United States Patent Application Publication US 2023/0212319 A1 - sequence listing, part 7

SEQ ID NO: 8893 - DNA, 1356 bp, Artificial Sequence
  Synthetic Polynucloetide
atggccttaccagtgaccgccttgctcctgccgctggccttgctgctccacgccgccaggccggaagtgcagctggttgaatcaggtggcggcctggttcaacctggcggatctctgagactgagctgtgccgccagcggcttcaacatcaaggacacctacatccactgggtccgacaggcccctggcaaaggacttgaatgggtcgccagaatctaccccaccaacggctacaccagatacgccgactctgtgaagggcagattcaccatcagcgccgacaccagcaagaacaccgcctacctccagatgaactccctgagagccgaggacaccgccgtgtactactgtagcagatggggcggagccggagcctacgctatggatgtttggggccagggaaccctggtcaccgtgtcatctggcggaggcggaagtggaggcggaggatctggcggcggaggctctgacatccagatgacacagagccctagcagcctgtctgccagcgtgggagacagagtgaccatcacctgtagagccagccaggacgtgaacacagccgtggcttggtatcagcagaagcctggcaaggcccctaagctgctgatctacagcgccagctttctgtacagcggcgtgcccagcagattcagcggaagcagaagcggcaccgacttcaccctgacaatatccagcctccagcctgaggacttcgccacctactactgccagcaggcttacaccacacctccaacattcggccagggcaccaaggtggaaatcaagagaacaacgcgtgacggtaacgaggagatgggaggaatcactcaaaccccttacaaagtctcaatttcaggaacaactgttatccttacatgtccccagtatcctggcagcgagatcctttggcagcataacgacaagaatatagggggagatgaagacgataagaatatcggatctgacgaggatcacttgagcctgaaagagttctccgagcttgaacaaagcggatattatgtgtgctatccgcgcgggtcaaagccggaagacgctaacttttacctttatctccgagccagagtgtgcgaaaattgcatggaaatggacgttatgtccgttgctacaatagttatcgtagatatatgcatcacgggtggactgcttctgctggtttattattggtccaagaatagaaaggccaaagctaaacccgtgaccagaggcgctggcgcaggcggaaggcaaaggggacaaaacaaagaacggccaccaccagtgccaaatccagattatgagcctattcggaaaggacagagggacctgtactctggcctgaatcagagaagaatc

SEQ ID NO: 8894 - DNA, 1251 bp, Artificial Sequence
  Synthetic Polynucloetide
atggccttaccagtgaccgccttgctcctgccgctggccttgctgctccacgccgccaggccggaagtgcagctggttgaatcaggtggcggcctggttcaacctggcggatctctgagactgagctgtgccgccagcggcttcaacatcaaggacacctacatccactgggtccgacaggcccctggcaaaggacttgaatgggtcgccagaatctaccccaccaacggctacaccagatacgccgactctgtgaagggcagattcaccatcagcgccgacaccagcaagaacaccgcctacctccagatgaactccctgagagccgaggacaccgccgtgtactactgtagcagatggggcggagccggagcctacgctatggatgtttggggccagggaaccctggtcaccgtgtcatctggcggaggcggaagtggaggcggaggatctggcggcggaggctctgacatccagatgacacagagccctagcagcctgtctgccagcgtgggagacagagtgaccatcacctgtagagccagccaggacgtgaacacagccgtggcttggtatcagcagaagcctggcaaggcccctaagctgctgatctacagcgccagctttctgtacagcggcgtgcccagcagattcagcggaagcagaagcggcaccgacttcaccctgacaatatccagcctccagcctgaggacttcgccacctactactgccagcaggcttacaccacacctccaacattcggccagggcaccaaggtggaaatcaagagaacaacgcgtttcaagatccccatcgaggaactggaagatcgggtgttcgtgaactgcaacacctctatcacctgggtggaaggcaccgtgggaacactgctgagcgacatcaccagactggacctcggcaagcggattctggaccctcggggcatctacagatgcaacggcaccgacatctacaaggacaaagaaagcaccgtgcaggtccactacagaatgtgccagtcctgcgtggaactggaccctgctacagtggccggcatcatcgtgaccgatgtgatcgctactctgctgctggctctgggagtgttctgcttcgccggacacgaaacaggcagactgtctggcgctgccgatacacaggccctgctgagaaacgaccaagtgtatcagcccctgcgcgacagagatgatgcccagtattctcacctcggcggcaactgggctagaaacaag

SEQ ID NO: 8895 - DNA, 1281 bp, Artificial Sequence
  Synthetic Polynucloetide
atggccttaccagtgaccgccttgctcctgccgctggccttgctgctccacgccgccaggccggaagtgcagctggttgaatcaggtggcggcctggttcaacctggcggatctctgagactgagctgtgccgccagcggcttcaacatcaaggacacctacatccactgggtccgacaggcccctggcaaaggacttgaatgggtcgccagaatctaccccaccaacggctacaccagatacgccgactctgtgaagggcagattcaccatcagcgccgacaccagcaagaacaccgcctacctccagatgaactccctgagagccgaggacaccgccgtgtactactgtagcagatggggcggagccggagcctacgctatggatgtttggggccagggaaccctggtcaccgtgtcatctggcggaggcggaagtggaggcggaggatctggcggcggaggctctgacatccagatgacacagagccctagcagcctgtctgccagcgtgggagacagagtgaccatcacctgtagagccagccaggacgtgaacacagccgtggcttggtatcagcagaagcctggcaaggcccctaagctgctgatctacagcgccagctttctgtacagcggcgtgcccagcagattcagcggaagcagaagcggcaccgacttcaccctgacaatatccagcctccagcctgaggacttcgccacctactactgccagcaggcttacaccacacctccaacattcggccagggcaccaaggtggaaatcaagagaacaacgcgtcagagcatcaagggcaaccacctggtcaaggtgtacgactaccaagaggacggcagcgtgctgctgacatgtgatgccgaggccaagaacatcacctggtttaaggacggcaagatgatcggcttcctgaccgaggacaagaagaagtggaacctgggcagcaacgctaaggaccccagaggcatgtatcagtgcaagggcagccagaacaagagcaagcccctccaggtgtactaccggatgtgccagaactgcatcgagctgaacgccgctaccatcagcggctttctgttcgccgagatcgtgtccatcttcgtgctggccgtgggcgtgtactttatcgctggacaggatggcgtgcggcagagcagagcttccgataagcaaaccctgctgcctaacgaccagctgtaccagcctctgaaggacagagaggacgaccagtacagccacctccagggcaatcagctgagaagaaac

SEQ ID NO: 8896 - DNA, 1230 bp, Artificial Sequence
  Synthetic Polynucloetide
atggccttaccagtgaccgccttgctcctgccgctggccttgctgctccacgccgccaggccggaagtgcagctggttgaatcaggtggcggcctggttcaacctggcggatctctgagactgagctgtgccgccagcggcttcaacatcaaggacacctacatccactgggtccgacaggcccctggcaaaggacttgaatgggtcgccagaatctaccccaccaacggctacaccagatacgccgactctgtgaagggcagattcaccatcagcgccgacaccagcaagaacaccgcctacctccagatgaactccctgagagccgaggacaccgccgtgtactactgtagcagatggggcggagccggagcctacgctatggatgtttggggccagggaaccctggtcaccgtgtcatctggcggaggcggaagtggaggcggaggatctggcggcggaggctctgacatccagatgacacagagccctagcagcctgtctgccagcgtgggagacagagtgaccatcacctgtagagccagccaggacgtgaacacagccgtggcttggtatcagcagaagcctggcaaggcccctaagctgctgatctacagcgccagctttctgtacagcggcgtgcccagcagattcagcggaagcagaagcggcaccgacttcaccctgacaatatccagcctccagcctgaggacttcgccacctactactgccagcaggcttacaccacacctccaacattcggccagggcaccaaggtggaaatcaagagaacaacgcgtcagagttttgggttgttggaccctaaattgtgctatctgttggacggaatcctgttcatttacggagtgatcctgaccgcattgttcctgcgggttaagttttccagatccgcagacgcacccgcttaccaacaagggcagaaccaactctacaatgaacttaatttggggcggagggaagagtacgacgttctggacaaaaggaggggacgagatcccgagatgggcggaaagcctcagcgaaggaagaatccgcaagaggggctttataacgaactccagaaagataaaatggcagaagcctatagtgagattgggatgaagggagaaaggaggaggggtaaaggtcacgatgggttgtaccaaggattgagcacagccactaaagatacctatgatgcgctccacatgcaggccctgccgccaaga

SEQ ID NO: 8897 - DNA, 1932 bp, Artificial Sequence
  Synthetic Polynucloetide
atggccttaccagtgaccgccttgctcctgccgctggccttgctgctccacgccgccaggccggacatccagatgacacagagccctagcagcctgtctgccagcgtgggagacagagtgaccatcacctgtagagccagccaggacgtgaacacagccgtggcttggtatcagcagaagcctggcaaggcccctaagctgctgatctacagcgccagctttctgtacagcggcgtgcccagcagattcagcggaagcagaagcggcaccgacttcaccctgacaatatccagcctccagcctgaggacttcgccacctactactgccagcaggcttacaccacacctccaacattcggccagggcaccaaggtggaaatcaagagaacaggcggaggcggaagtggaggcggaggatctggcggcggaggctctgaagtgcagctggttgaatcaggtggcggcctggttcaacctggcggatctctgagactgagctgtgccgccagcggcttcaacatcaaggacacctacatccactgggtccgacaggcccctggcaaaggacttgaatgggtcgccagaatctaccccaccaacggctacaccagatacgccgactctgtgaagggcagattcaccatcagcgccgacaccagcaagaacaccgcctacctccagatgaactccctgagagccgaggacaccgccgtgtactactgtagcagatggggcggagccggagcctacgctatggatgtttggggccagggaaccctggtcaccgtgtcatctacgcgtgggagcggcatccagaaccctgatcctgccgtgtaccagctgcgggatagcaagagcagcgacaagagcgtgtgtctgttcaccgacttcgacagccagaccaacgtgtcccagagcaaggactccgacgtgtacatcaccgataagaccgtgctggacatgcggagcatggacttcaagagcaactccgccgtggcctggtccaacaagtccgatttcgcctgcgccaacgccttcaacaacagcattatccccgaggacacattcttcccaagccccgagagcagctgcgacgtgaagctggtggaaaagagcttcgagacagacaccaacctgaacttccagaacctgagcgtgatcggcttcagaatcctgctgctgaaagtggccggctttaacctgctgatgaccctgcggctgtggtccagccgcgccaagagaagcggatctggcgtgaagcagaccctgaatttcgacctgctgaagctggctggcgacgtggaatccaacccaggcccttctagaggccatatgaccgagtacaagcccacggtgcgcctcgccacccgcgacgacgtccccagggccgtacgcaccctcgccgccgcgttcgccgactaccccgccacgcgccacaccgtcgatccggaccgccacatcgagcgggtcaccgagctgcaagaactcttcctcacgcgcgtcgggctcgacatcggcaaggtgtgggtcgcggacgacggcgccgcggtggcggtctggaccacgccggagagcgtcgaagcgggggcggtgttcgccgagatcggcccgcgcatggccgagttgagcggttcccggctggccgcgcagcaacagatggaaggcctcctggcgccgcaccggcccaaggagcccgcgtggttcctggccaccgtcggcgtctcgcccgaccaccagggcaagggtctgggcagcgccgtcgtgctccccggagtggaggcggccgagcgcgccggggtgcccgccttcctggagacctccgcgccccgcaacctccccttctacgagcggctcggcttcaccgtcaccgccgacgtcgaggtgcccgaaggaccgcgcacctggtgcatgacccgcaagcccggtgcctga

SEQ ID NO: 8898 - DNA, 2028 bp, Artificial Sequence
  Synthetic Polynucloetide
atggccttaccagtgaccgccttgctcctgccgctggccttgctgctccacgccgccaggccggacatccagatgacacagagccctagcagcctgtctgccagcgtgggagacagagtgaccatcacctgtagagccagccaggacgtgaacacagccgtggcttggtatcagcagaagcctggcaaggcccctaagctgctgatctacagcgccagctttctgtacagcggcgtgcccagcagattcagcggaagcagaagcggcaccgacttcaccctgacaatatccagcctccagcctgaggacttcgccacctactactgccagcaggcttacaccacacctccaacattcggccagggcaccaaggtggaaatcaagagaacaggcggaggcggaagtggaggcggaggatctggcggcggaggctctgaagtgcagctggttgaatcaggtggcggcctggttcaacctggcggatctctgagactgagctgtgccgccagcggcttcaacatcaaggacacctacatccactgggtccgacaggcccctggcaaaggacttgaatgggtcgccagaatctaccccaccaacggctacaccagatacgccgactctgtgaagggcagattcaccatcagcgccgacaccagcaagaacaccgcctacctccagatgaactccctgagagccgaggacaccgccgtgtactactgtagcagatggggcggagccggagcctacgctatggatgtttggggccagggaaccctggtcaccgtgtcatctctcgaggacctgaagaacgtgttcccacctgaggtggccgtgttcgagcctagcgaggccgagatcagccacacccagaaagccaccctcgtgtgcctggctaccggcttctaccccgaccatgtggaactgtcttggtgggtcaacggcaaagaggtgcacagcggcgtgtctaccgacccccagccactgaaagaacagcccgccctgaacgacagccggtactgcctgagcagcagactgagagtgtccgccaccttctggcagaacccccggaaccacttcagatgccaggtgcagttctacggcctgagcgagaacgacgagtggacccaggacagagccaagcccgtgacccagatcgtgtctgccgaagcctggggcagagccgattgcggctttaccagcgagagctaccagcagggcgtgctgagcgccaccatcctgtacgagatcctgctgggcaaggccaccctgtacgccgtgctggtgtctgccctggtgctgatggctatggtcaagcggaaggacagccggggaagggccaagcgatctggatctggagcaacaaacttctcactactcaaacaagcaggtgacgtggaggagaatcccgggcctactagaggccatatgaccgagtacaagcccacggtgcgcctcgccacccgcgacgacgtccccagggccgtacgcaccctcgccgccgcgttcgccgactaccccgccacgcgccacaccgtcgatccggaccgccacatcgagcgggtcaccgagctgcaagaactcttcctcacgcgcgtcgggctcgacatcggcaaggtgtgggtcgcggacgacggcgccgcggtggcggtctggaccacgccggagagcgtcgaagcgggggcggtgttcgccgagatcggcccgcgcatggccgagttgagcggttcccggctggccgcgcagcaacagatggaaggcctcctggcgccgcaccggcccaaggagcccgcgtggttcctggccaccgtcggcgtctcgcccgaccaccagggcaagggtctgggcagcgccgtcgtgctccccggagtggaggcggccgagcgcgccggggtgcccgccttcctggagacctccgcgccccgcaacctccccttctacgagcggctcggcttcaccgtcaccgccgacgtcgaggtgcccgaaggaccgcgcacctggtgcatgacccgcaagcccggtgcctga

SEQ ID NO: 8899 - DNA, 2178 bp, Artificial Sequence
  Synthetic Polynucloetide
atggccttaccagtgaccgccttgctcctgccgctggccttgctgctccacgccgccaggccggacatccagatgacacagagccctagcagcctgtctgccagcgtgggagacagagtgaccatcacctgtagagccagccaggacgtgaacacagccgtggcttggtatcagcagaagcctggcaaggcccctaagctgctgatctacagcgccagctttctgtacagcggcgtgcccagcagattcagcggaagcagaagcggcaccgacttcaccctgacaatatccagcctccagcctgaggacttcgccacctactactgccagcaggcttacaccacacctccaacattcggccagggcaccaaggtggaaatcaagagaacaggcggaggcggaagtggaggcggaggatctggcggcggaggctctgaagtgcagctggttgaatcaggtggcggcctggttcaacctggcggatctctgagactgagctgtgccgccagcggcttcaacatcaaggacacctacatccactgggtccgacaggcccctggcaaaggacttgaatgggtcgccagaatctaccccaccaacggctacaccagatacgccgactctgtgaagggcagattcaccatcagcgccgacaccagcaagaacaccgcctacctccagatgaactccctgagagccgaggacaccgccgtgtactactgtagcagatggggcggagccggagcctacgctatggatgtttggggccagggaaccctggtcaccgtgtcatctacgcgtgagcagaaactgatctcggaagaggatctggggagcggcaccccattcccttctctggcccctcccatcatgctgctggtggacggcaagcagcagatggtggtcgtgtgcctggtgctggatgtggccccacctggactggacagccccatctggtttagcgccggcaatggctctgccctggacgcctttacctacggcccaagccctgccaccgatggcacctggacaaatctggcccacctgagcctgcccagcgaggaactggcttcttgggagcctctcgtgtgccacacaggacctggcgctgagggacacagcagatccacccagcctatgcacctgtctggcgaggccagcaccgccagaacctgtcctcaggaacctctgagaggcacccctggcggagcactgtggctgggagtgctgagactgctgctgttcaagctgctgctgtttgacctgctgctgacctgctcctgtctgtgcgatcctgccggccctctgccttctcctgccaccaccacaagactgagagccctgggcagccacagactgcaccctgccacagagacaggcggcagagaggccacaagcagccctagaccccagcccagagacagaagatggggcgataccccccctggcagaaagcctggatctccagtccgcgccaagagaagcggatctggcgtgaagcagaccctgaatttcgacctgctgaagctggctggcgacgtggaatccaacccaggcccttctagatctagaggccatatgaccgagtacaagcccacggtgcgcctcgccacccgcgacgacgtccccagggccgtacgcaccctcgccgccgcgttcgccgactaccccgccacgcgccacaccgtcgatccggaccgccacatcgagcgggtcaccgagctgcaagaactcttcctcacgcgcgtcgggctcgacatcggcaaggtgtgggtcgcggacgacggcgccgcggtggcggtctggaccacgccggagagcgtcgaagcgggggcggtgttcgccgagatcggcccgcgcatggccgagttgagcggttcccggctggccgcgcagcaacagatggaaggcctcctggcgccgcaccggcccaaggagcccgcgtggttcctggccaccgtcggcgtctcgcccgaccaccagggcaagggtctgggcagcgccgtcgtgctccccggagtggaggcggccgagcgcgccggggtgcccgccttcctggagacctccgcgccccgcaacctccccttctacgagcggctcggcttcaccgtcaccgccgacgtcgaggtgcccgaaggaccgcgcacctggtgcatgacccgcaagcccggtgcctga

SEQ ID NO: 8900 - DNA, 1623 bp, Artificial Sequence
  Synthetic Polynucloetide
atggccttaccagtgaccgccttgctcctgccgctggccttgctgctccacgccgccaggccggacatccagatgacacagagccctagcagcctgtctgccagcgtgggagacagagtgaccatcacctgtagagccagccaggacgtgaacacagccgtggcttggtatcagcagaagcctggcaaggcccctaagctgctgatctacagcgccagctttctgtacagcggcgtgcccagcagattcagcggaagcagaagcggcaccgacttcaccctgacaatatccagcctccagcctgaggacttcgccacctactactgccagcaggcttacaccacacctccaacattcggccagggcaccaaggtggaaatcaagagaacactcgaggacctgaagaacgtgttcccacctgaggtggccgtgttcgagcctagcgaggccgagatcagccacacccagaaagccaccctcgtgtgcctggctaccggcttctaccccgaccatgtggaactgtcttggtgggtcaacggcaaagaggtgcacagcggcgtgtctaccgacccccagccactgaaagaacagcccgccctgaacgacagccggtactgcctgagcagcagactgagagtgtccgccaccttctggcagaacccccggaaccacttcagatgccaggtgcagttctacggcctgagcgagaacgacgagtggacccaggacagagccaagcccgtgacccagatcgtgtctgccgaagcctggggcagagccgattgcggctttaccagcgagagctaccagcagggcgtgctgagcgccaccatcctgtacgagatcctgctgggcaaggccaccctgtacgccgtgctggtgtctgccctggtgctgatggctatggtcaagcggaaggacagccggggaagggccaagcgatctggatctggagcaacaaacttctcactactcaaacaagcaggtgacgtggaggagaatcccgggcctactagaggccatatgaccgagtacaagcccacggtgcgcctcgccacccgcgacgacgtccccagggccgtacgcaccctcgccgccgcgttcgccgactaccccgccacgcgccacaccgtcgatccggaccgccacatcgagcgggtcaccgagctgcaagaactcttcctcacgcgcgtcgggctcgacatcggcaaggtgtgggtcgcggacgacggcgccgcggtggcggtctggaccacgccggagagcgtcgaagcgggggcggtgttcgccgagatcggcccgcgcatggccgagttgagcggttcccggctggccgcgcagcaacagatggaaggcctcctggcgccgcaccggcccaaggagcccgcgtggttcctggccaccgtcggcgtctcgcccgaccaccagggcaagggtctgggcagcgccgtcgtgctccccggagtggaggcggccgagcgcgccggggtgcccgccttcctggagacctccgcgccccgcaacctccccttctacgagcggctcggcttcaccgtcaccgccgacgtcgaggtgcccgaaggaccgcgcacctggtgcatgacccgcaagcccggtgcctga

SEQ ID NO: 8901 - DNA, 930 bp, Artificial Sequence
  Synthetic Polynucloetide
atggccttaccagtgaccgccttgctcctgccgctggccttgctgctccacgccgccaggccggacatccagatgacacagagccctagcagcctgtctgccagcgtgggagacagagtgaccatcacctgtagagccagccaggacgtgaacacagccgtggcttggtatcagcagaagcctggcaaggcccctaagctgctgatctacagcgccagctttctgtacagcggcgtgcccagcagattcagcggaagcagaagcggcaccgacttcaccctgacaatatccagcctccagcctgaggacttcgccacctactactgccagcaggcttacaccacacctccaacattcggccagggcaccaaggtggaaatcaagagaacactcgaggacctgaagaacgtgttcccacctgaggtggccgtgttcgagcctagcgaggccgagatcagccacacccagaaagccaccctcgtgtgcctggctaccggcttctaccccgaccatgtggaactgtcttggtgggtcaacggcaaagaggtgcacagcggcgtgtctaccgacccccagccactgaaagaacagcccgccctgaacgacagccggtactgcctgagcagcagactgagagtgtccgccaccttctggcagaacccccggaaccacttcagatgccaggtgcagttctacggcctgagcgagaacgacgagtggacccaggacagagccaagcccgtgacccagatcgtgtctgccgaagcctggggcagagccgattgcggctttaccagcgagagctaccagcagggcgtgctgagcgccaccatcctgtacgagatcctgctgggcaaggccaccctgtacgccgtgctggtgtctgccctggtgctgatggctatggtcaagcggaaggacagccgggga

SEQ ID NO: 8902 - DNA, 1350 bp, Artificial Sequence
  Synthetic Polynucloetide
atggactggatttggcgcatccttttccttgtcggcgctgctaccggcgcgcattccttcgaagaagtgcagctggttgaatcaggtggcggcctggttcaacctggcggatctctgagactgagctgtgccgccagcggcttcaacatcaaggacacctacatccactgggtccgacaggcccctggcaaaggacttgaatgggtcgccagaatctaccccaccaacggctacaccagatacgccgactctgtgaagggcagattcaccatcagcgccgacaccagcaagaacaccgcctacctccagatgaactccctgagagccgaggacaccgccgtgtactactgtagcagatggggcggagccggagcctacgctatggatgtttggggccagggaaccctggtcaccgtgtcatctacgcgtatccagaaccctgatcctgccgtgtaccagctgcgggatagcaagagcagcgacaagagcgtgtgtctgttcaccgacttcgacagccagaccaacgtgtcccagagcaaggactccgacgtgtacatcaccgataagaccgtgctggacatgcggagcatggacttcaagagcaactccgccgtggcctggtccaacaagtccgatttcgcctgcgccaacgccttcaacaacagcattatccccgaggacacattcttcccaagccccgagagcagctgcgacgtgaagctggtggaaaagagcttcgagacagacaccaacctgaacttccagaacctgagcgtgatcggcttcagaatcctgctgctgaaagtggccggctttaacctgctgatgaccctgcggctgtggtccagccgcgccaagagaagcggatctggcgtgaagcagaccctgaatttcgacctgctgaagctggctggcgacgtggaatccaacccaggcccttctagaggccatatggccaagcctttgtctcaagaagaatccaccctcattgaaagagcaacggctacaatcaacagcatccccatctctgaagactacagcgtcgccagcgcagctctctctagcgacggccgcatcttcactggtgtcaatgtatatcattttactgggggaccttgtgcagaactcgtggtgctgggcactgctgctgctgcggcagctggcaacctgacttgtatcgtcgcgatcggaaatgagaacaggggcatcttgagcccctgcggacggtgccgacaggtgcttctcgatctgcatcctgggatcaaagccatagtgaaggacagtgatggacagccgacggcagttgggattcgtgaattgctgccctctggttatgtgtgggagggctga

SEQ ID NO: 8903 - DNA, 849 bp, Artificial Sequence
  Synthetic Polynucloetide
atggactggatttggcgcatccttttccttgtcggcgctgctaccggcgcgcattccttcgaagaagtgcagctggttgaatcaggtggcggcctggttcaacctggcggatctctgagactgagctgtgccgccagcggcttcaacatcaaggacacctacatccactgggtccgacaggcccctggcaaaggacttgaatgggtcgccagaatctaccccaccaacggctacaccagatacgccgactctgtgaagggcagattcaccatcagcgccgacaccagcaagaacaccgcctacctccagatgaactccctgagagccgaggacaccgccgtgtactactgtagcagatggggcggagccggagcctacgctatggatgtttggggccagggaaccctggtcaccgtgtcatctacgcgtatccagaaccctgatcctgccgtgtaccagctgcgggatagcaagagcagcgacaagagcgtgtgtctgttcaccgacttcgacagccagaccaacgtgtcccagagcaaggactccgacgtgtacatcaccgataagaccgtgctggacatgcggagcatggacttcaagagcaactccgccgtggcctggtccaacaagtccgatttcgcctgcgccaacgccttcaacaacagcattatccccgaggacacattcttcccaagccccgagagcagctgcgacgtgaagctggtggaaaagagcttcgagacagacaccaacctgaacttccagaacctgagcgtgatcggcttcagaatcctgctgctgaaagtggccggctttaacctgctgatgaccctgcggctgtggtccagc

SEQ ID NO: 8904 - DNA, 1677 bp, Artificial Sequence
  Synthetic Polynucloetide
atggccttaccagtgaccgccttgctcctgccgctggccttgctgctccacgccgccaggccggacatccagatgacacagagccctagcagcctgtctgccagcgtgggagacagagtgaccatcacctgtagagccagccaggacgtgaacacagccgtggcttggtatcagcagaagcctggcaaggcccctaagctgctgatctacagcgccagctttctgtacagcggcgtgcccagcagattcagcggaagcagaagcggcaccgacttcaccctgacaatatccagcctccagcctgaggacttcgccacctactactgccagcaggcttacaccacacctccaacattcggccagggcaccaaggtggaaatcaagagaacactcgaggggaaaccaattcccaaccctcttctgggactggattcaaccggcagcggcgaggacctgaagaacgtgttcccacctgaggtggccgtgttcgagcctagcgaggccgagatcagccacacccagaaagccaccctcgtgtgcctggctaccggcttctaccccgaccatgtggaactgtcttggtgggtcaacggcaaagaggtgcacagcggcgtgtgtaccgacccccagccactgaaagaacagcccgccctgaacgacagccggtactgcctgagcagcagactgagagtgtccgccaccttctggcagaacccccggaaccacttcagatgccaggtgcagttctacggcctgagcgagaacgacgagtggacccaggacagagccaagcccgtgacccagatcgtgtctgccgaagcctggggcagagccgattgcggctttaccagcgagagctaccagcagggcgtgctgagcgccaccatcctgtacgagatcctgctgggcaaggccaccctgtacgccgtgctggtgtctgccctggtgctgatggctatggtcaagcggaaggacagccggggaagggccaagcgatctggatctggagcaacaaacttctcactactcaaacaagcaggtgacgtggaggagaatcccgggcctactagaggccatatgaccgagtacaagcccacggtgcgcctcgccacccgcgacgacgtccccagggccgtacgcaccctcgccgccgcgttcgccgactaccccgccacgcgccacaccgtcgatccggaccgccacatcgagcgggtcaccgagctgcaagaactcttcctcacgcgcgtcgggctcgacatcggcaaggtgtgggtcgcggacgacggcgccgcggtggcggtctggaccacgccggagagcgtcgaagcgggggcggtgttcgccgagatcggcccgcgcatggccgagttgagcggttcccggctggccgcgcagcaacagatggaaggcctcctggcgccgcaccggcccaaggagcccgcgtggttcctggccaccgtcggcgtctcgcccgaccaccagggcaagggtctgggcagcgccgtcgtgctccccggagtggaggcggccgagcgcgccggggtgcccgccttcctggagacctccgcgccccgcaacctccccttctacgagcggctcggcttcaccgtcaccgccgacgtcgaggtgcccgaaggaccgcgcacctggtgcatgacccgcaagcccggtgcctga

SEQ ID NO: 8905 - DNA, 987 bp, Artificial Sequence
  Synthetic Polynucloetide
atggccttaccagtgaccgccttgctcctgccgctggccttgctgctccacgccgccaggccggacatccagatgacacagagccctagcagcctgtctgccagcgtgggagacagagtgaccatcacctgtagagccagccaggacgtgaacacagccgtggcttggtatcagcagaagcctggcaaggcccctaagctgctgatctacagcgccagctttctgtacagcggcgtgcccagcagattcagcggaagcagaagcggcaccgacttcaccctgacaatatccagcctccagcctgaggacttcgccacctactactgccagcaggcttacaccacacctccaacattcggccagggcaccaaggtggaaatcaagagaacactcgaggggaaaccaattcccaaccctcttctgggactggattcaaccggcagcggcgaggacctgaagaacgtgttcccacctgaggtggccgtgttcgagcctagcgaggccgagatcagccacacccagaaagccaccctcgtgtgcctggctaccggcttctaccccgaccatgtggaactgtcttggtgggtcaacggcaaagaggtgcacagcggcgtgtgtaccgacccccagccactgaaagaacagcccgccctgaacgacagccggtactgcctgagcagcagactgagagtgtccgccaccttctggcagaacccccggaaccacttcagatgccaggtgcagttctacggcctgagcgagaacgacgagtggacccaggacagagccaagcccgtgacccagatcgtgtctgccgaagcctggggcagagccgattgcggctttaccagcgagagctaccagcagggcgtgctgagcgccaccatcctgtacgagatcctgctgggcaaggccaccctgtacgccgtgctggtgtctgccctggtgctgatggctatggtcaagcggaaggacagccggggatga

SEQ ID NO: 8906 - DNA, 1386 bp, Artificial Sequence
  Synthetic Polynucloetide
atggactggatttggcgcatccttttccttgtcggcgctgctaccggcgcgcattccttcgaagaagtgcagctggttgaatcaggtggcggcctggttcaacctggcggatctctgagactgagctgtgccgccagcggcttcaacatcaaggacacctacatccactgggtccgacaggcccctggcaaaggacttgaatgggtcgccagaatctaccccaccaacggctacaccagatacgccgactctgtgaagggcagattcaccatcagcgccgacaccagcaagaacaccgcctacctccagatgaactccctgagagccgaggacaccgccgtgtactactgtagcagatggggcggagccggagcctacgctatggatgtttggggccagggaaccctggtcaccgtgtcatctacgcgtgagcagaaactgatctcggaagaggatgggagcggcatccagaaccctgatcctgccgtgtaccagctgcgggatagcaagagcagcgacaagagcgtgtgtctgttcaccgacttcgacagccagaccaacgtgtcccagagcaaggactccgacgtgtacatcaccgataagtgcgtgctggacatgcggagcatggacttcaagagcaactccgccgtggcctggtccaacaagtccgatttcgcctgcgccaacgccttcaacaacagcattatccccgaggacacattcttcccaagccccgagagcagctgcgacgtgaagctggtggaaaagagcttcgagacagacaccaacctgaacttccagaacctgagcgtgatcggcttcagaatcctgctgctgaaagtggccggctttaacctgctgatgaccctgcggctgtggtccagccgcgccaagagaagcggatctggcgtgaagcagaccctgaatttcgacctgctgaagctggctggcgacgtggaatccaacccaggcccttctagaggccatatggccaagcctttgtctcaagaagaatccaccctcattgaaagagcaacggctacaatcaacagcatccccatctctgaagactacagcgtcgccagcgcagctctctctagcgacggccgcatcttcactggtgtcaatgtatatcattttactgggggaccttgtgcagaactcgtggtgctgggcactgctgctgctgcggcagctggcaacctgacttgtatcgtcgcgatcggaaatgagaacaggggcatcttgagcccctgcggacggtgccgacaggtgcttctcgatctgcatcctgggatcaaagccatagtgaaggacagtgatggacagccgacggcagttgggattcgtgaattgctgccctctggttatgtgtgggagggctga

SEQ ID NO: 8907 - DNA, 888 bp, Artificial Sequence
  Synthetic Polynucloetide
atggactggatttggcgcatccttttccttgtcggcgctgctaccggcgcgcattccttcgaagaagtgcagctggttgaatcaggtggcggcctggttcaacctggcggatctctgagactgagctgtgccgccagcggcttcaacatcaaggacacctacatccactgggtccgacaggcccctggcaaaggacttgaatgggtcgccagaatctaccccaccaacggctacaccagatacgccgactctgtgaagggcagattcaccatcagcgccgacaccagcaagaacaccgcctacctccagatgaactccctgagagccgaggacaccgccgtgtactactgtagcagatggggcggagccggagcctacgctatggatgtttggggccagggaaccctggtcaccgtgtcatctacgcgtgagcagaaactgatctcggaagaggatgggagcggcatccagaaccctgatcctgccgtgtaccagctgcgggatagcaagagcagcgacaagagcgtgtgtctgttcaccgacttcgacagccagaccaacgtgtcccagagcaaggactccgacgtgtacatcaccgataagtgcgtgctggacatgcggagcatggacttcaagagcaactccgccgtggcctggtccaacaagtccgatttcgcctgcgccaacgccttcaacaacagcattatccccgaggacacattcttcccaagccccgagagcagctgcgacgtgaagctggtggaaaagagcttcgagacagacaccaacctgaacttccagaacctgagcgtgatcggcttcagaatcctgctgctgaaagtggccggctttaacctgctgatgaccctgcggctgtggtccagctga

SEQ ID NO: 8908 - DNA, 1932 bp, Artificial Sequence
  Synthetic Polynucloetide
atggccttaccagtgaccgccttgctcctgccgctggccttgctgctccacgccgccaggccggacatccagatgacacagagccctagcagcctgtctgccagcgtgggagacagagtgaccatcacctgtagagccagccaggacgtgaacacagccgtggcttggtatcagcagaagcctggcaaggcccctaagctgctgatctacagcgccagctttctgtacagcggcgtgcccagcagattcagcggaagcagaagcggcaccgacttcaccctgacaatatccagcctccagcctgaggacttcgccacctactactgccagcaggcttacaccacacctccaacattcggccagggcaccaaggtggaaatcaagagaacaggcggaggcggaagtggaggcggaggatctggcggcggaggctctgaagtgcagctggttgaatcaggtggcggcctggttcaacctggcggatctctgagactgagctgtgccgccagcggcttcaacatcaaggacacctacatccactgggtccgacaggcccctggcaaaggacttgaatgggtcgccagaatctaccccaccaacggctacaccagatacgccgactctgtgaagggcagattcaccatcagcgccgacaccagcaagaacaccgcctacctccagatgaactccctgagagccgaggacaccgccgtgtactactgtagcagatggggcggagccggagcctacgctatggatgtttggggccagggaaccctggtcaccgtgtcatctacgcgtgggagcggcatccagaaccctgatcctgccgtgtaccagctgcgggatagcaagagcagcgacaagagcgtgtgtctgttcaccgacttcgacagccagaccaacgtgtcccagagcaaggactccgacgtgtacatcaccgataagaccgtgctggacatgcggagcatggacttcaagagcaactccgccgtggcctggtccaacaagtccgatttcgcctgcgccaacgccttcaacaacagcattatccccgaggacacattcttcccaagcagcgacgtgccctgcgacgtgaagctggtggaaaagagcttcgagacagacaccaacctgaacttccagaacctgagcgtgatcggcttcagaatcctgctgctgaaagtggccggctttaacctgctgatgaccctgcggctgtggtccagccgcgccaagagaagcggatctggcgtgaagcagaccctgaatttcgacctgctgaagctggctggcgacgtggaatccaacccaggcccttctagaggccatatgaccgagtacaagcccacggtgcgcctcgccacccgcgacgacgtccccagggccgtacgcaccctcgccgccgcgttcgccgactaccccgccacgcgccacaccgtcgatccggaccgccacatcgagcgggtcaccgagctgcaagaactcttcctcacgcgcgtcgggctcgacatcggcaaggtgtgggtcgcggacgacggcgccgcggtggcggtctggaccacgccggagagcgtcgaagcgggggcggtgttcgccgagatcggcccgcgcatggccgagttgagcggttcccggctggccgcgcagcaacagatggaaggcctcctggcgccgcaccggcccaaggagcccgcgtggttcctggccaccgtcggcgtctcgcccgaccaccagggcaagggtctgggcagcgccgtcgtgctccccggagtggaggcggccgagcgcgccggggtgcccgccttcctggagacctccgcgccccgcaacctccccttctacgagcggctcggcttcaccgtcaccgccgacgtcgaggtgcccgaaggaccgcgcacctggtgcatgacccgcaagcccggtgcctga

SEQ ID NO: 8909 - DNA, 2028 bp, Artificial Sequence
  Synthetic Polynucloetide
atggccttaccagtgaccgccttgctcctgccgctggccttgctgctccacgccgccaggccggacatccagatgacacagagccctagcagcctgtctgccagcgtgggagacagagtgaccatcacctgtagagccagccaggacgtgaacacagccgtggcttggtatcagcagaagcctggcaaggcccctaagctgctgatctacagcgccagctttctgtacagcggcgtgcccagcagattcagcggaagcagaagcggcaccgacttcaccctgacaatatccagcctccagcctgaggacttcgccacctactactgccagcaggcttacaccacacctccaacattcggccagggcaccaaggtggaaatcaagagaacaggcggaggcggaagtggaggcggaggatctggcggcggaggctctgaagtgcagctggttgaatcaggtggcggcctggttcaacctggcggatctctgagactgagctgtgccgccagcggcttcaacatcaaggacacctacatccactgggtccgacaggcccctggcaaaggacttgaatgggtcgccagaatctaccccaccaacggctacaccagatacgccgactctgtgaagggcagattcaccatcagcgccgacaccagcaagaacaccgcctacctccagatgaactccctgagagccgaggacaccgccgtgtactactgtagcagatggggcggagccggagcctacgctatggatgtttggggccagggaaccctggtcaccgtgtcatctctcgaggacctgaagaacgtgttcccacctgaggtggccgtgttcgagcctagcaaggccgagatcgcccacacccagaaagccaccctcgtgtgcctggctaccggcttctaccccgaccatgtggaactgtcttggtgggtcaacggcaaagaggtgcacagcggcgtgtctaccgacccccagccactgaaagaacagcccgccctgaacgacagccggtactgcctgagcagcagactgagagtgtccgccaccttctggcagaacccccggaaccacttcagatgccaggtgcagttctacggcctgagcgagaacgacgagtggacccaggacagagccaagcccgtgacccagatcgtgtctgccgaagcctggggcagagccgattgcggcatcaccagcgccagctaccaccagggcgtgctgagcgccaccatcctgtacgagatcctgctgggcaaggccaccctgtacgccgtgctggtgtctgccctggtgctgatggctatggtcaagcggaaggacagccggggaagggccaagcgatctggatctggagcaacaaacttctcactactcaaacaagcaggtgacgtggaggagaatcccgggcctactagaggccatatgaccgagtacaagcccacggtgcgcctcgccacccgcgacgacgtccccagggccgtacgcaccctcgccgccgcgttcgccgactaccccgccacgcgccacaccgtcgatccggaccgccacatcgagcgggtcaccgagctgcaagaactcttcctcacgcgcgtcgggctcgacatcggcaaggtgtgggtcgcggacgacggcgccgcggtggcggtctggaccacgccggagagcgtcgaagcgggggcggtgttcgccgagatcggcccgcgcatggccgagttgagcggttcccggctggccgcgcagcaacagatggaaggcctcctggcgccgcaccggcccaaggagcccgcgtggttcctggccaccgtcggcgtctcgcccgaccaccagggcaagggtctgggcagcgccgtcgtgctccccggagtggaggcggccgagcgcgccggggtgcccgccttcctggagacctccgcgccccgcaacctccccttctacgagcggctcggcttcaccgtcaccgccgacgtcgaggtgcccgaaggaccgcgcacctggtgcatgacccgcaagcccggtgcctga

SEQ ID NO: 8910 - DNA, 2097 bp, Artificial Sequence
  Synthetic Polynucloetide
atggccttaccagtgaccgccttgctcctgccgctggccttgctgctccacgccgccaggccggacatccagatgacacagagccctagcagcctgtctgccagcgtgggagacagagtgaccatcacctgtagagccagccaggacgtgaacacagccgtggcttggtatcagcagaagcctggcaaggcccctaagctgctgatctacagcgccagctttctgtacagcggcgtgcccagcagattcagcggaagcagaagcggcaccgacttcaccctgacaatatccagcctccagcctgaggacttcgccacctactactgccagcaggcttacaccacacctccaacattcggccagggcaccaaggtggaaatcaagagaacaggcggaggcggaagtggaggcggaggatctggcggcggaggctctgaagtgcagctggttgaatcaggtggcggcctggttcaacctggcggatctctgagactgagctgtgccgccagcggcttcaacatcaaggacacctacatccactgggtccgacaggcccctggcaaaggacttgaatgggtcgccagaatctaccccaccaacggctacaccagatacgccgactctgtgaagggcagattcaccatcagcgccgacaccagcaagaacaccgcctacctccagatgaactccctgagagccgaggacaccgccgtgtactactgtagcagatggggcggagccggagcctacgctatggatgtttggggccagggaaccctggtcaccgtgtcatctacgcgtgggtctggaggcggaggcagcggcggaggcgggagcggcgacggtaacgaggagatgggaggaatcactcaaaccccttacaaagtctcaatttcaggaacaactgttatccttacatgtccccagtatcctggcagcgagatcctttggcagcataacgacaagaatatagggggagatgaagacgataagaatatcggatctgacgaggatcacttgagcctgaaagagttctccgagcttgaacaaagcggatattatgtgtgctatccgcgcgggtcaaagccggaagacgctaacttttacctttatctccgagccagagtgtgcgaaaattgcatggaaatggacgttatgtccgttgctacaatagttatcgtagatatatgcatcacgggtggactgcttctgctggtttattattggtccaagaatagaaaggccaaagctaaacccgtgaccagaggcgctggcgcaggcggaaggcaaaggggacaaaacaaagaacggccaccaccagtgccaaatccagattatgagcctattcggaaaggacagagggacctgtactctggcctgaatcagagaagaatccgcgccaagagaagcggatctggcgtgaagcagaccctgaatttcgacctgctgaagctggctggcgacgtggaatccaacccaggcccttctagaggccatatgaccgagtacaagcccacggtgcgcctcgccacccgcgacgacgtccccagggccgtacgcaccctcgccgccgcgttcgccgactaccccgccacgcgccacaccgtcgatccggaccgccacatcgagcgggtcaccgagctgcaagaactcttcctcacgcgcgtcgggctcgacatcggcaaggtgtgggtcgcggacgacggcgccgcggtggcggtctggaccacgccggagagcgtcgaagcgggggcggtgttcgccgagatcggcccgcgcatggccgagttgagcggttcccggctggccgcgcagcaacagatggaaggcctcctggcgccgcaccggcccaaggagcccgcgtggttcctggccaccgtcggcgtctcgcccgaccaccagggcaagggtctgggcagcgccgtcgtgctccccggagtggaggcggccgagcgcgccggggtgcccgccttcctggagacctccgcgccccgcaacctccccttctacgagcggctcggcttcaccgtcaccgccgacgtcgaggtgcccgaaggaccgcgcacctggtgcatgacccgcaagcccggtgcctga

SEQ ID NO: 8911 - DNA, 1992 bp, Artificial Sequence
  Synthetic Polynucloetide
atggccttaccagtgaccgccttgctcctgccgctggccttgctgctccacgccgccaggccggacatccagatgacacagagccctagcagcctgtctgccagcgtgggagacagagtgaccatcacctgtagagccagccaggacgtgaacacagccgtggcttggtatcagcagaagcctggcaaggcccctaagctgctgatctacagcgccagctttctgtacagcggcgtgcccagcagattcagcggaagcagaagcggcaccgacttcaccctgacaatatccagcctccagcctgaggacttcgccacctactactgccagcaggcttacaccacacctccaacattcggccagggcaccaaggtggaaatcaagagaacaggcggaggcggaagtggaggcggaggatctggcggcggaggctctgaagtgcagctggttgaatcaggtggcggcctggttcaacctggcggatctctgagactgagctgtgccgccagcggcttcaacatcaaggacacctacatccactgggtccgacaggcccctggcaaaggacttgaatgggtcgccagaatctaccccaccaacggctacaccagatacgccgactctgtgaagggcagattcaccatcagcgccgacaccagcaagaacaccgcctacctccagatgaactccctgagagccgaggacaccgccgtgtactactgtagcagatggggcggagccggagcctacgctatggatgtttggggccagggaaccctggtcaccgtgtcatctacgcgtgggtctggaggcggaggcagcggcggaggcgggagcggcttcaagatccccatcgaggaactggaagatcgggtgttcgtgaactgcaacacctctatcacctgggtggaaggcaccgtgggaacactgctgagcgacatcaccagactggacctcggcaagcggattctggaccctcggggcatctacagatgcaacggcaccgacatctacaaggacaaagaaagcaccgtgcaggtccactacagaatgtgccagtcctgcgtggaactggaccctgctacagtggccggcatcatcgtgaccgatgtgatcgctactctgctgctggctctgggagtgttctgcttcgccggacacgaaacaggcagactgtctggcgctgccgatacacaggccctgctgagaaacgaccaagtgtatcagcccctgcgcgacagagatgatgcccagtattctcacctcggcggcaactgggctagaaacaagcgcgccaagagaagcggatctggcgtgaagcagaccctgaatttcgacctgctgaagctggctggcgacgtggaatccaacccaggcccttctagaggccatatgaccgagtacaagcccacggtgcgcctcgccacccgcgacgacgtccccagggccgtacgcaccctcgccgccgcgttcgccgactaccccgccacgcgccacaccgtcgatccggaccgccacatcgagcgggtcaccgagctgcaagaactcttcctcacgcgcgtcgggctcgacatcggcaaggtgtgggtcgcggacgacggcgccgcggtggcggtctggaccacgccggagagcgtcgaagcgggggcggtgttcgccgagatcggcccgcgcatggccgagttgagcggttcccggctggccgcgcagcaacagatggaaggcctcctggcgccgcaccggcccaaggagcccgcgtggttcctggccaccgtcggcgtctcgcccgaccaccagggcaagggtctgggcagcgccgtcgtgctccccggagtggaggcggccgagcgcgccggggtgcccgccttcctggagacctccgcgccccgcaacctccccttctacgagcggctcggcttcaccgtcaccgccgacgtcgaggtgcccgaaggaccgcgcacctggtgcatgacccgcaagcccggtgcctga

SEQ ID NO: 8912 - DNA, 2022 bp, Artificial Sequence
  Synthetic Polynucloetide
atggccttaccagtgaccgccttgctcctgccgctggccttgctgctccacgccgccaggccggacatccagatgacacagagccctagcagcctgtctgccagcgtgggagacagagtgaccatcacctgtagagccagccaggacgtgaacacagccgtggcttggtatcagcagaagcctggcaaggcccctaagctgctgatctacagcgccagctttctgtacagcggcgtgcccagcagattcagcggaagcagaagcggcaccgacttcaccctgacaatatccagcctccagcctgaggacttcgccacctactactgccagcaggcttacaccacacctccaacattcggccagggcaccaaggtggaaatcaagagaacaggcggaggcggaagtggaggcggaggatctggcggcggaggctctgaagtgcagctggttgaatcaggtggcggcctggttcaacctggcggatctctgagactgagctgtgccgccagcggcttcaacatcaaggacacctacatccactgggtccgacaggcccctggcaaaggacttgaatgggtcgccagaatctaccccaccaacggctacaccagatacgccgactctgtgaagggcagattcaccatcagcgccgacaccagcaagaacaccgcctacctccagatgaactccctgagagccgaggacaccgccgtgtactactgtagcagatggggcggagccggagcctacgctatggatgtttggggccagggaaccctggtcaccgtgtcatctacgcgtgggtctggaggcggaggcagcggcggaggcgggagcggccagagcatcaagggcaaccacctggtcaaggtgtacgactaccaagaggacggcagcgtgctgctgacatgtgatgccgaggccaagaacatcacctggtttaaggacggcaagatgatcggcttcctgaccgaggacaagaagaagtggaacctgggcagcaacgctaaggaccccagaggcatgtatcagtgcaagggcagccagaacaagagcaagcccctccaggtgtactaccggatgtgccagaactgcatcgagctgaacgccgctaccatcagcggctttctgttcgccgagatcgtgtccatcttcgtgctggccgtgggcgtgtactttatcgctggacaggatggcgtgcggcagagcagagcttccgataagcaaaccctgctgcctaacgaccagctgtaccagcctctgaaggacagagaggacgaccagtacagccacctccagggcaatcagctgagaagaaaccgcgccaagagaagcggatctggcgtgaagcagaccctgaatttcgacctgctgaagctggctggcgacgtggaatccaacccaggcccttctagaggccatatgaccgagtacaagcccacggtgcgcctcgccacccgcgacgacgtccccagggccgtacgcaccctcgccgccgcgttcgccgactaccccgccacgcgccacaccgtcgatccggaccgccacatcgagcgggtcaccgagctgcaagaactcttcctcacgcgcgtcgggctcgacatcggcaaggtgtgggtcgcggacgacggcgccgcggtggcggtctggaccacgccggagagcgtcgaagcgggggcggtgttcgccgagatcggcccgcgcatggccgagttgagcggttcccggctggccgcgcagcaacagatggaaggcctcctggcgccgcaccggcccaaggagcccgcgtggttcctggccaccgtcggcgtctcgcccgaccaccagggcaagggtctgggcagcgccgtcgtgctccccggagtggaggcggccgagcgcgccggggtgcccgccttcctggagacctccgcgccccgcaacctccccttctacgagcggctcggcttcaccgtcaccgccgacgtcgaggtgcccgaaggaccgcgcacctggtgcatgacccgcaagcccggtgcctga

SEQ ID NO: 8913 - DNA, 1971 bp, Artificial Sequence
  Synthetic Polynucloetide
atggccttaccagtgaccgccttgctcctgccgctggccttgctgctccacgccgccaggccggacatccagatgacacagagccctagcagcctgtctgccagcgtgggagacagagtgaccatcacctgtagagccagccaggacgtgaacacagccgtggcttggtatcagcagaagcctggcaaggcccctaagctgctgatctacagcgccagctttctgtacagcggcgtgcccagcagattcagcggaagcagaagcggcaccgacttcaccctgacaatatccagcctccagcctgaggacttcgccacctactactgccagcaggcttacaccacacctccaacattcggccagggcaccaaggtggaaatcaagagaacaggcggaggcggaagtggaggcggaggatctggcggcggaggctctgaagtgcagctggttgaatcaggtggcggcctggttcaacctggcggatctctgagactgagctgtgccgccagcggcttcaacatcaaggacacctacatccactgggtccgacaggcccctggcaaaggacttgaatgggtcgccagaatctaccccaccaacggctacaccagatacgccgactctgtgaagggcagattcaccatcagcgccgacaccagcaagaacaccgcctacctccagatgaactccctgagagccgaggacaccgccgtgtactactgtagcagatggggcggagccggagcctacgctatggatgtttggggccagggaaccctggtcaccgtgtcatctacgcgtgggtctggaggcggaggcagcggcggaggcgggagcggccagagttttgggttgttggaccctaaattgtgctatctgttggacggaatcctgttcatttacggagtgatcctgaccgcattgttcctgcgggttaagttttccagatccgcagacgcacccgcttaccaacaagggcagaaccaactctacaatgaacttaatttggggcggagggaagagtacgacgttctggacaaaaggaggggacgagatcccgagatgggcggaaagcctcagcgaaggaagaatccgcaagaggggctttataacgaactccagaaagataaaatggcagaagcctatagtgagattgggatgaagggagaaaggaggaggggtaaaggtcacgatgggttgtaccaaggattgagcacagccactaaagatacctatgatgcgctccacatgcaggccctgccgccaagacgcgccaagagaagcggatctggcgtgaagcagaccctgaatttcgacctgctgaagctggctggcgacgtggaatccaacccaggcccttctagaggccatatgaccgagtacaagcccacggtgcgcctcgccacccgcgacgacgtccccagggccgtacgcaccctcgccgccgcgttcgccgactaccccgccacgcgccacaccgtcgatccggaccgccacatcgagcgggtcaccgagctgcaagaactcttcctcacgcgcgtcgggctcgacatcggcaaggtgtgggtcgcggacgacggcgccgcggtggcggtctggaccacgccggagagcgtcgaagcgggggcggtgttcgccgagatcggcccgcgcatggccgagttgagcggttcccggctggccgcgcagcaacagatggaaggcctcctggcgccgcaccggcccaaggagcccgcgtggttcctggccaccgtcggcgtctcgcccgaccaccagggcaagggtctgggcagcgccgtcgtgctccccggagtggaggcggccgagcgcgccggggtgcccgccttcctggagacctccgcgccccgcaacctccccttctacgagcggctcggcttcaccgtcaccgccgacgtcgaggtgcccgaaggaccgcgcacctggtgcatgacccgcaagcccggtgcctga

SEQ ID NO: 8914 - DNA, 2271 bp, Artificial Sequence
  Synthetic Polynucloetide
atggccttaccagtgaccgccttgctcctgccgctggccttgctgctccacgccgccaggccggaagtgcagctggttgaatctggcggaggactggttcagcctggcggatctctgagactgtcttgtgccgccagcggcttcagcttcagcgacttttggatgagctgggtccgacaggcccctggcaaaggacttgaatgggtcgccacaatcagccaggccggcagcgagaaggactacgtggactctgtgaagggcagattcaccatcagccgggacaacgccaagaagtccctgtacctccagatgaacagcctgagagccgaggacaccgccgtgtactattgtgcctctggcgtgtacagcttcgactacagaggccagggcaccctggtcacagtctcttctggtaccggcggaggcggatctggcggcggaggtagcggtggcggaggatctgaattcgacatccagatgacacagagccctagcagcctgtctgccagcgtgggagacagagtgaccatcacctgtagagccagccaggacgtgaacacagccgtggcttggtatcagcagaagcctggcaaggcccctaagctgctgatctacagcgccagctttctgtacagcggcgtgcccagcagattcagcggaagcagaagcggcaccgacttcaccctgacaatatccagcctccagcctgaggacttcgccacctactactgccagcaggcttacaccacacctccaacattcggccagggcaccaaggtggaaatcaagagaacactcgaggacctgaagaacgtgttcccacctgaggtggccgtgttcgagcctagcgaggccgagatcagccacacccagaaagccaccctcgtgtgcctggctaccggcttctaccccgaccatgtggaactgtcttggtgggtcaacggcaaagaggtgcacagcggcgtgtgtaccgacccccagccactgaaagaacagcccgccctgaacgacagccggtactgcctgagcagcagactgagagtgtccgccaccttctggcagaacccccggaaccacttcagatgccaggtgcagttctacggcctgagcgagaacgacgagtggacccaggacagagccaagcccgtgacccagatcgtgtctgccgaagcctggggcagagccgattgcggctttaccagcgagagctaccagcagggcgtgctgagcgccaccatcctgtacgagatcctgctgggcaaggccaccctgtacgccgtgctggtgtctgccctggtgctgatggctatggtcaagcggaaggacagccggggaagggccaagcgatctggatctggagcaacaaacttctcactactcaaacaagcaggtgacgtggaggagaatcccgggcctactagtatggactggatttggcgcatccttttccttgtcggcgctgctaccggcgcgcattccttcgaagaagtgcagctggttgaatcaggtggcggcctggttcaacctggcggatctctgagactgagctgtgccgccagcggcttcaacatcaaggacacctacatccactgggtccgacaggcccctggcaaaggacttgaatgggtcgccagaatctaccccaccaacggctacaccagatacgccgactctgtgaagggcagattcaccatcagcgccgacaccagcaagaacaccgcctacctccagatgaactccctgagagccgaggacaccgccgtgtactactgtagcagatggggcggagccggagcctacgctatggatgtttggggccagggaaccctggtcaccgtgtcatctacgcgtatccagaaccctgatcctgccgtgtaccagctgcgggatagcaagagcagcgacaagagcgtgtgtctgttcaccgacttcgacagccagaccaacgtgtcccagagcaaggactccgacgtgtacatcaccgataagtgcgtgctggacatgcggagcatggacttcaagagcaactccgccgtggcctggtccaacaagtccgatttcgcctgcgccaacgccttcaacaacagcattatccccgaggacacattcttcccaagccccgagagcagctgcgacgtgaagctggtggaaaagagcttcgagacagacaccaacctgaacttccagaacctgagcgtgatcggcttcagaatcctgctgctgaaagtggccggctttaacctgctgatgaccctgcggctgtggtccagc

SEQ ID NO: 8915 - DNA, 2283 bp, Artificial Sequence
  Synthetic Polynucloetide
atggccttaccagtgaccgccttgctcctgccgctggccttgctgctccacgccgccaggccggaagtgcagctggttgaatctggcggaggactggttcagcctggcggatctctgagactgtcttgtgccgccagcggcttcagcttcagcgacttttggatgagctgggtccgacaggcccctggcaaaggacttgaatgggtcgccacaatcagccaggccggcagcgagaaggactacgtggactctgtgaagggcagattcaccatcagccgggacaacgccaagaagtccctgtacctccagatgaacagcctgagagccgaggacaccgccgtgtactattgtgcctctggcgtgtacagcttcgactacagaggccagggcaccctggtcacagtctcttctggtaccggcggaggcggatctggcggcggaggtagcggtggcggaggatctgaattcgacatccagatgacacagagccctagcagcctgtctgccagcgtgggagacagagtgaccatcacctgtagagccagccaggacgtgaacacagccgtggcttggtatcagcagaagcctggcaaggcccctaagctgctgatctacagcgccagctttctgtacagcggcgtgcccagcagattcagcggaagcagaagcggcaccgacttcaccctgacaatatccagcctccagcctgaggacttcgccacctactactgccagcaggcttacaccacacctccaacattcggccagggcaccaaggtggaaatcaagagaacactcgagatccagaaccctgatcctgccgtgtaccagctgcgggatagcaagagcagcgacaagagcgtgtgtctgttcaccgacttcgacagccagaccaacgtgtcccagagcaaggactccgacgtgtacatcaccgataagtgcgtgctggacatgcggagcatggacttcaagagcaactccgccgtggcctggtccaacaagtccgatttcgcctgcgccaacgccttcaacaacagcattatccccgaggacacattcttcccaagccccgagagcagctgcgacgtgaagctggtggaaaagagcttcgagacagacaccaacctgaacttccagaacctgagcgtgatcggcttcagaatcctgctgctgaaagtggccggctttaacctgctgatgaccctgcggctgtggtccagccgcgccaagagaagcggatctggcgtgaagcagaccctgaatttcgacctgctgaagctggctggcgacgtggaatccaacccaggccctactagtatggactggatttggcgcatccttttccttgtcggcgctgctaccggcgcgcattccttcgaagaagtgcagctggttgaatcaggtggcggcctggttcaacctggcggatctctgagactgagctgtgccgccagcggcttcaacatcaaggacacctacatccactgggtccgacaggcccctggcaaaggacttgaatgggtcgccagaatctaccccaccaacggctacaccagatacgccgactctgtgaagggcagattcaccatcagcgccgacaccagcaagaacaccgcctacctccagatgaactccctgagagccgaggacaccgccgtgtactactgtagcagatggggcggagccggagcctacgctatggatgtttggggccagggaaccctggtcaccgtgtcatctacgcgtgaggacctgaagaacgtgttcccacctgaggtggccgtgttcgagcctagcgaggccgagatcagccacacccagaaagccaccctcgtgtgcctggctaccggcttctaccccgaccatgtggaactgtcttggtgggtcaacggcaaagaggtgcacagcggcgtgtgtaccgacccccagccactgaaagaacagcccgccctgaacgacagccggtactgcctgagcagcagactgagagtgtccgccaccttctggcagaacccccggaaccacttcagatgccaggtgcagttctacggcctgagcgagaacgacgagtggacccaggacagagccaagcccgtgacccagatcgtgtctgccgaagcctggggcagagccgattgcggctttaccagcgagagctaccagcagggcgtgctgagcgccaccatcctgtacgagatcctgctgggcaaggccaccctgtacgccgtgctggtgtctgccctggtgctgatggctatggtcaagcggaaggacagccgggga

SEQ ID NO: 8916 - DNA, 2859 bp, Artificial Sequence
  Synthetic Polynucloetide
atggccttaccagtgaccgccttgctcctgccgctggccttgctgctccacgccgccaggccggaagtgcagctggttgaatctggcggaggactggttcagcctggcggatctctgagactgtcttgtgccgccagcggcttcagcttcagcgacttttggatgagctgggtccgacaggcccctggcaaaggacttgaatgggtcgccacaatcagccaggccggcagcgagaaggactacgtggactctgtgaagggcagattcaccatcagccgggacaacgccaagaagtccctgtacctccagatgaacagcctgagagccgaggacaccgccgtgtactattgtgcctctggcgtgtacagcttcgactacagaggccagggcaccctggtcacagtctcttctggtaccggcggaggcggatctggcggcggaggtagcggtggcggaggatctgaattcgacatccagatgacacagagccctagcagcctgtctgccagcgtgggagacagagtgaccatcacctgtagagccagccaggacgtgaacacagccgtggcttggtatcagcagaagcctggcaaggcccctaagctgctgatctacagcgccagctttctgtacagcggcgtgcccagcagattcagcggaagcagaagcggcaccgacttcaccctgacaatatccagcctccagcctgaggacttcgccacctactactgccagcaggcttacaccacacctccaacattcggccagggcaccaaggtggaaatcaagagaacactcgaggacctgaagaacgtgttcccacctgaggtggccgtgttcgagcctagcgaggccgagatcagccacacccagaaagccaccctcgtgtgcctggctaccggcttctaccccgaccatgtggaactgtcttggtgggtcaacggcaaagaggtgcacagcggcgtgtctaccgacccccagccactgaaagaacagcccgccctgaacgacagccggtactgcctgagcagcagactgagagtgtccgccaccttctggcagaacccccggaaccacttcagatgccaggtgcagttctacggcctgagcgagaacgacgagtggacccaggacagagccaagcccgtgacccagatcgtgtctgccgaagcctggggcagagccgattgcggatcccagagcttcggcctgctggaccccaagctgtgctacctgctggatggcatcctgttcatctacggcgtgatcctgaccgccctgttcctgagagtgaagttcagcagaagcgccgacgcccctgcctaccagcagggacagaaccaactgtacaacgagctgaacctgggcagacgggaagagtacgacgtgctggacaagcggagaggcagggaccctgagatgggcggaaagccccagcggagaaagaacccccaggaaggactgtataacgaactccagaaagacaagatggccgaagcctacagcgagatcggcatgaagggcgagcggagaagaggcaagggccacgatggcctgtaccagggcctgagcaccgccaccaaggacacctatgacgccctgcacatgcaggccctgcctccaagaagggccaagcgatctggatctggagcaacaaacttctcactactcaaacaagcaggtgacgtggaggagaatcccgggcctactagtatggactggatttggcgcatccttttccttgtcggcgctgctaccggcgcgcattccttcgaagaagtgcagctggttgaatcaggtggcggcctggttcaacctggcggatctctgagactgagctgtgccgccagcggcttcaacatcaaggacacctacatccactgggtccgacaggcccctggcaaaggacttgaatgggtcgccagaatctaccccaccaacggctacaccagatacgccgactctgtgaagggcagattcaccatcagcgccgacaccagcaagaacaccgcctacctccagatgaactccctgagagccgaggacaccgccgtgtactactgtagcagatggggcggagccggagcctacgctatggatgtttggggccagggaaccctggtcaccgtgtcatctacgcgtatccagaaccctgatcctgccgtgtaccagctgcgggatagcaagagcagcgacaagagcgtgtgtctgttcaccgacttcgacagccagaccaacgtgtcccagagcaaggactccgacgtgtacatcaccgataagaccgtgctggacatgcggagcatggacttcaagagcaactccgccgtggcctggtccaacaagtccgatttcgcctgcgccaacgccttcaacaacagcattatccccgaggacacattcttcccaagccccgagagcagctgcggtacccagagttttgggttgttggaccctaaattgtgctatctgttggacggaatcctgttcatttacggagtgatcctgaccgcattgttcctgcgggttaagttttccagatccgcagacgcacccgcttaccaacaagggcagaaccaactctacaatgaacttaatttggggcggagggaagagtacgacgttctggacaaaaggaggggacgagatcccgagatgggcggaaagcctcagcgaaggaagaatccgcaagaggggctttataacgaactccagaaagataaaatggcagaagcctatagtgagattgggatgaagggagaaaggaggaggggtaaaggtcacgatgggttgtaccaaggattgagcacagccactaaagatacctatgatgcgctccacatgcaggccctgccgccaaga

SEQ ID NO: 8917 - DNA, 2349 bp, Artificial Sequence
  Synthetic Polynucloetide
atggccttaccagtgaccgccttgctcctgccgctggccttgctgctccacgccgccaggccggaagtgcagctggttgaatctggcggaggactggttcagcctggcggatctctgagactgtcttgtgccgccagcggcttcagcttcagcgacttttggatgagctgggtccgacaggcccctggcaaaggacttgaatgggtcgccacaatcagccaggccggcagcgagaaggactacgtggactctgtgaagggcagattcaccatcagccgggacaacgccaagaagtccctgtacctccagatgaacagcctgagagccgaggacaccgccgtgtactattgtgcctctggcgtgtacagcttcgactacagaggccagggcaccctggtcacagtctcttctggtaccggcggaggcggatctggcggcggaggtagcggtggcggaggatctgaattcgacatccagatgacacagagccctagcagcctgtctgccagcgtgggagacagagtgaccatcacctgtagagccagccaggacgtgaacacagccgtggcttggtatcagcagaagcctggcaaggcccctaagctgctgatctacagcgccagctttctgtacagcggcgtgcccagcagattcagcggaagcagaagcggcaccgacttcaccctgacaatatccagcctccagcctgaggacttcgccacctactactgccagcaggcttacaccacacctccaacattcggccagggcaccaaggtggaaatcaagagaacactcgagggacagcctaaggccaatcctaccgtgacactgttccctccaagcagcgaagaactccaggccaacaaggccacacttgtgtgcctgatctccgacttctaccctggggctgtgacagtggcttggaaggccgatggatctcctgtgaaagccggcgtggaaaccaccaagccatccaagcagagcaacaacaaatacgccgccagctcctacctgagcctgacacctgagcagtggaagtcccacagatcctacagctgccaagtgacccacgaaggcagcaccgtggaaaagacagtggcccctacagagtgcagccccatcaagaccgatgtgattacaatggaccccaaggacaactgctccaaggacgccaacgataccctgctgctccagctgaccaacaccagcgcctactacatgtacttgttgctgctgctgaagtccgtggtgtacttcgccatcatcacatgctgcctgctgcggagaaccgccttctgctgcaacggcgagaagtctagggccaagcgatctggatctggagcaacaaacttctcactactcaaacaagcaggtgacgtggaggagaatcccgggcctactagtatggactggatttggcgcatccttttccttgtcggcgctgctaccggcgcgcattccttcgaagaagtgcagctggttgaatcaggtggcggcctggttcaacctggcggatctctgagactgagctgtgccgccagcggcttcaacatcaaggacacctacatccactgggtccgacaggcccctggcaaaggacttgaatgggtcgccagaatctaccccaccaacggctacaccagatacgccgactctgtgaagggcagattcaccatcagcgccgacaccagcaagaacaccgcctacctccagatgaactccctgagagccgaggacaccgccgtgtactactgtagcagatggggcggagccggagcctacgctatggatgtttggggccagggaaccctggtcaccgtgtcatctacgcgtgcctctacaaagggaccctccgtgtttcctctggctcccagcagcaagtctacaagcggaggaacagccgctctgggctgcctggtcaaggattactttcccgagcctgtgaccgtgtcctggaatagcggagcactgacaagcggcgtgcacacctttccagccgtgctgcaaagcagcggcctgtactctctgagcagcgtggtcacagtgcctagctctagcctgggcacccagacctacatctgcaatgtgaaccacaagcctagcaacaccaaggtggacaagagagtggaacccaagagctgtgaagtgaaaaccgactccaccgaccacgtgaagcccaaagagacagagaacaccaagcagcccagcaagagctgccacaagcccaaggccatcgtgcacaccgagaaagtgaacatgatgagcctgaccgtgctgggcctgcggatgctgttcgccaaaaccgtggccgtgaacttcctgctgaccgccaagctgttcttcctc

SEQ ID NO: 8918 - DNA, 2292 bp, Artificial Sequence
  Synthetic Polynucloetide
atggccttaccagtgaccgccttgctcctgccgctggccttgctgctccacgccgccaggccggaagtgcagctggttgaatctggcggaggactggttcagcctggcggatctctgagactgtcttgtgccgccagcggcttcagcttcagcgacttttggatgagctgggtccgacaggcccctggcaaaggacttgaatgggtcgccacaatcagccaggccggcagcgagaaggactacgtggactctgtgaagggcagattcaccatcagccgggacaacgccaagaagtccctgtacctccagatgaacagcctgagagccgaggacaccgccgtgtactattgtgcctctggcgtgtacagcttcgactacagaggccagggcaccctggtcacagtctcttctggtaccggcggaggcggatctggcggcggaggtagcggtggcggaggatctgaattcgacatccagatgacacagagccctagcagcctgtctgccagcgtgggagacagagtgaccatcacctgtagagccagccaggacgtgaacacagccgtggcttggtatcagcagaagcctggcaaggcccctaagctgctgatctacagcgccagctttctgtacagcggcgtgcccagcagattcagcggaagcagaagcggcaccgacttcaccctgacaatatccagcctccagcctgaggacttcgccacctactactgccagcaggcttacaccacacctccaacattcggccagggcaccaaggtggaaatcaagagaacactcgagggacagcctaaggccaatcctaccgtgacactgttccctccaagcagcgaagaactccaggccaacaaggccacacttgtgtgcctgatctccgacttctaccctggggctgtgacagtggcttggaaggccgatggatctcctgtgaaagccggcgtggaaaccaccaagccatccaagcagagcaacaacaaatacgccgccagctcctacctgagcctgacacctgagcagtggaagtcccacagatcctacagctgccaagtgacccacgaaggcagcaccgtggaaaagacagtggcccctacagagtgcagcggcagagccgattgcggctttaccagcgagagctaccagcagggcgtgctgagcgccaccatcctgtacgagatcctgctgggcaaggccaccctgtacgccgtgctggtgtctgccctggtgctgatggctatggtcaagcggaaggacagccggggacgcgccaagagaagcggatctggcgtgaagcagaccctgaatttcgacctgctgaagctggctggcgacgtggaatccaacccaggccctactagtatggactggatttggcgcatccttttccttgtcggcgctgctaccggcgcgcattccttcgaagaagtgcagctggttgaatcaggtggcggcctggttcaacctggcggatctctgagactgagctgtgccgccagcggcttcaacatcaaggacacctacatccactgggtccgacaggcccctggcaaaggacttgaatgggtcgccagaatctaccccaccaacggctacaccagatacgccgactctgtgaagggcagattcaccatcagcgccgacaccagcaagaacaccgcctacctccagatgaactccctgagagccgaggacaccgccgtgtactactgtagcagatggggcggagccggagcctacgctatggatgtttggggccagggaaccctggtcaccgtgtcatctacgcgtgcctctacaaagggaccctccgtgtttcctctggctcccagcagcaagtctacaagcggaggaacagccgctctgggctgcctggtcaaggattactttcccgagcctgtgaccgtgtcctggaatagcggagcactgacaagcggcgtgcacacctttccagccgtgctgcaaagcagcggcctgtactctctgagcagcgtggtcacagtgcctagctctagcctgggcacccagacctacatctgcaatgtgaaccacaagcctagcaacaccaaggtggacaagagagtggaacccaagagctgtatccccgaggacacattcttcccaagccccgagagcagctgcgacgtgaagctggtggaaaagagcttcgagacagacaccaacctgaacttccagaacctgagcgtgatcggcttcagaatcctgctgctgaaagtggccggctttaacctgctgatgaccctgcggctgtggtccagc

SEQ ID NO: 8919 - DNA, 2694 bp, Artificial Sequence
  Synthetic Polynucloetide
atggccttaccagtgaccgccttgctcctgccgctggccttgctgctccacgccgccaggccggaagtgcagctggttgaatctggcggaggactggttcagcctggcggatctctgagactgtcttgtgccgccagcggcttcagcttcagcgacttttggatgagctgggtccgacaggcccctggcaaaggacttgaatgggtcgccacaatcagccaggccggcagcgagaaggactacgtggactctgtgaagggcagattcaccatcagccgggacaacgccaagaagtccctgtacctccagatgaacagcctgagagccgaggacaccgccgtgtactattgtgcctctggcgtgtacagcttcgactacagaggccagggcaccctggtcacagtctcttctggtaccggcggaggcggatctggcggcggaggtagcggtggcggaggatctgaattcgacatccagatgacacagagccctagcagcctgtctgccagcgtgggagacagagtgaccatcacctgtagagccagccaggacgtgaacacagccgtggcttggtatcagcagaagcctggcaaggcccctaagctgctgatctacagcgccagctttctgtacagcggcgtgcccagcagattcagcggaagcagaagcggcaccgacttcaccctgacaatatccagcctccagcctgaggacttcgccacctactactgccagcaggcttacaccacacctccaacattcggccagggcaccaaggtggaaatcaagagaacactcgagatccagaaccctgatcctgccgtgtaccagctgcgggatagcaagagcagcgacaagagcgtgtgtctgttcaccgacttcgacagccagaccaacgtgtcccagagcaaggactccgacgtgtacatcaccgataagtgcgtgctggacatgcggagcatggacttcaagagcaactccgccgtggcctggtccaacaagtccgatttcgcctgcgccaacgccttcaacaacagcattatccccgaggacacattcttcccaagccccgagagcagctgcgacgtgaagctggtggaaaagagcttcgagacagacaccaacctgaacttccagaacctgagcgtgatcggcttcagaatcctgctgctgaaagtggccggctttaacctgctgatgaccctgcggctgtggtccagccgcgccaagagaagcggatctggcgtgaagcagaccctgaatttcgacctgctgaagctggctggcgacgtggaatccaacccaggccctactagtatggactggatttggcgcatccttttccttgtcggcgctgctaccggcgcgcattccgggccccagctccagctgcaagagtctggacctggcctggtcaagcctagcgagacactgagcctgacctgtaccgtgtccggcgatagcatcagcagcggcgattactactggggctggatcagacagcctcctggcaaaggactggaatggatcggccacatctactacagcggcgtgacctactacaaccccagcctgaagtccagagtgaccatcagcgtggacaccagccggaaccagttctccctgaagctgtctagcgtgacagccgccgataccgccgtgtactactgcaccagagaggacagcagcaactggcggagtagaggccagggaacactggtcacagttagctctggatccggcggaggcggaagtggaggcggaggatctggcggcggaggctctttcgaagaagtgcagctggttgaatcaggtggcggcctggttcaacctggcggatctctgagactgagctgtgccgccagcggcttcaacatcaaggacacctacatccactgggtccgacaggcccctggcaaaggacttgaatgggtcgccagaatctaccccaccaacggctacaccagatacgccgactctgtgaagggcagattcaccatcagcgccgacaccagcaagaacaccgcctacctccagatgaactccctgagagccgaggacaccgccgtgtactactgtagcagatggggcggagccggagcctacgctatggatgtttggggccagggaaccctggtcaccgtgtcatctacgcgtgaggacctgaagaacgtgttcccacctgaggtggccgtgttcgagcctagcgaggccgagatcagccacacccagaaagccaccctcgtgtgcctggctaccggcttctaccccgaccatgtggaactgtcttggtgggtcaacggcaaagaggtgcacagcggcgtgtgtaccgacccccagccactgaaagaacagcccgccctgaacgacagccggtactgcctgagcagcagactgagagtgtccgccaccttctggcagaacccccggaaccacttcagatgccaggtgcagttctacggcctgagcgagaacgacgagtggacccaggacagagccaagcccgtgacccagatcgtgtctgccgaagcctggggcagagccgattgcggctttaccagcgagagctaccagcagggcgtgctgagcgccaccatcctgtacgagatcctgctgggcaaggccaccctgtacgccgtgctggtgtctgccctggtgctgatggctatggtcaagcggaaggacagccgggga

SEQ ID NO: 8920 - DNA, 3270 bp, Artificial Sequence
  Synthetic Polynucloetide
atggccttaccagtgaccgccttgctcctgccgctggccttgctgctccacgccgccaggccggaagtgcagctggttgaatctggcggaggactggttcagcctggcggatctctgagactgtcttgtgccgccagcggcttcagcttcagcgacttttggatgagctgggtccgacaggcccctggcaaaggacttgaatgggtcgccacaatcagccaggccggcagcgagaaggactacgtggactctgtgaagggcagattcaccatcagccgggacaacgccaagaagtccctgtacctccagatgaacagcctgagagccgaggacaccgccgtgtactattgtgcctctggcgtgtacagcttcgactacagaggccagggcaccctggtcacagtctcttctggtaccggcggaggcggatctggcggcggaggtagcggtggcggaggatctgaattcgacatccagatgacacagagccctagcagcctgtctgccagcgtgggagacagagtgaccatcacctgtagagccagccaggacgtgaacacagccgtggcttggtatcagcagaagcctggcaaggcccctaagctgctgatctacagcgccagctttctgtacagcggcgtgcccagcagattcagcggaagcagaagcggcaccgacttcaccctgacaatatccagcctccagcctgaggacttcgccacctactactgccagcaggcttacaccacacctccaacattcggccagggcaccaaggtggaaatcaagagaacactcgaggacctgaagaacgtgttcccacctgaggtggccgtgttcgagcctagcgaggccgagatcagccacacccagaaagccaccctcgtgtgcctggctaccggcttctaccccgaccatgtggaactgtcttggtgggtcaacggcaaagaggtgcacagcggcgtgtctaccgacccccagccactgaaagaacagcccgccctgaacgacagccggtactgcctgagcagcagactgagagtgtccgccaccttctggcagaacccccggaaccacttcagatgccaggtgcagttctacggcctgagcgagaacgacgagtggacccaggacagagccaagcccgtgacccagatcgtgtctgccgaagcctggggcagagccgattgcggatcccagagcttcggcctgctggaccccaagctgtgctacctgctggatggcatcctgttcatctacggcgtgatcctgaccgccctgttcctgagagtgaagttcagcagaagcgccgacgcccctgcctaccagcagggacagaaccaactgtacaacgagctgaacctgggcagacgggaagagtacgacgtgctggacaagcggagaggcagggaccctgagatgggcggaaagccccagcggagaaagaacccccaggaaggactgtataacgaactccagaaagacaagatggccgaagcctacagcgagatcggcatgaagggcgagcggagaagaggcaagggccacgatggcctgtaccagggcctgagcaccgccaccaaggacacctatgacgccctgcacatgcaggccctgcctccaagaagggccaagcgatctggatctggagcaacaaacttctcactactcaaacaagcaggtgacgtggaggagaatcccgggcctactagtatggactggatttggcgcatccttttccttgtcggcgctgctaccggcgcgcattccgggccccagctccagctgcaagagtctggacctggcctggtcaagcctagcgagacactgagcctgacctgtaccgtgtccggcgatagcatcagcagcggcgattactactggggctggatcagacagcctcctggcaaaggactggaatggatcggccacatctactacagcggcgtgacctactacaaccccagcctgaagtccagagtgaccatcagcgtggacaccagccggaaccagttctccctgaagctgtctagcgtgacagccgccgataccgccgtgtactactgcaccagagaggacagcagcaactggcggagtagaggccagggaacactggtcacagttagctctggatccggcggaggcggaagtggaggcggaggatctggcggcggaggctctttcgaagaagtgcagctggttgaatcaggtggcggcctggttcaacctggcggatctctgagactgagctgtgccgccagcggcttcaacatcaaggacacctacatccactgggtccgacaggcccctggcaaaggacttgaatgggtcgccagaatctaccccaccaacggctacaccagatacgccgactctgtgaagggcagattcaccatcagcgccgacaccagcaagaacaccgcctacctccagatgaactccctgagagccgaggacaccgccgtgtactactgtagcagatggggcggagccggagcctacgctatggatgtttggggccagggaaccctggtcaccgtgtcatctacgcgtatccagaaccctgatcctgccgtgtaccagctgcgggatagcaagagcagcgacaagagcgtgtgtctgttcaccgacttcgacagccagaccaacgtgtcccagagcaaggactccgacgtgtacatcaccgataagaccgtgctggacatgcggagcatggacttcaagagcaactccgccgtggcctggtccaacaagtccgatttcgcctgcgccaacgccttcaacaacagcattatccccgaggacacattcttcccaagccccgagagcagctgcggtacccagagttttgggttgttggaccctaaattgtgctatctgttggacggaatcctgttcatttacggagtgatcctgaccgcattgttcctgcgggttaagttttccagatccgcagacgcacccgcttaccaacaagggcagaaccaactctacaatgaacttaatttggggcggagggaagagtacgacgttctggacaaaaggaggggacgagatcccgagatgggcggaaagcctcagcgaaggaagaatccgcaagaggggctttataacgaactccagaaagataaaatggcagaagcctatagtgagattgggatgaagggagaaaggaggaggggtaaaggtcacgatgggttgtaccaaggattgagcacagccactaaagatacctatgatgcgctccacatgcaggccctgccgccaaga

SEQ ID NO: 8921 - DNA, 2760 bp, Artificial Sequence
  Synthetic Polynucloetide
atggccttaccagtgaccgccttgctcctgccgctggccttgctgctccacgccgccaggccggaagtgcagctggttgaatctggcggaggactggttcagcctggcggatctctgagactgtcttgtgccgccagcggcttcagcttcagcgacttttggatgagctgggtccgacaggcccctggcaaaggacttgaatgggtcgccacaatcagccaggccggcagcgagaaggactacgtggactctgtgaagggcagattcaccatcagccgggacaacgccaagaagtccctgtacctccagatgaacagcctgagagccgaggacaccgccgtgtactattgtgcctctggcgtgtacagcttcgactacagaggccagggcaccctggtcacagtctcttctggtaccggcggaggcggatctggcggcggaggtagcggtggcggaggatctgaattcgacatccagatgacacagagccctagcagcctgtctgccagcgtgggagacagagtgaccatcacctgtagagccagccaggacgtgaacacagccgtggcttggtatcagcagaagcctggcaaggcccctaagctgctgatctacagcgccagctttctgtacagcggcgtgcccagcagattcagcggaagcagaagcggcaccgacttcaccctgacaatatccagcctccagcctgaggacttcgccacctactactgccagcaggcttacaccacacctccaacattcggccagggcaccaaggtggaaatcaagagaacactcgagggacagcctaaggccaatcctaccgtgacactgttccctccaagcagcgaagaactccaggccaacaaggccacacttgtgtgcctgatctccgacttctaccctggggctgtgacagtggcttggaaggccgatggatctcctgtgaaagccggcgtggaaaccaccaagccatccaagcagagcaacaacaaatacgccgccagctcctacctgagcctgacacctgagcagtggaagtcccacagatcctacagctgccaagtgacccacgaaggcagcaccgtggaaaagacagtggcccctacagagtgcagccccatcaagaccgatgtgattacaatggaccccaaggacaactgctccaaggacgccaacgataccctgctgctccagctgaccaacaccagcgcctactacatgtacttgttgctgctgctgaagtccgtggtgtacttcgccatcatcacatgctgcctgctgcggagaaccgccttctgctgcaacggcgagaagtctagggccaagcgatctggatctggagcaacaaacttctcactactcaaacaagcaggtgacgtggaggagaatcccgggcctactagtatggactggatttggcgcatccttttccttgtcggcgctgctaccggcgcgcattccgggccccagctccagctgcaagagtctggacctggcctggtcaagcctagcgagacactgagcctgacctgtaccgtgtccggcgatagcatcagcagcggcgattactactggggctggatcagacagcctcctggcaaaggactggaatggatcggccacatctactacagcggcgtgacctactacaaccccagcctgaagtccagagtgaccatcagcgtggacaccagccggaaccagttctccctgaagctgtctagcgtgacagccgccgataccgccgtgtactactgcaccagagaggacagcagcaactggcggagtagaggccagggaacactggtcacagttagctctggatccggcggaggcggaagtggaggcggaggatctggcggcggaggctctttcgaagaagtgcagctggttgaatcaggtggcggcctggttcaacctggcggatctctgagactgagctgtgccgccagcggcttcaacatcaaggacacctacatccactgggtccgacaggcccctggcaaaggacttgaatgggtcgccagaatctaccccaccaacggctacaccagatacgccgactctgtgaagggcagattcaccatcagcgccgacaccagcaagaacaccgcctacctccagatgaactccctgagagccgaggacaccgccgtgtactactgtagcagatggggcggagccggagcctacgctatggatgtttggggccagggaaccctggtcaccgtgtcatctacgcgtgcctctacaaagggaccctccgtgtttcctctggctcccagcagcaagtctacaagcggaggaacagccgctctgggctgcctggtcaaggattactttcccgagcctgtgaccgtgtcctggaatagcggagcactgacaagcggcgtgcacacctttccagccgtgctgcaaagcagcggcctgtactctctgagcagcgtggtcacagtgcctagctctagcctgggcacccagacctacatctgcaatgtgaaccacaagcctagcaacaccaaggtggacaagagagtggaacccaagagctgtgaagtgaaaaccgactccaccgaccacgtgaagcccaaagagacagagaacaccaagcagcccagcaagagctgccacaagcccaaggccatcgtgcacaccgagaaagtgaacatgatgagcctgaccgtgctgggcctgcggatgctgttcgccaaaaccgtggccgtgaacttcctgctgaccgccaagctgttcttcctc

SEQ ID NO: 8922 - DNA, 2703 bp, Artificial Sequence
  Synthetic Polynucloetide
atggccttaccagtgaccgccttgctcctgccgctggccttgctgctccacgccgccaggccggaagtgcagctggttgaatctggcggaggactggttcagcctggcggatctctgagactgtcttgtgccgccagcggcttcagcttcagcgacttttggatgagctgggtccgacaggcccctggcaaaggacttgaatgggtcgccacaatcagccaggccggcagcgagaaggactacgtggactctgtgaagggcagattcaccatcagccgggacaacgccaagaagtccctgtacctccagatgaacagcctgagagccgaggacaccgccgtgtactattgtgcctctggcgtgtacagcttcgactacagaggccagggcaccctggtcacagtctcttctggtaccggcggaggcggatctggcggcggaggtagcggtggcggaggatctgaattcgacatccagatgacacagagccctagcagcctgtctgccagcgtgggagacagagtgaccatcacctgtagagccagccaggacgtgaacacagccgtggcttggtatcagcagaagcctggcaaggcccctaagctgctgatctacagcgccagctttctgtacagcggcgtgcccagcagattcagcggaagcagaagcggcaccgacttcaccctgacaatatccagcctccagcctgaggacttcgccacctactactgccagcaggcttacaccacacctccaacattcggccagggcaccaaggtggaaatcaagagaacactcgagggacagcctaaggccaatcctaccgtgacactgttccctccaagcagcgaagaactccaggccaacaaggccacacttgtgtgcctgatctccgacttctaccctggggctgtgacagtggcttggaaggccgatggatctcctgtgaaagccggcgtggaaaccaccaagccatccaagcagagcaacaacaaatacgccgccagctcctacctgagcctgacacctgagcagtggaagtcccacagatcctacagctgccaagtgacccacgaaggcagcaccgtggaaaagacagtggcccctacagagtgcagcggcagagccgattgcggctttaccagcgagagctaccagcagggcgtgctgagcgccaccatcctgtacgagatcctgctgggcaaggccaccctgtacgccgtgctggtgtctgccctggtgctgatggctatggtcaagcggaaggacagccggggacgcgccaagagaagcggatctggcgtgaagcagaccctgaatttcgacctgctgaagctggctggcgacgtggaatccaacccaggccctactagtatggactggatttggcgcatccttttccttgtcggcgctgctaccggcgcgcattccgggccccagctccagctgcaagagtctggacctggcctggtcaagcctagcgagacactgagcctgacctgtaccgtgtccggcgatagcatcagcagcggcgattactactggggctggatcagacagcctcctggcaaaggactggaatggatcggccacatctactacagcggcgtgacctactacaaccccagcctgaagtccagagtgaccatcagcgtggacaccagccggaaccagttctccctgaagctgtctagcgtgacagccgccgataccgccgtgtactactgcaccagagaggacagcagcaactggcggagtagaggccagggaacactggtcacagttagctctggatccggcggaggcggaagtggaggcggaggatctggcggcggaggctctttcgaagaagtgcagctggttgaatcaggtggcggcctggttcaacctggcggatctctgagactgagctgtgccgccagcggcttcaacatcaaggacacctacatccactgggtccgacaggcccctggcaaaggacttgaatgggtcgccagaatctaccccaccaacggctacaccagatacgccgactctgtgaagggcagattcaccatcagcgccgacaccagcaagaacaccgcctacctccagatgaactccctgagagccgaggacaccgccgtgtactactgtagcagatggggcggagccggagcctacgctatggatgtttggggccagggaaccctggtcaccgtgtcatctacgcgtgcctctacaaagggaccctccgtgtttcctctggctcccagcagcaagtctacaagcggaggaacagccgctctgggctgcctggtcaaggattactttcccgagcctgtgaccgtgtcctggaatagcggagcactgacaagcggcgtgcacacctttccagccgtgctgcaaagcagcggcctgtactctctgagcagcgtggtcacagtgcctagctctagcctgggcacccagacctacatctgcaatgtgaaccacaagcctagcaacaccaaggtggacaagagagtggaacccaagagctgtatccccgaggacacattcttcccaagccccgagagcagctgcgacgtgaagctggtggaaaagagcttcgagacagacaccaacctgaacttccagaacctgagcgtgatcggcttcagaatcctgctgctgaaagtggccggctttaacctgctgatgaccctgcggctgtggtccagc

SEQ ID NO: 8923 - DNA, 2274 bp, Artificial Sequence
  Synthetic Polynucloetide
atggccttaccagtgaccgccttgctcctgccgctggccttgctgctccacgccgccaggccggaagtgcaggttttggagtctggcggaggactggttcagcctggcggatctctgagactgtcttgtgccgccagcggcttcaccttcagcaactttgccatgagctgggtccgacaggcccctggcaaaggacttgaatgggtgtccacaatcagcggcagcgccggcacaacagattacgccgattctgtgaagggcagattcaccatcagccgggacaacagcaagaaaaccctgtacctccagatgaacagcctgcgcgtggaagataccgccgtgtactactgtgccgatggcagaggccccttcttcgattatcgcggccagggcacactggtcaccgtttcttctggtaccggcggaggcggatctggcggcggaggtagcggtggcggaggatctgaattcgacatccagatgacacagagccctagcagcctgtctgccagcgtgggagacagagtgaccatcacctgtagagccagccaggacgtgaacacagccgtggcttggtatcagcagaagcctggcaaggcccctaagctgctgatctacagcgccagctttctgtacagcggcgtgcccagcagattcagcggaagcagaagcggcaccgacttcaccctgacaatatccagcctccagcctgaggacttcgccacctactactgccagcaggcttacaccacacctccaacattcggccagggcaccaaggtggaaatcaagagaacactcgaggacctgaagaacgtgttcccacctgaggtggccgtgttcgagcctagcgaggccgagatcagccacacccagaaagccaccctcgtgtgcctggctaccggcttctaccccgaccatgtggaactgtcttggtgggtcaacggcaaagaggtgcacagcggcgtgtgtaccgacccccagccactgaaagaacagcccgccctgaacgacagccggtactgcctgagcagcagactgagagtgtccgccaccttctggcagaacccccggaaccacttcagatgccaggtgcagttctacggcctgagcgagaacgacgagtggacccaggacagagccaagcccgtgacccagatcgtgtctgccgaagcctggggcagagccgattgcggctttaccagcgagagctaccagcagggcgtgctgagcgccaccatcctgtacgagatcctgctgggcaaggccaccctgtacgccgtgctggtgtctgccctggtgctgatggctatggtcaagcggaaggacagccggggaagggccaagcgatctggatctggagcaacaaacttctcactactcaaacaagcaggtgacgtggaggagaatcccgggcctactagtatggactggatttggcgcatccttttccttgtcggcgctgctaccggcgcgcattccttcgaagaagtgcagctggttgaatcaggtggcggcctggttcaacctggcggatctctgagactgagctgtgccgccagcggcttcaacatcaaggacacctacatccactgggtccgacaggcccctggcaaaggacttgaatgggtcgccagaatctaccccaccaacggctacaccagatacgccgactctgtgaagggcagattcaccatcagcgccgacaccagcaagaacaccgcctacctccagatgaactccctgagagccgaggacaccgccgtgtactactgtagcagatggggcggagccggagcctacgctatggatgtttggggccagggaaccctggtcaccgtgtcatctacgcgtatccagaaccctgatcctgccgtgtaccagctgcgggatagcaagagcagcgacaagagcgtgtgtctgttcaccgacttcgacagccagaccaacgtgtcccagagcaaggactccgacgtgtacatcaccgataagtgcgtgctggacatgcggagcatggacttcaagagcaactccgccgtggcctggtccaacaagtccgatttcgcctgcgccaacgccttcaacaacagcattatccccgaggacacattcttcccaagccccgagagcagctgcgacgtgaagctggtggaaaagagcttcgagacagacaccaacctgaacttccagaacctgagcgtgatcggcttcagaatcctgctgctgaaagtggccggctttaacctgctgatgaccctgcggctgtggtccagc

SEQ ID NO: 8924 - DNA, 2277 bp, Artificial Sequence
  Synthetic Polynucloetide
atggccttaccagtgaccgccttgctcctgccgctggccttgctgctccacgccgccaggccggacatccagatgacacagagccctagcagcctgtctgccagcgtgggagacagagtgaccatcacctgtagagccagccaggacgtgaacacagccgtggcttggtatcagcagaagcctggcaaggcccctaagctgctgatctacagcgccagctttctgtacagcggcgtgcccagcagattcagcggaagcagaagcggcaccgacttcaccctgacaatatccagcctccagcctgaggacttcgccacctactactgccagcaggcttacaccacacctccaacattcggccagggcaccaaggtggaaatcaagagaacactcgaggacctgaagaacgtgttcccacctgaggtggccgtgttcgagcctagcgaggccgagatcagccacacccagaaagccaccctcgtgtgcctggctaccggcttctaccccgaccatgtggaactgtcttggtgggtcaacggcaaagaggtgcacagcggcgtgtgtaccgacccccagccactgaaagaacagcccgccctgaacgacagccggtactgcctgagcagcagactgagagtgtccgccaccttctggcagaacccccggaaccacttcagatgccaggtgcagttctacggcctgagcgagaacgacgagtggacccaggacagagccaagcccgtgacccagatcgtgtctgccgaagcctggggcagagccgattgcggctttaccagcgagagctaccagcagggcgtgctgagcgccaccatcctgtacgagatcctgctgggcaaggccaccctgtacgccgtgctggtgtctgccctggtgctgatggctatggtcaagcggaaggacagccggggaagggccaagcgatctggatctggagcaacaaacttctcactactcaaacaagcaggtgacgtggaggagaatcccgggcctactagtatggactggatttggcgcatccttttccttgtcggcgctgctaccggcgcccattccgggcccgaagtgcagctggttgaatctggcggaggactggttcaggctggcggatctctgagactgtcttgtgccgccagcggcagaacctttagcatgggctggtttagacaggcccctggcaaagagagagagttcgtcgccgccatcacatactctggcggcagcccttactacgccgactctgtgaagggcagattcaccatcagccgggacaacgccaagaacaccgtgtacctccagatgaacagcctgaagcctgaggacaccgccgtgtactactgcgccgccaatccaacatacggcagcgactggaacgccgagaattggggccagggaacccaagtgacagtgtctagcggatccggcggcggaggatctggcggaggcggatctgggggcggaggctctttcgaagaagtgcagctggttgaatcaggtggcggcctggttcaacctggcggatctctgagactgagctgtgccgccagcggcttcaacatcaaggacacctacatccactgggtccgacaggcccctggcaaaggacttgaatgggtcgccagaatctaccccaccaacggctacaccagatacgccgactctgtgaagggcagattcaccatcagcgccgacaccagcaagaacaccgcctacctccagatgaactccctgagagccgaggacaccgccgtgtactactgtagcagatggggcggagccggagcctacgctatggatgtttggggccagggaaccctggtcaccgtgtcatctacgcgtatccagaaccctgatcctgccgtgtaccagctgcgggatagcaagagcagcgacaagagcgtgtgtctgttcaccgacttcgacagccagaccaacgtgtcccagagcaaggactccgacgtgtacatcaccgataagtgcgtgctggacatgcggagcatggacttcaagagcaactccgccgtggcctggtccaacaagtccgatttcgcctgcgccaacgccttcaacaacagcattatccccgaggacacattcttcccaagccccgagagcagctgcgacgtgaagctggtggaaaagagcttcgagacagacaccaacctgaacttccagaacctgagcgtgatcggcttcagaatcctgctgctgaaagtggccggctttaacctgctgatgaccctgcggctgtggtccagc

SEQ ID NO: 8925 - DNA, 2658 bp, Artificial Sequence
  Synthetic Polynucloetide
atggccttaccagtgaccgccttgctcctgccgctggccttgctgctccacgccgccaggccggacatccagatgacacagagccctagcagcctgtctgccagcgtgggagacagagtgaccatcacctgtagagccagccaggacgtgaacacagccgtggcttggtatcagcagaagcctggcaaggcccctaagctgctgatctacagcgccagctttctgtacagcggcgtgcccagcagattcagcggaagcagaagcggcaccgacttcaccctgacaatatccagcctccagcctgaggacttcgccacctactactgccagcaggcttacaccacacctccaacattcggccagggcaccaaggtggaaatcaagagaacactcgaggacctgaagaacgtgttcccacctgaggtggccgtgttcgagcctagcgaggccgagatcagccacacccagaaagccaccctcgtgtgcctggctaccggcttctaccccgaccatgtggaactgtcttggtgggtcaacggcaaagaggtgcacagcggcgtgtgtaccgacccccagccactgaaagaacagcccgccctgaacgacagccggtactgcctgagcagcagactgagagtgtccgccaccttctggcagaacccccggaaccacttcagatgccaggtgcagttctacggcctgagcgagaacgacgagtggacccaggacagagccaagcccgtgacccagatcgtgtctgccgaagcctggggcagagccgattgcggctttaccagcgagagctaccagcagggcgtgctgagcgccaccatcctgtacgagatcctgctgggcaaggccaccctgtacgccgtgctggtgtctgccctggtgctgatggctatggtcaagcggaaggacagccggggaagggccaagcgatctggatctggagcaacaaacttctcactactcaaacaagcaggtgacgtggaggagaatcccgggcctactagtatggactggatttggcgcatccttttccttgtcggcgctgctaccggcgcccattcccaactgcaactgcaagagtctggccctggcctggtcaagccttctgaaaccctgagcctgacctgtaccgtgtccggcggctctatcagcagcggcgattactactggggctggatcagacagcctccaggcaagggactcgaatggatcggcagcatcagctacagcggctccacctactacaacccaagcctgaagtccagagtgaccatcagcgtggacaccagcagaaaccagttctccctgaagctgagcagcgtgacagccgccgatacagccgtgtattattgcaccagagaggacagcagcaactggcggagtagaggacagggcacactggtcacagtgtcctcttctggaggcggtggaagcggtggaggaggatctgaagtgcagctggttgaatctggcggaggactggttcaggctggcggatctctgagactgtcttgtgccgccagcggcagaacctttagcatgggctggtttagacaggcccctggcaaagagagagagttcgtcgccgccatcacatactctggcggcagcccttactacgccgactctgtgaagggcagattcaccatcagccgggacaacgccaagaacaccgtgtacctccagatgaacagcctgaagcctgaggacaccgccgtgtactactgcgccgccaatccaacatacggcagcgactggaacgccgagaattggggccagggaacccaagtgacagtgtctagcggatccggcggcggaggatctggcggaggcggatctgggggcggaggctctttcgaagaagtgcagctggttgaatcaggtggcggcctggttcaacctggcggatctctgagactgagctgtgccgccagcggcttcaacatcaaggacacctacatccactgggtccgacaggcccctggcaaaggacttgaatgggtcgccagaatctaccccaccaacggctacaccagatacgccgactctgtgaagggcagattcaccatcagcgccgacaccagcaagaacaccgcctacctccagatgaactccctgagagccgaggacaccgccgtgtactactgtagcagatggggcggagccggagcctacgctatggatgtttggggccagggaaccctggtcaccgtgtcatctacgcgtatccagaaccctgatcctgccgtgtaccagctgcgggatagcaagagcagcgacaagagcgtgtgtctgttcaccgacttcgacagccagaccaacgtgtcccagagcaaggactccgacgtgtacatcaccgataagtgcgtgctggacatgcggagcatggacttcaagagcaactccgccgtggcctggtccaacaagtccgatttcgcctgcgccaacgccttcaacaacagcattatccccgaggacacattcttcccaagccccgagagcagctgcgacgtgaagctggtggaaaagagcttcgagacagacaccaacctgaacttccagaacctgagcgtgatcggcttcagaatcctgctgctgaaagtggccggctttaacctgctgatgaccctgcggctgtggtccagc

SEQ ID NO: 8926 - DNA, 2685 bp, Artificial Sequence
  Synthetic Polynucloetide
atggccttaccagtgaccgccttgctcctgccgctggccttgctgctccacgccgccaggccggaagtgcaggttttggagtctggcggaggactggttcagcctggcggatctctgagactgtcttgtgccgccagcggcttcaccttcagcaactttgccatgagctgggtccgacaggcccctggcaaaggacttgaatgggtgtccacaatcagcggcagcgccggcacaacagattacgccgattctgtgaagggcagattcaccatcagccgggacaacagcaagaaaaccctgtacctccagatgaacagcctgcgcgtggaagataccgccgtgtactactgtgccgatggcagaggccccttcttcgattatcgcggccagggcacactggtcaccgtttcttctggtaccggcggaggcggatctggcggcggaggtagcggtggcggaggatctgaattcgacatccagatgacacagagccctagcagcctgtctgccagcgtgggagacagagtgaccatcacctgtagagccagccaggacgtgaacacagccgtggcttggtatcagcagaagcctggcaaggcccctaagctgctgatctacagcgccagctttctgtacagcggcgtgcccagcagattcagcggaagcagaagcggcaccgacttcaccctgacaatatccagcctccagcctgaggacttcgccacctactactgccagcaggcttacaccacacctccaacattcggccagggcaccaaggtggaaatcaagagaacactcgaggacctgaagaacgtgttcccacctgaggtggccgtgttcgagcctagcgaggccgagatcagccacacccagaaagccaccctcgtgtgcctggctaccggcttctaccccgaccatgtggaactgtcttggtgggtcaacggcaaagaggtgcacagcggcgtgtgtaccgacccccagccactgaaagaacagcccgccctgaacgacagccggtactgcctgagcagcagactgagagtgtccgccaccttctggcagaacccccggaaccacttcagatgccaggtgcagttctacggcctgagcgagaacgacgagtggacccaggacagagccaagcccgtgacccagatcgtgtctgccgaagcctggggcagagccgattgcggctttaccagcgagagctaccagcagggcgtgctgagcgccaccatcctgtacgagatcctgctgggcaaggccaccctgtacgccgtgctggtgtctgccctggtgctgatggctatggtcaagcggaaggacagccggggaagggccaagcgatctggatctggagcaacaaacttctcactactcaaacaagcaggtgacgtggaggagaatcccgggcctactagtatggactggatttggcgcatccttttccttgtcggcgctgctaccggcgcccattccgggcccgaagtgcagctggttgaatctggcggaggactggttcaggctggcggatctctgagactgtcttgtgccgccagcggcagaacctttagcatgggctggtttagacaggcccctggcaaagagagagagttcgtcgccgccatcacatacagcggcggcagcccttactacgcctcttctgtcagaggccggttcaccatcagccgggacaacgccaagaacaccgtgtacctccagatgaacagcctgaagccagaggacaccgccgtgtactactgtgccgccaatccaacctacggcagcgactggaatgccgagaattggggccagggcacccaagtgacagtgtctagtggatccggcggcggaggatctggcggaggcggatctgggggcggaggctctttcgaagaagtgcagctggttgaatcaggtggcggcctggttcaacctggcggatctctgagactgagctgtgccgccagcggcttcaacatcaaggacacctacatccactgggtccgacaggcccctggcaaaggacttgaatgggtcgccagaatctaccccaccaacggctacaccagatacgccgactctgtgaagggcagattcaccatcagcgccgacaccagcaagaacaccgcctacctccagatgaactccctgagagccgaggacaccgccgtgtactactgtagcagatggggcggagccggagcctacgctatggatgtttggggccagggaaccctggtcaccgtgtcatctacgcgtatccagaaccctgatcctgccgtgtaccagctgcgggatagcaagagcagcgacaagagcgtgtgtctgttcaccgacttcgacagccagaccaacgtgtcccagagcaaggactccgacgtgtacatcaccgataagtgcgtgctggacatgcggagcatggacttcaagagcaactccgccgtggcctggtccaacaagtccgatttcgcctgcgccaacgccttcaacaacagcattatccccgaggacacattcttcccaagccccgagagcagctgcgacgtgaagctggtggaaaagagcttcgagacagacaccaacctgaacttccagaacctgagcgtgatcggcttcagaatcctgctgctgaaagtggccggctttaacctgctgatgaccctgcggctgtggtccagc

SEQ ID NO: 8927 - DNA, 2190 bp, Artificial Sequence
  Synthetic Polynucloetide
atggccttaccagtgaccgccttgctcctgccgctggccttgctgctccacgccgccaggccggagatcgtgctgacacagagccctggcacactgtcactgtctccaggcgaaagagccacactgagctgtagagccagccagagcgtgtccagcgattacctggcttggtatcagcagaagcccggacaggctcccagactgctgatctacggtgcctctagcagagccacaggcatccccgatagattttctggcagcggctccggcaccgacttcaccctgacaattagcagactgcccgaggacttcgccgtgtactactgccagcagtacgtgtcctactggacctttggcggaggcaccaaggtggaaatcaaaagaacagtggctgccggcggaggcggaagtggaggcggaggatctggcggcggaggctctcaggtgcagctggttgaatctggtggcggagttgtgcagcctggcagaagcctgagactgtcttgtgccgccagcggcttcacctttagcagctatgccatgcactgggtccgacaggcccctggcaaaggacttgaatgggtcgccgtgatctcctacgacggcagcaacaagtattacgccgacagcgtgaagggcagattcaccatcagccgggacaacagcaagaacaccctgtacctccagatgaacagcctgagagccgaggacaccgccgtgtactactgtgccaaagaggccccttactacgccaaggactacatggacgtgtggggcaagggcaccaccgtgacagtttcttctacgcgtgagcagaaactgatctcggaagaggatctggcgaagcccaccacgacgccagcgccgcgaccaccaacaccggcgcccaccatcgcgtcgcagcccctgtccctgcgcccagaggcgtgccggccagcggcggggggcgcagtgcacacgagggggctggacttcgcctgtgacatctacatctgggcgcccttggccgggacttgtggggtccttctcctgtcactggttatcaccctttactgcaaacggggcagaaagaaactcctgtatatattcaaacaaccatttatgagaccagtacaaactactcaagaggaagatggctgtagctgccgatttccagaagaagaagaaggaggatgtgaactgagagtgaagttcagcaggagcgcagacgcccccgcgtaccagcagggccagaaccagctctataacgagctgaatctaggacgaagagaggagtacgatgttttggacaagagacgtggccgggaccctgagatggggggaaagccgagaaggaagaaccctcaggaaggcctgtacaatgaactgcagaaagataagatggcggaggcctacagtgagattgggatgaaaggcgagcgccggaggggcaaggggcacgatggcctttaccagggtctcagtacagccaccaaggacacctacgacgcccttcacatgcaggccctgccccctcgctctagtggctccggcgagggcagaggaagtctactaacctgcggagatgtggaagaaaatcctggcccacatatgaccgagtacaagcccacggtgcgcctcgccacccgcgacgacgtccccagggccgtacgcaccctcgccgccgcgttcgccgactaccccgccacgcgccacaccgtcgatccggaccgccacatcgagcgggtcaccgagctgcaagaactcttcctcacgcgcgtcgggctcgacatcggcaaggtgtgggtcgcggacgacggcgccgcggtggcggtctggaccacgccggagagcgtcgaagcgggggcggtgttcgccgagatcggcccgcgcatggccgagttgagcggttcccggctggccgcgcagcaacagatggaaggcctcctggcgccgcaccggcccaaggagcccgcgtggttcctggccaccgtcggcgtctcgcccgaccaccagggcaagggtctgggcagcgccgtcgtgctccccggagtggaggcggccgagcgcgccggggtgcccgccttcctggagacctccgcgccccgcaacctccccttctacgagcggctcggcttcaccgtcaccgccgacgtcgaggtgcccgaaggaccgcgcacctggtgcatgacccgcaagcccggtgcctga

SEQ ID NO: 8928 - DNA, 2172 bp, Artificial Sequence
  Synthetic Polynucloetide
atggccttaccagtgaccgccttgctcctgccgctggccttgctgctccacgccgccaggccggagatcgtgctgacacagagccctggcacactgtcactgtctccaggcgaaagagccacactgagctgtagagccagccagagcgtgtccagcgattacctggcttggtatcagcagaagcccggacaggctcccagactgctgatctacggtgcctctagcagagccacaggcatccccgatagattttctggcagcggctccggcaccgacttcaccctgacaattagcagactgcccgaggacttcgccgtgtactactgccagcagtacgtgtcctactggacctttggcggaggcaccaaggtggaaatcaaaagaacagtggctgccggcggaggcggaagtggaggcggaggatctggcggcggaggctctcaggtgcagctggttgaatctggtggcggagttgtgcagcctggcagaagcctgagactgtcttgtgccgccagcggcttcacctttagcagctatgccatgcactgggtccgacaggcccctggcaaaggacttgaatgggtcgccgtgatctcctacgacggcagcaacaagtattacgccgacagcgtgaagggcagattcaccatcagccgggacaacagcaagaacaccctgtacctccagatgaacagcctgagagccgaggacaccgccgtgtactactgtgccaaagaggccccttactacgccaaggactacatggacgtgtggggcaagggcaccaccgtgacagtttcttctacgcgtgagcagaaactgatctcggaagaggatctgaaaattgaagttatgtatcctcctccttacctagacaatgagaagagcaatggaaccattatccatgtgaaagggaaacacctttgtccaagtcccctatttcccggaccttctaagcccttttgggtgctggtggtggttgggggagtcctggcttgctatagcttgctagtaacagtggcctttattattttctgggtgaggagtaagaggagcaggctcctgcacagtgactacatgaacatgactccacgccgccccggacccacccgcaagcattaccagccctatgccccaccacgcgacttcgcagcctatcgctccagagtgaagttcagcaggagcgcagacgcccccgcgtaccagcagggccagaaccagctctataacgagctcaatctaggacgaagagaggagtacgatgttttggacaagagacgtggccgggaccctgagatggggggaaagccgagaaggaagaaccctcaggaaggcctgtacaatgaactgcagaaagataagatggcggaggcctacagtgagattgggatgaaaggcgagcgccggaggggcaaggggcacgatggcctttaccagggtctcagtacagccaccaaggacacctacgacgcccttcacatgcaggccctgccccctcgctctagtggctccggcgagggcagaggaagtctactaacctgcggagatgtggaagaaaatcctggcccacatatgaccgagtacaagcccacggtgcgcctcgccacccgcgacgacgtccccagggccgtacgcaccctcgccgccgcgttcgccgactaccccgccacgcgccacaccgtcgatccggaccgccacatcgagcgggtcaccgagctgcaagaactcttcctcacgcgcgtcgggctcgacatcggcaaggtgtgggtcgcggacgacggcgccgcggtggcggtctggaccacgccggagagcgtcgaagcgggggcggtgttcgccgagatcggcccgcgcatggccgagttgagcggttcccggctggccgcgcagcaacagatggaaggcctcctggcgccgcaccggcccaaggagcccgcgtggttcctggccaccgtcggcgtctcgcccgaccaccagggcaagggtctgggcagcgccgtcgtgctccccggagtggaggcggccgagcgcgccggggtgcccgccttcctggagacctccgcgccccgcaacctccccttctacgagcggctcggcttcaccgtcaccgccgacgtcgaggtgcccgaaggaccgcgcacctggtgcatgacccgcaagcccggtgcctga

SEQ ID NO: 8929 - DNA, 1500 bp, Artificial Sequence
  Synthetic Polynucloetide
atggccttaccagtgaccgccttgctcctgccgctggccttgctgctccacgccgccaggccggagatcgtgctgacacagagccctggcacactgtcactgtctccaggcgaaagagccacactgagctgtagagccagccagagcgtgtccagcgattacctggcttggtatcagcagaagcccggacaggctcccagactgctgatctacggtgcctctagcagagccacaggcatccccgatagattttctggcagcggctccggcaccgacttcaccctgacaattagcagactgcccgaggacttcgccgtgtactactgccagcagtacgtgtcctactggacctttggcggaggcaccaaggtggaaatcaaaagaacagtggctgccggcggaggcggaagtggaggcggaggatctggcggcggaggctctcaggtgcagctggttgaatctggtggcggagttgtgcagcctggcagaagcctgagactgtcttgtgccgccagcggcttcacctttagcagctatgccatgcactgggtccgacaggcccctggcaaaggacttgaatgggtcgccgtgatctcctacgacggcagcaacaagtattacgccgacagcgtgaagggcagattcaccatcagccgggacaacagcaagaacaccctgtacctccagatgaacagcctgagagccgaggacaccgccgtgtactactgtgccaaagaggccccttactacgccaaggactacatggacgtgtggggcaagggcaccaccgtgacagtttcttctacgcgtgagcagaaactgatctcggaagaggatctgaaaattgaagttatgtatcctcctccttacctagacaatgagaagagcaatggaaccattatccatgtgaaagggaaacacctttgtccaagtcccctatttcccggaccttctaagcccttttgggtgctggtggtggttgggggagtcctggcttgctatagcttgctagtaacagtggcctttattattttctgggtgaggagtaagaggagcaggctcctgcacagtgactacatgaacatgactccacgccgccccggacccacccgcaagcattaccagccctatgccccaccacgcgacttcgcagcctatcgctccagagtgaagttcagcaggagcgcagacgcccccgcgtaccagcagggccagaaccagctctataacgagctcaatctaggacgaagagaggagtacgatgttttggacaagagacgtggccgggaccctgagatggggggaaagccgagaaggaagaaccctcaggaaggcctgtacaatgaactgcagaaagataagatggcggaggcctacagtgagattgggatgaaaggcgagcgccggaggggcaaggggcacgatggcctttaccagggtctcagtacagccaccaaggacacctacgacgcccttcacatgcaggccctgccccctcgc

SEQ ID NO: 8930 - DNA, 1521 bp, Artificial Sequence
  Synthetic Polynucloetide
atggccttaccagtgaccgccttgctcctgccgctggccttgctgctccacgccgccaggccggagatcgtgctgacacagagccctggcacactgtcactgtctccaggcgaaagagccacactgagctgtagagccagccagagcgtgtccagcgattacctggcttggtatcagcagaagcccggacaggctcccagactgctgatctacggtgcctctagcagagccacaggcatccccgatagattttctggcagcggctccggcaccgacttcaccctgacaattagcagactgcccgaggacttcgccgtgtactactgccagcagtacgtgtcctactggacctttggcggaggcaccaaggtggaaatcaaaagaacagtggctgccggcggaggcggaagtggaggcggaggatctggcggcggaggctctcaggtgcagctggttgaatctggtggcggagttgtgcagcctggcagaagcctgagactgtcttgtgccgccagcggcttcacctttagcagctatgccatgcactgggtccgacaggcccctggcaaaggacttgaatgggtcgccgtgatctcctacgacggcagcaacaagtattacgccgacagcgtgaagggcagattcaccatcagccgggacaacagcaagaacaccctgtacctccagatgaacagcctgagagccgaggacaccgccgtgtactactgtgccaaagaggccccttactacgccaaggactacatggacgtgtggggcaagggcaccaccgtgacagtttcttctacgcgtgagcagaaactgatctcggaagaggatctggcgaagcccaccacgacgccagcgccgcgaccaccaacaccggcgcccaccatcgcgtcgcagcccctgtccctgcgcccagaggcgtgccggccagcggcggggggcgcagtgcacacgagggggctggacttcgcctgtgacatctacatctgggcgcccttggccgggacttgtggggtccttctcctgtcactggttatcaccctttactgcaaacggggcagaaagaaactcctgtatatattcaaacaaccatttatgagaccagtacaaactactcaagaggaagatggctgtagctgccgatttccagaagaagaagaaggaggatgtgaactgagagtgaagttcagcaggagcgcagacgcccccgcgtaccagcagggccagaaccagctctataacgagctgaatctaggacgaagagaggagtacgatgttttggacaagagacgtggccgggaccctgagatggggggaaagccgagaaggaagaaccctcaggaaggcctgtacaatgaactgcagaaagataagatggcggaggcctacagtgagattgggatgaaaggcgagcgccggaggggcaaggggcacgatggcctttaccagggtctcagtacagccaccaaggacacctacgacgcccttcacatgcaggccctgccccctcgctga

SEQ ID NO: 8931 - DNA, 1521 bp, Artificial Sequence
  Synthetic Polynucloetide
atggccttaccagtgaccgccttgctcctgccgctggccttgctgctccacgccgccaggccgcaggtgcagctggttgaatctggtggcggagttgtgcagcctggcagaagcctgagactgtcttgtgccgccagcggcttcacctttagcagctatgccatgcactgggtccgacaggcccctggcaaaggacttgaatgggtcgccgtgatctcctacgacggcagcaacaagtattacgccgacagcgtgaagggcagattcaccatcagccgggacaacagcaagaacaccctgtacctccagatgaacagcctgagagccgaggacaccgccgtgtactactgtgccaaagaggccccttactacgccaaggactacatggacgtgtggggcaagggcaccaccgtgacagtttcttctggcggaggcggaagtggaggcggaggatctggcggcggaggctctgagatcgtgctgacacagagccctggcacactgtcactgtctccaggcgaaagagccacactgagctgtagagccagccagagcgtgtccagcgattacctggcttggtatcagcagaagcccggacaggctcccagactgctgatctacggtgcctctagcagagccacaggcatccccgatagattttctggcagcggctccggcaccgacttcaccctgacaattagcagactgcccgaggacttcgccgtgtactactgccagcagtacgtgtcctactggacctttggcggaggcaccaaggtggaaatcaaaagaacagtggctgccacgcgtgagcagaaactgatctcggaagaggatctggcgaagcccaccacgacgccagcgccgcgaccaccaacaccggcgcccaccatcgcgtcgcagcccctgtccctgcgcccagaggcgtgccggccagcggcggggggcgcagtgcacacgagggggctggacttcgcctgtgacatctacatctgggcgcccttggccgggacttgtggggtccttctcctgtcactggttatcaccctttactgcaaacggggcagaaagaaactcctgtatatattcaaacaaccatttatgagaccagtacaaactactcaagaggaagatggctgtagctgccgatttccagaagaagaagaaggaggatgtgaactgagagtgaagttcagcaggagcgcagacgcccccgcgtaccagcagggccagaaccagctctataacgagctgaatctaggacgaagagaggagtacgatgttttggacaagagacgtggccgggaccctgagatggggggaaagccgagaaggaagaaccctcaggaaggcctgtacaatgaactgcagaaagataagatggcggaggcctacagtgagattgggatgaaaggcgagcgccggaggggcaaggggcacgatggcctttaccagggtctcagtacagccaccaaggacacctacgacgcccttcacatgcaggccctgccccctcgctga

SEQ ID NO: 8932 - DNA, 2760 bp, Artificial Sequence
  Synthetic Polynucloetide
atggccttaccagtgaccgccttgctcctgccgctggccttgctgctccacgccgccaggccggagatcgtgctgacacagagccctggcacactgtcactgtctccaggcgaaagagccacactgagctgtagagccagccagagcgtgtccagcgattacctggcttggtatcagcagaagcccggacaggctcccagactgctgatctacggtgcctctagcagagccacaggcatccccgatagattttctggcagcggctccggcaccgacttcaccctgacaattagcagactgcccgaggacttcgccgtgtactactgccagcagtacgtgtcctactggacctttggcggaggcaccaaggtggaaatcaaaagaacagtggctgccggcggaggcggaagtggaggcggaggatctggcggcggaggctctcaggtgcagctggttgaatctggtggcggagttgtgcagcctggcagaagcctgagactgtcttgtgccgccagcggcttcacctttagcagctatgccatgcactgggtccgacaggcccctggcaaaggacttgaatgggtcgccgtgatctcctacgacggcagcaacaagtattacgccgacagcgtgaagggcagattcaccatcagccgggacaacagcaagaacaccctgtacctccagatgaacagcctgagagccgaggacaccgccgtgtactactgtgccaaagaggccccttactacgccaaggactacatggacgtgtggggcaagggcaccaccgtgacagtttcttctacgcgtgagcagaaactgatctcggaagaggatctggcgaagcccaccacgacgccagcgccgcgaccaccaacaccggcgcccaccatcgcgtcgcagcccctgtccctgcgcccagaggcgtgccggccagcggcggggggcgcagtgcacacgagggggctggacttcgcctgtgacatctacatctgggcgcccttggccgggacttgtggggtccttctcctgtcactggttatcaccctttactgcgggcgcgccagagtgaagttcagcaggagcgcagacgcccccgcgtaccagcagggccagaaccagctctataacgagctgaatctaggacgaagagaggagtacgatgttttggacaagagacgtggccgggaccctgagatggggggaaagccgagaaggaagaaccctcaggaaggcctgtacaatgaactgcagaaagataagatggcggaggcctacagtgagattgggatgaaaggcgagcgccggaggggcaaggggcacgatggcctttaccagggtctcagtacagccaccaaggacacctacgacgcccttcacatgcaggccctgccccctcgctctagaggatctggagcaacaaacttctcactactcaaacaagcaggtgacgtggaggagaatcccgggcctgggatccacatggccacttacgaggttctctgtgaggtggcgcggaaactgggcacggatgacagggaagtggtattgttcctcctaaacgtgttcatacctcaacccacactggcccaattaattggagctcttagagctttaaaggaggagggcaggttaacgtttcccctgttagcggaatgtctgtttcgtgcaggtcgcagagacctcttgcgcgacctgcttcacttagacccgcgttttttagagcgccacctagcgggcacaatgagttatttcagcccttatcagctcactgttctccacgtagacggggagctgtgtgcgagggatattaggtctttgatatttttaagcaaggacactatagggtctcgcagcacaccacagacattcttacactgggtgtactgtatggaaaacttagacctactgggtcccactgacgtggatgccctaatgtcaatgcttagatctttgtcaagagtagacctacagcgccaagtgcaaaccctaatgggccttcacctttccggcccatcacactcccaacactatcgccatacaccactcgagaccgatttctacgactacaaggacgacgatgacaagactagtggctccggcgagggcagaggaagtctactaacctgcggagatgtggaagaaaatcctggcccacatatgaccgagtacaagcccacggtgcgcctcgccacccgcgacgacgtccccagggccgtacgcaccctcgccgccgcgttcgccgactaccccgccacgcgccacaccgtcgatccggaccgccacatcgagcgggtcaccgagctgcaagaactcttcctcacgcgcgtcgggctcgacatcggcaaggtgtgggtcgcggacgacggcgccgcggtggcggtctggaccacgccggagagcgtcgaagcgggggcggtgttcgccgagatcggcccgcgcatggccgagttgagcggttcccggctggccgcgcagcaacagatggaaggcctcctggcgccgcaccggcccaaggagcccgcgtggttcctggccaccgtcggcgtctcgcccgaccaccagggcaagggtctgggcagcgccgtcgtgctccccggagtggaggcggccgagcgcgccggggtgcccgccttcctggagacctccgcgccccgcaacctccccttctacgagcggctcggcttcaccgtcaccgccgacgtcgaggtgcccgaaggaccgcgcacctggtgcatgacccgcaagcccggtgcctga

SEQ ID NO: 8933 - DNA, 2580 bp, Artificial Sequence
  Synthetic Polynucloetide
atggccttaccagtgaccgccttgctcctgccgctggccttgctgctccacgccgccaggccggagatcgtgctgacacagagccctggcacactgtcactgtctccaggcgaaagagccacactgagctgtagagccagccagagcgtgtccagcgattacctggcttggtatcagcagaagcccggacaggctcccagactgctgatctacggtgcctctagcagagccacaggcatccccgatagattttctggcagcggctccggcaccgacttcaccctgacaattagcagactgcccgaggacttcgccgtgtactactgccagcagtacgtgtcctactggacctttggcggaggcaccaaggtggaaatcaaaagaacagtggctgccctcgagatccagaaccctgatcctgccgtgtaccagctgcgggatagcaagagcagcgacaagagcgtgtgtctgttcaccgacttcgacagccagaccaacgtgtcccagagcaaggactccgacgtgtacatcaccgataagtgcgtgctggacatgcggagcatggacttcaagagcaactccgccgtggcctggtccaacaagtccgatttcgcctgcgccaacgccttcaacaacagcattatccccgaggacacattcttcccaagcagcgacgtgccctgcgacgtgaagctggtggaaaagagcttcgagacagacaccaacctgaacttccagaacctgagcgtgatcggcttcagaatcctgctgctgaaagtggccggctttaacctgctgatgaccctgcggctgtggtccagccgcgccaagagaagcggatctggcgtgaagcagaccctgaatttcgacctgctgaagctggctggcgacgtggaatccaacccaggccctactagtatggactggatttggcgcatccttttccttgtcggcgctgctaccggcgcgcattccttcgaacaggtgcagctggttgaatctggtggcggagttgtgcagcctggcagaagcctgagactgtcttgtgccgccagcggcttcacctttagcagctatgccatgcactgggtccgacaggcccctggcaaaggacttgaatgggtcgccgtgatctcctacgacggcagcaacaagtattacgccgacagcgtgaagggcagattcaccatcagccgggacaacagcaagaacaccctgtacctccagatgaacagcctgagagccgaggacaccgccgtgtactactgtgccaaagaggccccttactacgccaaggactacatggacgtgtggggcaagggcaccaccgtgacagtttcttctacgcgtgaggacctgaagaacgtgttcccacctgaggtggccgtgttcgagcctagcaaggccgagatcgcccacacccagaaagccaccctcgtgtgcctggctaccggcttctaccccgaccatgtggaactgtcttggtgggtcaacggcaaagaggtgcacagcggcgtgtgtaccgacccccagccactgaaagaacagcccgccctgaacgacagccggtactgcctgagcagcagactgagagtgtccgccaccttctggcagaacccccggaaccacttcagatgccaggtgcagttctacggcctgagcgagaacgacgagtggacccaggacagagccaagcccgtgacccagatcgtgtctgccgaagcctggggcagagccgattgcggcatcaccagcgccagctaccaccagggcgtgctgagcgccaccatcctgtacgagatcctgctgggcaaggccaccctgtacgccgtgctggtgtctgccctggtgctgatggctatggtcaagcggaaggacagccggggaagggccaagcgatctggatctggagcaacaaacttctcactactcaaacaagcaggtgacgtggaggagaatcccgggccttctagaggccatatgaccgagtacaagcccacggtgcgcctcgccacccgcgacgacgtccccagggccgtacgcaccctcgccgccgcgttcgccgactaccccgccacgcgccacaccgtcgatccggaccgccacatcgagcgggtcaccgagctgcaagaactcttcctcacgcgcgtcgggctcgacatcggcaaggtgtgggtcgcggacgacggcgccgcggtggcggtctggaccacgccggagagcgtcgaagcgggggcggtgttcgccgagatcggcccgcgcatggccgagttgagcggttcccggctggccgcgcagcaacagatggaaggcctcctggcgccgcaccggcccaaggagcccgcgtggttcctggccaccgtcggcgtctcgcccgaccaccagggcaagggtctgggcagcgccgtcgtgctccccggagtggaggcggccgagcgcgccggggtgcccgccttcctggagacctccgcgccccgcaacctccccttctacgagcggctcggcttcaccgtcaccgccgacgtcgaggtgcccgaaggaccgcgcacctggtgcatgacccgcaagcccggtgcctga

SEQ ID NO: 8934 - DNA, 2577 bp, Artificial Sequence
  Synthetic Polynucloetide
atggccttaccagtgaccgccttgctcctgccgctggccttgctgctccacgccgccaggccggagatcgtgctgacacagagccctggcacactgtcactgtctccaggcgaaagagccacactgagctgtagagccagccagagcgtgtccagcgattacctggcttggtatcagcagaagcccggacaggctcccagactgctgatctacggtgcctctagcagagccacaggcatccccgatagattttctggcagcggctccggcaccgacttcaccctgacaattagcagactgcccgaggacttcgccgtgtactactgccagcagtacgtgtcctactggacctttggcggaggcaccaaggtggaaatcaaaagaacagtggctgccctcgaggacctgaagaacgtgttcccacctgaggtggccgtgttcgagcctagcaaggccgagatcgcccacacccagaaagccaccctcgtgtgcctggctaccggcttctaccccgaccatgtggaactgtcttggtgggtcaacggcaaagaggtgcacagcggcgtgtgtaccgacccccagccactgaaagaacagcccgccctgaacgacagccggtactgcctgagcagcagactgagagtgtccgccaccttctggcagaacccccggaaccacttcagatgccaggtgcagttctacggcctgagcgagaacgacgagtggacccaggacagagccaagcccgtgacccagatcgtgtctgccgaagcctggggcagagccgattgcggcatcaccagcgccagctaccaccagggcgtgctgagcgccaccatcctgtacgagatcctgctgggcaaggccaccctgtacgccgtgctggtgtctgccctggtgctgatggctatggtcaagcggaaggacagccggggaagggccaagcgatctggatctggagcaacaaacttctcactactcaaacaagcaggtgacgtggaggagaatcccgggcctactagtatggactggatttggcgcatccttttccttgtcggcgctgctaccggcgcgcattccttcgaacaggtgcagctggttgaatctggtggcggagttgtgcagcctggcagaagcctgagactgtcttgtgccgccagcggcttcacctttagcagctatgccatgcactgggtccgacaggcccctggcaaaggacttgaatgggtcgccgtgatctcctacgacggcagcaacaagtattacgccgacagcgtgaagggcagattcaccatcagccgggacaacagcaagaacaccctgtacctccagatgaacagcctgagagccgaggacaccgccgtgtactactgtgccaaagaggccccttactacgccaaggactacatggacgtgtggggcaagggcaccaccgtgacagtttcttctacgcgtatccagaaccctgatcctgccgtgtaccagctgcgggatagcaagagcagcgacaagagcgtgtgtctgttcaccgacttcgacagccagaccaacgtgtcccagagcaaggactccgacgtgtacatcaccgataagtgcgtgctggacatgcggagcatggacttcaagagcaactccgccgtggcctggtccaacaagtccgatttcgcctgcgccaacgccttcaacaacagcattatccccgaggacacattcttcccaagcagcgacgtgccctgcgacgtgaagctggtggaaaagagcttcgagacagacaccaacctgaacttccagaacctgagcgtgatcggcttcagaatcctgctgctgaaagtggccggctttaacctgctgatgaccctgcggctgtggtccagccgcgccaagagaagcggatctggcgtgaagcagaccctgaatttcgacctgctgaagctggctggcgacgtggaatccaacccaggcccttctagaggccatatgaccgagtacaagcccacggtgcgcctcgccacccgcgacgacgtccccagggccgtacgcaccctcgccgccgcgttcgccgactaccccgccacgcgccacaccgtcgatccggaccgccacatcgagcgggtcaccgagctgcaagaactcttcctcacgcgcgtcgggctcgacatcggcaaggtgtgggtcgcggacgacggcgccgcggtggcggtctggaccacgccggagagcgtcgaagcgggggcggtgttcgccgagatcggcccgcgcatggccgagttgagcggttcccggctggccgcgcagcaacagatggaaggcctcctggcgccgcaccggcccaaggagcccgcgtggttcctggccaccgtcggcgtctcgcccgaccaccagggcaagggtctgggcagcgccgtcgtgctccccggagtggaggcggccgagcgcgccggggtgcccgccttcctggagacctccgcgccccgcaacctccccttctacgagcggctcggcttcaccgtcaccgccgacgtcgaggtgcccgaaggaccgcgcacctggtgcatgacccgcaagcccggtgcctga

SEQ ID NO: 8935 - DNA, 1875 bp, Artificial Sequence
  Synthetic Polynucloetide
atggccttaccagtgaccgccttgctcctgccgctggccttgctgctccacgccgccaggccggagatcgtgctgacacagagccctggcacactgtcactgtctccaggcgaaagagccacactgagctgtagagccagccagagcgtgtccagcgattacctggcttggtatcagcagaagcccggacaggctcccagactgctgatctacggtgcctctagcagagccacaggcatccccgatagattttctggcagcggctccggcaccgacttcaccctgacaattagcagactgcccgaggacttcgccgtgtactactgccagcagtacgtgtcctactggacctttggcggaggcaccaaggtggaaatcaaaagaacagtggctgccctcgaggacctgaagaacgtgttcccacctgaggtggccgtgttcgagcctagcgaggccgagatcagccacacccagaaagccaccctcgtgtgcctggctaccggcttctaccccgaccatgtggaactgtcttggtgggtcaacggcaaagaggtgcacagcggcgtgtgtaccgacccccagccactgaaagaacagcccgccctgaacgacagccggtactgcctgagcagcagactgagagtgtccgccaccttctggcagaacccccggaaccacttcagatgccaggtgcagttctacggcctgagcgagaacgacgagtggacccaggacagagccaagcccgtgacccagatcgtgtctgccgaagcctggggcagagccgattgcggctttaccagcgagagctaccagcagggcgtgctgagcgccaccatcctgtacgagatcctgctgggcaaggccaccctgtacgccgtgctggtgtctgccctggtgctgatggctatggtcaagcggaaggacagccggggaagggccaagcgatctggatctggagcaacaaacttctcactactcaaacaagcaggtgacgtggaggagaatcccgggcctactagtatggactggatttggcgcatccttttccttgtcggcgctgctaccggcgcgcattccttcgaacaggtgcagctggttgaatctggtggcggagttgtgcagcctggcagaagcctgagactgtcttgtgccgccagcggcttcacctttagcagctatgccatgcactgggtccgacaggcccctggcaaaggacttgaatgggtcgccgtgatctcctacgacggcagcaacaagtattacgccgacagcgtgaagggcagattcaccatcagccgggacaacagcaagaacaccctgtacctccagatgaacagcctgagagccgaggacaccgccgtgtactactgtgccaaagaggccccttactacgccaaggactacatggacgtgtggggcaagggcaccaccgtgacagtttcttctacgcgtatccagaaccctgatcctgccgtgtaccagctgcgggatagcaagagcagcgacaagagcgtgtgtctgttcaccgacttcgacagccagaccaacgtgtcccagagcaaggactccgacgtgtacatcaccgataagtgcgtgctggacatgcggagcatggacttcaagagcaactccgccgtggcctggtccaacaagtccgatttcgcctgcgccaacgccttcaacaacagcattatccccgaggacacattcttcccaagccccgagagcagctgcgacgtgaagctggtggaaaagagcttcgagacagacaccaacctgaacttccagaacctgagcgtgatcggcttcagaatcctgctgctgaaagtggccggctttaacctgctgatgaccctgcggctgtggtccagc

SEQ ID NO: 8936 - DNA, 2550 bp, Artificial Sequence
  Synthetic Polynucloetide
atggccttaccagtgaccgccttgctcctgccgctggccttgctgctccacgccgccaggccggagatcgtgctgacacagagccctggcacactgtcactgtctccaggcgaaagagccacactgagctgtagagccagccagagcgtgtccagcgattacctggcttggtatcagcagaagcccggacaggctcccagactgctgatctacggtgcctctagcagagccacaggcatccccgatagattttctggcagcggctccggcaccgacttcaccctgacaattagcagactgcccgaggacttcgccgtgtactactgccagcagtacgtgtcctactggacctttggcggaggcaccaaggtggaaatcaaaagaacagtggctgccctcgaggacctgaagaacgtgttcccacctgaggtggccgtgttcgagcctagcgaggccgagatcagccacacccagaaagccaccctcgtgtgcctggctaccggcttctaccccgaccatgtggaactgtcttggtgggtcaacggcaaagaggtgcacagcggcgtgtgtaccgacccccagccactgaaagaacagcccgccctgaacgacagccggtactgcctgagcagcagactgagagtgtccgccaccttctggcagaacccccggaaccacttcagatgccaggtgcagttctacggcctgagcgagaacgacgagtggacccaggacagagccaagcccgtgacccagatcgtgtctgccgaagcctggggcagagccgattgcggctttaccagcgagagctaccagcagggcgtgctgagcgccaccatcctgtacgagatcctgctgggcaaggccaccctgtacgccgtgctggtgtctgccctggtgctgatggctatggtcaagcggaaggacagccggggaagggccaagcgatctggatctggagcaacaaacttctcactactcaaacaagcaggtgacgtggaggagaatcccgggcctactagtatggactggatttggcgcatccttttccttgtcggcgctgctaccggcgcgcattccttcgaacaggtgcagctggttgaatctggtggcggagttgtgcagcctggcagaagcctgagactgtcttgtgccgccagcggcttcacctttagcagctatgccatgcactgggtccgacaggcccctggcaaaggacttgaatgggtcgccgtgatctcctacgacggcagcaacaagtattacgccgacagcgtgaagggcagattcaccatcagccgggacaacagcaagaacaccctgtacctccagatgaacagcctgagagccgaggacaccgccgtgtactactgtgccaaagaggccccttactacgccaaggactacatggacgtgtggggcaagggcaccaccgtgacagtttcttctacgcgtatccagaaccctgatcctgccgtgtaccagctgcgggatagcaagagcagcgacaagagcgtgtgtctgttcaccgacttcgacagccagaccaacgtgtcccagagcaaggactccgacgtgtacatcaccgataagtgcgtgctggacatgcggagcatggacttcaagagcaactccgccgtggcctggtccaacaagtccgatttcgcctgcgccaacgccttcaacaacagcattatccccgaggacacattcttcccaagccccgagagcagctgcgacgtgaagctggtggaaaagagcttcgagacagacaccaacctgaacttccagaacctgagcgtgatcggcttcagaatcctgctgctgaaagtggccggctttaacctgctgatgaccctgcggctgtggtccagccgcgccaagagaagcggatctggcgtgaagcagaccctgaatttcgacctgctgaagctggctggcgacgtggaatccaacccaggcccttctagaggcgggatccacaccatggctacctacgaggtgctgtgcgaggtggcaagaaagctgggcaccgacgacagagaagtggtgctgttcctgctgaacgtgttcatccctcagcctacactggcccagctgatcggtgcactgagagccctgaaagaggaaggccggctgacctttcctctgctggccgaatgcctgttcagagccggaagaagggatctgctgcgggacctgctgcatctggaccccagatttctggaaagacacctggccggcaccatgagctacttcagcccttaccagctgaccgtgctgcacgttgacggcgaactgtgcgccagagatattcggagcctgatcttcctgagcaaggacaccatcggcagccggtctacccctcagacatttctgcactgggtgtactgcatggaaaacctggacctgctcggccccacagatgtggatgccctgatgtccatgctgagaagcctgagcagagtggacctccagagacaggtgcagacactgatgggactgcacctgagcggacctagccacagccagcactacagacacacccct

SEQ ID NO: 8937 - DNA, 1887 bp, Artificial Sequence
  Synthetic Polynucloetide
atggccttaccagtgaccgccttgctcctgccgctggccttgctgctccacgccgccaggccggagatcgtgctgacacagagccctggcacactgtcactgtctccaggcgaaagagccacactgagctgtagagccagccagagcgtgtccagcgattacctggcttggtatcagcagaagcccggacaggctcccagactgctgatctacggtgcctctagcagagccacaggcatccccgatagattttctggcagcggctccggcaccgacttcaccctgacaattagcagactgcccgaggacttcgccgtgtactactgccagcagtacgtgtcctactggacctttggcggaggcaccaaggtggaaatcaaaagaacagtggctgccctcgagatccagaaccctgatcctgccgtgtaccagctgcgggatagcaagagcagcgacaagagcgtgtgtctgttcaccgacttcgacagccagaccaacgtgtcccagagcaaggactccgacgtgtacatcaccgataagtgcgtgctggacatgcggagcatggacttcaagagcaactccgccgtggcctggtccaacaagtccgatttcgcctgcgccaacgccttcaacaacagcattatccccgaggacacattcttcccaagccccgagagcagctgcgacgtgaagctggtggaaaagagcttcgagacagacaccaacctgaacttccagaacctgagcgtgatcggcttcagaatcctgctgctgaaagtggccggctttaacctgctgatgaccctgcggctgtggtccagccgcgccaagagaagcggatctggcgtgaagcagaccctgaatttcgacctgctgaagctggctggcgacgtggaatccaacccaggccctactagtatggactggatttggcgcatccttttccttgtcggcgctgctaccggcgcgcattccttcgaacaggtgcagctggttgaatctggtggcggagttgtgcagcctggcagaagcctgagactgtcttgtgccgccagcggcttcacctttagcagctatgccatgcactgggtccgacaggcccctggcaaaggacttgaatgggtcgccgtgatctcctacgacggcagcaacaagtattacgccgacagcgtgaagggcagattcaccatcagccgggacaacagcaagaacaccctgtacctccagatgaacagcctgagagccgaggacaccgccgtgtactactgtgccaaagaggccccttactacgccaaggactacatggacgtgtggggcaagggcaccaccgtgacagtttcttctacgcgtgaggacctgaagaacgtgttcccacctgaggtggccgtgttcgagcctagcgaggccgagatcagccacacccagaaagccaccctcgtgtgcctggctaccggcttctaccccgaccatgtggaactgtcttggtgggtcaacggcaaagaggtgcacagcggcgtgtgtaccgacccccagccactgaaagaacagcccgccctgaacgacagccggtactgcctgagcagcagactgagagtgtccgccaccttctggcagaacccccggaaccacttcagatgccaggtgcagttctacggcctgagcgagaacgacgagtggacccaggacagagccaagcccgtgacccagatcgtgtctgccgaagcctggggcagagccgattgcggctttaccagcgagagctaccagcagggcgtgctgagcgccaccatcctgtacgagatcctgctgggcaaggccaccctgtacgccgtgctggtgtctgccctggtgctgatggctatggtcaagcggaaggacagccgggga

SEQ ID NO: 8938 - DNA, 2553 bp, Artificial Sequence
  Synthetic Polynucloetide
atggccttaccagtgaccgccttgctcctgccgctggccttgctgctccacgccgccaggccggagatcgtgctgacacagagccctggcacactgtcactgtctccaggcgaaagagccacactgagctgtagagccagccagagcgtgtccagcgattacctggcttggtatcagcagaagcccggacaggctcccagactgctgatctacggtgcctctagcagagccacaggcatccccgatagattttctggcagcggctccggcaccgacttcaccctgacaattagcagactgcccgaggacttcgccgtgtactactgccagcagtacgtgtcctactggacctttggcggaggcaccaaggtggaaatcaaaagaacagtggctgccctcgagatccagaaccctgatcctgccgtgtaccagctgcgggatagcaagagcagcgacaagagcgtgtgtctgttcaccgacttcgacagccagaccaacgtgtcccagagcaaggactccgacgtgtacatcaccgataagtgcgtgctggacatgcggagcatggacttcaagagcaactccgccgtggcctggtccaacaagtccgatttcgcctgcgccaacgccttcaacaacagcattatccccgaggacacattcttcccaagccccgagagcagctgcgacgtgaagctggtggaaaagagcttcgagacagacaccaacctgaacttccagaacctgagcgtgatcggcttcagaatcctgctgctgaaagtggccggctttaacctgctgatgaccctgcggctgtggtccagccgcgccaagagaagcggatctggcgtgaagcagaccctgaatttcgacctgctgaagctggctggcgacgtggaatccaacccaggccctactagtatggactggatttggcgcatccttttccttgtcggcgctgctaccggcgcgcattccttcgaacaggtgcagctggttgaatctggtggcggagttgtgcagcctggcagaagcctgagactgtcttgtgccgccagcggcttcacctttagcagctatgccatgcactgggtccgacaggcccctggcaaaggacttgaatgggtcgccgtgatctcctacgacggcagcaacaagtattacgccgacagcgtgaagggcagattcaccatcagccgggacaacagcaagaacaccctgtacctccagatgaacagcctgagagccgaggacaccgccgtgtactactgtgccaaagaggccccttactacgccaaggactacatggacgtgtggggcaagggcaccaccgtgacagtttcttctacgcgtgaggacctgaagaacgtgttcccacctgaggtggccgtgttcgagcctagcgaggccgagatcagccacacccagaaagccaccctcgtgtgcctggctaccggcttctaccccgaccatgtggaactgtcttggtgggtcaacggcaaagaggtgcacagcggcgtgtgtaccgacccccagccactgaaagaacagcccgccctgaacgacagccggtactgcctgagcagcagactgagagtgtccgccaccttctggcagaacccccggaaccacttcagatgccaggtgcagttctacggcctgagcgagaacgacgagtggacccaggacagagccaagcccgtgacccagatcgtgtctgccgaagcctggggcagagccgattgcggctttaccagcgagagctaccagcagggcgtgctgagcgccaccatcctgtacgagatcctgctgggcaaggccaccctgtacgccgtgctggtgtctgccctggtgctgatggctatggtcaagcggaaggacagccggggaagggccaagcgatctggatctggagcaacaaacttctcactactcaaacaagcaggtgacgtggaggagaatcccgggccttctagaggcgggatccacaccatggctacctacgaggtgctgtgcgaggtggcaagaaagctgggcaccgacgacagagaagtggtgctgttcctgctgaacgtgttcatccctcagcctacactggcccagctgatcggtgcactgagagccctgaaagaggaaggccggctgacctttcctctgctggccgaatgcctgttcagagccggaagaagggatctgctgcgggacctgctgcatctggaccccagatttctggaaagacacctggccggcaccatgagctacttcagcccttaccagctgaccgtgctgcacgttgacggcgaactgtgcgccagagatattcggagcctgatcttcctgagcaaggacaccatcggcagccggtctacccctcagacatttctgcactgggtgtactgcatggaaaacctggacctgctcggccccacagatgtggatgccctgatgtccatgctgagaagcctgagcagagtggacctccagagacaggtgcagacactgatgggactgcacctgagcggacctagccacagccagcactacagacacacccct

SEQ ID NO: 8939 - DNA, 2712 bp, Artificial Sequence
  Synthetic Polynucloetide
atggccttaccagtgaccgccttgctcctgccgctggccttgctgctccacgccgccaggccgctcgaggggaaaccaattcccaaccctcttctgggactggattcaaccggcagcggcgaggacctgaagaacgtgttcccacctgaggtggccgtgttcgagcctagcaaggccgagatcgcccacacccagaaagccaccctcgtgtgcctggctaccggcttctaccccgaccatgtggaactgtcttggtgggtcaacggcaaagaggtgcacagcggcgtgtgtaccgacccccagccactgaaagaacagcccgccctgaacgacagccggtactgcctgagcagcagactgagagtgtccgccaccttctggcagaacccccggaaccacttcagatgccaggtgcagttctacggcctgagcgagaacgacgagtggacccaggacagagccaagcccgtgacccagatcgtgtctgccgaagcctggggcagagccgattgcggcatcaccagcgccagctaccaccagggcgtgctgagcgccaccatcctgtacgagatcctgctgggcaaggccaccctgtacgccgtgctggtgtctgccctggtgctgatggctatggtcaagcggaaggacagccggggaagggccaagcgatctggatctggagcaacaaacttctcactactcaaacaagcaggtgacgtggaggagaatcccgggcctactagcatggccttaccagtgaccgccttgctcctgccgctggccttgctgctccacgccgccaggccggagatcgtgctgacacagagccctggcacactgtcactgtctccaggcgaaagagccacactgagctgtagagccagccagagcgtgtccagcgattacctggcttggtatcagcagaagcccggacaggctcccagactgctgatctacggtgcctctagcagagccacaggcatccccgatagattttctggcagcggctccggcaccgacttcaccctgacaattagcagactgcccgaggacttcgccgtgtactactgccagcagtacgtgtcctactggacctttggcggaggcaccaaggtggaaatcaaaagaacagtggctgccggcggaggcggaagtggaggcggaggatctggcggcggaggctctcaggtgcagctggttgaatctggtggcggagttgtgcagcctggcagaagcctgagactgtcttgtgccgccagcggcttcacctttagcagctatgccatgcactgggtccgacaggcccctggcaaaggacttgaatgggtcgccgtgatctcctacgacggcagcaacaagtattacgccgacagcgtgaagggcagattcaccatcagccgggacaacagcaagaacaccctgtacctccagatgaacagcctgagagccgaggacaccgccgtgtactactgtgccaaagaggccccttactacgccaaggactacatggacgtgtggggcaagggcaccaccgtgacagtttcttctacgcgtgagcagaaactgatctcggaagaggatgggagcggcatccagaaccctgatcctgccgtgtaccagctgcgggatagcaagagcagcgacaagagcgtgtgtctgttcaccgacttcgacagccagaccaacgtgtcccagagcaaggactccgacgtgtacatcaccgataagtgcgtgctggacatgcggagcatggacttcaagagcaactccgccgtggcctggtccaacaagtccgatttcgcctgcgccaacgccttcaacaacagcattatccccgaggacacattcttcccaagcagcgacgtgccctgcgacgtgaagctggtggaaaagagcttcgagacagacaccaacctgaacttccagaacctgagcgtgatcggcttcagaatcctgctgctgaaagtggccggctttaacctgctgatgaccctgcggctgtggtccagccgcgccaagagaagcggatctggcgtgaagcagaccctgaatttcgacctgctgaagctggctggcgacgtggaatccaacccaggcccttctagaggccatatgaccgagtacaagcccacggtgcgcctcgccacccgcgacgacgtccccagggccgtacgcaccctcgccgccgcgttcgccgactaccccgccacgcgccacaccgtcgatccggaccgccacatcgagcgggtcaccgagctgcaagaactcttcctcacgcgcgtcgggctcgacatcggcaaggtgtgggtcgcggacgacggcgccgcggtggcggtctggaccacgccggagagcgtcgaagcgggggcggtgttcgccgagatcggcccgcgcatggccgagttgagcggttcccggctggccgcgcagcaacagatggaaggcctcctggcgccgcaccggcccaaggagcccgcgtggttcctggccaccgtcggcgtctcgcccgaccaccagggcaagggtctgggcagcgccgtcgtgctccccggagtggaggcggccgagcgcgccggggtgcccgccttcctggagacctccgcgccccgcaacctccccttctacgagcggctcggcttcaccgtcaccgccgacgtcgaggtgcccgaaggaccgcgcacctggtgcatgacccgcaagcccggtgcctga

SEQ ID NO: 8940 - DNA, 2715 bp, Artificial Sequence
  Synthetic Polynucloetide
atggccttaccagtgaccgccttgctcctgccgctggccttgctgctccacgccgccaggccgctcgagcagaaactgatctcggaagaggatctgggctccggcgatcgccctgatcctgccgtgtaccagctgcgggatagcaagagcagcgacaagagcgtgtgtctgttcaccgacttcgacagccagaccaacgtgtcccagagcaaggactccgacgtgtacatcaccgataagtgcgtgctggacatgcggagcatggacttcaagagcaactccgccgtggcctggtccaacaagtccgatttcgcctgcgccaacgccttcaacaacagcattatccccgaggacacattcttcccaagccccgagagcagctgcgacgtgaagctggtggaaaagagcttcgagacagacaccaacctgaacttccagaacctgagcgtgatcggcttcagaatcctgctgctgaaagtggccggctttaacctgctgatgaccctgcggctgtggtccagctctagtcgcgccaagagaagcggatctggcgtgaagcagaccctgaatttcgacctgctgaagctggctggcgacgtggaatccaacccaggccccactagcatggccttaccagtgaccgccttgctcctgccgctggccttgctgctccacgccgccaggccggagatcgtgctgacacagagccctggcacactgtcactgtctccaggcgaaagagccacactgagctgtagagccagccagagcgtgtccagcgattacctggcttggtatcagcagaagcccggacaggctcccagactgctgatctacggtgcctctagcagagccacaggcatccccgatagattttctggcagcggctccggcaccgacttcaccctgacaattagcagactgcccgaggacttcgccgtgtactactgccagcagtacgtgtcctactggacctttggcggaggcaccaaggtggaaatcaaaagaacagtggctgccggcggaggcggaagtggaggcggaggatctggcggcggaggctctcaggtgcagctggttgaatctggtggcggagttgtgcagcctggcagaagcctgagactgtcttgtgccgccagcggcttcacctttagcagctatgccatgcactgggtccgacaggcccctggcaaaggacttgaatgggtcgccgtgatctcctacgacggcagcaacaagtattacgccgacagcgtgaagggcagattcaccatcagccgggacaacagcaagaacaccctgtacctccagatgaacagcctgagagccgaggacaccgccgtgtactactgtgccaaagaggccccttactacgccaaggactacatggacgtgtggggcaagggcaccaccgtgacagtttcttctacgcgtgggaaaccaattcccaaccctcttctgggactggattcaaccggcagcggcgaggacctgaagaacgtgttcccacctgaggtggccgtgttcgagcctagcgaggccgagatcagccacacccagaaagccaccctcgtgtgcctggctaccggcttctaccccgaccatgtggaactgtcttggtgggtcaacggcaaagaggtgcacagcggcgtgtgtaccgacccccagccactgaaagaacagcccgccctgaacgacagccggtactgcctgagcagcagactgagagtgtccgccaccttctggcagaacccccggaaccacttcagatgccaggtgcagttctacggcctgagcgagaacgacgagtggacccaggacagagccaagcccgtgacccagatcgtgtctgccgaagcctggggcagagccgattgcggctttaccagcgagagctaccagcagggcgtgctgagcgccaccatcctgtacgagatcctgctgggcaaggccaccctgtacgccgtgctggtgtctgccctggtgctgatggctatggtcaagcggaaggacagccggggaagggccaagcgatctggatctggagcaacaaacttctcactactcaaacaagcaggtgacgtggaggagaatcccgggccttctagaggccatatgaccgagtacaagcccacggtgcgcctcgccacccgcgacgacgtccccagggccgtacgcaccctcgccgccgcgttcgccgactaccccgccacgcgccacaccgtcgatccggaccgccacatcgagcgggtcaccgagctgcaagaactcttcctcacgcgcgtcgggctcgacatcggcaaggtgtgggtcgcggacgacggcgccgcggtggcggtctggaccacgccggagagcgtcgaagcgggggcggtgttcgccgagatcggcccgcgcatggccgagttgagcggttcccggctggccgcgcagcaacagatggaaggcctcctggcgccgcaccggcccaaggagcccgcgtggttcctggccaccgtcggcgtctcgcccgaccaccagggcaagggtctgggcagcgccgtcgtgctccccggagtggaggcggccgagcgcgccggggtgcccgccttcctggagacctccgcgccccgcaacctccccttctacgagcggctcggcttcaccgtcaccgccgacgtcgaggtgcccgaaggaccgcgcacctggtgcatgacccgcaagcccggtgcctga

SEQ ID NO: 8941 - DNA, 2577 bp, Artificial Sequence
  Synthetic Polynucloetide
atggccttaccagtgaccgccttgctcctgccgctggccttgctgctccacgccgccaggccggagatcgtgctgacacagagccctggcacactgtcactgtctccaggcgaaagagccacactgagctgtagagccagccagagcgtgtccagcgattacctggcttggtatcagcagaagcccggacaggctcccagactgctgatctacggtgcctctagcagagccacaggcatccccgatagattttctggcagcggctccggcaccgacttcaccctgacaattagcagactgcccgaggacttcgccgtgtactactgccagcagtacgtgtcctactggacctttggcggaggcaccaaggtggaaatcaaaagaacagtggctgccctcgaggacctgaagaacgtgttcccacctgaggtggccgtgttcgagcctagcgaggccgagatcagccacacccagaaagccaccctcgtgtgcctggctaccggcttctaccccgaccatgtggaactgtcttggtgggtcaacggcaaagaggtgcacagcggcgtgtctaccgacccccagccactgaaagaacagcccgccctgaacgacagccggtactgcctgagcagcagactgagagtgtccgccaccttctggcagaacccccggaaccacttcagatgccaggtgcagttctacggcctgagcgagaacgacgagtggacccaggacagagccaagcccgtgacccagatcgtgtctgccgaagcctggggcagagccgattgcggctttaccagcgagagctaccagcagggcgtgctgagcgccaccatcctgtacgagatcctgctgggcaaggccaccctgtacgccgtgctggtgtctgccctggtgctgatggctatggtcaagcggaaggacagccggggaagggccaagcgatctggatctggagcaacaaacttctcactactcaaacaagcaggtgacgtggaggagaatcccgggcctactagtatggactggatttggcgcatccttttccttgtcggcgctgctaccggcgcgcattccttcgaacaggtgcagctggttgaatctggtggcggagttgtgcagcctggcagaagcctgagactgtcttgtgccgccagcggcttcacctttagcagctatgccatgcactgggtccgacaggcccctggcaaaggacttgaatgggtcgccgtgatctcctacgacggcagcaacaagtattacgccgacagcgtgaagggcagattcaccatcagccgggacaacagcaagaacaccctgtacctccagatgaacagcctgagagccgaggacaccgccgtgtactactgtgccaaagaggccccttactacgccaaggactacatggacgtgtggggcaagggcaccaccgtgacagtttcttctacgcgtatccagaaccctgatcctgccgtgtaccagctgcgggatagcaagagcagcgacaagagcgtgtgtctgttcaccgacttcgacagccagaccaacgtgtcccagagcaaggactccgacgtgtacatcaccgataagaccgtgctggacatgcggagcatggacttcaagagcaactccgccgtggcctggtccaacaagtccgatttcgcctgcgccaacgccttcaacaacagcattatccccgaggacacattcttcccaagccccgagagcagctgcgacgtgaagctggtggaaaagagcttcgagacagacaccaacctgaacttccagaacctgagcgtgatcggcttcagaatcctgctgctgaaagtggccggctttaacctgctgatgaccctgcggctgtggtccagccgcgccaagagaagcggatctggcgtgaagcagaccctgaatttcgacctgctgaagctggctggcgacgtggaatccaacccaggcccttctagaggccatatgaccgagtacaagcccacggtgcgcctcgccacccgcgacgacgtccccagggccgtacgcaccctcgccgccgcgttcgccgactaccccgccacgcgccacaccgtcgatccggaccgccacatcgagcgggtcaccgagctgcaagaactcttcctcacgcgcgtcgggctcgacatcggcaaggtgtgggtcgcggacgacggcgccgcggtggcggtctggaccacgccggagagcgtcgaagcgggggcggtgttcgccgagatcggcccgcgcatggccgagttgagcggttcccggctggccgcgcagcaacagatggaaggcctcctggcgccgcaccggcccaaggagcccgcgtggttcctggccaccgtcggcgtctcgcccgaccaccagggcaagggtctgggcagcgccgtcgtgctccccggagtggaggcggccgagcgcgccggggtgcccgccttcctggagacctccgcgccccgcaacctccccttctacgagcggctcggcttcaccgtcaccgccgacgtcgaggtgcccgaaggaccgcgcacctggtgcatgacccgcaagcccggtgcctga

SEQ ID NO: 8942 - DNA, 2823 bp, Artificial Sequence
  Synthetic Polynucloetide
atggccttaccagtgaccgccttgctcctgccgctggccttgctgctccacgccgccaggccggagatcgtgctgacacagagccctggcacactgtcactgtctccaggcgaaagagccacactgagctgtagagccagccagagcgtgtccagcgattacctggcttggtatcagcagaagcccggacaggctcccagactgctgatctacggtgcctctagcagagccacaggcatccccgatagattttctggcagcggctccggcaccgacttcaccctgacaattagcagactgcccgaggacttcgccgtgtactactgccagcagtacgtgtcctactggacctttggcggaggcaccaaggtggaaatcaaaagaacagtggctgccctcgaggacctgaagaacgtgttcccacctgaggtggccgtgttcgagcctagcgaggccgagatcagccacacccagaaagccaccctcgtgtgcctggctaccggcttctaccccgaccatgtggaactgtcttggtgggtcaacggcaaagaggtgcacagcggcgtgtctaccgacccccagccactgaaagaacagcccgccctgaacgacagccggtactgcctgagcagcagactgagagtgtccgccaccttctggcagaacccccggaaccacttcagatgccaggtgcagttctacggcctgagcgagaacgacgagtggacccaggacagagccaagcccgtgacccagatcgtgtctgccgaagcctggggcagagccgattgcggctttaccagcgagagctaccagcagggcgtgctgagcgccaccatcctgtacgagatcctgctgggcaaggccaccctgtacgccgtgctggtgtctgccctggtgctgatggctatggtcaagcggaaggacagccggggaagggccaagcgatctggatctggagcaacaaacttctcactactcaaacaagcaggtgacgtggaggagaatcccgggcctactagtatggactggatttggcgcatccttttccttgtcggcgctgctaccggcgcgcattccttcgaacaggtgcagctggttgaatctggtggcggagttgtgcagcctggcagaagcctgagactgtcttgtgccgccagcggcttcacctttagcagctatgccatgcactgggtccgacaggcccctggcaaaggacttgaatgggtcgccgtgatctcctacgacggcagcaacaagtattacgccgacagcgtgaagggcagattcaccatcagccgggacaacagcaagaacaccctgtacctccagatgaacagcctgagagccgaggacaccgccgtgtactactgtgccaaagaggccccttactacgccaaggactacatggacgtgtggggcaagggcaccaccgtgacagtttcttctacgcgtgagcagaaactgatctcggaagaggatgggagcggcaccccattcccttctctggcccctcccatcatgctgctggtggacggcaagcagcagatggtggtcgtgtgcctggtgctggatgtggccccacctggactggacagccccatctggtttagcgccggcaatggctctgccctggacgcctttacctacggcccaagccctgccaccgatggcacctggacaaatctggcccacctgagcctgcccagcgaggaactggcttcttgggagcctctcgtgtgccacacaggacctggcgctgagggacacagcagatccacccagcctatgcacctgtctggcgaggccagcaccgccagaacctgtcctcaggaacctctgagaggcacccctggcggagcactgtggctgggagtgctgagactgctgctgttcaagctgctgctgtttgacctgctgctgacctgctcctgtctgtgcgatcctgccggccctctgccttctcctgccaccaccacaagactgagagccctgggcagccacagactgcaccctgccacagagacaggcggcagagaggccacaagcagccctagaccccagcccagagacagaagatggggcgataccccccctggcagaaagcctggatctccagtccgcgccaagagaagcggatctggcgtgaagcagaccctgaatttcgacctgctgaagctggctggcgacgtggaatccaacccaggcccttctagaggccatatgaccgagtacaagcccacggtgcgcctcgccacccgcgacgacgtccccagggccgtacgcaccctcgccgccgcgttcgccgactaccccgccacgcgccacaccgtcgatccggaccgccacatcgagcgggtcaccgagctgcaagaactcttcctcacgcgcgtcgggctcgacatcggcaaggtgtgggtcgcggacgacggcgccgcggtggcggtctggaccacgccggagagcgtcgaagcgggggcggtgttcgccgagatcggcccgcgcatggccgagttgagcggttcccggctggccgcgcagcaacagatggaaggcctcctggcgccgcaccggcccaaggagcccgcgtggttcctggccaccgtcggcgtctcgcccgaccaccagggcaagggtctgggcagcgccgtcgtgctccccggagtggaggcggccgagcgcgccggggtgcccgccttcctggagacctccgcgccccgcaacctccccttctacgagcggctcggcttcaccgtcaccgccgacgtcgaggtgcccgaaggaccgcgcacctggtgcatgacccgcaagcccggtgcctga

SEQ ID NO: 8943 - DNA, 2877 bp, Artificial Sequence
  Synthetic Polynucloetide
atggccttaccagtgaccgccttgctcctgccgctggccttgctgctccacgccgccaggccgctcgaggacctgaagaacgtgttcccacctgaggtggccgtgttcgagcctagcgaggccgagatcagccacacccagaaagccaccctcgtgtgcctggctaccggcttctaccccgaccatgtggaactgtcttggtgggtcaacggcaaagaggtgcacagcggcgtgtctaccgacccccagccactgaaagaacagcccgccctgaacgacagccggtactgcctgagcagcagactgagagtgtccgccaccttctggcagaacccccggaaccacttcagatgccaggtgcagttctacggcctgagcgagaacgacgagtggacccaggacagagccaagcccgtgacccagatcgtgtctgccgaagcctggggcagagccgattgcggctttaccagcgagagctaccagcagggcgtgctgagcgccaccatcctgtacgagatcctgctgggcaaggccaccctgtacgccgtgctggtgtctgccctggtgctgatggctatggtcaagcggaaggacagccggggaagggccaagcgatctggatctggagcaacaaacttctcactactcaaacaagcaggtgacgtggaggagaatcccgggcctactagcatggccttaccagtgaccgccttgctcctgccgctggccttgctgctccacgccgccaggccggagatcgtgctgacacagagccctggcacactgtcactgtctccaggcgaaagagccacactgagctgtagagccagccagagcgtgtccagcgattacctggcttggtatcagcagaagcccggacaggctcccagactgctgatctacggtgcctctagcagagccacaggcatccccgatagattttctggcagcggctccggcaccgacttcaccctgacaattagcagactgcccgaggacttcgccgtgtactactgccagcagtacgtgtcctactggacctttggcggaggcaccaaggtggaaatcaaaagaacagtggctgccggcggaggcggaagtggaggcggaggatctggcggcggaggctctcaggtgcagctggttgaatctggtggcggagttgtgcagcctggcagaagcctgagactgtcttgtgccgccagcggcttcacctttagcagctatgccatgcactgggtccgacaggcccctggcaaaggacttgaatgggtcgccgtgatctcctacgacggcagcaacaagtattacgccgacagcgtgaagggcagattcaccatcagccgggacaacagcaagaacaccctgtacctccagatgaacagcctgagagccgaggacaccgccgtgtactactgtgccaaagaggccccttactacgccaaggactacatggacgtgtggggcaagggcaccaccgtgacagtttcttctacgcgtgagcagaaactgatctcggaagaggatctggggagcggcaccccattcccttctctggcccctcccatcatgctgctggtggacggcaagcagcagatggtggtcgtgtgcctggtgctggatgtggccccacctggactggacagccccatctggtttagcgccggcaatggctctgccctggacgcctttacctacggcccaagccctgccaccgatggcacctggacaaatctggcccacctgagcctgcccagcgaggaactggcttcttgggagcctctcgtgtgccacacaggacctggcgctgagggacacagcagatccacccagcctatgcacctgtctggcgaggccagcaccgccagaacctgtcctcaggaacctctgagaggcacccctggcggagcactgtggctgggagtgctgagactgctgctgttcaagctgctgctgtttgacctgctgctgacctgctcctgtctgtgcgatcctgccggccctctgccttctcctgccaccaccacaagactgagagccctgggcagccacagactgcaccctgccacagagacaggcggcagagaggccacaagcagccctagaccccagcccagagacagaagatggggcgataccccccctggcagaaagcctggatctccagtccgcgccaagagaagcggatctggcgtgaagcagaccctgaatttcgacctgctgaagctggctggcgacgtggaatccaacccaggcccttctagatctagaggccatatgaccgagtacaagcccacggtgcgcctcgccacccgcgacgacgtccccagggccgtacgcaccctcgccgccgcgttcgccgactaccccgccacgcgccacaccgtcgatccggaccgccacatcgagcgggtcaccgagctgcaagaactcttcctcacgcgcgtcgggctcgacatcggcaaggtgtgggtcgcggacgacggcgccgcggtggcggtctggaccacgccggagagcgtcgaagcgggggcggtgttcgccgagatcggcccgcgcatggccgagttgagcggttcccggctggccgcgcagcaacagatggaaggcctcctggcgccgcaccggcccaaggagcccgcgtggttcctggccaccgtcggcgtctcgcccgaccaccagggcaagggtctgggcagcgccgtcgtgctccccggagtggaggcggccgagcgcgccggggtgcccgccttcctggagacctccgcgccccgcaacctccccttctacgagcggctcggcttcaccgtcaccgccgacgtcgaggtgcccgaaggaccgcgcacctggtgcatgacccgcaagcccggtgcctga

SEQ ID NO: 8944 - DNA, 2688 bp, Artificial Sequence
  Synthetic Polynucloetide
atggccttaccagtgaccgccttgctcctgccgctggccttgctgctccacgccgccaggccggagatcgtgctgacacagagccctggcacactgtcactgtctccaggcgaaagagccacactgagctgtagagccagccagagcgtgtccagcgattacctggcttggtatcagcagaagcccggacaggctcccagactgctgatctacggtgcctctagcagagccacaggcatccccgatagattttctggcagcggctccggcaccgacttcaccctgacaattagcagactgcccgaggacttcgccgtgtactactgccagcagtacgtgtcctactggacctttggcggaggcaccaaggtggaaatcaaaagaacagtggctgccctcgaggggaaaccaattcccaaccctcttctgggactggattcaaccggcagcggcgacaagcagctggacgccgacgtgtcccccaagcctaccatcttcctgccctctatcgccgagacaaagctccagaaggccggcacctacctgtgcctgctggaaaagttcttcccagatgtgattaagatccactggcaggaaaagaagtccaacaccatcctgggcagccaggaaggcaacaccatgaagaccaacgacacctacatgaagttcagctggctgaccgtgcccgagaagtccctggacaaagaacacagatgcatcgtgcggcacgaaaacaacaagaacggcgtggaccaggaaatcatcttcccacccatcaagaccgatgtgattacaatggaccccaaggacaactgctccaaggacgccaacgataccctgctgctccagctgaccaacaccagcgcctactacatgtacttgttgctgctgctgaagtccgtggtgtacttcgccatcatcacatgctgcctgctgcggagaaccgccttctgctgcaacggcgagaagtctagggccaagcgatctggatctggagcaacaaacttctcactactcaaacaagcaggtgacgtggaggagaatcccgggcctactagtatggactggatttggcgcatccttttccttgtcggcgctgctaccggcgcgcattccttcgaacaggtgcagctggttgaatctggtggcggagttgtgcagcctggcagaagcctgagactgtcttgtgccgccagcggcttcacctttagcagctatgccatgcactgggtccgacaggcccctggcaaaggacttgaatgggtcgccgtgatctcctacgacggcagcaacaagtattacgccgacagcgtgaagggcagattcaccatcagccgggacaacagcaagaacaccctgtacctccagatgaacagcctgagagccgaggacaccgccgtgtactactgtgccaaagaggccccttactacgccaaggactacatggacgtgtggggcaagggcaccaccgtgacagtttcttctacgcgtgagcagaaactgatctcggaagaggatgggagcggcagccagcctcacaccaagcccagcgtgttcgtgatgaagaacggcaccaacgtggcctgcctcgtgaaagagttctaccccaaggacatcaggatcaacctggtgtccagcaagaagatcaccgagttcgaccccgccatcgtgatctcccccagcggcaagtacaacgccgtgaagctggggaagtacgaggacagcaacagcgtgacctgctccgtgcagcacgacaacaagaccgtgcacagcaccgactttgaagtgaaaaccgactccaccgaccacgtgaagcccaaagagacagagaacaccaagcagcccagcaagagctgccacaagcccaaggccatcgtgcacaccgagaaagtgaacatgatgagcctgaccgtgctgggcctgcggatgctgttcgccaaaaccgtggccgtgaacttcctgctgaccgccaagctgttcttcctccgcgccaagagaagcggatctggcgtgaagcagaccctgaatttcgacctgctgaagctggctggcgacgtggaatccaacccaggcccttctagaggccatatgaccgagtacaagcccacggtgcgcctcgccacccgcgacgacgtccccagggccgtacgcaccctcgccgccgcgttcgccgactaccccgccacgcgccacaccgtcgatccggaccgccacatcgagcgggtcaccgagctgcaagaactcttcctcacgcgcgtcgggctcgacatcggcaaggtgtgggtcgcggacgacggcgccgcggtggcggtctggaccacgccggagagcgtcgaagcgggggcggtgttcgccgagatcggcccgcgcatggccgagttgagcggttcccggctggccgcgcagcaacagatggaaggcctcctggcgccgcaccggcccaaggagcccgcgtggttcctggccaccgtcggcgtctcgcccgaccaccagggcaagggtctgggcagcgccgtcgtgctccccggagtggaggcggccgagcgcgccggggtgcccgccttcctggagacctccgcgccccgcaacctccccttctacgagcggctcggcttcaccgtcaccgccgacgtcgaggtgcccgaaggaccgcgcacctggtgcatgacccgcaagcccggtgcctga

SEQ ID NO: 8945 - DNA, 1899 bp, Artificial Sequence
  Synthetic Polynucloetide
atggccttaccagtgaccgccttgctcctgccgctggccttgctgctccacgccgccaggccggagatcgtgctgacacagagccctggcacactgtcactgtctccaggcgaaagagccacactgagctgtagagccagccagagcgtgtccagcgattacctggcttggtatcagcagaagcccggacaggctcccagactgctgatctacggtgcctctagcagagccacaggcatccccgatagattttctggcagcggctccggcaccgacttcaccctgacaattagcagactgcccgaggacttcgccgtgtactactgccagcagtacgtgtcctactggacctttggcggaggcaccaaggtggaaatcaaaagaacagtggctgccctcgagagccagcctcacaccaagcccagcgtgttcgtgatgaagaacggcaccaacgtggcctgcctcgtgaaagagttctaccccaaggacatcaggatcaacctggtgtccagcaagaagatcaccgagttcgaccccgccatcgtgatctcccccagcggcaagtacaacgccgtgaagctggggaagtacgaggacagcaacagcgtgacctgctccgtgcagcacgacaacaagaccgtgcacagcaccgactttgaagtgaaaaccgactccaccgaccacgtgaagcccaaagagacagagaacaccaagcagcccagcaagagctgccacaagcccaaggccatcgtgcacaccgagaaagtgaacatgatgagcctgaccgtgctgggcctgcggatgctgttcgccaaaaccgtggccgtgaacttcctgctgaccgccaagctgttcttcctcagggccaagcgatctggatctggagcaacaaacttctcactactcaaacaagcaggtgacgtggaggagaatcccgggcctactagtatggactggatttggcgcatccttttccttgtcggcgctgctaccggcgcgcattccttcgaacaggtgcagctggttgaatctggtggcggagttgtgcagcctggcagaagcctgagactgtcttgtgccgccagcggcttcacctttagcagctatgccatgcactgggtccgacaggcccctggcaaaggacttgaatgggtcgccgtgatctcctacgacggcagcaacaagtattacgccgacagcgtgaagggcagattcaccatcagccgggacaacagcaagaacaccctgtacctccagatgaacagcctgagagccgaggacaccgccgtgtactactgtgccaaagaggccccttactacgccaaggactacatggacgtgtggggcaagggcaccaccgtgacagtttcttctacgcgtgacaagcagctggacgccgacgtgtcccccaagcctaccatcttcctgccctctatcgccgagacaaagctccagaaggccggcacctacctgtgcctgctggaaaagttcttcccagatgtgattaagatccactggcaggaaaagaagtccaacaccatcctgggcagccaggaaggcaacaccatgaagaccaacgacacctacatgaagttcagctggctgaccgtgcccgagaagtccctggacaaagaacacagatgcatcgtgcggcacgaaaacaacaagaacggcgtggaccaggaaatcatcttcccacccatcaagaccgatgtgattacaatggaccccaaggacaactgctccaaggacgccaacgataccctgctgctccagctgaccaacaccagcgcctactacatgtacttgttgctgctgctgaagtccgtggtgtacttcgccatcatcacatgctgcctgctgcggagaaccgccttctgctgcaacggcgagaagtct

SEQ ID NO: 8946 - DNA, 2733 bp, Artificial Sequence
  Synthetic Polynucloetide
atggccttaccagtgaccgccttgctcctgccgctggccttgctgctccacgccgccaggccgctcgaggggaaaccaattcccaaccctcttctgggactggattcaaccggcagcggcgacaagcagctggacgccgacgtgtcccccaagcctaccatcttcctgccctctatcgccgagacaaagctccagaaggccggcacctacctgtgcctgctggaaaagttcttcccagatgtgattaagatccactggcaggaaaagaagtccaacaccatcctgggcagccaggaaggcaacaccatgaagaccaacgacacctacatgaagttcagctggctgaccgtgcccgagaagtccctggacaaagaacacagatgcatcgtgcggcacgaaaacaacaagaacggcgtggaccaggaaatcatcttcccacccatcaagaccgatgtgattacaatggaccccaaggacaactgctccaaggacgccaacgataccctgctgctccagctgaccaacaccagcgcctactacatgtacttgttgctgctgctgaagtccgtggtgtacttcgccatcatcacatgctgcctgctgcggagaaccgccttctgctgcaacggcgagaagtctagggccaagcgatctggatctggagcaacaaacttctcactactcaaacaagcaggtgacgtggaggagaatcccgggcctactagcatggccttaccagtgaccgccttgctcctgccgctggccttgctgctccacgccgccaggccggagatcgtgctgacacagagccctggcacactgtcactgtctccaggcgaaagagccacactgagctgtagagccagccagagcgtgtccagcgattacctggcttggtatcagcagaagcccggacaggctcccagactgctgatctacggtgcctctagcagagccacaggcatccccgatagattttctggcagcggctccggcaccgacttcaccctgacaattagcagactgcccgaggacttcgccgtgtactactgccagcagtacgtgtcctactggacctttggcggaggcaccaaggtggaaatcaaaagaacagtggctgccggcggaggcggaagtggaggcggaggatctggcggcggaggctctcaggtgcagctggttgaatctggtggcggagttgtgcagcctggcagaagcctgagactgtcttgtgccgccagcggcttcacctttagcagctatgccatgcactgggtccgacaggcccctggcaaaggacttgaatgggtcgccgtgatctcctacgacggcagcaacaagtattacgccgacagcgtgaagggcagattcaccatcagccgggacaacagcaagaacaccctgtacctccagatgaacagcctgagagccgaggacaccgccgtgtactactgtgccaaagaggccccttactacgccaaggactacatggacgtgtggggcaagggcaccaccgtgacagtttcttctacgcgtgagcagaaactgatctcggaagaggatgggagcggcagccagcctcacaccaagcccagcgtgttcgtgatgaagaacggcaccaacgtggcctgcctcgtgaaagagttctaccccaaggacatcaggatcaacctggtgtccagcaagaagatcaccgagttcgaccccgccatcgtgatctcccccagcggcaagtacaacgccgtgaagctggggaagtacgaggacagcaacagcgtgacctgctccgtgcagcacgacaacaagaccgtgcacagcaccgactttgaagtgaaaaccgactccaccgaccacgtgaagcccaaagagacagagaacaccaagcagcccagcaagagctgccacaagcccaaggccatcgtgcacaccgagaaagtgaacatgatgagcctgaccgtgctgggcctgcggatgctgttcgccaaaaccgtggccgtgaacttcctgctgaccgccaagctgttcttcctccgcgccaagagaagcggatctggcgtgaagcagaccctgaatttcgacctgctgaagctggctggcgacgtggaatccaacccaggcccttctagaggccatatgaccgagtacaagcccacggtgcgcctcgccacccgcgacgacgtccccagggccgtacgcaccctcgccgccgcgttcgccgactaccccgccacgcgccacaccgtcgatccggaccgccacatcgagcgggtcaccgagctgcaagaactcttcctcacgcgcgtcgggctcgacatcggcaaggtgtgggtcgcggacgacggcgccgcggtggcggtctggaccacgccggagagcgtcgaagcgggggcggtgttcgccgagatcggcccgcgcatggccgagttgagcggttcccggctggccgcgcagcaacagatggaaggcctcctggcgccgcaccggcccaaggagcccgcgtggttcctggccaccgtcggcgtctcgcccgaccaccagggcaagggtctgggcagcgccgtcgtgctccccggagtggaggcggccgagcgcgccggggtgcccgccttcctggagacctccgcgccccgcaacctccccttctacgagcggctcggcttcaccgtcaccgccgacgtcgaggtgcccgaaggaccgcgcacctggtgcatgacccgcaagcccggtgcctga

SEQ ID NO: 8947 - DNA, 3108 bp, Artificial Sequence
  Synthetic Polynucloetide
atggccttaccagtgaccgccttgctcctgccgctggccttgctgctccacgccgccaggccggagatcgtgctgacacagagccctggcacactgtcactgtctccaggcgaaagagccacactgagctgtagagccagccagagcgtgtccagcgattacctggcttggtatcagcagaagcccggacaggctcccagactgctgatctacggtgcctctagcagagccacaggcatccccgatagattttctggcagcggctccggcaccgacttcaccctgacaattagcagactgcccgaggacttcgccgtgtactactgccagcagtacgtgtcctactggacctttggcggaggcaccaaggtggaaatcaaaagaacagtggctgccggacagcctaaggccaatcctaccgtgacactgttccctccaagcagcgaagaactccaggccaacaaggccacacttgtgtgcctgatctccgacttctaccctggggctgtgacagtggcttggaaggccgatggatctcctgtgaaagccggcgtggaaaccaccaagccatccaagcagagcaacaacaaatacgccgccagctcctacctgagcctgacacctgagcagtggaagtcccacagatcctacagctgccaagtgacccacgaaggcagcaccgtggaaaagacagtggcccctacagagtgcagcggatcccagagcttcggcctgctggaccccaagctgtgctacctgctggatggcatcctgttcatctacggcgtgatcctgaccgccctgttcctgagagtgaagttcagcagaagcgccgacgcccctgcctaccagcagggacagaaccaactgtacaacgagctgaacctgggcagacgggaagagtacgacgtgctggacaagcggagaggcagggaccctgagatgggcggaaagccccagcggagaaagaacccccaggaaggactgtataacgaactccagaaagacaagatggccgaagcctacagcgagatcggcatgaagggcgagcggagaagaggcaagggccacgatggcctgtaccagggcctgagcaccgccaccaaggacacctatgacgccctgcacatgcaggccctgcctccaagaagggccaagcgatctggatctggagcaacaaacttctcactactcaaacaagcaggtgacgtggaggagaatcccgggcctactagtatggactggatttggcgcatccttttccttgtcggcgctgctaccggcgcgcattccttcgaacaggtgcagctggttgaatctggtggcggagttgtgcagcctggcagaagcctgagactgtcttgtgccgccagcggcttcacctttagcagctatgccatgcactgggtccgacaggcccctggcaaaggacttgaatgggtcgccgtgatctcctacgacggcagcaacaagtattacgccgacagcgtgaagggcagattcaccatcagccgggacaacagcaagaacaccctgtacctccagatgaacagcctgagagccgaggacaccgccgtgtactactgtgccaaagaggccccttactacgccaaggactacatggacgtgtggggcaagggcaccaccgtgacagtttcttctgcctctacaaagggaccctccgtgtttcctctggctcccagcagcaagtctacaagcggaggaacagccgctctgggctgcctggtcaaggattactttcccgagcctgtgaccgtgtcctggaatagcggagcactgacaagcggcgtgcacacctttccagccgtgctgcaaagcagcggcctgtactctctgagcagcgtggtcacagtgcctagctctagcctgggcacccagacctacatctgcaatgtgaaccacaagcctagcaacaccaaggtggacaagagagtggaacccaagagctgtggtacccagagttttgggttgttggaccctaaattgtgctatctgttggacggaatcctgttcatttacggagtgatcctgaccgcattgttcctgcgggttaagttttccagatccgcagacgcacccgcttaccaacaagggcagaaccaactctacaatgaacttaatttggggcggagggaagagtacgacgttctggacaaaaggaggggacgagatcccgagatgggcggaaagcctcagcgaaggaagaatccgcaagaggggctttataacgaactccagaaagataaaatggcagaagcctatagtgagattgggatgaagggagaaaggaggaggggtaaaggtcacgatgggttgtaccaaggattgagcacagccactaaagatacctatgatgcgctccacatgcaggccctgccgccaagacgcgccaagagaagcggatctggcgtgaagcagaccctgaatttcgacctgctgaagctggctggcgacgtggaatccaacccaggcccttctagaggccatatgaccgagtacaagcccacggtgcgcctcgccacccgcgacgacgtccccagggccgtacgcaccctcgccgccgcgttcgccgactaccccgccacgcgccacaccgtcgatccggaccgccacatcgagcgggtcaccgagctgcaagaactcttcctcacgcgcgtcgggctcgacatcggcaaggtgtgggtcgcggacgacggcgccgcggtggcggtctggaccacgccggagagcgtcgaagcgggggcggtgttcgccgagatcggcccgcgcatggccgagttgagcggttcccggctggccgcgcagcaacagatggaaggcctcctggcgccgcaccggcccaaggagcccgcgtggttcctggccaccgtcggcgtctcgcccgaccaccagggcaagggtctgggcagcgccgtcgtgctccccggagtggaggcggccgagcgcgccggggtgcccgccttcctggagacctccgcgccccgcaacctccccttctacgagcggctcggcttcaccgtcaccgccgacgtcgaggtgcccgaaggaccgcgcacctggtgcatgacccgcaagcccggtgcctga

SEQ ID NO: 8948 - DNA, 2463 bp, Artificial Sequence
  Synthetic Polynucloetide
atggccttaccagtgaccgccttgctcctgccgctggccttgctgctccacgccgccaggccggagatcgtgctgacacagagccctggcacactgtcactgtctccaggcgaaagagccacactgagctgtagagccagccagagcgtgtccagcgattacctggcttggtatcagcagaagcccggacaggctcccagactgctgatctacggtgcctctagcagagccacaggcatccccgatagattttctggcagcggctccggcaccgacttcaccctgacaattagcagactgcccgaggacttcgccgtgtactactgccagcagtacgtgtcctactggacctttggcggaggcaccaaggtggaaatcaaaagaacagtggctgccctcgaggacctgaagaacgtgttcccacctgaggtggccgtgttcgagcctagcgaggccgagatcagccacacccagaaagccaccctcgtgtgcctggctaccggcttctaccccgaccatgtggaactgtcttggtgggtcaacggcaaagaggtgcacagcggcgtgtctaccgacccccagccactgaaagaacagcccgccctgaacgacagccggtactgcctgagcagcagactgagagtgtccgccaccttctggcagaacccccggaaccacttcagatgccaggtgcagttctacggcctgagcgagaacgacgagtggacccaggacagagccaagcccgtgacccagatcgtgtctgccgaagcctggggcagagccgattgcggatcccagagcttcggcctgctggaccccaagctgtgctacctgctggatggcatcctgttcatctacggcgtgatcctgaccgccctgttcctgagagtgaagttcagcagaagcgccgacgcccctgcctaccagcagggacagaaccaactgtacaacgagctgaacctgggcagacgggaagagtacgacgtgctggacaagcggagaggcagggaccctgagatgggcggaaagccccagcggagaaagaacccccaggaaggactgtataacgaactccagaaagacaagatggccgaagcctacagcgagatcggcatgaagggcgagcggagaagaggcaagggccacgatggcctgtaccagggcctgagcaccgccaccaaggacacctatgacgccctgcacatgcaggccctgcctccaagaagggccaagcgatctggatctggagcaacaaacttctcactactcaaacaagcaggtgacgtggaggagaatcccgggcctactagtatggactggatttggcgcatccttttccttgtcggcgctgctaccggcgcgcattccttcgaacaggtgcagctggttgaatctggtggcggagttgtgcagcctggcagaagcctgagactgtcttgtgccgccagcggcttcacctttagcagctatgccatgcactgggtccgacaggcccctggcaaaggacttgaatgggtcgccgtgatctcctacgacggcagcaacaagtattacgccgacagcgtgaagggcagattcaccatcagccgggacaacagcaagaacaccctgtacctccagatgaacagcctgagagccgaggacaccgccgtgtactactgtgccaaagaggccccttactacgccaaggactacatggacgtgtggggcaagggcaccaccgtgacagtttcttctacgcgtatccagaaccctgatcctgccgtgtaccagctgcgggatagcaagagcagcgacaagagcgtgtgtctgttcaccgacttcgacagccagaccaacgtgtcccagagcaaggactccgacgtgtacatcaccgataagaccgtgctggacatgcggagcatggacttcaagagcaactccgccgtggcctggtccaacaagtccgatttcgcctgcgccaacgccttcaacaacagcattatccccgaggacacattcttcccaagccccgagagcagctgcggtacccagagttttgggttgttggaccctaaattgtgctatctgttggacggaatcctgttcatttacggagtgatcctgaccgcattgttcctgcgggttaagttttccagatccgcagacgcacccgcttaccaacaagggcagaaccaactctacaatgaacttaatttggggcggagggaagagtacgacgttctggacaaaaggaggggacgagatcccgagatgggcggaaagcctcagcgaaggaagaatccgcaagaggggctttataacgaactccagaaagataaaatggcagaagcctatagtgagattgggatgaagggagaaaggaggaggggtaaaggtcacgatgggttgtaccaaggattgagcacagccactaaagatacctatgatgcgctccacatgcaggccctgccgccaaga

SEQ ID NO: 8949 - DNA, 2463 bp, Artificial Sequence
  Synthetic Polynucloetide
atggccttaccagtgaccgccttgctcctgccgctggccttgctgctccacgccgccaggccggagatcgtgctgacacagagccctggcacactgtcactgtctccaggcgaaagagccacactgagctgtagagccagccagagcgtgtccagcgattacctggcttggtatcagcagaagcccggacaggctcccagactgctgatctacggtgcctctagcagagccacaggcatccccgatagattttctggcagcggctccggcaccgacttcaccctgacaattagcagactgcccgaggacttcgccgtgtactactgccagcagtacgtgtcctactggacctttggcggaggcaccaaggtggaaatcaaaagaacagtggctgccctcgaggacctgaagaacgtgttcccacctgaggtggccgtgttcgagcctagcaaggccgagatcgcccacacccagaaagccaccctcgtgtgcctggctaccggcttctaccccgaccatgtggaactgtcttggtgggtcaacggcaaagaggtgcacagcggcgtgtgtaccgacccccagccactgaaagaacagcccgccctgaacgacagccggtactgcctgagcagcagactgagagtgtccgccaccttctggcagaacccccggaaccacttcagatgccaggtgcagttctacggcctgagcgagaacgacgagtggacccaggacagagccaagcccgtgacccagatcgtgtctgccgaagcctggggcagagccgattgcggatcccagagcttcggcctgctggaccccaagctgtgctacctgctggatggcatcctgttcatctacggcgtgatcctgaccgccctgttcctgagagtgaagttcagcagaagcgccgacgcccctgcctaccagcagggacagaaccaactgtacaacgagctgaacctgggcagacgggaagagtacgacgtgctggacaagcggagaggcagggaccctgagatgggcggaaagccccagcggagaaagaacccccaggaaggactgtataacgaactccagaaagacaagatggccgaagcctacagcgagatcggcatgaagggcgagcggagaagaggcaagggccacgatggcctgtaccagggcctgagcaccgccaccaaggacacctatgacgccctgcacatgcaggccctgcctccaagaagggccaagcgatctggatctggagcaacaaacttctcactactcaaacaagcaggtgacgtggaggagaatcccgggcctactagtatggactggatttggcgcatccttttccttgtcggcgctgctaccggcgcgcattccttcgaacaggtgcagctggttgaatctggtggcggagttgtgcagcctggcagaagcctgagactgtcttgtgccgccagcggcttcacctttagcagctatgccatgcactgggtccgacaggcccctggcaaaggacttgaatgggtcgccgtgatctcctacgacggcagcaacaagtattacgccgacagcgtgaagggcagattcaccatcagccgggacaacagcaagaacaccctgtacctccagatgaacagcctgagagccgaggacaccgccgtgtactactgtgccaaagaggccccttactacgccaaggactacatggacgtgtggggcaagggcaccaccgtgacagtttcttctacgcgtatccagaaccctgatcctgccgtgtaccagctgcgggatagcaagagcagcgacaagagcgtgtgtctgttcaccgacttcgacagccagaccaacgtgtcccagagcaaggactccgacgtgtacatcaccgataagtgcgtgctggacatgcggagcatggacttcaagagcaactccgccgtggcctggtccaacaagtccgatttcgcctgcgccaacgccttcaacaacagcattatccccgaggacacattcttcccaagcagcgacgtgccctgcggtacccagagttttgggttgttggaccctaaattgtgctatctgttggacggaatcctgttcatttacggagtgatcctgaccgcattgttcctgcgggttaagttttccagatccgcagacgcacccgcttaccaacaagggcagaaccaactctacaatgaacttaatttggggcggagggaagagtacgacgttctggacaaaaggaggggacgagatcccgagatgggcggaaagcctcagcgaaggaagaatccgcaagaggggctttataacgaactccagaaagataaaatggcagaagcctatagtgagattgggatgaagggagaaaggaggaggggtaaaggtcacgatgggttgtaccaaggattgagcacagccactaaagatacctatgatgcgctccacatgcaggccctgccgccaaga

SEQ ID NO: 8950 - DNA, 2676 bp, Artificial Sequence
  Synthetic Polynucloetide
atggccttaccagtgaccgccttgctcctgccgctggccttgctgctccacgccgccaggccggagatcgtgctgacacagagccctggcacactgtcactgtctccaggcgaaagagccacactgagctgtagagccagccagagcgtgtccagcgattacctggcttggtatcagcagaagcccggacaggctcccagactgctgatctacggtgcctctagcagagccacaggcatccccgatagattttctggcagcggctccggcaccgacttcaccctgacaattagcagactgcccgaggacttcgccgtgtactactgccagcagtacgtgtcctactggacctttggcggaggcaccaaggtggaaatcaaaagaacagtggctgccctcgaggggaaaccaattcccaaccctcttctgggactggattcaaccggcagcggcgaggacctgaagaacgtgttcccacctgaggtggccgtgttcgagcctagcgaggccgagatcagccacacccagaaagccaccctcgtgtgcctggctaccggcttctaccccgaccatgtggaactgtcttggtgggtcaacggcaaagaggtgcacagcggcgtgtctaccgacccccagccactgaaagaacagcccgccctgaacgacagccggtactgcctgagcagcagactgagagtgtccgccaccttctggcagaacccccggaaccacttcagatgccaggtgcagttctacggcctgagcgagaacgacgagtggacccaggacagagccaagcccgtgacccagatcgtgtctgccgaagcctggggcagagccgattgcggatcccagagcttcggcctgctggaccccaagctgtgctacctgctggatggcatcctgttcatctacggcgtgatcctgaccgccctgttcctgagagtgaagttcagcagaagcgccgacgcccctgcctaccagcagggacagaaccaactgtacaacgagctgaacctgggcagacgggaagagtacgacgtgctggacaagcggagaggcagggaccctgagatgggcggaaagccccagcggagaaagaacccccaggaaggactgtataacgaactccagaaagacaagatggccgaagcctacagcgagatcggcatgaagggcgagcggagaagaggcaagggccacgatggcctgtaccagggcctgagcaccgccaccaaggacacctatgacgccctgcacatgcaggccctgcctccaagaagggccaagcgatctggatctggagcaacaaacttctcactactcaaacaagcaggtgacgtggaggagaatcccgggcctactagtatggactggatttggcgcatccttttccttgtcggcgctgctaccggcgcgcattccttcgaacaggtgcagctggttgaatctggtggcggagttgtgcagcctggcagaagcctgagactgtcttgtgccgccagcggcttcacctttagcagctatgccatgcactgggtccgacaggcccctggcaaaggacttgaatgggtcgccgtgatctcctacgacggcagcaacaagtattacgccgacagcgtgaagggcagattcaccatcagccgggacaacagcaagaacaccctgtacctccagatgaacagcctgagagccgaggacaccgccgtgtactactgtgccaaagaggccccttactacgccaaggactacatggacgtgtggggcaagggcaccaccgtgacagtttcttctacgcgtgagcagaaactgatctcggaagaggatgggagcggcatccagaaccctgatcctgccgtgtaccagctgcgggatagcaagagcagcgacaagagcgtgtgtctgttcaccgacttcgacagccagaccaacgtgtcccagagcaaggactccgacgtgtacatcaccgataagaccgtgctggacatgcggagcatggacttcaagagcaactccgccgtggcctggtccaacaagtccgatttcgcctgcgccaacgccttcaacaacagcattatccccgaggacacattcttcccaagccccgagagcagctgcggtacccagagttttgggttgttggaccctaaattgtgctatctgttggacggaatcctgttcatttacggagtgatcctgaccgcattgttcctgaggagcaagcggtcacggctgctccacagcgattacatgaatatgacaccacgaagaccgggtcctactcgcaaacactaccaaccctacgcacctccccgcgactttgcagcgtaccgatctcgggttaagttttccagatccgcagacgcacccgcttaccaacaagggcagaaccaactctacaatgaacttaatttggggcggagggaagagtacgacgttctggacaaaaggaggggacgagatcccgagatgggcggaaagcctcagcgaaggaagaatccgcaagaggggctttataacgaactccagaaagataaaatggcagaagcctatagtgagattgggatgaagggagaaaggaggaggggtaaaggtcacgatgggttgtaccaaggattgagcacagccactaaagatacctatgatgcgctccacatgcaggccctgccgccaaga

SEQ ID NO: 8951 - DNA, 2799 bp, Artificial Sequence
  Synthetic Polynucloetide
atggccttaccagtgaccgccttgctcctgccgctggccttgctgctccacgccgccaggccggagatcgtgctgacacagagccctggcacactgtcactgtctccaggcgaaagagccacactgagctgtagagccagccagagcgtgtccagcgattacctggcttggtatcagcagaagcccggacaggctcccagactgctgatctacggtgcctctagcagagccacaggcatccccgatagattttctggcagcggctccggcaccgacttcaccctgacaattagcagactgcccgaggacttcgccgtgtactactgccagcagtacgtgtcctactggacctttggcggaggcaccaaggtggaaatcaaaagaacagtggctgccctcgaggggaaaccaattcccaaccctcttctgggactggattcaaccggcagcggcgaggacctgaagaacgtgttcccacctgaggtggccgtgttcgagcctagcgaggccgagatcagccacacccagaaagccaccctcgtgtgcctggctaccggcttctaccccgaccatgtggaactgtcttggtgggtcaacggcaaagaggtgcacagcggcgtgtctaccgacccccagccactgaaagaacagcccgccctgaacgacagccggtactgcctgagcagcagactgagagtgtccgccaccttctggcagaacccccggaaccacttcagatgccaggtgcagttctacggcctgagcgagaacgacgagtggacccaggacagagccaagcccgtgacccagatcgtgtctgccgaagcctggggcagagccgattgcggatcccagagcttcggcctgctggaccccaagctgtgctacctgctggatggcatcctgttcatctacggcgtgatcctgaccgccctgttcctgaggagtaagaggagcaggctcctgcacagtgactacatgaacatgactccacgccgccccggacccacccgcaagcattaccagccctatgccccaccacgcgacttcgcagcctatcgctccagagtgaagttcagcagaagcgccgacgcccctgcctaccagcagggacagaaccaactgtacaacgagctgaacctgggcagacgggaagagtacgacgtgctggacaagcggagaggcagggaccctgagatgggcggaaagccccagcggagaaagaacccccaggaaggactgtataacgaactccagaaagacaagatggccgaagcctacagcgagatcggcatgaagggcgagcggagaagaggcaagggccacgatggcctgtaccagggcctgagcaccgccaccaaggacacctatgacgccctgcacatgcaggccctgcctccaagaagggccaagcgatctggatctggagcaacaaacttctcactactcaaacaagcaggtgacgtggaggagaatcccgggcctactagtatggactggatttggcgcatccttttccttgtcggcgctgctaccggcgcgcattccttcgaacaggtgcagctggttgaatctggtggcggagttgtgcagcctggcagaagcctgagactgtcttgtgccgccagcggcttcacctttagcagctatgccatgcactgggtccgacaggcccctggcaaaggacttgaatgggtcgccgtgatctcctacgacggcagcaacaagtattacgccgacagcgtgaagggcagattcaccatcagccgggacaacagcaagaacaccctgtacctccagatgaacagcctgagagccgaggacaccgccgtgtactactgtgccaaagaggccccttactacgccaaggactacatggacgtgtggggcaagggcaccaccgtgacagtttcttctacgcgtgagcagaaactgatctcggaagaggatgggagcggcatccagaaccctgatcctgccgtgtaccagctgcgggatagcaagagcagcgacaagagcgtgtgtctgttcaccgacttcgacagccagaccaacgtgtcccagagcaaggactccgacgtgtacatcaccgataagaccgtgctggacatgcggagcatggacttcaagagcaactccgccgtggcctggtccaacaagtccgatttcgcctgcgccaacgccttcaacaacagcattatccccgaggacacattcttcccaagccccgagagcagctgcggtacccagagttttgggttgttggaccctaaattgtgctatctgttggacggaatcctgttcatttacggagtgatcctgaccgcattgttcctgaggagcaagcggtcacggctgctccacagcgattacatgaatatgacaccacgaagaccgggtcctactcgcaaacactaccaaccctacgcacctccccgcgactttgcagcgtaccgatctcgggttaagttttccagatccgcagacgcacccgcttaccaacaagggcagaaccaactctacaatgaacttaatttggggcggagggaagagtacgacgttctggacaaaaggaggggacgagatcccgagatgggcggaaagcctcagcgaaggaagaatccgcaagaggggctttataacgaactccagaaagataaaatggcagaagcctatagtgagattgggatgaagggagaaaggaggaggggtaaaggtcacgatgggttgtaccaaggattgagcacagccactaaagatacctatgatgcgctccacatgcaggccctgccgccaaga

SEQ ID NO: 8952 - DNA, 2682 bp, Artificial Sequence
  Synthetic Polynucloetide
atggccttaccagtgaccgccttgctcctgccgctggccttgctgctccacgccgccaggccggagatcgtgctgacacagagccctggcacactgtcactgtctccaggcgaaagagccacactgagctgtagagccagccagagcgtgtccagcgattacctggcttggtatcagcagaagcccggacaggctcccagactgctgatctacggtgcctctagcagagccacaggcatccccgatagattttctggcagcggctccggcaccgacttcaccctgacaattagcagactgcccgaggacttcgccgtgtactactgccagcagtacgtgtcctactggacctttggcggaggcaccaaggtggaaatcaaaagaacagtggctgccctcgaggggaaaccaattcccaaccctcttctgggactggattcaaccggcagcggcgaggacctgaagaacgtgttcccacctgaggtggccgtgttcgagcctagcgaggccgagatcagccacacccagaaagccaccctcgtgtgcctggctaccggcttctaccccgaccatgtggaactgtcttggtgggtcaacggcaaagaggtgcacagcggcgtgtctaccgacccccagccactgaaagaacagcccgccctgaacgacagccggtactgcctgagcagcagactgagagtgtccgccaccttctggcagaacccccggaaccacttcagatgccaggtgcagttctacggcctgagcgagaacgacgagtggacccaggacagagccaagcccgtgacccagatcgtgtctgccgaagcctggggcagagccgattgcggatcccagagcttcggcctgctggaccccaagctgtgctacctgctggatggcatcctgttcatctacggcgtgatcctgaccgccctgttcctgagagtgaagttcagcagaagcgccgacgcccctgcctaccagcagggacagaaccaactgtacaacgagctgaacctgggcagacgggaagagtacgacgtgctggacaagcggagaggcagggaccctgagatgggcggaaagccccagcggagaaagaacccccaggaaggactgtataacgaactccagaaagacaagatggccgaagcctacagcgagatcggcatgaagggcgagcggagaagaggcaagggccacgatggcctgtaccagggcctgagcaccgccaccaaggacacctatgacgccctgcacatgcaggccctgcctccaagaagggccaagcgatctggatctggagcaacaaacttctcactactcaaacaagcaggtgacgtggaggagaatcccgggcctactagtatggactggatttggcgcatccttttccttgtcggcgctgctaccggcgcgcattccttcgaacaggtgcagctggttgaatctggtggcggagttgtgcagcctggcagaagcctgagactgtcttgtgccgccagcggcttcacctttagcagctatgccatgcactgggtccgacaggcccctggcaaaggacttgaatgggtcgccgtgatctcctacgacggcagcaacaagtattacgccgacagcgtgaagggcagattcaccatcagccgggacaacagcaagaacaccctgtacctccagatgaacagcctgagagccgaggacaccgccgtgtactactgtgccaaagaggccccttactacgccaaggactacatggacgtgtggggcaagggcaccaccgtgacagtttcttctacgcgtgagcagaaactgatctcggaagaggatctggggagcggcatccagaaccctgatcctgccgtgtaccagctgcgggatagcaagagcagcgacaagagcgtgtgtctgttcaccgacttcgacagccagaccaacgtgtcccagagcaaggactccgacgtgtacatcaccgataagaccgtgctggacatgcggagcatggacttcaagagcaactccgccgtggcctggtccaacaagtccgatttcgcctgcgccaacgccttcaacaacagcattatccccgaggacacattcttcccaagccccgagagcagctgcggtacccagagttttgggttgttggaccctaaattgtgctatctgttggacggaatcctgttcatttacggagtgatcctgaccgcattgttcctgaagagaggccggaagaagctgctgtacatcttcaagcagcctttcatgcggcccgtgcagaccacccaggaagaggacggctgctcctgccggttccccgaggaagaagaaggcggctgcgagctgcgggttaagttttccagatccgcagacgcacccgcttaccaacaagggcagaaccaactctacaatgaacttaatttggggcggagggaagagtacgacgttctggacaaaaggaggggacgagatcccgagatgggcggaaagcctcagcgaaggaagaatccgcaagaggggctttataacgaactccagaaagataaaatggcagaagcctatagtgagattgggatgaagggagaaaggaggaggggtaaaggtcacgatgggttgtaccaaggattgagcacagccactaaagatacctatgatgcgctccacatgcaggccctgccgccaaga

SEQ ID NO: 8953 - DNA, 2808 bp, Artificial Sequence
  Synthetic Polynucloetide
atggccttaccagtgaccgccttgctcctgccgctggccttgctgctccacgccgccaggccggagatcgtgctgacacagagccctggcacactgtcactgtctccaggcgaaagagccacactgagctgtagagccagccagagcgtgtccagcgattacctggcttggtatcagcagaagcccggacaggctcccagactgctgatctacggtgcctctagcagagccacaggcatccccgatagattttctggcagcggctccggcaccgacttcaccctgacaattagcagactgcccgaggacttcgccgtgtactactgccagcagtacgtgtcctactggacctttggcggaggcaccaaggtggaaatcaaaagaacagtggctgccctcgaggggaaaccaattcccaaccctcttctgggactggattcaaccggcagcggcgaggacctgaagaacgtgttcccacctgaggtggccgtgttcgagcctagcgaggccgagatcagccacacccagaaagccaccctcgtgtgcctggctaccggcttctaccccgaccatgtggaactgtcttggtgggtcaacggcaaagaggtgcacagcggcgtgtctaccgacccccagccactgaaagaacagcccgccctgaacgacagccggtactgcctgagcagcagactgagagtgtccgccaccttctggcagaacccccggaaccacttcagatgccaggtgcagttctacggcctgagcgagaacgacgagtggacccaggacagagccaagcccgtgacccagatcgtgtctgccgaagcctggggcagagccgattgcggatcccagagcttcggcctgctggaccccaagctgtgctacctgctggatggcatcctgttcatctacggcgtgatcctgaccgccctgttcctgaaacggggcagaaagaaactcctgtatatattcaaacaaccatttatgagaccagtacaaactactcaagaggaagatggctgtagctgccgatttccagaagaagaagaaggaggatgtgaactgagagtgaagttcagcagaagcgccgacgcccctgcctaccagcagggacagaaccaactgtacaacgagctgaacctgggcagacgggaagagtacgacgtgctggacaagcggagaggcagggaccctgagatgggcggaaagccccagcggagaaagaacccccaggaaggactgtataacgaactccagaaagacaagatggccgaagcctacagcgagatcggcatgaagggcgagcggagaagaggcaagggccacgatggcctgtaccagggcctgagcaccgccaccaaggacacctatgacgccctgcacatgcaggccctgcctccaagaagggccaagcgatctggatctggagcaacaaacttctcactactcaaacaagcaggtgacgtggaggagaatcccgggcctactagtatggactggatttggcgcatccttttccttgtcggcgctgctaccggcgcgcattccttcgaacaggtgcagctggttgaatctggtggcggagttgtgcagcctggcagaagcctgagactgtcttgtgccgccagcggcttcacctttagcagctatgccatgcactgggtccgacaggcccctggcaaaggacttgaatgggtcgccgtgatctcctacgacggcagcaacaagtattacgccgacagcgtgaagggcagattcaccatcagccgggacaacagcaagaacaccctgtacctccagatgaacagcctgagagccgaggacaccgccgtgtactactgtgccaaagaggccccttactacgccaaggactacatggacgtgtggggcaagggcaccaccgtgacagtttcttctacgcgtgagcagaaactgatctcggaagaggatctggggagcggcatccagaaccctgatcctgccgtgtaccagctgcgggatagcaagagcagcgacaagagcgtgtgtctgttcaccgacttcgacagccagaccaacgtgtcccagagcaaggactccgacgtgtacatcaccgataagaccgtgctggacatgcggagcatggacttcaagagcaactccgccgtggcctggtccaacaagtccgatttcgcctgcgccaacgccttcaacaacagcattatccccgaggacacattcttcccaagccccgagagcagctgcggtacccagagttttgggttgttggaccctaaattgtgctatctgttggacggaatcctgttcatttacggagtgatcctgaccgcattgttcctgaagagaggccggaagaagctgctgtacatcttcaagcagcctttcatgcggcccgtgcagaccacccaggaagaggacggctgctcctgccggttccccgaggaagaagaaggcggctgcgagctgcgggttaagttttccagatccgcagacgcacccgcttaccaacaagggcagaaccaactctacaatgaacttaatttggggcggagggaagagtacgacgttctggacaaaaggaggggacgagatcccgagatgggcggaaagcctcagcgaaggaagaatccgcaagaggggctttataacgaactccagaaagataaaatggcagaagcctatagtgagattgggatgaagggagaaaggaggaggggtaaaggtcacgatgggttgtaccaaggattgagcacagccactaaagatacctatgatgcgctccacatgcaggccctgccgccaaga

SEQ ID NO: 8954 - DNA, 2481 bp, Artificial Sequence
  Synthetic Polynucloetide
atggccttaccagtgaccgccttgctcctgccgctggccttgctgctccacgccgccaggccggagatcgtgctgacacagagccctggcacactgtcactgtctccaggcgaaagagccacactgagctgtagagccagccagagcgtgtccagcgattacctggcttggtatcagcagaagcccggacaggctcccagactgctgatctacggtgcctctagcagagccacaggcatccccgatagattttctggcagcggctccggcaccgacttcaccctgacaattagcagactgcccgaggacttcgccgtgtactactgccagcagtacgtgtcctactggacctttggcggaggcaccaaggtggaaatcaaaagaacagtggctgccctcgagcagagcttcggcctgctggaccccaagctgtgctacctgctggatggcatcctgttcatctacggcgtgatcctgaccgccctgttcctgagagtgaagttcagcagaagcgccgacgcccctgcctaccagcagggacagaaccaactgtacaacgagctgaacctgggcagacgggaagagtacgacgtgctggacaagcggagaggcagggaccctgagatgggcggaaagccccagcggagaaagaacccccaggaaggactgtataacgaactccagaaagacaagatggccgaagcctacagcgagatcggcatgaagggcgagcggagaagaggcaagggccacgatggcctgtaccagggcctgagcaccgccaccaaggacacctatgacgccctgcacatgcaggccctgcctccaagaagggccaagcgatctggatctggagcaacaaacttctcactactcaaacaagcaggtgacgtggaggagaatcccgggcctactagtatggactggatttggcgcatccttttccttgtcggcgctgctaccggcgcgcattccttcgaacaggtgcagctggttgaatctggtggcggagttgtgcagcctggcagaagcctgagactgtcttgtgccgccagcggcttcacctttagcagctatgccatgcactgggtccgacaggcccctggcaaaggacttgaatgggtcgccgtgatctcctacgacggcagcaacaagtattacgccgacagcgtgaagggcagattcaccatcagccgggacaacagcaagaacaccctgtacctccagatgaacagcctgagagccgaggacaccgccgtgtactactgtgccaaagaggccccttactacgccaaggactacatggacgtgtggggcaagggcaccaccgtgacagtttcttctacgcgtcagagttttgggttgttggaccctaaattgtgctatctgttggacggaatcctgttcatttacggagtgatcctgaccgcattgttcctgcgggttaagttttccagatccgcagacgcacccgcttaccaacaagggcagaaccaactctacaatgaacttaatttggggcggagggaagagtacgacgttctggacaaaaggaggggacgagatcccgagatgggcggaaagcctcagcgaaggaagaatccgcaagaggggctttataacgaactccagaaagataaaatggcagaagcctatagtgagattgggatgaagggagaaaggaggaggggtaaaggtcacgatgggttgtaccaaggattgagcacagccactaaagatacctatgatgcgctccacatgcaggccctgccgccaagacgcgccaagagaagcggatctggcgtgaagcagaccctgaatttcgacctgctgaagctggctggcgacgtggaatccaacccaggcccttctagaggccatatgaccgagtacaagcccacggtgcgcctcgccacccgcgacgacgtccccagggccgtacgcaccctcgccgccgcgttcgccgactaccccgccacgcgccacaccgtcgatccggaccgccacatcgagcgggtcaccgagctgcaagaactcttcctcacgcgcgtcgggctcgacatcggcaaggtgtgggtcgcggacgacggcgccgcggtggcggtctggaccacgccggagagcgtcgaagcgggggcggtgttcgccgagatcggcccgcgcatggccgagttgagcggttcccggctggccgcgcagcaacagatggaaggcctcctggcgccgcaccggcccaaggagcccgcgtggttcctggccaccgtcggcgtctcgcccgaccaccagggcaagggtctgggcagcgccgtcgtgctccccggagtggaggcggccgagcgcgccggggtgcccgccttcctggagacctccgcgccccgcaacctccccttctacgagcggctcggcttcaccgtcaccgccgacgtcgaggtgcccgaaggaccgcgcacctggtgcatgacccgcaagcccggtgcctga

SEQ ID NO: 8955 - DNA, 1953 bp, Artificial Sequence
  Synthetic Polynucloetide
atggccttaccagtgaccgccttgctcctgccgctggccttgctgctccacgccgccaggccggagatcgtgctgacacagagccctggcacactgtcactgtctccaggcgaaagagccacactgagctgtagagccagccagagcgtgtccagcgattacctggcttggtatcagcagaagcccggacaggctcccagactgctgatctacggtgcctctagcagagccacaggcatccccgatagattttctggcagcggctccggcaccgacttcaccctgacaattagcagactgcccgaggacttcgccgtgtactactgccagcagtacgtgtcctactggacctttggcggaggcaccaaggtggaaatcaaaagaacagtggctgccctcgagggacagcctaaggccaatcctaccgtgacactgttccctccaagcagcgaagaactccaggccaacaaggccacacttgtgtgcctgatctccgacttctaccctggggctgtgacagtggcttggaaggccgatggatctcctgtgaaagccggcgtggaaaccaccaagccatccaagcagagcaacaacaaatacgccgccagctcctacctgagcctgacacctgagcagtggaagtcccacagatcctacagctgccaagtgacccacgaaggcagcaccgtggaaaagacagtggcccctacagagtgcagccccatcaagaccgatgtgattacaatggaccccaaggacaactgctccaaggacgccaacgataccctgctgctccagctgaccaacaccagcgcctactacatgtacttgttgctgctgctgaagtccgtggtgtacttcgccatcatcacatgctgcctgctgcggagaaccgccttctgctgcaacggcgagaagtctagggccaagcgatctggatctggagcaacaaacttctcactactcaaacaagcaggtgacgtggaggagaatcccgggcctactagtatggactggatttggcgcatccttttccttgtcggcgctgctaccggcgcgcattccttcgaacaggtgcagctggttgaatctggtggcggagttgtgcagcctggcagaagcctgagactgtcttgtgccgccagcggcttcacctttagcagctatgccatgcactgggtccgacaggcccctggcaaaggacttgaatgggtcgccgtgatctcctacgacggcagcaacaagtattacgccgacagcgtgaagggcagattcaccatcagccgggacaacagcaagaacaccctgtacctccagatgaacagcctgagagccgaggacaccgccgtgtactactgtgccaaagaggccccttactacgccaaggactacatggacgtgtggggcaagggcaccaccgtgacagtttcttctacgcgtgcctctacaaagggaccctccgtgtttcctctggctcccagcagcaagtctacaagcggaggaacagccgctctgggctgcctggtcaaggattactttcccgagcctgtgaccgtgtcctggaatagcggagcactgacaagcggcgtgcacacctttccagccgtgctgcaaagcagcggcctgtactctctgagcagcgtggtcacagtgcctagctctagcctgggcacccagacctacatctgcaatgtgaaccacaagcctagcaacaccaaggtggacaagagagtggaacccaagagctgtgaagtgaaaaccgactccaccgaccacgtgaagcccaaagagacagagaacaccaagcagcccagcaagagctgccacaagcccaaggccatcgtgcacaccgagaaagtgaacatgatgagcctgaccgtgctgggcctgcggatgctgttcgccaaaaccgtggccgtgaacttcctgctgaccgccaagctgttcttcctc

SEQ ID NO: 8956 - DNA, 1887 bp, Artificial Sequence
  Synthetic Polynucloetide
atggccttaccagtgaccgccttgctcctgccgctggccttgctgctccacgccgccaggccggagatcgtgctgacacagagccctggcacactgtcactgtctccaggcgaaagagccacactgagctgtagagccagccagagcgtgtccagcgattacctggcttggtatcagcagaagcccggacaggctcccagactgctgatctacggtgcctctagcagagccacaggcatccccgatagattttctggcagcggctccggcaccgacttcaccctgacaattagcagactgcccgaggacttcgccgtgtactactgccagcagtacgtgtcctactggacctttggcggaggcaccaaggtggaaatcaaaagaacagtggctgccctcgagggacagcctaaggccaatcctaccgtgacactgttccctccaagcagcgaagaactccaggccaacaaggccacacttgtgtgcctgatctccgacttctaccctggggctgtgacagtggcttggaaggccgatggatctcctgtgaaagccggcgtggaaaccaccaagccatccaagcagagcaacaacaaatacgccgccagctcctacctgagcctgacacctgagcagtggaagtcccacagatcctacagctgccaagtgacccacgaaggcagcaccgtggaaaagacagtggcccctacagagtgcagcggcagagccgattgcggcatcaccagcgccagctaccaccagggcgtgctgagcgccaccatcctgtacgagatcctgctgggcaaggccaccctgtacgccgtgctggtgtctgccctggtgctgatggctatggtcaagcggaaggacagccggggaagggccaagcgatctggatctggagcaacaaacttctcactactcaaacaagcaggtgacgtggaggagaatcccgggcctactagtatggactggatttggcgcatccttttccttgtcggcgctgctaccggcgcgcattccttcgaacaggtgcagctggttgaatctggtggcggagttgtgcagcctggcagaagcctgagactgtcttgtgccgccagcggcttcacctttagcagctatgccatgcactgggtccgacaggcccctggcaaaggacttgaatgggtcgccgtgatctcctacgacggcagcaacaagtattacgccgacagcgtgaagggcagattcaccatcagccgggacaacagcaagaacaccctgtacctccagatgaacagcctgagagccgaggacaccgccgtgtactactgtgccaaagaggccccttactacgccaaggactacatggacgtgtggggcaagggcaccaccgtgacagtttcttctacgcgtgcctctacaaagggaccctccgtgtttcctctggctcccagcagcaagtctacaagcggaggaacagccgctctgggctgcctggtcaaggattactttcccgagcctgtgaccgtgtcctggaatagcggagcactgacaagcggcgtgcacacctttccagccgtgctgcaaagcagcggcctgtactctctgagcagcgtggtcacagtgcctagctctagcctgggcacccagacctacatctgcaatgtgaaccacaagcctagcaacaccaaggtggacaagagagtggaacccaagagctgtatccccgaggacacattcttcccaagcagcgacgtgccctgcgacgtgaagctggtggaaaagagcttcgagacagacaccaacctgaacttccagaacctgagcgtgatcggcttcagaatcctgctgctgaaagtggccggctttaacctgctgatgaccctgcggctgtggtccagc

SEQ ID NO: 8957 - DNA, 1887 bp, Artificial Sequence
  Synthetic Polynucloetide
atggccttaccagtgaccgccttgctcctgccgctggccttgctgctccacgccgccaggccggagatcgtgctgacacagagccctggcacactgtcactgtctccaggcgaaagagccacactgagctgtagagccagccagagcgtgtccagcgattacctggcttggtatcagcagaagcccggacaggctcccagactgctgatctacggtgcctctagcagagccacaggcatccccgatagattttctggcagcggctccggcaccgacttcaccctgacaattagcagactgcccgaggacttcgccgtgtactactgccagcagtacgtgtcctactggacctttggcggaggcaccaaggtggaaatcaaaagaacagtggctgccctcgagggacagcctaaggccaatcctaccgtgacactgttccctccaagcagcgaagaactccaggccaacaaggccacacttgtgtgcctgatctccgacttctaccctggggctgtgacagtggcttggaaggccgatggatctcctgtgaaagccggcgtggaaaccaccaagccatccaagcagagcaacaacaaatacgccgccagctcctacctgagcctgacacctgagcagtggaagtcccacagatcctacagctgccaagtgacccacgaaggcagcaccgtggaaaagacagtggcccctacagagtgcagcggcagagccgattgcggctttaccagcgagagctaccagcagggcgtgctgagcgccaccatcctgtacgagatcctgctgggcaaggccaccctgtacgccgtgctggtgtctgccctggtgctgatggctatggtcaagcggaaggacagccggggaagggccaagcgatctggatctggagcaacaaacttctcactactcaaacaagcaggtgacgtggaggagaatcccgggcctactagtatggactggatttggcgcatccttttccttgtcggcgctgctaccggcgcgcattccttcgaacaggtgcagctggttgaatctggtggcggagttgtgcagcctggcagaagcctgagactgtcttgtgccgccagcggcttcacctttagcagctatgccatgcactgggtccgacaggcccctggcaaaggacttgaatgggtcgccgtgatctcctacgacggcagcaacaagtattacgccgacagcgtgaagggcagattcaccatcagccgggacaacagcaagaacaccctgtacctccagatgaacagcctgagagccgaggacaccgccgtgtactactgtgccaaagaggccccttactacgccaaggactacatggacgtgtggggcaagggcaccaccgtgacagtttcttctacgcgtgcctctacaaagggaccctccgtgtttcctctggctcccagcagcaagtctacaagcggaggaacagccgctctgggctgcctggtcaaggattactttcccgagcctgtgaccgtgtcctggaatagcggagcactgacaagcggcgtgcacacctttccagccgtgctgcaaagcagcggcctgtactctctgagcagcgtggtcacagtgcctagctctagcctgggcacccagacctacatctgcaatgtgaaccacaagcctagcaacaccaaggtggacaagagagtggaacccaagagctgtatccccgaggacacattcttcccaagccccgagagcagctgcgacgtgaagctggtggaaaagagcttcgagacagacaccaacctgaacttccagaacctgagcgtgatcggcttcagaatcctgctgctgaaagtggccggctttaacctgctgatgaccctgcggctgtggtccagc

SEQ ID NO: 8958 - DNA, 1365 bp, Artificial Sequence
  Synthetic Polynucloetide
atggccttaccagtgaccgccttgctcctgccgctggccttgctgctccacgccgccaggccggagatcgtgctgacacagagccctggcacactgtcactgtctccaggcgaaagagccacactgagctgtagagccagccagagcgtgtccagcgattacctggcttggtatcagcagaagcccggacaggctcccagactgctgatctacggtgcctctagcagagccacaggcatccccgatagattttctggcagcggctccggcaccgacttcaccctgacaattagcagactgcccgaggacttcgccgtgtactactgccagcagtacgtgtcctactggacctttggcggaggcaccaaggtggaaatcaaaagaacagtggctgccggcggaggcggaagtggaggcggaggatctggcggcggaggctctcaggtgcagctggttgaatctggtggcggagttgtgcagcctggcagaagcctgagactgtcttgtgccgccagcggcttcacctttagcagctatgccatgcactgggtccgacaggcccctggcaaaggacttgaatgggtcgccgtgatctcctacgacggcagcaacaagtattacgccgacagcgtgaagggcagattcaccatcagccgggacaacagcaagaacaccctgtacctccagatgaacagcctgagagccgaggacaccgccgtgtactactgtgccaaagaggccccttactacgccaaggactacatggacgtgtggggcaagggcaccaccgtgacagtttcttctacgcgtgacggtaacgaggagatgggaggaatcactcaaaccccttacaaagtctcaatttcaggaacaactgttatccttacatgtccccagtatcctggcagcgagatcctttggcagcataacgacaagaatatagggggagatgaagacgataagaatatcggatctgacgaggatcacttgagcctgaaagagttctccgagcttgaacaaagcggatattatgtgtgctatccgcgcgggtcaaagccggaagacgctaacttttacctttatctccgagccagagtgtgcgaaaattgcatggaaatggacgttatgtccgttgctacaatagttatcgtagatatatgcatcacgggtggactgcttctgctggtttattattggtccaagaatagaaaggccaaagctaaacccgtgaccagaggcgctggcgcaggcggaaggcaaaggggacaaaacaaagaacggccaccaccagtgccaaatccagattatgagcctattcggaaaggacagagggacctgtactctggcctgaatcagagaagaatc

SEQ ID NO: 8959 - DNA, 1260 bp, Artificial Sequence
  Synthetic Polynucloetide
atggccttaccagtgaccgccttgctcctgccgctggccttgctgctccacgccgccaggccggagatcgtgctgacacagagccctggcacactgtcactgtctccaggcgaaagagccacactgagctgtagagccagccagagcgtgtccagcgattacctggcttggtatcagcagaagcccggacaggctcccagactgctgatctacggtgcctctagcagagccacaggcatccccgatagattttctggcagcggctccggcaccgacttcaccctgacaattagcagactgcccgaggacttcgccgtgtactactgccagcagtacgtgtcctactggacctttggcggaggcaccaaggtggaaatcaaaagaacagtggctgccggcggaggcggaagtggaggcggaggatctggcggcggaggctctcaggtgcagctggttgaatctggtggcggagttgtgcagcctggcagaagcctgagactgtcttgtgccgccagcggcttcacctttagcagctatgccatgcactgggtccgacaggcccctggcaaaggacttgaatgggtcgccgtgatctcctacgacggcagcaacaagtattacgccgacagcgtgaagggcagattcaccatcagccgggacaacagcaagaacaccctgtacctccagatgaacagcctgagagccgaggacaccgccgtgtactactgtgccaaagaggccccttactacgccaaggactacatggacgtgtggggcaagggcaccaccgtgacagtttcttctacgcgtttcaagatccccatcgaggaactggaagatcgggtgttcgtgaactgcaacacctctatcacctgggtggaaggcaccgtgggaacactgctgagcgacatcaccagactggacctcggcaagcggattctggaccctcggggcatctacagatgcaacggcaccgacatctacaaggacaaagaaagcaccgtgcaggtccactacagaatgtgccagtcctgcgtggaactggaccctgctacagtggccggcatcatcgtgaccgatgtgatcgctactctgctgctggctctgggagtgttctgcttcgccggacacgaaacaggcagactgtctggcgctgccgatacacaggccctgctgagaaacgaccaagtgtatcagcccctgcgcgacagagatgatgcccagtattctcacctcggcggcaactgggctagaaacaag

SEQ ID NO: 8960 - DNA, 1290 bp, Artificial Sequence
  Synthetic Polynucloetide
atggccttaccagtgaccgccttgctcctgccgctggccttgctgctccacgccgccaggccggagatcgtgctgacacagagccctggcacactgtcactgtctccaggcgaaagagccacactgagctgtagagccagccagagcgtgtccagcgattacctggcttggtatcagcagaagcccggacaggctcccagactgctgatctacggtgcctctagcagagccacaggcatccccgatagattttctggcagcggctccggcaccgacttcaccctgacaattagcagactgcccgaggacttcgccgtgtactactgccagcagtacgtgtcctactggacctttggcggaggcaccaaggtggaaatcaaaagaacagtggctgccggcggaggcggaagtggaggcggaggatctggcggcggaggctctcaggtgcagctggttgaatctggtggcggagttgtgcagcctggcagaagcctgagactgtcttgtgccgccagcggcttcacctttagcagctatgccatgcactgggtccgacaggcccctggcaaaggacttgaatgggtcgccgtgatctcctacgacggcagcaacaagtattacgccgacagcgtgaagggcagattcaccatcagccgggacaacagcaagaacaccctgtacctccagatgaacagcctgagagccgaggacaccgccgtgtactactgtgccaaagaggccccttactacgccaaggactacatggacgtgtggggcaagggcaccaccgtgacagtttcttctacgcgtcagagcatcaagggcaaccacctggtcaaggtgtacgactaccaagaggacggcagcgtgctgctgacatgtgatgccgaggccaagaacatcacctggtttaaggacggcaagatgatcggcttcctgaccgaggacaagaagaagtggaacctgggcagcaacgctaaggaccccagaggcatgtatcagtgcaagggcagccagaacaagagcaagcccctccaggtgtactaccggatgtgccagaactgcatcgagctgaacgccgctaccatcagcggctttctgttcgccgagatcgtgtccatcttcgtgctggccgtgggcgtgtactttatcgctggacaggatggcgtgcggcagagcagagcttccgataagcaaaccctgctgcctaacgaccagctgtaccagcctctgaaggacagagaggacgaccagtacagccacctccagggcaatcagctgagaagaaac

SEQ ID NO: 8961 - DNA, 1239 bp, Artificial Sequence
  Synthetic Polynucloetide
atggccttaccagtgaccgccttgctcctgccgctggccttgctgctccacgccgccaggccggagatcgtgctgacacagagccctggcacactgtcactgtctccaggcgaaagagccacactgagctgtagagccagccagagcgtgtccagcgattacctggcttggtatcagcagaagcccggacaggctcccagactgctgatctacggtgcctctagcagagccacaggcatccccgatagattttctggcagcggctccggcaccgacttcaccctgacaattagcagactgcccgaggacttcgccgtgtactactgccagcagtacgtgtcctactggacctttggcggaggcaccaaggtggaaatcaaaagaacagtggctgccggcggaggcggaagtggaggcggaggatctggcggcggaggctctcaggtgcagctggttgaatctggtggcggagttgtgcagcctggcagaagcctgagactgtcttgtgccgccagcggcttcacctttagcagctatgccatgcactgggtccgacaggcccctggcaaaggacttgaatgggtcgccgtgatctcctacgacggcagcaacaagtattacgccgacagcgtgaagggcagattcaccatcagccgggacaacagcaagaacaccctgtacctccagatgaacagcctgagagccgaggacaccgccgtgtactactgtgccaaagaggccccttactacgccaaggactacatggacgtgtggggcaagggcaccaccgtgacagtttcttctacgcgtcagagttttgggttgttggaccctaaattgtgctatctgttggacggaatcctgttcatttacggagtgatcctgaccgcattgttcctgcgggttaagttttccagatccgcagacgcacccgcttaccaacaagggcagaaccaactctacaatgaacttaatttggggcggagggaagagtacgacgttctggacaaaaggaggggacgagatcccgagatgggcggaaagcctcagcgaaggaagaatccgcaagaggggctttataacgaactccagaaagataaaatggcagaagcctatagtgagattgggatgaagggagaaaggaggaggggtaaaggtcacgatgggttgtaccaaggattgagcacagccactaaagatacctatgatgcgctccacatgcaggccctgccgccaaga

SEQ ID NO: 8962 - DNA, 1365 bp, Artificial Sequence
  Synthetic Polynucloetide
atggccttaccagtgaccgccttgctcctgccgctggccttgctgctccacgccgccaggccgcaggtgcagctggttgaatctggtggcggagttgtgcagcctggcagaagcctgagactgtcttgtgccgccagcggcttcacctttagcagctatgccatgcactgggtccgacaggcccctggcaaaggacttgaatgggtcgccgtgatctcctacgacggcagcaacaagtattacgccgacagcgtgaagggcagattcaccatcagccgggacaacagcaagaacaccctgtacctccagatgaacagcctgagagccgaggacaccgccgtgtactactgtgccaaagaggccccttactacgccaaggactacatggacgtgtggggcaagggcaccaccgtgacagtttcttctggcggaggcggaagtggaggcggaggatctggcggcggaggctctgagatcgtgctgacacagagccctggcacactgtcactgtctccaggcgaaagagccacactgagctgtagagccagccagagcgtgtccagcgattacctggcttggtatcagcagaagcccggacaggctcccagactgctgatctacggtgcctctagcagagccacaggcatccccgatagattttctggcagcggctccggcaccgacttcaccctgacaattagcagactgcccgaggacttcgccgtgtactactgccagcagtacgtgtcctactggacctttggcggaggcaccaaggtggaaatcaaaagaacagtggctgccacgcgtgacggtaacgaggagatgggaggaatcactcaaaccccttacaaagtctcaatttcaggaacaactgttatccttacatgtccccagtatcctggcagcgagatcctttggcagcataacgacaagaatatagggggagatgaagacgataagaatatcggatctgacgaggatcacttgagcctgaaagagttctccgagcttgaacaaagcggatattatgtgtgctatccgcgcgggtcaaagccggaagacgctaacttttacctttatctccgagccagagtgtgcgaaaattgcatggaaatggacgttatgtccgttgctacaatagttatcgtagatatatgcatcacgggtggactgcttctgctggtttattattggtccaagaatagaaaggccaaagctaaacccgtgaccagaggcgctggcgcaggcggaaggcaaaggggacaaaacaaagaacggccaccaccagtgccaaatccagattatgagcctattcggaaaggacagagggacctgtactctggcctgaatcagagaagaatc

SEQ ID NO: 8963 - DNA, 1260 bp, Artificial Sequence
  Synthetic Polynucloetide
atggccttaccagtgaccgccttgctcctgccgctggccttgctgctccacgccgccaggccgcaggtgcagctggttgaatctggtggcggagttgtgcagcctggcagaagcctgagactgtcttgtgccgccagcggcttcacctttagcagctatgccatgcactgggtccgacaggcccctggcaaaggacttgaatgggtcgccgtgatctcctacgacggcagcaacaagtattacgccgacagcgtgaagggcagattcaccatcagccgggacaacagcaagaacaccctgtacctccagatgaacagcctgagagccgaggacaccgccgtgtactactgtgccaaagaggccccttactacgccaaggactacatggacgtgtggggcaagggcaccaccgtgacagtttcttctggcggaggcggaagtggaggcggaggatctggcggcggaggctctgagatcgtgctgacacagagccctggcacactgtcactgtctccaggcgaaagagccacactgagctgtagagccagccagagcgtgtccagcgattacctggcttggtatcagcagaagcccggacaggctcccagactgctgatctacggtgcctctagcagagccacaggcatccccgatagattttctggcagcggctccggcaccgacttcaccctgacaattagcagactgcccgaggacttcgccgtgtactactgccagcagtacgtgtcctactggacctttggcggaggcaccaaggtggaaatcaaaagaacagtggctgccacgcgtttcaagatccccatcgaggaactggaagatcgggtgttcgtgaactgcaacacctctatcacctgggtggaaggcaccgtgggaacactgctgagcgacatcaccagactggacctcggcaagcggattctggaccctcggggcatctacagatgcaacggcaccgacatctacaaggacaaagaaagcaccgtgcaggtccactacagaatgtgccagtcctgcgtggaactggaccctgctacagtggccggcatcatcgtgaccgatgtgatcgctactctgctgctggctctgggagtgttctgcttcgccggacacgaaacaggcagactgtctggcgctgccgatacacaggccctgctgagaaacgaccaagtgtatcagcccctgcgcgacagagatgatgcccagtattctcacctcggcggcaactgggctagaaacaag

SEQ ID NO: 8964 - DNA, 1290 bp, Artificial Sequence
  Synthetic Polynucloetide
atggccttaccagtgaccgccttgctcctgccgctggccttgctgctccacgccgccaggccgcaggtgcagctggttgaatctggtggcggagttgtgcagcctggcagaagcctgagactgtcttgtgccgccagcggcttcacctttagcagctatgccatgcactgggtccgacaggcccctggcaaaggacttgaatgggtcgccgtgatctcctacgacggcagcaacaagtattacgccgacagcgtgaagggcagattcaccatcagccgggacaacagcaagaacaccctgtacctccagatgaacagcctgagagccgaggacaccgccgtgtactactgtgccaaagaggccccttactacgccaaggactacatggacgtgtggggcaagggcaccaccgtgacagtttcttctggcggaggcggaagtggaggcggaggatctggcggcggaggctctgagatcgtgctgacacagagccctggcacactgtcactgtctccaggcgaaagagccacactgagctgtagagccagccagagcgtgtccagcgattacctggcttggtatcagcagaagcccggacaggctcccagactgctgatctacggtgcctctagcagagccacaggcatccccgatagattttctggcagcggctccggcaccgacttcaccctgacaattagcagactgcccgaggacttcgccgtgtactactgccagcagtacgtgtcctactggacctttggcggaggcaccaaggtggaaatcaaaagaacagtggctgccacgcgtcagagcatcaagggcaaccacctggtcaaggtgtacgactaccaagaggacggcagcgtgctgctgacatgtgatgccgaggccaagaacatcacctggtttaaggacggcaagatgatcggcttcctgaccgaggacaagaagaagtggaacctgggcagcaacgctaaggaccccagaggcatgtatcagtgcaagggcagccagaacaagagcaagcccctccaggtgtactaccggatgtgccagaactgcatcgagctgaacgccgctaccatcagcggctttctgttcgccgagatcgtgtccatcttcgtgctggccgtgggcgtgtactttatcgctggacaggatggcgtgcggcagagcagagcttccgataagcaaaccctgctgcctaacgaccagctgtaccagcctctgaaggacagagaggacgaccagtacagccacctccagggcaatcagctgagaagaaac

SEQ ID NO: 8965 - DNA, 1239 bp, Artificial Sequence
  Synthetic Polynucloetide
atggccttaccagtgaccgccttgctcctgccgctggccttgctgctccacgccgccaggccgcaggtgcagctggttgaatctggtggcggagttgtgcagcctggcagaagcctgagactgtcttgtgccgccagcggcttcacctttagcagctatgccatgcactgggtccgacaggcccctggcaaaggacttgaatgggtcgccgtgatctcctacgacggcagcaacaagtattacgccgacagcgtgaagggcagattcaccatcagccgggacaacagcaagaacaccctgtacctccagatgaacagcctgagagccgaggacaccgccgtgtactactgtgccaaagaggccccttactacgccaaggactacatggacgtgtggggcaagggcaccaccgtgacagtttcttctggcggaggcggaagtggaggcggaggatctggcggcggaggctctgagatcgtgctgacacagagccctggcacactgtcactgtctccaggcgaaagagccacactgagctgtagagccagccagagcgtgtccagcgattacctggcttggtatcagcagaagcccggacaggctcccagactgctgatctacggtgcctctagcagagccacaggcatccccgatagattttctggcagcggctccggcaccgacttcaccctgacaattagcagactgcccgaggacttcgccgtgtactactgccagcagtacgtgtcctactggacctttggcggaggcaccaaggtggaaatcaaaagaacagtggctgccacgcgtcagagttttgggttgttggaccctaaattgtgctatctgttggacggaatcctgttcatttacggagtgatcctgaccgcattgttcctgcgggttaagttttccagatccgcagacgcacccgcttaccaacaagggcagaaccaactctacaatgaacttaatttggggcggagggaagagtacgacgttctggacaaaaggaggggacgagatcccgagatgggcggaaagcctcagcgaaggaagaatccgcaagaggggctttataacgaactccagaaagataaaatggcagaagcctatagtgagattgggatgaagggagaaaggaggaggggtaaaggtcacgatgggttgtaccaaggattgagcacagccactaaagatacctatgatgcgctccacatgcaggccctgccgccaaga

SEQ ID NO: 8966 - DNA, 1941 bp, Artificial Sequence
  Synthetic Polynucloetide
atggccttaccagtgaccgccttgctcctgccgctggccttgctgctccacgccgccaggccggagatcgtgctgacacagagccctggcacactgtcactgtctccaggcgaaagagccacactgagctgtagagccagccagagcgtgtccagcgattacctggcttggtatcagcagaagcccggacaggctcccagactgctgatctacggtgcctctagcagagccacaggcatccccgatagattttctggcagcggctccggcaccgacttcaccctgacaattagcagactgcccgaggacttcgccgtgtactactgccagcagtacgtgtcctactggacctttggcggaggcaccaaggtggaaatcaaaagaacagtggctgccggcggaggcggaagtggaggcggaggatctggcggcggaggctctcaggtgcagctggttgaatctggtggcggagttgtgcagcctggcagaagcctgagactgtcttgtgccgccagcggcttcacctttagcagctatgccatgcactgggtccgacaggcccctggcaaaggacttgaatgggtcgccgtgatctcctacgacggcagcaacaagtattacgccgacagcgtgaagggcagattcaccatcagccgggacaacagcaagaacaccctgtacctccagatgaacagcctgagagccgaggacaccgccgtgtactactgtgccaaagaggccccttactacgccaaggactacatggacgtgtggggcaagggcaccaccgtgacagtttcttctacgcgtgggagcggcatccagaaccctgatcctgccgtgtaccagctgcgggatagcaagagcagcgacaagagcgtgtgtctgttcaccgacttcgacagccagaccaacgtgtcccagagcaaggactccgacgtgtacatcaccgataagaccgtgctggacatgcggagcatggacttcaagagcaactccgccgtggcctggtccaacaagtccgatttcgcctgcgccaacgccttcaacaacagcattatccccgaggacacattcttcccaagccccgagagcagctgcgacgtgaagctggtggaaaagagcttcgagacagacaccaacctgaacttccagaacctgagcgtgatcggcttcagaatcctgctgctgaaagtggccggctttaacctgctgatgaccctgcggctgtggtccagccgcgccaagagaagcggatctggcgtgaagcagaccctgaatttcgacctgctgaagctggctggcgacgtggaatccaacccaggcccttctagaggccatatgaccgagtacaagcccacggtgcgcctcgccacccgcgacgacgtccccagggccgtacgcaccctcgccgccgcgttcgccgactaccccgccacgcgccacaccgtcgatccggaccgccacatcgagcgggtcaccgagctgcaagaactcttcctcacgcgcgtcgggctcgacatcggcaaggtgtgggtcgcggacgacggcgccgcggtggcggtctggaccacgccggagagcgtcgaagcgggggcggtgttcgccgagatcggcccgcgcatggccgagttgagcggttcccggctggccgcgcagcaacagatggaaggcctcctggcgccgcaccggcccaaggagcccgcgtggttcctggccaccgtcggcgtctcgcccgaccaccagggcaagggtctgggcagcgccgtcgtgctccccggagtggaggcggccgagcgcgccggggtgcccgccttcctggagacctccgcgccccgcaacctccccttctacgagcggctcggcttcaccgtcaccgccgacgtcgaggtgcccgaaggaccgcgcacctggtgcatgacccgcaagcccggtgcctga

SEQ ID NO: 8967 - DNA, 2037 bp, Artificial Sequence
  Synthetic Polynucloetide
atggccttaccagtgaccgccttgctcctgccgctggccttgctgctccacgccgccaggccggagatcgtgctgacacagagccctggcacactgtcactgtctccaggcgaaagagccacactgagctgtagagccagccagagcgtgtccagcgattacctggcttggtatcagcagaagcccggacaggctcccagactgctgatctacggtgcctctagcagagccacaggcatccccgatagattttctggcagcggctccggcaccgacttcaccctgacaattagcagactgcccgaggacttcgccgtgtactactgccagcagtacgtgtcctactggacctttggcggaggcaccaaggtggaaatcaaaagaacagtggctgccggcggaggcggaagtggaggcggaggatctggcggcggaggctctcaggtgcagctggttgaatctggtggcggagttgtgcagcctggcagaagcctgagactgtcttgtgccgccagcggcttcacctttagcagctatgccatgcactgggtccgacaggcccctggcaaaggacttgaatgggtcgccgtgatctcctacgacggcagcaacaagtattacgccgacagcgtgaagggcagattcaccatcagccgggacaacagcaagaacaccctgtacctccagatgaacagcctgagagccgaggacaccgccgtgtactactgtgccaaagaggccccttactacgccaaggactacatggacgtgtggggcaagggcaccaccgtgacagtttcttctctcgaggacctgaagaacgtgttcccacctgaggtggccgtgttcgagcctagcgaggccgagatcagccacacccagaaagccaccctcgtgtgcctggctaccggcttctaccccgaccatgtggaactgtcttggtgggtcaacggcaaagaggtgcacagcggcgtgtctaccgacccccagccactgaaagaacagcccgccctgaacgacagccggtactgcctgagcagcagactgagagtgtccgccaccttctggcagaacccccggaaccacttcagatgccaggtgcagttctacggcctgagcgagaacgacgagtggacccaggacagagccaagcccgtgacccagatcgtgtctgccgaagcctggggcagagccgattgcggctttaccagcgagagctaccagcagggcgtgctgagcgccaccatcctgtacgagatcctgctgggcaaggccaccctgtacgccgtgctggtgtctgccctggtgctgatggctatggtcaagcggaaggacagccggggaagggccaagcgatctggatctggagcaacaaacttctcactactcaaacaagcaggtgacgtggaggagaatcccgggcctactagaggccatatgaccgagtacaagcccacggtgcgcctcgccacccgcgacgacgtccccagggccgtacgcaccctcgccgccgcgttcgccgactaccccgccacgcgccacaccgtcgatccggaccgccacatcgagcgggtcaccgagctgcaagaactcttcctcacgcgcgtcgggctcgacatcggcaaggtgtgggtcgcggacgacggcgccgcggtggcggtctggaccacgccggagagcgtcgaagcgggggcggtgttcgccgagatcggcccgcgcatggccgagttgagcggttcccggctggccgcgcagcaacagatggaaggcctcctggcgccgcaccggcccaaggagcccgcgtggttcctggccaccgtcggcgtctcgcccgaccaccagggcaagggtctgggcagcgccgtcgtgctccccggagtggaggcggccgagcgcgccggggtgcccgccttcctggagacctccgcgccccgcaacctccccttctacgagcggctcggcttcaccgtcaccgccgacgtcgaggtgcccgaaggaccgcgcacctggtgcatgacccgcaagcccggtgcctga

SEQ ID NO: 8968 - DNA, 2187 bp, Artificial Sequence
  Synthetic Polynucloetide
atggccttaccagtgaccgccttgctcctgccgctggccttgctgctccacgccgccaggccggagatcgtgctgacacagagccctggcacactgtcactgtctccaggcgaaagagccacactgagctgtagagccagccagagcgtgtccagcgattacctggcttggtatcagcagaagcccggacaggctcccagactgctgatctacggtgcctctagcagagccacaggcatccccgatagattttctggcagcggctccggcaccgacttcaccctgacaattagcagactgcccgaggacttcgccgtgtactactgccagcagtacgtgtcctactggacctttggcggaggcaccaaggtggaaatcaaaagaacagtggctgccggcggaggcggaagtggaggcggaggatctggcggcggaggctctcaggtgcagctggttgaatctggtggcggagttgtgcagcctggcagaagcctgagactgtcttgtgccgccagcggcttcacctttagcagctatgccatgcactgggtccgacaggcccctggcaaaggacttgaatgggtcgccgtgatctcctacgacggcagcaacaagtattacgccgacagcgtgaagggcagattcaccatcagccgggacaacagcaagaacaccctgtacctccagatgaacagcctgagagccgaggacaccgccgtgtactactgtgccaaagaggccccttactacgccaaggactacatggacgtgtggggcaagggcaccaccgtgacagtttcttctacgcgtgagcagaaactgatctcggaagaggatctggggagcggcaccccattcccttctctggcccctcccatcatgctgctggtggacggcaagcagcagatggtggtcgtgtgcctggtgctggatgtggccccacctggactggacagccccatctggtttagcgccggcaatggctctgccctggacgcctttacctacggcccaagccctgccaccgatggcacctggacaaatctggcccacctgagcctgcccagcgaggaactggcttcttgggagcctctcgtgtgccacacaggacctggcgctgagggacacagcagatccacccagcctatgcacctgtctggcgaggccagcaccgccagaacctgtcctcaggaacctctgagaggcacccctggcggagcactgtggctgggagtgctgagactgctgctgttcaagctgctgctgtttgacctgctgctgacctgctcctgtctgtgcgatcctgccggccctctgccttctcctgccaccaccacaagactgagagccctgggcagccacagactgcaccctgccacagagacaggcggcagagaggccacaagcagccctagaccccagcccagagacagaagatggggcgataccccccctggcagaaagcctggatctccagtccgcgccaagagaagcggatctggcgtgaagcagaccctgaatttcgacctgctgaagctggctggcgacgtggaatccaacccaggcccttctagatctagaggccatatgaccgagtacaagcccacggtgcgcctcgccacccgcgacgacgtccccagggccgtacgcaccctcgccgccgcgttcgccgactaccccgccacgcgccacaccgtcgatccggaccgccacatcgagcgggtcaccgagctgcaagaactcttcctcacgcgcgtcgggctcgacatcggcaaggtgtgggtcgcggacgacggcgccgcggtggcggtctggaccacgccggagagcgtcgaagcgggggcggtgttcgccgagatcggcccgcgcatggccgagttgagcggttcccggctggccgcgcagcaacagatggaaggcctcctggcgccgcaccggcccaaggagcccgcgtggttcctggccaccgtcggcgtctcgcccgaccaccagggcaagggtctgggcagcgccgtcgtgctccccggagtggaggcggccgagcgcgccggggtgcccgccttcctggagacctccgcgccccgcaacctccccttctacgagcggctcggcttcaccgtcaccgccgacgtcgaggtgcccgaaggaccgcgcacctggtgcatgacccgcaagcccggtgcctga

SEQ ID NO: 8969 - DNA, 1629 bp, Artificial Sequence
  Synthetic Polynucloetide
atggccttaccagtgaccgccttgctcctgccgctggccttgctgctccacgccgccaggccggagatcgtgctgacacagagccctggcacactgtcactgtctccaggcgaaagagccacactgagctgtagagccagccagagcgtgtccagcgattacctggcttggtatcagcagaagcccggacaggctcccagactgctgatctacggtgcctctagcagagccacaggcatccccgatagattttctggcagcggctccggcaccgacttcaccctgacaattagcagactgcccgaggacttcgccgtgtactactgccagcagtacgtgtcctactggacctttggcggaggcaccaaggtggaaatcaaaagaacagtggctgccctcgaggacctgaagaacgtgttcccacctgaggtggccgtgttcgagcctagcgaggccgagatcagccacacccagaaagccaccctcgtgtgcctggctaccggcttctaccccgaccatgtggaactgtcttggtgggtcaacggcaaagaggtgcacagcggcgtgtctaccgacccccagccactgaaagaacagcccgccctgaacgacagccggtactgcctgagcagcagactgagagtgtccgccaccttctggcagaacccccggaaccacttcagatgccaggtgcagttctacggcctgagcgagaacgacgagtggacccaggacagagccaagcccgtgacccagatcgtgtctgccgaagcctggggcagagccgattgcggctttaccagcgagagctaccagcagggcgtgctgagcgccaccatcctgtacgagatcctgctgggcaaggccaccctgtacgccgtgctggtgtctgccctggtgctgatggctatggtcaagcggaaggacagccggggaagggccaagcgatctggatctggagcaacaaacttctcactactcaaacaagcaggtgacgtggaggagaatcccgggcctactagaggccatatgaccgagtacaagcccacggtgcgcctcgccacccgcgacgacgtccccagggccgtacgcaccctcgccgccgcgttcgccgactaccccgccacgcgccacaccgtcgatccggaccgccacatcgagcgggtcaccgagctgcaagaactcttcctcacgcgcgtcgggctcgacatcggcaaggtgtgggtcgcggacgacggcgccgcggtggcggtctggaccacgccggagagcgtcgaagcgggggcggtgttcgccgagatcggcccgcgcatggccgagttgagcggttcccggctggccgcgcagcaacagatggaaggcctcctggcgccgcaccggcccaaggagcccgcgtggttcctggccaccgtcggcgtctcgcccgaccaccagggcaagggtctgggcagcgccgtcgtgctccccggagtggaggcggccgagcgcgccggggtgcccgccttcctggagacctccgcgccccgcaacctccccttctacgagcggctcggcttcaccgtcaccgccgacgtcgaggtgcccgaaggaccgcgcacctggtgcatgacccgcaagcccggtgcctga

SEQ ID NO: 8970 - DNA, 936 bp, Artificial Sequence
  Synthetic Polynucloetide
atggccttaccagtgaccgccttgctcctgccgctggccttgctgctccacgccgccaggccggagatcgtgctgacacagagccctggcacactgtcactgtctccaggcgaaagagccacactgagctgtagagccagccagagcgtgtccagcgattacctggcttggtatcagcagaagcccggacaggctcccagactgctgatctacggtgcctctagcagagccacaggcatccccgatagattttctggcagcggctccggcaccgacttcaccctgacaattagcagactgcccgaggacttcgccgtgtactactgccagcagtacgtgtcctactggacctttggcggaggcaccaaggtggaaatcaaaagaacagtggctgccctcgaggacctgaagaacgtgttcccacctgaggtggccgtgttcgagcctagcgaggccgagatcagccacacccagaaagccaccctcgtgtgcctggctaccggcttctaccccgaccatgtggaactgtcttggtgggtcaacggcaaagaggtgcacagcggcgtgtctaccgacccccagccactgaaagaacagcccgccctgaacgacagccggtactgcctgagcagcagactgagagtgtccgccaccttctggcagaacccccggaaccacttcagatgccaggtgcagttctacggcctgagcgagaacgacgagtggacccaggacagagccaagcccgtgacccagatcgtgtctgccgaagcctggggcagagccgattgcggctttaccagcgagagctaccagcagggcgtgctgagcgccaccatcctgtacgagatcctgctgggcaaggccaccctgtacgccgtgctggtgtctgccctggtgctgatggctatggtcaagcggaaggacagccgggga

SEQ ID NO: 8971 - DNA, 1353 bp, Artificial Sequence
  Synthetic Polynucloetide
atggactggatttggcgcatccttttccttgtcggcgctgctaccggcgcgcattccttcgaacaggtgcagctggttgaatctggtggcggagttgtgcagcctggcagaagcctgagactgtcttgtgccgccagcggcttcacctttagcagctatgccatgcactgggtccgacaggcccctggcaaaggacttgaatgggtcgccgtgatctcctacgacggcagcaacaagtattacgccgacagcgtgaagggcagattcaccatcagccgggacaacagcaagaacaccctgtacctccagatgaacagcctgagagccgaggacaccgccgtgtactactgtgccaaagaggccccttactacgccaaggactacatggacgtgtggggcaagggcaccaccgtgacagtttcttctacgcgtatccagaaccctgatcctgccgtgtaccagctgcgggatagcaagagcagcgacaagagcgtgtgtctgttcaccgacttcgacagccagaccaacgtgtcccagagcaaggactccgacgtgtacatcaccgataagaccgtgctggacatgcggagcatggacttcaagagcaactccgccgtggcctggtccaacaagtccgatttcgcctgcgccaacgccttcaacaacagcattatccccgaggacacattcttcccaagccccgagagcagctgcgacgtgaagctggtggaaaagagcttcgagacagacaccaacctgaacttccagaacctgagcgtgatcggcttcagaatcctgctgctgaaagtggccggctttaacctgctgatgaccctgcggctgtggtccagccgcgccaagagaagcggatctggcgtgaagcagaccctgaatttcgacctgctgaagctggctggcgacgtggaatccaacccaggcccttctagaggccatatggccaagcctttgtctcaagaagaatccaccctcattgaaagagcaacggctacaatcaacagcatccccatctctgaagactacagcgtcgccagcgcagctctctctagcgacggccgcatcttcactggtgtcaatgtatatcattttactgggggaccttgtgcagaactcgtggtgctgggcactgctgctgctgcggcagctggcaacctgacttgtatcgtcgcgatcggaaatgagaacaggggcatcttgagcccctgcggacggtgccgacaggtgcttctcgatctgcatcctgggatcaaagccatagtgaaggacagtgatggacagccgacggcagttgggattcgtgaattgctgccctctggttatgtgtgggagggctga

SEQ ID NO: 8972 - DNA, 852 bp, Artificial Sequence
  Synthetic Polynucloetide
atggactggatttggcgcatccttttccttgtcggcgctgctaccggcgcgcattccttcgaacaggtgcagctggttgaatctggtggcggagttgtgcagcctggcagaagcctgagactgtcttgtgccgccagcggcttcacctttagcagctatgccatgcactgggtccgacaggcccctggcaaaggacttgaatgggtcgccgtgatctcctacgacggcagcaacaagtattacgccgacagcgtgaagggcagattcaccatcagccgggacaacagcaagaacaccctgtacctccagatgaacagcctgagagccgaggacaccgccgtgtactactgtgccaaagaggccccttactacgccaaggactacatggacgtgtggggcaagggcaccaccgtgacagtttcttctacgcgtatccagaaccctgatcctgccgtgtaccagctgcgggatagcaagagcagcgacaagagcgtgtgtctgttcaccgacttcgacagccagaccaacgtgtcccagagcaaggactccgacgtgtacatcaccgataagaccgtgctggacatgcggagcatggacttcaagagcaactccgccgtggcctggtccaacaagtccgatttcgcctgcgccaacgccttcaacaacagcattatccccgaggacacattcttcccaagccccgagagcagctgcgacgtgaagctggtggaaaagagcttcgagacagacaccaacctgaacttccagaacctgagcgtgatcggcttcagaatcctgctgctgaaagtggccggctttaacctgctgatgaccctgcggctgtggtccagc

SEQ ID NO: 8973 - DNA, 1683 bp, Artificial Sequence
  Synthetic Polynucloetide
atggccttaccagtgaccgccttgctcctgccgctggccttgctgctccacgccgccaggccggagatcgtgctgacacagagccctggcacactgtcactgtctccaggcgaaagagccacactgagctgtagagccagccagagcgtgtccagcgattacctggcttggtatcagcagaagcccggacaggctcccagactgctgatctacggtgcctctagcagagccacaggcatccccgatagattttctggcagcggctccggcaccgacttcaccctgacaattagcagactgcccgaggacttcgccgtgtactactgccagcagtacgtgtcctactggacctttggcggaggcaccaaggtggaaatcaaaagaacagtggctgccctcgaggggaaaccaattcccaaccctcttctgggactggattcaaccggcagcggcgaggacctgaagaacgtgttcccacctgaggtggccgtgttcgagcctagcgaggccgagatcagccacacccagaaagccaccctcgtgtgcctggctaccggcttctaccccgaccatgtggaactgtcttggtgggtcaacggcaaagaggtgcacagcggcgtgtgtaccgacccccagccactgaaagaacagcccgccctgaacgacagccggtactgcctgagcagcagactgagagtgtccgccaccttctggcagaacccccggaaccacttcagatgccaggtgcagttctacggcctgagcgagaacgacgagtggacccaggacagagccaagcccgtgacccagatcgtgtctgccgaagcctggggcagagccgattgcggctttaccagcgagagctaccagcagggcgtgctgagcgccaccatcctgtacgagatcctgctgggcaaggccaccctgtacgccgtgctggtgtctgccctggtgctgatggctatggtcaagcggaaggacagccggggaagggccaagcgatctggatctggagcaacaaacttctcactactcaaacaagcaggtgacgtggaggagaatcccgggcctactagaggccatatgaccgagtacaagcccacggtgcgcctcgccacccgcgacgacgtccccagggccgtacgcaccctcgccgccgcgttcgccgactaccccgccacgcgccacaccgtcgatccggaccgccacatcgagcgggtcaccgagctgcaagaactcttcctcacgcgcgtcgggctcgacatcggcaaggtgtgggtcgcggacgacggcgccgcggtggcggtctggaccacgccggagagcgtcgaagcgggggcggtgttcgccgagatcggcccgcgcatggccgagttgagcggttcccggctggccgcgcagcaacagatggaaggcctcctggcgccgcaccggcccaaggagcccgcgtggttcctggccaccgtcggcgtctcgcccgaccaccagggcaagggtctgggcagcgccgtcgtgctccccggagtggaggcggccgagcgcgccggggtgcccgccttcctggagacctccgcgccccgcaacctccccttctacgagcggctcggcttcaccgtcaccgccgacgtcgaggtgcccgaaggaccgcgcacctggtgcatgacccgcaagcccggtgcctga

SEQ ID NO: 8974 - DNA, 993 bp, Artificial Sequence
  Synthetic Polynucloetide
atggccttaccagtgaccgccttgctcctgccgctggccttgctgctccacgccgccaggccggagatcgtgctgacacagagccctggcacactgtcactgtctccaggcgaaagagccacactgagctgtagagccagccagagcgtgtccagcgattacctggcttggtatcagcagaagcccggacaggctcccagactgctgatctacggtgcctctagcagagccacaggcatccccgatagattttctggcagcggctccggcaccgacttcaccctgacaattagcagactgcccgaggacttcgccgtgtactactgccagcagtacgtgtcctactggacctttggcggaggcaccaaggtggaaatcaaaagaacagtggctgccctcgaggggaaaccaattcccaaccctcttctgggactggattcaaccggcagcggcgaggacctgaagaacgtgttcccacctgaggtggccgtgttcgagcctagcgaggccgagatcagccacacccagaaagccaccctcgtgtgcctggctaccggcttctaccccgaccatgtggaactgtcttggtgggtcaacggcaaagaggtgcacagcggcgtgtgtaccgacccccagccactgaaagaacagcccgccctgaacgacagccggtactgcctgagcagcagactgagagtgtccgccaccttctggcagaacccccggaaccacttcagatgccaggtgcagttctacggcctgagcgagaacgacgagtggacccaggacagagccaagcccgtgacccagatcgtgtctgccgaagcctggggcagagccgattgcggctttaccagcgagagctaccagcagggcgtgctgagcgccaccatcctgtacgagatcctgctgggcaaggccaccctgtacgccgtgctggtgtctgccctggtgctgatggctatggtcaagcggaaggacagccggggatga

SEQ ID NO: 8975 - DNA, 1389 bp, Artificial Sequence
  Synthetic Polynucloetide
atggactggatttggcgcatccttttccttgtcggcgctgctaccggcgcgcattccttcgaacaggtgcagctggttgaatctggtggcggagttgtgcagcctggcagaagcctgagactgtcttgtgccgccagcggcttcacctttagcagctatgccatgcactgggtccgacaggcccctggcaaaggacttgaatgggtcgccgtgatctcctacgacggcagcaacaagtattacgccgacagcgtgaagggcagattcaccatcagccgggacaacagcaagaacaccctgtacctccagatgaacagcctgagagccgaggacaccgccgtgtactactgtgccaaagaggccccttactacgccaaggactacatggacgtgtggggcaagggcaccaccgtgacagtttcttctacgcgtgagcagaaactgatctcggaagaggatgggagcggcatccagaaccctgatcctgccgtgtaccagctgcgggatagcaagagcagcgacaagagcgtgtgtctgttcaccgacttcgacagccagaccaacgtgtcccagagcaaggactccgacgtgtacatcaccgataagtgcgtgctggacatgcggagcatggacttcaagagcaactccgccgtggcctggtccaacaagtccgatttcgcctgcgccaacgccttcaacaacagcattatccccgaggacacattcttcccaagccccgagagcagctgcgacgtgaagctggtggaaaagagcttcgagacagacaccaacctgaacttccagaacctgagcgtgatcggcttcagaatcctgctgctgaaagtggccggctttaacctgctgatgaccctgcggctgtggtccagccgcgccaagagaagcggatctggcgtgaagcagaccctgaatttcgacctgctgaagctggctggcgacgtggaatccaacccaggcccttctagaggccatatggccaagcctttgtctcaagaagaatccaccctcattgaaagagcaacggctacaatcaacagcatccccatctctgaagactacagcgtcgccagcgcagctctctctagcgacggccgcatcttcactggtgtcaatgtatatcattttactgggggaccttgtgcagaactcgtggtgctgggcactgctgctgctgcggcagctggcaacctgacttgtatcgtcgcgatcggaaatgagaacaggggcatcttgagcccctgcggacggtgccgacaggtgcttctcgatctgcatcctgggatcaaagccatagtgaaggacagtgatggacagccgacggcagttgggattcgtgaattgctgccctctggttatgtgtgggagggctga

SEQ ID NO: 8976 - DNA, 891 bp, Artificial Sequence
  Synthetic Polynucloetide
atggactggatttggcgcatccttttccttgtcggcgctgctaccggcgcgcattccttcgaacaggtgcagctggttgaatctggtggcggagttgtgcagcctggcagaagcctgagactgtcttgtgccgccagcggcttcacctttagcagctatgccatgcactgggtccgacaggcccctggcaaaggacttgaatgggtcgccgtgatctcctacgacggcagcaacaagtattacgccgacagcgtgaagggcagattcaccatcagccgggacaacagcaagaacaccctgtacctccagatgaacagcctgagagccgaggacaccgccgtgtactactgtgccaaagaggccccttactacgccaaggactacatggacgtgtggggcaagggcaccaccgtgacagtttcttctacgcgtgagcagaaactgatctcggaagaggatgggagcggcatccagaaccctgatcctgccgtgtaccagctgcgggatagcaagagcagcgacaagagcgtgtgtctgttcaccgacttcgacagccagaccaacgtgtcccagagcaaggactccgacgtgtacatcaccgataagtgcgtgctggacatgcggagcatggacttcaagagcaactccgccgtggcctggtccaacaagtccgatttcgcctgcgccaacgccttcaacaacagcattatccccgaggacacattcttcccaagccccgagagcagctgcgacgtgaagctggtggaaaagagcttcgagacagacaccaacctgaacttccagaacctgagcgtgatcggcttcagaatcctgctgctgaaagtggccggctttaacctgctgatgaccctgcggctgtggtccagctga

SEQ ID NO: 8977 - DNA, 1941 bp, Artificial Sequence
  Synthetic Polynucloetide
atggccttaccagtgaccgccttgctcctgccgctggccttgctgctccacgccgccaggccggagatcgtgctgacacagagccctggcacactgtcactgtctccaggcgaaagagccacactgagctgtagagccagccagagcgtgtccagcgattacctggcttggtatcagcagaagcccggacaggctcccagactgctgatctacggtgcctctagcagagccacaggcatccccgatagattttctggcagcggctccggcaccgacttcaccctgacaattagcagactgcccgaggacttcgccgtgtactactgccagcagtacgtgtcctactggacctttggcggaggcaccaaggtggaaatcaaaagaacagtggctgccggcggaggcggaagtggaggcggaggatctggcggcggaggctctcaggtgcagctggttgaatctggtggcggagttgtgcagcctggcagaagcctgagactgtcttgtgccgccagcggcttcacctttagcagctatgccatgcactgggtccgacaggcccctggcaaaggacttgaatgggtcgccgtgatctcctacgacggcagcaacaagtattacgccgacagcgtgaagggcagattcaccatcagccgggacaacagcaagaacaccctgtacctccagatgaacagcctgagagccgaggacaccgccgtgtactactgtgccaaagaggccccttactacgccaaggactacatggacgtgtggggcaagggcaccaccgtgacagtttcttctacgcgtgggagcggcatccagaaccctgatcctgccgtgtaccagctgcgggatagcaagagcagcgacaagagcgtgtgtctgttcaccgacttcgacagccagaccaacgtgtcccagagcaaggactccgacgtgtacatcaccgataagaccgtgctggacatgcggagcatggacttcaagagcaactccgccgtggcctggtccaacaagtccgatttcgcctgcgccaacgccttcaacaacagcattatccccgaggacacattcttcccaagcagcgacgtgccctgcgacgtgaagctggtggaaaagagcttcgagacagacaccaacctgaacttccagaacctgagcgtgatcggcttcagaatcctgctgctgaaagtggccggctttaacctgctgatgaccctgcggctgtggtccagccgcgccaagagaagcggatctggcgtgaagcagaccctgaatttcgacctgctgaagctggctggcgacgtggaatccaacccaggcccttctagaggccatatgaccgagtacaagcccacggtgcgcctcgccacccgcgacgacgtccccagggccgtacgcaccctcgccgccgcgttcgccgactaccccgccacgcgccacaccgtcgatccggaccgccacatcgagcgggtcaccgagctgcaagaactcttcctcacgcgcgtcgggctcgacatcggcaaggtgtgggtcgcggacgacggcgccgcggtggcggtctggaccacgccggagagcgtcgaagcgggggcggtgttcgccgagatcggcccgcgcatggccgagttgagcggttcccggctggccgcgcagcaacagatggaaggcctcctggcgccgcaccggcccaaggagcccgcgtggttcctggccaccgtcggcgtctcgcccgaccaccagggcaagggtctgggcagcgccgtcgtgctccccggagtggaggcggccgagcgcgccggggtgcccgccttcctggagacctccgcgccccgcaacctccccttctacgagcggctcggcttcaccgtcaccgccgacgtcgaggtgcccgaaggaccgcgcacctggtgcatgacccgcaagcccggtgcctga

SEQ ID NO: 8978 - DNA, 2037 bp, Artificial Sequence
  Synthetic Polynucloetide
atggccttaccagtgaccgccttgctcctgccgctggccttgctgctccacgccgccaggccggagatcgtgctgacacagagccctggcacactgtcactgtctccaggcgaaagagccacactgagctgtagagccagccagagcgtgtccagcgattacctggcttggtatcagcagaagcccggacaggctcccagactgctgatctacggtgcctctagcagagccacaggcatccccgatagattttctggcagcggctccggcaccgacttcaccctgacaattagcagactgcccgaggacttcgccgtgtactactgccagcagtacgtgtcctactggacctttggcggaggcaccaaggtggaaatcaaaagaacagtggctgccggcggaggcggaagtggaggcggaggatctggcggcggaggctctcaggtgcagctggttgaatctggtggcggagttgtgcagcctggcagaagcctgagactgtcttgtgccgccagcggcttcacctttagcagctatgccatgcactgggtccgacaggcccctggcaaaggacttgaatgggtcgccgtgatctcctacgacggcagcaacaagtattacgccgacagcgtgaagggcagattcaccatcagccgggacaacagcaagaacaccctgtacctccagatgaacagcctgagagccgaggacaccgccgtgtactactgtgccaaagaggccccttactacgccaaggactacatggacgtgtggggcaagggcaccaccgtgacagtttcttctctcgaggacctgaagaacgtgttcccacctgaggtggccgtgttcgagcctagcaaggccgagatcgcccacacccagaaagccaccctcgtgtgcctggctaccggcttctaccccgaccatgtggaactgtcttggtgggtcaacggcaaagaggtgcacagcggcgtgtctaccgacccccagccactgaaagaacagcccgccctgaacgacagccggtactgcctgagcagcagactgagagtgtccgccaccttctggcagaacccccggaaccacttcagatgccaggtgcagttctacggcctgagcgagaacgacgagtggacccaggacagagccaagcccgtgacccagatcgtgtctgccgaagcctggggcagagccgattgcggcatcaccagcgccagctaccaccagggcgtgctgagcgccaccatcctgtacgagatcctgctgggcaaggccaccctgtacgccgtgctggtgtctgccctggtgctgatggctatggtcaagcggaaggacagccggggaagggccaagcgatctggatctggagcaacaaacttctcactactcaaacaagcaggtgacgtggaggagaatcccgggcctactagaggccatatgaccgagtacaagcccacggtgcgcctcgccacccgcgacgacgtccccagggccgtacgcaccctcgccgccgcgttcgccgactaccccgccacgcgccacaccgtcgatccggaccgccacatcgagcgggtcaccgagctgcaagaactcttcctcacgcgcgtcgggctcgacatcggcaaggtgtgggtcgcggacgacggcgccgcggtggcggtctggaccacgccggagagcgtcgaagcgggggcggtgttcgccgagatcggcccgcgcatggccgagttgagcggttcccggctggccgcgcagcaacagatggaaggcctcctggcgccgcaccggcccaaggagcccgcgtggttcctggccaccgtcggcgtctcgcccgaccaccagggcaagggtctgggcagcgccgtcgtgctccccggagtggaggcggccgagcgcgccggggtgcccgccttcctggagacctccgcgccccgcaacctccccttctacgagcggctcggcttcaccgtcaccgccgacgtcgaggtgcccgaaggaccgcgcacctggtgcatgacccgcaagcccggtgcctga

SEQ ID NO: 8979 - DNA, 2106 bp, Artificial Sequence
  Synthetic Polynucloetide
atggccttaccagtgaccgccttgctcctgccgctggccttgctgctccacgccgccaggccggagatcgtgctgacacagagccctggcacactgtcactgtctccaggcgaaagagccacactgagctgtagagccagccagagcgtgtccagcgattacctggcttggtatcagcagaagcccggacaggctcccagactgctgatctacggtgcctctagcagagccacaggcatccccgatagattttctggcagcggctccggcaccgacttcaccctgacaattagcagactgcccgaggacttcgccgtgtactactgccagcagtacgtgtcctactggacctttggcggaggcaccaaggtggaaatcaaaagaacagtggctgccggcggaggcggaagtggaggcggaggatctggcggcggaggctctcaggtgcagctggttgaatctggtggcggagttgtgcagcctggcagaagcctgagactgtcttgtgccgccagcggcttcacctttagcagctatgccatgcactgggtccgacaggcccctggcaaaggacttgaatgggtcgccgtgatctcctacgacggcagcaacaagtattacgccgacagcgtgaagggcagattcaccatcagccgggacaacagcaagaacaccctgtacctccagatgaacagcctgagagccgaggacaccgccgtgtactactgtgccaaagaggccccttactacgccaaggactacatggacgtgtggggcaagggcaccaccgtgacagtttcttctacgcgtgggtctggaggcggaggcagcggcggaggcgggagcggcgacggtaacgaggagatgggaggaatcactcaaaccccttacaaagtctcaatttcaggaacaactgttatccttacatgtccccagtatcctggcagcgagatcctttggcagcataacgacaagaatatagggggagatgaagacgataagaatatcggatctgacgaggatcacttgagcctgaaagagttctccgagcttgaacaaagcggatattatgtgtgctatccgcgcgggtcaaagccggaagacgctaacttttacctttatctccgagccagagtgtgcgaaaattgcatggaaatggacgttatgtccgttgctacaatagttatcgtagatatatgcatcacgggtggactgcttctgctggtttattattggtccaagaatagaaaggccaaagctaaacccgtgaccagaggcgctggcgcaggcggaaggcaaaggggacaaaacaaagaacggccaccaccagtgccaaatccagattatgagcctattcggaaaggacagagggacctgtactctggcctgaatcagagaagaatccgcgccaagagaagcggatctggcgtgaagcagaccctgaatttcgacctgctgaagctggctggcgacgtggaatccaacccaggcccttctagaggccatatgaccgagtacaagcccacggtgcgcctcgccacccgcgacgacgtccccagggccgtacgcaccctcgccgccgcgttcgccgactaccccgccacgcgccacaccgtcgatccggaccgccacatcgagcgggtcaccgagctgcaagaactcttcctcacgcgcgtcgggctcgacatcggcaaggtgtgggtcgcggacgacggcgccgcggtggcggtctggaccacgccggagagcgtcgaagcgggggcggtgttcgccgagatcggcccgcgcatggccgagttgagcggttcccggctggccgcgcagcaacagatggaaggcctcctggcgccgcaccggcccaaggagcccgcgtggttcctggccaccgtcggcgtctcgcccgaccaccagggcaagggtctgggcagcgccgtcgtgctccccggagtggaggcggccgagcgcgccggggtgcccgccttcctggagacctccgcgccccgcaacctccccttctacgagcggctcggcttcaccgtcaccgccgacgtcgaggtgcccgaaggaccgcgcacctggtgcatgacccgcaagcccggtgcctga

SEQ ID NO: 8980 - DNA, 2001 bp, Artificial Sequence
  Synthetic Polynucloetide
atggccttaccagtgaccgccttgctcctgccgctggccttgctgctccacgccgccaggccggagatcgtgctgacacagagccctggcacactgtcactgtctccaggcgaaagagccacactgagctgtagagccagccagagcgtgtccagcgattacctggcttggtatcagcagaagcccggacaggctcccagactgctgatctacggtgcctctagcagagccacaggcatccccgatagattttctggcagcggctccggcaccgacttcaccctgacaattagcagactgcccgaggacttcgccgtgtactactgccagcagtacgtgtcctactggacctttggcggaggcaccaaggtggaaatcaaaagaacagtggctgccggcggaggcggaagtggaggcggaggatctggcggcggaggctctcaggtgcagctggttgaatctggtggcggagttgtgcagcctggcagaagcctgagactgtcttgtgccgccagcggcttcacctttagcagctatgccatgcactgggtccgacaggcccctggcaaaggacttgaatgggtcgccgtgatctcctacgacggcagcaacaagtattacgccgacagcgtgaagggcagattcaccatcagccgggacaacagcaagaacaccctgtacctccagatgaacagcctgagagccgaggacaccgccgtgtactactgtgccaaagaggccccttactacgccaaggactacatggacgtgtggggcaagggcaccaccgtgacagtttcttctacgcgtgggtctggaggcggaggcagcggcggaggcgggagcggcttcaagatccccatcgaggaactggaagatcgggtgttcgtgaactgcaacacctctatcacctgggtggaaggcaccgtgggaacactgctgagcgacatcaccagactggacctcggcaagcggattctggaccctcggggcatctacagatgcaacggcaccgacatctacaaggacaaagaaagcaccgtgcaggtccactacagaatgtgccagtcctgcgtggaactggaccctgctacagtggccggcatcatcgtgaccgatgtgatcgctactctgctgctggctctgggagtgttctgcttcgccggacacgaaacaggcagactgtctggcgctgccgatacacaggccctgctgagaaacgaccaagtgtatcagcccctgcgcgacagagatgatgcccagtattctcacctcggcggcaactgggctagaaacaagcgcgccaagagaagcggatctggcgtgaagcagaccctgaatttcgacctgctgaagctggctggcgacgtggaatccaacccaggcccttctagaggccatatgaccgagtacaagcccacggtgcgcctcgccacccgcgacgacgtccccagggccgtacgcaccctcgccgccgcgttcgccgactaccccgccacgcgccacaccgtcgatccggaccgccacatcgagcgggtcaccgagctgcaagaactcttcctcacgcgcgtcgggctcgacatcggcaaggtgtgggtcgcggacgacggcgccgcggtggcggtctggaccacgccggagagcgtcgaagcgggggcggtgttcgccgagatcggcccgcgcatggccgagttgagcggttcccggctggccgcgcagcaacagatggaaggcctcctggcgccgcaccggcccaaggagcccgcgtggttcctggccaccgtcggcgtctcgcccgaccaccagggcaagggtctgggcagcgccgtcgtgctccccggagtggaggcggccgagcgcgccggggtgcccgccttcctggagacctccgcgccccgcaacctccccttctacgagcggctcggcttcaccgtcaccgccgacgtcgaggtgcccgaaggaccgcgcacctggtgcatgacccgcaagcccggtgcctga

SEQ ID NO: 8981 - DNA, 2031 bp, Artificial Sequence
  Synthetic Polynucloetide
atggccttaccagtgaccgccttgctcctgccgctggccttgctgctccacgccgccaggccggagatcgtgctgacacagagccctggcacactgtcactgtctccaggcgaaagagccacactgagctgtagagccagccagagcgtgtccagcgattacctggcttggtatcagcagaagcccggacaggctcccagactgctgatctacggtgcctctagcagagccacaggcatccccgatagattttctggcagcggctccggcaccgacttcaccctgacaattagcagactgcccgaggacttcgccgtgtactactgccagcagtacgtgtcctactggacctttggcggaggcaccaaggtggaaatcaaaagaacagtggctgccggcggaggcggaagtggaggcggaggatctggcggcggaggctctcaggtgcagctggttgaatctggtggcggagttgtgcagcctggcagaagcctgagactgtcttgtgccgccagcggcttcacctttagcagctatgccatgcactgggtccgacaggcccctggcaaaggacttgaatgggtcgccgtgatctcctacgacggcagcaacaagtattacgccgacagcgtgaagggcagattcaccatcagccgggacaacagcaagaacaccctgtacctccagatgaacagcctgagagccgaggacaccgccgtgtactactgtgccaaagaggccccttactacgccaaggactacatggacgtgtggggcaagggcaccaccgtgacagtttcttctacgcgtgggtctggaggcggaggcagcggcggaggcgggagcggccagagcatcaagggcaaccacctggtcaaggtgtacgactaccaagaggacggcagcgtgctgctgacatgtgatgccgaggccaagaacatcacctggtttaaggacggcaagatgatcggcttcctgaccgaggacaagaagaagtggaacctgggcagcaacgctaaggaccccagaggcatgtatcagtgcaagggcagccagaacaagagcaagcccctccaggtgtactaccggatgtgccagaactgcatcgagctgaacgccgctaccatcagcggctttctgttcgccgagatcgtgtccatcttcgtgctggccgtgggcgtgtactttatcgctggacaggatggcgtgcggcagagcagagcttccgataagcaaaccctgctgcctaacgaccagctgtaccagcctctgaaggacagagaggacgaccagtacagccacctccagggcaatcagctgagaagaaaccgcgccaagagaagcggatctggcgtgaagcagaccctgaatttcgacctgctgaagctggctggcgacgtggaatccaacccaggcccttctagaggccatatgaccgagtacaagcccacggtgcgcctcgccacccgcgacgacgtccccagggccgtacgcaccctcgccgccgcgttcgccgactaccccgccacgcgccacaccgtcgatccggaccgccacatcgagcgggtcaccgagctgcaagaactcttcctcacgcgcgtcgggctcgacatcggcaaggtgtgggtcgcggacgacggcgccgcggtggcggtctggaccacgccggagagcgtcgaagcgggggcggtgttcgccgagatcggcccgcgcatggccgagttgagcggttcccggctggccgcgcagcaacagatggaaggcctcctggcgccgcaccggcccaaggagcccgcgtggttcctggccaccgtcggcgtctcgcccgaccaccagggcaagggtctgggcagcgccgtcgtgctccccggagtggaggcggccgagcgcgccggggtgcccgccttcctggagacctccgcgccccgcaacctccccttctacgagcggctcggcttcaccgtcaccgccgacgtcgaggtgcccgaaggaccgcgcacctggtgcatgacccgcaagcccggtgcctga

SEQ ID NO: 8982 - DNA, 1980 bp, Artificial Sequence
  Synthetic Polynucloetide
atggccttaccagtgaccgccttgctcctgccgctggccttgctgctccacgccgccaggccggagatcgtgctgacacagagccctggcacactgtcactgtctccaggcgaaagagccacactgagctgtagagccagccagagcgtgtccagcgattacctggcttggtatcagcagaagcccggacaggctcccagactgctgatctacggtgcctctagcagagccacaggcatccccgatagattttctggcagcggctccggcaccgacttcaccctgacaattagcagactgcccgaggacttcgccgtgtactactgccagcagtacgtgtcctactggacctttggcggaggcaccaaggtggaaatcaaaagaacagtggctgccggcggaggcggaagtggaggcggaggatctggcggcggaggctctcaggtgcagctggttgaatctggtggcggagttgtgcagcctggcagaagcctgagactgtcttgtgccgccagcggcttcacctttagcagctatgccatgcactgggtccgacaggcccctggcaaaggacttgaatgggtcgccgtgatctcctacgacggcagcaacaagtattacgccgacagcgtgaagggcagattcaccatcagccgggacaacagcaagaacaccctgtacctccagatgaacagcctgagagccgaggacaccgccgtgtactactgtgccaaagaggccccttactacgccaaggactacatggacgtgtggggcaagggcaccaccgtgacagtttcttctacgcgtgggtctggaggcggaggcagcggcggaggcgggagcggccagagttttgggttgttggaccctaaattgtgctatctgttggacggaatcctgttcatttacggagtgatcctgaccgcattgttcctgcgggttaagttttccagatccgcagacgcacccgcttaccaacaagggcagaaccaactctacaatgaacttaatttggggcggagggaagagtacgacgttctggacaaaaggaggggacgagatcccgagatgggcggaaagcctcagcgaaggaagaatccgcaagaggggctttataacgaactccagaaagataaaatggcagaagcctatagtgagattgggatgaagggagaaaggaggaggggtaaaggtcacgatgggttgtaccaaggattgagcacagccactaaagatacctatgatgcgctccacatgcaggccctgccgccaagacgcgccaagagaagcggatctggcgtgaagcagaccctgaatttcgacctgctgaagctggctggcgacgtggaatccaacccaggcccttctagaggccatatgaccgagtacaagcccacggtgcgcctcgccacccgcgacgacgtccccagggccgtacgcaccctcgccgccgcgttcgccgactaccccgccacgcgccacaccgtcgatccggaccgccacatcgagcgggtcaccgagctgcaagaactcttcctcacgcgcgtcgggctcgacatcggcaaggtgtgggtcgcggacgacggcgccgcggtggcggtctggaccacgccggagagcgtcgaagcgggggcggtgttcgccgagatcggcccgcgcatggccgagttgagcggttcccggctggccgcgcagcaacagatggaaggcctcctggcgccgcaccggcccaaggagcccgcgtggttcctggccaccgtcggcgtctcgcccgaccaccagggcaagggtctgggcagcgccgtcgtgctccccggagtggaggcggccgagcgcgccggggtgcccgccttcctggagacctccgcgccccgcaacctccccttctacgagcggctcggcttcaccgtcaccgccgacgtcgaggtgcccgaaggaccgcgcacctggtgcatgacccgcaagcccggtgcctga

SEQ ID NO: 8983 - DNA, 2280 bp, Artificial Sequence
  Synthetic Polynucloetide
atggccttaccagtgaccgccttgctcctgccgctggccttgctgctccacgccgccaggccggaagtgcagctggttgaatctggcggaggactggttcagcctggcggatctctgagactgtcttgtgccgccagcggcttcagcttcagcgacttttggatgagctgggtccgacaggcccctggcaaaggacttgaatgggtcgccacaatcagccaggccggcagcgagaaggactacgtggactctgtgaagggcagattcaccatcagccgggacaacgccaagaagtccctgtacctccagatgaacagcctgagagccgaggacaccgccgtgtactattgtgcctctggcgtgtacagcttcgactacagaggccagggcaccctggtcacagtctcttctggtaccggcggaggcggatctggcggcggaggtagcggtggcggaggatctgaattcgagatcgtgctgacacagagccctggcacactgtcactgtctccaggcgaaagagccacactgagctgtagagccagccagagcgtgtccagcgattacctggcttggtatcagcagaagcccggacaggctcccagactgctgatctacggtgcctctagcagagccacaggcatccccgatagattttctggcagcggctccggcaccgacttcaccctgacaattagcagactgcccgaggacttcgccgtgtactactgccagcagtacgtgtcctactggacctttggcggaggcaccaaggtggaaatcaaaagaacagtggctgccctcgaggacctgaagaacgtgttcccacctgaggtggccgtgttcgagcctagcgaggccgagatcagccacacccagaaagccaccctcgtgtgcctggctaccggcttctaccccgaccatgtggaactgtcttggtgggtcaacggcaaagaggtgcacagcggcgtgtgtaccgacccccagccactgaaagaacagcccgccctgaacgacagccggtactgcctgagcagcagactgagagtgtccgccaccttctggcagaacccccggaaccacttcagatgccaggtgcagttctacggcctgagcgagaacgacgagtggacccaggacagagccaagcccgtgacccagatcgtgtctgccgaagcctggggcagagccgattgcggctttaccagcgagagctaccagcagggcgtgctgagcgccaccatcctgtacgagatcctgctgggcaaggccaccctgtacgccgtgctggtgtctgccctggtgctgatggctatggtcaagcggaaggacagccggggaagggccaagcgatctggatctggagcaacaaacttctcactactcaaacaagcaggtgacgtggaggagaatcccgggcctactagtatggactggatttggcgcatccttttccttgtcggcgctgctaccggcgcgcattccttcgaacaggtgcagctggttgaatctggtggcggagttgtgcagcctggcagaagcctgagactgtcttgtgccgccagcggcttcacctttagcagctatgccatgcactgggtccgacaggcccctggcaaaggacttgaatgggtcgccgtgatctcctacgacggcagcaacaagtattacgccgacagcgtgaagggcagattcaccatcagccgggacaacagcaagaacaccctgtacctccagatgaacagcctgagagccgaggacaccgccgtgtactactgtgccaaagaggccccttactacgccaaggactacatggacgtgtggggcaagggcaccaccgtgacagtttcttctacgcgtatccagaaccctgatcctgccgtgtaccagctgcgggatagcaagagcagcgacaagagcgtgtgtctgttcaccgacttcgacagccagaccaacgtgtcccagagcaaggactccgacgtgtacatcaccgataagtgcgtgctggacatgcggagcatggacttcaagagcaactccgccgtggcctggtccaacaagtccgatttcgcctgcgccaacgccttcaacaacagcattatccccgaggacacattcttcccaagccccgagagcagctgcgacgtgaagctggtggaaaagagcttcgagacagacaccaacctgaacttccagaacctgagcgtgatcggcttcagaatcctgctgctgaaagtggccggctttaacctgctgatgaccctgcggctgtggtccagc

SEQ ID NO: 8984 - DNA, 2292 bp, Artificial Sequence
  Synthetic Polynucloetide
atggccttaccagtgaccgccttgctcctgccgctggccttgctgctccacgccgccaggccggaagtgcagctggttgaatctggcggaggactggttcagcctggcggatctctgagactgtcttgtgccgccagcggcttcagcttcagcgacttttggatgagctgggtccgacaggcccctggcaaaggacttgaatgggtcgccacaatcagccaggccggcagcgagaaggactacgtggactctgtgaagggcagattcaccatcagccgggacaacgccaagaagtccctgtacctccagatgaacagcctgagagccgaggacaccgccgtgtactattgtgcctctggcgtgtacagcttcgactacagaggccagggcaccctggtcacagtctcttctggtaccggcggaggcggatctggcggcggaggtagcggtggcggaggatctgaattcgagatcgtgctgacacagagccctggcacactgtcactgtctccaggcgaaagagccacactgagctgtagagccagccagagcgtgtccagcgattacctggcttggtatcagcagaagcccggacaggctcccagactgctgatctacggtgcctctagcagagccacaggcatccccgatagattttctggcagcggctccggcaccgacttcaccctgacaattagcagactgcccgaggacttcgccgtgtactactgccagcagtacgtgtcctactggacctttggcggaggcaccaaggtggaaatcaaaagaacagtggctgccctcgagatccagaaccctgatcctgccgtgtaccagctgcgggatagcaagagcagcgacaagagcgtgtgtctgttcaccgacttcgacagccagaccaacgtgtcccagagcaaggactccgacgtgtacatcaccgataagtgcgtgctggacatgcggagcatggacttcaagagcaactccgccgtggcctggtccaacaagtccgatttcgcctgcgccaacgccttcaacaacagcattatccccgaggacacattcttcccaagccccgagagcagctgcgacgtgaagctggtggaaaagagcttcgagacagacaccaacctgaacttccagaacctgagcgtgatcggcttcagaatcctgctgctgaaagtggccggctttaacctgctgatgaccctgcggctgtggtccagccgcgccaagagaagcggatctggcgtgaagcagaccctgaatttcgacctgctgaagctggctggcgacgtggaatccaacccaggccctactagtatggactggatttggcgcatccttttccttgtcggcgctgctaccggcgcgcattccttcgaacaggtgcagctggttgaatctggtggcggagttgtgcagcctggcagaagcctgagactgtcttgtgccgccagcggcttcacctttagcagctatgccatgcactgggtccgacaggcccctggcaaaggacttgaatgggtcgccgtgatctcctacgacggcagcaacaagtattacgccgacagcgtgaagggcagattcaccatcagccgggacaacagcaagaacaccctgtacctccagatgaacagcctgagagccgaggacaccgccgtgtactactgtgccaaagaggccccttactacgccaaggactacatggacgtgtggggcaagggcaccaccgtgacagtttcttctacgcgtgaggacctgaagaacgtgttcccacctgaggtggccgtgttcgagcctagcgaggccgagatcagccacacccagaaagccaccctcgtgtgcctggctaccggcttctaccccgaccatgtggaactgtcttggtgggtcaacggcaaagaggtgcacagcggcgtgtgtaccgacccccagccactgaaagaacagcccgccctgaacgacagccggtactgcctgagcagcagactgagagtgtccgccaccttctggcagaacccccggaaccacttcagatgccaggtgcagttctacggcctgagcgagaacgacgagtggacccaggacagagccaagcccgtgacccagatcgtgtctgccgaagcctggggcagagccgattgcggctttaccagcgagagctaccagcagggcgtgctgagcgccaccatcctgtacgagatcctgctgggcaaggccaccctgtacgccgtgctggtgtctgccctggtgctgatggctatggtcaagcggaaggacagccgggga

SEQ ID NO: 8985 - DNA, 2868 bp, Artificial Sequence
  Synthetic Polynucloetide
atggccttaccagtgaccgccttgctcctgccgctggccttgctgctccacgccgccaggccggaagtgcagctggttgaatctggcggaggactggttcagcctggcggatctctgagactgtcttgtgccgccagcggcttcagcttcagcgacttttggatgagctgggtccgacaggcccctggcaaaggacttgaatgggtcgccacaatcagccaggccggcagcgagaaggactacgtggactctgtgaagggcagattcaccatcagccgggacaacgccaagaagtccctgtacctccagatgaacagcctgagagccgaggacaccgccgtgtactattgtgcctctggcgtgtacagcttcgactacagaggccagggcaccctggtcacagtctcttctggtaccggcggaggcggatctggcggcggaggtagcggtggcggaggatctgaattcgagatcgtgctgacacagagccctggcacactgtcactgtctccaggcgaaagagccacactgagctgtagagccagccagagcgtgtccagcgattacctggcttggtatcagcagaagcccggacaggctcccagactgctgatctacggtgcctctagcagagccacaggcatccccgatagattttctggcagcggctccggcaccgacttcaccctgacaattagcagactgcccgaggacttcgccgtgtactactgccagcagtacgtgtcctactggacctttggcggaggcaccaaggtggaaatcaaaagaacagtggctgccctcgaggacctgaagaacgtgttcccacctgaggtggccgtgttcgagcctagcgaggccgagatcagccacacccagaaagccaccctcgtgtgcctggctaccggcttctaccccgaccatgtggaactgtcttggtgggtcaacggcaaagaggtgcacagcggcgtgtctaccgacccccagccactgaaagaacagcccgccctgaacgacagccggtactgcctgagcagcagactgagagtgtccgccaccttctggcagaacccccggaaccacttcagatgccaggtgcagttctacggcctgagcgagaacgacgagtggacccaggacagagccaagcccgtgacccagatcgtgtctgccgaagcctggggcagagccgattgcggatcccagagcttcggcctgctggaccccaagctgtgctacctgctggatggcatcctgttcatctacggcgtgatcctgaccgccctgttcctgagagtgaagttcagcagaagcgccgacgcccctgcctaccagcagggacagaaccaactgtacaacgagctgaacctgggcagacgggaagagtacgacgtgctggacaagcggagaggcagggaccctgagatgggcggaaagccccagcggagaaagaacccccaggaaggactgtataacgaactccagaaagacaagatggccgaagcctacagcgagatcggcatgaagggcgagcggagaagaggcaagggccacgatggcctgtaccagggcctgagcaccgccaccaaggacacctatgacgccctgcacatgcaggccctgcctccaagaagggccaagcgatctggatctggagcaacaaacttctcactactcaaacaagcaggtgacgtggaggagaatcccgggcctactagtatggactggatttggcgcatccttttccttgtcggcgctgctaccggcgcgcattccttcgaacaggtgcagctggttgaatctggtggcggagttgtgcagcctggcagaagcctgagactgtcttgtgccgccagcggcttcacctttagcagctatgccatgcactgggtccgacaggcccctggcaaaggacttgaatgggtcgccgtgatctcctacgacggcagcaacaagtattacgccgacagcgtgaagggcagattcaccatcagccgggacaacagcaagaacaccctgtacctccagatgaacagcctgagagccgaggacaccgccgtgtactactgtgccaaagaggccccttactacgccaaggactacatggacgtgtggggcaagggcaccaccgtgacagtttcttctacgcgtatccagaaccctgatcctgccgtgtaccagctgcgggatagcaagagcagcgacaagagcgtgtgtctgttcaccgacttcgacagccagaccaacgtgtcccagagcaaggactccgacgtgtacatcaccgataagaccgtgctggacatgcggagcatggacttcaagagcaactccgccgtggcctggtccaacaagtccgatttcgcctgcgccaacgccttcaacaacagcattatccccgaggacacattcttcccaagccccgagagcagctgcggtacccagagttttgggttgttggaccctaaattgtgctatctgttggacggaatcctgttcatttacggagtgatcctgaccgcattgttcctgcgggttaagttttccagatccgcagacgcacccgcttaccaacaagggcagaaccaactctacaatgaacttaatttggggcggagggaagagtacgacgttctggacaaaaggaggggacgagatcccgagatgggcggaaagcctcagcgaaggaagaatccgcaagaggggctttataacgaactccagaaagataaaatggcagaagcctatagtgagattgggatgaagggagaaaggaggaggggtaaaggtcacgatgggttgtaccaaggattgagcacagccactaaagatacctatgatgcgctccacatgcaggccctgccgccaaga

SEQ ID NO: 8986 - DNA, 2358 bp, Artificial Sequence
  Synthetic Polynucloetide
atggccttaccagtgaccgccttgctcctgccgctggccttgctgctccacgccgccaggccggaagtgcagctggttgaatctggcggaggactggttcagcctggcggatctctgagactgtcttgtgccgccagcggcttcagcttcagcgacttttggatgagctgggtccgacaggcccctggcaaaggacttgaatgggtcgccacaatcagccaggccggcagcgagaaggactacgtggactctgtgaagggcagattcaccatcagccgggacaacgccaagaagtccctgtacctccagatgaacagcctgagagccgaggacaccgccgtgtactattgtgcctctggcgtgtacagcttcgactacagaggccagggcaccctggtcacagtctcttctggtaccggcggaggcggatctggcggcggaggtagcggtggcggaggatctgaattcgagatcgtgctgacacagagccctggcacactgtcactgtctccaggcgaaagagccacactgagctgtagagccagccagagcgtgtccagcgattacctggcttggtatcagcagaagcccggacaggctcccagactgctgatctacggtgcctctagcagagccacaggcatccccgatagattttctggcagcggctccggcaccgacttcaccctgacaattagcagactgcccgaggacttcgccgtgtactactgccagcagtacgtgtcctactggacctttggcggaggcaccaaggtggaaatcaaaagaacagtggctgccctcgagggacagcctaaggccaatcctaccgtgacactgttccctccaagcagcgaagaactccaggccaacaaggccacacttgtgtgcctgatctccgacttctaccctggggctgtgacagtggcttggaaggccgatggatctcctgtgaaagccggcgtggaaaccaccaagccatccaagcagagcaacaacaaatacgccgccagctcctacctgagcctgacacctgagcagtggaagtcccacagatcctacagctgccaagtgacccacgaaggcagcaccgtggaaaagacagtggcccctacagagtgcagccccatcaagaccgatgtgattacaatggaccccaaggacaactgctccaaggacgccaacgataccctgctgctccagctgaccaacaccagcgcctactacatgtacttgttgctgctgctgaagtccgtggtgtacttcgccatcatcacatgctgcctgctgcggagaaccgccttctgctgcaacggcgagaagtctagggccaagcgatctggatctggagcaacaaacttctcactactcaaacaagcaggtgacgtggaggagaatcccgggcctactagtatggactggatttggcgcatccttttccttgtcggcgctgctaccggcgcgcattccttcgaacaggtgcagctggttgaatctggtggcggagttgtgcagcctggcagaagcctgagactgtcttgtgccgccagcggcttcacctttagcagctatgccatgcactgggtccgacaggcccctggcaaaggacttgaatgggtcgccgtgatctcctacgacggcagcaacaagtattacgccgacagcgtgaagggcagattcaccatcagccgggacaacagcaagaacaccctgtacctccagatgaacagcctgagagccgaggacaccgccgtgtactactgtgccaaagaggccccttactacgccaaggactacatggacgtgtggggcaagggcaccaccgtgacagtttcttctacgcgtgcctctacaaagggaccctccgtgtttcctctggctcccagcagcaagtctacaagcggaggaacagccgctctgggctgcctggtcaaggattactttcccgagcctgtgaccgtgtcctggaatagcggagcactgacaagcggcgtgcacacctttccagccgtgctgcaaagcagcggcctgtactctctgagcagcgtggtcacagtgcctagctctagcctgggcacccagacctacatctgcaatgtgaaccacaagcctagcaacaccaaggtggacaagagagtggaacccaagagctgtgaagtgaaaaccgactccaccgaccacgtgaagcccaaagagacagagaacaccaagcagcccagcaagagctgccacaagcccaaggccatcgtgcacaccgagaaagtgaacatgatgagcctgaccgtgctgggcctgcggatgctgttcgccaaaaccgtggccgtgaacttcctgctgaccgccaagctgttcttcctc

SEQ ID NO: 8987 - DNA, 2301 bp, Artificial Sequence
  Synthetic Polynucloetide
atggccttaccagtgaccgccttgctcctgccgctggccttgctgctccacgccgccaggccggaagtgcagctggttgaatctggcggaggactggttcagcctggcggatctctgagactgtcttgtgccgccagcggcttcagcttcagcgacttttggatgagctgggtccgacaggcccctggcaaaggacttgaatgggtcgccacaatcagccaggccggcagcgagaaggactacgtggactctgtgaagggcagattcaccatcagccgggacaacgccaagaagtccctgtacctccagatgaacagcctgagagccgaggacaccgccgtgtactattgtgcctctggcgtgtacagcttcgactacagaggccagggcaccctggtcacagtctcttctggtaccggcggaggcggatctggcggcggaggtagcggtggcggaggatctgaattcgagatcgtgctgacacagagccctggcacactgtcactgtctccaggcgaaagagccacactgagctgtagagccagccagagcgtgtccagcgattacctggcttggtatcagcagaagcccggacaggctcccagactgctgatctacggtgcctctagcagagccacaggcatccccgatagattttctggcagcggctccggcaccgacttcaccctgacaattagcagactgcccgaggacttcgccgtgtactactgccagcagtacgtgtcctactggacctttggcggaggcaccaaggtggaaatcaaaagaacagtggctgccctcgagggacagcctaaggccaatcctaccgtgacactgttccctccaagcagcgaagaactccaggccaacaaggccacacttgtgtgcctgatctccgacttctaccctggggctgtgacagtggcttggaaggccgatggatctcctgtgaaagccggcgtggaaaccaccaagccatccaagcagagcaacaacaaatacgccgccagctcctacctgagcctgacacctgagcagtggaagtcccacagatcctacagctgccaagtgacccacgaaggcagcaccgtggaaaagacagtggcccctacagagtgcagcggcagagccgattgcggctttaccagcgagagctaccagcagggcgtgctgagcgccaccatcctgtacgagatcctgctgggcaaggccaccctgtacgccgtgctggtgtctgccctggtgctgatggctatggtcaagcggaaggacagccggggacgcgccaagagaagcggatctggcgtgaagcagaccctgaatttcgacctgctgaagctggctggcgacgtggaatccaacccaggccctactagtatggactggatttggcgcatccttttccttgtcggcgctgctaccggcgcgcattccttcgaacaggtgcagctggttgaatctggtggcggagttgtgcagcctggcagaagcctgagactgtcttgtgccgccagcggcttcacctttagcagctatgccatgcactgggtccgacaggcccctggcaaaggacttgaatgggtcgccgtgatctcctacgacggcagcaacaagtattacgccgacagcgtgaagggcagattcaccatcagccgggacaacagcaagaacaccctgtacctccagatgaacagcctgagagccgaggacaccgccgtgtactactgtgccaaagaggccccttactacgccaaggactacatggacgtgtggggcaagggcaccaccgtgacagtttcttctacgcgtgcctctacaaagggaccctccgtgtttcctctggctcccagcagcaagtctacaagcggaggaacagccgctctgggctgcctggtcaaggattactttcccgagcctgtgaccgtgtcctggaatagcggagcactgacaagcggcgtgcacacctttccagccgtgctgcaaagcagcggcctgtactctctgagcagcgtggtcacagtgcctagctctagcctgggcacccagacctacatctgcaatgtgaaccacaagcctagcaacaccaaggtggacaagagagtggaacccaagagctgtatccccgaggacacattcttcccaagccccgagagcagctgcgacgtgaagctggtggaaaagagcttcgagacagacaccaacctgaacttccagaacctgagcgtgatcggcttcagaatcctgctgctgaaagtggccggctttaacctgctgatgaccctgcggctgtggtccagc

SEQ ID NO: 8988 - DNA, 2703 bp, Artificial Sequence
  Synthetic Polynucloetide
atggccttaccagtgaccgccttgctcctgccgctggccttgctgctccacgccgccaggccggaagtgcagctggttgaatctggcggaggactggttcagcctggcggatctctgagactgtcttgtgccgccagcggcttcagcttcagcgacttttggatgagctgggtccgacaggcccctggcaaaggacttgaatgggtcgccacaatcagccaggccggcagcgagaaggactacgtggactctgtgaagggcagattcaccatcagccgggacaacgccaagaagtccctgtacctccagatgaacagcctgagagccgaggacaccgccgtgtactattgtgcctctggcgtgtacagcttcgactacagaggccagggcaccctggtcacagtctcttctggtaccggcggaggcggatctggcggcggaggtagcggtggcggaggatctgaattcgagatcgtgctgacacagagccctggcacactgtcactgtctccaggcgaaagagccacactgagctgtagagccagccagagcgtgtccagcgattacctggcttggtatcagcagaagcccggacaggctcccagactgctgatctacggtgcctctagcagagccacaggcatccccgatagattttctggcagcggctccggcaccgacttcaccctgacaattagcagactgcccgaggacttcgccgtgtactactgccagcagtacgtgtcctactggacctttggcggaggcaccaaggtggaaatcaaaagaacagtggctgccctcgagatccagaaccctgatcctgccgtgtaccagctgcgggatagcaagagcagcgacaagagcgtgtgtctgttcaccgacttcgacagccagaccaacgtgtcccagagcaaggactccgacgtgtacatcaccgataagtgcgtgctggacatgcggagcatggacttcaagagcaactccgccgtggcctggtccaacaagtccgatttcgcctgcgccaacgccttcaacaacagcattatccccgaggacacattcttcccaagccccgagagcagctgcgacgtgaagctggtggaaaagagcttcgagacagacaccaacctgaacttccagaacctgagcgtgatcggcttcagaatcctgctgctgaaagtggccggctttaacctgctgatgaccctgcggctgtggtccagccgcgccaagagaagcggatctggcgtgaagcagaccctgaatttcgacctgctgaagctggctggcgacgtggaatccaacccaggccctactagtatggactggatttggcgcatccttttccttgtcggcgctgctaccggcgcgcattccgggccccagctccagctgcaagagtctggacctggcctggtcaagcctagcgagacactgagcctgacctgtaccgtgtccggcgatagcatcagcagcggcgattactactggggctggatcagacagcctcctggcaaaggactggaatggatcggccacatctactacagcggcgtgacctactacaaccccagcctgaagtccagagtgaccatcagcgtggacaccagccggaaccagttctccctgaagctgtctagcgtgacagccgccgataccgccgtgtactactgcaccagagaggacagcagcaactggcggagtagaggccagggaacactggtcacagttagctctggatccggcggaggcggaagtggaggcggaggatctggcggcggaggctctttcgaacaggtgcagctggttgaatctggtggcggagttgtgcagcctggcagaagcctgagactgtcttgtgccgccagcggcttcacctttagcagctatgccatgcactgggtccgacaggcccctggcaaaggacttgaatgggtcgccgtgatctcctacgacggcagcaacaagtattacgccgacagcgtgaagggcagattcaccatcagccgggacaacagcaagaacaccctgtacctccagatgaacagcctgagagccgaggacaccgccgtgtactactgtgccaaagaggccccttactacgccaaggactacatggacgtgtggggcaagggcaccaccgtgacagtttcttctacgcgtgaggacctgaagaacgtgttcccacctgaggtggccgtgttcgagcctagcgaggccgagatcagccacacccagaaagccaccctcgtgtgcctggctaccggcttctaccccgaccatgtggaactgtcttggtgggtcaacggcaaagaggtgcacagcggcgtgtgtaccgacccccagccactgaaagaacagcccgccctgaacgacagccggtactgcctgagcagcagactgagagtgtccgccaccttctggcagaacccccggaaccacttcagatgccaggtgcagttctacggcctgagcgagaacgacgagtggacccaggacagagccaagcccgtgacccagatcgtgtctgccgaagcctggggcagagccgattgcggctttaccagcgagagctaccagcagggcgtgctgagcgccaccatcctgtacgagatcctgctgggcaaggccaccctgtacgccgtgctggtgtctgccctggtgctgatggctatggtcaagcggaaggacagccgggga

SEQ ID NO: 8989 - DNA, 3279 bp, Artificial Sequence
  Synthetic Polynucloetide
atggccttaccagtgaccgccttgctcctgccgctggccttgctgctccacgccgccaggccggaagtgcagctggttgaatctggcggaggactggttcagcctggcggatctctgagactgtcttgtgccgccagcggcttcagcttcagcgacttttggatgagctgggtccgacaggcccctggcaaaggacttgaatgggtcgccacaatcagccaggccggcagcgagaaggactacgtggactctgtgaagggcagattcaccatcagccgggacaacgccaagaagtccctgtacctccagatgaacagcctgagagccgaggacaccgccgtgtactattgtgcctctggcgtgtacagcttcgactacagaggccagggcaccctggtcacagtctcttctggtaccggcggaggcggatctggcggcggaggtagcggtggcggaggatctgaattcgagatcgtgctgacacagagccctggcacactgtcactgtctccaggcgaaagagccacactgagctgtagagccagccagagcgtgtccagcgattacctggcttggtatcagcagaagcccggacaggctcccagactgctgatctacggtgcctctagcagagccacaggcatccccgatagattttctggcagcggctccggcaccgacttcaccctgacaattagcagactgcccgaggacttcgccgtgtactactgccagcagtacgtgtcctactggacctttggcggaggcaccaaggtggaaatcaaaagaacagtggctgccctcgaggacctgaagaacgtgttcccacctgaggtggccgtgttcgagcctagcgaggccgagatcagccacacccagaaagccaccctcgtgtgcctggctaccggcttctaccccgaccatgtggaactgtcttggtgggtcaacggcaaagaggtgcacagcggcgtgtctaccgacccccagccactgaaagaacagcccgccctgaacgacagccggtactgcctgagcagcagactgagagtgtccgccaccttctggcagaacccccggaaccacttcagatgccaggtgcagttctacggcctgagcgagaacgacgagtggacccaggacagagccaagcccgtgacccagatcgtgtctgccgaagcctggggcagagccgattgcggatcccagagcttcggcctgctggaccccaagctgtgctacctgctggatggcatcctgttcatctacggcgtgatcctgaccgccctgttcctgagagtgaagttcagcagaagcgccgacgcccctgcctaccagcagggacagaaccaactgtacaacgagctgaacctgggcagacgggaagagtacgacgtgctggacaagcggagaggcagggaccctgagatgggcggaaagccccagcggagaaagaacccccaggaaggactgtataacgaactccagaaagacaagatggccgaagcctacagcgagatcggcatgaagggcgagcggagaagaggcaagggccacgatggcctgtaccagggcctgagcaccgccaccaaggacacctatgacgccctgcacatgcaggccctgcctccaagaagggccaagcgatctggatctggagcaacaaacttctcactactcaaacaagcaggtgacgtggaggagaatcccgggcctactagtatggactggatttggcgcatccttttccttgtcggcgctgctaccggcgcgcattccgggccccagctccagctgcaagagtctggacctggcctggtcaagcctagcgagacactgagcctgacctgtaccgtgtccggcgatagcatcagcagcggcgattactactggggctggatcagacagcctcctggcaaaggactggaatggatcggccacatctactacagcggcgtgacctactacaaccccagcctgaagtccagagtgaccatcagcgtggacaccagccggaaccagttctccctgaagctgtctagcgtgacagccgccgataccgccgtgtactactgcaccagagaggacagcagcaactggcggagtagaggccagggaacactggtcacagttagctctggatccggcggaggcggaagtggaggcggaggatctggcggcggaggctctttcgaacaggtgcagctggttgaatctggtggcggagttgtgcagcctggcagaagcctgagactgtcttgtgccgccagcggcttcacctttagcagctatgccatgcactgggtccgacaggcccctggcaaaggacttgaatgggtcgccgtgatctcctacgacggcagcaacaagtattacgccgacagcgtgaagggcagattcaccatcagccgggacaacagcaagaacaccctgtacctccagatgaacagcctgagagccgaggacaccgccgtgtactactgtgccaaagaggccccttactacgccaaggactacatggacgtgtggggcaagggcaccaccgtgacagtttcttctacgcgtatccagaaccctgatcctgccgtgtaccagctgcgggatagcaagagcagcgacaagagcgtgtgtctgttcaccgacttcgacagccagaccaacgtgtcccagagcaaggactccgacgtgtacatcaccgataagaccgtgctggacatgcggagcatggacttcaagagcaactccgccgtggcctggtccaacaagtccgatttcgcctgcgccaacgccttcaacaacagcattatccccgaggacacattcttcccaagccccgagagcagctgcggtacccagagttttgggttgttggaccctaaattgtgctatctgttggacggaatcctgttcatttacggagtgatcctgaccgcattgttcctgcgggttaagttttccagatccgcagacgcacccgcttaccaacaagggcagaaccaactctacaatgaacttaatttggggcggagggaagagtacgacgttctggacaaaaggaggggacgagatcccgagatgggcggaaagcctcagcgaaggaagaatccgcaagaggggctttataacgaactccagaaagataaaatggcagaagcctatagtgagattgggatgaagggagaaaggaggaggggtaaaggtcacgatgggttgtaccaaggattgagcacagccactaaagatacctatgatgcgctccacatgcaggccctgccgccaaga

SEQ ID NO: 8990 - DNA, 2769 bp, Artificial Sequence
  Synthetic Polynucloetide
atggccttaccagtgaccgccttgctcctgccgctggccttgctgctccacgccgccaggccggaagtgcagctggttgaatctggcggaggactggttcagcctggcggatctctgagactgtcttgtgccgccagcggcttcagcttcagcgacttttggatgagctgggtccgacaggcccctggcaaaggacttgaatgggtcgccacaatcagccaggccggcagcgagaaggactacgtggactctgtgaagggcagattcaccatcagccgggacaacgccaagaagtccctgtacctccagatgaacagcctgagagccgaggacaccgccgtgtactattgtgcctctggcgtgtacagcttcgactacagaggccagggcaccctggtcacagtctcttctggtaccggcggaggcggatctggcggcggaggtagcggtggcggaggatctgaattcgagatcgtgctgacacagagccctggcacactgtcactgtctccaggcgaaagagccacactgagctgtagagccagccagagcgtgtccagcgattacctggcttggtatcagcagaagcccggacaggctcccagactgctgatctacggtgcctctagcagagccacaggcatccccgatagattttctggcagcggctccggcaccgacttcaccctgacaattagcagactgcccgaggacttcgccgtgtactactgccagcagtacgtgtcctactggacctttggcggaggcaccaaggtggaaatcaaaagaacagtggctgccctcgagggacagcctaaggccaatcctaccgtgacactgttccctccaagcagcgaagaactccaggccaacaaggccacacttgtgtgcctgatctccgacttctaccctggggctgtgacagtggcttggaaggccgatggatctcctgtgaaagccggcgtggaaaccaccaagccatccaagcagagcaacaacaaatacgccgccagctcctacctgagcctgacacctgagcagtggaagtcccacagatcctacagctgccaagtgacccacgaaggcagcaccgtggaaaagacagtggcccctacagagtgcagccccatcaagaccgatgtgattacaatggaccccaaggacaactgctccaaggacgccaacgataccctgctgctccagctgaccaacaccagcgcctactacatgtacttgttgctgctgctgaagtccgtggtgtacttcgccatcatcacatgctgcctgctgcggagaaccgccttctgctgcaacggcgagaagtctagggccaagcgatctggatctggagcaacaaacttctcactactcaaacaagcaggtgacgtggaggagaatcccgggcctactagtatggactggatttggcgcatccttttccttgtcggcgctgctaccggcgcgcattccgggccccagctccagctgcaagagtctggacctggcctggtcaagcctagcgagacactgagcctgacctgtaccgtgtccggcgatagcatcagcagcggcgattactactggggctggatcagacagcctcctggcaaaggactggaatggatcggccacatctactacagcggcgtgacctactacaaccccagcctgaagtccagagtgaccatcagcgtggacaccagccggaaccagttctccctgaagctgtctagcgtgacagccgccgataccgccgtgtactactgcaccagagaggacagcagcaactggcggagtagaggccagggaacactggtcacagttagctctggatccggcggaggcggaagtggaggcggaggatctggcggcggaggctctttcgaacaggtgcagctggttgaatctggtggcggagttgtgcagcctggcagaagcctgagactgtcttgtgccgccagcggcttcacctttagcagctatgccatgcactgggtccgacaggcccctggcaaaggacttgaatgggtcgccgtgatctcctacgacggcagcaacaagtattacgccgacagcgtgaagggcagattcaccatcagccgggacaacagcaagaacaccctgtacctccagatgaacagcctgagagccgaggacaccgccgtgtactactgtgccaaagaggccccttactacgccaaggactacatggacgtgtggggcaagggcaccaccgtgacagtttcttctacgcgtgcctctacaaagggaccctccgtgtttcctctggctcccagcagcaagtctacaagcggaggaacagccgctctgggctgcctggtcaaggattactttcccgagcctgtgaccgtgtcctggaatagcggagcactgacaagcggcgtgcacacctttccagccgtgctgcaaagcagcggcctgtactctctgagcagcgtggtcacagtgcctagctctagcctgggcacccagacctacatctgcaatgtgaaccacaagcctagcaacaccaaggtggacaagagagtggaacccaagagctgtgaagtgaaaaccgactccaccgaccacgtgaagcccaaagagacagagaacaccaagcagcccagcaagagctgccacaagcccaaggccatcgtgcacaccgagaaagtgaacatgatgagcctgaccgtgctgggcctgcggatgctgttcgccaaaaccgtggccgtgaacttcctgctgaccgccaagctgttcttcctc

SEQ ID NO: 8991 - DNA, 2712 bp, Artificial Sequence
  Synthetic Polynucloetide
atggccttaccagtgaccgccttgctcctgccgctggccttgctgctccacgccgccaggccggaagtgcagctggttgaatctggcggaggactggttcagcctggcggatctctgagactgtcttgtgccgccagcggcttcagcttcagcgacttttggatgagctgggtccgacaggcccctggcaaaggacttgaatgggtcgccacaatcagccaggccggcagcgagaaggactacgtggactctgtgaagggcagattcaccatcagccgggacaacgccaagaagtccctgtacctccagatgaacagcctgagagccgaggacaccgccgtgtactattgtgcctctggcgtgtacagcttcgactacagaggccagggcaccctggtcacagtctcttctggtaccggcggaggcggatctggcggcggaggtagcggtggcggaggatctgaattcgagatcgtgctgacacagagccctggcacactgtcactgtctccaggcgaaagagccacactgagctgtagagccagccagagcgtgtccagcgattacctggcttggtatcagcagaagcccggacaggctcccagactgctgatctacggtgcctctagcagagccacaggcatccccgatagattttctggcagcggctccggcaccgacttcaccctgacaattagcagactgcccgaggacttcgccgtgtactactgccagcagtacgtgtcctactggacctttggcggaggcaccaaggtggaaatcaaaagaacagtggctgccctcgagggacagcctaaggccaatcctaccgtgacactgttccctccaagcagcgaagaactccaggccaacaaggccacacttgtgtgcctgatctccgacttctaccctggggctgtgacagtggcttggaaggccgatggatctcctgtgaaagccggcgtggaaaccaccaagccatccaagcagagcaacaacaaatacgccgccagctcctacctgagcctgacacctgagcagtggaagtcccacagatcctacagctgccaagtgacccacgaaggcagcaccgtggaaaagacagtggcccctacagagtgcagcggcagagccgattgcggctttaccagcgagagctaccagcagggcgtgctgagcgccaccatcctgtacgagatcctgctgggcaaggccaccctgtacgccgtgctggtgtctgccctggtgctgatggctatggtcaagcggaaggacagccggggacgcgccaagagaagcggatctggcgtgaagcagaccctgaatttcgacctgctgaagctggctggcgacgtggaatccaacccaggccctactagtatggactggatttggcgcatccttttccttgtcggcgctgctaccggcgcgcattccgggccccagctccagctgcaagagtctggacctggcctggtcaagcctagcgagacactgagcctgacctgtaccgtgtccggcgatagcatcagcagcggcgattactactggggctggatcagacagcctcctggcaaaggactggaatggatcggccacatctactacagcggcgtgacctactacaaccccagcctgaagtccagagtgaccatcagcgtggacaccagccggaaccagttctccctgaagctgtctagcgtgacagccgccgataccgccgtgtactactgcaccagagaggacagcagcaactggcggagtagaggccagggaacactggtcacagttagctctggatccggcggaggcggaagtggaggcggaggatctggcggcggaggctctttcgaacaggtgcagctggttgaatctggtggcggagttgtgcagcctggcagaagcctgagactgtcttgtgccgccagcggcttcacctttagcagctatgccatgcactgggtccgacaggcccctggcaaaggacttgaatgggtcgccgtgatctcctacgacggcagcaacaagtattacgccgacagcgtgaagggcagattcaccatcagccgggacaacagcaagaacaccctgtacctccagatgaacagcctgagagccgaggacaccgccgtgtactactgtgccaaagaggccccttactacgccaaggactacatggacgtgtggggcaagggcaccaccgtgacagtttcttctacgcgtgcctctacaaagggaccctccgtgtttcctctggctcccagcagcaagtctacaagcggaggaacagccgctctgggctgcctggtcaaggattactttcccgagcctgtgaccgtgtcctggaatagcggagcactgacaagcggcgtgcacacctttccagccgtgctgcaaagcagcggcctgtactctctgagcagcgtggtcacagtgcctagctctagcctgggcacccagacctacatctgcaatgtgaaccacaagcctagcaacaccaaggtggacaagagagtggaacccaagagctgtatccccgaggacacattcttcccaagccccgagagcagctgcgacgtgaagctggtggaaaagagcttcgagacagacaccaacctgaacttccagaacctgagcgtgatcggcttcagaatcctgctgctgaaagtggccggctttaacctgctgatgaccctgcggctgtggtccagc

SEQ ID NO: 8992 - DNA, 2283 bp, Artificial Sequence
  Synthetic Polynucloetide
atggccttaccagtgaccgccttgctcctgccgctggccttgctgctccacgccgccaggccggaagtgcaggttttggagtctggcggaggactggttcagcctggcggatctctgagactgtcttgtgccgccagcggcttcaccttcagcaactttgccatgagctgggtccgacaggcccctggcaaaggacttgaatgggtgtccacaatcagcggcagcgccggcacaacagattacgccgattctgtgaagggcagattcaccatcagccgggacaacagcaagaaaaccctgtacctccagatgaacagcctgcgcgtggaagataccgccgtgtactactgtgccgatggcagaggccccttcttcgattatcgcggccagggcacactggtcaccgtttcttctggtaccggcggaggcggatctggcggcggaggtagcggtggcggaggatctgaattcgagatcgtgctgacacagagccctggcacactgtcactgtctccaggcgaaagagccacactgagctgtagagccagccagagcgtgtccagcgattacctggcttggtatcagcagaagcccggacaggctcccagactgctgatctacggtgcctctagcagagccacaggcatccccgatagattttctggcagcggctccggcaccgacttcaccctgacaattagcagactgcccgaggacttcgccgtgtactactgccagcagtacgtgtcctactggacctttggcggaggcaccaaggtggaaatcaaaagaacagtggctgccctcgaggacctgaagaacgtgttcccacctgaggtggccgtgttcgagcctagcgaggccgagatcagccacacccagaaagccaccctcgtgtgcctggctaccggcttctaccccgaccatgtggaactgtcttggtgggtcaacggcaaagaggtgcacagcggcgtgtgtaccgacccccagccactgaaagaacagcccgccctgaacgacagccggtactgcctgagcagcagactgagagtgtccgccaccttctggcagaacccccggaaccacttcagatgccaggtgcagttctacggcctgagcgagaacgacgagtggacccaggacagagccaagcccgtgacccagatcgtgtctgccgaagcctggggcagagccgattgcggctttaccagcgagagctaccagcagggcgtgctgagcgccaccatcctgtacgagatcctgctgggcaaggccaccctgtacgccgtgctggtgtctgccctggtgctgatggctatggtcaagcggaaggacagccggggaagggccaagcgatctggatctggagcaacaaacttctcactactcaaacaagcaggtgacgtggaggagaatcccgggcctactagtatggactggatttggcgcatccttttccttgtcggcgctgctaccggcgcgcattccttcgaacaggtgcagctggttgaatctggtggcggagttgtgcagcctggcagaagcctgagactgtcttgtgccgccagcggcttcacctttagcagctatgccatgcactgggtccgacaggcccctggcaaaggacttgaatgggtcgccgtgatctcctacgacggcagcaacaagtattacgccgacagcgtgaagggcagattcaccatcagccgggacaacagcaagaacaccctgtacctccagatgaacagcctgagagccgaggacaccgccgtgtactactgtgccaaagaggccccttactacgccaaggactacatggacgtgtggggcaagggcaccaccgtgacagtttcttctacgcgtatccagaaccctgatcctgccgtgtaccagctgcgggatagcaagagcagcgacaagagcgtgtgtctgttcaccgacttcgacagccagaccaacgtgtcccagagcaaggactccgacgtgtacatcaccgataagtgcgtgctggacatgcggagcatggacttcaagagcaactccgccgtggcctggtccaacaagtccgatttcgcctgcgccaacgccttcaacaacagcattatccccgaggacacattcttcccaagccccgagagcagctgcgacgtgaagctggtggaaaagagcttcgagacagacaccaacctgaacttccagaacctgagcgtgatcggcttcagaatcctgctgctgaaagtggccggctttaacctgctgatgaccctgcggctgtggtccagc

SEQ ID NO: 8993 - DNA, 2286 bp, Artificial Sequence
  Synthetic Polynucloetide
atggccttaccagtgaccgccttgctcctgccgctggccttgctgctccacgccgccaggccggagatcgtgctgacacagagccctggcacactgtcactgtctccaggcgaaagagccacactgagctgtagagccagccagagcgtgtccagcgattacctggcttggtatcagcagaagcccggacaggctcccagactgctgatctacggtgcctctagcagagccacaggcatccccgatagattttctggcagcggctccggcaccgacttcaccctgacaattagcagactgcccgaggacttcgccgtgtactactgccagcagtacgtgtcctactggacctttggcggaggcaccaaggtggaaatcaaaagaacagtggctgccctcgaggacctgaagaacgtgttcccacctgaggtggccgtgttcgagcctagcgaggccgagatcagccacacccagaaagccaccctcgtgtgcctggctaccggcttctaccccgaccatgtggaactgtcttggtgggtcaacggcaaagaggtgcacagcggcgtgtgtaccgacccccagccactgaaagaacagcccgccctgaacgacagccggtactgcctgagcagcagactgagagtgtccgccaccttctggcagaacccccggaaccacttcagatgccaggtgcagttctacggcctgagcgagaacgacgagtggacccaggacagagccaagcccgtgacccagatcgtgtctgccgaagcctggggcagagccgattgcggctttaccagcgagagctaccagcagggcgtgctgagcgccaccatcctgtacgagatcctgctgggcaaggccaccctgtacgccgtgctggtgtctgccctggtgctgatggctatggtcaagcggaaggacagccggggaagggccaagcgatctggatctggagcaacaaacttctcactactcaaacaagcaggtgacgtggaggagaatcccgggcctactagtatggactggatttggcgcatccttttccttgtcggcgctgctaccggcgcccattccgggcccgaagtgcagctggttgaatctggcggaggactggttcaggctggcggatctctgagactgtcttgtgccgccagcggcagaacctttagcatgggctggtttagacaggcccctggcaaagagagagagttcgtcgccgccatcacatactctggcggcagcccttactacgccgactctgtgaagggcagattcaccatcagccgggacaacgccaagaacaccgtgtacctccagatgaacagcctgaagcctgaggacaccgccgtgtactactgcgccgccaatccaacatacggcagcgactggaacgccgagaattggggccagggaacccaagtgacagtgtctagcggatccggcggcggaggatctggcggaggcggatctgggggcggaggctctttcgaacaggtgcagctggttgaatctggtggcggagttgtgcagcctggcagaagcctgagactgtcttgtgccgccagcggcttcacctttagcagctatgccatgcactgggtccgacaggcccctggcaaaggacttgaatgggtcgccgtgatctcctacgacggcagcaacaagtattacgccgacagcgtgaagggcagattcaccatcagccgggacaacagcaagaacaccctgtacctccagatgaacagcctgagagccgaggacaccgccgtgtactactgtgccaaagaggccccttactacgccaaggactacatggacgtgtggggcaagggcaccaccgtgacagtttcttctacgcgtatccagaaccctgatcctgccgtgtaccagctgcgggatagcaagagcagcgacaagagcgtgtgtctgttcaccgacttcgacagccagaccaacgtgtcccagagcaaggactccgacgtgtacatcaccgataagtgcgtgctggacatgcggagcatggacttcaagagcaactccgccgtggcctggtccaacaagtccgatttcgcctgcgccaacgccttcaacaacagcattatccccgaggacacattcttcccaagccccgagagcagctgcgacgtgaagctggtggaaaagagcttcgagacagacaccaacctgaacttccagaacctgagcgtgatcggcttcagaatcctgctgctgaaagtggccggctttaacctgctgatgaccctgcggctgtggtccagc

SEQ ID NO: 8994 - DNA, 2667 bp, Artificial Sequence
  Synthetic Polynucloetide
atggccttaccagtgaccgccttgctcctgccgctggccttgctgctccacgccgccaggccggagatcgtgctgacacagagccctggcacactgtcactgtctccaggcgaaagagccacactgagctgtagagccagccagagcgtgtccagcgattacctggcttggtatcagcagaagcccggacaggctcccagactgctgatctacggtgcctctagcagagccacaggcatccccgatagattttctggcagcggctccggcaccgacttcaccctgacaattagcagactgcccgaggacttcgccgtgtactactgccagcagtacgtgtcctactggacctttggcggaggcaccaaggtggaaatcaaaagaacagtggctgccctcgaggacctgaagaacgtgttcccacctgaggtggccgtgttcgagcctagcgaggccgagatcagccacacccagaaagccaccctcgtgtgcctggctaccggcttctaccccgaccatgtggaactgtcttggtgggtcaacggcaaagaggtgcacagcggcgtgtgtaccgacccccagccactgaaagaacagcccgccctgaacgacagccggtactgcctgagcagcagactgagagtgtccgccaccttctggcagaacccccggaaccacttcagatgccaggtgcagttctacggcctgagcgagaacgacgagtggacccaggacagagccaagcccgtgacccagatcgtgtctgccgaagcctggggcagagccgattgcggctttaccagcgagagctaccagcagggcgtgctgagcgccaccatcctgtacgagatcctgctgggcaaggccaccctgtacgccgtgctggtgtctgccctggtgctgatggctatggtcaagcggaaggacagccggggaagggccaagcgatctggatctggagcaacaaacttctcactactcaaacaagcaggtgacgtggaggagaatcccgggcctactagtatggactggatttggcgcatccttttccttgtcggcgctgctaccggcgcccattcccaactgcaactgcaagagtctggccctggcctggtcaagccttctgaaaccctgagcctgacctgtaccgtgtccggcggctctatcagcagcggcgattactactggggctggatcagacagcctccaggcaagggactcgaatggatcggcagcatcagctacagcggctccacctactacaacccaagcctgaagtccagagtgaccatcagcgtggacaccagcagaaaccagttctccctgaagctgagcagcgtgacagccgccgatacagccgtgtattattgcaccagagaggacagcagcaactggcggagtagaggacagggcacactggtcacagtgtcctcttctggaggcggtggaagcggtggaggaggatctgaagtgcagctggttgaatctggcggaggactggttcaggctggcggatctctgagactgtcttgtgccgccagcggcagaacctttagcatgggctggtttagacaggcccctggcaaagagagagagttcgtcgccgccatcacatactctggcggcagcccttactacgccgactctgtgaagggcagattcaccatcagccgggacaacgccaagaacaccgtgtacctccagatgaacagcctgaagcctgaggacaccgccgtgtactactgcgccgccaatccaacatacggcagcgactggaacgccgagaattggggccagggaacccaagtgacagtgtctagcggatccggcggcggaggatctggcggaggcggatctgggggcggaggctctttcgaacaggtgcagctggttgaatctggtggcggagttgtgcagcctggcagaagcctgagactgtcttgtgccgccagcggcttcacctttagcagctatgccatgcactgggtccgacaggcccctggcaaaggacttgaatgggtcgccgtgatctcctacgacggcagcaacaagtattacgccgacagcgtgaagggcagattcaccatcagccgggacaacagcaagaacaccctgtacctccagatgaacagcctgagagccgaggacaccgccgtgtactactgtgccaaagaggccccttactacgccaaggactacatggacgtgtggggcaagggcaccaccgtgacagtttcttctacgcgtatccagaaccctgatcctgccgtgtaccagctgcgggatagcaagagcagcgacaagagcgtgtgtctgttcaccgacttcgacagccagaccaacgtgtcccagagcaaggactccgacgtgtacatcaccgataagtgcgtgctggacatgcggagcatggacttcaagagcaactccgccgtggcctggtccaacaagtccgatttcgcctgcgccaacgccttcaacaacagcattatccccgaggacacattcttcccaagccccgagagcagctgcgacgtgaagctggtggaaaagagcttcgagacagacaccaacctgaacttccagaacctgagcgtgatcggcttcagaatcctgctgctgaaagtggccggctttaacctgctgatgaccctgcggctgtggtccagc

SEQ ID NO: 8995 - DNA, 2694 bp, Artificial Sequence
  Synthetic Polynucloetide
atggccttaccagtgaccgccttgctcctgccgctggccttgctgctccacgccgccaggccggaagtgcaggttttggagtctggcggaggactggttcagcctggcggatctctgagactgtcttgtgccgccagcggcttcaccttcagcaactttgccatgagctgggtccgacaggcccctggcaaaggacttgaatgggtgtccacaatcagcggcagcgccggcacaacagattacgccgattctgtgaagggcagattcaccatcagccgggacaacagcaagaaaaccctgtacctccagatgaacagcctgcgcgtggaagataccgccgtgtactactgtgccgatggcagaggccccttcttcgattatcgcggccagggcacactggtcaccgtttcttctggtaccggcggaggcggatctggcggcggaggtagcggtggcggaggatctgaattcgagatcgtgctgacacagagccctggcacactgtcactgtctccaggcgaaagagccacactgagctgtagagccagccagagcgtgtccagcgattacctggcttggtatcagcagaagcccggacaggctcccagactgctgatctacggtgcctctagcagagccacaggcatccccgatagattttctggcagcggctccggcaccgacttcaccctgacaattagcagactgcccgaggacttcgccgtgtactactgccagcagtacgtgtcctactggacctttggcggaggcaccaaggtggaaatcaaaagaacagtggctgccctcgaggacctgaagaacgtgttcccacctgaggtggccgtgttcgagcctagcgaggccgagatcagccacacccagaaagccaccctcgtgtgcctggctaccggcttctaccccgaccatgtggaactgtcttggtgggtcaacggcaaagaggtgcacagcggcgtgtgtaccgacccccagccactgaaagaacagcccgccctgaacgacagccggtactgcctgagcagcagactgagagtgtccgccaccttctggcagaacccccggaaccacttcagatgccaggtgcagttctacggcctgagcgagaacgacgagtggacccaggacagagccaagcccgtgacccagatcgtgtctgccgaagcctggggcagagccgattgcggctttaccagcgagagctaccagcagggcgtgctgagcgccaccatcctgtacgagatcctgctgggcaaggccaccctgtacgccgtgctggtgtctgccctggtgctgatggctatggtcaagcggaaggacagccggggaagggccaagcgatctggatctggagcaacaaacttctcactactcaaacaagcaggtgacgtggaggagaatcccgggcctactagtatggactggatttggcgcatccttttccttgtcggcgctgctaccggcgcccattccgggcccgaagtgcagctggttgaatctggcggaggactggttcaggctggcggatctctgagactgtcttgtgccgccagcggcagaacctttagcatgggctggtttagacaggcccctggcaaagagagagagttcgtcgccgccatcacatacagcggcggcagcccttactacgcctcttctgtcagaggccggttcaccatcagccgggacaacgccaagaacaccgtgtacctccagatgaacagcctgaagccagaggacaccgccgtgtactactgtgccgccaatccaacctacggcagcgactggaatgccgagaattggggccagggcacccaagtgacagtgtctagtggatccggcggcggaggatctggcggaggcggatctgggggcggaggctctttcgaacaggtgcagctggttgaatctggtggcggagttgtgcagcctggcagaagcctgagactgtcttgtgccgccagcggcttcacctttagcagctatgccatgcactgggtccgacaggcccctggcaaaggacttgaatgggtcgccgtgatctcctacgacggcagcaacaagtattacgccgacagcgtgaagggcagattcaccatcagccgggacaacagcaagaacaccctgtacctccagatgaacagcctgagagccgaggacaccgccgtgtactactgtgccaaagaggccccttactacgccaaggactacatggacgtgtggggcaagggcaccaccgtgacagtttcttctacgcgtatccagaaccctgatcctgccgtgtaccagctgcgggatagcaagagcagcgacaagagcgtgtgtctgttcaccgacttcgacagccagaccaacgtgtcccagagcaaggactccgacgtgtacatcaccgataagtgcgtgctggacatgcggagcatggacttcaagagcaactccgccgtggcctggtccaacaagtccgatttcgcctgcgccaacgccttcaacaacagcattatccccgaggacacattcttcccaagccccgagagcagctgcgacgtgaagctggtggaaaagagcttcgagacagacaccaacctgaacttccagaacctgagcgtgatcggcttcagaatcctgctgctgaaagtggccggctttaacctgctgatgaccctgcggctgtggtccagc

SEQ ID NO: 8996 - DNA, 2187 bp, Artificial Sequence
  Synthetic Polynucloetide
atggccttaccagtgaccgccttgctcctgccgctggccttgctgctccacgccgccaggccgagctacgagctgatccagcctccttctgccgctgtgacactgggcaataccgtgtctctgacctgtgtgggagatgagctgcccaagagatacgcctactggtatcagcagaagcccgaccagagcatcgtgcgcgtgatctacgaagatagcgtgcggcctcctggcatcagcgatagattttctggcagcagcagcggcaccaccgccacactgacaattagagatgcccagaacgaggacgaggccgactactactgtcagagcacctacggcgacgacaagctgtacatctttggcggaggcaccaagctgacagtgcttggaggcggaggcggaagtggaggcggaggatctggcggcggaggctctgaagttcagctggttgaaacaggtggcggcctggtgcagcctggcaaatctctggaactgacctgcgccaccagcggcttcacctttaataccgcctggatgcactgggtccgacagagccccgataagcggctggaatggatcgccagaatcaaggacaccagcaacaactacgccaccgactacgtggaatccatgaagggcagattcaccatcagccgggacgacagcaagggctccgtgaacctccagatgaacagcctgaaagaagaggacaccgccacctactactgcaccaccgacttctacgacggcacctactattggaactactggggccagggcgtgatggtcacagtgtcatctacgcgtgagcagaaactgatctcggaagaggatctggcgaagcccaccacgacgccagcgccgcgaccaccaacaccggcgcccaccatcgcgtcgcagcccctgtccctgcgcccagaggcgtgccggccagcggcggggggcgcagtgcacacgagggggctggacttcgcctgtgacatctacatctgggcgcccttggccgggacttgtggggtccttctcctgtcactggttatcaccctttactgcaaacggggcagaaagaaactcctgtatatattcaaacaaccatttatgagaccagtacaaactactcaagaggaagatggctgtagctgccgatttccagaagaagaagaaggaggatgtgaactgagagtgaagttcagcaggagcgcagacgcccccgcgtaccagcagggccagaaccagctctataacgagctgaatctaggacgaagagaggagtacgatgttttggacaagagacgtggccgggaccctgagatggggggaaagccgagaaggaagaaccctcaggaaggcctgtacaatgaactgcagaaagataagatggcggaggcctacagtgagattgggatgaaaggcgagcgccggaggggcaaggggcacgatggcctttaccagggtctcagtacagccaccaaggacacctacgacgcccttcacatgcaggccctgccccctcgctctagtggctccggcgagggcagaggaagtctactaacctgcggagatgtggaagaaaatcctggcccacatatgaccgagtacaagcccacggtgcgcctcgccacccgcgacgacgtccccagggccgtacgcaccctcgccgccgcgttcgccgactaccccgccacgcgccacaccgtcgatccggaccgccacatcgagcgggtcaccgagctgcaagaactcttcctcacgcgcgtcgggctcgacatcggcaaggtgtgggtcgcggacgacggcgccgcggtggcggtctggaccacgccggagagcgtcgaagcgggggcggtgttcgccgagatcggcccgcgcatggccgagttgagcggttcccggctggccgcgcagcaacagatggaaggcctcctggcgccgcaccggcccaaggagcccgcgtggttcctggccaccgtcggcgtctcgcccgaccaccagggcaagggtctgggcagcgccgtcgtgctccccggagtggaggcggccgagcgcgccggggtgcccgccttcctggagacctccgcgccccgcaacctccccttctacgagcggctcggcttcaccgtcaccgccgacgtcgaggtgcccgaaggaccgcgcacctggtgcatgacccgcaagcccggtgcctga

SEQ ID NO: 8997 - DNA, 2169 bp, Artificial Sequence
  Synthetic Polynucloetide
atggccttaccagtgaccgccttgctcctgccgctggccttgctgctccacgccgccaggccgagctacgagctgatccagcctccttctgccgctgtgacactgggcaataccgtgtctctgacctgtgtgggagatgagctgcccaagagatacgcctactggtatcagcagaagcccgaccagagcatcgtgcgcgtgatctacgaagatagcgtgcggcctcctggcatcagcgatagattttctggcagcagcagcggcaccaccgccacactgacaattagagatgcccagaacgaggacgaggccgactactactgtcagagcacctacggcgacgacaagctgtacatctttggcggaggcaccaagctgacagtgcttggaggcggaggcggaagtggaggcggaggatctggcggcggaggctctgaagttcagctggttgaaacaggtggcggcctggtgcagcctggcaaatctctggaactgacctgcgccaccagcggcttcacctttaataccgcctggatgcactgggtccgacagagccccgataagcggctggaatggatcgccagaatcaaggacaccagcaacaactacgccaccgactacgtggaatccatgaagggcagattcaccatcagccgggacgacagcaagggctccgtgaacctccagatgaacagcctgaaagaagaggacaccgccacctactactgcaccaccgacttctacgacggcacctactattggaactactggggccagggcgtgatggtcacagtgtcatctacgcgtgagcagaaactgatctcggaagaggatctgaaaattgaagttatgtatcctcctccttacctagacaatgagaagagcaatggaaccattatccatgtgaaagggaaacacctttgtccaagtcccctatttcccggaccttctaagcccttttgggtgctggtggtggttgggggagtcctggcttgctatagcttgctagtaacagtggcctttattattttctgggtgaggagtaagaggagcaggctcctgcacagtgactacatgaacatgactccacgccgccccggacccacccgcaagcattaccagccctatgccccaccacgcgacttcgcagcctatcgctccagagtgaagttcagcaggagcgcagacgcccccgcgtaccagcagggccagaaccagctctataacgagctcaatctaggacgaagagaggagtacgatgttttggacaagagacgtggccgggaccctgagatggggggaaagccgagaaggaagaaccctcaggaaggcctgtacaatgaactgcagaaagataagatggcggaggcctacagtgagattgggatgaaaggcgagcgccggaggggcaaggggcacgatggcctttaccagggtctcagtacagccaccaaggacacctacgacgcccttcacatgcaggccctgccccctcgctctagtggctccggcgagggcagaggaagtctactaacctgcggagatgtggaagaaaatcctggcccacatatgaccgagtacaagcccacggtgcgcctcgccacccgcgacgacgtccccagggccgtacgcaccctcgccgccgcgttcgccgactaccccgccacgcgccacaccgtcgatccggaccgccacatcgagcgggtcaccgagctgcaagaactcttcctcacgcgcgtcgggctcgacatcggcaaggtgtgggtcgcggacgacggcgccgcggtggcggtctggaccacgccggagagcgtcgaagcgggggcggtgttcgccgagatcggcccgcgcatggccgagttgagcggttcccggctggccgcgcagcaacagatggaaggcctcctggcgccgcaccggcccaaggagcccgcgtggttcctggccaccgtcggcgtctcgcccgaccaccagggcaagggtctgggcagcgccgtcgtgctccccggagtggaggcggccgagcgcgccggggtgcccgccttcctggagacctccgcgccccgcaacctccccttctacgagcggctcggcttcaccgtcaccgccgacgtcgaggtgcccgaaggaccgcgcacctggtgcatgacccgcaagcccggtgcctga

SEQ ID NO: 8998 - DNA, 1497 bp, Artificial Sequence
  Synthetic Polynucloetide
atggccttaccagtgaccgccttgctcctgccgctggccttgctgctccacgccgccaggccgagctacgagctgatccagcctccttctgccgctgtgacactgggcaataccgtgtctctgacctgtgtgggagatgagctgcccaagagatacgcctactggtatcagcagaagcccgaccagagcatcgtgcgcgtgatctacgaagatagcgtgcggcctcctggcatcagcgatagattttctggcagcagcagcggcaccaccgccacactgacaattagagatgcccagaacgaggacgaggccgactactactgtcagagcacctacggcgacgacaagctgtacatctttggcggaggcaccaagctgacagtgcttggaggcggaggcggaagtggaggcggaggatctggcggcggaggctctgaagttcagctggttgaaacaggtggcggcctggtgcagcctggcaaatctctggaactgacctgcgccaccagcggcttcacctttaataccgcctggatgcactgggtccgacagagccccgataagcggctggaatggatcgccagaatcaaggacaccagcaacaactacgccaccgactacgtggaatccatgaagggcagattcaccatcagccgggacgacagcaagggctccgtgaacctccagatgaacagcctgaaagaagaggacaccgccacctactactgcaccaccgacttctacgacggcacctactattggaactactggggccagggcgtgatggtcacagtgtcatctacgcgtgagcagaaactgatctcggaagaggatctgaaaattgaagttatgtatcctcctccttacctagacaatgagaagagcaatggaaccattatccatgtgaaagggaaacacctttgtccaagtcccctatttcccggaccttctaagcccttttgggtgctggtggtggttgggggagtcctggcttgctatagcttgctagtaacagtggcctttattattttctgggtgaggagtaagaggagcaggctcctgcacagtgactacatgaacatgactccacgccgccccggacccacccgcaagcattaccagccctatgccccaccacgcgacttcgcagcctatcgctccagagtgaagttcagcaggagcgcagacgcccccgcgtaccagcagggccagaaccagctctataacgagctcaatctaggacgaagagaggagtacgatgttttggacaagagacgtggccgggaccctgagatggggggaaagccgagaaggaagaaccctcaggaaggcctgtacaatgaactgcagaaagataagatggcggaggcctacagtgagattgggatgaaaggcgagcgccggaggggcaaggggcacgatggcctttaccagggtctcagtacagccaccaaggacacctacgacgcccttcacatgcaggccctgccccctcgc

SEQ ID NO: 8999 - DNA, 1518 bp, Artificial Sequence
  Synthetic Polynucloetide
atggccttaccagtgaccgccttgctcctgccgctggccttgctgctccacgccgccaggccgagctacgagctgatccagcctccttctgccgctgtgacactgggcaataccgtgtctctgacctgtgtgggagatgagctgcccaagagatacgcctactggtatcagcagaagcccgaccagagcatcgtgcgcgtgatctacgaagatagcgtgcggcctcctggcatcagcgatagattttctggcagcagcagcggcaccaccgccacactgacaattagagatgcccagaacgaggacgaggccgactactactgtcagagcacctacggcgacgacaagctgtacatctttggcggaggcaccaagctgacagtgcttggaggcggaggcggaagtggaggcggaggatctggcggcggaggctctgaagttcagctggttgaaacaggtggcggcctggtgcagcctggcaaatctctggaactgacctgcgccaccagcggcttcacctttaataccgcctggatgcactgggtccgacagagccccgataagcggctggaatggatcgccagaatcaaggacaccagcaacaactacgccaccgactacgtggaatccatgaagggcagattcaccatcagccgggacgacagcaagggctccgtgaacctccagatgaacagcctgaaagaagaggacaccgccacctactactgcaccaccgacttctacgacggcacctactattggaactactggggccagggcgtgatggtcacagtgtcatctacgcgtgagcagaaactgatctcggaagaggatctggcgaagcccaccacgacgccagcgccgcgaccaccaacaccggcgcccaccatcgcgtcgcagcccctgtccctgcgcccagaggcgtgccggccagcggcggggggcgcagtgcacacgagggggctggacttcgcctgtgacatctacatctgggcgcccttggccgggacttgtggggtccttctcctgtcactggttatcaccctttactgcaaacggggcagaaagaaactcctgtatatattcaaacaaccatttatgagaccagtacaaactactcaagaggaagatggctgtagctgccgatttccagaagaagaagaaggaggatgtgaactgagagtgaagttcagcaggagcgcagacgcccccgcgtaccagcagggccagaaccagctctataacgagctgaatctaggacgaagagaggagtacgatgttttggacaagagacgtggccgggaccctgagatggggggaaagccgagaaggaagaaccctcaggaaggcctgtacaatgaactgcagaaagataagatggcggaggcctacagtgagattgggatgaaaggcgagcgccggaggggcaaggggcacgatggcctttaccagggtctcagtacagccaccaaggacacctacgacgcccttcacatgcaggccctgccccctcgctga

SEQ ID NO: 9000 - DNA, 1518 bp, Artificial Sequence
  Synthetic Polynucloetide
atggccttaccagtgaccgccttgctcctgccgctggccttgctgctccacgccgccaggccggaagttcagctggttgaaacaggtggcggcctggtgcagcctggcaaatctctggaactgacctgcgccaccagcggcttcacctttaataccgcctggatgcactgggtccgacagagccccgataagcggctggaatggatcgccagaatcaaggacaccagcaacaactacgccaccgactacgtggaatccatgaagggcagattcaccatcagccgggacgacagcaagggctccgtgaacctccagatgaacagcctgaaagaagaggacaccgccacctactactgcaccaccgacttctacgacggcacctactattggaactactggggccagggcgtgatggtcacagtgtcatctggcggaggcggaagtggaggcggaggatctggcggcggaggctctagctacgagctgatccagcctccttctgccgctgtgacactgggcaataccgtgtctctgacctgtgtgggagatgagctgcccaagagatacgcctactggtatcagcagaagcccgaccagagcatcgtgcgcgtgatctacgaagatagcgtgcggcctcctggcatcagcgatagattttctggcagcagcagcggcaccaccgccacactgacaattagagatgcccagaacgaggacgaggccgactactactgtcagagcacctacggcgacgacaagctgtacatctttggcggaggcaccaagctgacagtgcttggaacgcgtgagcagaaactgatctcggaagaggatctggcgaagcccaccacgacgccagcgccgcgaccaccaacaccggcgcccaccatcgcgtcgcagcccctgtccctgcgcccagaggcgtgccggccagcggcggggggcgcagtgcacacgagggggctggacttcgcctgtgacatctacatctgggcgcccttggccgggacttgtggggtccttctcctgtcactggttatcaccctttactgcaaacggggcagaaagaaactcctgtatatattcaaacaaccatttatgagaccagtacaaactactcaagaggaagatggctgtagctgccgatttccagaagaagaagaaggaggatgtgaactgagagtgaagttcagcaggagcgcagacgcccccgcgtaccagcagggccagaaccagctctataacgagctgaatctaggacgaagagaggagtacgatgttttggacaagagacgtggccgggaccctgagatggggggaaagccgagaaggaagaaccctcaggaaggcctgtacaatgaactgcagaaagataagatggcggaggcctacagtgagattgggatgaaaggcgagcgccggaggggcaaggggcacgatggcctttaccagggtctcagtacagccaccaaggacacctacgacgcccttcacatgcaggccctgccccctcgctga

SEQ ID NO: 9001 - DNA, 2757 bp, Artificial Sequence
  Synthetic Polynucloetide
atggccttaccagtgaccgccttgctcctgccgctggccttgctgctccacgccgccaggccgagctacgagctgatccagcctccttctgccgctgtgacactgggcaataccgtgtctctgacctgtgtgggagatgagctgcccaagagatacgcctactggtatcagcagaagcccgaccagagcatcgtgcgcgtgatctacgaagatagcgtgcggcctcctggcatcagcgatagattttctggcagcagcagcggcaccaccgccacactgacaattagagatgcccagaacgaggacgaggccgactactactgtcagagcacctacggcgacgacaagctgtacatctttggcggaggcaccaagctgacagtgcttggaggcggaggcggaagtggaggcggaggatctggcggcggaggctctgaagttcagctggttgaaacaggtggcggcctggtgcagcctggcaaatctctggaactgacctgcgccaccagcggcttcacctttaataccgcctggatgcactgggtccgacagagccccgataagcggctggaatggatcgccagaatcaaggacaccagcaacaactacgccaccgactacgtggaatccatgaagggcagattcaccatcagccgggacgacagcaagggctccgtgaacctccagatgaacagcctgaaagaagaggacaccgccacctactactgcaccaccgacttctacgacggcacctactattggaactactggggccagggcgtgatggtcacagtgtcatctacgcgtgagcagaaactgatctcggaagaggatctggcgaagcccaccacgacgccagcgccgcgaccaccaacaccggcgcccaccatcgcgtcgcagcccctgtccctgcgcccagaggcgtgccggccagcggcggggggcgcagtgcacacgagggggctggacttcgcctgtgacatctacatctgggcgcccttggccgggacttgtggggtccttctcctgtcactggttatcaccctttactgcgggcgcgccagagtgaagttcagcaggagcgcagacgcccccgcgtaccagcagggccagaaccagctctataacgagctgaatctaggacgaagagaggagtacgatgttttggacaagagacgtggccgggaccctgagatggggggaaagccgagaaggaagaaccctcaggaaggcctgtacaatgaactgcagaaagataagatggcggaggcctacagtgagattgggatgaaaggcgagcgccggaggggcaaggggcacgatggcctttaccagggtctcagtacagccaccaaggacacctacgacgcccttcacatgcaggccctgccccctcgctctagaggatctggagcaacaaacttctcactactcaaacaagcaggtgacgtggaggagaatcccgggcctgggatccacatggccacttacgaggttctctgtgaggtggcgcggaaactgggcacggatgacagggaagtggtattgttcctcctaaacgtgttcatacctcaacccacactggcccaattaattggagctcttagagctttaaaggaggagggcaggttaacgtttcccctgttagcggaatgtctgtttcgtgcaggtcgcagagacctcttgcgcgacctgcttcacttagacccgcgttttttagagcgccacctagcgggcacaatgagttatttcagcccttatcagctcactgttctccacgtagacggggagctgtgtgcgagggatattaggtctttgatatttttaagcaaggacactatagggtctcgcagcacaccacagacattcttacactgggtgtactgtatggaaaacttagacctactgggtcccactgacgtggatgccctaatgtcaatgcttagatctttgtcaagagtagacctacagcgccaagtgcaaaccctaatgggccttcacctttccggcccatcacactcccaacactatcgccatacaccactcgagaccgatttctacgactacaaggacgacgatgacaagactagtggctccggcgagggcagaggaagtctactaacctgcggagatgtggaagaaaatcctggcccacatatgaccgagtacaagcccacggtgcgcctcgccacccgcgacgacgtccccagggccgtacgcaccctcgccgccgcgttcgccgactaccccgccacgcgccacaccgtcgatccggaccgccacatcgagcgggtcaccgagctgcaagaactcttcctcacgcgcgtcgggctcgacatcggcaaggtgtgggtcgcggacgacggcgccgcggtggcggtctggaccacgccggagagcgtcgaagcgggggcggtgttcgccgagatcggcccgcgcatggccgagttgagcggttcccggctggccgcgcagcaacagatggaaggcctcctggcgccgcaccggcccaaggagcccgcgtggttcctggccaccgtcggcgtctcgcccgaccaccagggcaagggtctgggcagcgccgtcgtgctccccggagtggaggcggccgagcgcgccggggtgcccgccttcctggagacctccgcgccccgcaacctccccttctacgagcggctcggcttcaccgtcaccgccgacgtcgaggtgcccgaaggaccgcgcacctggtgcatgacccgcaagcccggtgcctga

SEQ ID NO: 9002 - DNA, 2577 bp, Artificial Sequence
  Synthetic Polynucloetide
atggccttaccagtgaccgccttgctcctgccgctggccttgctgctccacgccgccaggccgagctacgagctgatccagcctccttctgccgctgtgacactgggcaataccgtgtctctgacctgtgtgggagatgagctgcccaagagatacgcctactggtatcagcagaagcccgaccagagcatcgtgcgcgtgatctacgaagatagcgtgcggcctcctggcatcagcgatagattttctggcagcagcagcggcaccaccgccacactgacaattagagatgcccagaacgaggacgaggccgactactactgtcagagcacctacggcgacgacaagctgtacatctttggcggaggcaccaagctgacagtgcttggactcgagatccagaaccctgatcctgccgtgtaccagctgcgggatagcaagagcagcgacaagagcgtgtgtctgttcaccgacttcgacagccagaccaacgtgtcccagagcaaggactccgacgtgtacatcaccgataagtgcgtgctggacatgcggagcatggacttcaagagcaactccgccgtggcctggtccaacaagtccgatttcgcctgcgccaacgccttcaacaacagcattatccccgaggacacattcttcccaagcagcgacgtgccctgcgacgtgaagctggtggaaaagagcttcgagacagacaccaacctgaacttccagaacctgagcgtgatcggcttcagaatcctgctgctgaaagtggccggctttaacctgctgatgaccctgcggctgtggtccagccgcgccaagagaagcggatctggcgtgaagcagaccctgaatttcgacctgctgaagctggctggcgacgtggaatccaacccaggccctactagtatggactggatttggcgcatccttttccttgtcggcgctgctaccggcgcgcattccttcgaagaagttcagctggttgaaacaggtggcggcctggtgcagcctggcaaatctctggaactgacctgcgccaccagcggcttcacctttaataccgcctggatgcactgggtccgacagagccccgataagcggctggaatggatcgccagaatcaaggacaccagcaacaactacgccaccgactacgtggaatccatgaagggcagattcaccatcagccgggacgacagcaagggctccgtgaacctccagatgaacagcctgaaagaagaggacaccgccacctactactgcaccaccgacttctacgacggcacctactattggaactactggggccagggcgtgatggtcacagtgtcatctacgcgtgaggacctgaagaacgtgttcccacctgaggtggccgtgttcgagcctagcaaggccgagatcgcccacacccagaaagccaccctcgtgtgcctggctaccggcttctaccccgaccatgtggaactgtcttggtgggtcaacggcaaagaggtgcacagcggcgtgtgtaccgacccccagccactgaaagaacagcccgccctgaacgacagccggtactgcctgagcagcagactgagagtgtccgccaccttctggcagaacccccggaaccacttcagatgccaggtgcagttctacggcctgagcgagaacgacgagtggacccaggacagagccaagcccgtgacccagatcgtgtctgccgaagcctggggcagagccgattgcggcatcaccagcgccagctaccaccagggcgtgctgagcgccaccatcctgtacgagatcctgctgggcaaggccaccctgtacgccgtgctggtgtctgccctggtgctgatggctatggtcaagcggaaggacagccggggaagggccaagcgatctggatctggagcaacaaacttctcactactcaaacaagcaggtgacgtggaggagaatcccgggccttctagaggccatatgaccgagtacaagcccacggtgcgcctcgccacccgcgacgacgtccccagggccgtacgcaccctcgccgccgcgttcgccgactaccccgccacgcgccacaccgtcgatccggaccgccacatcgagcgggtcaccgagctgcaagaactcttcctcacgcgcgtcgggctcgacatcggcaaggtgtgggtcgcggacgacggcgccgcggtggcggtctggaccacgccggagagcgtcgaagcgggggcggtgttcgccgagatcggcccgcgcatggccgagttgagcggttcccggctggccgcgcagcaacagatggaaggcctcctggcgccgcaccggcccaaggagcccgcgtggttcctggccaccgtcggcgtctcgcccgaccaccagggcaagggtctgggcagcgccgtcgtgctccccggagtggaggcggccgagcgcgccggggtgcccgccttcctggagacctccgcgccccgcaacctccccttctacgagcggctcggcttcaccgtcaccgccgacgtcgaggtgcccgaaggaccgcgcacctggtgcatgacccgcaagcccggtgcctga

SEQ ID NO: 9003 - DNA, 2574 bp, Artificial Sequence
  Synthetic Polynucloetide
atggccttaccagtgaccgccttgctcctgccgctggccttgctgctccacgccgccaggccgagctacgagctgatccagcctccttctgccgctgtgacactgggcaataccgtgtctctgacctgtgtgggagatgagctgcccaagagatacgcctactggtatcagcagaagcccgaccagagcatcgtgcgcgtgatctacgaagatagcgtgcggcctcctggcatcagcgatagattttctggcagcagcagcggcaccaccgccacactgacaattagagatgcccagaacgaggacgaggccgactactactgtcagagcacctacggcgacgacaagctgtacatctttggcggaggcaccaagctgacagtgcttggactcgaggacctgaagaacgtgttcccacctgaggtggccgtgttcgagcctagcaaggccgagatcgcccacacccagaaagccaccctcgtgtgcctggctaccggcttctaccccgaccatgtggaactgtcttggtgggtcaacggcaaagaggtgcacagcggcgtgtgtaccgacccccagccactgaaagaacagcccgccctgaacgacagccggtactgcctgagcagcagactgagagtgtccgccaccttctggcagaacccccggaaccacttcagatgccaggtgcagttctacggcctgagcgagaacgacgagtggacccaggacagagccaagcccgtgacccagatcgtgtctgccgaagcctggggcagagccgattgcggcatcaccagcgccagctaccaccagggcgtgctgagcgccaccatcctgtacgagatcctgctgggcaaggccaccctgtacgccgtgctggtgtctgccctggtgctgatggctatggtcaagcggaaggacagccggggaagggccaagcgatctggatctggagcaacaaacttctcactactcaaacaagcaggtgacgtggaggagaatcccgggcctactagtatggactggatttggcgcatccttttccttgtcggcgctgctaccggcgcgcattccttcgaagaagttcagctggttgaaacaggtggcggcctggtgcagcctggcaaatctctggaactgacctgcgccaccagcggcttcacctttaataccgcctggatgcactgggtccgacagagccccgataagcggctggaatggatcgccagaatcaaggacaccagcaacaactacgccaccgactacgtggaatccatgaagggcagattcaccatcagccgggacgacagcaagggctccgtgaacctccagatgaacagcctgaaagaagaggacaccgccacctactactgcaccaccgacttctacgacggcacctactattggaactactggggccagggcgtgatggtcacagtgtcatctacgcgtatccagaaccctgatcctgccgtgtaccagctgcgggatagcaagagcagcgacaagagcgtgtgtctgttcaccgacttcgacagccagaccaacgtgtcccagagcaaggactccgacgtgtacatcaccgataagtgcgtgctggacatgcggagcatggacttcaagagcaactccgccgtggcctggtccaacaagtccgatttcgcctgcgccaacgccttcaacaacagcattatccccgaggacacattcttcccaagcagcgacgtgccctgcgacgtgaagctggtggaaaagagcttcgagacagacaccaacctgaacttccagaacctgagcgtgatcggcttcagaatcctgctgctgaaagtggccggctttaacctgctgatgaccctgcggctgtggtccagccgcgccaagagaagcggatctggcgtgaagcagaccctgaatttcgacctgctgaagctggctggcgacgtggaatccaacccaggcccttctagaggccatatgaccgagtacaagcccacggtgcgcctcgccacccgcgacgacgtccccagggccgtacgcaccctcgccgccgcgttcgccgactaccccgccacgcgccacaccgtcgatccggaccgccacatcgagcgggtcaccgagctgcaagaactcttcctcacgcgcgtcgggctcgacatcggcaaggtgtgggtcgcggacgacggcgccgcggtggcggtctggaccacgccggagagcgtcgaagcgggggcggtgttcgccgagatcggcccgcgcatggccgagttgagcggttcccggctggccgcgcagcaacagatggaaggcctcctggcgccgcaccggcccaaggagcccgcgtggttcctggccaccgtcggcgtctcgcccgaccaccagggcaagggtctgggcagcgccgtcgtgctccccggagtggaggcggccgagcgcgccggggtgcccgccttcctggagacctccgcgccccgcaacctccccttctacgagcggctcggcttcaccgtcaccgccgacgtcgaggtgcccgaaggaccgcgcacctggtgcatgacccgcaagcccggtgcctga

SEQ ID NO: 9004 - DNA, 1872 bp, Artificial Sequence
  Synthetic Polynucloetide
atggccttaccagtgaccgccttgctcctgccgctggccttgctgctccacgccgccaggccgagctacgagctgatccagcctccttctgccgctgtgacactgggcaataccgtgtctctgacctgtgtgggagatgagctgcccaagagatacgcctactggtatcagcagaagcccgaccagagcatcgtgcgcgtgatctacgaagatagcgtgcggcctcctggcatcagcgatagattttctggcagcagcagcggcaccaccgccacactgacaattagagatgcccagaacgaggacgaggccgactactactgtcagagcacctacggcgacgacaagctgtacatctttggcggaggcaccaagctgacagtgcttggactcgaggacctgaagaacgtgttcccacctgaggtggccgtgttcgagcctagcgaggccgagatcagccacacccagaaagccaccctcgtgtgcctggctaccggcttctaccccgaccatgtggaactgtcttggtgggtcaacggcaaagaggtgcacagcggcgtgtgtaccgacccccagccactgaaagaacagcccgccctgaacgacagccggtactgcctgagcagcagactgagagtgtccgccaccttctggcagaacccccggaaccacttcagatgccaggtgcagttctacggcctgagcgagaacgacgagtggacccaggacagagccaagcccgtgacccagatcgtgtctgccgaagcctggggcagagccgattgcggctttaccagcgagagctaccagcagggcgtgctgagcgccaccatcctgtacgagatcctgctgggcaaggccaccctgtacgccgtgctggtgtctgccctggtgctgatggctatggtcaagcggaaggacagccggggaagggccaagcgatctggatctggagcaacaaacttctcactactcaaacaagcaggtgacgtggaggagaatcccgggcctactagtatggactggatttggcgcatccttttccttgtcggcgctgctaccggcgcgcattccttcgaagaagttcagctggttgaaacaggtggcggcctggtgcagcctggcaaatctctggaactgacctgcgccaccagcggcttcacctttaataccgcctggatgcactgggtccgacagagccccgataagcggctggaatggatcgccagaatcaaggacaccagcaacaactacgccaccgactacgtggaatccatgaagggcagattcaccatcagccgggacgacagcaagggctccgtgaacctccagatgaacagcctgaaagaagaggacaccgccacctactactgcaccaccgacttctacgacggcacctactattggaactactggggccagggcgtgatggtcacagtgtcatctacgcgtatccagaaccctgatcctgccgtgtaccagctgcgggatagcaagagcagcgacaagagcgtgtgtctgttcaccgacttcgacagccagaccaacgtgtcccagagcaaggactccgacgtgtacatcaccgataagtgcgtgctggacatgcggagcatggacttcaagagcaactccgccgtggcctggtccaacaagtccgatttcgcctgcgccaacgccttcaacaacagcattatccccgaggacacattcttcccaagccccgagagcagctgcgacgtgaagctggtggaaaagagcttcgagacagacaccaacctgaacttccagaacctgagcgtgatcggcttcagaatcctgctgctgaaagtggccggctttaacctgctgatgaccctgcggctgtggtccagc

SEQ ID NO: 9005 - DNA, 2547 bp, Artificial Sequence
  Synthetic Polynucloetide
atggccttaccagtgaccgccttgctcctgccgctggccttgctgctccacgccgccaggccgagctacgagctgatccagcctccttctgccgctgtgacactgggcaataccgtgtctctgacctgtgtgggagatgagctgcccaagagatacgcctactggtatcagcagaagcccgaccagagcatcgtgcgcgtgatctacgaagatagcgtgcggcctcctggcatcagcgatagattttctggcagcagcagcggcaccaccgccacactgacaattagagatgcccagaacgaggacgaggccgactactactgtcagagcacctacggcgacgacaagctgtacatctttggcggaggcaccaagctgacagtgcttggactcgaggacctgaagaacgtgttcccacctgaggtggccgtgttcgagcctagcgaggccgagatcagccacacccagaaagccaccctcgtgtgcctggctaccggcttctaccccgaccatgtggaactgtcttggtgggtcaacggcaaagaggtgcacagcggcgtgtgtaccgacccccagccactgaaagaacagcccgccctgaacgacagccggtactgcctgagcagcagactgagagtgtccgccaccttctggcagaacccccggaaccacttcagatgccaggtgcagttctacggcctgagcgagaacgacgagtggacccaggacagagccaagcccgtgacccagatcgtgtctgccgaagcctggggcagagccgattgcggctttaccagcgagagctaccagcagggcgtgctgagcgccaccatcctgtacgagatcctgctgggcaaggccaccctgtacgccgtgctggtgtctgccctggtgctgatggctatggtcaagcggaaggacagccggggaagggccaagcgatctggatctggagcaacaaacttctcactactcaaacaagcaggtgacgtggaggagaatcccgggcctactagtatggactggatttggcgcatccttttccttgtcggcgctgctaccggcgcgcattccttcgaagaagttcagctggttgaaacaggtggcggcctggtgcagcctggcaaatctctggaactgacctgcgccaccagcggcttcacctttaataccgcctggatgcactgggtccgacagagccccgataagcggctggaatggatcgccagaatcaaggacaccagcaacaactacgccaccgactacgtggaatccatgaagggcagattcaccatcagccgggacgacagcaagggctccgtgaacctccagatgaacagcctgaaagaagaggacaccgccacctactactgcaccaccgacttctacgacggcacctactattggaactactggggccagggcgtgatggtcacagtgtcatctacgcgtatccagaaccctgatcctgccgtgtaccagctgcgggatagcaagagcagcgacaagagcgtgtgtctgttcaccgacttcgacagccagaccaacgtgtcccagagcaaggactccgacgtgtacatcaccgataagtgcgtgctggacatgcggagcatggacttcaagagcaactccgccgtggcctggtccaacaagtccgatttcgcctgcgccaacgccttcaacaacagcattatccccgaggacacattcttcccaagccccgagagcagctgcgacgtgaagctggtggaaaagagcttcgagacagacaccaacctgaacttccagaacctgagcgtgatcggcttcagaatcctgctgctgaaagtggccggctttaacctgctgatgaccctgcggctgtggtccagccgcgccaagagaagcggatctggcgtgaagcagaccctgaatttcgacctgctgaagctggctggcgacgtggaatccaacccaggcccttctagaggcgggatccacaccatggctacctacgaggtgctgtgcgaggtggcaagaaagctgggcaccgacgacagagaagtggtgctgttcctgctgaacgtgttcatccctcagcctacactggcccagctgatcggtgcactgagagccctgaaagaggaaggccggctgacctttcctctgctggccgaatgcctgttcagagccggaagaagggatctgctgcgggacctgctgcatctggaccccagatttctggaaagacacctggccggcaccatgagctacttcagcccttaccagctgaccgtgctgcacgttgacggcgaactgtgcgccagagatattcggagcctgatcttcctgagcaaggacaccatcggcagccggtctacccctcagacatttctgcactgggtgtactgcatggaaaacctggacctgctcggccccacagatgtggatgccctgatgtccatgctgagaagcctgagcagagtggacctccagagacaggtgcagacactgatgggactgcacctgagcggacctagccacagccagcactacagacacacccct

SEQ ID NO: 9006 - DNA, 1884 bp, Artificial Sequence
  Synthetic Polynucloetide
atggccttaccagtgaccgccttgctcctgccgctggccttgctgctccacgccgccaggccgagctacgagctgatccagcctccttctgccgctgtgacactgggcaataccgtgtctctgacctgtgtgggagatgagctgcccaagagatacgcctactggtatcagcagaagcccgaccagagcatcgtgcgcgtgatctacgaagatagcgtgcggcctcctggcatcagcgatagattttctggcagcagcagcggcaccaccgccacactgacaattagagatgcccagaacgaggacgaggccgactactactgtcagagcacctacggcgacgacaagctgtacatctttggcggaggcaccaagctgacagtgcttggactcgagatccagaaccctgatcctgccgtgtaccagctgcgggatagcaagagcagcgacaagagcgtgtgtctgttcaccgacttcgacagccagaccaacgtgtcccagagcaaggactccgacgtgtacatcaccgataagtgcgtgctggacatgcggagcatggacttcaagagcaactccgccgtggcctggtccaacaagtccgatttcgcctgcgccaacgccttcaacaacagcattatccccgaggacacattcttcccaagccccgagagcagctgcgacgtgaagctggtggaaaagagcttcgagacagacaccaacctgaacttccagaacctgagcgtgatcggcttcagaatcctgctgctgaaagtggccggctttaacctgctgatgaccctgcggctgtggtccagccgcgccaagagaagcggatctggcgtgaagcagaccctgaatttcgacctgctgaagctggctggcgacgtggaatccaacccaggccctactagtatggactggatttggcgcatccttttccttgtcggcgctgctaccggcgcgcattccttcgaagaagttcagctggttgaaacaggtggcggcctggtgcagcctggcaaatctctggaactgacctgcgccaccagcggcttcacctttaataccgcctggatgcactgggtccgacagagccccgataagcggctggaatggatcgccagaatcaaggacaccagcaacaactacgccaccgactacgtggaatccatgaagggcagattcaccatcagccgggacgacagcaagggctccgtgaacctccagatgaacagcctgaaagaagaggacaccgccacctactactgcaccaccgacttctacgacggcacctactattggaactactggggccagggcgtgatggtcacagtgtcatctacgcgtgaggacctgaagaacgtgttcccacctgaggtggccgtgttcgagcctagcgaggccgagatcagccacacccagaaagccaccctcgtgtgcctggctaccggcttctaccccgaccatgtggaactgtcttggtgggtcaacggcaaagaggtgcacagcggcgtgtgtaccgacccccagccactgaaagaacagcccgccctgaacgacagccggtactgcctgagcagcagactgagagtgtccgccaccttctggcagaacccccggaaccacttcagatgccaggtgcagttctacggcctgagcgagaacgacgagtggacccaggacagagccaagcccgtgacccagatcgtgtctgccgaagcctggggcagagccgattgcggctttaccagcgagagctaccagcagggcgtgctgagcgccaccatcctgtacgagatcctgctgggcaaggccaccctgtacgccgtgctggtgtctgccctggtgctgatggctatggtcaagcggaaggacagccgggga

SEQ ID NO: 9007 - DNA, 2550 bp, Artificial Sequence
  Synthetic Polynucloetide
atggccttaccagtgaccgccttgctcctgccgctggccttgctgctccacgccgccaggccgagctacgagctgatccagcctccttctgccgctgtgacactgggcaataccgtgtctctgacctgtgtgggagatgagctgcccaagagatacgcctactggtatcagcagaagcccgaccagagcatcgtgcgcgtgatctacgaagatagcgtgcggcctcctggcatcagcgatagattttctggcagcagcagcggcaccaccgccacactgacaattagagatgcccagaacgaggacgaggccgactactactgtcagagcacctacggcgacgacaagctgtacatctttggcggaggcaccaagctgacagtgcttggactcgagatccagaaccctgatcctgccgtgtaccagctgcgggatagcaagagcagcgacaagagcgtgtgtctgttcaccgacttcgacagccagaccaacgtgtcccagagcaaggactccgacgtgtacatcaccgataagtgcgtgctggacatgcggagcatggacttcaagagcaactccgccgtggcctggtccaacaagtccgatttcgcctgcgccaacgccttcaacaacagcattatccccgaggacacattcttcccaagccccgagagcagctgcgacgtgaagctggtggaaaagagcttcgagacagacaccaacctgaacttccagaacctgagcgtgatcggcttcagaatcctgctgctgaaagtggccggctttaacctgctgatgaccctgcggctgtggtccagccgcgccaagagaagcggatctggcgtgaagcagaccctgaatttcgacctgctgaagctggctggcgacgtggaatccaacccaggccctactagtatggactggatttggcgcatccttttccttgtcggcgctgctaccggcgcgcattccttcgaagaagttcagctggttgaaacaggtggcggcctggtgcagcctggcaaatctctggaactgacctgcgccaccagcggcttcacctttaataccgcctggatgcactgggtccgacagagccccgataagcggctggaatggatcgccagaatcaaggacaccagcaacaactacgccaccgactacgtggaatccatgaagggcagattcaccatcagccgggacgacagcaagggctccgtgaacctccagatgaacagcctgaaagaagaggacaccgccacctactactgcaccaccgacttctacgacggcacctactattggaactactggggccagggcgtgatggtcacagtgtcatctacgcgtgaggacctgaagaacgtgttcccacctgaggtggccgtgttcgagcctagcgaggccgagatcagccacacccagaaagccaccctcgtgtgcctggctaccggcttctaccccgaccatgtggaactgtcttggtgggtcaacggcaaagaggtgcacagcggcgtgtgtaccgacccccagccactgaaagaacagcccgccctgaacgacagccggtactgcctgagcagcagactgagagtgtccgccaccttctggcagaacccccggaaccacttcagatgccaggtgcagttctacggcctgagcgagaacgacgagtggacccaggacagagccaagcccgtgacccagatcgtgtctgccgaagcctggggcagagccgattgcggctttaccagcgagagctaccagcagggcgtgctgagcgccaccatcctgtacgagatcctgctgggcaaggccaccctgtacgccgtgctggtgtctgccctggtgctgatggctatggtcaagcggaaggacagccggggaagggccaagcgatctggatctggagcaacaaacttctcactactcaaacaagcaggtgacgtggaggagaatcccgggccttctagaggcgggatccacaccatggctacctacgaggtgctgtgcgaggtggcaagaaagctgggcaccgacgacagagaagtggtgctgttcctgctgaacgtgttcatccctcagcctacactggcccagctgatcggtgcactgagagccctgaaagaggaaggccggctgacctttcctctgctggccgaatgcctgttcagagccggaagaagggatctgctgcgggacctgctgcatctggaccccagatttctggaaagacacctggccggcaccatgagctacttcagcccttaccagctgaccgtgctgcacgttgacggcgaactgtgcgccagagatattcggagcctgatcttcctgagcaaggacaccatcggcagccggtctacccctcagacatttctgcactgggtgtactgcatggaaaacctggacctgctcggccccacagatgtggatgccctgatgtccatgctgagaagcctgagcagagtggacctccagagacaggtgcagacactgatgggactgcacctgagcggacctagccacagccagcactacagacacacccct

SEQ ID NO: 9008 - DNA, 2709 bp, Artificial Sequence
  Synthetic Polynucloetide
atggccttaccagtgaccgccttgctcctgccgctggccttgctgctccacgccgccaggccgctcgaggggaaaccaattcccaaccctcttctgggactggattcaaccggcagcggcgaggacctgaagaacgtgttcccacctgaggtggccgtgttcgagcctagcaaggccgagatcgcccacacccagaaagccaccctcgtgtgcctggctaccggcttctaccccgaccatgtggaactgtcttggtgggtcaacggcaaagaggtgcacagcggcgtgtgtaccgacccccagccactgaaagaacagcccgccctgaacgacagccggtactgcctgagcagcagactgagagtgtccgccaccttctggcagaacccccggaaccacttcagatgccaggtgcagttctacggcctgagcgagaacgacgagtggacccaggacagagccaagcccgtgacccagatcgtgtctgccgaagcctggggcagagccgattgcggcatcaccagcgccagctaccaccagggcgtgctgagcgccaccatcctgtacgagatcctgctgggcaaggccaccctgtacgccgtgctggtgtctgccctggtgctgatggctatggtcaagcggaaggacagccggggaagggccaagcgatctggatctggagcaacaaacttctcactactcaaacaagcaggtgacgtggaggagaatcccgggcctactagcatggccttaccagtgaccgccttgctcctgccgctggccttgctgctccacgccgccaggccgagctacgagctgatccagcctccttctgccgctgtgacactgggcaataccgtgtctctgacctgtgtgggagatgagctgcccaagagatacgcctactggtatcagcagaagcccgaccagagcatcgtgcgcgtgatctacgaagatagcgtgcggcctcctggcatcagcgatagattttctggcagcagcagcggcaccaccgccacactgacaattagagatgcccagaacgaggacgaggccgactactactgtcagagcacctacggcgacgacaagctgtacatctttggcggaggcaccaagctgacagtgcttggaggcggaggcggaagtggaggcggaggatctggcggcggaggctctgaagttcagctggttgaaacaggtggcggcctggtgcagcctggcaaatctctggaactgacctgcgccaccagcggcttcacctttaataccgcctggatgcactgggtccgacagagccccgataagcggctggaatggatcgccagaatcaaggacaccagcaacaactacgccaccgactacgtggaatccatgaagggcagattcaccatcagccgggacgacagcaagggctccgtgaacctccagatgaacagcctgaaagaagaggacaccgccacctactactgcaccaccgacttctacgacggcacctactattggaactactggggccagggcgtgatggtcacagtgtcatctacgcgtgagcagaaactgatctcggaagaggatgggagcggcatccagaaccctgatcctgccgtgtaccagctgcgggatagcaagagcagcgacaagagcgtgtgtctgttcaccgacttcgacagccagaccaacgtgtcccagagcaaggactccgacgtgtacatcaccgataagtgcgtgctggacatgcggagcatggacttcaagagcaactccgccgtggcctggtccaacaagtccgatttcgcctgcgccaacgccttcaacaacagcattatccccgaggacacattcttcccaagcagcgacgtgccctgcgacgtgaagctggtggaaaagagcttcgagacagacaccaacctgaacttccagaacctgagcgtgatcggcttcagaatcctgctgctgaaagtggccggctttaacctgctgatgaccctgcggctgtggtccagccgcgccaagagaagcggatctggcgtgaagcagaccctgaatttcgacctgctgaagctggctggcgacgtggaatccaacccaggcccttctagaggccatatgaccgagtacaagcccacggtgcgcctcgccacccgcgacgacgtccccagggccgtacgcaccctcgccgccgcgttcgccgactaccccgccacgcgccacaccgtcgatccggaccgccacatcgagcgggtcaccgagctgcaagaactcttcctcacgcgcgtcgggctcgacatcggcaaggtgtgggtcgcggacgacggcgccgcggtggcggtctggaccacgccggagagcgtcgaagcgggggcggtgttcgccgagatcggcccgcgcatggccgagttgagcggttcccggctggccgcgcagcaacagatggaaggcctcctggcgccgcaccggcccaaggagcccgcgtggttcctggccaccgtcggcgtctcgcccgaccaccagggcaagggtctgggcagcgccgtcgtgctccccggagtggaggcggccgagcgcgccggggtgcccgccttcctggagacctccgcgccccgcaacctccccttctacgagcggctcggcttcaccgtcaccgccgacgtcgaggtgcccgaaggaccgcgcacctggtgcatgacccgcaagcccggtgcctga

SEQ ID NO: 9009 - DNA, 2712 bp, Artificial Sequence
  Synthetic Polynucloetide
atggccttaccagtgaccgccttgctcctgccgctggccttgctgctccacgccgccaggccgctcgagcagaaactgatctcggaagaggatctgggctccggcgatcgccctgatcctgccgtgtaccagctgcgggatagcaagagcagcgacaagagcgtgtgtctgttcaccgacttcgacagccagaccaacgtgtcccagagcaaggactccgacgtgtacatcaccgataagtgcgtgctggacatgcggagcatggacttcaagagcaactccgccgtggcctggtccaacaagtccgatttcgcctgcgccaacgccttcaacaacagcattatccccgaggacacattcttcccaagccccgagagcagctgcgacgtgaagctggtggaaaagagcttcgagacagacaccaacctgaacttccagaacctgagcgtgatcggcttcagaatcctgctgctgaaagtggccggctttaacctgctgatgaccctgcggctgtggtccagctctagtcgcgccaagagaagcggatctggcgtgaagcagaccctgaatttcgacctgctgaagctggctggcgacgtggaatccaacccaggccccactagcatggccttaccagtgaccgccttgctcctgccgctggccttgctgctccacgccgccaggccgagctacgagctgatccagcctccttctgccgctgtgacactgggcaataccgtgtctctgacctgtgtgggagatgagctgcccaagagatacgcctactggtatcagcagaagcccgaccagagcatcgtgcgcgtgatctacgaagatagcgtgcggcctcctggcatcagcgatagattttctggcagcagcagcggcaccaccgccacactgacaattagagatgcccagaacgaggacgaggccgactactactgtcagagcacctacggcgacgacaagctgtacatctttggcggaggcaccaagctgacagtgcttggaggcggaggcggaagtggaggcggaggatctggcggcggaggctctgaagttcagctggttgaaacaggtggcggcctggtgcagcctggcaaatctctggaactgacctgcgccaccagcggcttcacctttaataccgcctggatgcactgggtccgacagagccccgataagcggctggaatggatcgccagaatcaaggacaccagcaacaactacgccaccgactacgtggaatccatgaagggcagattcaccatcagccgggacgacagcaagggctccgtgaacctccagatgaacagcctgaaagaagaggacaccgccacctactactgcaccaccgacttctacgacggcacctactattggaactactggggccagggcgtgatggtcacagtgtcatctacgcgtgggaaaccaattcccaaccctcttctgggactggattcaaccggcagcggcgaggacctgaagaacgtgttcccacctgaggtggccgtgttcgagcctagcgaggccgagatcagccacacccagaaagccaccctcgtgtgcctggctaccggcttctaccccgaccatgtggaactgtcttggtgggtcaacggcaaagaggtgcacagcggcgtgtgtaccgacccccagccactgaaagaacagcccgccctgaacgacagccggtactgcctgagcagcagactgagagtgtccgccaccttctggcagaacccccggaaccacttcagatgccaggtgcagttctacggcctgagcgagaacgacgagtggacccaggacagagccaagcccgtgacccagatcgtgtctgccgaagcctggggcagagccgattgcggctttaccagcgagagctaccagcagggcgtgctgagcgccaccatcctgtacgagatcctgctgggcaaggccaccctgtacgccgtgctggtgtctgccctggtgctgatggctatggtcaagcggaaggacagccggggaagggccaagcgatctggatctggagcaacaaacttctcactactcaaacaagcaggtgacgtggaggagaatcccgggccttctagaggccatatgaccgagtacaagcccacggtgcgcctcgccacccgcgacgacgtccccagggccgtacgcaccctcgccgccgcgttcgccgactaccccgccacgcgccacaccgtcgatccggaccgccacatcgagcgggtcaccgagctgcaagaactcttcctcacgcgcgtcgggctcgacatcggcaaggtgtgggtcgcggacgacggcgccgcggtggcggtctggaccacgccggagagcgtcgaagcgggggcggtgttcgccgagatcggcccgcgcatggccgagttgagcggttcccggctggccgcgcagcaacagatggaaggcctcctggcgccgcaccggcccaaggagcccgcgtggttcctggccaccgtcggcgtctcgcccgaccaccagggcaagggtctgggcagcgccgtcgtgctccccggagtggaggcggccgagcgcgccggggtgcccgccttcctggagacctccgcgccccgcaacctccccttctacgagcggctcggcttcaccgtcaccgccgacgtcgaggtgcccgaaggaccgcgcacctggtgcatgacccgcaagcccggtgcctga

SEQ ID NO: 9010 - DNA, 2574 bp, Artificial Sequence
  Synthetic Polynucloetide
atggccttaccagtgaccgccttgctcctgccgctggccttgctgctccacgccgccaggccgagctacgagctgatccagcctccttctgccgctgtgacactgggcaataccgtgtctctgacctgtgtgggagatgagctgcccaagagatacgcctactggtatcagcagaagcccgaccagagcatcgtgcgcgtgatctacgaagatagcgtgcggcctcctggcatcagcgatagattttctggcagcagcagcggcaccaccgccacactgacaattagagatgcccagaacgaggacgaggccgactactactgtcagagcacctacggcgacgacaagctgtacatctttggcggaggcaccaagctgacagtgcttggactcgaggacctgaagaacgtgttcccacctgaggtggccgtgttcgagcctagcgaggccgagatcagccacacccagaaagccaccctcgtgtgcctggctaccggcttctaccccgaccatgtggaactgtcttggtgggtcaacggcaaagaggtgcacagcggcgtgtctaccgacccccagccactgaaagaacagcccgccctgaacgacagccggtactgcctgagcagcagactgagagtgtccgccaccttctggcagaacccccggaaccacttcagatgccaggtgcagttctacggcctgagcgagaacgacgagtggacccaggacagagccaagcccgtgacccagatcgtgtctgccgaagcctggggcagagccgattgcggctttaccagcgagagctaccagcagggcgtgctgagcgccaccatcctgtacgagatcctgctgggcaaggccaccctgtacgccgtgctggtgtctgccctggtgctgatggctatggtcaagcggaaggacagccggggaagggccaagcgatctggatctggagcaacaaacttctcactactcaaacaagcaggtgacgtggaggagaatcccgggcctactagtatggactggatttggcgcatccttttccttgtcggcgctgctaccggcgcgcattccttcgaagaagttcagctggttgaaacaggtggcggcctggtgcagcctggcaaatctctggaactgacctgcgccaccagcggcttcacctttaataccgcctggatgcactgggtccgacagagccccgataagcggctggaatggatcgccagaatcaaggacaccagcaacaactacgccaccgactacgtggaatccatgaagggcagattcaccatcagccgggacgacagcaagggctccgtgaacctccagatgaacagcctgaaagaagaggacaccgccacctactactgcaccaccgacttctacgacggcacctactattggaactactggggccagggcgtgatggtcacagtgtcatctacgcgtatccagaaccctgatcctgccgtgtaccagctgcgggatagcaagagcagcgacaagagcgtgtgtctgttcaccgacttcgacagccagaccaacgtgtcccagagcaaggactccgacgtgtacatcaccgataagaccgtgctggacatgcggagcatggacttcaagagcaactccgccgtggcctggtccaacaagtccgatttcgcctgcgccaacgccttcaacaacagcattatccccgaggacacattcttcccaagccccgagagcagctgcgacgtgaagctggtggaaaagagcttcgagacagacaccaacctgaacttccagaacctgagcgtgatcggcttcagaatcctgctgctgaaagtggccggctttaacctgctgatgaccctgcggctgtggtccagccgcgccaagagaagcggatctggcgtgaagcagaccctgaatttcgacctgctgaagctggctggcgacgtggaatccaacccaggcccttctagaggccatatgaccgagtacaagcccacggtgcgcctcgccacccgcgacgacgtccccagggccgtacgcaccctcgccgccgcgttcgccgactaccccgccacgcgccacaccgtcgatccggaccgccacatcgagcgggtcaccgagctgcaagaactcttcctcacgcgcgtcgggctcgacatcggcaaggtgtgggtcgcggacgacggcgccgcggtggcggtctggaccacgccggagagcgtcgaagcgggggcggtgttcgccgagatcggcccgcgcatggccgagttgagcggttcccggctggccgcgcagcaacagatggaaggcctcctggcgccgcaccggcccaaggagcccgcgtggttcctggccaccgtcggcgtctcgcccgaccaccagggcaagggtctgggcagcgccgtcgtgctccccggagtggaggcggccgagcgcgccggggtgcccgccttcctggagacctccgcgccccgcaacctccccttctacgagcggctcggcttcaccgtcaccgccgacgtcgaggtgcccgaaggaccgcgcacctggtgcatgacccgcaagcccggtgcctga

SEQ ID NO: 9011 - DNA, 2820 bp, Artificial Sequence
  Synthetic Polynucloetide
atggccttaccagtgaccgccttgctcctgccgctggccttgctgctccacgccgccaggccgagctacgagctgatccagcctccttctgccgctgtgacactgggcaataccgtgtctctgacctgtgtgggagatgagctgcccaagagatacgcctactggtatcagcagaagcccgaccagagcatcgtgcgcgtgatctacgaagatagcgtgcggcctcctggcatcagcgatagattttctggcagcagcagcggcaccaccgccacactgacaattagagatgcccagaacgaggacgaggccgactactactgtcagagcacctacggcgacgacaagctgtacatctttggcggaggcaccaagctgacagtgcttggactcgaggacctgaagaacgtgttcccacctgaggtggccgtgttcgagcctagcgaggccgagatcagccacacccagaaagccaccctcgtgtgcctggctaccggcttctaccccgaccatgtggaactgtcttggtgggtcaacggcaaagaggtgcacagcggcgtgtctaccgacccccagccactgaaagaacagcccgccctgaacgacagccggtactgcctgagcagcagactgagagtgtccgccaccttctggcagaacccccggaaccacttcagatgccaggtgcagttctacggcctgagcgagaacgacgagtggacccaggacagagccaagcccgtgacccagatcgtgtctgccgaagcctggggcagagccgattgcggctttaccagcgagagctaccagcagggcgtgctgagcgccaccatcctgtacgagatcctgctgggcaaggccaccctgtacgccgtgctggtgtctgccctggtgctgatggctatggtcaagcggaaggacagccggggaagggccaagcgatctggatctggagcaacaaacttctcactactcaaacaagcaggtgacgtggaggagaatcccgggcctactagtatggactggatttggcgcatccttttccttgtcggcgctgctaccggcgcgcattccttcgaagaagttcagctggttgaaacaggtggcggcctggtgcagcctggcaaatctctggaactgacctgcgccaccagcggcttcacctttaataccgcctggatgcactgggtccgacagagccccgataagcggctggaatggatcgccagaatcaaggacaccagcaacaactacgccaccgactacgtggaatccatgaagggcagattcaccatcagccgggacgacagcaagggctccgtgaacctccagatgaacagcctgaaagaagaggacaccgccacctactactgcaccaccgacttctacgacggcacctactattggaactactggggccagggcgtgatggtcacagtgtcatctacgcgtgagcagaaactgatctcggaagaggatgggagcggcaccccattcccttctctggcccctcccatcatgctgctggtggacggcaagcagcagatggtggtcgtgtgcctggtgctggatgtggccccacctggactggacagccccatctggtttagcgccggcaatggctctgccctggacgcctttacctacggcccaagccctgccaccgatggcacctggacaaatctggcccacctgagcctgcccagcgaggaactggcttcttgggagcctctcgtgtgccacacaggacctggcgctgagggacacagcagatccacccagcctatgcacctgtctggcgaggccagcaccgccagaacctgtcctcaggaacctctgagaggcacccctggcggagcactgtggctgggagtgctgagactgctgctgttcaagctgctgctgtttgacctgctgctgacctgctcctgtctgtgcgatcctgccggccctctgccttctcctgccaccaccacaagactgagagccctgggcagccacagactgcaccctgccacagagacaggcggcagagaggccacaagcagccctagaccccagcccagagacagaagatggggcgataccccccctggcagaaagcctggatctccagtccgcgccaagagaagcggatctggcgtgaagcagaccctgaatttcgacctgctgaagctggctggcgacgtggaatccaacccaggcccttctagaggccatatgaccgagtacaagcccacggtgcgcctcgccacccgcgacgacgtccccagggccgtacgcaccctcgccgccgcgttcgccgactaccccgccacgcgccacaccgtcgatccggaccgccacatcgagcgggtcaccgagctgcaagaactcttcctcacgcgcgtcgggctcgacatcggcaaggtgtgggtcgcggacgacggcgccgcggtggcggtctggaccacgccggagagcgtcgaagcgggggcggtgttcgccgagatcggcccgcgcatggccgagttgagcggttcccggctggccgcgcagcaacagatggaaggcctcctggcgccgcaccggcccaaggagcccgcgtggttcctggccaccgtcggcgtctcgcccgaccaccagggcaagggtctgggcagcgccgtcgtgctccccggagtggaggcggccgagcgcgccggggtgcccgccttcctggagacctccgcgccccgcaacctccccttctacgagcggctcggcttcaccgtcaccgccgacgtcgaggtgcccgaaggaccgcgcacctggtgcatgacccgcaagcccggtgcctga

SEQ ID NO: 9012 - DNA, 2874 bp, Artificial Sequence
  Synthetic Polynucloetide
atggccttaccagtgaccgccttgctcctgccgctggccttgctgctccacgccgccaggccgctcgaggacctgaagaacgtgttcccacctgaggtggccgtgttcgagcctagcgaggccgagatcagccacacccagaaagccaccctcgtgtgcctggctaccggcttctaccccgaccatgtggaactgtcttggtgggtcaacggcaaagaggtgcacagcggcgtgtctaccgacccccagccactgaaagaacagcccgccctgaacgacagccggtactgcctgagcagcagactgagagtgtccgccaccttctggcagaacccccggaaccacttcagatgccaggtgcagttctacggcctgagcgagaacgacgagtggacccaggacagagccaagcccgtgacccagatcgtgtctgccgaagcctggggcagagccgattgcggctttaccagcgagagctaccagcagggcgtgctgagcgccaccatcctgtacgagatcctgctgggcaaggccaccctgtacgccgtgctggtgtctgccctggtgctgatggctatggtcaagcggaaggacagccggggaagggccaagcgatctggatctggagcaacaaacttctcactactcaaacaagcaggtgacgtggaggagaatcccgggcctactagcatggccttaccagtgaccgccttgctcctgccgctggccttgctgctccacgccgccaggccgagctacgagctgatccagcctccttctgccgctgtgacactgggcaataccgtgtctctgacctgtgtgggagatgagctgcccaagagatacgcctactggtatcagcagaagcccgaccagagcatcgtgcgcgtgatctacgaagatagcgtgcggcctcctggcatcagcgatagattttctggcagcagcagcggcaccaccgccacactgacaattagagatgcccagaacgaggacgaggccgactactactgtcagagcacctacggcgacgacaagctgtacatctttggcggaggcaccaagctgacagtgcttggaggcggaggcggaagtggaggcggaggatctggcggcggaggctctgaagttcagctggttgaaacaggtggcggcctggtgcagcctggcaaatctctggaactgacctgcgccaccagcggcttcacctttaataccgcctggatgcactgggtccgacagagccccgataagcggctggaatggatcgccagaatcaaggacaccagcaacaactacgccaccgactacgtggaatccatgaagggcagattcaccatcagccgggacgacagcaagggctccgtgaacctccagatgaacagcctgaaagaagaggacaccgccacctactactgcaccaccgacttctacgacggcacctactattggaactactggggccagggcgtgatggtcacagtgtcatctacgcgtgagcagaaactgatctcggaagaggatctggggagcggcaccccattcccttctctggcccctcccatcatgctgctggtggacggcaagcagcagatggtggtcgtgtgcctggtgctggatgtggccccacctggactggacagccccatctggtttagcgccggcaatggctctgccctggacgcctttacctacggcccaagccctgccaccgatggcacctggacaaatctggcccacctgagcctgcccagcgaggaactggcttcttgggagcctctcgtgtgccacacaggacctggcgctgagggacacagcagatccacccagcctatgcacctgtctggcgaggccagcaccgccagaacctgtcctcaggaacctctgagaggcacccctggcggagcactgtggctgggagtgctgagactgctgctgttcaagctgctgctgtttgacctgctgctgacctgctcctgtctgtgcgatcctgccggccctctgccttctcctgccaccaccacaagactgagagccctgggcagccacagactgcaccctgccacagagacaggcggcagagaggccacaagcagccctagaccccagcccagagacagaagatggggcgataccccccctggcagaaagcctggatctccagtccgcgccaagagaagcggatctggcgtgaagcagaccctgaatttcgacctgctgaagctggctggcgacgtggaatccaacccaggcccttctagatctagaggccatatgaccgagtacaagcccacggtgcgcctcgccacccgcgacgacgtccccagggccgtacgcaccctcgccgccgcgttcgccgactaccccgccacgcgccacaccgtcgatccggaccgccacatcgagcgggtcaccgagctgcaagaactcttcctcacgcgcgtcgggctcgacatcggcaaggtgtgggtcgcggacgacggcgccgcggtggcggtctggaccacgccggagagcgtcgaagcgggggcggtgttcgccgagatcggcccgcgcatggccgagttgagcggttcccggctggccgcgcagcaacagatggaaggcctcctggcgccgcaccggcccaaggagcccgcgtggttcctggccaccgtcggcgtctcgcccgaccaccagggcaagggtctgggcagcgccgtcgtgctccccggagtggaggcggccgagcgcgccggggtgcccgccttcctggagacctccgcgccccgcaacctccccttctacgagcggctcggcttcaccgtcaccgccgacgtcgaggtgcccgaaggaccgcgcacctggtgcatgacccgcaagcccggtgcctga

SEQ ID NO: 9013 - DNA, 2685 bp, Artificial Sequence
  Synthetic Polynucloetide
atggccttaccagtgaccgccttgctcctgccgctggccttgctgctccacgccgccaggccgagctacgagctgatccagcctccttctgccgctgtgacactgggcaataccgtgtctctgacctgtgtgggagatgagctgcccaagagatacgcctactggtatcagcagaagcccgaccagagcatcgtgcgcgtgatctacgaagatagcgtgcggcctcctggcatcagcgatagattttctggcagcagcagcggcaccaccgccacactgacaattagagatgcccagaacgaggacgaggccgactactactgtcagagcacctacggcgacgacaagctgtacatctttggcggaggcaccaagctgacagtgcttggactcgaggggaaaccaattcccaaccctcttctgggactggattcaaccggcagcggcgacaagcagctggacgccgacgtgtcccccaagcctaccatcttcctgccctctatcgccgagacaaagctccagaaggccggcacctacctgtgcctgctggaaaagttcttcccagatgtgattaagatccactggcaggaaaagaagtccaacaccatcctgggcagccaggaaggcaacaccatgaagaccaacgacacctacatgaagttcagctggctgaccgtgcccgagaagtccctggacaaagaacacagatgcatcgtgcggcacgaaaacaacaagaacggcgtggaccaggaaatcatcttcccacccatcaagaccgatgtgattacaatggaccccaaggacaactgctccaaggacgccaacgataccctgctgctccagctgaccaacaccagcgcctactacatgtacttgttgctgctgctgaagtccgtggtgtacttcgccatcatcacatgctgcctgctgcggagaaccgccttctgctgcaacggcgagaagtctagggccaagcgatctggatctggagcaacaaacttctcactactcaaacaagcaggtgacgtggaggagaatcccgggcctactagtatggactggatttggcgcatccttttccttgtcggcgctgctaccggcgcgcattccttcgaagaagttcagctggttgaaacaggtggcggcctggtgcagcctggcaaatctctggaactgacctgcgccaccagcggcttcacctttaataccgcctggatgcactgggtccgacagagccccgataagcggctggaatggatcgccagaatcaaggacaccagcaacaactacgccaccgactacgtggaatccatgaagggcagattcaccatcagccgggacgacagcaagggctccgtgaacctccagatgaacagcctgaaagaagaggacaccgccacctactactgcaccaccgacttctacgacggcacctactattggaactactggggccagggcgtgatggtcacagtgtcatctacgcgtgagcagaaactgatctcggaagaggatgggagcggcagccagcctcacaccaagcccagcgtgttcgtgatgaagaacggcaccaacgtggcctgcctcgtgaaagagttctaccccaaggacatcaggatcaacctggtgtccagcaagaagatcaccgagttcgaccccgccatcgtgatctcccccagcggcaagtacaacgccgtgaagctggggaagtacgaggacagcaacagcgtgacctgctccgtgcagcacgacaacaagaccgtgcacagcaccgactttgaagtgaaaaccgactccaccgaccacgtgaagcccaaagagacagagaacaccaagcagcccagcaagagctgccacaagcccaaggccatcgtgcacaccgagaaagtgaacatgatgagcctgaccgtgctgggcctgcggatgctgttcgccaaaaccgtggccgtgaacttcctgctgaccgccaagctgttcttcctccgcgccaagagaagcggatctggcgtgaagcagaccctgaatttcgacctgctgaagctggctggcgacgtggaatccaacccaggcccttctagaggccatatgaccgagtacaagcccacggtgcgcctcgccacccgcgacgacgtccccagggccgtacgcaccctcgccgccgcgttcgccgactaccccgccacgcgccacaccgtcgatccggaccgccacatcgagcgggtcaccgagctgcaagaactcttcctcacgcgcgtcgggctcgacatcggcaaggtgtgggtcgcggacgacggcgccgcggtggcggtctggaccacgccggagagcgtcgaagcgggggcggtgttcgccgagatcggcccgcgcatggccgagttgagcggttcccggctggccgcgcagcaacagatggaaggcctcctggcgccgcaccggcccaaggagcccgcgtggttcctggccaccgtcggcgtctcgcccgaccaccagggcaagggtctgggcagcgccgtcgtgctccccggagtggaggcggccgagcgcgccggggtgcccgccttcctggagacctccgcgccccgcaacctccccttctacgagcggctcggcttcaccgtcaccgccgacgtcgaggtgcccgaaggaccgcgcacctggtgcatgacccgcaagcccggtgcctga

SEQ ID NO: 9014 - DNA, 1896 bp, Artificial Sequence
  Synthetic Polynucloetide
atggccttaccagtgaccgccttgctcctgccgctggccttgctgctccacgccgccaggccgagctacgagctgatccagcctccttctgccgctgtgacactgggcaataccgtgtctctgacctgtgtgggagatgagctgcccaagagatacgcctactggtatcagcagaagcccgaccagagcatcgtgcgcgtgatctacgaagatagcgtgcggcctcctggcatcagcgatagattttctggcagcagcagcggcaccaccgccacactgacaattagagatgcccagaacgaggacgaggccgactactactgtcagagcacctacggcgacgacaagctgtacatctttggcggaggcaccaagctgacagtgcttggactcgagagccagcctcacaccaagcccagcgtgttcgtgatgaagaacggcaccaacgtggcctgcctcgtgaaagagttctaccccaaggacatcaggatcaacctggtgtccagcaagaagatcaccgagttcgaccccgccatcgtgatctcccccagcggcaagtacaacgccgtgaagctggggaagtacgaggacagcaacagcgtgacctgctccgtgcagcacgacaacaagaccgtgcacagcaccgactttgaagtgaaaaccgactccaccgaccacgtgaagcccaaagagacagagaacaccaagcagcccagcaagagctgccacaagcccaaggccatcgtgcacaccgagaaagtgaacatgatgagcctgaccgtgctgggcctgcggatgctgttcgccaaaaccgtggccgtgaacttcctgctgaccgccaagctgttcttcctcagggccaagcgatctggatctggagcaacaaacttctcactactcaaacaagcaggtgacgtggaggagaatcccgggcctactagtatggactggatttggcgcatccttttccttgtcggcgctgctaccggcgcgcattccttcgaagaagttcagctggttgaaacaggtggcggcctggtgcagcctggcaaatctctggaactgacctgcgccaccagcggcttcacctttaataccgcctggatgcactgggtccgacagagccccgataagcggctggaatggatcgccagaatcaaggacaccagcaacaactacgccaccgactacgtggaatccatgaagggcagattcaccatcagccgggacgacagcaagggctccgtgaacctccagatgaacagcctgaaagaagaggacaccgccacctactactgcaccaccgacttctacgacggcacctactattggaactactggggccagggcgtgatggtcacagtgtcatctacgcgtgacaagcagctggacgccgacgtgtcccccaagcctaccatcttcctgccctctatcgccgagacaaagctccagaaggccggcacctacctgtgcctgctggaaaagttcttcccagatgtgattaagatccactggcaggaaaagaagtccaacaccatcctgggcagccaggaaggcaacaccatgaagaccaacgacacctacatgaagttcagctggctgaccgtgcccgagaagtccctggacaaagaacacagatgcatcgtgcggcacgaaaacaacaagaacggcgtggaccaggaaatcatcttcccacccatcaagaccgatgtgattacaatggaccccaaggacaactgctccaaggacgccaacgataccctgctgctccagctgaccaacaccagcgcctactacatgtacttgttgctgctgctgaagtccgtggtgtacttcgccatcatcacatgctgcctgctgcggagaaccgccttctgctgcaacggcgagaagtct

SEQ ID NO: 9015 - DNA, 2730 bp, Artificial Sequence
  Synthetic Polynucloetide
atggccttaccagtgaccgccttgctcctgccgctggccttgctgctccacgccgccaggccgctcgaggggaaaccaattcccaaccctcttctgggactggattcaaccggcagcggcgacaagcagctggacgccgacgtgtcccccaagcctaccatcttcctgccctctatcgccgagacaaagctccagaaggccggcacctacctgtgcctgctggaaaagttcttcccagatgtgattaagatccactggcaggaaaagaagtccaacaccatcctgggcagccaggaaggcaacaccatgaagaccaacgacacctacatgaagttcagctggctgaccgtgcccgagaagtccctggacaaagaacacagatgcatcgtgcggcacgaaaacaacaagaacggcgtggaccaggaaatcatcttcccacccatcaagaccgatgtgattacaatggaccccaaggacaactgctccaaggacgccaacgataccctgctgctccagctgaccaacaccagcgcctactacatgtacttgttgctgctgctgaagtccgtggtgtacttcgccatcatcacatgctgcctgctgcggagaaccgccttctgctgcaacggcgagaagtctagggccaagcgatctggatctggagcaacaaacttctcactactcaaacaagcaggtgacgtggaggagaatcccgggcctactagcatggccttaccagtgaccgccttgctcctgccgctggccttgctgctccacgccgccaggccgagctacgagctgatccagcctccttctgccgctgtgacactgggcaataccgtgtctctgacctgtgtgggagatgagctgcccaagagatacgcctactggtatcagcagaagcccgaccagagcatcgtgcgcgtgatctacgaagatagcgtgcggcctcctggcatcagcgatagattttctggcagcagcagcggcaccaccgccacactgacaattagagatgcccagaacgaggacgaggccgactactactgtcagagcacctacggcgacgacaagctgtacatctttggcggaggcaccaagctgacagtgcttggaggcggaggcggaagtggaggcggaggatctggcggcggaggctctgaagttcagctggttgaaacaggtggcggcctggtgcagcctggcaaatctctggaactgacctgcgccaccagcggcttcacctttaataccgcctggatgcactgggtccgacagagccccgataagcggctggaatggatcgccagaatcaaggacaccagcaacaactacgccaccgactacgtggaatccatgaagggcagattcaccatcagccgggacgacagcaagggctccgtgaacctccagatgaacagcctgaaagaagaggacaccgccacctactactgcaccaccgacttctacgacggcacctactattggaactactggggccagggcgtgatggtcacagtgtcatctacgcgtgagcagaaactgatctcggaagaggatgggagcggcagccagcctcacaccaagcccagcgtgttcgtgatgaagaacggcaccaacgtggcctgcctcgtgaaagagttctaccccaaggacatcaggatcaacctggtgtccagcaagaagatcaccgagttcgaccccgccatcgtgatctcccccagcggcaagtacaacgccgtgaagctggggaagtacgaggacagcaacagcgtgacctgctccgtgcagcacgacaacaagaccgtgcacagcaccgactttgaagtgaaaaccgactccaccgaccacgtgaagcccaaagagacagagaacaccaagcagcccagcaagagctgccacaagcccaaggccatcgtgcacaccgagaaagtgaacatgatgagcctgaccgtgctgggcctgcggatgctgttcgccaaaaccgtggccgtgaacttcctgctgaccgccaagctgttcttcctccgcgccaagagaagcggatctggcgtgaagcagaccctgaatttcgacctgctgaagctggctggcgacgtggaatccaacccaggcccttctagaggccatatgaccgagtacaagcccacggtgcgcctcgccacccgcgacgacgtccccagggccgtacgcaccctcgccgccgcgttcgccgactaccccgccacgcgccacaccgtcgatccggaccgccacatcgagcgggtcaccgagctgcaagaactcttcctcacgcgcgtcgggctcgacatcggcaaggtgtgggtcgcggacgacggcgccgcggtggcggtctggaccacgccggagagcgtcgaagcgggggcggtgttcgccgagatcggcccgcgcatggccgagttgagcggttcccggctggccgcgcagcaacagatggaaggcctcctggcgccgcaccggcccaaggagcccgcgtggttcctggccaccgtcggcgtctcgcccgaccaccagggcaagggtctgggcagcgccgtcgtgctccccggagtggaggcggccgagcgcgccggggtgcccgccttcctggagacctccgcgccccgcaacctccccttctacgagcggctcggcttcaccgtcaccgccgacgtcgaggtgcccgaaggaccgcgcacctggtgcatgacccgcaagcccggtgcctga

SEQ ID NO: 9016 - DNA, 3105 bp, Artificial Sequence
  Synthetic Polynucloetide
atggccttaccagtgaccgccttgctcctgccgctggccttgctgctccacgccgccaggccgagctacgagctgatccagcctccttctgccgctgtgacactgggcaataccgtgtctctgacctgtgtgggagatgagctgcccaagagatacgcctactggtatcagcagaagcccgaccagagcatcgtgcgcgtgatctacgaagatagcgtgcggcctcctggcatcagcgatagattttctggcagcagcagcggcaccaccgccacactgacaattagagatgcccagaacgaggacgaggccgactactactgtcagagcacctacggcgacgacaagctgtacatctttggcggaggcaccaagctgacagtgcttggaggacagcctaaggccaatcctaccgtgacactgttccctccaagcagcgaagaactccaggccaacaaggccacacttgtgtgcctgatctccgacttctaccctggggctgtgacagtggcttggaaggccgatggatctcctgtgaaagccggcgtggaaaccaccaagccatccaagcagagcaacaacaaatacgccgccagctcctacctgagcctgacacctgagcagtggaagtcccacagatcctacagctgccaagtgacccacgaaggcagcaccgtggaaaagacagtggcccctacagagtgcagcggatcccagagcttcggcctgctggaccccaagctgtgctacctgctggatggcatcctgttcatctacggcgtgatcctgaccgccctgttcctgagagtgaagttcagcagaagcgccgacgcccctgcctaccagcagggacagaaccaactgtacaacgagctgaacctgggcagacgggaagagtacgacgtgctggacaagcggagaggcagggaccctgagatgggcggaaagccccagcggagaaagaacccccaggaaggactgtataacgaactccagaaagacaagatggccgaagcctacagcgagatcggcatgaagggcgagcggagaagaggcaagggccacgatggcctgtaccagggcctgagcaccgccaccaaggacacctatgacgccctgcacatgcaggccctgcctccaagaagggccaagcgatctggatctggagcaacaaacttctcactactcaaacaagcaggtgacgtggaggagaatcccgggcctactagtatggactggatttggcgcatccttttccttgtcggcgctgctaccggcgcgcattccttcgaagaagttcagctggttgaaacaggtggcggcctggtgcagcctggcaaatctctggaactgacctgcgccaccagcggcttcacctttaataccgcctggatgcactgggtccgacagagccccgataagcggctggaatggatcgccagaatcaaggacaccagcaacaactacgccaccgactacgtggaatccatgaagggcagattcaccatcagccgggacgacagcaagggctccgtgaacctccagatgaacagcctgaaagaagaggacaccgccacctactactgcaccaccgacttctacgacggcacctactattggaactactggggccagggcgtgatggtcacagtgtcatctgcctctacaaagggaccctccgtgtttcctctggctcccagcagcaagtctacaagcggaggaacagccgctctgggctgcctggtcaaggattactttcccgagcctgtgaccgtgtcctggaatagcggagcactgacaagcggcgtgcacacctttccagccgtgctgcaaagcagcggcctgtactctctgagcagcgtggtcacagtgcctagctctagcctgggcacccagacctacatctgcaatgtgaaccacaagcctagcaacaccaaggtggacaagagagtggaacccaagagctgtggtacccagagttttgggttgttggaccctaaattgtgctatctgttggacggaatcctgttcatttacggagtgatcctgaccgcattgttcctgcgggttaagttttccagatccgcagacgcacccgcttaccaacaagggcagaaccaactctacaatgaacttaatttggggcggagggaagagtacgacgttctggacaaaaggaggggacgagatcccgagatgggcggaaagcctcagcgaaggaagaatccgcaagaggggctttataacgaactccagaaagataaaatggcagaagcctatagtgagattgggatgaagggagaaaggaggaggggtaaaggtcacgatgggttgtaccaaggattgagcacagccactaaagatacctatgatgcgctccacatgcaggccctgccgccaagacgcgccaagagaagcggatctggcgtgaagcagaccctgaatttcgacctgctgaagctggctggcgacgtggaatccaacccaggcccttctagaggccatatgaccgagtacaagcccacggtgcgcctcgccacccgcgacgacgtccccagggccgtacgcaccctcgccgccgcgttcgccgactaccccgccacgcgccacaccgtcgatccggaccgccacatcgagcgggtcaccgagctgcaagaactcttcctcacgcgcgtcgggctcgacatcggcaaggtgtgggtcgcggacgacggcgccgcggtggcggtctggaccacgccggagagcgtcgaagcgggggcggtgttcgccgagatcggcccgcgcatggccgagttgagcggttcccggctggccgcgcagcaacagatggaaggcctcctggcgccgcaccggcccaaggagcccgcgtggttcctggccaccgtcggcgtctcgcccgaccaccagggcaagggtctgggcagcgccgtcgtgctccccggagtggaggcggccgagcgcgccggggtgcccgccttcctggagacctccgcgccccgcaacctccccttctacgagcggctcggcttcaccgtcaccgccgacgtcgaggtgcccgaaggaccgcgcacctggtgcatgacccgcaagcccggtgcctga

SEQ ID NO: 9017 - DNA, 2460 bp, Artificial Sequence
  Synthetic Polynucloetide
atggccttaccagtgaccgccttgctcctgccgctggccttgctgctccacgccgccaggccgagctacgagctgatccagcctccttctgccgctgtgacactgggcaataccgtgtctctgacctgtgtgggagatgagctgcccaagagatacgcctactggtatcagcagaagcccgaccagagcatcgtgcgcgtgatctacgaagatagcgtgcggcctcctggcatcagcgatagattttctggcagcagcagcggcaccaccgccacactgacaattagagatgcccagaacgaggacgaggccgactactactgtcagagcacctacggcgacgacaagctgtacatctttggcggaggcaccaagctgacagtgcttggactcgaggacctgaagaacgtgttcccacctgaggtggccgtgttcgagcctagcgaggccgagatcagccacacccagaaagccaccctcgtgtgcctggctaccggcttctaccccgaccatgtggaactgtcttggtgggtcaacggcaaagaggtgcacagcggcgtgtctaccgacccccagccactgaaagaacagcccgccctgaacgacagccggtactgcctgagcagcagactgagagtgtccgccaccttctggcagaacccccggaaccacttcagatgccaggtgcagttctacggcctgagcgagaacgacgagtggacccaggacagagccaagcccgtgacccagatcgtgtctgccgaagcctggggcagagccgattgcggatcccagagcttcggcctgctggaccccaagctgtgctacctgctggatggcatcctgttcatctacggcgtgatcctgaccgccctgttcctgagagtgaagttcagcagaagcgccgacgcccctgcctaccagcagggacagaaccaactgtacaacgagctgaacctgggcagacgggaagagtacgacgtgctggacaagcggagaggcagggaccctgagatgggcggaaagccccagcggagaaagaacccccaggaaggactgtataacgaactccagaaagacaagatggccgaagcctacagcgagatcggcatgaagggcgagcggagaagaggcaagggccacgatggcctgtaccagggcctgagcaccgccaccaaggacacctatgacgccctgcacatgcaggccctgcctccaagaagggccaagcgatctggatctggagcaacaaacttctcactactcaaacaagcaggtgacgtggaggagaatcccgggcctactagtatggactggatttggcgcatccttttccttgtcggcgctgctaccggcgcgcattccttcgaagaagttcagctggttgaaacaggtggcggcctggtgcagcctggcaaatctctggaactgacctgcgccaccagcggcttcacctttaataccgcctggatgcactgggtccgacagagccccgataagcggctggaatggatcgccagaatcaaggacaccagcaacaactacgccaccgactacgtggaatccatgaagggcagattcaccatcagccgggacgacagcaagggctccgtgaacctccagatgaacagcctgaaagaagaggacaccgccacctactactgcaccaccgacttctacgacggcacctactattggaactactggggccagggcgtgatggtcacagtgtcatctacgcgtatccagaaccctgatcctgccgtgtaccagctgcgggatagcaagagcagcgacaagagcgtgtgtctgttcaccgacttcgacagccagaccaacgtgtcccagagcaaggactccgacgtgtacatcaccgataagaccgtgctggacatgcggagcatggacttcaagagcaactccgccgtggcctggtccaacaagtccgatttcgcctgcgccaacgccttcaacaacagcattatccccgaggacacattcttcccaagccccgagagcagctgcggtacccagagttttgggttgttggaccctaaattgtgctatctgttggacggaatcctgttcatttacggagtgatcctgaccgcattgttcctgcgggttaagttttccagatccgcagacgcacccgcttaccaacaagggcagaaccaactctacaatgaacttaatttggggcggagggaagagtacgacgttctggacaaaaggaggggacgagatcccgagatgggcggaaagcctcagcgaaggaagaatccgcaagaggggctttataacgaactccagaaagataaaatggcagaagcctatagtgagattgggatgaagggagaaaggaggaggggtaaaggtcacgatgggttgtaccaaggattgagcacagccactaaagatacctatgatgcgctccacatgcaggccctgccgccaaga

SEQ ID NO: 9018 - DNA, 2460 bp, Artificial Sequence
  Synthetic Polynucloetide
atggccttaccagtgaccgccttgctcctgccgctggccttgctgctccacgccgccaggccgagctacgagctgatccagcctccttctgccgctgtgacactgggcaataccgtgtctctgacctgtgtgggagatgagctgcccaagagatacgcctactggtatcagcagaagcccgaccagagcatcgtgcgcgtgatctacgaagatagcgtgcggcctcctggcatcagcgatagattttctggcagcagcagcggcaccaccgccacactgacaattagagatgcccagaacgaggacgaggccgactactactgtcagagcacctacggcgacgacaagctgtacatctttggcggaggcaccaagctgacagtgcttggactcgaggacctgaagaacgtgttcccacctgaggtggccgtgttcgagcctagcaaggccgagatcgcccacacccagaaagccaccctcgtgtgcctggctaccggcttctaccccgaccatgtggaactgtcttggtgggtcaacggcaaagaggtgcacagcggcgtgtgtaccgacccccagccactgaaagaacagcccgccctgaacgacagccggtactgcctgagcagcagactgagagtgtccgccaccttctggcagaacccccggaaccacttcagatgccaggtgcagttctacggcctgagcgagaacgacgagtggacccaggacagagccaagcccgtgacccagatcgtgtctgccgaagcctggggcagagccgattgcggatcccagagcttcggcctgctggaccccaagctgtgctacctgctggatggcatcctgttcatctacggcgtgatcctgaccgccctgttcctgagagtgaagttcagcagaagcgccgacgcccctgcctaccagcagggacagaaccaactgtacaacgagctgaacctgggcagacgggaagagtacgacgtgctggacaagcggagaggcagggaccctgagatgggcggaaagccccagcggagaaagaacccccaggaaggactgtataacgaactccagaaagacaagatggccgaagcctacagcgagatcggcatgaagggcgagcggagaagaggcaagggccacgatggcctgtaccagggcctgagcaccgccaccaaggacacctatgacgccctgcacatgcaggccctgcctccaagaagggccaagcgatctggatctggagcaacaaacttctcactactcaaacaagcaggtgacgtggaggagaatcccgggcctactagtatggactggatttggcgcatccttttccttgtcggcgctgctaccggcgcgcattccttcgaagaagttcagctggttgaaacaggtggcggcctggtgcagcctggcaaatctctggaactgacctgcgccaccagcggcttcacctttaataccgcctggatgcactgggtccgacagagccccgataagcggctggaatggatcgccagaatcaaggacaccagcaacaactacgccaccgactacgtggaatccatgaagggcagattcaccatcagccgggacgacagcaagggctccgtgaacctccagatgaacagcctgaaagaagaggacaccgccacctactactgcaccaccgacttctacgacggcacctactattggaactactggggccagggcgtgatggtcacagtgtcatctacgcgtatccagaaccctgatcctgccgtgtaccagctgcgggatagcaagagcagcgacaagagcgtgtgtctgttcaccgacttcgacagccagaccaacgtgtcccagagcaaggactccgacgtgtacatcaccgataagtgcgtgctggacatgcggagcatggacttcaagagcaactccgccgtggcctggtccaacaagtccgatttcgcctgcgccaacgccttcaacaacagcattatccccgaggacacattcttcccaagcagcgacgtgccctgcggtacccagagttttgggttgttggaccctaaattgtgctatctgttggacggaatcctgttcatttacggagtgatcctgaccgcattgttcctgcgggttaagttttccagatccgcagacgcacccgcttaccaacaagggcagaaccaactctacaatgaacttaatttggggcggagggaagagtacgacgttctggacaaaaggaggggacgagatcccgagatgggcggaaagcctcagcgaaggaagaatccgcaagaggggctttataacgaactccagaaagataaaatggcagaagcctatagtgagattgggatgaagggagaaaggaggaggggtaaaggtcacgatgggttgtaccaaggattgagcacagccactaaagatacctatgatgcgctccacatgcaggccctgccgccaaga

SEQ ID NO: 9019 - DNA, 2673 bp, Artificial Sequence
  Synthetic Polynucloetide
atggccttaccagtgaccgccttgctcctgccgctggccttgctgctccacgccgccaggccgagctacgagctgatccagcctccttctgccgctgtgacactgggcaataccgtgtctctgacctgtgtgggagatgagctgcccaagagatacgcctactggtatcagcagaagcccgaccagagcatcgtgcgcgtgatctacgaagatagcgtgcggcctcctggcatcagcgatagattttctggcagcagcagcggcaccaccgccacactgacaattagagatgcccagaacgaggacgaggccgactactactgtcagagcacctacggcgacgacaagctgtacatctttggcggaggcaccaagctgacagtgcttggactcgaggggaaaccaattcccaaccctcttctgggactggattcaaccggcagcggcgaggacctgaagaacgtgttcccacctgaggtggccgtgttcgagcctagcgaggccgagatcagccacacccagaaagccaccctcgtgtgcctggctaccggcttctaccccgaccatgtggaactgtcttggtgggtcaacggcaaagaggtgcacagcggcgtgtctaccgacccccagccactgaaagaacagcccgccctgaacgacagccggtactgcctgagcagcagactgagagtgtccgccaccttctggcagaacccccggaaccacttcagatgccaggtgcagttctacggcctgagcgagaacgacgagtggacccaggacagagccaagcccgtgacccagatcgtgtctgccgaagcctggggcagagccgattgcggatcccagagcttcggcctgctggaccccaagctgtgctacctgctggatggcatcctgttcatctacggcgtgatcctgaccgccctgttcctgagagtgaagttcagcagaagcgccgacgcccctgcctaccagcagggacagaaccaactgtacaacgagctgaacctgggcagacgggaagagtacgacgtgctggacaagcggagaggcagggaccctgagatgggcggaaagccccagcggagaaagaacccccaggaaggactgtataacgaactccagaaagacaagatggccgaagcctacagcgagatcggcatgaagggcgagcggagaagaggcaagggccacgatggcctgtaccagggcctgagcaccgccaccaaggacacctatgacgccctgcacatgcaggccctgcctccaagaagggccaagcgatctggatctggagcaacaaacttctcactactcaaacaagcaggtgacgtggaggagaatcccgggcctactagtatggactggatttggcgcatccttttccttgtcggcgctgctaccggcgcgcattccttcgaagaagttcagctggttgaaacaggtggcggcctggtgcagcctggcaaatctctggaactgacctgcgccaccagcggcttcacctttaataccgcctggatgcactgggtccgacagagccccgataagcggctggaatggatcgccagaatcaaggacaccagcaacaactacgccaccgactacgtggaatccatgaagggcagattcaccatcagccgggacgacagcaagggctccgtgaacctccagatgaacagcctgaaagaagaggacaccgccacctactactgcaccaccgacttctacgacggcacctactattggaactactggggccagggcgtgatggtcacagtgtcatctacgcgtgagcagaaactgatctcggaagaggatgggagcggcatccagaaccctgatcctgccgtgtaccagctgcgggatagcaagagcagcgacaagagcgtgtgtctgttcaccgacttcgacagccagaccaacgtgtcccagagcaaggactccgacgtgtacatcaccgataagaccgtgctggacatgcggagcatggacttcaagagcaactccgccgtggcctggtccaacaagtccgatttcgcctgcgccaacgccttcaacaacagcattatccccgaggacacattcttcccaagccccgagagcagctgcggtacccagagttttgggttgttggaccctaaattgtgctatctgttggacggaatcctgttcatttacggagtgatcctgaccgcattgttcctgaggagcaagcggtcacggctgctccacagcgattacatgaatatgacaccacgaagaccgggtcctactcgcaaacactaccaaccctacgcacctccccgcgactttgcagcgtaccgatctcgggttaagttttccagatccgcagacgcacccgcttaccaacaagggcagaaccaactctacaatgaacttaatttggggcggagggaagagtacgacgttctggacaaaaggaggggacgagatcccgagatgggcggaaagcctcagcgaaggaagaatccgcaagaggggctttataacgaactccagaaagataaaatggcagaagcctatagtgagattgggatgaagggagaaaggaggaggggtaaaggtcacgatgggttgtaccaaggattgagcacagccactaaagatacctatgatgcgctccacatgcaggccctgccgccaaga

SEQ ID NO: 9020 - DNA, 2796 bp, Artificial Sequence
  Synthetic Polynucloetide
atggccttaccagtgaccgccttgctcctgccgctggccttgctgctccacgccgccaggccgagctacgagctgatccagcctccttctgccgctgtgacactgggcaataccgtgtctctgacctgtgtgggagatgagctgcccaagagatacgcctactggtatcagcagaagcccgaccagagcatcgtgcgcgtgatctacgaagatagcgtgcggcctcctggcatcagcgatagattttctggcagcagcagcggcaccaccgccacactgacaattagagatgcccagaacgaggacgaggccgactactactgtcagagcacctacggcgacgacaagctgtacatctttggcggaggcaccaagctgacagtgcttggactcgaggggaaaccaattcccaaccctcttctgggactggattcaaccggcagcggcgaggacctgaagaacgtgttcccacctgaggtggccgtgttcgagcctagcgaggccgagatcagccacacccagaaagccaccctcgtgtgcctggctaccggcttctaccccgaccatgtggaactgtcttggtgggtcaacggcaaagaggtgcacagcggcgtgtctaccgacccccagccactgaaagaacagcccgccctgaacgacagccggtactgcctgagcagcagactgagagtgtccgccaccttctggcagaacccccggaaccacttcagatgccaggtgcagttctacggcctgagcgagaacgacgagtggacccaggacagagccaagcccgtgacccagatcgtgtctgccgaagcctggggcagagccgattgcggatcccagagcttcggcctgctggaccccaagctgtgctacctgctggatggcatcctgttcatctacggcgtgatcctgaccgccctgttcctgaggagtaagaggagcaggctcctgcacagtgactacatgaacatgactccacgccgccccggacccacccgcaagcattaccagccctatgccccaccacgcgacttcgcagcctatcgctccagagtgaagttcagcagaagcgccgacgcccctgcctaccagcagggacagaaccaactgtacaacgagctgaacctgggcagacgggaagagtacgacgtgctggacaagcggagaggcagggaccctgagatgggcggaaagccccagcggagaaagaacccccaggaaggactgtataacgaactccagaaagacaagatggccgaagcctacagcgagatcggcatgaagggcgagcggagaagaggcaagggccacgatggcctgtaccagggcctgagcaccgccaccaaggacacctatgacgccctgcacatgcaggccctgcctccaagaagggccaagcgatctggatctggagcaacaaacttctcactactcaaacaagcaggtgacgtggaggagaatcccgggcctactagtatggactggatttggcgcatccttttccttgtcggcgctgctaccggcgcgcattccttcgaagaagttcagctggttgaaacaggtggcggcctggtgcagcctggcaaatctctggaactgacctgcgccaccagcggcttcacctttaataccgcctggatgcactgggtccgacagagccccgataagcggctggaatggatcgccagaatcaaggacaccagcaacaactacgccaccgactacgtggaatccatgaagggcagattcaccatcagccgggacgacagcaagggctccgtgaacctccagatgaacagcctgaaagaagaggacaccgccacctactactgcaccaccgacttctacgacggcacctactattggaactactggggccagggcgtgatggtcacagtgtcatctacgcgtgagcagaaactgatctcggaagaggatgggagcggcatccagaaccctgatcctgccgtgtaccagctgcgggatagcaagagcagcgacaagagcgtgtgtctgttcaccgacttcgacagccagaccaacgtgtcccagagcaaggactccgacgtgtacatcaccgataagaccgtgctggacatgcggagcatggacttcaagagcaactccgccgtggcctggtccaacaagtccgatttcgcctgcgccaacgccttcaacaacagcattatccccgaggacacattcttcccaagccccgagagcagctgcggtacccagagttttgggttgttggaccctaaattgtgctatctgttggacggaatcctgttcatttacggagtgatcctgaccgcattgttcctgaggagcaagcggtcacggctgctccacagcgattacatgaatatgacaccacgaagaccgggtcctactcgcaaacactaccaaccctacgcacctccccgcgactttgcagcgtaccgatctcgggttaagttttccagatccgcagacgcacccgcttaccaacaagggcagaaccaactctacaatgaacttaatttggggcggagggaagagtacgacgttctggacaaaaggaggggacgagatcccgagatgggcggaaagcctcagcgaaggaagaatccgcaagaggggctttataacgaactccagaaagataaaatggcagaagcctatagtgagattgggatgaagggagaaaggaggaggggtaaaggtcacgatgggttgtaccaaggattgagcacagccactaaagatacctatgatgcgctccacatgcaggccctgccgccaaga

SEQ ID NO: 9021 - DNA, 2679 bp, Artificial Sequence
  Synthetic Polynucloetide
atggccttaccagtgaccgccttgctcctgccgctggccttgctgctccacgccgccaggccgagctacgagctgatccagcctccttctgccgctgtgacactgggcaataccgtgtctctgacctgtgtgggagatgagctgcccaagagatacgcctactggtatcagcagaagcccgaccagagcatcgtgcgcgtgatctacgaagatagcgtgcggcctcctggcatcagcgatagattttctggcagcagcagcggcaccaccgccacactgacaattagagatgcccagaacgaggacgaggccgactactactgtcagagcacctacggcgacgacaagctgtacatctttggcggaggcaccaagctgacagtgcttggactcgaggggaaaccaattcccaaccctcttctgggactggattcaaccggcagcggcgaggacctgaagaacgtgttcccacctgaggtggccgtgttcgagcctagcgaggccgagatcagccacacccagaaagccaccctcgtgtgcctggctaccggcttctaccccgaccatgtggaactgtcttggtgggtcaacggcaaagaggtgcacagcggcgtgtctaccgacccccagccactgaaagaacagcccgccctgaacgacagccggtactgcctgagcagcagactgagagtgtccgccaccttctggcagaacccccggaaccacttcagatgccaggtgcagttctacggcctgagcgagaacgacgagtggacccaggacagagccaagcccgtgacccagatcgtgtctgccgaagcctggggcagagccgattgcggatcccagagcttcggcctgctggaccccaagctgtgctacctgctggatggcatcctgttcatctacggcgtgatcctgaccgccctgttcctgagagtgaagttcagcagaagcgccgacgcccctgcctaccagcagggacagaaccaactgtacaacgagctgaacctgggcagacgggaagagtacgacgtgctggacaagcggagaggcagggaccctgagatgggcggaaagccccagcggagaaagaacccccaggaaggactgtataacgaactccagaaagacaagatggccgaagcctacagcgagatcggcatgaagggcgagcggagaagaggcaagggccacgatggcctgtaccagggcctgagcaccgccaccaaggacacctatgacgccctgcacatgcaggccctgcctccaagaagggccaagcgatctggatctggagcaacaaacttctcactactcaaacaagcaggtgacgtggaggagaatcccgggcctactagtatggactggatttggcgcatccttttccttgtcggcgctgctaccggcgcgcattccttcgaagaagttcagctggttgaaacaggtggcggcctggtgcagcctggcaaatctctggaactgacctgcgccaccagcggcttcacctttaataccgcctggatgcactgggtccgacagagccccgataagcggctggaatggatcgccagaatcaaggacaccagcaacaactacgccaccgactacgtggaatccatgaagggcagattcaccatcagccgggacgacagcaagggctccgtgaacctccagatgaacagcctgaaagaagaggacaccgccacctactactgcaccaccgacttctacgacggcacctactattggaactactggggccagggcgtgatggtcacagtgtcatctacgcgtgagcagaaactgatctcggaagaggatctggggagcggcatccagaaccctgatcctgccgtgtaccagctgcgggatagcaagagcagcgacaagagcgtgtgtctgttcaccgacttcgacagccagaccaacgtgtcccagagcaaggactccgacgtgtacatcaccgataagaccgtgctggacatgcggagcatggacttcaagagcaactccgccgtggcctggtccaacaagtccgatttcgcctgcgccaacgccttcaacaacagcattatccccgaggacacattcttcccaagccccgagagcagctgcggtacccagagttttgggttgttggaccctaaattgtgctatctgttggacggaatcctgttcatttacggagtgatcctgaccgcattgttcctgaagagaggccggaagaagctgctgtacatcttcaagcagcctttcatgcggcccgtgcagaccacccaggaagaggacggctgctcctgccggttccccgaggaagaagaaggcggctgcgagctgcgggttaagttttccagatccgcagacgcacccgcttaccaacaagggcagaaccaactctacaatgaacttaatttggggcggagggaagagtacgacgttctggacaaaaggaggggacgagatcccgagatgggcggaaagcctcagcgaaggaagaatccgcaagaggggctttataacgaactccagaaagataaaatggcagaagcctatagtgagattgggatgaagggagaaaggaggaggggtaaaggtcacgatgggttgtaccaaggattgagcacagccactaaagatacctatgatgcgctccacatgcaggccctgccgccaaga

SEQ ID NO: 9022 - DNA, 2805 bp, Artificial Sequence
  Synthetic Polynucloetide
atggccttaccagtgaccgccttgctcctgccgctggccttgctgctccacgccgccaggccgagctacgagctgatccagcctccttctgccgctgtgacactgggcaataccgtgtctctgacctgtgtgggagatgagctgcccaagagatacgcctactggtatcagcagaagcccgaccagagcatcgtgcgcgtgatctacgaagatagcgtgcggcctcctggcatcagcgatagattttctggcagcagcagcggcaccaccgccacactgacaattagagatgcccagaacgaggacgaggccgactactactgtcagagcacctacggcgacgacaagctgtacatctttggcggaggcaccaagctgacagtgcttggactcgaggggaaaccaattcccaaccctcttctgggactggattcaaccggcagcggcgaggacctgaagaacgtgttcccacctgaggtggccgtgttcgagcctagcgaggccgagatcagccacacccagaaagccaccctcgtgtgcctggctaccggcttctaccccgaccatgtggaactgtcttggtgggtcaacggcaaagaggtgcacagcggcgtgtctaccgacccccagccactgaaagaacagcccgccctgaacgacagccggtactgcctgagcagcagactgagagtgtccgccaccttctggcagaacccccggaaccacttcagatgccaggtgcagttctacggcctgagcgagaacgacgagtggacccaggacagagccaagcccgtgacccagatcgtgtctgccgaagcctggggcagagccgattgcggatcccagagcttcggcctgctggaccccaagctgtgctacctgctggatggcatcctgttcatctacggcgtgatcctgaccgccctgttcctgaaacggggcagaaagaaactcctgtatatattcaaacaaccatttatgagaccagtacaaactactcaagaggaagatggctgtagctgccgatttccagaagaagaagaaggaggatgtgaactgagagtgaagttcagcagaagcgccgacgcccctgcctaccagcagggacagaaccaactgtacaacgagctgaacctgggcagacgggaagagtacgacgtgctggacaagcggagaggcagggaccctgagatgggcggaaagccccagcggagaaagaacccccaggaaggactgtataacgaactccagaaagacaagatggccgaagcctacagcgagatcggcatgaagggcgagcggagaagaggcaagggccacgatggcctgtaccagggcctgagcaccgccaccaaggacacctatgacgccctgcacatgcaggccctgcctccaagaagggccaagcgatctggatctggagcaacaaacttctcactactcaaacaagcaggtgacgtggaggagaatcccgggcctactagtatggactggatttggcgcatccttttccttgtcggcgctgctaccggcgcgcattccttcgaagaagttcagctggttgaaacaggtggcggcctggtgcagcctggcaaatctctggaactgacctgcgccaccagcggcttcacctttaataccgcctggatgcactgggtccgacagagccccgataagcggctggaatggatcgccagaatcaaggacaccagcaacaactacgccaccgactacgtggaatccatgaagggcagattcaccatcagccgggacgacagcaagggctccgtgaacctccagatgaacagcctgaaagaagaggacaccgccacctactactgcaccaccgacttctacgacggcacctactattggaactactggggccagggcgtgatggtcacagtgtcatctacgcgtgagcagaaactgatctcggaagaggatctggggagcggcatccagaaccctgatcctgccgtgtaccagctgcgggatagcaagagcagcgacaagagcgtgtgtctgttcaccgacttcgacagccagaccaacgtgtcccagagcaaggactccgacgtgtacatcaccgataagaccgtgctggacatgcggagcatggacttcaagagcaactccgccgtggcctggtccaacaagtccgatttcgcctgcgccaacgccttcaacaacagcattatccccgaggacacattcttcccaagccccgagagcagctgcggtacccagagttttgggttgttggaccctaaattgtgctatctgttggacggaatcctgttcatttacggagtgatcctgaccgcattgttcctgaagagaggccggaagaagctgctgtacatcttcaagcagcctttcatgcggcccgtgcagaccacccaggaagaggacggctgctcctgccggttccccgaggaagaagaaggcggctgcgagctgcgggttaagttttccagatccgcagacgcacccgcttaccaacaagggcagaaccaactctacaatgaacttaatttggggcggagggaagagtacgacgttctggacaaaaggaggggacgagatcccgagatgggcggaaagcctcagcgaaggaagaatccgcaagaggggctttataacgaactccagaaagataaaatggcagaagcctatagtgagattgggatgaagggagaaaggaggaggggtaaaggtcacgatgggttgtaccaaggattgagcacagccactaaagatacctatgatgcgctccacatgcaggccctgccgccaaga

SEQ ID NO: 9023 - DNA, 2478 bp, Artificial Sequence
  Synthetic Polynucloetide
atggccttaccagtgaccgccttgctcctgccgctggccttgctgctccacgccgccaggccgagctacgagctgatccagcctccttctgccgctgtgacactgggcaataccgtgtctctgacctgtgtgggagatgagctgcccaagagatacgcctactggtatcagcagaagcccgaccagagcatcgtgcgcgtgatctacgaagatagcgtgcggcctcctggcatcagcgatagattttctggcagcagcagcggcaccaccgccacactgacaattagagatgcccagaacgaggacgaggccgactactactgtcagagcacctacggcgacgacaagctgtacatctttggcggaggcaccaagctgacagtgcttggactcgagcagagcttcggcctgctggaccccaagctgtgctacctgctggatggcatcctgttcatctacggcgtgatcctgaccgccctgttcctgagagtgaagttcagcagaagcgccgacgcccctgcctaccagcagggacagaaccaactgtacaacgagctgaacctgggcagacgggaagagtacgacgtgctggacaagcggagaggcagggaccctgagatgggcggaaagccccagcggagaaagaacccccaggaaggactgtataacgaactccagaaagacaagatggccgaagcctacagcgagatcggcatgaagggcgagcggagaagaggcaagggccacgatggcctgtaccagggcctgagcaccgccaccaaggacacctatgacgccctgcacatgcaggccctgcctccaagaagggccaagcgatctggatctggagcaacaaacttctcactactcaaacaagcaggtgacgtggaggagaatcccgggcctactagtatggactggatttggcgcatccttttccttgtcggcgctgctaccggcgcgcattccttcgaagaagttcagctggttgaaacaggtggcggcctggtgcagcctggcaaatctctggaactgacctgcgccaccagcggcttcacctttaataccgcctggatgcactgggtccgacagagccccgataagcggctggaatggatcgccagaatcaaggacaccagcaacaactacgccaccgactacgtggaatccatgaagggcagattcaccatcagccgggacgacagcaagggctccgtgaacctccagatgaacagcctgaaagaagaggacaccgccacctactactgcaccaccgacttctacgacggcacctactattggaactactggggccagggcgtgatggtcacagtgtcatctacgcgtcagagttttgggttgttggaccctaaattgtgctatctgttggacggaatcctgttcatttacggagtgatcctgaccgcattgttcctgcgggttaagttttccagatccgcagacgcacccgcttaccaacaagggcagaaccaactctacaatgaacttaatttggggcggagggaagagtacgacgttctggacaaaaggaggggacgagatcccgagatgggcggaaagcctcagcgaaggaagaatccgcaagaggggctttataacgaactccagaaagataaaatggcagaagcctatagtgagattgggatgaagggagaaaggaggaggggtaaaggtcacgatgggttgtaccaaggattgagcacagccactaaagatacctatgatgcgctccacatgcaggccctgccgccaagacgcgccaagagaagcggatctggcgtgaagcagaccctgaatttcgacctgctgaagctggctggcgacgtggaatccaacccaggcccttctagaggccatatgaccgagtacaagcccacggtgcgcctcgccacccgcgacgacgtccccagggccgtacgcaccctcgccgccgcgttcgccgactaccccgccacgcgccacaccgtcgatccggaccgccacatcgagcgggtcaccgagctgcaagaactcttcctcacgcgcgtcgggctcgacatcggcaaggtgtgggtcgcggacgacggcgccgcggtggcggtctggaccacgccggagagcgtcgaagcgggggcggtgttcgccgagatcggcccgcgcatggccgagttgagcggttcccggctggccgcgcagcaacagatggaaggcctcctggcgccgcaccggcccaaggagcccgcgtggttcctggccaccgtcggcgtctcgcccgaccaccagggcaagggtctgggcagcgccgtcgtgctccccggagtggaggcggccgagcgcgccggggtgcccgccttcctggagacctccgcgccccgcaacctccccttctacgagcggctcggcttcaccgtcaccgccgacgtcgaggtgcccgaaggaccgcgcacctggtgcatgacccgcaagcccggtgcctga

SEQ ID NO: 9024 - DNA, 1950 bp, Artificial Sequence
  Synthetic Polynucloetide
atggccttaccagtgaccgccttgctcctgccgctggccttgctgctccacgccgccaggccgagctacgagctgatccagcctccttctgccgctgtgacactgggcaataccgtgtctctgacctgtgtgggagatgagctgcccaagagatacgcctactggtatcagcagaagcccgaccagagcatcgtgcgcgtgatctacgaagatagcgtgcggcctcctggcatcagcgatagattttctggcagcagcagcggcaccaccgccacactgacaattagagatgcccagaacgaggacgaggccgactactactgtcagagcacctacggcgacgacaagctgtacatctttggcggaggcaccaagctgacagtgcttggactcgagggacagcctaaggccaatcctaccgtgacactgttccctccaagcagcgaagaactccaggccaacaaggccacacttgtgtgcctgatctccgacttctaccctggggctgtgacagtggcttggaaggccgatggatctcctgtgaaagccggcgtggaaaccaccaagccatccaagcagagcaacaacaaatacgccgccagctcctacctgagcctgacacctgagcagtggaagtcccacagatcctacagctgccaagtgacccacgaaggcagcaccgtggaaaagacagtggcccctacagagtgcagccccatcaagaccgatgtgattacaatggaccccaaggacaactgctccaaggacgccaacgataccctgctgctccagctgaccaacaccagcgcctactacatgtacttgttgctgctgctgaagtccgtggtgtacttcgccatcatcacatgctgcctgctgcggagaaccgccttctgctgcaacggcgagaagtctagggccaagcgatctggatctggagcaacaaacttctcactactcaaacaagcaggtgacgtggaggagaatcccgggcctactagtatggactggatttggcgcatccttttccttgtcggcgctgctaccggcgcgcattccttcgaagaagttcagctggttgaaacaggtggcggcctggtgcagcctggcaaatctctggaactgacctgcgccaccagcggcttcacctttaataccgcctggatgcactgggtccgacagagccccgataagcggctggaatggatcgccagaatcaaggacaccagcaacaactacgccaccgactacgtggaatccatgaagggcagattcaccatcagccgggacgacagcaagggctccgtgaacctccagatgaacagcctgaaagaagaggacaccgccacctactactgcaccaccgacttctacgacggcacctactattggaactactggggccagggcgtgatggtcacagtgtcatctacgcgtgcctctacaaagggaccctccgtgtttcctctggctcccagcagcaagtctacaagcggaggaacagccgctctgggctgcctggtcaaggattactttcccgagcctgtgaccgtgtcctggaatagcggagcactgacaagcggcgtgcacacctttccagccgtgctgcaaagcagcggcctgtactctctgagcagcgtggtcacagtgcctagctctagcctgggcacccagacctacatctgcaatgtgaaccacaagcctagcaacaccaaggtggacaagagagtggaacccaagagctgtgaagtgaaaaccgactccaccgaccacgtgaagcccaaagagacagagaacaccaagcagcccagcaagagctgccacaagcccaaggccatcgtgcacaccgagaaagtgaacatgatgagcctgaccgtgctgggcctgcggatgctgttcgccaaaaccgtggccgtgaacttcctgctgaccgccaagctgttcttcctc

SEQ ID NO: 9025 - DNA, 1884 bp, Artificial Sequence
  Synthetic Polynucloetide
atggccttaccagtgaccgccttgctcctgccgctggccttgctgctccacgccgccaggccgagctacgagctgatccagcctccttctgccgctgtgacactgggcaataccgtgtctctgacctgtgtgggagatgagctgcccaagagatacgcctactggtatcagcagaagcccgaccagagcatcgtgcgcgtgatctacgaagatagcgtgcggcctcctggcatcagcgatagattttctggcagcagcagcggcaccaccgccacactgacaattagagatgcccagaacgaggacgaggccgactactactgtcagagcacctacggcgacgacaagctgtacatctttggcggaggcaccaagctgacagtgcttggactcgagggacagcctaaggccaatcctaccgtgacactgttccctccaagcagcgaagaactccaggccaacaaggccacacttgtgtgcctgatctccgacttctaccctggggctgtgacagtggcttggaaggccgatggatctcctgtgaaagccggcgtggaaaccaccaagccatccaagcagagcaacaacaaatacgccgccagctcctacctgagcctgacacctgagcagtggaagtcccacagatcctacagctgccaagtgacccacgaaggcagcaccgtggaaaagacagtggcccctacagagtgcagcggcagagccgattgcggcatcaccagcgccagctaccaccagggcgtgctgagcgccaccatcctgtacgagatcctgctgggcaaggccaccctgtacgccgtgctggtgtctgccctggtgctgatggctatggtcaagcggaaggacagccggggaagggccaagcgatctggatctggagcaacaaacttctcactactcaaacaagcaggtgacgtggaggagaatcccgggcctactagtatggactggatttggcgcatccttttccttgtcggcgctgctaccggcgcgcattccttcgaagaagttcagctggttgaaacaggtggcggcctggtgcagcctggcaaatctctggaactgacctgcgccaccagcggcttcacctttaataccgcctggatgcactgggtccgacagagccccgataagcggctggaatggatcgccagaatcaaggacaccagcaacaactacgccaccgactacgtggaatccatgaagggcagattcaccatcagccgggacgacagcaagggctccgtgaacctccagatgaacagcctgaaagaagaggacaccgccacctactactgcaccaccgacttctacgacggcacctactattggaactactggggccagggcgtgatggtcacagtgtcatctacgcgtgcctctacaaagggaccctccgtgtttcctctggctcccagcagcaagtctacaagcggaggaacagccgctctgggctgcctggtcaaggattactttcccgagcctgtgaccgtgtcctggaatagcggagcactgacaagcggcgtgcacacctttccagccgtgctgcaaagcagcggcctgtactctctgagcagcgtggtcacagtgcctagctctagcctgggcacccagacctacatctgcaatgtgaaccacaagcctagcaacaccaaggtggacaagagagtggaacccaagagctgtatccccgaggacacattcttcccaagcagcgacgtgccctgcgacgtgaagctggtggaaaagagcttcgagacagacaccaacctgaacttccagaacctgagcgtgatcggcttcagaatcctgctgctgaaagtggccggctttaacctgctgatgaccctgcggctgtggtccagc

SEQ ID NO: 9026 - DNA, 1884 bp, Artificial Sequence
  Synthetic Polynucloetide
atggccttaccagtgaccgccttgctcctgccgctggccttgctgctccacgccgccaggccgagctacgagctgatccagcctccttctgccgctgtgacactgggcaataccgtgtctctgacctgtgtgggagatgagctgcccaagagatacgcctactggtatcagcagaagcccgaccagagcatcgtgcgcgtgatctacgaagatagcgtgcggcctcctggcatcagcgatagattttctggcagcagcagcggcaccaccgccacactgacaattagagatgcccagaacgaggacgaggccgactactactgtcagagcacctacggcgacgacaagctgtacatctttggcggaggcaccaagctgacagtgcttggactcgagggacagcctaaggccaatcctaccgtgacactgttccctccaagcagcgaagaactccaggccaacaaggccacacttgtgtgcctgatctccgacttctaccctggggctgtgacagtggcttggaaggccgatggatctcctgtgaaagccggcgtggaaaccaccaagccatccaagcagagcaacaacaaatacgccgccagctcctacctgagcctgacacctgagcagtggaagtcccacagatcctacagctgccaagtgacccacgaaggcagcaccgtggaaaagacagtggcccctacagagtgcagcggcagagccgattgcggctttaccagcgagagctaccagcagggcgtgctgagcgccaccatcctgtacgagatcctgctgggcaaggccaccctgtacgccgtgctggtgtctgccctggtgctgatggctatggtcaagcggaaggacagccggggaagggccaagcgatctggatctggagcaacaaacttctcactactcaaacaagcaggtgacgtggaggagaatcccgggcctactagtatggactggatttggcgcatccttttccttgtcggcgctgctaccggcgcgcattccttcgaagaagttcagctggttgaaacaggtggcggcctggtgcagcctggcaaatctctggaactgacctgcgccaccagcggcttcacctttaataccgcctggatgcactgggtccgacagagccccgataagcggctggaatggatcgccagaatcaaggacaccagcaacaactacgccaccgactacgtggaatccatgaagggcagattcaccatcagccgggacgacagcaagggctccgtgaacctccagatgaacagcctgaaagaagaggacaccgccacctactactgcaccaccgacttctacgacggcacctactattggaactactggggccagggcgtgatggtcacagtgtcatctacgcgtgcctctacaaagggaccctccgtgtttcctctggctcccagcagcaagtctacaagcggaggaacagccgctctgggctgcctggtcaaggattactttcccgagcctgtgaccgtgtcctggaatagcggagcactgacaagcggcgtgcacacctttccagccgtgctgcaaagcagcggcctgtactctctgagcagcgtggtcacagtgcctagctctagcctgggcacccagacctacatctgcaatgtgaaccacaagcctagcaacaccaaggtggacaagagagtggaacccaagagctgtatccccgaggacacattcttcccaagccccgagagcagctgcgacgtgaagctggtggaaaagagcttcgagacagacaccaacctgaacttccagaacctgagcgtgatcggcttcagaatcctgctgctgaaagtggccggctttaacctgctgatgaccctgcggctgtggtccagc

SEQ ID NO: 9027 - DNA, 1362 bp, Artificial Sequence
  Synthetic Polynucloetide
atggccttaccagtgaccgccttgctcctgccgctggccttgctgctccacgccgccaggccgagctacgagctgatccagcctccttctgccgctgtgacactgggcaataccgtgtctctgacctgtgtgggagatgagctgcccaagagatacgcctactggtatcagcagaagcccgaccagagcatcgtgcgcgtgatctacgaagatagcgtgcggcctcctggcatcagcgatagattttctggcagcagcagcggcaccaccgccacactgacaattagagatgcccagaacgaggacgaggccgactactactgtcagagcacctacggcgacgacaagctgtacatctttggcggaggcaccaagctgacagtgcttggaggcggaggcggaagtggaggcggaggatctggcggcggaggctctgaagttcagctggttgaaacaggtggcggcctggtgcagcctggcaaatctctggaactgacctgcgccaccagcggcttcacctttaataccgcctggatgcactgggtccgacagagccccgataagcggctggaatggatcgccagaatcaaggacaccagcaacaactacgccaccgactacgtggaatccatgaagggcagattcaccatcagccgggacgacagcaagggctccgtgaacctccagatgaacagcctgaaagaagaggacaccgccacctactactgcaccaccgacttctacgacggcacctactattggaactactggggccagggcgtgatggtcacagtgtcatctacgcgtgacggtaacgaggagatgggaggaatcactcaaaccccttacaaagtctcaatttcaggaacaactgttatccttacatgtccccagtatcctggcagcgagatcctttggcagcataacgacaagaatatagggggagatgaagacgataagaatatcggatctgacgaggatcacttgagcctgaaagagttctccgagcttgaacaaagcggatattatgtgtgctatccgcgcgggtcaaagccggaagacgctaacttttacctttatctccgagccagagtgtgcgaaaattgcatggaaatggacgttatgtccgttgctacaatagttatcgtagatatatgcatcacgggtggactgcttctgctggtttattattggtccaagaatagaaaggccaaagctaaacccgtgaccagaggcgctggcgcaggcggaaggcaaaggggacaaaacaaagaacggccaccaccagtgccaaatccagattatgagcctattcggaaaggacagagggacctgtactctggcctgaatcagagaagaatc

SEQ ID NO: 9028 - DNA, 1257 bp, Artificial Sequence
  Synthetic Polynucloetide
atggccttaccagtgaccgccttgctcctgccgctggccttgctgctccacgccgccaggccgagctacgagctgatccagcctccttctgccgctgtgacactgggcaataccgtgtctctgacctgtgtgggagatgagctgcccaagagatacgcctactggtatcagcagaagcccgaccagagcatcgtgcgcgtgatctacgaagatagcgtgcggcctcctggcatcagcgatagattttctggcagcagcagcggcaccaccgccacactgacaattagagatgcccagaacgaggacgaggccgactactactgtcagagcacctacggcgacgacaagctgtacatctttggcggaggcaccaagctgacagtgcttggaggcggaggcggaagtggaggcggaggatctggcggcggaggctctgaagttcagctggttgaaacaggtggcggcctggtgcagcctggcaaatctctggaactgacctgcgccaccagcggcttcacctttaataccgcctggatgcactgggtccgacagagccccgataagcggctggaatggatcgccagaatcaaggacaccagcaacaactacgccaccgactacgtggaatccatgaagggcagattcaccatcagccgggacgacagcaagggctccgtgaacctccagatgaacagcctgaaagaagaggacaccgccacctactactgcaccaccgacttctacgacggcacctactattggaactactggggccagggcgtgatggtcacagtgtcatctacgcgtttcaagatccccatcgaggaactggaagatcgggtgttcgtgaactgcaacacctctatcacctgggtggaaggcaccgtgggaacactgctgagcgacatcaccagactggacctcggcaagcggattctggaccctcggggcatctacagatgcaacggcaccgacatctacaaggacaaagaaagcaccgtgcaggtccactacagaatgtgccagtcctgcgtggaactggaccctgctacagtggccggcatcatcgtgaccgatgtgatcgctactctgctgctggctctgggagtgttctgcttcgccggacacgaaacaggcagactgtctggcgctgccgatacacaggccctgctgagaaacgaccaagtgtatcagcccctgcgcgacagagatgatgcccagtattctcacctcggcggcaactgggctagaaacaag

SEQ ID NO: 9029 - DNA, 1287 bp, Artificial Sequence
  Synthetic Polynucloetide
atggccttaccagtgaccgccttgctcctgccgctggccttgctgctccacgccgccaggccgagctacgagctgatccagcctccttctgccgctgtgacactgggcaataccgtgtctctgacctgtgtgggagatgagctgcccaagagatacgcctactggtatcagcagaagcccgaccagagcatcgtgcgcgtgatctacgaagatagcgtgcggcctcctggcatcagcgatagattttctggcagcagcagcggcaccaccgccacactgacaattagagatgcccagaacgaggacgaggccgactactactgtcagagcacctacggcgacgacaagctgtacatctttggcggaggcaccaagctgacagtgcttggaggcggaggcggaagtggaggcggaggatctggcggcggaggctctgaagttcagctggttgaaacaggtggcggcctggtgcagcctggcaaatctctggaactgacctgcgccaccagcggcttcacctttaataccgcctggatgcactgggtccgacagagccccgataagcggctggaatggatcgccagaatcaaggacaccagcaacaactacgccaccgactacgtggaatccatgaagggcagattcaccatcagccgggacgacagcaagggctccgtgaacctccagatgaacagcctgaaagaagaggacaccgccacctactactgcaccaccgacttctacgacggcacctactattggaactactggggccagggcgtgatggtcacagtgtcatctacgcgtcagagcatcaagggcaaccacctggtcaaggtgtacgactaccaagaggacggcagcgtgctgctgacatgtgatgccgaggccaagaacatcacctggtttaaggacggcaagatgatcggcttcctgaccgaggacaagaagaagtggaacctgggcagcaacgctaaggaccccagaggcatgtatcagtgcaagggcagccagaacaagagcaagcccctccaggtgtactaccggatgtgccagaactgcatcgagctgaacgccgctaccatcagcggctttctgttcgccgagatcgtgtccatcttcgtgctggccgtgggcgtgtactttatcgctggacaggatggcgtgcggcagagcagagcttccgataagcaaaccctgctgcctaacgaccagctgtaccagcctctgaaggacagagaggacgaccagtacagccacctccagggcaatcagctgagaagaaac

SEQ ID NO: 9030 - DNA, 1236 bp, Artificial Sequence
  Synthetic Polynucloetide
atggccttaccagtgaccgccttgctcctgccgctggccttgctgctccacgccgccaggccgagctacgagctgatccagcctccttctgccgctgtgacactgggcaataccgtgtctctgacctgtgtgggagatgagctgcccaagagatacgcctactggtatcagcagaagcccgaccagagcatcgtgcgcgtgatctacgaagatagcgtgcggcctcctggcatcagcgatagattttctggcagcagcagcggcaccaccgccacactgacaattagagatgcccagaacgaggacgaggccgactactactgtcagagcacctacggcgacgacaagctgtacatctttggcggaggcaccaagctgacagtgcttggaggcggaggcggaagtggaggcggaggatctggcggcggaggctctgaagttcagctggttgaaacaggtggcggcctggtgcagcctggcaaatctctggaactgacctgcgccaccagcggcttcacctttaataccgcctggatgcactgggtccgacagagccccgataagcggctggaatggatcgccagaatcaaggacaccagcaacaactacgccaccgactacgtggaatccatgaagggcagattcaccatcagccgggacgacagcaagggctccgtgaacctccagatgaacagcctgaaagaagaggacaccgccacctactactgcaccaccgacttctacgacggcacctactattggaactactggggccagggcgtgatggtcacagtgtcatctacgcgtcagagttttgggttgttggaccctaaattgtgctatctgttggacggaatcctgttcatttacggagtgatcctgaccgcattgttcctgcgggttaagttttccagatccgcagacgcacccgcttaccaacaagggcagaaccaactctacaatgaacttaatttggggcggagggaagagtacgacgttctggacaaaaggaggggacgagatcccgagatgggcggaaagcctcagcgaaggaagaatccgcaagaggggctttataacgaactccagaaagataaaatggcagaagcctatagtgagattgggatgaagggagaaaggaggaggggtaaaggtcacgatgggttgtaccaaggattgagcacagccactaaagatacctatgatgcgctccacatgcaggccctgccgccaaga

SEQ ID NO: 9031 - DNA, 1362 bp, Artificial Sequence
  Synthetic Polynucloetide
atggccttaccagtgaccgccttgctcctgccgctggccttgctgctccacgccgccaggccggaagttcagctggttgaaacaggtggcggcctggtgcagcctggcaaatctctggaactgacctgcgccaccagcggcttcacctttaataccgcctggatgcactgggtccgacagagccccgataagcggctggaatggatcgccagaatcaaggacaccagcaacaactacgccaccgactacgtggaatccatgaagggcagattcaccatcagccgggacgacagcaagggctccgtgaacctccagatgaacagcctgaaagaagaggacaccgccacctactactgcaccaccgacttctacgacggcacctactattggaactactggggccagggcgtgatggtcacagtgtcatctggcggaggcggaagtggaggcggaggatctggcggcggaggctctagctacgagctgatccagcctccttctgccgctgtgacactgggcaataccgtgtctctgacctgtgtgggagatgagctgcccaagagatacgcctactggtatcagcagaagcccgaccagagcatcgtgcgcgtgatctacgaagatagcgtgcggcctcctggcatcagcgatagattttctggcagcagcagcggcaccaccgccacactgacaattagagatgcccagaacgaggacgaggccgactactactgtcagagcacctacggcgacgacaagctgtacatctttggcggaggcaccaagctgacagtgcttggaacgcgtgacggtaacgaggagatgggaggaatcactcaaaccccttacaaagtctcaatttcaggaacaactgttatccttacatgtccccagtatcctggcagcgagatcctttggcagcataacgacaagaatatagggggagatgaagacgataagaatatcggatctgacgaggatcacttgagcctgaaagagttctccgagcttgaacaaagcggatattatgtgtgctatccgcgcgggtcaaagccggaagacgctaacttttacctttatctccgagccagagtgtgcgaaaattgcatggaaatggacgttatgtccgttgctacaatagttatcgtagatatatgcatcacgggtggactgcttctgctggtttattattggtccaagaatagaaaggccaaagctaaacccgtgaccagaggcgctggcgcaggcggaaggcaaaggggacaaaacaaagaacggccaccaccagtgccaaatccagattatgagcctattcggaaaggacagagggacctgtactctggcctgaatcagagaagaatc

SEQ ID NO: 9032 - DNA, 1257 bp, Artificial Sequence
  Synthetic Polynucloetide
atggccttaccagtgaccgccttgctcctgccgctggccttgctgctccacgccgccaggccggaagttcagctggttgaaacaggtggcggcctggtgcagcctggcaaatctctggaactgacctgcgccaccagcggcttcacctttaataccgcctggatgcactgggtccgacagagccccgataagcggctggaatggatcgccagaatcaaggacaccagcaacaactacgccaccgactacgtggaatccatgaagggcagattcaccatcagccgggacgacagcaagggctccgtgaacctccagatgaacagcctgaaagaagaggacaccgccacctactactgcaccaccgacttctacgacggcacctactattggaactactggggccagggcgtgatggtcacagtgtcatctggcggaggcggaagtggaggcggaggatctggcggcggaggctctagctacgagctgatccagcctccttctgccgctgtgacactgggcaataccgtgtctctgacctgtgtgggagatgagctgcccaagagatacgcctactggtatcagcagaagcccgaccagagcatcgtgcgcgtgatctacgaagatagcgtgcggcctcctggcatcagcgatagattttctggcagcagcagcggcaccaccgccacactgacaattagagatgcccagaacgaggacgaggccgactactactgtcagagcacctacggcgacgacaagctgtacatctttggcggaggcaccaagctgacagtgcttggaacgcgtttcaagatccccatcgaggaactggaagatcgggtgttcgtgaactgcaacacctctatcacctgggtggaaggcaccgtgggaacactgctgagcgacatcaccagactggacctcggcaagcggattctggaccctcggggcatctacagatgcaacggcaccgacatctacaaggacaaagaaagcaccgtgcaggtccactacagaatgtgccagtcctgcgtggaactggaccctgctacagtggccggcatcatcgtgaccgatgtgatcgctactctgctgctggctctgggagtgttctgcttcgccggacacgaaacaggcagactgtctggcgctgccgatacacaggccctgctgagaaacgaccaagtgtatcagcccctgcgcgacagagatgatgcccagtattctcacctcggcggcaactgggctagaaacaag

SEQ ID NO: 9033 - DNA, 1287 bp, Artificial Sequence
  Synthetic Polynucloetide
atggccttaccagtgaccgccttgctcctgccgctggccttgctgctccacgccgccaggccggaagttcagctggttgaaacaggtggcggcctggtgcagcctggcaaatctctggaactgacctgcgccaccagcggcttcacctttaataccgcctggatgcactgggtccgacagagccccgataagcggctggaatggatcgccagaatcaaggacaccagcaacaactacgccaccgactacgtggaatccatgaagggcagattcaccatcagccgggacgacagcaagggctccgtgaacctccagatgaacagcctgaaagaagaggacaccgccacctactactgcaccaccgacttctacgacggcacctactattggaactactggggccagggcgtgatggtcacagtgtcatctggcggaggcggaagtggaggcggaggatctggcggcggaggctctagctacgagctgatccagcctccttctgccgctgtgacactgggcaataccgtgtctctgacctgtgtgggagatgagctgcccaagagatacgcctactggtatcagcagaagcccgaccagagcatcgtgcgcgtgatctacgaagatagcgtgcggcctcctggcatcagcgatagattttctggcagcagcagcggcaccaccgccacactgacaattagagatgcccagaacgaggacgaggccgactactactgtcagagcacctacggcgacgacaagctgtacatctttggcggaggcaccaagctgacagtgcttggaacgcgtcagagcatcaagggcaaccacctggtcaaggtgtacgactaccaagaggacggcagcgtgctgctgacatgtgatgccgaggccaagaacatcacctggtttaaggacggcaagatgatcggcttcctgaccgaggacaagaagaagtggaacctgggcagcaacgctaaggaccccagaggcatgtatcagtgcaagggcagccagaacaagagcaagcccctccaggtgtactaccggatgtgccagaactgcatcgagctgaacgccgctaccatcagcggctttctgttcgccgagatcgtgtccatcttcgtgctggccgtgggcgtgtactttatcgctggacaggatggcgtgcggcagagcagagcttccgataagcaaaccctgctgcctaacgaccagctgtaccagcctctgaaggacagagaggacgaccagtacagccacctccagggcaatcagctgagaagaaac

SEQ ID NO: 9034 - DNA, 1236 bp, Artificial Sequence
  Synthetic Polynucloetide
atggccttaccagtgaccgccttgctcctgccgctggccttgctgctccacgccgccaggccggaagttcagctggttgaaacaggtggcggcctggtgcagcctggcaaatctctggaactgacctgcgccaccagcggcttcacctttaataccgcctggatgcactgggtccgacagagccccgataagcggctggaatggatcgccagaatcaaggacaccagcaacaactacgccaccgactacgtggaatccatgaagggcagattcaccatcagccgggacgacagcaagggctccgtgaacctccagatgaacagcctgaaagaagaggacaccgccacctactactgcaccaccgacttctacgacggcacctactattggaactactggggccagggcgtgatggtcacagtgtcatctggcggaggcggaagtggaggcggaggatctggcggcggaggctctagctacgagctgatccagcctccttctgccgctgtgacactgggcaataccgtgtctctgacctgtgtgggagatgagctgcccaagagatacgcctactggtatcagcagaagcccgaccagagcatcgtgcgcgtgatctacgaagatagcgtgcggcctcctggcatcagcgatagattttctggcagcagcagcggcaccaccgccacactgacaattagagatgcccagaacgaggacgaggccgactactactgtcagagcacctacggcgacgacaagctgtacatctttggcggaggcaccaagctgacagtgcttggaacgcgtcagagttttgggttgttggaccctaaattgtgctatctgttggacggaatcctgttcatttacggagtgatcctgaccgcattgttcctgcgggttaagttttccagatccgcagacgcacccgcttaccaacaagggcagaaccaactctacaatgaacttaatttggggcggagggaagagtacgacgttctggacaaaaggaggggacgagatcccgagatgggcggaaagcctcagcgaaggaagaatccgcaagaggggctttataacgaactccagaaagataaaatggcagaagcctatagtgagattgggatgaagggagaaaggaggaggggtaaaggtcacgatgggttgtaccaaggattgagcacagccactaaagatacctatgatgcgctccacatgcaggccctgccgccaaga

SEQ ID NO: 9035 - DNA, 1938 bp, Artificial Sequence
  Synthetic Polynucloetide
atggccttaccagtgaccgccttgctcctgccgctggccttgctgctccacgccgccaggccgagctacgagctgatccagcctccttctgccgctgtgacactgggcaataccgtgtctctgacctgtgtgggagatgagctgcccaagagatacgcctactggtatcagcagaagcccgaccagagcatcgtgcgcgtgatctacgaagatagcgtgcggcctcctggcatcagcgatagattttctggcagcagcagcggcaccaccgccacactgacaattagagatgcccagaacgaggacgaggccgactactactgtcagagcacctacggcgacgacaagctgtacatctttggcggaggcaccaagctgacagtgcttggaggcggaggcggaagtggaggcggaggatctggcggcggaggctctgaagttcagctggttgaaacaggtggcggcctggtgcagcctggcaaatctctggaactgacctgcgccaccagcggcttcacctttaataccgcctggatgcactgggtccgacagagccccgataagcggctggaatggatcgccagaatcaaggacaccagcaacaactacgccaccgactacgtggaatccatgaagggcagattcaccatcagccgggacgacagcaagggctccgtgaacctccagatgaacagcctgaaagaagaggacaccgccacctactactgcaccaccgacttctacgacggcacctactattggaactactggggccagggcgtgatggtcacagtgtcatctacgcgtgggagcggcatccagaaccctgatcctgccgtgtaccagctgcgggatagcaagagcagcgacaagagcgtgtgtctgttcaccgacttcgacagccagaccaacgtgtcccagagcaaggactccgacgtgtacatcaccgataagaccgtgctggacatgcggagcatggacttcaagagcaactccgccgtggcctggtccaacaagtccgatttcgcctgcgccaacgccttcaacaacagcattatccccgaggacacattcttcccaagccccgagagcagctgcgacgtgaagctggtggaaaagagcttcgagacagacaccaacctgaacttccagaacctgagcgtgatcggcttcagaatcctgctgctgaaagtggccggctttaacctgctgatgaccctgcggctgtggtccagccgcgccaagagaagcggatctggcgtgaagcagaccctgaatttcgacctgctgaagctggctggcgacgtggaatccaacccaggcccttctagaggccatatgaccgagtacaagcccacggtgcgcctcgccacccgcgacgacgtccccagggccgtacgcaccctcgccgccgcgttcgccgactaccccgccacgcgccacaccgtcgatccggaccgccacatcgagcgggtcaccgagctgcaagaactcttcctcacgcgcgtcgggctcgacatcggcaaggtgtgggtcgcggacgacggcgccgcggtggcggtctggaccacgccggagagcgtcgaagcgggggcggtgttcgccgagatcggcccgcgcatggccgagttgagcggttcccggctggccgcgcagcaacagatggaaggcctcctggcgccgcaccggcccaaggagcccgcgtggttcctggccaccgtcggcgtctcgcccgaccaccagggcaagggtctgggcagcgccgtcgtgctccccggagtggaggcggccgagcgcgccggggtgcccgccttcctggagacctccgcgccccgcaacctccccttctacgagcggctcggcttcaccgtcaccgccgacgtcgaggtgcccgaaggaccgcgcacctggtgcatgacccgcaagcccggtgcctga

SEQ ID NO: 9036 - DNA, 2034 bp, Artificial Sequence
  Synthetic Polynucloetide
atggccttaccagtgaccgccttgctcctgccgctggccttgctgctccacgccgccaggccgagctacgagctgatccagcctccttctgccgctgtgacactgggcaataccgtgtctctgacctgtgtgggagatgagctgcccaagagatacgcctactggtatcagcagaagcccgaccagagcatcgtgcgcgtgatctacgaagatagcgtgcggcctcctggcatcagcgatagattttctggcagcagcagcggcaccaccgccacactgacaattagagatgcccagaacgaggacgaggccgactactactgtcagagcacctacggcgacgacaagctgtacatctttggcggaggcaccaagctgacagtgcttggaggcggaggcggaagtggaggcggaggatctggcggcggaggctctgaagttcagctggttgaaacaggtggcggcctggtgcagcctggcaaatctctggaactgacctgcgccaccagcggcttcacctttaataccgcctggatgcactgggtccgacagagccccgataagcggctggaatggatcgccagaatcaaggacaccagcaacaactacgccaccgactacgtggaatccatgaagggcagattcaccatcagccgggacgacagcaagggctccgtgaacctccagatgaacagcctgaaagaagaggacaccgccacctactactgcaccaccgacttctacgacggcacctactattggaactactggggccagggcgtgatggtcacagtgtcatctctcgaggacctgaagaacgtgttcccacctgaggtggccgtgttcgagcctagcgaggccgagatcagccacacccagaaagccaccctcgtgtgcctggctaccggcttctaccccgaccatgtggaactgtcttggtgggtcaacggcaaagaggtgcacagcggcgtgtctaccgacccccagccactgaaagaacagcccgccctgaacgacagccggtactgcctgagcagcagactgagagtgtccgccaccttctggcagaacccccggaaccacttcagatgccaggtgcagttctacggcctgagcgagaacgacgagtggacccaggacagagccaagcccgtgacccagatcgtgtctgccgaagcctggggcagagccgattgcggctttaccagcgagagctaccagcagggcgtgctgagcgccaccatcctgtacgagatcctgctgggcaaggccaccctgtacgccgtgctggtgtctgccctggtgctgatggctatggtcaagcggaaggacagccggggaagggccaagcgatctggatctggagcaacaaacttctcactactcaaacaagcaggtgacgtggaggagaatcccgggcctactagaggccatatgaccgagtacaagcccacggtgcgcctcgccacccgcgacgacgtccccagggccgtacgcaccctcgccgccgcgttcgccgactaccccgccacgcgccacaccgtcgatccggaccgccacatcgagcgggtcaccgagctgcaagaactcttcctcacgcgcgtcgggctcgacatcggcaaggtgtgggtcgcggacgacggcgccgcggtggcggtctggaccacgccggagagcgtcgaagcgggggcggtgttcgccgagatcggcccgcgcatggccgagttgagcggttcccggctggccgcgcagcaacagatggaaggcctcctggcgccgcaccggcccaaggagcccgcgtggttcctggccaccgtcggcgtctcgcccgaccaccagggcaagggtctgggcagcgccgtcgtgctccccggagtggaggcggccgagcgcgccggggtgcccgccttcctggagacctccgcgccccgcaacctccccttctacgagcggctcggcttcaccgtcaccgccgacgtcgaggtgcccgaaggaccgcgcacctggtgcatgacccgcaagcccggtgcctga

SEQ ID NO: 9037 - DNA, 2184 bp, Artificial Sequence
  Synthetic Polynucloetide
atggccttaccagtgaccgccttgctcctgccgctggccttgctgctccacgccgccaggccgagctacgagctgatccagcctccttctgccgctgtgacactgggcaataccgtgtctctgacctgtgtgggagatgagctgcccaagagatacgcctactggtatcagcagaagcccgaccagagcatcgtgcgcgtgatctacgaagatagcgtgcggcctcctggcatcagcgatagattttctggcagcagcagcggcaccaccgccacactgacaattagagatgcccagaacgaggacgaggccgactactactgtcagagcacctacggcgacgacaagctgtacatctttggcggaggcaccaagctgacagtgcttggaggcggaggcggaagtggaggcggaggatctggcggcggaggctctgaagttcagctggttgaaacaggtggcggcctggtgcagcctggcaaatctctggaactgacctgcgccaccagcggcttcacctttaataccgcctggatgcactgggtccgacagagccccgataagcggctggaatggatcgccagaatcaaggacaccagcaacaactacgccaccgactacgtggaatccatgaagggcagattcaccatcagccgggacgacagcaagggctccgtgaacctccagatgaacagcctgaaagaagaggacaccgccacctactactgcaccaccgacttctacgacggcacctactattggaactactggggccagggcgtgatggtcacagtgtcatctacgcgtgagcagaaactgatctcggaagaggatctggggagcggcaccccattcccttctctggcccctcccatcatgctgctggtggacggcaagcagcagatggtggtcgtgtgcctggtgctggatgtggccccacctggactggacagccccatctggtttagcgccggcaatggctctgccctggacgcctttacctacggcccaagccctgccaccgatggcacctggacaaatctggcccacctgagcctgcccagcgaggaactggcttcttgggagcctctcgtgtgccacacaggacctggcgctgagggacacagcagatccacccagcctatgcacctgtctggcgaggccagcaccgccagaacctgtcctcaggaacctctgagaggcacccctggcggagcactgtggctgggagtgctgagactgctgctgttcaagctgctgctgtttgacctgctgctgacctgctcctgtctgtgcgatcctgccggccctctgccttctcctgccaccaccacaagactgagagccctgggcagccacagactgcaccctgccacagagacaggcggcagagaggccacaagcagccctagaccccagcccagagacagaagatggggcgataccccccctggcagaaagcctggatctccagtccgcgccaagagaagcggatctggcgtgaagcagaccctgaatttcgacctgctgaagctggctggcgacgtggaatccaacccaggcccttctagatctagaggccatatgaccgagtacaagcccacggtgcgcctcgccacccgcgacgacgtccccagggccgtacgcaccctcgccgccgcgttcgccgactaccccgccacgcgccacaccgtcgatccggaccgccacatcgagcgggtcaccgagctgcaagaactcttcctcacgcgcgtcgggctcgacatcggcaaggtgtgggtcgcggacgacggcgccgcggtggcggtctggaccacgccggagagcgtcgaagcgggggcggtgttcgccgagatcggcccgcgcatggccgagttgagcggttcccggctggccgcgcagcaacagatggaaggcctcctggcgccgcaccggcccaaggagcccgcgtggttcctggccaccgtcggcgtctcgcccgaccaccagggcaagggtctgggcagcgccgtcgtgctccccggagtggaggcggccgagcgcgccggggtgcccgccttcctggagacctccgcgccccgcaacctccccttctacgagcggctcggcttcaccgtcaccgccgacgtcgaggtgcccgaaggaccgcgcacctggtgcatgacccgcaagcccggtgcctga

SEQ ID NO: 9038 - DNA, 1623 bp, Artificial Sequence
  Synthetic Polynucloetide
atggccttaccagtgaccgccttgctcctgccgctggccttgctgctccacgccgccaggccgagctacgagctgatccagcctccttctgccgctgtgacactgggcaataccgtgtctctgacctgtgtgggagatgagctgcccaagagatacgcctactggtatcagcagaagcccgaccagagcatcgtgcgcgtgatctacgaagatagcgtgcggcctcctggcatcagcgatagattttctggcagcagcagcggcaccaccgccacactgacaattagagatgcccagaacgaggacgaggccgactactactgtcagagcacctacggcgacgacaagctgtacatctttggcggaggcaccaagctgacagtgcttggactcgaggacctgaagaacgtgttcccacctgaggtggccgtgttcgagcctagcgaggccgagatcagccacacccagaaagccaccctcgtgtgcctggctaccggcttctaccccgaccatgtggaactgtcttggtgggtcaacggcaaagaggtgcacagcggcgtgtctaccgacccccagccactgaaagaacagcccgccctgaacgacagccggtactgcctgagcagcagactgagagtgtccgccaccttctggcagaacccccggaaccacttcagatgccaggtgcagttctacggcctgagcgagaacgacgagtggacccaggacagagccaagcccgtgacccagatcgtgtctgccgaagcctggggcagagccgattgcggctttaccagcgagagctaccagcagggcgtgctgagcgccaccatcctgtacgagatcctgctgggcaaggccaccctgtacgccgtgctggtgtctgccctggtgctgatggctatggtcaagcggaaggacagccggggaagggccaagcgatctggatctggagcaacaaacttctcactactcaaacaagcaggtgacgtggaggagaatcccgggcctactagaggccatatgaccgagtacaagcccacggtgcgcctcgccacccgcgacgacgtccccagggccgtacgcaccctcgccgccgcgttcgccgactaccccgccacgcgccacaccgtcgatccggaccgccacatcgagcgggtcaccgagctgcaagaactcttcctcacgcgcgtcgggctcgacatcggcaaggtgtgggtcgcggacgacggcgccgcggtggcggtctggaccacgccggagagcgtcgaagcgggggcggtgttcgccgagatcggcccgcgcatggccgagttgagcggttcccggctggccgcgcagcaacagatggaaggcctcctggcgccgcaccggcccaaggagcccgcgtggttcctggccaccgtcggcgtctcgcccgaccaccagggcaagggtctgggcagcgccgtcgtgctccccggagtggaggcggccgagcgcgccggggtgcccgccttcctggagacctccgcgccccgcaacctccccttctacgagcggctcggcttcaccgtcaccgccgacgtcgaggtgcccgaaggaccgcgcacctggtgcatgacccgcaagcccggtgcctga

SEQ ID NO: 9039 - DNA, 930 bp, Artificial Sequence
  Synthetic Polynucloetide
atggccttaccagtgaccgccttgctcctgccgctggccttgctgctccacgccgccaggccgagctacgagctgatccagcctccttctgccgctgtgacactgggcaataccgtgtctctgacctgtgtgggagatgagctgcccaagagatacgcctactggtatcagcagaagcccgaccagagcatcgtgcgcgtgatctacgaagatagcgtgcggcctcctggcatcagcgatagattttctggcagcagcagcggcaccaccgccacactgacaattagagatgcccagaacgaggacgaggccgactactactgtcagagcacctacggcgacgacaagctgtacatctttggcggaggcaccaagctgacagtgcttggactcgaggacctgaagaacgtgttcccacctgaggtggccgtgttcgagcctagcgaggccgagatcagccacacccagaaagccaccctcgtgtgcctggctaccggcttctaccccgaccatgtggaactgtcttggtgggtcaacggcaaagaggtgcacagcggcgtgtctaccgacccccagccactgaaagaacagcccgccctgaacgacagccggtactgcctgagcagcagactgagagtgtccgccaccttctggcagaacccccggaaccacttcagatgccaggtgcagttctacggcctgagcgagaacgacgagtggacccaggacagagccaagcccgtgacccagatcgtgtctgccgaagcctggggcagagccgattgcggctttaccagcgagagctaccagcagggcgtgctgagcgccaccatcctgtacgagatcctgctgggcaaggccaccctgtacgccgtgctggtgtctgccctggtgctgatggctatggtcaagcggaaggacagccgggga

SEQ ID NO: 9040 - DNA, 1356 bp, Artificial Sequence
  Synthetic Polynucloetide
atggactggatttggcgcatccttttccttgtcggcgctgctaccggcgcgcattccttcgaagaagttcagctggttgaaacaggtggcggcctggtgcagcctggcaaatctctggaactgacctgcgccaccagcggcttcacctttaataccgcctggatgcactgggtccgacagagccccgataagcggctggaatggatcgccagaatcaaggacaccagcaacaactacgccaccgactacgtggaatccatgaagggcagattcaccatcagccgggacgacagcaagggctccgtgaacctccagatgaacagcctgaaagaagaggacaccgccacctactactgcaccaccgacttctacgacggcacctactattggaactactggggccagggcgtgatggtcacagtgtcatctacgcgtatccagaaccctgatcctgccgtgtaccagctgcgggatagcaagagcagcgacaagagcgtgtgtctgttcaccgacttcgacagccagaccaacgtgtcccagagcaaggactccgacgtgtacatcaccgataagaccgtgctggacatgcggagcatggacttcaagagcaactccgccgtggcctggtccaacaagtccgatttcgcctgcgccaacgccttcaacaacagcattatccccgaggacacattcttcccaagccccgagagcagctgcgacgtgaagctggtggaaaagagcttcgagacagacaccaacctgaacttccagaacctgagcgtgatcggcttcagaatcctgctgctgaaagtggccggctttaacctgctgatgaccctgcggctgtggtccagccgcgccaagagaagcggatctggcgtgaagcagaccctgaatttcgacctgctgaagctggctggcgacgtggaatccaacccaggcccttctagaggccatatggccaagcctttgtctcaagaagaatccaccctcattgaaagagcaacggctacaatcaacagcatccccatctctgaagactacagcgtcgccagcgcagctctctctagcgacggccgcatcttcactggtgtcaatgtatatcattttactgggggaccttgtgcagaactcgtggtgctgggcactgctgctgctgcggcagctggcaacctgacttgtatcgtcgcgatcggaaatgagaacaggggcatcttgagcccctgcggacggtgccgacaggtgcttctcgatctgcatcctgggatcaaagccatagtgaaggacagtgatggacagccgacggcagttgggattcgtgaattgctgccctctggttatgtgtgggagggctga

SEQ ID NO: 9041 - DNA, 855 bp, Artificial Sequence
  Synthetic Polynucloetide
atggactggatttggcgcatccttttccttgtcggcgctgctaccggcgcgcattccttcgaagaagttcagctggttgaaacaggtggcggcctggtgcagcctggcaaatctctggaactgacctgcgccaccagcggcttcacctttaataccgcctggatgcactgggtccgacagagccccgataagcggctggaatggatcgccagaatcaaggacaccagcaacaactacgccaccgactacgtggaatccatgaagggcagattcaccatcagccgggacgacagcaagggctccgtgaacctccagatgaacagcctgaaagaagaggacaccgccacctactactgcaccaccgacttctacgacggcacctactattggaactactggggccagggcgtgatggtcacagtgtcatctacgcgtatccagaaccctgatcctgccgtgtaccagctgcgggatagcaagagcagcgacaagagcgtgtgtctgttcaccgacttcgacagccagaccaacgtgtcccagagcaaggactccgacgtgtacatcaccgataagaccgtgctggacatgcggagcatggacttcaagagcaactccgccgtggcctggtccaacaagtccgatttcgcctgcgccaacgccttcaacaacagcattatccccgaggacacattcttcccaagccccgagagcagctgcgacgtgaagctggtggaaaagagcttcgagacagacaccaacctgaacttccagaacctgagcgtgatcggcttcagaatcctgctgctgaaagtggccggctttaacctgctgatgaccctgcggctgtggtccagc

SEQ ID NO: 9042 - DNA, 1677 bp, Artificial Sequence
  Synthetic Polynucloetide
atggccttaccagtgaccgccttgctcctgccgctggccttgctgctccacgccgccaggccgagctacgagctgatccagcctccttctgccgctgtgacactgggcaataccgtgtctctgacctgtgtgggagatgagctgcccaagagatacgcctactggtatcagcagaagcccgaccagagcatcgtgcgcgtgatctacgaagatagcgtgcggcctcctggcatcagcgatagattttctggcagcagcagcggcaccaccgccacactgacaattagagatgcccagaacgaggacgaggccgactactactgtcagagcacctacggcgacgacaagctgtacatctttggcggaggcaccaagctgacagtgcttggactcgaggggaaaccaattcccaaccctcttctgggactggattcaaccggcagcggcgaggacctgaagaacgtgttcccacctgaggtggccgtgttcgagcctagcgaggccgagatcagccacacccagaaagccaccctcgtgtgcctggctaccggcttctaccccgaccatgtggaactgtcttggtgggtcaacggcaaagaggtgcacagcggcgtgtgtaccgacccccagccactgaaagaacagcccgccctgaacgacagccggtactgcctgagcagcagactgagagtgtccgccaccttctggcagaacccccggaaccacttcagatgccaggtgcagttctacggcctgagcgagaacgacgagtggacccaggacagagccaagcccgtgacccagatcgtgtctgccgaagcctggggcagagccgattgcggctttaccagcgagagctaccagcagggcgtgctgagcgccaccatcctgtacgagatcctgctgggcaaggccaccctgtacgccgtgctggtgtctgccctggtgctgatggctatggtcaagcggaaggacagccggggaagggccaagcgatctggatctggagcaacaaacttctcactactcaaacaagcaggtgacgtggaggagaatcccgggcctactagaggccatatgaccgagtacaagcccacggtgcgcctcgccacccgcgacgacgtccccagggccgtacgcaccctcgccgccgcgttcgccgactaccccgccacgcgccacaccgtcgatccggaccgccacatcgagcgggtcaccgagctgcaagaactcttcctcacgcgcgtcgggctcgacatcggcaaggtgtgggtcgcggacgacggcgccgcggtggcggtctggaccacgccggagagcgtcgaagcgggggcggtgttcgccgagatcggcccgcgcatggccgagttgagcggttcccggctggccgcgcagcaacagatggaaggcctcctggcgccgcaccggcccaaggagcccgcgtggttcctggccaccgtcggcgtctcgcccgaccaccagggcaagggtctgggcagcgccgtcgtgctccccggagtggaggcggccgagcgcgccggggtgcccgccttcctggagacctccgcgccccgcaacctccccttctacgagcggctcggcttcaccgtcaccgccgacgtcgaggtgcccgaaggaccgcgcacctggtgcatgacccgcaagcccggtgcctga

SEQ ID NO: 9043 - DNA, 987 bp, Artificial Sequence
  Synthetic Polynucloetide
atggccttaccagtgaccgccttgctcctgccgctggccttgctgctccacgccgccaggccgagctacgagctgatccagcctccttctgccgctgtgacactgggcaataccgtgtctctgacctgtgtgggagatgagctgcccaagagatacgcctactggtatcagcagaagcccgaccagagcatcgtgcgcgtgatctacgaagatagcgtgcggcctcctggcatcagcgatagattttctggcagcagcagcggcaccaccgccacactgacaattagagatgcccagaacgaggacgaggccgactactactgtcagagcacctacggcgacgacaagctgtacatctttggcggaggcaccaagctgacagtgcttggactcgaggggaaaccaattcccaaccctcttctgggactggattcaaccggcagcggcgaggacctgaagaacgtgttcccacctgaggtggccgtgttcgagcctagcgaggccgagatcagccacacccagaaagccaccctcgtgtgcctggctaccggcttctaccccgaccatgtggaactgtcttggtgggtcaacggcaaagaggtgcacagcggcgtgtgtaccgacccccagccactgaaagaacagcccgccctgaacgacagccggtactgcctgagcagcagactgagagtgtccgccaccttctggcagaacccccggaaccacttcagatgccaggtgcagttctacggcctgagcgagaacgacgagtggacccaggacagagccaagcccgtgacccagatcgtgtctgccgaagcctggggcagagccgattgcggctttaccagcgagagctaccagcagggcgtgctgagcgccaccatcctgtacgagatcctgctgggcaaggccaccctgtacgccgtgctggtgtctgccctggtgctgatggctatggtcaagcggaaggacagccggggatga

SEQ ID NO: 9044 - DNA, 1392 bp, Artificial Sequence
  Synthetic Polynucloetide
atggactggatttggcgcatccttttccttgtcggcgctgctaccggcgcgcattccttcgaagaagttcagctggttgaaacaggtggcggcctggtgcagcctggcaaatctctggaactgacctgcgccaccagcggcttcacctttaataccgcctggatgcactgggtccgacagagccccgataagcggctggaatggatcgccagaatcaaggacaccagcaacaactacgccaccgactacgtggaatccatgaagggcagattcaccatcagccgggacgacagcaagggctccgtgaacctccagatgaacagcctgaaagaagaggacaccgccacctactactgcaccaccgacttctacgacggcacctactattggaactactggggccagggcgtgatggtcacagtgtcatctacgcgtgagcagaaactgatctcggaagaggatgggagcggcatccagaaccctgatcctgccgtgtaccagctgcgggatagcaagagcagcgacaagagcgtgtgtctgttcaccgacttcgacagccagaccaacgtgtcccagagcaaggactccgacgtgtacatcaccgataagtgcgtgctggacatgcggagcatggacttcaagagcaactccgccgtggcctggtccaacaagtccgatttcgcctgcgccaacgccttcaacaacagcattatccccgaggacacattcttcccaagccccgagagcagctgcgacgtgaagctggtggaaaagagcttcgagacagacaccaacctgaacttccagaacctgagcgtgatcggcttcagaatcctgctgctgaaagtggccggctttaacctgctgatgaccctgcggctgtggtccagccgcgccaagagaagcggatctggcgtgaagcagaccctgaatttcgacctgctgaagctggctggcgacgtggaatccaacccaggcccttctagaggccatatggccaagcctttgtctcaagaagaatccaccctcattgaaagagcaacggctacaatcaacagcatccccatctctgaagactacagcgtcgccagcgcagctctctctagcgacggccgcatcttcactggtgtcaatgtatatcattttactgggggaccttgtgcagaactcgtggtgctgggcactgctgctgctgcggcagctggcaacctgacttgtatcgtcgcgatcggaaatgagaacaggggcatcttgagcccctgcggacggtgccgacaggtgcttctcgatctgcatcctgggatcaaagccatagtgaaggacagtgatggacagccgacggcagttgggattcgtgaattgctgccctctggttatgtgtgggagggctga

SEQ ID NO: 9045 - DNA, 894 bp, Artificial Sequence
  Synthetic Polynucloetide
atggactggatttggcgcatccttttccttgtcggcgctgctaccggcgcgcattccttcgaagaagttcagctggttgaaacaggtggcggcctggtgcagcctggcaaatctctggaactgacctgcgccaccagcggcttcacctttaataccgcctggatgcactgggtccgacagagccccgataagcggctggaatggatcgccagaatcaaggacaccagcaacaactacgccaccgactacgtggaatccatgaagggcagattcaccatcagccgggacgacagcaagggctccgtgaacctccagatgaacagcctgaaagaagaggacaccgccacctactactgcaccaccgacttctacgacggcacctactattggaactactggggccagggcgtgatggtcacagtgtcatctacgcgtgagcagaaactgatctcggaagaggatgggagcggcatccagaaccctgatcctgccgtgtaccagctgcgggatagcaagagcagcgacaagagcgtgtgtctgttcaccgacttcgacagccagaccaacgtgtcccagagcaaggactccgacgtgtacatcaccgataagtgcgtgctggacatgcggagcatggacttcaagagcaactccgccgtggcctggtccaacaagtccgatttcgcctgcgccaacgccttcaacaacagcattatccccgaggacacattcttcccaagccccgagagcagctgcgacgtgaagctggtggaaaagagcttcgagacagacaccaacctgaacttccagaacctgagcgtgatcggcttcagaatcctgctgctgaaagtggccggctttaacctgctgatgaccctgcggctgtggtccagctga

SEQ ID NO: 9046 - DNA, 1938 bp, Artificial Sequence
  Synthetic Polynucloetide
atggccttaccagtgaccgccttgctcctgccgctggccttgctgctccacgccgccaggccgagctacgagctgatccagcctccttctgccgctgtgacactgggcaataccgtgtctctgacctgtgtgggagatgagctgcccaagagatacgcctactggtatcagcagaagcccgaccagagcatcgtgcgcgtgatctacgaagatagcgtgcggcctcctggcatcagcgatagattttctggcagcagcagcggcaccaccgccacactgacaattagagatgcccagaacgaggacgaggccgactactactgtcagagcacctacggcgacgacaagctgtacatctttggcggaggcaccaagctgacagtgcttggaggcggaggcggaagtggaggcggaggatctggcggcggaggctctgaagttcagctggttgaaacaggtggcggcctggtgcagcctggcaaatctctggaactgacctgcgccaccagcggcttcacctttaataccgcctggatgcactgggtccgacagagccccgataagcggctggaatggatcgccagaatcaaggacaccagcaacaactacgccaccgactacgtggaatccatgaagggcagattcaccatcagccgggacgacagcaagggctccgtgaacctccagatgaacagcctgaaagaagaggacaccgccacctactactgcaccaccgacttctacgacggcacctactattggaactactggggccagggcgtgatggtcacagtgtcatctacgcgtgggagcggcatccagaaccctgatcctgccgtgtaccagctgcgggatagcaagagcagcgacaagagcgtgtgtctgttcaccgacttcgacagccagaccaacgtgtcccagagcaaggactccgacgtgtacatcaccgataagaccgtgctggacatgcggagcatggacttcaagagcaactccgccgtggcctggtccaacaagtccgatttcgcctgcgccaacgccttcaacaacagcattatccccgaggacacattcttcccaagcagcgacgtgccctgcgacgtgaagctggtggaaaagagcttcgagacagacaccaacctgaacttccagaacctgagcgtgatcggcttcagaatcctgctgctgaaagtggccggctttaacctgctgatgaccctgcggctgtggtccagccgcgccaagagaagcggatctggcgtgaagcagaccctgaatttcgacctgctgaagctggctggcgacgtggaatccaacccaggcccttctagaggccatatgaccgagtacaagcccacggtgcgcctcgccacccgcgacgacgtccccagggccgtacgcaccctcgccgccgcgttcgccgactaccccgccacgcgccacaccgtcgatccggaccgccacatcgagcgggtcaccgagctgcaagaactcttcctcacgcgcgtcgggctcgacatcggcaaggtgtgggtcgcggacgacggcgccgcggtggcggtctggaccacgccggagagcgtcgaagcgggggcggtgttcgccgagatcggcccgcgcatggccgagttgagcggttcccggctggccgcgcagcaacagatggaaggcctcctggcgccgcaccggcccaaggagcccgcgtggttcctggccaccgtcggcgtctcgcccgaccaccagggcaagggtctgggcagcgccgtcgtgctccccggagtggaggcggccgagcgcgccggggtgcccgccttcctggagacctccgcgccccgcaacctccccttctacgagcggctcggcttcaccgtcaccgccgacgtcgaggtgcccgaaggaccgcgcacctggtgcatgacccgcaagcccggtgcctga

SEQ ID NO: 9047 - DNA, 2034 bp, Artificial Sequence
  Synthetic Polynucloetide
atggccttaccagtgaccgccttgctcctgccgctggccttgctgctccacgccgccaggccgagctacgagctgatccagcctccttctgccgctgtgacactgggcaataccgtgtctctgacctgtgtgggagatgagctgcccaagagatacgcctactggtatcagcagaagcccgaccagagcatcgtgcgcgtgatctacgaagatagcgtgcggcctcctggcatcagcgatagattttctggcagcagcagcggcaccaccgccacactgacaattagagatgcccagaacgaggacgaggccgactactactgtcagagcacctacggcgacgacaagctgtacatctttggcggaggcaccaagctgacagtgcttggaggcggaggcggaagtggaggcggaggatctggcggcggaggctctgaagttcagctggttgaaacaggtggcggcctggtgcagcctggcaaatctctggaactgacctgcgccaccagcggcttcacctttaataccgcctggatgcactgggtccgacagagccccgataagcggctggaatggatcgccagaatcaaggacaccagcaacaactacgccaccgactacgtggaatccatgaagggcagattcaccatcagccgggacgacagcaagggctccgtgaacctccagatgaacagcctgaaagaagaggacaccgccacctactactgcaccaccgacttctacgacggcacctactattggaactactggggccagggcgtgatggtcacagtgtcatctctcgaggacctgaagaacgtgttcccacctgaggtggccgtgttcgagcctagcaaggccgagatcgcccacacccagaaagccaccctcgtgtgcctggctaccggcttctaccccgaccatgtggaactgtcttggtgggtcaacggcaaagaggtgcacagcggcgtgtctaccgacccccagccactgaaagaacagcccgccctgaacgacagccggtactgcctgagcagcagactgagagtgtccgccaccttctggcagaacccccggaaccacttcagatgccaggtgcagttctacggcctgagcgagaacgacgagtggacccaggacagagccaagcccgtgacccagatcgtgtctgccgaagcctggggcagagccgattgcggcatcaccagcgccagctaccaccagggcgtgctgagcgccaccatcctgtacgagatcctgctgggcaaggccaccctgtacgccgtgctggtgtctgccctggtgctgatggctatggtcaagcggaaggacagccggggaagggccaagcgatctggatctggagcaacaaacttctcactactcaaacaagcaggtgacgtggaggagaatcccgggcctactagaggccatatgaccgagtacaagcccacggtgcgcctcgccacccgcgacgacgtccccagggccgtacgcaccctcgccgccgcgttcgccgactaccccgccacgcgccacaccgtcgatccggaccgccacatcgagcgggtcaccgagctgcaagaactcttcctcacgcgcgtcgggctcgacatcggcaaggtgtgggtcgcggacgacggcgccgcggtggcggtctggaccacgccggagagcgtcgaagcgggggcggtgttcgccgagatcggcccgcgcatggccgagttgagcggttcccggctggccgcgcagcaacagatggaaggcctcctggcgccgcaccggcccaaggagcccgcgtggttcctggccaccgtcggcgtctcgcccgaccaccagggcaagggtctgggcagcgccgtcgtgctccccggagtggaggcggccgagcgcgccggggtgcccgccttcctggagacctccgcgccccgcaacctccccttctacgagcggctcggcttcaccgtcaccgccgacgtcgaggtgcccgaaggaccgcgcacctggtgcatgacccgcaagcccggtgcctga

SEQ ID NO: 9048 - DNA, 2103 bp, Artificial Sequence
  Synthetic Polynucloetide
atggccttaccagtgaccgccttgctcctgccgctggccttgctgctccacgccgccaggccgagctacgagctgatccagcctccttctgccgctgtgacactgggcaataccgtgtctctgacctgtgtgggagatgagctgcccaagagatacgcctactggtatcagcagaagcccgaccagagcatcgtgcgcgtgatctacgaagatagcgtgcggcctcctggcatcagcgatagattttctggcagcagcagcggcaccaccgccacactgacaattagagatgcccagaacgaggacgaggccgactactactgtcagagcacctacggcgacgacaagctgtacatctttggcggaggcaccaagctgacagtgcttggaggcggaggcggaagtggaggcggaggatctggcggcggaggctctgaagttcagctggttgaaacaggtggcggcctggtgcagcctggcaaatctctggaactgacctgcgccaccagcggcttcacctttaataccgcctggatgcactgggtccgacagagccccgataagcggctggaatggatcgccagaatcaaggacaccagcaacaactacgccaccgactacgtggaatccatgaagggcagattcaccatcagccgggacgacagcaagggctccgtgaacctccagatgaacagcctgaaagaagaggacaccgccacctactactgcaccaccgacttctacgacggcacctactattggaactactggggccagggcgtgatggtcacagtgtcatctacgcgtgggtctggaggcggaggcagcggcggaggcgggagcggcgacggtaacgaggagatgggaggaatcactcaaaccccttacaaagtctcaatttcaggaacaactgttatccttacatgtccccagtatcctggcagcgagatcctttggcagcataacgacaagaatatagggggagatgaagacgataagaatatcggatctgacgaggatcacttgagcctgaaagagttctccgagcttgaacaaagcggatattatgtgtgctatccgcgcgggtcaaagccggaagacgctaacttttacctttatctccgagccagagtgtgcgaaaattgcatggaaatggacgttatgtccgttgctacaatagttatcgtagatatatgcatcacgggtggactgcttctgctggtttattattggtccaagaatagaaaggccaaagctaaacccgtgaccagaggcgctggcgcaggcggaaggcaaaggggacaaaacaaagaacggccaccaccagtgccaaatccagattatgagcctattcggaaaggacagagggacctgtactctggcctgaatcagagaagaatccgcgccaagagaagcggatctggcgtgaagcagaccctgaatttcgacctgctgaagctggctggcgacgtggaatccaacccaggcccttctagaggccatatgaccgagtacaagcccacggtgcgcctcgccacccgcgacgacgtccccagggccgtacgcaccctcgccgccgcgttcgccgactaccccgccacgcgccacaccgtcgatccggaccgccacatcgagcgggtcaccgagctgcaagaactcttcctcacgcgcgtcgggctcgacatcggcaaggtgtgggtcgcggacgacggcgccgcggtggcggtctggaccacgccggagagcgtcgaagcgggggcggtgttcgccgagatcggcccgcgcatggccgagttgagcggttcccggctggccgcgcagcaacagatggaaggcctcctggcgccgcaccggcccaaggagcccgcgtggttcctggccaccgtcggcgtctcgcccgaccaccagggcaagggtctgggcagcgccgtcgtgctccccggagtggaggcggccgagcgcgccggggtgcccgccttcctggagacctccgcgccccgcaacctccccttctacgagcggctcggcttcaccgtcaccgccgacgtcgaggtgcccgaaggaccgcgcacctggtgcatgacccgcaagcccggtgcctga

SEQ ID NO: 9049 - DNA, 1998 bp, Artificial Sequence
  Synthetic Polynucloetide
atggccttaccagtgaccgccttgctcctgccgctggccttgctgctccacgccgccaggccgagctacgagctgatccagcctccttctgccgctgtgacactgggcaataccgtgtctctgacctgtgtgggagatgagctgcccaagagatacgcctactggtatcagcagaagcccgaccagagcatcgtgcgcgtgatctacgaagatagcgtgcggcctcctggcatcagcgatagattttctggcagcagcagcggcaccaccgccacactgacaattagagatgcccagaacgaggacgaggccgactactactgtcagagcacctacggcgacgacaagctgtacatctttggcggaggcaccaagctgacagtgcttggaggcggaggcggaagtggaggcggaggatctggcggcggaggctctgaagttcagctggttgaaacaggtggcggcctggtgcagcctggcaaatctctggaactgacctgcgccaccagcggcttcacctttaataccgcctggatgcactgggtccgacagagccccgataagcggctggaatggatcgccagaatcaaggacaccagcaacaactacgccaccgactacgtggaatccatgaagggcagattcaccatcagccgggacgacagcaagggctccgtgaacctccagatgaacagcctgaaagaagaggacaccgccacctactactgcaccaccgacttctacgacggcacctactattggaactactggggccagggcgtgatggtcacagtgtcatctacgcgtgggtctggaggcggaggcagcggcggaggcgggagcggcttcaagatccccatcgaggaactggaagatcgggtgttcgtgaactgcaacacctctatcacctgggtggaaggcaccgtgggaacactgctgagcgacatcaccagactggacctcggcaagcggattctggaccctcggggcatctacagatgcaacggcaccgacatctacaaggacaaagaaagcaccgtgcaggtccactacagaatgtgccagtcctgcgtggaactggaccctgctacagtggccggcatcatcgtgaccgatgtgatcgctactctgctgctggctctgggagtgttctgcttcgccggacacgaaacaggcagactgtctggcgctgccgatacacaggccctgctgagaaacgaccaagtgtatcagcccctgcgcgacagagatgatgcccagtattctcacctcggcggcaactgggctagaaacaagcgcgccaagagaagcggatctggcgtgaagcagaccctgaatttcgacctgctgaagctggctggcgacgtggaatccaacccaggcccttctagaggccatatgaccgagtacaagcccacggtgcgcctcgccacccgcgacgacgtccccagggccgtacgcaccctcgccgccgcgttcgccgactaccccgccacgcgccacaccgtcgatccggaccgccacatcgagcgggtcaccgagctgcaagaactcttcctcacgcgcgtcgggctcgacatcggcaaggtgtgggtcgcggacgacggcgccgcggtggcggtctggaccacgccggagagcgtcgaagcgggggcggtgttcgccgagatcggcccgcgcatggccgagttgagcggttcccggctggccgcgcagcaacagatggaaggcctcctggcgccgcaccggcccaaggagcccgcgtggttcctggccaccgtcggcgtctcgcccgaccaccagggcaagggtctgggcagcgccgtcgtgctccccggagtggaggcggccgagcgcgccggggtgcccgccttcctggagacctccgcgccccgcaacctccccttctacgagcggctcggcttcaccgtcaccgccgacgtcgaggtgcccgaaggaccgcgcacctggtgcatgacccgcaagcccggtgcctga

SEQ ID NO: 9050 - DNA, 2028 bp, Artificial Sequence
  Synthetic Polynucloetide
atggccttaccagtgaccgccttgctcctgccgctggccttgctgctccacgccgccaggccgagctacgagctgatccagcctccttctgccgctgtgacactgggcaataccgtgtctctgacctgtgtgggagatgagctgcccaagagatacgcctactggtatcagcagaagcccgaccagagcatcgtgcgcgtgatctacgaagatagcgtgcggcctcctggcatcagcgatagattttctggcagcagcagcggcaccaccgccacactgacaattagagatgcccagaacgaggacgaggccgactactactgtcagagcacctacggcgacgacaagctgtacatctttggcggaggcaccaagctgacagtgcttggaggcggaggcggaagtggaggcggaggatctggcggcggaggctctgaagttcagctggttgaaacaggtggcggcctggtgcagcctggcaaatctctggaactgacctgcgccaccagcggcttcacctttaataccgcctggatgcactgggtccgacagagccccgataagcggctggaatggatcgccagaatcaaggacaccagcaacaactacgccaccgactacgtggaatccatgaagggcagattcaccatcagccgggacgacagcaagggctccgtgaacctccagatgaacagcctgaaagaagaggacaccgccacctactactgcaccaccgacttctacgacggcacctactattggaactactggggccagggcgtgatggtcacagtgtcatctacgcgtgggtctggaggcggaggcagcggcggaggcgggagcggccagagcatcaagggcaaccacctggtcaaggtgtacgactaccaagaggacggcagcgtgctgctgacatgtgatgccgaggccaagaacatcacctggtttaaggacggcaagatgatcggcttcctgaccgaggacaagaagaagtggaacctgggcagcaacgctaaggaccccagaggcatgtatcagtgcaagggcagccagaacaagagcaagcccctccaggtgtactaccggatgtgccagaactgcatcgagctgaacgccgctaccatcagcggctttctgttcgccgagatcgtgtccatcttcgtgctggccgtgggcgtgtactttatcgctggacaggatggcgtgcggcagagcagagcttccgataagcaaaccctgctgcctaacgaccagctgtaccagcctctgaaggacagagaggacgaccagtacagccacctccagggcaatcagctgagaagaaaccgcgccaagagaagcggatctggcgtgaagcagaccctgaatttcgacctgctgaagctggctggcgacgtggaatccaacccaggcccttctagaggccatatgaccgagtacaagcccacggtgcgcctcgccacccgcgacgacgtccccagggccgtacgcaccctcgccgccgcgttcgccgactaccccgccacgcgccacaccgtcgatccggaccgccacatcgagcgggtcaccgagctgcaagaactcttcctcacgcgcgtcgggctcgacatcggcaaggtgtgggtcgcggacgacggcgccgcggtggcggtctggaccacgccggagagcgtcgaagcgggggcggtgttcgccgagatcggcccgcgcatggccgagttgagcggttcccggctggccgcgcagcaacagatggaaggcctcctggcgccgcaccggcccaaggagcccgcgtggttcctggccaccgtcggcgtctcgcccgaccaccagggcaagggtctgggcagcgccgtcgtgctccccggagtggaggcggccgagcgcgccggggtgcccgccttcctggagacctccgcgccccgcaacctccccttctacgagcggctcggcttcaccgtcaccgccgacgtcgaggtgcccgaaggaccgcgcacctggtgcatgacccgcaagcccggtgcctga

SEQ ID NO: 9051 - DNA, 1977 bp, Artificial Sequence
  Synthetic Polynucloetide
atggccttaccagtgaccgccttgctcctgccgctggccttgctgctccacgccgccaggccgagctacgagctgatccagcctccttctgccgctgtgacactgggcaataccgtgtctctgacctgtgtgggagatgagctgcccaagagatacgcctactggtatcagcagaagcccgaccagagcatcgtgcgcgtgatctacgaagatagcgtgcggcctcctggcatcagcgatagattttctggcagcagcagcggcaccaccgccacactgacaattagagatgcccagaacgaggacgaggccgactactactgtcagagcacctacggcgacgacaagctgtacatctttggcggaggcaccaagctgacagtgcttggaggcggaggcggaagtggaggcggaggatctggcggcggaggctctgaagttcagctggttgaaacaggtggcggcctggtgcagcctggcaaatctctggaactgacctgcgccaccagcggcttcacctttaataccgcctggatgcactgggtccgacagagccccgataagcggctggaatggatcgccagaatcaaggacaccagcaacaactacgccaccgactacgtggaatccatgaagggcagattcaccatcagccgggacgacagcaagggctccgtgaacctccagatgaacagcctgaaagaagaggacaccgccacctactactgcaccaccgacttctacgacggcacctactattggaactactggggccagggcgtgatggtcacagtgtcatctacgcgtgggtctggaggcggaggcagcggcggaggcgggagcggccagagttttgggttgttggaccctaaattgtgctatctgttggacggaatcctgttcatttacggagtgatcctgaccgcattgttcctgcgggttaagttttccagatccgcagacgcacccgcttaccaacaagggcagaaccaactctacaatgaacttaatttggggcggagggaagagtacgacgttctggacaaaaggaggggacgagatcccgagatgggcggaaagcctcagcgaaggaagaatccgcaagaggggctttataacgaactccagaaagataaaatggcagaagcctatagtgagattgggatgaagggagaaaggaggaggggtaaaggtcacgatgggttgtaccaaggattgagcacagccactaaagatacctatgatgcgctccacatgcaggccctgccgccaagacgcgccaagagaagcggatctggcgtgaagcagaccctgaatttcgacctgctgaagctggctggcgacgtggaatccaacccaggcccttctagaggccatatgaccgagtacaagcccacggtgcgcctcgccacccgcgacgacgtccccagggccgtacgcaccctcgccgccgcgttcgccgactaccccgccacgcgccacaccgtcgatccggaccgccacatcgagcgggtcaccgagctgcaagaactcttcctcacgcgcgtcgggctcgacatcggcaaggtgtgggtcgcggacgacggcgccgcggtggcggtctggaccacgccggagagcgtcgaagcgggggcggtgttcgccgagatcggcccgcgcatggccgagttgagcggttcccggctggccgcgcagcaacagatggaaggcctcctggcgccgcaccggcccaaggagcccgcgtggttcctggccaccgtcggcgtctcgcccgaccaccagggcaagggtctgggcagcgccgtcgtgctccccggagtggaggcggccgagcgcgccggggtgcccgccttcctggagacctccgcgccccgcaacctccccttctacgagcggctcggcttcaccgtcaccgccgacgtcgaggtgcccgaaggaccgcgcacctggtgcatgacccgcaagcccggtgcctga

SEQ ID NO: 9052 - DNA, 2277 bp, Artificial Sequence
  Synthetic Polynucloetide
atggccttaccagtgaccgccttgctcctgccgctggccttgctgctccacgccgccaggccggaagtgcagctggttgaatctggcggaggactggttcagcctggcggatctctgagactgtcttgtgccgccagcggcttcagcttcagcgacttttggatgagctgggtccgacaggcccctggcaaaggacttgaatgggtcgccacaatcagccaggccggcagcgagaaggactacgtggactctgtgaagggcagattcaccatcagccgggacaacgccaagaagtccctgtacctccagatgaacagcctgagagccgaggacaccgccgtgtactattgtgcctctggcgtgtacagcttcgactacagaggccagggcaccctggtcacagtctcttctggtaccggcggaggcggatctggcggcggaggtagcggtggcggaggatctgaattcagctacgagctgatccagcctccttctgccgctgtgacactgggcaataccgtgtctctgacctgtgtgggagatgagctgcccaagagatacgcctactggtatcagcagaagcccgaccagagcatcgtgcgcgtgatctacgaagatagcgtgcggcctcctggcatcagcgatagattttctggcagcagcagcggcaccaccgccacactgacaattagagatgcccagaacgaggacgaggccgactactactgtcagagcacctacggcgacgacaagctgtacatctttggcggaggcaccaagctgacagtgcttggactcgaggacctgaagaacgtgttcccacctgaggtggccgtgttcgagcctagcgaggccgagatcagccacacccagaaagccaccctcgtgtgcctggctaccggcttctaccccgaccatgtggaactgtcttggtgggtcaacggcaaagaggtgcacagcggcgtgtgtaccgacccccagccactgaaagaacagcccgccctgaacgacagccggtactgcctgagcagcagactgagagtgtccgccaccttctggcagaacccccggaaccacttcagatgccaggtgcagttctacggcctgagcgagaacgacgagtggacccaggacagagccaagcccgtgacccagatcgtgtctgccgaagcctggggcagagccgattgcggctttaccagcgagagctaccagcagggcgtgctgagcgccaccatcctgtacgagatcctgctgggcaaggccaccctgtacgccgtgctggtgtctgccctggtgctgatggctatggtcaagcggaaggacagccggggaagggccaagcgatctggatctggagcaacaaacttctcactactcaaacaagcaggtgacgtggaggagaatcccgggcctactagtatggactggatttggcgcatccttttccttgtcggcgctgctaccggcgcgcattccttcgaagaagttcagctggttgaaacaggtggcggcctggtgcagcctggcaaatctctggaactgacctgcgccaccagcggcttcacctttaataccgcctggatgcactgggtccgacagagccccgataagcggctggaatggatcgccagaatcaaggacaccagcaacaactacgccaccgactacgtggaatccatgaagggcagattcaccatcagccgggacgacagcaagggctccgtgaacctccagatgaacagcctgaaagaagaggacaccgccacctactactgcaccaccgacttctacgacggcacctactattggaactactggggccagggcgtgatggtcacagtgtcatctacgcgtatccagaaccctgatcctgccgtgtaccagctgcgggatagcaagagcagcgacaagagcgtgtgtctgttcaccgacttcgacagccagaccaacgtgtcccagagcaaggactccgacgtgtacatcaccgataagtgcgtgctggacatgcggagcatggacttcaagagcaactccgccgtggcctggtccaacaagtccgatttcgcctgcgccaacgccttcaacaacagcattatccccgaggacacattcttcccaagccccgagagcagctgcgacgtgaagctggtggaaaagagcttcgagacagacaccaacctgaacttccagaacctgagcgtgatcggcttcagaatcctgctgctgaaagtggccggctttaacctgctgatgaccctgcggctgtggtccagc

SEQ ID NO: 9053 - DNA, 2289 bp, Artificial Sequence
  Synthetic Polynucloetide
atggccttaccagtgaccgccttgctcctgccgctggccttgctgctccacgccgccaggccggaagtgcagctggttgaatctggcggaggactggttcagcctggcggatctctgagactgtcttgtgccgccagcggcttcagcttcagcgacttttggatgagctgggtccgacaggcccctggcaaaggacttgaatgggtcgccacaatcagccaggccggcagcgagaaggactacgtggactctgtgaagggcagattcaccatcagccgggacaacgccaagaagtccctgtacctccagatgaacagcctgagagccgaggacaccgccgtgtactattgtgcctctggcgtgtacagcttcgactacagaggccagggcaccctggtcacagtctcttctggtaccggcggaggcggatctggcggcggaggtagcggtggcggaggatctgaattcagctacgagctgatccagcctccttctgccgctgtgacactgggcaataccgtgtctctgacctgtgtgggagatgagctgcccaagagatacgcctactggtatcagcagaagcccgaccagagcatcgtgcgcgtgatctacgaagatagcgtgcggcctcctggcatcagcgatagattttctggcagcagcagcggcaccaccgccacactgacaattagagatgcccagaacgaggacgaggccgactactactgtcagagcacctacggcgacgacaagctgtacatctttggcggaggcaccaagctgacagtgcttggactcgagatccagaaccctgatcctgccgtgtaccagctgcgggatagcaagagcagcgacaagagcgtgtgtctgttcaccgacttcgacagccagaccaacgtgtcccagagcaaggactccgacgtgtacatcaccgataagtgcgtgctggacatgcggagcatggacttcaagagcaactccgccgtggcctggtccaacaagtccgatttcgcctgcgccaacgccttcaacaacagcattatccccgaggacacattcttcccaagccccgagagcagctgcgacgtgaagctggtggaaaagagcttcgagacagacaccaacctgaacttccagaacctgagcgtgatcggcttcagaatcctgctgctgaaagtggccggctttaacctgctgatgaccctgcggctgtggtccagccgcgccaagagaagcggatctggcgtgaagcagaccctgaatttcgacctgctgaagctggctggcgacgtggaatccaacccaggccctactagtatggactggatttggcgcatccttttccttgtcggcgctgctaccggcgcgcattccttcgaagaagttcagctggttgaaacaggtggcggcctggtgcagcctggcaaatctctggaactgacctgcgccaccagcggcttcacctttaataccgcctggatgcactgggtccgacagagccccgataagcggctggaatggatcgccagaatcaaggacaccagcaacaactacgccaccgactacgtggaatccatgaagggcagattcaccatcagccgggacgacagcaagggctccgtgaacctccagatgaacagcctgaaagaagaggacaccgccacctactactgcaccaccgacttctacgacggcacctactattggaactactggggccagggcgtgatggtcacagtgtcatctacgcgtgaggacctgaagaacgtgttcccacctgaggtggccgtgttcgagcctagcgaggccgagatcagccacacccagaaagccaccctcgtgtgcctggctaccggcttctaccccgaccatgtggaactgtcttggtgggtcaacggcaaagaggtgcacagcggcgtgtgtaccgacccccagccactgaaagaacagcccgccctgaacgacagccggtactgcctgagcagcagactgagagtgtccgccaccttctggcagaacccccggaaccacttcagatgccaggtgcagttctacggcctgagcgagaacgacgagtggacccaggacagagccaagcccgtgacccagatcgtgtctgccgaagcctggggcagagccgattgcggctttaccagcgagagctaccagcagggcgtgctgagcgccaccatcctgtacgagatcctgctgggcaaggccaccctgtacgccgtgctggtgtctgccctggtgctgatggctatggtcaagcggaaggacagccgggga

SEQ ID NO: 9054 - DNA, 2865 bp, Artificial Sequence
  Synthetic Polynucloetide
atggccttaccagtgaccgccttgctcctgccgctggccttgctgctccacgccgccaggccggaagtgcagctggttgaatctggcggaggactggttcagcctggcggatctctgagactgtcttgtgccgccagcggcttcagcttcagcgacttttggatgagctgggtccgacaggcccctggcaaaggacttgaatgggtcgccacaatcagccaggccggcagcgagaaggactacgtggactctgtgaagggcagattcaccatcagccgggacaacgccaagaagtccctgtacctccagatgaacagcctgagagccgaggacaccgccgtgtactattgtgcctctggcgtgtacagcttcgactacagaggccagggcaccctggtcacagtctcttctggtaccggcggaggcggatctggcggcggaggtagcggtggcggaggatctgaattcagctacgagctgatccagcctccttctgccgctgtgacactgggcaataccgtgtctctgacctgtgtgggagatgagctgcccaagagatacgcctactggtatcagcagaagcccgaccagagcatcgtgcgcgtgatctacgaagatagcgtgcggcctcctggcatcagcgatagattttctggcagcagcagcggcaccaccgccacactgacaattagagatgcccagaacgaggacgaggccgactactactgtcagagcacctacggcgacgacaagctgtacatctttggcggaggcaccaagctgacagtgcttggactcgaggacctgaagaacgtgttcccacctgaggtggccgtgttcgagcctagcgaggccgagatcagccacacccagaaagccaccctcgtgtgcctggctaccggcttctaccccgaccatgtggaactgtcttggtgggtcaacggcaaagaggtgcacagcggcgtgtctaccgacccccagccactgaaagaacagcccgccctgaacgacagccggtactgcctgagcagcagactgagagtgtccgccaccttctggcagaacccccggaaccacttcagatgccaggtgcagttctacggcctgagcgagaacgacgagtggacccaggacagagccaagcccgtgacccagatcgtgtctgccgaagcctggggcagagccgattgcggatcccagagcttcggcctgctggaccccaagctgtgctacctgctggatggcatcctgttcatctacggcgtgatcctgaccgccctgttcctgagagtgaagttcagcagaagcgccgacgcccctgcctaccagcagggacagaaccaactgtacaacgagctgaacctgggcagacgggaagagtacgacgtgctggacaagcggagaggcagggaccctgagatgggcggaaagccccagcggagaaagaacccccaggaaggactgtataacgaactccagaaagacaagatggccgaagcctacagcgagatcggcatgaagggcgagcggagaagaggcaagggccacgatggcctgtaccagggcctgagcaccgccaccaaggacacctatgacgccctgcacatgcaggccctgcctccaagaagggccaagcgatctggatctggagcaacaaacttctcactactcaaacaagcaggtgacgtggaggagaatcccgggcctactagtatggactggatttggcgcatccttttccttgtcggcgctgctaccggcgcgcattccttcgaagaagttcagctggttgaaacaggtggcggcctggtgcagcctggcaaatctctggaactgacctgcgccaccagcggcttcacctttaataccgcctggatgcactgggtccgacagagccccgataagcggctggaatggatcgccagaatcaaggacaccagcaacaactacgccaccgactacgtggaatccatgaagggcagattcaccatcagccgggacgacagcaagggctccgtgaacctccagatgaacagcctgaaagaagaggacaccgccacctactactgcaccaccgacttctacgacggcacctactattggaactactggggccagggcgtgatggtcacagtgtcatctacgcgtatccagaaccctgatcctgccgtgtaccagctgcgggatagcaagagcagcgacaagagcgtgtgtctgttcaccgacttcgacagccagaccaacgtgtcccagagcaaggactccgacgtgtacatcaccgataagaccgtgctggacatgcggagcatggacttcaagagcaactccgccgtggcctggtccaacaagtccgatttcgcctgcgccaacgccttcaacaacagcattatccccgaggacacattcttcccaagccccgagagcagctgcggtacccagagttttgggttgttggaccctaaattgtgctatctgttggacggaatcctgttcatttacggagtgatcctgaccgcattgttcctgcgggttaagttttccagatccgcagacgcacccgcttaccaacaagggcagaaccaactctacaatgaacttaatttggggcggagggaagagtacgacgttctggacaaaaggaggggacgagatcccgagatgggcggaaagcctcagcgaaggaagaatccgcaagaggggctttataacgaactccagaaagataaaatggcagaagcctatagtgagattgggatgaagggagaaaggaggaggggtaaaggtcacgatgggttgtaccaaggattgagcacagccactaaagatacctatgatgcgctccacatgcaggccctgccgccaaga

SEQ ID NO: 9055 - DNA, 2355 bp, Artificial Sequence
  Synthetic Polynucloetide
atggccttaccagtgaccgccttgctcctgccgctggccttgctgctccacgccgccaggccggaagtgcagctggttgaatctggcggaggactggttcagcctggcggatctctgagactgtcttgtgccgccagcggcttcagcttcagcgacttttggatgagctgggtccgacaggcccctggcaaaggacttgaatgggtcgccacaatcagccaggccggcagcgagaaggactacgtggactctgtgaagggcagattcaccatcagccgggacaacgccaagaagtccctgtacctccagatgaacagcctgagagccgaggacaccgccgtgtactattgtgcctctggcgtgtacagcttcgactacagaggccagggcaccctggtcacagtctcttctggtaccggcggaggcggatctggcggcggaggtagcggtggcggaggatctgaattcagctacgagctgatccagcctccttctgccgctgtgacactgggcaataccgtgtctctgacctgtgtgggagatgagctgcccaagagatacgcctactggtatcagcagaagcccgaccagagcatcgtgcgcgtgatctacgaagatagcgtgcggcctcctggcatcagcgatagattttctggcagcagcagcggcaccaccgccacactgacaattagagatgcccagaacgaggacgaggccgactactactgtcagagcacctacggcgacgacaagctgtacatctttggcggaggcaccaagctgacagtgcttggactcgagggacagcctaaggccaatcctaccgtgacactgttccctccaagcagcgaagaactccaggccaacaaggccacacttgtgtgcctgatctccgacttctaccctggggctgtgacagtggcttggaaggccgatggatctcctgtgaaagccggcgtggaaaccaccaagccatccaagcagagcaacaacaaatacgccgccagctcctacctgagcctgacacctgagcagtggaagtcccacagatcctacagctgccaagtgacccacgaaggcagcaccgtggaaaagacagtggcccctacagagtgcagccccatcaagaccgatgtgattacaatggaccccaaggacaactgctccaaggacgccaacgataccctgctgctccagctgaccaacaccagcgcctactacatgtacttgttgctgctgctgaagtccgtggtgtacttcgccatcatcacatgctgcctgctgcggagaaccgccttctgctgcaacggcgagaagtctagggccaagcgatctggatctggagcaacaaacttctcactactcaaacaagcaggtgacgtggaggagaatcccgggcctactagtatggactggatttggcgcatccttttccttgtcggcgctgctaccggcgcgcattccttcgaagaagttcagctggttgaaacaggtggcggcctggtgcagcctggcaaatctctggaactgacctgcgccaccagcggcttcacctttaataccgcctggatgcactgggtccgacagagccccgataagcggctggaatggatcgccagaatcaaggacaccagcaacaactacgccaccgactacgtggaatccatgaagggcagattcaccatcagccgggacgacagcaagggctccgtgaacctccagatgaacagcctgaaagaagaggacaccgccacctactactgcaccaccgacttctacgacggcacctactattggaactactggggccagggcgtgatggtcacagtgtcatctacgcgtgcctctacaaagggaccctccgtgtttcctctggctcccagcagcaagtctacaagcggaggaacagccgctctgggctgcctggtcaaggattactttcccgagcctgtgaccgtgtcctggaatagcggagcactgacaagcggcgtgcacacctttccagccgtgctgcaaagcagcggcctgtactctctgagcagcgtggtcacagtgcctagctctagcctgggcacccagacctacatctgcaatgtgaaccacaagcctagcaacaccaaggtggacaagagagtggaacccaagagctgtgaagtgaaaaccgactccaccgaccacgtgaagcccaaagagacagagaacaccaagcagcccagcaagagctgccacaagcccaaggccatcgtgcacaccgagaaagtgaacatgatgagcctgaccgtgctgggcctgcggatgctgttcgccaaaaccgtggccgtgaacttcctgctgaccgccaagctgttcttcctc

SEQ ID NO: 9056 - DNA, 2298 bp, Artificial Sequence
  Synthetic Polynucloetide
atggccttaccagtgaccgccttgctcctgccgctggccttgctgctccacgccgccaggccggaagtgcagctggttgaatctggcggaggactggttcagcctggcggatctctgagactgtcttgtgccgccagcggcttcagcttcagcgacttttggatgagctgggtccgacaggcccctggcaaaggacttgaatgggtcgccacaatcagccaggccggcagcgagaaggactacgtggactctgtgaagggcagattcaccatcagccgggacaacgccaagaagtccctgtacctccagatgaacagcctgagagccgaggacaccgccgtgtactattgtgcctctggcgtgtacagcttcgactacagaggccagggcaccctggtcacagtctcttctggtaccggcggaggcggatctggcggcggaggtagcggtggcggaggatctgaattcagctacgagctgatccagcctccttctgccgctgtgacactgggcaataccgtgtctctgacctgtgtgggagatgagctgcccaagagatacgcctactggtatcagcagaagcccgaccagagcatcgtgcgcgtgatctacgaagatagcgtgcggcctcctggcatcagcgatagattttctggcagcagcagcggcaccaccgccacactgacaattagagatgcccagaacgaggacgaggccgactactactgtcagagcacctacggcgacgacaagctgtacatctttggcggaggcaccaagctgacagtgcttggactcgagggacagcctaaggccaatcctaccgtgacactgttccctccaagcagcgaagaactccaggccaacaaggccacacttgtgtgcctgatctccgacttctaccctggggctgtgacagtggcttggaaggccgatggatctcctgtgaaagccggcgtggaaaccaccaagccatccaagcagagcaacaacaaatacgccgccagctcctacctgagcctgacacctgagcagtggaagtcccacagatcctacagctgccaagtgacccacgaaggcagcaccgtggaaaagacagtggcccctacagagtgcagcggcagagccgattgcggctttaccagcgagagctaccagcagggcgtgctgagcgccaccatcctgtacgagatcctgctgggcaaggccaccctgtacgccgtgctggtgtctgccctggtgctgatggctatggtcaagcggaaggacagccggggacgcgccaagagaagcggatctggcgtgaagcagaccctgaatttcgacctgctgaagctggctggcgacgtggaatccaacccaggccctactagtatggactggatttggcgcatccttttccttgtcggcgctgctaccggcgcgcattccttcgaagaagttcagctggttgaaacaggtggcggcctggtgcagcctggcaaatctctggaactgacctgcgccaccagcggcttcacctttaataccgcctggatgcactgggtccgacagagccccgataagcggctggaatggatcgccagaatcaaggacaccagcaacaactacgccaccgactacgtggaatccatgaagggcagattcaccatcagccgggacgacagcaagggctccgtgaacctccagatgaacagcctgaaagaagaggacaccgccacctactactgcaccaccgacttctacgacggcacctactattggaactactggggccagggcgtgatggtcacagtgtcatctacgcgtgcctctacaaagggaccctccgtgtttcctctggctcccagcagcaagtctacaagcggaggaacagccgctctgggctgcctggtcaaggattactttcccgagcctgtgaccgtgtcctggaatagcggagcactgacaagcggcgtgcacacctttccagccgtgctgcaaagcagcggcctgtactctctgagcagcgtggtcacagtgcctagctctagcctgggcacccagacctacatctgcaatgtgaaccacaagcctagcaacaccaaggtggacaagagagtggaacccaagagctgtatccccgaggacacattcttcccaagccccgagagcagctgcgacgtgaagctggtggaaaagagcttcgagacagacaccaacctgaacttccagaacctgagcgtgatcggcttcagaatcctgctgctgaaagtggccggctttaacctgctgatgaccctgcggctgtggtccagc

SEQ ID NO: 9057 - DNA, 2700 bp, Artificial Sequence
  Synthetic Polynucloetide
atggccttaccagtgaccgccttgctcctgccgctggccttgctgctccacgccgccaggccggaagtgcagctggttgaatctggcggaggactggttcagcctggcggatctctgagactgtcttgtgccgccagcggcttcagcttcagcgacttttggatgagctgggtccgacaggcccctggcaaaggacttgaatgggtcgccacaatcagccaggccggcagcgagaaggactacgtggactctgtgaagggcagattcaccatcagccgggacaacgccaagaagtccctgtacctccagatgaacagcctgagagccgaggacaccgccgtgtactattgtgcctctggcgtgtacagcttcgactacagaggccagggcaccctggtcacagtctcttctggtaccggcggaggcggatctggcggcggaggtagcggtggcggaggatctgaattcagctacgagctgatccagcctccttctgccgctgtgacactgggcaataccgtgtctctgacctgtgtgggagatgagctgcccaagagatacgcctactggtatcagcagaagcccgaccagagcatcgtgcgcgtgatctacgaagatagcgtgcggcctcctggcatcagcgatagattttctggcagcagcagcggcaccaccgccacactgacaattagagatgcccagaacgaggacgaggccgactactactgtcagagcacctacggcgacgacaagctgtacatctttggcggaggcaccaagctgacagtgcttggactcgagatccagaaccctgatcctgccgtgtaccagctgcgggatagcaagagcagcgacaagagcgtgtgtctgttcaccgacttcgacagccagaccaacgtgtcccagagcaaggactccgacgtgtacatcaccgataagtgcgtgctggacatgcggagcatggacttcaagagcaactccgccgtggcctggtccaacaagtccgatttcgcctgcgccaacgccttcaacaacagcattatccccgaggacacattcttcccaagccccgagagcagctgcgacgtgaagctggtggaaaagagcttcgagacagacaccaacctgaacttccagaacctgagcgtgatcggcttcagaatcctgctgctgaaagtggccggctttaacctgctgatgaccctgcggctgtggtccagccgcgccaagagaagcggatctggcgtgaagcagaccctgaatttcgacctgctgaagctggctggcgacgtggaatccaacccaggccctactagtatggactggatttggcgcatccttttccttgtcggcgctgctaccggcgcgcattccgggccccagctccagctgcaagagtctggacctggcctggtcaagcctagcgagacactgagcctgacctgtaccgtgtccggcgatagcatcagcagcggcgattactactggggctggatcagacagcctcctggcaaaggactggaatggatcggccacatctactacagcggcgtgacctactacaaccccagcctgaagtccagagtgaccatcagcgtggacaccagccggaaccagttctccctgaagctgtctagcgtgacagccgccgataccgccgtgtactactgcaccagagaggacagcagcaactggcggagtagaggccagggaacactggtcacagttagctctggatccggcggaggcggaagtggaggcggaggatctggcggcggaggctctttcgaagaagttcagctggttgaaacaggtggcggcctggtgcagcctggcaaatctctggaactgacctgcgccaccagcggcttcacctttaataccgcctggatgcactgggtccgacagagccccgataagcggctggaatggatcgccagaatcaaggacaccagcaacaactacgccaccgactacgtggaatccatgaagggcagattcaccatcagccgggacgacagcaagggctccgtgaacctccagatgaacagcctgaaagaagaggacaccgccacctactactgcaccaccgacttctacgacggcacctactattggaactactggggccagggcgtgatggtcacagtgtcatctacgcgtgaggacctgaagaacgtgttcccacctgaggtggccgtgttcgagcctagcgaggccgagatcagccacacccagaaagccaccctcgtgtgcctggctaccggcttctaccccgaccatgtggaactgtcttggtgggtcaacggcaaagaggtgcacagcggcgtgtgtaccgacccccagccactgaaagaacagcccgccctgaacgacagccggtactgcctgagcagcagactgagagtgtccgccaccttctggcagaacccccggaaccacttcagatgccaggtgcagttctacggcctgagcgagaacgacgagtggacccaggacagagccaagcccgtgacccagatcgtgtctgccgaagcctggggcagagccgattgcggctttaccagcgagagctaccagcagggcgtgctgagcgccaccatcctgtacgagatcctgctgggcaaggccaccctgtacgccgtgctggtgtctgccctggtgctgatggctatggtcaagcggaaggacagccgggga

SEQ ID NO: 9058 - DNA, 3276 bp, Artificial Sequence
  Synthetic Polynucloetide
atggccttaccagtgaccgccttgctcctgccgctggccttgctgctccacgccgccaggccggaagtgcagctggttgaatctggcggaggactggttcagcctggcggatctctgagactgtcttgtgccgccagcggcttcagcttcagcgacttttggatgagctgggtccgacaggcccctggcaaaggacttgaatgggtcgccacaatcagccaggccggcagcgagaaggactacgtggactctgtgaagggcagattcaccatcagccgggacaacgccaagaagtccctgtacctccagatgaacagcctgagagccgaggacaccgccgtgtactattgtgcctctggcgtgtacagcttcgactacagaggccagggcaccctggtcacagtctcttctggtaccggcggaggcggatctggcggcggaggtagcggtggcggaggatctgaattcagctacgagctgatccagcctccttctgccgctgtgacactgggcaataccgtgtctctgacctgtgtgggagatgagctgcccaagagatacgcctactggtatcagcagaagcccgaccagagcatcgtgcgcgtgatctacgaagatagcgtgcggcctcctggcatcagcgatagattttctggcagcagcagcggcaccaccgccacactgacaattagagatgcccagaacgaggacgaggccgactactactgtcagagcacctacggcgacgacaagctgtacatctttggcggaggcaccaagctgacagtgcttggactcgaggacctgaagaacgtgttcccacctgaggtggccgtgttcgagcctagcgaggccgagatcagccacacccagaaagccaccctcgtgtgcctggctaccggcttctaccccgaccatgtggaactgtcttggtgggtcaacggcaaagaggtgcacagcggcgtgtctaccgacccccagccactgaaagaacagcccgccctgaacgacagccggtactgcctgagcagcagactgagagtgtccgccaccttctggcagaacccccggaaccacttcagatgccaggtgcagttctacggcctgagcgagaacgacgagtggacccaggacagagccaagcccgtgacccagatcgtgtctgccgaagcctggggcagagccgattgcggatcccagagcttcggcctgctggaccccaagctgtgctacctgctggatggcatcctgttcatctacggcgtgatcctgaccgccctgttcctgagagtgaagttcagcagaagcgccgacgcccctgcctaccagcagggacagaaccaactgtacaacgagctgaacctgggcagacgggaagagtacgacgtgctggacaagcggagaggcagggaccctgagatgggcggaaagccccagcggagaaagaacccccaggaaggactgtataacgaactccagaaagacaagatggccgaagcctacagcgagatcggcatgaagggcgagcggagaagaggcaagggccacgatggcctgtaccagggcctgagcaccgccaccaaggacacctatgacgccctgcacatgcaggccctgcctccaagaagggccaagcgatctggatctggagcaacaaacttctcactactcaaacaagcaggtgacgtggaggagaatcccgggcctactagtatggactggatttggcgcatccttttccttgtcggcgctgctaccggcgcgcattccgggccccagctccagctgcaagagtctggacctggcctggtcaagcctagcgagacactgagcctgacctgtaccgtgtccggcgatagcatcagcagcggcgattactactggggctggatcagacagcctcctggcaaaggactggaatggatcggccacatctactacagcggcgtgacctactacaaccccagcctgaagtccagagtgaccatcagcgtggacaccagccggaaccagttctccctgaagctgtctagcgtgacagccgccgataccgccgtgtactactgcaccagagaggacagcagcaactggcggagtagaggccagggaacactggtcacagttagctctggatccggcggaggcggaagtggaggcggaggatctggcggcggaggctctttcgaagaagttcagctggttgaaacaggtggcggcctggtgcagcctggcaaatctctggaactgacctgcgccaccagcggcttcacctttaataccgcctggatgcactgggtccgacagagccccgataagcggctggaatggatcgccagaatcaaggacaccagcaacaactacgccaccgactacgtggaatccatgaagggcagattcaccatcagccgggacgacagcaagggctccgtgaacctccagatgaacagcctgaaagaagaggacaccgccacctactactgcaccaccgacttctacgacggcacctactattggaactactggggccagggcgtgatggtcacagtgtcatctacgcgtatccagaaccctgatcctgccgtgtaccagctgcgggatagcaagagcagcgacaagagcgtgtgtctgttcaccgacttcgacagccagaccaacgtgtcccagagcaaggactccgacgtgtacatcaccgataagaccgtgctggacatgcggagcatggacttcaagagcaactccgccgtggcctggtccaacaagtccgatttcgcctgcgccaacgccttcaacaacagcattatccccgaggacacattcttcccaagccccgagagcagctgcggtacccagagttttgggttgttggaccctaaattgtgctatctgttggacggaatcctgttcatttacggagtgatcctgaccgcattgttcctgcgggttaagttttccagatccgcagacgcacccgcttaccaacaagggcagaaccaactctacaatgaacttaatttggggcggagggaagagtacgacgttctggacaaaaggaggggacgagatcccgagatgggcggaaagcctcagcgaaggaagaatccgcaagaggggctttataacgaactccagaaagataaaatggcagaagcctatagtgagattgggatgaagggagaaaggaggaggggtaaaggtcacgatgggttgtaccaaggattgagcacagccactaaagatacctatgatgcgctccacatgcaggccctgccgccaaga

SEQ ID NO: 9059 - DNA, 2766 bp, Artificial Sequence
  Synthetic Polynucloetide
atggccttaccagtgaccgccttgctcctgccgctggccttgctgctccacgccgccaggccggaagtgcagctggttgaatctggcggaggactggttcagcctggcggatctctgagactgtcttgtgccgccagcggcttcagcttcagcgacttttggatgagctgggtccgacaggcccctggcaaaggacttgaatgggtcgccacaatcagccaggccggcagcgagaaggactacgtggactctgtgaagggcagattcaccatcagccgggacaacgccaagaagtccctgtacctccagatgaacagcctgagagccgaggacaccgccgtgtactattgtgcctctggcgtgtacagcttcgactacagaggccagggcaccctggtcacagtctcttctggtaccggcggaggcggatctggcggcggaggtagcggtggcggaggatctgaattcagctacgagctgatccagcctccttctgccgctgtgacactgggcaataccgtgtctctgacctgtgtgggagatgagctgcccaagagatacgcctactggtatcagcagaagcccgaccagagcatcgtgcgcgtgatctacgaagatagcgtgcggcctcctggcatcagcgatagattttctggcagcagcagcggcaccaccgccacactgacaattagagatgcccagaacgaggacgaggccgactactactgtcagagcacctacggcgacgacaagctgtacatctttggcggaggcaccaagctgacagtgcttggactcgagggacagcctaaggccaatcctaccgtgacactgttccctccaagcagcgaagaactccaggccaacaaggccacacttgtgtgcctgatctccgacttctaccctggggctgtgacagtggcttggaaggccgatggatctcctgtgaaagccggcgtggaaaccaccaagccatccaagcagagcaacaacaaatacgccgccagctcctacctgagcctgacacctgagcagtggaagtcccacagatcctacagctgccaagtgacccacgaaggcagcaccgtggaaaagacagtggcccctacagagtgcagccccatcaagaccgatgtgattacaatggaccccaaggacaactgctccaaggacgccaacgataccctgctgctccagctgaccaacaccagcgcctactacatgtacttgttgctgctgctgaagtccgtggtgtacttcgccatcatcacatgctgcctgctgcggagaaccgccttctgctgcaacggcgagaagtctagggccaagcgatctggatctggagcaacaaacttctcactactcaaacaagcaggtgacgtggaggagaatcccgggcctactagtatggactggatttggcgcatccttttccttgtcggcgctgctaccggcgcgcattccgggccccagctccagctgcaagagtctggacctggcctggtcaagcctagcgagacactgagcctgacctgtaccgtgtccggcgatagcatcagcagcggcgattactactggggctggatcagacagcctcctggcaaaggactggaatggatcggccacatctactacagcggcgtgacctactacaaccccagcctgaagtccagagtgaccatcagcgtggacaccagccggaaccagttctccctgaagctgtctagcgtgacagccgccgataccgccgtgtactactgcaccagagaggacagcagcaactggcggagtagaggccagggaacactggtcacagttagctctggatccggcggaggcggaagtggaggcggaggatctggcggcggaggctctttcgaagaagttcagctggttgaaacaggtggcggcctggtgcagcctggcaaatctctggaactgacctgcgccaccagcggcttcacctttaataccgcctggatgcactgggtccgacagagccccgataagcggctggaatggatcgccagaatcaaggacaccagcaacaactacgccaccgactacgtggaatccatgaagggcagattcaccatcagccgggacgacagcaagggctccgtgaacctccagatgaacagcctgaaagaagaggacaccgccacctactactgcaccaccgacttctacgacggcacctactattggaactactggggccagggcgtgatggtcacagtgtcatctacgcgtgcctctacaaagggaccctccgtgtttcctctggctcccagcagcaagtctacaagcggaggaacagccgctctgggctgcctggtcaaggattactttcccgagcctgtgaccgtgtcctggaatagcggagcactgacaagcggcgtgcacacctttccagccgtgctgcaaagcagcggcctgtactctctgagcagcgtggtcacagtgcctagctctagcctgggcacccagacctacatctgcaatgtgaaccacaagcctagcaacaccaaggtggacaagagagtggaacccaagagctgtgaagtgaaaaccgactccaccgaccacgtgaagcccaaagagacagagaacaccaagcagcccagcaagagctgccacaagcccaaggccatcgtgcacaccgagaaagtgaacatgatgagcctgaccgtgctgggcctgcggatgctgttcgccaaaaccgtggccgtgaacttcctgctgaccgccaagctgttcttcctc

SEQ ID NO: 9060 - DNA, 2709 bp, Artificial Sequence
  Synthetic Polynucloetide
atggccttaccagtgaccgccttgctcctgccgctggccttgctgctccacgccgccaggccggaagtgcagctggttgaatctggcggaggactggttcagcctggcggatctctgagactgtcttgtgccgccagcggcttcagcttcagcgacttttggatgagctgggtccgacaggcccctggcaaaggacttgaatgggtcgccacaatcagccaggccggcagcgagaaggactacgtggactctgtgaagggcagattcaccatcagccgggacaacgccaagaagtccctgtacctccagatgaacagcctgagagccgaggacaccgccgtgtactattgtgcctctggcgtgtacagcttcgactacagaggccagggcaccctggtcacagtctcttctggtaccggcggaggcggatctggcggcggaggtagcggtggcggaggatctgaattcagctacgagctgatccagcctccttctgccgctgtgacactgggcaataccgtgtctctgacctgtgtgggagatgagctgcccaagagatacgcctactggtatcagcagaagcccgaccagagcatcgtgcgcgtgatctacgaagatagcgtgcggcctcctggcatcagcgatagattttctggcagcagcagcggcaccaccgccacactgacaattagagatgcccagaacgaggacgaggccgactactactgtcagagcacctacggcgacgacaagctgtacatctttggcggaggcaccaagctgacagtgcttggactcgagggacagcctaaggccaatcctaccgtgacactgttccctccaagcagcgaagaactccaggccaacaaggccacacttgtgtgcctgatctccgacttctaccctggggctgtgacagtggcttggaaggccgatggatctcctgtgaaagccggcgtggaaaccaccaagccatccaagcagagcaacaacaaatacgccgccagctcctacctgagcctgacacctgagcagtggaagtcccacagatcctacagctgccaagtgacccacgaaggcagcaccgtggaaaagacagtggcccctacagagtgcagcggcagagccgattgcggctttaccagcgagagctaccagcagggcgtgctgagcgccaccatcctgtacgagatcctgctgggcaaggccaccctgtacgccgtgctggtgtctgccctggtgctgatggctatggtcaagcggaaggacagccggggacgcgccaagagaagcggatctggcgtgaagcagaccctgaatttcgacctgctgaagctggctggcgacgtggaatccaacccaggccctactagtatggactggatttggcgcatccttttccttgtcggcgctgctaccggcgcgcattccgggccccagctccagctgcaagagtctggacctggcctggtcaagcctagcgagacactgagcctgacctgtaccgtgtccggcgatagcatcagcagcggcgattactactggggctggatcagacagcctcctggcaaaggactggaatggatcggccacatctactacagcggcgtgacctactacaaccccagcctgaagtccagagtgaccatcagcgtggacaccagccggaaccagttctccctgaagctgtctagcgtgacagccgccgataccgccgtgtactactgcaccagagaggacagcagcaactggcggagtagaggccagggaacactggtcacagttagctctggatccggcggaggcggaagtggaggcggaggatctggcggcggaggctctttcgaagaagttcagctggttgaaacaggtggcggcctggtgcagcctggcaaatctctggaactgacctgcgccaccagcggcttcacctttaataccgcctggatgcactgggtccgacagagccccgataagcggctggaatggatcgccagaatcaaggacaccagcaacaactacgccaccgactacgtggaatccatgaagggcagattcaccatcagccgggacgacagcaagggctccgtgaacctccagatgaacagcctgaaagaagaggacaccgccacctactactgcaccaccgacttctacgacggcacctactattggaactactggggccagggcgtgatggtcacagtgtcatctacgcgtgcctctacaaagggaccctccgtgtttcctctggctcccagcagcaagtctacaagcggaggaacagccgctctgggctgcctggtcaaggattactttcccgagcctgtgaccgtgtcctggaatagcggagcactgacaagcggcgtgcacacctttccagccgtgctgcaaagcagcggcctgtactctctgagcagcgtggtcacagtgcctagctctagcctgggcacccagacctacatctgcaatgtgaaccacaagcctagcaacaccaaggtggacaagagagtggaacccaagagctgtatccccgaggacacattcttcccaagccccgagagcagctgcgacgtgaagctggtggaaaagagcttcgagacagacaccaacctgaacttccagaacctgagcgtgatcggcttcagaatcctgctgctgaaagtggccggctttaacctgctgatgaccctgcggctgtggtccagc

SEQ ID NO: 9061 - DNA, 2280 bp, Artificial Sequence
  Synthetic Polynucloetide
atggccttaccagtgaccgccttgctcctgccgctggccttgctgctccacgccgccaggccggaagtgcaggttttggagtctggcggaggactggttcagcctggcggatctctgagactgtcttgtgccgccagcggcttcaccttcagcaactttgccatgagctgggtccgacaggcccctggcaaaggacttgaatgggtgtccacaatcagcggcagcgccggcacaacagattacgccgattctgtgaagggcagattcaccatcagccgggacaacagcaagaaaaccctgtacctccagatgaacagcctgcgcgtggaagataccgccgtgtactactgtgccgatggcagaggccccttcttcgattatcgcggccagggcacactggtcaccgtttcttctggtaccggcggaggcggatctggcggcggaggtagcggtggcggaggatctgaattcagctacgagctgatccagcctccttctgccgctgtgacactgggcaataccgtgtctctgacctgtgtgggagatgagctgcccaagagatacgcctactggtatcagcagaagcccgaccagagcatcgtgcgcgtgatctacgaagatagcgtgcggcctcctggcatcagcgatagattttctggcagcagcagcggcaccaccgccacactgacaattagagatgcccagaacgaggacgaggccgactactactgtcagagcacctacggcgacgacaagctgtacatctttggcggaggcaccaagctgacagtgcttggactcgaggacctgaagaacgtgttcccacctgaggtggccgtgttcgagcctagcgaggccgagatcagccacacccagaaagccaccctcgtgtgcctggctaccggcttctaccccgaccatgtggaactgtcttggtgggtcaacggcaaagaggtgcacagcggcgtgtgtaccgacccccagccactgaaagaacagcccgccctgaacgacagccggtactgcctgagcagcagactgagagtgtccgccaccttctggcagaacccccggaaccacttcagatgccaggtgcagttctacggcctgagcgagaacgacgagtggacccaggacagagccaagcccgtgacccagatcgtgtctgccgaagcctggggcagagccgattgcggctttaccagcgagagctaccagcagggcgtgctgagcgccaccatcctgtacgagatcctgctgggcaaggccaccctgtacgccgtgctggtgtctgccctggtgctgatggctatggtcaagcggaaggacagccggggaagggccaagcgatctggatctggagcaacaaacttctcactactcaaacaagcaggtgacgtggaggagaatcccgggcctactagtatggactggatttggcgcatccttttccttgtcggcgctgctaccggcgcgcattccttcgaagaagttcagctggttgaaacaggtggcggcctggtgcagcctggcaaatctctggaactgacctgcgccaccagcggcttcacctttaataccgcctggatgcactgggtccgacagagccccgataagcggctggaatggatcgccagaatcaaggacaccagcaacaactacgccaccgactacgtggaatccatgaagggcagattcaccatcagccgggacgacagcaagggctccgtgaacctccagatgaacagcctgaaagaagaggacaccgccacctactactgcaccaccgacttctacgacggcacctactattggaactactggggccagggcgtgatggtcacagtgtcatctacgcgtatccagaaccctgatcctgccgtgtaccagctgcgggatagcaagagcagcgacaagagcgtgtgtctgttcaccgacttcgacagccagaccaacgtgtcccagagcaaggactccgacgtgtacatcaccgataagtgcgtgctggacatgcggagcatggacttcaagagcaactccgccgtggcctggtccaacaagtccgatttcgcctgcgccaacgccttcaacaacagcattatccccgaggacacattcttcccaagccccgagagcagctgcgacgtgaagctggtggaaaagagcttcgagacagacaccaacctgaacttccagaacctgagcgtgatcggcttcagaatcctgctgctgaaagtggccggctttaacctgctgatgaccctgcggctgtggtccagc

SEQ ID NO: 9062 - DNA, 2283 bp, Artificial Sequence
  Synthetic Polynucloetide
atggccttaccagtgaccgccttgctcctgccgctggccttgctgctccacgccgccaggccgagctacgagctgatccagcctccttctgccgctgtgacactgggcaataccgtgtctctgacctgtgtgggagatgagctgcccaagagatacgcctactggtatcagcagaagcccgaccagagcatcgtgcgcgtgatctacgaagatagcgtgcggcctcctggcatcagcgatagattttctggcagcagcagcggcaccaccgccacactgacaattagagatgcccagaacgaggacgaggccgactactactgtcagagcacctacggcgacgacaagctgtacatctttggcggaggcaccaagctgacagtgcttggactcgaggacctgaagaacgtgttcccacctgaggtggccgtgttcgagcctagcgaggccgagatcagccacacccagaaagccaccctcgtgtgcctggctaccggcttctaccccgaccatgtggaactgtcttggtgggtcaacggcaaagaggtgcacagcggcgtgtgtaccgacccccagccactgaaagaacagcccgccctgaacgacagccggtactgcctgagcagcagactgagagtgtccgccaccttctggcagaacccccggaaccacttcagatgccaggtgcagttctacggcctgagcgagaacgacgagtggacccaggacagagccaagcccgtgacccagatcgtgtctgccgaagcctggggcagagccgattgcggctttaccagcgagagctaccagcagggcgtgctgagcgccaccatcctgtacgagatcctgctgggcaaggccaccctgtacgccgtgctggtgtctgccctggtgctgatggctatggtcaagcggaaggacagccggggaagggccaagcgatctggatctggagcaacaaacttctcactactcaaacaagcaggtgacgtggaggagaatcccgggcctactagtatggactggatttggcgcatccttttccttgtcggcgctgctaccggcgcccattccgggcccgaagtgcagctggttgaatctggcggaggactggttcaggctggcggatctctgagactgtcttgtgccgccagcggcagaacctttagcatgggctggtttagacaggcccctggcaaagagagagagttcgtcgccgccatcacatactctggcggcagcccttactacgccgactctgtgaagggcagattcaccatcagccgggacaacgccaagaacaccgtgtacctccagatgaacagcctgaagcctgaggacaccgccgtgtactactgcgccgccaatccaacatacggcagcgactggaacgccgagaattggggccagggaacccaagtgacagtgtctagcggatccggcggcggaggatctggcggaggcggatctgggggcggaggctctttcgaagaagttcagctggttgaaacaggtggcggcctggtgcagcctggcaaatctctggaactgacctgcgccaccagcggcttcacctttaataccgcctggatgcactgggtccgacagagccccgataagcggctggaatggatcgccagaatcaaggacaccagcaacaactacgccaccgactacgtggaatccatgaagggcagattcaccatcagccgggacgacagcaagggctccgtgaacctccagatgaacagcctgaaagaagaggacaccgccacctactactgcaccaccgacttctacgacggcacctactattggaactactggggccagggcgtgatggtcacagtgtcatctacgcgtatccagaaccctgatcctgccgtgtaccagctgcgggatagcaagagcagcgacaagagcgtgtgtctgttcaccgacttcgacagccagaccaacgtgtcccagagcaaggactccgacgtgtacatcaccgataagtgcgtgctggacatgcggagcatggacttcaagagcaactccgccgtggcctggtccaacaagtccgatttcgcctgcgccaacgccttcaacaacagcattatccccgaggacacattcttcccaagccccgagagcagctgcgacgtgaagctggtggaaaagagcttcgagacagacaccaacctgaacttccagaacctgagcgtgatcggcttcagaatcctgctgctgaaagtggccggctttaacctgctgatgaccctgcggctgtggtccagc

SEQ ID NO: 9063 - DNA, 2664 bp, Artificial Sequence
  Synthetic Polynucloetide
atggccttaccagtgaccgccttgctcctgccgctggccttgctgctccacgccgccaggccgagctacgagctgatccagcctccttctgccgctgtgacactgggcaataccgtgtctctgacctgtgtgggagatgagctgcccaagagatacgcctactggtatcagcagaagcccgaccagagcatcgtgcgcgtgatctacgaagatagcgtgcggcctcctggcatcagcgatagattttctggcagcagcagcggcaccaccgccacactgacaattagagatgcccagaacgaggacgaggccgactactactgtcagagcacctacggcgacgacaagctgtacatctttggcggaggcaccaagctgacagtgcttggactcgaggacctgaagaacgtgttcccacctgaggtggccgtgttcgagcctagcgaggccgagatcagccacacccagaaagccaccctcgtgtgcctggctaccggcttctaccccgaccatgtggaactgtcttggtgggtcaacggcaaagaggtgcacagcggcgtgtgtaccgacccccagccactgaaagaacagcccgccctgaacgacagccggtactgcctgagcagcagactgagagtgtccgccaccttctggcagaacccccggaaccacttcagatgccaggtgcagttctacggcctgagcgagaacgacgagtggacccaggacagagccaagcccgtgacccagatcgtgtctgccgaagcctggggcagagccgattgcggctttaccagcgagagctaccagcagggcgtgctgagcgccaccatcctgtacgagatcctgctgggcaaggccaccctgtacgccgtgctggtgtctgccctggtgctgatggctatggtcaagcggaaggacagccggggaagggccaagcgatctggatctggagcaacaaacttctcactactcaaacaagcaggtgacgtggaggagaatcccgggcctactagtatggactggatttggcgcatccttttccttgtcggcgctgctaccggcgcccattcccaactgcaactgcaagagtctggccctggcctggtcaagccttctgaaaccctgagcctgacctgtaccgtgtccggcggctctatcagcagcggcgattactactggggctggatcagacagcctccaggcaagggactcgaatggatcggcagcatcagctacagcggctccacctactacaacccaagcctgaagtccagagtgaccatcagcgtggacaccagcagaaaccagttctccctgaagctgagcagcgtgacagccgccgatacagccgtgtattattgcaccagagaggacagcagcaactggcggagtagaggacagggcacactggtcacagtgtcctcttctggaggcggtggaagcggtggaggaggatctgaagtgcagctggttgaatctggcggaggactggttcaggctggcggatctctgagactgtcttgtgccgccagcggcagaacctttagcatgggctggtttagacaggcccctggcaaagagagagagttcgtcgccgccatcacatactctggcggcagcccttactacgccgactctgtgaagggcagattcaccatcagccgggacaacgccaagaacaccgtgtacctccagatgaacagcctgaagcctgaggacaccgccgtgtactactgcgccgccaatccaacatacggcagcgactggaacgccgagaattggggccagggaacccaagtgacagtgtctagcggatccggcggcggaggatctggcggaggcggatctgggggcggaggctctttcgaagaagttcagctggttgaaacaggtggcggcctggtgcagcctggcaaatctctggaactgacctgcgccaccagcggcttcacctttaataccgcctggatgcactgggtccgacagagccccgataagcggctggaatggatcgccagaatcaaggacaccagcaacaactacgccaccgactacgtggaatccatgaagggcagattcaccatcagccgggacgacagcaagggctccgtgaacctccagatgaacagcctgaaagaagaggacaccgccacctactactgcaccaccgacttctacgacggcacctactattggaactactggggccagggcgtgatggtcacagtgtcatctacgcgtatccagaaccctgatcctgccgtgtaccagctgcgggatagcaagagcagcgacaagagcgtgtgtctgttcaccgacttcgacagccagaccaacgtgtcccagagcaaggactccgacgtgtacatcaccgataagtgcgtgctggacatgcggagcatggacttcaagagcaactccgccgtggcctggtccaacaagtccgatttcgcctgcgccaacgccttcaacaacagcattatccccgaggacacattcttcccaagccccgagagcagctgcgacgtgaagctggtggaaaagagcttcgagacagacaccaacctgaacttccagaacctgagcgtgatcggcttcagaatcctgctgctgaaagtggccggctttaacctgctgatgaccctgcggctgtggtccagc

SEQ ID NO: 9064 - DNA, 2691 bp, Artificial Sequence
  Synthetic Polynucloetide
atggccttaccagtgaccgccttgctcctgccgctggccttgctgctccacgccgccaggccggaagtgcaggttttggagtctggcggaggactggttcagcctggcggatctctgagactgtcttgtgccgccagcggcttcaccttcagcaactttgccatgagctgggtccgacaggcccctggcaaaggacttgaatgggtgtccacaatcagcggcagcgccggcacaacagattacgccgattctgtgaagggcagattcaccatcagccgggacaacagcaagaaaaccctgtacctccagatgaacagcctgcgcgtggaagataccgccgtgtactactgtgccgatggcagaggccccttcttcgattatcgcggccagggcacactggtcaccgtttcttctggtaccggcggaggcggatctggcggcggaggtagcggtggcggaggatctgaattcagctacgagctgatccagcctccttctgccgctgtgacactgggcaataccgtgtctctgacctgtgtgggagatgagctgcccaagagatacgcctactggtatcagcagaagcccgaccagagcatcgtgcgcgtgatctacgaagatagcgtgcggcctcctggcatcagcgatagattttctggcagcagcagcggcaccaccgccacactgacaattagagatgcccagaacgaggacgaggccgactactactgtcagagcacctacggcgacgacaagctgtacatctttggcggaggcaccaagctgacagtgcttggactcgaggacctgaagaacgtgttcccacctgaggtggccgtgttcgagcctagcgaggccgagatcagccacacccagaaagccaccctcgtgtgcctggctaccggcttctaccccgaccatgtggaactgtcttggtgggtcaacggcaaagaggtgcacagcggcgtgtgtaccgacccccagccactgaaagaacagcccgccctgaacgacagccggtactgcctgagcagcagactgagagtgtccgccaccttctggcagaacccccggaaccacttcagatgccaggtgcagttctacggcctgagcgagaacgacgagtggacccaggacagagccaagcccgtgacccagatcgtgtctgccgaagcctggggcagagccgattgcggctttaccagcgagagctaccagcagggcgtgctgagcgccaccatcctgtacgagatcctgctgggcaaggccaccctgtacgccgtgctggtgtctgccctggtgctgatggctatggtcaagcggaaggacagccggggaagggccaagcgatctggatctggagcaacaaacttctcactactcaaacaagcaggtgacgtggaggagaatcccgggcctactagtatggactggatttggcgcatccttttccttgtcggcgctgctaccggcgcccattccgggcccgaagtgcagctggttgaatctggcggaggactggttcaggctggcggatctctgagactgtcttgtgccgccagcggcagaacctttagcatgggctggtttagacaggcccctggcaaagagagagagttcgtcgccgccatcacatacagcggcggcagcccttactacgcctcttctgtcagaggccggttcaccatcagccgggacaacgccaagaacaccgtgtacctccagatgaacagcctgaagccagaggacaccgccgtgtactactgtgccgccaatccaacctacggcagcgactggaatgccgagaattggggccagggcacccaagtgacagtgtctagtggatccggcggcggaggatctggcggaggcggatctgggggcggaggctctttcgaagaagttcagctggttgaaacaggtggcggcctggtgcagcctggcaaatctctggaactgacctgcgccaccagcggcttcacctttaataccgcctggatgcactgggtccgacagagccccgataagcggctggaatggatcgccagaatcaaggacaccagcaacaactacgccaccgactacgtggaatccatgaagggcagattcaccatcagccgggacgacagcaagggctccgtgaacctccagatgaacagcctgaaagaagaggacaccgccacctactactgcaccaccgacttctacgacggcacctactattggaactactggggccagggcgtgatggtcacagtgtcatctacgcgtatccagaaccctgatcctgccgtgtaccagctgcgggatagcaagagcagcgacaagagcgtgtgtctgttcaccgacttcgacagccagaccaacgtgtcccagagcaaggactccgacgtgtacatcaccgataagtgcgtgctggacatgcggagcatggacttcaagagcaactccgccgtggcctggtccaacaagtccgatttcgcctgcgccaacgccttcaacaacagcattatccccgaggacacattcttcccaagccccgagagcagctgcgacgtgaagctggtggaaaagagcttcgagacagacaccaacctgaacttccagaacctgagcgtgatcggcttcagaatcctgctgctgaaagtggccggctttaacctgctgatgaccctgcggctgtggtccagc

SEQ ID NO: 9065 - DNA, 2199 bp, Artificial Sequence
  Synthetic Polynucloetide
atggccttaccagtgaccgccttgctcctgccgctggccttgctgctccacgccgccaggccgagcgtgatcgagctgacacagagccccaagttcatgagcaccagcgtgggcgacagagtgaacgtgacatacaaggccagccagaacgtgggcaccaacgtggcatggttccagcagaagcctggacagagccctaaggtgctgatctacagcgccagctacagatacagcggcgtgcccgatagattcacaggctctggcagcggcaccgacttcaccctgacaatcagcaacgtgcagagcgaggacctggccgagtatttctgccagcagtaccacacataccctctgacctttggcggaggcaccaagctggaaatcaagagaggcggaggcggaagtggaggcggaggatctggcggcggaggctctagaatggctcaggttcagctgcaacagagcggagccgaacttgctagacctggcgcttccgtgaagatgagctgtaaagccagcggctacaccttcaccacctacaccatccactgggtccgaagaaggccaggccacgaccttgagtggatcggctacatcaaccccagcagcggctgctccgactacaaccagaacttcaagggcaagaccacactgaccgccgacaagagcagcaacaccgcctacatgcagctcaacagcctgaccagcgaggacagcgccgtgtactattgtgccagaagggccgactacggcaactacgagtacacttggtttgcctactggggccagggcaccaccgtgacagtttcttctacgcgtgagcagaaactgatctcggaagaggatctggcgaagcccaccacgacgccagcgccgcgaccaccaacaccggcgcccaccatcgcgtcgcagcccctgtccctgcgcccagaggcgtgccggccagcggcggggggcgcagtgcacacgagggggctggacttcgcctgtgacatctacatctgggcgcccttggccgggacttgtggggtccttctcctgtcactggttatcaccctttactgcaaacggggcagaaagaaactcctgtatatattcaaacaaccatttatgagaccagtacaaactactcaagaggaagatggctgtagctgccgatttccagaagaagaagaaggaggatgtgaactgagagtgaagttcagcaggagcgcagacgcccccgcgtaccagcagggccagaaccagctctataacgagctgaatctaggacgaagagaggagtacgatgttttggacaagagacgtggccgggaccctgagatggggggaaagccgagaaggaagaaccctcaggaaggcctgtacaatgaactgcagaaagataagatggcggaggcctacagtgagattgggatgaaaggcgagcgccggaggggcaaggggcacgatggcctttaccagggtctcagtacagccaccaaggacacctacgacgcccttcacatgcaggccctgccccctcgctctagtggctccggcgagggcagaggaagtctactaacctgcggagatgtggaagaaaatcctggcccacatatgaccgagtacaagcccacggtgcgcctcgccacccgcgacgacgtccccagggccgtacgcaccctcgccgccgcgttcgccgactaccccgccacgcgccacaccgtcgatccggaccgccacatcgagcgggtcaccgagctgcaagaactcttcctcacgcgcgtcgggctcgacatcggcaaggtgtgggtcgcggacgacggcgccgcggtggcggtctggaccacgccggagagcgtcgaagcgggggcggtgttcgccgagatcggcccgcgcatggccgagttgagcggttcccggctggccgcgcagcaacagatggaaggcctcctggcgccgcaccggcccaaggagcccgcgtggttcctggccaccgtcggcgtctcgcccgaccaccagggcaagggtctgggcagcgccgtcgtgctccccggagtggaggcggccgagcgcgccggggtgcccgccttcctggagacctccgcgccccgcaacctccccttctacgagcggctcggcttcaccgtcaccgccgacgtcgaggtgcccgaaggaccgcgcacctggtgcatgacccgcaagcccggtgcctga

SEQ ID NO: 9066 - DNA, 2181 bp, Artificial Sequence
  Synthetic Polynucloetide
atggccttaccagtgaccgccttgctcctgccgctggccttgctgctccacgccgccaggccgagcgtgatcgagctgacacagagccccaagttcatgagcaccagcgtgggcgacagagtgaacgtgacatacaaggccagccagaacgtgggcaccaacgtggcatggttccagcagaagcctggacagagccctaaggtgctgatctacagcgccagctacagatacagcggcgtgcccgatagattcacaggctctggcagcggcaccgacttcaccctgacaatcagcaacgtgcagagcgaggacctggccgagtatttctgccagcagtaccacacataccctctgacctttggcggaggcaccaagctggaaatcaagagaggcggaggcggaagtggaggcggaggatctggcggcggaggctctagaatggctcaggttcagctgcaacagagcggagccgaacttgctagacctggcgcttccgtgaagatgagctgtaaagccagcggctacaccttcaccacctacaccatccactgggtccgaagaaggccaggccacgaccttgagtggatcggctacatcaaccccagcagcggctgctccgactacaaccagaacttcaagggcaagaccacactgaccgccgacaagagcagcaacaccgcctacatgcagctcaacagcctgaccagcgaggacagcgccgtgtactattgtgccagaagggccgactacggcaactacgagtacacttggtttgcctactggggccagggcaccaccgtgacagtttcttctacgcgtgagcagaaactgatctcggaagaggatctgaaaattgaagttatgtatcctcctccttacctagacaatgagaagagcaatggaaccattatccatgtgaaagggaaacacctttgtccaagtcccctatttcccggaccttctaagcccttttgggtgctggtggtggttgggggagtcctggcttgctatagcttgctagtaacagtggcctttattattttctgggtgaggagtaagaggagcaggctcctgcacagtgactacatgaacatgactccacgccgccccggacccacccgcaagcattaccagccctatgccccaccacgcgacttcgcagcctatcgctccagagtgaagttcagcaggagcgcagacgcccccgcgtaccagcagggccagaaccagctctataacgagctcaatctaggacgaagagaggagtacgatgttttggacaagagacgtggccgggaccctgagatggggggaaagccgagaaggaagaaccctcaggaaggcctgtacaatgaactgcagaaagataagatggcggaggcctacagtgagattgggatgaaaggcgagcgccggaggggcaaggggcacgatggcctttaccagggtctcagtacagccaccaaggacacctacgacgcccttcacatgcaggccctgccccctcgctctagtggctccggcgagggcagaggaagtctactaacctgcggagatgtggaagaaaatcctggcccacatatgaccgagtacaagcccacggtgcgcctcgccacccgcgacgacgtccccagggccgtacgcaccctcgccgccgcgttcgccgactaccccgccacgcgccacaccgtcgatccggaccgccacatcgagcgggtcaccgagctgcaagaactcttcctcacgcgcgtcgggctcgacatcggcaaggtgtgggtcgcggacgacggcgccgcggtggcggtctggaccacgccggagagcgtcgaagcgggggcggtgttcgccgagatcggcccgcgcatggccgagttgagcggttcccggctggccgcgcagcaacagatggaaggcctcctggcgccgcaccggcccaaggagcccgcgtggttcctggccaccgtcggcgtctcgcccgaccaccagggcaagggtctgggcagcgccgtcgtgctccccggagtggaggcggccgagcgcgccggggtgcccgccttcctggagacctccgcgccccgcaacctccccttctacgagcggctcggcttcaccgtcaccgccgacgtcgaggtgcccgaaggaccgcgcacctggtgcatgacccgcaagcccggtgcctga

SEQ ID NO: 9067 - DNA, 1509 bp, Artificial Sequence
  Synthetic Polynucloetide
atggccttaccagtgaccgccttgctcctgccgctggccttgctgctccacgccgccaggccgagcgtgatcgagctgacacagagccccaagttcatgagcaccagcgtgggcgacagagtgaacgtgacatacaaggccagccagaacgtgggcaccaacgtggcatggttccagcagaagcctggacagagccctaaggtgctgatctacagcgccagctacagatacagcggcgtgcccgatagattcacaggctctggcagcggcaccgacttcaccctgacaatcagcaacgtgcagagcgaggacctggccgagtatttctgccagcagtaccacacataccctctgacctttggcggaggcaccaagctggaaatcaagagaggcggaggcggaagtggaggcggaggatctggcggcggaggctctagaatggctcaggttcagctgcaacagagcggagccgaacttgctagacctggcgcttccgtgaagatgagctgtaaagccagcggctacaccttcaccacctacaccatccactgggtccgaagaaggccaggccacgaccttgagtggatcggctacatcaaccccagcagcggctgctccgactacaaccagaacttcaagggcaagaccacactgaccgccgacaagagcagcaacaccgcctacatgcagctcaacagcctgaccagcgaggacagcgccgtgtactattgtgccagaagggccgactacggcaactacgagtacacttggtttgcctactggggccagggcaccaccgtgacagtttcttctacgcgtgagcagaaactgatctcggaagaggatctgaaaattgaagttatgtatcctcctccttacctagacaatgagaagagcaatggaaccattatccatgtgaaagggaaacacctttgtccaagtcccctatttcccggaccttctaagcccttttgggtgctggtggtggttgggggagtcctggcttgctatagcttgctagtaacagtggcctttattattttctgggtgaggagtaagaggagcaggctcctgcacagtgactacatgaacatgactccacgccgccccggacccacccgcaagcattaccagccctatgccccaccacgcgacttcgcagcctatcgctccagagtgaagttcagcaggagcgcagacgcccccgcgtaccagcagggccagaaccagctctataacgagctcaatctaggacgaagagaggagtacgatgttttggacaagagacgtggccgggaccctgagatggggggaaagccgagaaggaagaaccctcaggaaggcctgtacaatgaactgcagaaagataagatggcggaggcctacagtgagattgggatgaaaggcgagcgccggaggggcaaggggcacgatggcctttaccagggtctcagtacagccaccaaggacacctacgacgcccttcacatgcaggccctgccccctcgc

SEQ ID NO: 9068 - DNA, 1530 bp, Artificial Sequence
  Synthetic Polynucloetide
atggccttaccagtgaccgccttgctcctgccgctggccttgctgctccacgccgccaggccgagcgtgatcgagctgacacagagccccaagttcatgagcaccagcgtgggcgacagagtgaacgtgacatacaaggccagccagaacgtgggcaccaacgtggcatggttccagcagaagcctggacagagccctaaggtgctgatctacagcgccagctacagatacagcggcgtgcccgatagattcacaggctctggcagcggcaccgacttcaccctgacaatcagcaacgtgcagagcgaggacctggccgagtatttctgccagcagtaccacacataccctctgacctttggcggaggcaccaagctggaaatcaagagaggcggaggcggaagtggaggcggaggatctggcggcggaggctctagaatggctcaggttcagctgcaacagagcggagccgaacttgctagacctggcgcttccgtgaagatgagctgtaaagccagcggctacaccttcaccacctacaccatccactgggtccgaagaaggccaggccacgaccttgagtggatcggctacatcaaccccagcagcggctgctccgactacaaccagaacttcaagggcaagaccacactgaccgccgacaagagcagcaacaccgcctacatgcagctcaacagcctgaccagcgaggacagcgccgtgtactattgtgccagaagggccgactacggcaactacgagtacacttggtttgcctactggggccagggcaccaccgtgacagtttcttctacgcgtgagcagaaactgatctcggaagaggatctggcgaagcccaccacgacgccagcgccgcgaccaccaacaccggcgcccaccatcgcgtcgcagcccctgtccctgcgcccagaggcgtgccggccagcggcggggggcgcagtgcacacgagggggctggacttcgcctgtgacatctacatctgggcgcccttggccgggacttgtggggtccttctcctgtcactggttatcaccctttactgcaaacggggcagaaagaaactcctgtatatattcaaacaaccatttatgagaccagtacaaactactcaagaggaagatggctgtagctgccgatttccagaagaagaagaaggaggatgtgaactgagagtgaagttcagcaggagcgcagacgcccccgcgtaccagcagggccagaaccagctctataacgagctgaatctaggacgaagagaggagtacgatgttttggacaagagacgtggccgggaccctgagatggggggaaagccgagaaggaagaaccctcaggaaggcctgtacaatgaactgcagaaagataagatggcggaggcctacagtgagattgggatgaaaggcgagcgccggaggggcaaggggcacgatggcctttaccagggtctcagtacagccaccaaggacacctacgacgcccttcacatgcaggccctgccccctcgctga

SEQ ID NO: 9069 - DNA, 1530 bp, Artificial Sequence
  Synthetic Polynucloetide
atggccttaccagtgaccgccttgctcctgccgctggccttgctgctccacgccgccaggccgagaatggctcaggttcagctgcaacagagcggagccgaacttgctagacctggcgcttccgtgaagatgagctgtaaagccagcggctacaccttcaccacctacaccatccactgggtccgaagaaggccaggccacgaccttgagtggatcggctacatcaaccccagcagcggctgctccgactacaaccagaacttcaagggcaagaccacactgaccgccgacaagagcagcaacaccgcctacatgcagctcaacagcctgaccagcgaggacagcgccgtgtactattgtgccagaagggccgactacggcaactacgagtacacttggtttgcctactggggccagggcaccaccgtgacagtttcttctggcggaggcggaagtggaggcggaggatctggcggcggaggctctagcgtgatcgagctgacacagagccccaagttcatgagcaccagcgtgggcgacagagtgaacgtgacatacaaggccagccagaacgtgggcaccaacgtggcatggttccagcagaagcctggacagagccctaaggtgctgatctacagcgccagctacagatacagcggcgtgcccgatagattcacaggctctggcagcggcaccgacttcaccctgacaatcagcaacgtgcagagcgaggacctggccgagtatttctgccagcagtaccacacataccctctgacctttggcggaggcaccaagctggaaatcaagagaacgcgtgagcagaaactgatctcggaagaggatctggcgaagcccaccacgacgccagcgccgcgaccaccaacaccggcgcccaccatcgcgtcgcagcccctgtccctgcgcccagaggcgtgccggccagcggcggggggcgcagtgcacacgagggggctggacttcgcctgtgacatctacatctgggcgcccttggccgggacttgtggggtccttctcctgtcactggttatcaccctttactgcaaacggggcagaaagaaactcctgtatatattcaaacaaccatttatgagaccagtacaaactactcaagaggaagatggctgtagctgccgatttccagaagaagaagaaggaggatgtgaactgagagtgaagttcagcaggagcgcagacgcccccgcgtaccagcagggccagaaccagctctataacgagctgaatctaggacgaagagaggagtacgatgttttggacaagagacgtggccgggaccctgagatggggggaaagccgagaaggaagaaccctcaggaaggcctgtacaatgaactgcagaaagataagatggcggaggcctacagtgagattgggatgaaaggcgagcgccggaggggcaaggggcacgatggcctttaccagggtctcagtacagccaccaaggacacctacgacgcccttcacatgcaggccctgccccctcgctga

SEQ ID NO: 9070 - DNA, 2769 bp, Artificial Sequence
  Synthetic Polynucloetide
atggccttaccagtgaccgccttgctcctgccgctggccttgctgctccacgccgccaggccgagcgtgatcgagctgacacagagccccaagttcatgagcaccagcgtgggcgacagagtgaacgtgacatacaaggccagccagaacgtgggcaccaacgtggcatggttccagcagaagcctggacagagccctaaggtgctgatctacagcgccagctacagatacagcggcgtgcccgatagattcacaggctctggcagcggcaccgacttcaccctgacaatcagcaacgtgcagagcgaggacctggccgagtatttctgccagcagtaccacacataccctctgacctttggcggaggcaccaagctggaaatcaagagaggcggaggcggaagtggaggcggaggatctggcggcggaggctctagaatggctcaggttcagctgcaacagagcggagccgaacttgctagacctggcgcttccgtgaagatgagctgtaaagccagcggctacaccttcaccacctacaccatccactgggtccgaagaaggccaggccacgaccttgagtggatcggctacatcaaccccagcagcggctgctccgactacaaccagaacttcaagggcaagaccacactgaccgccgacaagagcagcaacaccgcctacatgcagctcaacagcctgaccagcgaggacagcgccgtgtactattgtgccagaagggccgactacggcaactacgagtacacttggtttgcctactggggccagggcaccaccgtgacagtttcttctacgcgtgagcagaaactgatctcggaagaggatctggcgaagcccaccacgacgccagcgccgcgaccaccaacaccggcgcccaccatcgcgtcgcagcccctgtccctgcgcccagaggcgtgccggccagcggcggggggcgcagtgcacacgagggggctggacttcgcctgtgacatctacatctgggcgcccttggccgggacttgtggggtccttctcctgtcactggttatcaccctttactgcgggcgcgccagagtgaagttcagcaggagcgcagacgcccccgcgtaccagcagggccagaaccagctctataacgagctgaatctaggacgaagagaggagtacgatgttttggacaagagacgtggccgggaccctgagatggggggaaagccgagaaggaagaaccctcaggaaggcctgtacaatgaactgcagaaagataagatggcggaggcctacagtgagattgggatgaaaggcgagcgccggaggggcaaggggcacgatggcctttaccagggtctcagtacagccaccaaggacacctacgacgcccttcacatgcaggccctgccccctcgctctagaggatctggagcaacaaacttctcactactcaaacaagcaggtgacgtggaggagaatcccgggcctgggatccacatggccacttacgaggttctctgtgaggtggcgcggaaactgggcacggatgacagggaagtggtattgttcctcctaaacgtgttcatacctcaacccacactggcccaattaattggagctcttagagctttaaaggaggagggcaggttaacgtttcccctgttagcggaatgtctgtttcgtgcaggtcgcagagacctcttgcgcgacctgcttcacttagacccgcgttttttagagcgccacctagcgggcacaatgagttatttcagcccttatcagctcactgttctccacgtagacggggagctgtgtgcgagggatattaggtctttgatatttttaagcaaggacactatagggtctcgcagcacaccacagacattcttacactgggtgtactgtatggaaaacttagacctactgggtcccactgacgtggatgccctaatgtcaatgcttagatctttgtcaagagtagacctacagcgccaagtgcaaaccctaatgggccttcacctttccggcccatcacactcccaacactatcgccatacaccactcgagaccgatttctacgactacaaggacgacgatgacaagactagtggctccggcgagggcagaggaagtctactaacctgcggagatgtggaagaaaatcctggcccacatatgaccgagtacaagcccacggtgcgcctcgccacccgcgacgacgtccccagggccgtacgcaccctcgccgccgcgttcgccgactaccccgccacgcgccacaccgtcgatccggaccgccacatcgagcgggtcaccgagctgcaagaactcttcctcacgcgcgtcgggctcgacatcggcaaggtgtgggtcgcggacgacggcgccgcggtggcggtctggaccacgccggagagcgtcgaagcgggggcggtgttcgccgagatcggcccgcgcatggccgagttgagcggttcccggctggccgcgcagcaacagatggaaggcctcctggcgccgcaccggcccaaggagcccgcgtggttcctggccaccgtcggcgtctcgcccgaccaccagggcaagggtctgggcagcgccgtcgtgctccccggagtggaggcggccgagcgcgccggggtgcccgccttcctggagacctccgcgccccgcaacctccccttctacgagcggctcggcttcaccgtcaccgccgacgtcgaggtgcccgaaggaccgcgcacctggtgcatgacccgcaagcccggtgcctga

SEQ ID NO: 9071 - DNA, 2589 bp, Artificial Sequence
  Synthetic Polynucloetide
atggccttaccagtgaccgccttgctcctgccgctggccttgctgctccacgccgccaggccgagcgtgatcgagctgacacagagccccaagttcatgagcaccagcgtgggcgacagagtgaacgtgacatacaaggccagccagaacgtgggcaccaacgtggcatggttccagcagaagcctggacagagccctaaggtgctgatctacagcgccagctacagatacagcggcgtgcccgatagattcacaggctctggcagcggcaccgacttcaccctgacaatcagcaacgtgcagagcgaggacctggccgagtatttctgccagcagtaccacacataccctctgacctttggcggaggcaccaagctggaaatcaagagactcgagatccagaaccctgatcctgccgtgtaccagctgcgggatagcaagagcagcgacaagagcgtgtgtctgttcaccgacttcgacagccagaccaacgtgtcccagagcaaggactccgacgtgtacatcaccgataagtgcgtgctggacatgcggagcatggacttcaagagcaactccgccgtggcctggtccaacaagtccgatttcgcctgcgccaacgccttcaacaacagcattatccccgaggacacattcttcccaagcagcgacgtgccctgcgacgtgaagctggtggaaaagagcttcgagacagacaccaacctgaacttccagaacctgagcgtgatcggcttcagaatcctgctgctgaaagtggccggctttaacctgctgatgaccctgcggctgtggtccagccgcgccaagagaagcggatctggcgtgaagcagaccctgaatttcgacctgctgaagctggctggcgacgtggaatccaacccaggccctactagtatggactggatttggcgcatccttttccttgtcggcgctgctaccggcgcgcattccttcgaaagaatggctcaggttcagctgcaacagagcggagccgaacttgctagacctggcgcttccgtgaagatgagctgtaaagccagcggctacaccttcaccacctacaccatccactgggtccgaagaaggccaggccacgaccttgagtggatcggctacatcaaccccagcagcggctgctccgactacaaccagaacttcaagggcaagaccacactgaccgccgacaagagcagcaacaccgcctacatgcagctcaacagcctgaccagcgaggacagcgccgtgtactattgtgccagaagggccgactacggcaactacgagtacacttggtttgcctactggggccagggcaccaccgtgacagtttcttctacgcgtgaggacctgaagaacgtgttcccacctgaggtggccgtgttcgagcctagcaaggccgagatcgcccacacccagaaagccaccctcgtgtgcctggctaccggcttctaccccgaccatgtggaactgtcttggtgggtcaacggcaaagaggtgcacagcggcgtgtgtaccgacccccagccactgaaagaacagcccgccctgaacgacagccggtactgcctgagcagcagactgagagtgtccgccaccttctggcagaacccccggaaccacttcagatgccaggtgcagttctacggcctgagcgagaacgacgagtggacccaggacagagccaagcccgtgacccagatcgtgtctgccgaagcctggggcagagccgattgcggcatcaccagcgccagctaccaccagggcgtgctgagcgccaccatcctgtacgagatcctgctgggcaaggccaccctgtacgccgtgctggtgtctgccctggtgctgatggctatggtcaagcggaaggacagccggggaagggccaagcgatctggatctggagcaacaaacttctcactactcaaacaagcaggtgacgtggaggagaatcccgggccttctagaggccatatgaccgagtacaagcccacggtgcgcctcgccacccgcgacgacgtccccagggccgtacgcaccctcgccgccgcgttcgccgactaccccgccacgcgccacaccgtcgatccggaccgccacatcgagcgggtcaccgagctgcaagaactcttcctcacgcgcgtcgggctcgacatcggcaaggtgtgggtcgcggacgacggcgccgcggtggcggtctggaccacgccggagagcgtcgaagcgggggcggtgttcgccgagatcggcccgcgcatggccgagttgagcggttcccggctggccgcgcagcaacagatggaaggcctcctggcgccgcaccggcccaaggagcccgcgtggttcctggccaccgtcggcgtctcgcccgaccaccagggcaagggtctgggcagcgccgtcgtgctccccggagtggaggcggccgagcgcgccggggtgcccgccttcctggagacctccgcgccccgcaacctccccttctacgagcggctcggcttcaccgtcaccgccgacgtcgaggtgcccgaaggaccgcgcacctggtgcatgacccgcaagcccggtgcctga

SEQ ID NO: 9072 - DNA, 2586 bp, Artificial Sequence
  Synthetic Polynucloetide
atggccttaccagtgaccgccttgctcctgccgctggccttgctgctccacgccgccaggccgagcgtgatcgagctgacacagagccccaagttcatgagcaccagcgtgggcgacagagtgaacgtgacatacaaggccagccagaacgtgggcaccaacgtggcatggttccagcagaagcctggacagagccctaaggtgctgatctacagcgccagctacagatacagcggcgtgcccgatagattcacaggctctggcagcggcaccgacttcaccctgacaatcagcaacgtgcagagcgaggacctggccgagtatttctgccagcagtaccacacataccctctgacctttggcggaggcaccaagctggaaatcaagagactcgaggacctgaagaacgtgttcccacctgaggtggccgtgttcgagcctagcaaggccgagatcgcccacacccagaaagccaccctcgtgtgcctggctaccggcttctaccccgaccatgtggaactgtcttggtgggtcaacggcaaagaggtgcacagcggcgtgtgtaccgacccccagccactgaaagaacagcccgccctgaacgacagccggtactgcctgagcagcagactgagagtgtccgccaccttctggcagaacccccggaaccacttcagatgccaggtgcagttctacggcctgagcgagaacgacgagtggacccaggacagagccaagcccgtgacccagatcgtgtctgccgaagcctggggcagagccgattgcggcatcaccagcgccagctaccaccagggcgtgctgagcgccaccatcctgtacgagatcctgctgggcaaggccaccctgtacgccgtgctggtgtctgccctggtgctgatggctatggtcaagcggaaggacagccggggaagggccaagcgatctggatctggagcaacaaacttctcactactcaaacaagcaggtgacgtggaggagaatcccgggcctactagtatggactggatttggcgcatccttttccttgtcggcgctgctaccggcgcgcattccttcgaaagaatggctcaggttcagctgcaacagagcggagccgaacttgctagacctggcgcttccgtgaagatgagctgtaaagccagcggctacaccttcaccacctacaccatccactgggtccgaagaaggccaggccacgaccttgagtggatcggctacatcaaccccagcagcggctgctccgactacaaccagaacttcaagggcaagaccacactgaccgccgacaagagcagcaacaccgcctacatgcagctcaacagcctgaccagcgaggacagcgccgtgtactattgtgccagaagggccgactacggcaactacgagtacacttggtttgcctactggggccagggcaccaccgtgacagtttcttctacgcgtatccagaaccctgatcctgccgtgtaccagctgcgggatagcaagagcagcgacaagagcgtgtgtctgttcaccgacttcgacagccagaccaacgtgtcccagagcaaggactccgacgtgtacatcaccgataagtgcgtgctggacatgcggagcatggacttcaagagcaactccgccgtggcctggtccaacaagtccgatttcgcctgcgccaacgccttcaacaacagcattatccccgaggacacattcttcccaagcagcgacgtgccctgcgacgtgaagctggtggaaaagagcttcgagacagacaccaacctgaacttccagaacctgagcgtgatcggcttcagaatcctgctgctgaaagtggccggctttaacctgctgatgaccctgcggctgtggtccagccgcgccaagagaagcggatctggcgtgaagcagaccctgaatttcgacctgctgaagctggctggcgacgtggaatccaacccaggcccttctagaggccatatgaccgagtacaagcccacggtgcgcctcgccacccgcgacgacgtccccagggccgtacgcaccctcgccgccgcgttcgccgactaccccgccacgcgccacaccgtcgatccggaccgccacatcgagcgggtcaccgagctgcaagaactcttcctcacgcgcgtcgggctcgacatcggcaaggtgtgggtcgcggacgacggcgccgcggtggcggtctggaccacgccggagagcgtcgaagcgggggcggtgttcgccgagatcggcccgcgcatggccgagttgagcggttcccggctggccgcgcagcaacagatggaaggcctcctggcgccgcaccggcccaaggagcccgcgtggttcctggccaccgtcggcgtctcgcccgaccaccagggcaagggtctgggcagcgccgtcgtgctccccggagtggaggcggccgagcgcgccggggtgcccgccttcctggagacctccgcgccccgcaacctccccttctacgagcggctcggcttcaccgtcaccgccgacgtcgaggtgcccgaaggaccgcgcacctggtgcatgacccgcaagcccggtgcctga

SEQ ID NO: 9073 - DNA, 1884 bp, Artificial Sequence
  Synthetic Polynucloetide
atggccttaccagtgaccgccttgctcctgccgctggccttgctgctccacgccgccaggccgagcgtgatcgagctgacacagagccccaagttcatgagcaccagcgtgggcgacagagtgaacgtgacatacaaggccagccagaacgtgggcaccaacgtggcatggttccagcagaagcctggacagagccctaaggtgctgatctacagcgccagctacagatacagcggcgtgcccgatagattcacaggctctggcagcggcaccgacttcaccctgacaatcagcaacgtgcagagcgaggacctggccgagtatttctgccagcagtaccacacataccctctgacctttggcggaggcaccaagctggaaatcaagagactcgaggacctgaagaacgtgttcccacctgaggtggccgtgttcgagcctagcgaggccgagatcagccacacccagaaagccaccctcgtgtgcctggctaccggcttctaccccgaccatgtggaactgtcttggtgggtcaacggcaaagaggtgcacagcggcgtgtgtaccgacccccagccactgaaagaacagcccgccctgaacgacagccggtactgcctgagcagcagactgagagtgtccgccaccttctggcagaacccccggaaccacttcagatgccaggtgcagttctacggcctgagcgagaacgacgagtggacccaggacagagccaagcccgtgacccagatcgtgtctgccgaagcctggggcagagccgattgcggctttaccagcgagagctaccagcagggcgtgctgagcgccaccatcctgtacgagatcctgctgggcaaggccaccctgtacgccgtgctggtgtctgccctggtgctgatggctatggtcaagcggaaggacagccggggaagggccaagcgatctggatctggagcaacaaacttctcactactcaaacaagcaggtgacgtggaggagaatcccgggcctactagtatggactggatttggcgcatccttttccttgtcggcgctgctaccggcgcgcattccttcgaaagaatggctcaggttcagctgcaacagagcggagccgaacttgctagacctggcgcttccgtgaagatgagctgtaaagccagcggctacaccttcaccacctacaccatccactgggtccgaagaaggccaggccacgaccttgagtggatcggctacatcaaccccagcagcggctgctccgactacaaccagaacttcaagggcaagaccacactgaccgccgacaagagcagcaacaccgcctacatgcagctcaacagcctgaccagcgaggacagcgccgtgtactattgtgccagaagggccgactacggcaactacgagtacacttggtttgcctactggggccagggcaccaccgtgacagtttcttctacgcgtatccagaaccctgatcctgccgtgtaccagctgcgggatagcaagagcagcgacaagagcgtgtgtctgttcaccgacttcgacagccagaccaacgtgtcccagagcaaggactccgacgtgtacatcaccgataagtgcgtgctggacatgcggagcatggacttcaagagcaactccgccgtggcctggtccaacaagtccgatttcgcctgcgccaacgccttcaacaacagcattatccccgaggacacattcttcccaagccccgagagcagctgcgacgtgaagctggtggaaaagagcttcgagacagacaccaacctgaacttccagaacctgagcgtgatcggcttcagaatcctgctgctgaaagtggccggctttaacctgctgatgaccctgcggctgtggtccagc

SEQ ID NO: 9074 - DNA, 2559 bp, Artificial Sequence
  Synthetic Polynucloetide
atggccttaccagtgaccgccttgctcctgccgctggccttgctgctccacgccgccaggccgagcgtgatcgagctgacacagagccccaagttcatgagcaccagcgtgggcgacagagtgaacgtgacatacaaggccagccagaacgtgggcaccaacgtggcatggttccagcagaagcctggacagagccctaaggtgctgatctacagcgccagctacagatacagcggcgtgcccgatagattcacaggctctggcagcggcaccgacttcaccctgacaatcagcaacgtgcagagcgaggacctggccgagtatttctgccagcagtaccacacataccctctgacctttggcggaggcaccaagctggaaatcaagagactcgaggacctgaagaacgtgttcccacctgaggtggccgtgttcgagcctagcgaggccgagatcagccacacccagaaagccaccctcgtgtgcctggctaccggcttctaccccgaccatgtggaactgtcttggtgggtcaacggcaaagaggtgcacagcggcgtgtgtaccgacccccagccactgaaagaacagcccgccctgaacgacagccggtactgcctgagcagcagactgagagtgtccgccaccttctggcagaacccccggaaccacttcagatgccaggtgcagttctacggcctgagcgagaacgacgagtggacccaggacagagccaagcccgtgacccagatcgtgtctgccgaagcctggggcagagccgattgcggctttaccagcgagagctaccagcagggcgtgctgagcgccaccatcctgtacgagatcctgctgggcaaggccaccctgtacgccgtgctggtgtctgccctggtgctgatggctatggtcaagcggaaggacagccggggaagggccaagcgatctggatctggagcaacaaacttctcactactcaaacaagcaggtgacgtggaggagaatcccgggcctactagtatggactggatttggcgcatccttttccttgtcggcgctgctaccggcgcgcattccttcgaaagaatggctcaggttcagctgcaacagagcggagccgaacttgctagacctggcgcttccgtgaagatgagctgtaaagccagcggctacaccttcaccacctacaccatccactgggtccgaagaaggccaggccacgaccttgagtggatcggctacatcaaccccagcagcggctgctccgactacaaccagaacttcaagggcaagaccacactgaccgccgacaagagcagcaacaccgcctacatgcagctcaacagcctgaccagcgaggacagcgccgtgtactattgtgccagaagggccgactacggcaactacgagtacacttggtttgcctactggggccagggcaccaccgtgacagtttcttctacgcgtatccagaaccctgatcctgccgtgtaccagctgcgggatagcaagagcagcgacaagagcgtgtgtctgttcaccgacttcgacagccagaccaacgtgtcccagagcaaggactccgacgtgtacatcaccgataagtgcgtgctggacatgcggagcatggacttcaagagcaactccgccgtggcctggtccaacaagtccgatttcgcctgcgccaacgccttcaacaacagcattatccccgaggacacattcttcccaagccccgagagcagctgcgacgtgaagctggtggaaaagagcttcgagacagacaccaacctgaacttccagaacctgagcgtgatcggcttcagaatcctgctgctgaaagtggccggctttaacctgctgatgaccctgcggctgtggtccagccgcgccaagagaagcggatctggcgtgaagcagaccctgaatttcgacctgctgaagctggctggcgacgtggaatccaacccaggcccttctagaggcgggatccacaccatggctacctacgaggtgctgtgcgaggtggcaagaaagctgggcaccgacgacagagaagtggtgctgttcctgctgaacgtgttcatccctcagcctacactggcccagctgatcggtgcactgagagccctgaaagaggaaggccggctgacctttcctctgctggccgaatgcctgttcagagccggaagaagggatctgctgcgggacctgctgcatctggaccccagatttctggaaagacacctggccggcaccatgagctacttcagcccttaccagctgaccgtgctgcacgttgacggcgaactgtgcgccagagatattcggagcctgatcttcctgagcaaggacaccatcggcagccggtctacccctcagacatttctgcactgggtgtactgcatggaaaacctggacctgctcggccccacagatgtggatgccctgatgtccatgctgagaagcctgagcagagtggacctccagagacaggtgcagacactgatgggactgcacctgagcggacctagccacagccagcactacagacacacccct

SEQ ID NO: 9075 - DNA, 1896 bp, Artificial Sequence
  Synthetic Polynucloetide
atggccttaccagtgaccgccttgctcctgccgctggccttgctgctccacgccgccaggccgagcgtgatcgagctgacacagagccccaagttcatgagcaccagcgtgggcgacagagtgaacgtgacatacaaggccagccagaacgtgggcaccaacgtggcatggttccagcagaagcctggacagagccctaaggtgctgatctacagcgccagctacagatacagcggcgtgcccgatagattcacaggctctggcagcggcaccgacttcaccctgacaatcagcaacgtgcagagcgaggacctggccgagtatttctgccagcagtaccacacataccctctgacctttggcggaggcaccaagctggaaatcaagagactcgagatccagaaccctgatcctgccgtgtaccagctgcgggatagcaagagcagcgacaagagcgtgtgtctgttcaccgacttcgacagccagaccaacgtgtcccagagcaaggactccgacgtgtacatcaccgataagtgcgtgctggacatgcggagcatggacttcaagagcaactccgccgtggcctggtccaacaagtccgatttcgcctgcgccaacgccttcaacaacagcattatccccgaggacacattcttcccaagccccgagagcagctgcgacgtgaagctggtggaaaagagcttcgagacagacaccaacctgaacttccagaacctgagcgtgatcggcttcagaatcctgctgctgaaagtggccggctttaacctgctgatgaccctgcggctgtggtccagccgcgccaagagaagcggatctggcgtgaagcagaccctgaatttcgacctgctgaagctggctggcgacgtggaatccaacccaggccctactagtatggactggatttggcgcatccttttccttgtcggcgctgctaccggcgcgcattccttcgaaagaatggctcaggttcagctgcaacagagcggagccgaacttgctagacctggcgcttccgtgaagatgagctgtaaagccagcggctacaccttcaccacctacaccatccactgggtccgaagaaggccaggccacgaccttgagtggatcggctacatcaaccccagcagcggctgctccgactacaaccagaacttcaagggcaagaccacactgaccgccgacaagagcagcaacaccgcctacatgcagctcaacagcctgaccagcgaggacagcgccgtgtactattgtgccagaagggccgactacggcaactacgagtacacttggtttgcctactggggccagggcaccaccgtgacagtttcttctacgcgtgaggacctgaagaacgtgttcccacctgaggtggccgtgttcgagcctagcgaggccgagatcagccacacccagaaagccaccctcgtgtgcctggctaccggcttctaccccgaccatgtggaactgtcttggtgggtcaacggcaaagaggtgcacagcggcgtgtgtaccgacccccagccactgaaagaacagcccgccctgaacgacagccggtactgcctgagcagcagactgagagtgtccgccaccttctggcagaacccccggaaccacttcagatgccaggtgcagttctacggcctgagcgagaacgacgagtggacccaggacagagccaagcccgtgacccagatcgtgtctgccgaagcctggggcagagccgattgcggctttaccagcgagagctaccagcagggcgtgctgagcgccaccatcctgtacgagatcctgctgggcaaggccaccctgtacgccgtgctggtgtctgccctggtgctgatggctatggtcaagcggaaggacagccgggga

SEQ ID NO: 9076 - DNA, 2562 bp, Artificial Sequence
  Synthetic Polynucloetide
atggccttaccagtgaccgccttgctcctgccgctggccttgctgctccacgccgccaggccgagcgtgatcgagctgacacagagccccaagttcatgagcaccagcgtgggcgacagagtgaacgtgacatacaaggccagccagaacgtgggcaccaacgtggcatggttccagcagaagcctggacagagccctaaggtgctgatctacagcgccagctacagatacagcggcgtgcccgatagattcacaggctctggcagcggcaccgacttcaccctgacaatcagcaacgtgcagagcgaggacctggccgagtatttctgccagcagtaccacacataccctctgacctttggcggaggcaccaagctggaaatcaagagactcgagatccagaaccctgatcctgccgtgtaccagctgcgggatagcaagagcagcgacaagagcgtgtgtctgttcaccgacttcgacagccagaccaacgtgtcccagagcaaggactccgacgtgtacatcaccgataagtgcgtgctggacatgcggagcatggacttcaagagcaactccgccgtggcctggtccaacaagtccgatttcgcctgcgccaacgccttcaacaacagcattatccccgaggacacattcttcccaagccccgagagcagctgcgacgtgaagctggtggaaaagagcttcgagacagacaccaacctgaacttccagaacctgagcgtgatcggcttcagaatcctgctgctgaaagtggccggctttaacctgctgatgaccctgcggctgtggtccagccgcgccaagagaagcggatctggcgtgaagcagaccctgaatttcgacctgctgaagctggctggcgacgtggaatccaacccaggccctactagtatggactggatttggcgcatccttttccttgtcggcgctgctaccggcgcgcattccttcgaaagaatggctcaggttcagctgcaacagagcggagccgaacttgctagacctggcgcttccgtgaagatgagctgtaaagccagcggctacaccttcaccacctacaccatccactgggtccgaagaaggccaggccacgaccttgagtggatcggctacatcaaccccagcagcggctgctccgactacaaccagaacttcaagggcaagaccacactgaccgccgacaagagcagcaacaccgcctacatgcagctcaacagcctgaccagcgaggacagcgccgtgtactattgtgccagaagggccgactacggcaactacgagtacacttggtttgcctactggggccagggcaccaccgtgacagtttcttctacgcgtgaggacctgaagaacgtgttcccacctgaggtggccgtgttcgagcctagcgaggccgagatcagccacacccagaaagccaccctcgtgtgcctggctaccggcttctaccccgaccatgtggaactgtcttggtgggtcaacggcaaagaggtgcacagcggcgtgtgtaccgacccccagccactgaaagaacagcccgccctgaacgacagccggtactgcctgagcagcagactgagagtgtccgccaccttctggcagaacccccggaaccacttcagatgccaggtgcagttctacggcctgagcgagaacgacgagtggacccaggacagagccaagcccgtgacccagatcgtgtctgccgaagcctggggcagagccgattgcggctttaccagcgagagctaccagcagggcgtgctgagcgccaccatcctgtacgagatcctgctgggcaaggccaccctgtacgccgtgctggtgtctgccctggtgctgatggctatggtcaagcggaaggacagccggggaagggccaagcgatctggatctggagcaacaaacttctcactactcaaacaagcaggtgacgtggaggagaatcccgggccttctagaggcgggatccacaccatggctacctacgaggtgctgtgcgaggtggcaagaaagctgggcaccgacgacagagaagtggtgctgttcctgctgaacgtgttcatccctcagcctacactggcccagctgatcggtgcactgagagccctgaaagaggaaggccggctgacctttcctctgctggccgaatgcctgttcagagccggaagaagggatctgctgcgggacctgctgcatctggaccccagatttctggaaagacacctggccggcaccatgagctacttcagcccttaccagctgaccgtgctgcacgttgacggcgaactgtgcgccagagatattcggagcctgatcttcctgagcaaggacaccatcggcagccggtctacccctcagacatttctgcactgggtgtactgcatggaaaacctggacctgctcggccccacagatgtggatgccctgatgtccatgctgagaagcctgagcagagtggacctccagagacaggtgcagacactgatgggactgcacctgagcggacctagccacagccagcactacagacacacccct

SEQ ID NO: 9077 - DNA, 2721 bp, Artificial Sequence
  Synthetic Polynucloetide
atggccttaccagtgaccgccttgctcctgccgctggccttgctgctccacgccgccaggccgctcgaggggaaaccaattcccaaccctcttctgggactggattcaaccggcagcggcgaggacctgaagaacgtgttcccacctgaggtggccgtgttcgagcctagcaaggccgagatcgcccacacccagaaagccaccctcgtgtgcctggctaccggcttctaccccgaccatgtggaactgtcttggtgggtcaacggcaaagaggtgcacagcggcgtgtgtaccgacccccagccactgaaagaacagcccgccctgaacgacagccggtactgcctgagcagcagactgagagtgtccgccaccttctggcagaacccccggaaccacttcagatgccaggtgcagttctacggcctgagcgagaacgacgagtggacccaggacagagccaagcccgtgacccagatcgtgtctgccgaagcctggggcagagccgattgcggcatcaccagcgccagctaccaccagggcgtgctgagcgccaccatcctgtacgagatcctgctgggcaaggccaccctgtacgccgtgctggtgtctgccctggtgctgatggctatggtcaagcggaaggacagccggggaagggccaagcgatctggatctggagcaacaaacttctcactactcaaacaagcaggtgacgtggaggagaatcccgggcctactagcatggccttaccagtgaccgccttgctcctgccgctggccttgctgctccacgccgccaggccgagcgtgatcgagctgacacagagccccaagttcatgagcaccagcgtgggcgacagagtgaacgtgacatacaaggccagccagaacgtgggcaccaacgtggcatggttccagcagaagcctggacagagccctaaggtgctgatctacagcgccagctacagatacagcggcgtgcccgatagattcacaggctctggcagcggcaccgacttcaccctgacaatcagcaacgtgcagagcgaggacctggccgagtatttctgccagcagtaccacacataccctctgacctttggcggaggcaccaagctggaaatcaagagaggcggaggcggaagtggaggcggaggatctggcggcggaggctctagaatggctcaggttcagctgcaacagagcggagccgaacttgctagacctggcgcttccgtgaagatgagctgtaaagccagcggctacaccttcaccacctacaccatccactgggtccgaagaaggccaggccacgaccttgagtggatcggctacatcaaccccagcagcggctgctccgactacaaccagaacttcaagggcaagaccacactgaccgccgacaagagcagcaacaccgcctacatgcagctcaacagcctgaccagcgaggacagcgccgtgtactattgtgccagaagggccgactacggcaactacgagtacacttggtttgcctactggggccagggcaccaccgtgacagtttcttctacgcgtgagcagaaactgatctcggaagaggatgggagcggcatccagaaccctgatcctgccgtgtaccagctgcgggatagcaagagcagcgacaagagcgtgtgtctgttcaccgacttcgacagccagaccaacgtgtcccagagcaaggactccgacgtgtacatcaccgataagtgcgtgctggacatgcggagcatggacttcaagagcaactccgccgtggcctggtccaacaagtccgatttcgcctgcgccaacgccttcaacaacagcattatccccgaggacacattcttcccaagcagcgacgtgccctgcgacgtgaagctggtggaaaagagcttcgagacagacaccaacctgaacttccagaacctgagcgtgatcggcttcagaatcctgctgctgaaagtggccggctttaacctgctgatgaccctgcggctgtggtccagccgcgccaagagaagcggatctggcgtgaagcagaccctgaatttcgacctgctgaagctggctggcgacgtggaatccaacccaggcccttctagaggccatatgaccgagtacaagcccacggtgcgcctcgccacccgcgacgacgtccccagggccgtacgcaccctcgccgccgcgttcgccgactaccccgccacgcgccacaccgtcgatccggaccgccacatcgagcgggtcaccgagctgcaagaactcttcctcacgcgcgtcgggctcgacatcggcaaggtgtgggtcgcggacgacggcgccgcggtggcggtctggaccacgccggagagcgtcgaagcgggggcggtgttcgccgagatcggcccgcgcatggccgagttgagcggttcccggctggccgcgcagcaacagatggaaggcctcctggcgccgcaccggcccaaggagcccgcgtggttcctggccaccgtcggcgtctcgcccgaccaccagggcaagggtctgggcagcgccgtcgtgctccccggagtggaggcggccgagcgcgccggggtgcccgccttcctggagacctccgcgccccgcaacctccccttctacgagcggctcggcttcaccgtcaccgccgacgtcgaggtgcccgaaggaccgcgcacctggtgcatgacccgcaagcccggtgcctga

SEQ ID NO: 9078 - DNA, 2724 bp, Artificial Sequence
  Synthetic Polynucloetide
atggccttaccagtgaccgccttgctcctgccgctggccttgctgctccacgccgccaggccgctcgagcagaaactgatctcggaagaggatctgggctccggcgatcgccctgatcctgccgtgtaccagctgcgggatagcaagagcagcgacaagagcgtgtgtctgttcaccgacttcgacagccagaccaacgtgtcccagagcaaggactccgacgtgtacatcaccgataagtgcgtgctggacatgcggagcatggacttcaagagcaactccgccgtggcctggtccaacaagtccgatttcgcctgcgccaacgccttcaacaacagcattatccccgaggacacattcttcccaagccccgagagcagctgcgacgtgaagctggtggaaaagagcttcgagacagacaccaacctgaacttccagaacctgagcgtgatcggcttcagaatcctgctgctgaaagtggccggctttaacctgctgatgaccctgcggctgtggtccagctctagtcgcgccaagagaagcggatctggcgtgaagcagaccctgaatttcgacctgctgaagctggctggcgacgtggaatccaacccaggccccactagcatggccttaccagtgaccgccttgctcctgccgctggccttgctgctccacgccgccaggccgagcgtgatcgagctgacacagagccccaagttcatgagcaccagcgtgggcgacagagtgaacgtgacatacaaggccagccagaacgtgggcaccaacgtggcatggttccagcagaagcctggacagagccctaaggtgctgatctacagcgccagctacagatacagcggcgtgcccgatagattcacaggctctggcagcggcaccgacttcaccctgacaatcagcaacgtgcagagcgaggacctggccgagtatttctgccagcagtaccacacataccctctgacctttggcggaggcaccaagctggaaatcaagagaggcggaggcggaagtggaggcggaggatctggcggcggaggctctagaatggctcaggttcagctgcaacagagcggagccgaacttgctagacctggcgcttccgtgaagatgagctgtaaagccagcggctacaccttcaccacctacaccatccactgggtccgaagaaggccaggccacgaccttgagtggatcggctacatcaaccccagcagcggctgctccgactacaaccagaacttcaagggcaagaccacactgaccgccgacaagagcagcaacaccgcctacatgcagctcaacagcctgaccagcgaggacagcgccgtgtactattgtgccagaagggccgactacggcaactacgagtacacttggtttgcctactggggccagggcaccaccgtgacagtttcttctacgcgtgggaaaccaattcccaaccctcttctgggactggattcaaccggcagcggcgaggacctgaagaacgtgttcccacctgaggtggccgtgttcgagcctagcgaggccgagatcagccacacccagaaagccaccctcgtgtgcctggctaccggcttctaccccgaccatgtggaactgtcttggtgggtcaacggcaaagaggtgcacagcggcgtgtgtaccgacccccagccactgaaagaacagcccgccctgaacgacagccggtactgcctgagcagcagactgagagtgtccgccaccttctggcagaacccccggaaccacttcagatgccaggtgcagttctacggcctgagcgagaacgacgagtggacccaggacagagccaagcccgtgacccagatcgtgtctgccgaagcctggggcagagccgattgcggctttaccagcgagagctaccagcagggcgtgctgagcgccaccatcctgtacgagatcctgctgggcaaggccaccctgtacgccgtgctggtgtctgccctggtgctgatggctatggtcaagcggaaggacagccggggaagggccaagcgatctggatctggagcaacaaacttctcactactcaaacaagcaggtgacgtggaggagaatcccgggccttctagaggccatatgaccgagtacaagcccacggtgcgcctcgccacccgcgacgacgtccccagggccgtacgcaccctcgccgccgcgttcgccgactaccccgccacgcgccacaccgtcgatccggaccgccacatcgagcgggtcaccgagctgcaagaactcttcctcacgcgcgtcgggctcgacatcggcaaggtgtgggtcgcggacgacggcgccgcggtggcggtctggaccacgccggagagcgtcgaagcgggggcggtgttcgccgagatcggcccgcgcatggccgagttgagcggttcccggctggccgcgcagcaacagatggaaggcctcctggcgccgcaccggcccaaggagcccgcgtggttcctggccaccgtcggcgtctcgcccgaccaccagggcaagggtctgggcagcgccgtcgtgctccccggagtggaggcggccgagcgcgccggggtgcccgccttcctggagacctccgcgccccgcaacctccccttctacgagcggctcggcttcaccgtcaccgccgacgtcgaggtgcccgaaggaccgcgcacctggtgcatgacccgcaagcccggtgcctga

SEQ ID NO: 9079 - DNA, 2586 bp, Artificial Sequence
  Synthetic Polynucloetide
atggccttaccagtgaccgccttgctcctgccgctggccttgctgctccacgccgccaggccgagcgtgatcgagctgacacagagccccaagttcatgagcaccagcgtgggcgacagagtgaacgtgacatacaaggccagccagaacgtgggcaccaacgtggcatggttccagcagaagcctggacagagccctaaggtgctgatctacagcgccagctacagatacagcggcgtgcccgatagattcacaggctctggcagcggcaccgacttcaccctgacaatcagcaacgtgcagagcgaggacctggccgagtatttctgccagcagtaccacacataccctctgacctttggcggaggcaccaagctggaaatcaagagactcgaggacctgaagaacgtgttcccacctgaggtggccgtgttcgagcctagcgaggccgagatcagccacacccagaaagccaccctcgtgtgcctggctaccggcttctaccccgaccatgtggaactgtcttggtgggtcaacggcaaagaggtgcacagcggcgtgtctaccgacccccagccactgaaagaacagcccgccctgaacgacagccggtactgcctgagcagcagactgagagtgtccgccaccttctggcagaacccccggaaccacttcagatgccaggtgcagttctacggcctgagcgagaacgacgagtggacccaggacagagccaagcccgtgacccagatcgtgtctgccgaagcctggggcagagccgattgcggctttaccagcgagagctaccagcagggcgtgctgagcgccaccatcctgtacgagatcctgctgggcaaggccaccctgtacgccgtgctggtgtctgccctggtgctgatggctatggtcaagcggaaggacagccggggaagggccaagcgatctggatctggagcaacaaacttctcactactcaaacaagcaggtgacgtggaggagaatcccgggcctactagtatggactggatttggcgcatccttttccttgtcggcgctgctaccggcgcgcattccttcgaaagaatggctcaggttcagctgcaacagagcggagccgaacttgctagacctggcgcttccgtgaagatgagctgtaaagccagcggctacaccttcaccacctacaccatccactgggtccgaagaaggccaggccacgaccttgagtggatcggctacatcaaccccagcagcggctgctccgactacaaccagaacttcaagggcaagaccacactgaccgccgacaagagcagcaacaccgcctacatgcagctcaacagcctgaccagcgaggacagcgccgtgtactattgtgccagaagggccgactacggcaactacgagtacacttggtttgcctactggggccagggcaccaccgtgacagtttcttctacgcgtatccagaaccctgatcctgccgtgtaccagctgcgggatagcaagagcagcgacaagagcgtgtgtctgttcaccgacttcgacagccagaccaacgtgtcccagagcaaggactccgacgtgtacatcaccgataagaccgtgctggacatgcggagcatggacttcaagagcaactccgccgtggcctggtccaacaagtccgatttcgcctgcgccaacgccttcaacaacagcattatccccgaggacacattcttcccaagccccgagagcagctgcgacgtgaagctggtggaaaagagcttcgagacagacaccaacctgaacttccagaacctgagcgtgatcggcttcagaatcctgctgctgaaagtggccggctttaacctgctgatgaccctgcggctgtggtccagccgcgccaagagaagcggatctggcgtgaagcagaccctgaatttcgacctgctgaagctggctggcgacgtggaatccaacccaggcccttctagaggccatatgaccgagtacaagcccacggtgcgcctcgccacccgcgacgacgtccccagggccgtacgcaccctcgccgccgcgttcgccgactaccccgccacgcgccacaccgtcgatccggaccgccacatcgagcgggtcaccgagctgcaagaactcttcctcacgcgcgtcgggctcgacatcggcaaggtgtgggtcgcggacgacggcgccgcggtggcggtctggaccacgccggagagcgtcgaagcgggggcggtgttcgccgagatcggcccgcgcatggccgagttgagcggttcccggctggccgcgcagcaacagatggaaggcctcctggcgccgcaccggcccaaggagcccgcgtggttcctggccaccgtcggcgtctcgcccgaccaccagggcaagggtctgggcagcgccgtcgtgctccccggagtggaggcggccgagcgcgccggggtgcccgccttcctggagacctccgcgccccgcaacctccccttctacgagcggctcggcttcaccgtcaccgccgacgtcgaggtgcccgaaggaccgcgcacctggtgcatgacccgcaagcccggtgcctga

SEQ ID NO: 9080 - DNA, 2832 bp, Artificial Sequence
  Synthetic Polynucloetide
atggccttaccagtgaccgccttgctcctgccgctggccttgctgctccacgccgccaggccgagcgtgatcgagctgacacagagccccaagttcatgagcaccagcgtgggcgacagagtgaacgtgacatacaaggccagccagaacgtgggcaccaacgtggcatggttccagcagaagcctggacagagccctaaggtgctgatctacagcgccagctacagatacagcggcgtgcccgatagattcacaggctctggcagcggcaccgacttcaccctgacaatcagcaacgtgcagagcgaggacctggccgagtatttctgccagcagtaccacacataccctctgacctttggcggaggcaccaagctggaaatcaagagactcgaggacctgaagaacgtgttcccacctgaggtggccgtgttcgagcctagcgaggccgagatcagccacacccagaaagccaccctcgtgtgcctggctaccggcttctaccccgaccatgtggaactgtcttggtgggtcaacggcaaagaggtgcacagcggcgtgtctaccgacccccagccactgaaagaacagcccgccctgaacgacagccggtactgcctgagcagcagactgagagtgtccgccaccttctggcagaacccccggaaccacttcagatgccaggtgcagttctacggcctgagcgagaacgacgagtggacccaggacagagccaagcccgtgacccagatcgtgtctgccgaagcctggggcagagccgattgcggctttaccagcgagagctaccagcagggcgtgctgagcgccaccatcctgtacgagatcctgctgggcaaggccaccctgtacgccgtgctggtgtctgccctggtgctgatggctatggtcaagcggaaggacagccggggaagggccaagcgatctggatctggagcaacaaacttctcactactcaaacaagcaggtgacgtggaggagaatcccgggcctactagtatggactggatttggcgcatccttttccttgtcggcgctgctaccggcgcgcattccttcgaaagaatggctcaggttcagctgcaacagagcggagccgaacttgctagacctggcgcttccgtgaagatgagctgtaaagccagcggctacaccttcaccacctacaccatccactgggtccgaagaaggccaggccacgaccttgagtggatcggctacatcaaccccagcagcggctgctccgactacaaccagaacttcaagggcaagaccacactgaccgccgacaagagcagcaacaccgcctacatgcagctcaacagcctgaccagcgaggacagcgccgtgtactattgtgccagaagggccgactacggcaactacgagtacacttggtttgcctactggggccagggcaccaccgtgacagtttcttctacgcgtgagcagaaactgatctcggaagaggatgggagcggcaccccattcccttctctggcccctcccatcatgctgctggtggacggcaagcagcagatggtggtcgtgtgcctggtgctggatgtggccccacctggactggacagccccatctggtttagcgccggcaatggctctgccctggacgcctttacctacggcccaagccctgccaccgatggcacctggacaaatctggcccacctgagcctgcccagcgaggaactggcttcttgggagcctctcgtgtgccacacaggacctggcgctgagggacacagcagatccacccagcctatgcacctgtctggcgaggccagcaccgccagaacctgtcctcaggaacctctgagaggcacccctggcggagcactgtggctgggagtgctgagactgctgctgttcaagctgctgctgtttgacctgctgctgacctgctcctgtctgtgcgatcctgccggccctctgccttctcctgccaccaccacaagactgagagccctgggcagccacagactgcaccctgccacagagacaggcggcagagaggccacaagcagccctagaccccagcccagagacagaagatggggcgataccccccctggcagaaagcctggatctccagtccgcgccaagagaagcggatctggcgtgaagcagaccctgaatttcgacctgctgaagctggctggcgacgtggaatccaacccaggcccttctagaggccatatgaccgagtacaagcccacggtgcgcctcgccacccgcgacgacgtccccagggccgtacgcaccctcgccgccgcgttcgccgactaccccgccacgcgccacaccgtcgatccggaccgccacatcgagcgggtcaccgagctgcaagaactcttcctcacgcgcgtcgggctcgacatcggcaaggtgtgggtcgcggacgacggcgccgcggtggcggtctggaccacgccggagagcgtcgaagcgggggcggtgttcgccgagatcggcccgcgcatggccgagttgagcggttcccggctggccgcgcagcaacagatggaaggcctcctggcgccgcaccggcccaaggagcccgcgtggttcctggccaccgtcggcgtctcgcccgaccaccagggcaagggtctgggcagcgccgtcgtgctccccggagtggaggcggccgagcgcgccggggtgcccgccttcctggagacctccgcgccccgcaacctccccttctacgagcggctcggcttcaccgtcaccgccgacgtcgaggtgcccgaaggaccgcgcacctggtgcatgacccgcaagcccggtgcctga

SEQ ID NO: 9081 - DNA, 2886 bp, Artificial Sequence
  Synthetic Polynucloetide
atggccttaccagtgaccgccttgctcctgccgctggccttgctgctccacgccgccaggccgctcgaggacctgaagaacgtgttcccacctgaggtggccgtgttcgagcctagcgaggccgagatcagccacacccagaaagccaccctcgtgtgcctggctaccggcttctaccccgaccatgtggaactgtcttggtgggtcaacggcaaagaggtgcacagcggcgtgtctaccgacccccagccactgaaagaacagcccgccctgaacgacagccggtactgcctgagcagcagactgagagtgtccgccaccttctggcagaacccccggaaccacttcagatgccaggtgcagttctacggcctgagcgagaacgacgagtggacccaggacagagccaagcccgtgacccagatcgtgtctgccgaagcctggggcagagccgattgcggctttaccagcgagagctaccagcagggcgtgctgagcgccaccatcctgtacgagatcctgctgggcaaggccaccctgtacgccgtgctggtgtctgccctggtgctgatggctatggtcaagcggaaggacagccggggaagggccaagcgatctggatctggagcaacaaacttctcactactcaaacaagcaggtgacgtggaggagaatcccgggcctactagcatggccttaccagtgaccgccttgctcctgccgctggccttgctgctccacgccgccaggccgagcgtgatcgagctgacacagagccccaagttcatgagcaccagcgtgggcgacagagtgaacgtgacatacaaggccagccagaacgtgggcaccaacgtggcatggttccagcagaagcctggacagagccctaaggtgctgatctacagcgccagctacagatacagcggcgtgcccgatagattcacaggctctggcagcggcaccgacttcaccctgacaatcagcaacgtgcagagcgaggacctggccgagtatttctgccagcagtaccacacataccctctgacctttggcggaggcaccaagctggaaatcaagagaggcggaggcggaagtggaggcggaggatctggcggcggaggctctagaatggctcaggttcagctgcaacagagcggagccgaacttgctagacctggcgcttccgtgaagatgagctgtaaagccagcggctacaccttcaccacctacaccatccactgggtccgaagaaggccaggccacgaccttgagtggatcggctacatcaaccccagcagcggctgctccgactacaaccagaacttcaagggcaagaccacactgaccgccgacaagagcagcaacaccgcctacatgcagctcaacagcctgaccagcgaggacagcgccgtgtactattgtgccagaagggccgactacggcaactacgagtacacttggtttgcctactggggccagggcaccaccgtgacagtttcttctacgcgtgagcagaaactgatctcggaagaggatctggggagcggcaccccattcccttctctggcccctcccatcatgctgctggtggacggcaagcagcagatggtggtcgtgtgcctggtgctggatgtggccccacctggactggacagccccatctggtttagcgccggcaatggctctgccctggacgcctttacctacggcccaagccctgccaccgatggcacctggacaaatctggcccacctgagcctgcccagcgaggaactggcttcttgggagcctctcgtgtgccacacaggacctggcgctgagggacacagcagatccacccagcctatgcacctgtctggcgaggccagcaccgccagaacctgtcctcaggaacctctgagaggcacccctggcggagcactgtggctgggagtgctgagactgctgctgttcaagctgctgctgtttgacctgctgctgacctgctcctgtctgtgcgatcctgccggccctctgccttctcctgccaccaccacaagactgagagccctgggcagccacagactgcaccctgccacagagacaggcggcagagaggccacaagcagccctagaccccagcccagagacagaagatggggcgataccccccctggcagaaagcctggatctccagtccgcgccaagagaagcggatctggcgtgaagcagaccctgaatttcgacctgctgaagctggctggcgacgtggaatccaacccaggcccttctagatctagaggccatatgaccgagtacaagcccacggtgcgcctcgccacccgcgacgacgtccccagggccgtacgcaccctcgccgccgcgttcgccgactaccccgccacgcgccacaccgtcgatccggaccgccacatcgagcgggtcaccgagctgcaagaactcttcctcacgcgcgtcgggctcgacatcggcaaggtgtgggtcgcggacgacggcgccgcggtggcggtctggaccacgccggagagcgtcgaagcgggggcggtgttcgccgagatcggcccgcgcatggccgagttgagcggttcccggctggccgcgcagcaacagatggaaggcctcctggcgccgcaccggcccaaggagcccgcgtggttcctggccaccgtcggcgtctcgcccgaccaccagggcaagggtctgggcagcgccgtcgtgctccccggagtggaggcggccgagcgcgccggggtgcccgccttcctggagacctccgcgccccgcaacctccccttctacgagcggctcggcttcaccgtcaccgccgacgtcgaggtgcccgaaggaccgcgcacctggtgcatgacccgcaagcccggtgcctga

SEQ ID NO: 9082 - DNA, 2697 bp, Artificial Sequence
  Synthetic Polynucloetide
atggccttaccagtgaccgccttgctcctgccgctggccttgctgctccacgccgccaggccgagcgtgatcgagctgacacagagccccaagttcatgagcaccagcgtgggcgacagagtgaacgtgacatacaaggccagccagaacgtgggcaccaacgtggcatggttccagcagaagcctggacagagccctaaggtgctgatctacagcgccagctacagatacagcggcgtgcccgatagattcacaggctctggcagcggcaccgacttcaccctgacaatcagcaacgtgcagagcgaggacctggccgagtatttctgccagcagtaccacacataccctctgacctttggcggaggcaccaagctggaaatcaagagactcgaggggaaaccaattcccaaccctcttctgggactggattcaaccggcagcggcgacaagcagctggacgccgacgtgtcccccaagcctaccatcttcctgccctctatcgccgagacaaagctccagaaggccggcacctacctgtgcctgctggaaaagttcttcccagatgtgattaagatccactggcaggaaaagaagtccaacaccatcctgggcagccaggaaggcaacaccatgaagaccaacgacacctacatgaagttcagctggctgaccgtgcccgagaagtccctggacaaagaacacagatgcatcgtgcggcacgaaaacaacaagaacggcgtggaccaggaaatcatcttcccacccatcaagaccgatgtgattacaatggaccccaaggacaactgctccaaggacgccaacgataccctgctgctccagctgaccaacaccagcgcctactacatgtacttgttgctgctgctgaagtccgtggtgtacttcgccatcatcacatgctgcctgctgcggagaaccgccttctgctgcaacggcgagaagtctagggccaagcgatctggatctggagcaacaaacttctcactactcaaacaagcaggtgacgtggaggagaatcccgggcctactagtatggactggatttggcgcatccttttccttgtcggcgctgctaccggcgcgcattccttcgaaagaatggctcaggttcagctgcaacagagcggagccgaacttgctagacctggcgcttccgtgaagatgagctgtaaagccagcggctacaccttcaccacctacaccatccactgggtccgaagaaggccaggccacgaccttgagtggatcggctacatcaaccccagcagcggctgctccgactacaaccagaacttcaagggcaagaccacactgaccgccgacaagagcagcaacaccgcctacatgcagctcaacagcctgaccagcgaggacagcgccgtgtactattgtgccagaagggccgactacggcaactacgagtacacttggtttgcctactggggccagggcaccaccgtgacagtttcttctacgcgtgagcagaaactgatctcggaagaggatgggagcggcagccagcctcacaccaagcccagcgtgttcgtgatgaagaacggcaccaacgtggcctgcctcgtgaaagagttctaccccaaggacatcaggatcaacctggtgtccagcaagaagatcaccgagttcgaccccgccatcgtgatctcccccagcggcaagtacaacgccgtgaagctggggaagtacgaggacagcaacagcgtgacctgctccgtgcagcacgacaacaagaccgtgcacagcaccgactttgaagtgaaaaccgactccaccgaccacgtgaagcccaaagagacagagaacaccaagcagcccagcaagagctgccacaagcccaaggccatcgtgcacaccgagaaagtgaacatgatgagcctgaccgtgctgggcctgcggatgctgttcgccaaaaccgtggccgtgaacttcctgctgaccgccaagctgttcttcctccgcgccaagagaagcggatctggcgtgaagcagaccctgaatttcgacctgctgaagctggctggcgacgtggaatccaacccaggcccttctagaggccatatgaccgagtacaagcccacggtgcgcctcgccacccgcgacgacgtccccagggccgtacgcaccctcgccgccgcgttcgccgactaccccgccacgcgccacaccgtcgatccggaccgccacatcgagcgggtcaccgagctgcaagaactcttcctcacgcgcgtcgggctcgacatcggcaaggtgtgggtcgcggacgacggcgccgcggtggcggtctggaccacgccggagagcgtcgaagcgggggcggtgttcgccgagatcggcccgcgcatggccgagttgagcggttcccggctggccgcgcagcaacagatggaaggcctcctggcgccgcaccggcccaaggagcccgcgtggttcctggccaccgtcggcgtctcgcccgaccaccagggcaagggtctgggcagcgccgtcgtgctccccggagtggaggcggccgagcgcgccggggtgcccgccttcctggagacctccgcgccccgcaacctccccttctacgagcggctcggcttcaccgtcaccgccgacgtcgaggtgcccgaaggaccgcgcacctggtgcatgacccgcaagcccggtgcctga

SEQ ID NO: 9083 - DNA, 1908 bp, Artificial Sequence
  Synthetic Polynucloetide
atggccttaccagtgaccgccttgctcctgccgctggccttgctgctccacgccgccaggccgagcgtgatcgagctgacacagagccccaagttcatgagcaccagcgtgggcgacagagtgaacgtgacatacaaggccagccagaacgtgggcaccaacgtggcatggttccagcagaagcctggacagagccctaaggtgctgatctacagcgccagctacagatacagcggcgtgcccgatagattcacaggctctggcagcggcaccgacttcaccctgacaatcagcaacgtgcagagcgaggacctggccgagtatttctgccagcagtaccacacataccctctgacctttggcggaggcaccaagctggaaatcaagagactcgagagccagcctcacaccaagcccagcgtgttcgtgatgaagaacggcaccaacgtggcctgcctcgtgaaagagttctaccccaaggacatcaggatcaacctggtgtccagcaagaagatcaccgagttcgaccccgccatcgtgatctcccccagcggcaagtacaacgccgtgaagctggggaagtacgaggacagcaacagcgtgacctgctccgtgcagcacgacaacaagaccgtgcacagcaccgactttgaagtgaaaaccgactccaccgaccacgtgaagcccaaagagacagagaacaccaagcagcccagcaagagctgccacaagcccaaggccatcgtgcacaccgagaaagtgaacatgatgagcctgaccgtgctgggcctgcggatgctgttcgccaaaaccgtggccgtgaacttcctgctgaccgccaagctgttcttcctcagggccaagcgatctggatctggagcaacaaacttctcactactcaaacaagcaggtgacgtggaggagaatcccgggcctactagtatggactggatttggcgcatccttttccttgtcggcgctgctaccggcgcgcattccttcgaaagaatggctcaggttcagctgcaacagagcggagccgaacttgctagacctggcgcttccgtgaagatgagctgtaaagccagcggctacaccttcaccacctacaccatccactgggtccgaagaaggccaggccacgaccttgagtggatcggctacatcaaccccagcagcggctgctccgactacaaccagaacttcaagggcaagaccacactgaccgccgacaagagcagcaacaccgcctacatgcagctcaacagcctgaccagcgaggacagcgccgtgtactattgtgccagaagggccgactacggcaactacgagtacacttggtttgcctactggggccagggcaccaccgtgacagtttcttctacgcgtgacaagcagctggacgccgacgtgtcccccaagcctaccatcttcctgccctctatcgccgagacaaagctccagaaggccggcacctacctgtgcctgctggaaaagttcttcccagatgtgattaagatccactggcaggaaaagaagtccaacaccatcctgggcagccaggaaggcaacaccatgaagaccaacgacacctacatgaagttcagctggctgaccgtgcccgagaagtccctggacaaagaacacagatgcatcgtgcggcacgaaaacaacaagaacggcgtggaccaggaaatcatcttcccacccatcaagaccgatgtgattacaatggaccccaaggacaactgctccaaggacgccaacgataccctgctgctccagctgaccaacaccagcgcctactacatgtacttgttgctgctgctgaagtccgtggtgtacttcgccatcatcacatgctgcctgctgcggagaaccgccttctgctgcaacggcgagaagtct

SEQ ID NO: 9084 - DNA, 2742 bp, Artificial Sequence
  Synthetic Polynucloetide
atggccttaccagtgaccgccttgctcctgccgctggccttgctgctccacgccgccaggccgctcgaggggaaaccaattcccaaccctcttctgggactggattcaaccggcagcggcgacaagcagctggacgccgacgtgtcccccaagcctaccatcttcctgccctctatcgccgagacaaagctccagaaggccggcacctacctgtgcctgctggaaaagttcttcccagatgtgattaagatccactggcaggaaaagaagtccaacaccatcctgggcagccaggaaggcaacaccatgaagaccaacgacacctacatgaagttcagctggctgaccgtgcccgagaagtccctggacaaagaacacagatgcatcgtgcggcacgaaaacaacaagaacggcgtggaccaggaaatcatcttcccacccatcaagaccgatgtgattacaatggaccccaaggacaactgctccaaggacgccaacgataccctgctgctccagctgaccaacaccagcgcctactacatgtacttgttgctgctgctgaagtccgtggtgtacttcgccatcatcacatgctgcctgctgcggagaaccgccttctgctgcaacggcgagaagtctagggccaagcgatctggatctggagcaacaaacttctcactactcaaacaagcaggtgacgtggaggagaatcccgggcctactagcatggccttaccagtgaccgccttgctcctgccgctggccttgctgctccacgccgccaggccgagcgtgatcgagctgacacagagccccaagttcatgagcaccagcgtgggcgacagagtgaacgtgacatacaaggccagccagaacgtgggcaccaacgtggcatggttccagcagaagcctggacagagccctaaggtgctgatctacagcgccagctacagatacagcggcgtgcccgatagattcacaggctctggcagcggcaccgacttcaccctgacaatcagcaacgtgcagagcgaggacctggccgagtatttctgccagcagtaccacacataccctctgacctttggcggaggcaccaagctggaaatcaagagaggcggaggcggaagtggaggcggaggatctggcggcggaggctctagaatggctcaggttcagctgcaacagagcggagccgaacttgctagacctggcgcttccgtgaagatgagctgtaaagccagcggctacaccttcaccacctacaccatccactgggtccgaagaaggccaggccacgaccttgagtggatcggctacatcaaccccagcagcggctgctccgactacaaccagaacttcaagggcaagaccacactgaccgccgacaagagcagcaacaccgcctacatgcagctcaacagcctgaccagcgaggacagcgccgtgtactattgtgccagaagggccgactacggcaactacgagtacacttggtttgcctactggggccagggcaccaccgtgacagtttcttctacgcgtgagcagaaactgatctcggaagaggatgggagcggcagccagcctcacaccaagcccagcgtgttcgtgatgaagaacggcaccaacgtggcctgcctcgtgaaagagttctaccccaaggacatcaggatcaacctggtgtccagcaagaagatcaccgagttcgaccccgccatcgtgatctcccccagcggcaagtacaacgccgtgaagctggggaagtacgaggacagcaacagcgtgacctgctccgtgcagcacgacaacaagaccgtgcacagcaccgactttgaagtgaaaaccgactccaccgaccacgtgaagcccaaagagacagagaacaccaagcagcccagcaagagctgccacaagcccaaggccatcgtgcacaccgagaaagtgaacatgatgagcctgaccgtgctgggcctgcggatgctgttcgccaaaaccgtggccgtgaacttcctgctgaccgccaagctgttcttcctccgcgccaagagaagcggatctggcgtgaagcagaccctgaatttcgacctgctgaagctggctggcgacgtggaatccaacccaggcccttctagaggccatatgaccgagtacaagcccacggtgcgcctcgccacccgcgacgacgtccccagggccgtacgcaccctcgccgccgcgttcgccgactaccccgccacgcgccacaccgtcgatccggaccgccacatcgagcgggtcaccgagctgcaagaactcttcctcacgcgcgtcgggctcgacatcggcaaggtgtgggtcgcggacgacggcgccgcggtggcggtctggaccacgccggagagcgtcgaagcgggggcggtgttcgccgagatcggcccgcgcatggccgagttgagcggttcccggctggccgcgcagcaacagatggaaggcctcctggcgccgcaccggcccaaggagcccgcgtggttcctggccaccgtcggcgtctcgcccgaccaccagggcaagggtctgggcagcgccgtcgtgctccccggagtggaggcggccgagcgcgccggggtgcccgccttcctggagacctccgcgccccgcaacctccccttctacgagcggctcggcttcaccgtcaccgccgacgtcgaggtgcccgaaggaccgcgcacctggtgcatgacccgcaagcccggtgcctga

SEQ ID NO: 9085 - DNA, 3117 bp, Artificial Sequence
  Synthetic Polynucloetide
atggccttaccagtgaccgccttgctcctgccgctggccttgctgctccacgccgccaggccgagcgtgatcgagctgacacagagccccaagttcatgagcaccagcgtgggcgacagagtgaacgtgacatacaaggccagccagaacgtgggcaccaacgtggcatggttccagcagaagcctggacagagccctaaggtgctgatctacagcgccagctacagatacagcggcgtgcccgatagattcacaggctctggcagcggcaccgacttcaccctgacaatcagcaacgtgcagagcgaggacctggccgagtatttctgccagcagtaccacacataccctctgacctttggcggaggcaccaagctggaaatcaagagaggacagcctaaggccaatcctaccgtgacactgttccctccaagcagcgaagaactccaggccaacaaggccacacttgtgtgcctgatctccgacttctaccctggggctgtgacagtggcttggaaggccgatggatctcctgtgaaagccggcgtggaaaccaccaagccatccaagcagagcaacaacaaatacgccgccagctcctacctgagcctgacacctgagcagtggaagtcccacagatcctacagctgccaagtgacccacgaaggcagcaccgtggaaaagacagtggcccctacagagtgcagcggatcccagagcttcggcctgctggaccccaagctgtgctacctgctggatggcatcctgttcatctacggcgtgatcctgaccgccctgttcctgagagtgaagttcagcagaagcgccgacgcccctgcctaccagcagggacagaaccaactgtacaacgagctgaacctgggcagacgggaagagtacgacgtgctggacaagcggagaggcagggaccctgagatgggcggaaagccccagcggagaaagaacccccaggaaggactgtataacgaactccagaaagacaagatggccgaagcctacagcgagatcggcatgaagggcgagcggagaagaggcaagggccacgatggcctgtaccagggcctgagcaccgccaccaaggacacctatgacgccctgcacatgcaggccctgcctccaagaagggccaagcgatctggatctggagcaacaaacttctcactactcaaacaagcaggtgacgtggaggagaatcccgggcctactagtatggactggatttggcgcatccttttccttgtcggcgctgctaccggcgcgcattccttcgaaagaatggctcaggttcagctgcaacagagcggagccgaacttgctagacctggcgcttccgtgaagatgagctgtaaagccagcggctacaccttcaccacctacaccatccactgggtccgaagaaggccaggccacgaccttgagtggatcggctacatcaaccccagcagcggctgctccgactacaaccagaacttcaagggcaagaccacactgaccgccgacaagagcagcaacaccgcctacatgcagctcaacagcctgaccagcgaggacagcgccgtgtactattgtgccagaagggccgactacggcaactacgagtacacttggtttgcctactggggccagggcaccaccgtgacagtttcttctgcctctacaaagggaccctccgtgtttcctctggctcccagcagcaagtctacaagcggaggaacagccgctctgggctgcctggtcaaggattactttcccgagcctgtgaccgtgtcctggaatagcggagcactgacaagcggcgtgcacacctttccagccgtgctgcaaagcagcggcctgtactctctgagcagcgtggtcacagtgcctagctctagcctgggcacccagacctacatctgcaatgtgaaccacaagcctagcaacaccaaggtggacaagagagtggaacccaagagctgtggtacccagagttttgggttgttggaccctaaattgtgctatctgttggacggaatcctgttcatttacggagtgatcctgaccgcattgttcctgcgggttaagttttccagatccgcagacgcacccgcttaccaacaagggcagaaccaactctacaatgaacttaatttggggcggagggaagagtacgacgttctggacaaaaggaggggacgagatcccgagatgggcggaaagcctcagcgaaggaagaatccgcaagaggggctttataacgaactccagaaagataaaatggcagaagcctatagtgagattgggatgaagggagaaaggaggaggggtaaaggtcacgatgggttgtaccaaggattgagcacagccactaaagatacctatgatgcgctccacatgcaggccctgccgccaagacgcgccaagagaagcggatctggcgtgaagcagaccctgaatttcgacctgctgaagctggctggcgacgtggaatccaacccaggcccttctagaggccatatgaccgagtacaagcccacggtgcgcctcgccacccgcgacgacgtccccagggccgtacgcaccctcgccgccgcgttcgccgactaccccgccacgcgccacaccgtcgatccggaccgccacatcgagcgggtcaccgagctgcaagaactcttcctcacgcgcgtcgggctcgacatcggcaaggtgtgggtcgcggacgacggcgccgcggtggcggtctggaccacgccggagagcgtcgaagcgggggcggtgttcgccgagatcggcccgcgcatggccgagttgagcggttcccggctggccgcgcagcaacagatggaaggcctcctggcgccgcaccggcccaaggagcccgcgtggttcctggccaccgtcggcgtctcgcccgaccaccagggcaagggtctgggcagcgccgtcgtgctccccggagtggaggcggccgagcgcgccggggtgcccgccttcctggagacctccgcgccccgcaacctccccttctacgagcggctcggcttcaccgtcaccgccgacgtcgaggtgcccgaaggaccgcgcacctggtgcatgacccgcaagcccggtgcctga

SEQ ID NO: 9086 - DNA, 2472 bp, Artificial Sequence
  Synthetic Polynucloetide
atggccttaccagtgaccgccttgctcctgccgctggccttgctgctccacgccgccaggccgagcgtgatcgagctgacacagagccccaagttcatgagcaccagcgtgggcgacagagtgaacgtgacatacaaggccagccagaacgtgggcaccaacgtggcatggttccagcagaagcctggacagagccctaaggtgctgatctacagcgccagctacagatacagcggcgtgcccgatagattcacaggctctggcagcggcaccgacttcaccctgacaatcagcaacgtgcagagcgaggacctggccgagtatttctgccagcagtaccacacataccctctgacctttggcggaggcaccaagctggaaatcaagagactcgaggacctgaagaacgtgttcccacctgaggtggccgtgttcgagcctagcgaggccgagatcagccacacccagaaagccaccctcgtgtgcctggctaccggcttctaccccgaccatgtggaactgtcttggtgggtcaacggcaaagaggtgcacagcggcgtgtctaccgacccccagccactgaaagaacagcccgccctgaacgacagccggtactgcctgagcagcagactgagagtgtccgccaccttctggcagaacccccggaaccacttcagatgccaggtgcagttctacggcctgagcgagaacgacgagtggacccaggacagagccaagcccgtgacccagatcgtgtctgccgaagcctggggcagagccgattgcggatcccagagcttcggcctgctggaccccaagctgtgctacctgctggatggcatcctgttcatctacggcgtgatcctgaccgccctgttcctgagagtgaagttcagcagaagcgccgacgcccctgcctaccagcagggacagaaccaactgtacaacgagctgaacctgggcagacgggaagagtacgacgtgctggacaagcggagaggcagggaccctgagatgggcggaaagccccagcggagaaagaacccccaggaaggactgtataacgaactccagaaagacaagatggccgaagcctacagcgagatcggcatgaagggcgagcggagaagaggcaagggccacgatggcctgtaccagggcctgagcaccgccaccaaggacacctatgacgccctgcacatgcaggccctgcctccaagaagggccaagcgatctggatctggagcaacaaacttctcactactcaaacaagcaggtgacgtggaggagaatcccgggcctactagtatggactggatttggcgcatccttttccttgtcggcgctgctaccggcgcgcattccttcgaaagaatggctcaggttcagctgcaacagagcggagccgaacttgctagacctggcgcttccgtgaagatgagctgtaaagccagcggctacaccttcaccacctacaccatccactgggtccgaagaaggccaggccacgaccttgagtggatcggctacatcaaccccagcagcggctgctccgactacaaccagaacttcaagggcaagaccacactgaccgccgacaagagcagcaacaccgcctacatgcagctcaacagcctgaccagcgaggacagcgccgtgtactattgtgccagaagggccgactacggcaactacgagtacacttggtttgcctactggggccagggcaccaccgtgacagtttcttctacgcgtatccagaaccctgatcctgccgtgtaccagctgcgggatagcaagagcagcgacaagagcgtgtgtctgttcaccgacttcgacagccagaccaacgtgtcccagagcaaggactccgacgtgtacatcaccgataagaccgtgctggacatgcggagcatggacttcaagagcaactccgccgtggcctggtccaacaagtccgatttcgcctgcgccaacgccttcaacaacagcattatccccgaggacacattcttcccaagccccgagagcagctgcggtacccagagttttgggttgttggaccctaaattgtgctatctgttggacggaatcctgttcatttacggagtgatcctgaccgcattgttcctgcgggttaagttttccagatccgcagacgcacccgcttaccaacaagggcagaaccaactctacaatgaacttaatttggggcggagggaagagtacgacgttctggacaaaaggaggggacgagatcccgagatgggcggaaagcctcagcgaaggaagaatccgcaagaggggctttataacgaactccagaaagataaaatggcagaagcctatagtgagattgggatgaagggagaaaggaggaggggtaaaggtcacgatgggttgtaccaaggattgagcacagccactaaagatacctatgatgcgctccacatgcaggccctgccgccaaga

SEQ ID NO: 9087 - DNA, 2472 bp, Artificial Sequence
  Synthetic Polynucloetide
atggccttaccagtgaccgccttgctcctgccgctggccttgctgctccacgccgccaggccgagcgtgatcgagctgacacagagccccaagttcatgagcaccagcgtgggcgacagagtgaacgtgacatacaaggccagccagaacgtgggcaccaacgtggcatggttccagcagaagcctggacagagccctaaggtgctgatctacagcgccagctacagatacagcggcgtgcccgatagattcacaggctctggcagcggcaccgacttcaccctgacaatcagcaacgtgcagagcgaggacctggccgagtatttctgccagcagtaccacacataccctctgacctttggcggaggcaccaagctggaaatcaagagactcgaggacctgaagaacgtgttcccacctgaggtggccgtgttcgagcctagcaaggccgagatcgcccacacccagaaagccaccctcgtgtgcctggctaccggcttctaccccgaccatgtggaactgtcttggtgggtcaacggcaaagaggtgcacagcggcgtgtgtaccgacccccagccactgaaagaacagcccgccctgaacgacagccggtactgcctgagcagcagactgagagtgtccgccaccttctggcagaacccccggaaccacttcagatgccaggtgcagttctacggcctgagcgagaacgacgagtggacccaggacagagccaagcccgtgacccagatcgtgtctgccgaagcctggggcagagccgattgcggatcccagagcttcggcctgctggaccccaagctgtgctacctgctggatggcatcctgttcatctacggcgtgatcctgaccgccctgttcctgagagtgaagttcagcagaagcgccgacgcccctgcctaccagcagggacagaaccaactgtacaacgagctgaacctgggcagacgggaagagtacgacgtgctggacaagcggagaggcagggaccctgagatgggcggaaagccccagcggagaaagaacccccaggaaggactgtataacgaactccagaaagacaagatggccgaagcctacagcgagatcggcatgaagggcgagcggagaagaggcaagggccacgatggcctgtaccagggcctgagcaccgccaccaaggacacctatgacgccctgcacatgcaggccctgcctccaagaagggccaagcgatctggatctggagcaacaaacttctcactactcaaacaagcaggtgacgtggaggagaatcccgggcctactagtatggactggatttggcgcatccttttccttgtcggcgctgctaccggcgcgcattccttcgaaagaatggctcaggttcagctgcaacagagcggagccgaacttgctagacctggcgcttccgtgaagatgagctgtaaagccagcggctacaccttcaccacctacaccatccactgggtccgaagaaggccaggccacgaccttgagtggatcggctacatcaaccccagcagcggctgctccgactacaaccagaacttcaagggcaagaccacactgaccgccgacaagagcagcaacaccgcctacatgcagctcaacagcctgaccagcgaggacagcgccgtgtactattgtgccagaagggccgactacggcaactacgagtacacttggtttgcctactggggccagggcaccaccgtgacagtttcttctacgcgtatccagaaccctgatcctgccgtgtaccagctgcgggatagcaagagcagcgacaagagcgtgtgtctgttcaccgacttcgacagccagaccaacgtgtcccagagcaaggactccgacgtgtacatcaccgataagtgcgtgctggacatgcggagcatggacttcaagagcaactccgccgtggcctggtccaacaagtccgatttcgcctgcgccaacgccttcaacaacagcattatccccgaggacacattcttcccaagcagcgacgtgccctgcggtacccagagttttgggttgttggaccctaaattgtgctatctgttggacggaatcctgttcatttacggagtgatcctgaccgcattgttcctgcgggttaagttttccagatccgcagacgcacccgcttaccaacaagggcagaaccaactctacaatgaacttaatttggggcggagggaagagtacgacgttctggacaaaaggaggggacgagatcccgagatgggcggaaagcctcagcgaaggaagaatccgcaagaggggctttataacgaactccagaaagataaaatggcagaagcctatagtgagattgggatgaagggagaaaggaggaggggtaaaggtcacgatgggttgtaccaaggattgagcacagccactaaagatacctatgatgcgctccacatgcaggccctgccgccaaga

SEQ ID NO: 9088 - DNA, 2685 bp, Artificial Sequence
  Synthetic Polynucloetide
atggccttaccagtgaccgccttgctcctgccgctggccttgctgctccacgccgccaggccgagcgtgatcgagctgacacagagccccaagttcatgagcaccagcgtgggcgacagagtgaacgtgacatacaaggccagccagaacgtgggcaccaacgtggcatggttccagcagaagcctggacagagccctaaggtgctgatctacagcgccagctacagatacagcggcgtgcccgatagattcacaggctctggcagcggcaccgacttcaccctgacaatcagcaacgtgcagagcgaggacctggccgagtatttctgccagcagtaccacacataccctctgacctttggcggaggcaccaagctggaaatcaagagactcgaggggaaaccaattcccaaccctcttctgggactggattcaaccggcagcggcgaggacctgaagaacgtgttcccacctgaggtggccgtgttcgagcctagcgaggccgagatcagccacacccagaaagccaccctcgtgtgcctggctaccggcttctaccccgaccatgtggaactgtcttggtgggtcaacggcaaagaggtgcacagcggcgtgtctaccgacccccagccactgaaagaacagcccgccctgaacgacagccggtactgcctgagcagcagactgagagtgtccgccaccttctggcagaacccccggaaccacttcagatgccaggtgcagttctacggcctgagcgagaacgacgagtggacccaggacagagccaagcccgtgacccagatcgtgtctgccgaagcctggggcagagccgattgcggatcccagagcttcggcctgctggaccccaagctgtgctacctgctggatggcatcctgttcatctacggcgtgatcctgaccgccctgttcctgagagtgaagttcagcagaagcgccgacgcccctgcctaccagcagggacagaaccaactgtacaacgagctgaacctgggcagacgggaagagtacgacgtgctggacaagcggagaggcagggaccctgagatgggcggaaagccccagcggagaaagaacccccaggaaggactgtataacgaactccagaaagacaagatggccgaagcctacagcgagatcggcatgaagggcgagcggagaagaggcaagggccacgatggcctgtaccagggcctgagcaccgccaccaaggacacctatgacgccctgcacatgcaggccctgcctccaagaagggccaagcgatctggatctggagcaacaaacttctcactactcaaacaagcaggtgacgtggaggagaatcccgggcctactagtatggactggatttggcgcatccttttccttgtcggcgctgctaccggcgcgcattccttcgaaagaatggctcaggttcagctgcaacagagcggagccgaacttgctagacctggcgcttccgtgaagatgagctgtaaagccagcggctacaccttcaccacctacaccatccactgggtccgaagaaggccaggccacgaccttgagtggatcggctacatcaaccccagcagcggctgctccgactacaaccagaacttcaagggcaagaccacactgaccgccgacaagagcagcaacaccgcctacatgcagctcaacagcctgaccagcgaggacagcgccgtgtactattgtgccagaagggccgactacggcaactacgagtacacttggtttgcctactggggccagggcaccaccgtgacagtttcttctacgcgtgagcagaaactgatctcggaagaggatgggagcggcatccagaaccctgatcctgccgtgtaccagctgcgggatagcaagagcagcgacaagagcgtgtgtctgttcaccgacttcgacagccagaccaacgtgtcccagagcaaggactccgacgtgtacatcaccgataagaccgtgctggacatgcggagcatggacttcaagagcaactccgccgtggcctggtccaacaagtccgatttcgcctgcgccaacgccttcaacaacagcattatccccgaggacacattcttcccaagccccgagagcagctgcggtacccagagttttgggttgttggaccctaaattgtgctatctgttggacggaatcctgttcatttacggagtgatcctgaccgcattgttcctgaggagcaagcggtcacggctgctccacagcgattacatgaatatgacaccacgaagaccgggtcctactcgcaaacactaccaaccctacgcacctccccgcgactttgcagcgtaccgatctcgggttaagttttccagatccgcagacgcacccgcttaccaacaagggcagaaccaactctacaatgaacttaatttggggcggagggaagagtacgacgttctggacaaaaggaggggacgagatcccgagatgggcggaaagcctcagcgaaggaagaatccgcaagaggggctttataacgaactccagaaagataaaatggcagaagcctatagtgagattgggatgaagggagaaaggaggaggggtaaaggtcacgatgggttgtaccaaggattgagcacagccactaaagatacctatgatgcgctccacatgcaggccctgccgccaaga

SEQ ID NO: 9089 - DNA, 2808 bp, Artificial Sequence
  Synthetic Polynucloetide
atggccttaccagtgaccgccttgctcctgccgctggccttgctgctccacgccgccaggccgagcgtgatcgagctgacacagagccccaagttcatgagcaccagcgtgggcgacagagtgaacgtgacatacaaggccagccagaacgtgggcaccaacgtggcatggttccagcagaagcctggacagagccctaaggtgctgatctacagcgccagctacagatacagcggcgtgcccgatagattcacaggctctggcagcggcaccgacttcaccctgacaatcagcaacgtgcagagcgaggacctggccgagtatttctgccagcagtaccacacataccctctgacctttggcggaggcaccaagctggaaatcaagagactcgaggggaaaccaattcccaaccctcttctgggactggattcaaccggcagcggcgaggacctgaagaacgtgttcccacctgaggtggccgtgttcgagcctagcgaggccgagatcagccacacccagaaagccaccctcgtgtgcctggctaccggcttctaccccgaccatgtggaactgtcttggtgggtcaacggcaaagaggtgcacagcggcgtgtctaccgacccccagccactgaaagaacagcccgccctgaacgacagccggtactgcctgagcagcagactgagagtgtccgccaccttctggcagaacccccggaaccacttcagatgccaggtgcagttctacggcctgagcgagaacgacgagtggacccaggacagagccaagcccgtgacccagatcgtgtctgccgaagcctggggcagagccgattgcggatcccagagcttcggcctgctggaccccaagctgtgctacctgctggatggcatcctgttcatctacggcgtgatcctgaccgccctgttcctgaggagtaagaggagcaggctcctgcacagtgactacatgaacatgactccacgccgccccggacccacccgcaagcattaccagccctatgccccaccacgcgacttcgcagcctatcgctccagagtgaagttcagcagaagcgccgacgcccctgcctaccagcagggacagaaccaactgtacaacgagctgaacctgggcagacgggaagagtacgacgtgctggacaagcggagaggcagggaccctgagatgggcggaaagccccagcggagaaagaacccccaggaaggactgtataacgaactccagaaagacaagatggccgaagcctacagcgagatcggcatgaagggcgagcggagaagaggcaagggccacgatggcctgtaccagggcctgagcaccgccaccaaggacacctatgacgccctgcacatgcaggccctgcctccaagaagggccaagcgatctggatctggagcaacaaacttctcactactcaaacaagcaggtgacgtggaggagaatcccgggcctactagtatggactggatttggcgcatccttttccttgtcggcgctgctaccggcgcgcattccttcgaaagaatggctcaggttcagctgcaacagagcggagccgaacttgctagacctggcgcttccgtgaagatgagctgtaaagccagcggctacaccttcaccacctacaccatccactgggtccgaagaaggccaggccacgaccttgagtggatcggctacatcaaccccagcagcggctgctccgactacaaccagaacttcaagggcaagaccacactgaccgccgacaagagcagcaacaccgcctacatgcagctcaacagcctgaccagcgaggacagcgccgtgtactattgtgccagaagggccgactacggcaactacgagtacacttggtttgcctactggggccagggcaccaccgtgacagtttcttctacgcgtgagcagaaactgatctcggaagaggatgggagcggcatccagaaccctgatcctgccgtgtaccagctgcgggatagcaagagcagcgacaagagcgtgtgtctgttcaccgacttcgacagccagaccaacgtgtcccagagcaaggactccgacgtgtacatcaccgataagaccgtgctggacatgcggagcatggacttcaagagcaactccgccgtggcctggtccaacaagtccgatttcgcctgcgccaacgccttcaacaacagcattatccccgaggacacattcttcccaagccccgagagcagctgcggtacccagagttttgggttgttggaccctaaattgtgctatctgttggacggaatcctgttcatttacggagtgatcctgaccgcattgttcctgaggagcaagcggtcacggctgctccacagcgattacatgaatatgacaccacgaagaccgggtcctactcgcaaacactaccaaccctacgcacctccccgcgactttgcagcgtaccgatctcgggttaagttttccagatccgcagacgcacccgcttaccaacaagggcagaaccaactctacaatgaacttaatttggggcggagggaagagtacgacgttctggacaaaaggaggggacgagatcccgagatgggcggaaagcctcagcgaaggaagaatccgcaagaggggctttataacgaactccagaaagataaaatggcagaagcctatagtgagattgggatgaagggagaaaggaggaggggtaaaggtcacgatgggttgtaccaaggattgagcacagccactaaagatacctatgatgcgctccacatgcaggccctgccgccaaga

SEQ ID NO: 9090 - DNA, 2691 bp, Artificial Sequence
  Synthetic Polynucloetide
atggccttaccagtgaccgccttgctcctgccgctggccttgctgctccacgccgccaggccgagcgtgatcgagctgacacagagccccaagttcatgagcaccagcgtgggcgacagagtgaacgtgacatacaaggccagccagaacgtgggcaccaacgtggcatggttccagcagaagcctggacagagccctaaggtgctgatctacagcgccagctacagatacagcggcgtgcccgatagattcacaggctctggcagcggcaccgacttcaccctgacaatcagcaacgtgcagagcgaggacctggccgagtatttctgccagcagtaccacacataccctctgacctttggcggaggcaccaagctggaaatcaagagactcgaggggaaaccaattcccaaccctcttctgggactggattcaaccggcagcggcgaggacctgaagaacgtgttcccacctgaggtggccgtgttcgagcctagcgaggccgagatcagccacacccagaaagccaccctcgtgtgcctggctaccggcttctaccccgaccatgtggaactgtcttggtgggtcaacggcaaagaggtgcacagcggcgtgtctaccgacccccagccactgaaagaacagcccgccctgaacgacagccggtactgcctgagcagcagactgagagtgtccgccaccttctggcagaacccccggaaccacttcagatgccaggtgcagttctacggcctgagcgagaacgacgagtggacccaggacagagccaagcccgtgacccagatcgtgtctgccgaagcctggggcagagccgattgcggatcccagagcttcggcctgctggaccccaagctgtgctacctgctggatggcatcctgttcatctacggcgtgatcctgaccgccctgttcctgagagtgaagttcagcagaagcgccgacgcccctgcctaccagcagggacagaaccaactgtacaacgagctgaacctgggcagacgggaagagtacgacgtgctggacaagcggagaggcagggaccctgagatgggcggaaagccccagcggagaaagaacccccaggaaggactgtataacgaactccagaaagacaagatggccgaagcctacagcgagatcggcatgaagggcgagcggagaagaggcaagggccacgatggcctgtaccagggcctgagcaccgccaccaaggacacctatgacgccctgcacatgcaggccctgcctccaagaagggccaagcgatctggatctggagcaacaaacttctcactactcaaacaagcaggtgacgtggaggagaatcccgggcctactagtatggactggatttggcgcatccttttccttgtcggcgctgctaccggcgcgcattccttcgaaagaatggctcaggttcagctgcaacagagcggagccgaacttgctagacctggcgcttccgtgaagatgagctgtaaagccagcggctacaccttcaccacctacaccatccactgggtccgaagaaggccaggccacgaccttgagtggatcggctacatcaaccccagcagcggctgctccgactacaaccagaacttcaagggcaagaccacactgaccgccgacaagagcagcaacaccgcctacatgcagctcaacagcctgaccagcgaggacagcgccgtgtactattgtgccagaagggccgactacggcaactacgagtacacttggtttgcctactggggccagggcaccaccgtgacagtttcttctacgcgtgagcagaaactgatctcggaagaggatctggggagcggcatccagaaccctgatcctgccgtgtaccagctgcgggatagcaagagcagcgacaagagcgtgtgtctgttcaccgacttcgacagccagaccaacgtgtcccagagcaaggactccgacgtgtacatcaccgataagaccgtgctggacatgcggagcatggacttcaagagcaactccgccgtggcctggtccaacaagtccgatttcgcctgcgccaacgccttcaacaacagcattatccccgaggacacattcttcccaagccccgagagcagctgcggtacccagagttttgggttgttggaccctaaattgtgctatctgttggacggaatcctgttcatttacggagtgatcctgaccgcattgttcctgaagagaggccggaagaagctgctgtacatcttcaagcagcctttcatgcggcccgtgcagaccacccaggaagaggacggctgctcctgccggttccccgaggaagaagaaggcggctgcgagctgcgggttaagttttccagatccgcagacgcacccgcttaccaacaagggcagaaccaactctacaatgaacttaatttggggcggagggaagagtacgacgttctggacaaaaggaggggacgagatcccgagatgggcggaaagcctcagcgaaggaagaatccgcaagaggggctttataacgaactccagaaagataaaatggcagaagcctatagtgagattgggatgaagggagaaaggaggaggggtaaaggtcacgatgggttgtaccaaggattgagcacagccactaaagatacctatgatgcgctccacatgcaggccctgccgccaaga

SEQ ID NO: 9091 - DNA, 2817 bp, Artificial Sequence
  Synthetic Polynucloetide
atggccttaccagtgaccgccttgctcctgccgctggccttgctgctccacgccgccaggccgagcgtgatcgagctgacacagagccccaagttcatgagcaccagcgtgggcgacagagtgaacgtgacatacaaggccagccagaacgtgggcaccaacgtggcatggttccagcagaagcctggacagagccctaaggtgctgatctacagcgccagctacagatacagcggcgtgcccgatagattcacaggctctggcagcggcaccgacttcaccctgacaatcagcaacgtgcagagcgaggacctggccgagtatttctgccagcagtaccacacataccctctgacctttggcggaggcaccaagctggaaatcaagagactcgaggggaaaccaattcccaaccctcttctgggactggattcaaccggcagcggcgaggacctgaagaacgtgttcccacctgaggtggccgtgttcgagcctagcgaggccgagatcagccacacccagaaagccaccctcgtgtgcctggctaccggcttctaccccgaccatgtggaactgtcttggtgggtcaacggcaaagaggtgcacagcggcgtgtctaccgacccccagccactgaaagaacagcccgccctgaacgacagccggtactgcctgagcagcagactgagagtgtccgccaccttctggcagaacccccggaaccacttcagatgccaggtgcagttctacggcctgagcgagaacgacgagtggacccaggacagagccaagcccgtgacccagatcgtgtctgccgaagcctggggcagagccgattgcggatcccagagcttcggcctgctggaccccaagctgtgctacctgctggatggcatcctgttcatctacggcgtgatcctgaccgccctgttcctgaaacggggcagaaagaaactcctgtatatattcaaacaaccatttatgagaccagtacaaactactcaagaggaagatggctgtagctgccgatttccagaagaagaagaaggaggatgtgaactgagagtgaagttcagcagaagcgccgacgcccctgcctaccagcagggacagaaccaactgtacaacgagctgaacctgggcagacgggaagagtacgacgtgctggacaagcggagaggcagggaccctgagatgggcggaaagccccagcggagaaagaacccccaggaaggactgtataacgaactccagaaagacaagatggccgaagcctacagcgagatcggcatgaagggcgagcggagaagaggcaagggccacgatggcctgtaccagggcctgagcaccgccaccaaggacacctatgacgccctgcacatgcaggccctgcctccaagaagggccaagcgatctggatctggagcaacaaacttctcactactcaaacaagcaggtgacgtggaggagaatcccgggcctactagtatggactggatttggcgcatccttttccttgtcggcgctgctaccggcgcgcattccttcgaaagaatggctcaggttcagctgcaacagagcggagccgaacttgctagacctggcgcttccgtgaagatgagctgtaaagccagcggctacaccttcaccacctacaccatccactgggtccgaagaaggccaggccacgaccttgagtggatcggctacatcaaccccagcagcggctgctccgactacaaccagaacttcaagggcaagaccacactgaccgccgacaagagcagcaacaccgcctacatgcagctcaacagcctgaccagcgaggacagcgccgtgtactattgtgccagaagggccgactacggcaactacgagtacacttggtttgcctactggggccagggcaccaccgtgacagtttcttctacgcgtgagcagaaactgatctcggaagaggatctggggagcggcatccagaaccctgatcctgccgtgtaccagctgcgggatagcaagagcagcgacaagagcgtgtgtctgttcaccgacttcgacagccagaccaacgtgtcccagagcaaggactccgacgtgtacatcaccgataagaccgtgctggacatgcggagcatggacttcaagagcaactccgccgtggcctggtccaacaagtccgatttcgcctgcgccaacgccttcaacaacagcattatccccgaggacacattcttcccaagccccgagagcagctgcggtacccagagttttgggttgttggaccctaaattgtgctatctgttggacggaatcctgttcatttacggagtgatcctgaccgcattgttcctgaagagaggccggaagaagctgctgtacatcttcaagcagcctttcatgcggcccgtgcagaccacccaggaagaggacggctgctcctgccggttccccgaggaagaagaaggcggctgcgagctgcgggttaagttttccagatccgcagacgcacccgcttaccaacaagggcagaaccaactctacaatgaacttaatttggggcggagggaagagtacgacgttctggacaaaaggaggggacgagatcccgagatgggcggaaagcctcagcgaaggaagaatccgcaagaggggctttataacgaactccagaaagataaaatggcagaagcctatagtgagattgggatgaagggagaaaggaggaggggtaaaggtcacgatgggttgtaccaaggattgagcacagccactaaagatacctatgatgcgctccacatgcaggccctgccgccaaga

SEQ ID NO: 9092 - DNA, 2490 bp, Artificial Sequence
  Synthetic Polynucloetide
atggccttaccagtgaccgccttgctcctgccgctggccttgctgctccacgccgccaggccgagcgtgatcgagctgacacagagccccaagttcatgagcaccagcgtgggcgacagagtgaacgtgacatacaaggccagccagaacgtgggcaccaacgtggcatggttccagcagaagcctggacagagccctaaggtgctgatctacagcgccagctacagatacagcggcgtgcccgatagattcacaggctctggcagcggcaccgacttcaccctgacaatcagcaacgtgcagagcgaggacctggccgagtatttctgccagcagtaccacacataccctctgacctttggcggaggcaccaagctggaaatcaagagactcgagcagagcttcggcctgctggaccccaagctgtgctacctgctggatggcatcctgttcatctacggcgtgatcctgaccgccctgttcctgagagtgaagttcagcagaagcgccgacgcccctgcctaccagcagggacagaaccaactgtacaacgagctgaacctgggcagacgggaagagtacgacgtgctggacaagcggagaggcagggaccctgagatgggcggaaagccccagcggagaaagaacccccaggaaggactgtataacgaactccagaaagacaagatggccgaagcctacagcgagatcggcatgaagggcgagcggagaagaggcaagggccacgatggcctgtaccagggcctgagcaccgccaccaaggacacctatgacgccctgcacatgcaggccctgcctccaagaagggccaagcgatctggatctggagcaacaaacttctcactactcaaacaagcaggtgacgtggaggagaatcccgggcctactagtatggactggatttggcgcatccttttccttgtcggcgctgctaccggcgcgcattccttcgaaagaatggctcaggttcagctgcaacagagcggagccgaacttgctagacctggcgcttccgtgaagatgagctgtaaagccagcggctacaccttcaccacctacaccatccactgggtccgaagaaggccaggccacgaccttgagtggatcggctacatcaaccccagcagcggctgctccgactacaaccagaacttcaagggcaagaccacactgaccgccgacaagagcagcaacaccgcctacatgcagctcaacagcctgaccagcgaggacagcgccgtgtactattgtgccagaagggccgactacggcaactacgagtacacttggtttgcctactggggccagggcaccaccgtgacagtttcttctacgcgtcagagttttgggttgttggaccctaaattgtgctatctgttggacggaatcctgttcatttacggagtgatcctgaccgcattgttcctgcgggttaagttttccagatccgcagacgcacccgcttaccaacaagggcagaaccaactctacaatgaacttaatttggggcggagggaagagtacgacgttctggacaaaaggaggggacgagatcccgagatgggcggaaagcctcagcgaaggaagaatccgcaagaggggctttataacgaactccagaaagataaaatggcagaagcctatagtgagattgggatgaagggagaaaggaggaggggtaaaggtcacgatgggttgtaccaaggattgagcacagccactaaagatacctatgatgcgctccacatgcaggccctgccgccaagacgcgccaagagaagcggatctggcgtgaagcagaccctgaatttcgacctgctgaagctggctggcgacgtggaatccaacccaggcccttctagaggccatatgaccgagtacaagcccacggtgcgcctcgccacccgcgacgacgtccccagggccgtacgcaccctcgccgccgcgttcgccgactaccccgccacgcgccacaccgtcgatccggaccgccacatcgagcgggtcaccgagctgcaagaactcttcctcacgcgcgtcgggctcgacatcggcaaggtgtgggtcgcggacgacggcgccgcggtggcggtctggaccacgccggagagcgtcgaagcgggggcggtgttcgccgagatcggcccgcgcatggccgagttgagcggttcccggctggccgcgcagcaacagatggaaggcctcctggcgccgcaccggcccaaggagcccgcgtggttcctggccaccgtcggcgtctcgcccgaccaccagggcaagggtctgggcagcgccgtcgtgctccccggagtggaggcggccgagcgcgccggggtgcccgccttcctggagacctccgcgccccgcaacctccccttctacgagcggctcggcttcaccgtcaccgccgacgtcgaggtgcccgaaggaccgcgcacctggtgcatgacccgcaagcccggtgcctga

SEQ ID NO: 9093 - DNA, 1962 bp, Artificial Sequence
  Synthetic Polynucloetide
atggccttaccagtgaccgccttgctcctgccgctggccttgctgctccacgccgccaggccgagcgtgatcgagctgacacagagccccaagttcatgagcaccagcgtgggcgacagagtgaacgtgacatacaaggccagccagaacgtgggcaccaacgtggcatggttccagcagaagcctggacagagccctaaggtgctgatctacagcgccagctacagatacagcggcgtgcccgatagattcacaggctctggcagcggcaccgacttcaccctgacaatcagcaacgtgcagagcgaggacctggccgagtatttctgccagcagtaccacacataccctctgacctttggcggaggcaccaagctggaaatcaagagactcgagggacagcctaaggccaatcctaccgtgacactgttccctccaagcagcgaagaactccaggccaacaaggccacacttgtgtgcctgatctccgacttctaccctggggctgtgacagtggcttggaaggccgatggatctcctgtgaaagccggcgtggaaaccaccaagccatccaagcagagcaacaacaaatacgccgccagctcctacctgagcctgacacctgagcagtggaagtcccacagatcctacagctgccaagtgacccacgaaggcagcaccgtggaaaagacagtggcccctacagagtgcagccccatcaagaccgatgtgattacaatggaccccaaggacaactgctccaaggacgccaacgataccctgctgctccagctgaccaacaccagcgcctactacatgtacttgttgctgctgctgaagtccgtggtgtacttcgccatcatcacatgctgcctgctgcggagaaccgccttctgctgcaacggcgagaagtctagggccaagcgatctggatctggagcaacaaacttctcactactcaaacaagcaggtgacgtggaggagaatcccgggcctactagtatggactggatttggcgcatccttttccttgtcggcgctgctaccggcgcgcattccttcgaaagaatggctcaggttcagctgcaacagagcggagccgaacttgctagacctggcgcttccgtgaagatgagctgtaaagccagcggctacaccttcaccacctacaccatccactgggtccgaagaaggccaggccacgaccttgagtggatcggctacatcaaccccagcagcggctgctccgactacaaccagaacttcaagggcaagaccacactgaccgccgacaagagcagcaacaccgcctacatgcagctcaacagcctgaccagcgaggacagcgccgtgtactattgtgccagaagggccgactacggcaactacgagtacacttggtttgcctactggggccagggcaccaccgtgacagtttcttctacgcgtgcctctacaaagggaccctccgtgtttcctctggctcccagcagcaagtctacaagcggaggaacagccgctctgggctgcctggtcaaggattactttcccgagcctgtgaccgtgtcctggaatagcggagcactgacaagcggcgtgcacacctttccagccgtgctgcaaagcagcggcctgtactctctgagcagcgtggtcacagtgcctagctctagcctgggcacccagacctacatctgcaatgtgaaccacaagcctagcaacaccaaggtggacaagagagtggaacccaagagctgtgaagtgaaaaccgactccaccgaccacgtgaagcccaaagagacagagaacaccaagcagcccagcaagagctgccacaagcccaaggccatcgtgcacaccgagaaagtgaacatgatgagcctgaccgtgctgggcctgcggatgctgttcgccaaaaccgtggccgtgaacttcctgctgaccgccaagctgttcttcctc

SEQ ID NO: 9094 - DNA, 1896 bp, Artificial Sequence
  Synthetic Polynucloetide
atggccttaccagtgaccgccttgctcctgccgctggccttgctgctccacgccgccaggccgagcgtgatcgagctgacacagagccccaagttcatgagcaccagcgtgggcgacagagtgaacgtgacatacaaggccagccagaacgtgggcaccaacgtggcatggttccagcagaagcctggacagagccctaaggtgctgatctacagcgccagctacagatacagcggcgtgcccgatagattcacaggctctggcagcggcaccgacttcaccctgacaatcagcaacgtgcagagcgaggacctggccgagtatttctgccagcagtaccacacataccctctgacctttggcggaggcaccaagctggaaatcaagagactcgagggacagcctaaggccaatcctaccgtgacactgttccctccaagcagcgaagaactccaggccaacaaggccacacttgtgtgcctgatctccgacttctaccctggggctgtgacagtggcttggaaggccgatggatctcctgtgaaagccggcgtggaaaccaccaagccatccaagcagagcaacaacaaatacgccgccagctcctacctgagcctgacacctgagcagtggaagtcccacagatcctacagctgccaagtgacccacgaaggcagcaccgtggaaaagacagtggcccctacagagtgcagcggcagagccgattgcggcatcaccagcgccagctaccaccagggcgtgctgagcgccaccatcctgtacgagatcctgctgggcaaggccaccctgtacgccgtgctggtgtctgccctggtgctgatggctatggtcaagcggaaggacagccggggaagggccaagcgatctggatctggagcaacaaacttctcactactcaaacaagcaggtgacgtggaggagaatcccgggcctactagtatggactggatttggcgcatccttttccttgtcggcgctgctaccggcgcgcattccttcgaaagaatggctcaggttcagctgcaacagagcggagccgaacttgctagacctggcgcttccgtgaagatgagctgtaaagccagcggctacaccttcaccacctacaccatccactgggtccgaagaaggccaggccacgaccttgagtggatcggctacatcaaccccagcagcggctgctccgactacaaccagaacttcaagggcaagaccacactgaccgccgacaagagcagcaacaccgcctacatgcagctcaacagcctgaccagcgaggacagcgccgtgtactattgtgccagaagggccgactacggcaactacgagtacacttggtttgcctactggggccagggcaccaccgtgacagtttcttctacgcgtgcctctacaaagggaccctccgtgtttcctctggctcccagcagcaagtctacaagcggaggaacagccgctctgggctgcctggtcaaggattactttcccgagcctgtgaccgtgtcctggaatagcggagcactgacaagcggcgtgcacacctttccagccgtgctgcaaagcagcggcctgtactctctgagcagcgtggtcacagtgcctagctctagcctgggcacccagacctacatctgcaatgtgaaccacaagcctagcaacaccaaggtggacaagagagtggaacccaagagctgtatccccgaggacacattcttcccaagcagcgacgtgccctgcgacgtgaagctggtggaaaagagcttcgagacagacaccaacctgaacttccagaacctgagcgtgatcggcttcagaatcctgctgctgaaagtggccggctttaacctgctgatgaccctgcggctgtggtccagc

SEQ ID NO: 9095 - DNA, 1896 bp, Artificial Sequence
  Synthetic Polynucloetide
atggccttaccagtgaccgccttgctcctgccgctggccttgctgctccacgccgccaggccgagcgtgatcgagctgacacagagccccaagttcatgagcaccagcgtgggcgacagagtgaacgtgacatacaaggccagccagaacgtgggcaccaacgtggcatggttccagcagaagcctggacagagccctaaggtgctgatctacagcgccagctacagatacagcggcgtgcccgatagattcacaggctctggcagcggcaccgacttcaccctgacaatcagcaacgtgcagagcgaggacctggccgagtatttctgccagcagtaccacacataccctctgacctttggcggaggcaccaagctggaaatcaagagactcgagggacagcctaaggccaatcctaccgtgacactgttccctccaagcagcgaagaactccaggccaacaaggccacacttgtgtgcctgatctccgacttctaccctggggctgtgacagtggcttggaaggccgatggatctcctgtgaaagccggcgtggaaaccaccaagccatccaagcagagcaacaacaaatacgccgccagctcctacctgagcctgacacctgagcagtggaagtcccacagatcctacagctgccaagtgacccacgaaggcagcaccgtggaaaagacagtggcccctacagagtgcagcggcagagccgattgcggctttaccagcgagagctaccagcagggcgtgctgagcgccaccatcctgtacgagatcctgctgggcaaggccaccctgtacgccgtgctggtgtctgccctggtgctgatggctatggtcaagcggaaggacagccggggaagggccaagcgatctggatctggagcaacaaacttctcactactcaaacaagcaggtgacgtggaggagaatcccgggcctactagtatggactggatttggcgcatccttttccttgtcggcgctgctaccggcgcgcattccttcgaaagaatggctcaggttcagctgcaacagagcggagccgaacttgctagacctggcgcttccgtgaagatgagctgtaaagccagcggctacaccttcaccacctacaccatccactgggtccgaagaaggccaggccacgaccttgagtggatcggctacatcaaccccagcagcggctgctccgactacaaccagaacttcaagggcaagaccacactgaccgccgacaagagcagcaacaccgcctacatgcagctcaacagcctgaccagcgaggacagcgccgtgtactattgtgccagaagggccgactacggcaactacgagtacacttggtttgcctactggggccagggcaccaccgtgacagtttcttctacgcgtgcctctacaaagggaccctccgtgtttcctctggctcccagcagcaagtctacaagcggaggaacagccgctctgggctgcctggtcaaggattactttcccgagcctgtgaccgtgtcctggaatagcggagcactgacaagcggcgtgcacacctttccagccgtgctgcaaagcagcggcctgtactctctgagcagcgtggtcacagtgcctagctctagcctgggcacccagacctacatctgcaatgtgaaccacaagcctagcaacaccaaggtggacaagagagtggaacccaagagctgtatccccgaggacacattcttcccaagccccgagagcagctgcgacgtgaagctggtggaaaagagcttcgagacagacaccaacctgaacttccagaacctgagcgtgatcggcttcagaatcctgctgctgaaagtggccggctttaacctgctgatgaccctgcggctgtggtccagc

SEQ ID NO: 9096 - DNA, 1374 bp, Artificial Sequence
  Synthetic Polynucloetide
atggccttaccagtgaccgccttgctcctgccgctggccttgctgctccacgccgccaggccgagcgtgatcgagctgacacagagccccaagttcatgagcaccagcgtgggcgacagagtgaacgtgacatacaaggccagccagaacgtgggcaccaacgtggcatggttccagcagaagcctggacagagccctaaggtgctgatctacagcgccagctacagatacagcggcgtgcccgatagattcacaggctctggcagcggcaccgacttcaccctgacaatcagcaacgtgcagagcgaggacctggccgagtatttctgccagcagtaccacacataccctctgacctttggcggaggcaccaagctggaaatcaagagaggcggaggcggaagtggaggcggaggatctggcggcggaggctctagaatggctcaggttcagctgcaacagagcggagccgaacttgctagacctggcgcttccgtgaagatgagctgtaaagccagcggctacaccttcaccacctacaccatccactgggtccgaagaaggccaggccacgaccttgagtggatcggctacatcaaccccagcagcggctgctccgactacaaccagaacttcaagggcaagaccacactgaccgccgacaagagcagcaacaccgcctacatgcagctcaacagcctgaccagcgaggacagcgccgtgtactattgtgccagaagggccgactacggcaactacgagtacacttggtttgcctactggggccagggcaccaccgtgacagtttcttctacgcgtgacggtaacgaggagatgggaggaatcactcaaaccccttacaaagtctcaatttcaggaacaactgttatccttacatgtccccagtatcctggcagcgagatcctttggcagcataacgacaagaatatagggggagatgaagacgataagaatatcggatctgacgaggatcacttgagcctgaaagagttctccgagcttgaacaaagcggatattatgtgtgctatccgcgcgggtcaaagccggaagacgctaacttttacctttatctccgagccagagtgtgcgaaaattgcatggaaatggacgttatgtccgttgctacaatagttatcgtagatatatgcatcacgggtggactgcttctgctggtttattattggtccaagaatagaaaggccaaagctaaacccgtgaccagaggcgctggcgcaggcggaaggcaaaggggacaaaacaaagaacggccaccaccagtgccaaatccagattatgagcctattcggaaaggacagagggacctgtactctggcctgaatcagagaagaatc

SEQ ID NO: 9097 - DNA, 1269 bp, Artificial Sequence
  Synthetic Polynucloetide
atggccttaccagtgaccgccttgctcctgccgctggccttgctgctccacgccgccaggccgagcgtgatcgagctgacacagagccccaagttcatgagcaccagcgtgggcgacagagtgaacgtgacatacaaggccagccagaacgtgggcaccaacgtggcatggttccagcagaagcctggacagagccctaaggtgctgatctacagcgccagctacagatacagcggcgtgcccgatagattcacaggctctggcagcggcaccgacttcaccctgacaatcagcaacgtgcagagcgaggacctggccgagtatttctgccagcagtaccacacataccctctgacctttggcggaggcaccaagctggaaatcaagagaggcggaggcggaagtggaggcggaggatctggcggcggaggctctagaatggctcaggttcagctgcaacagagcggagccgaacttgctagacctggcgcttccgtgaagatgagctgtaaagccagcggctacaccttcaccacctacaccatccactgggtccgaagaaggccaggccacgaccttgagtggatcggctacatcaaccccagcagcggctgctccgactacaaccagaacttcaagggcaagaccacactgaccgccgacaagagcagcaacaccgcctacatgcagctcaacagcctgaccagcgaggacagcgccgtgtactattgtgccagaagggccgactacggcaactacgagtacacttggtttgcctactggggccagggcaccaccgtgacagtttcttctacgcgtttcaagatccccatcgaggaactggaagatcgggtgttcgtgaactgcaacacctctatcacctgggtggaaggcaccgtgggaacactgctgagcgacatcaccagactggacctcggcaagcggattctggaccctcggggcatctacagatgcaacggcaccgacatctacaaggacaaagaaagcaccgtgcaggtccactacagaatgtgccagtcctgcgtggaactggaccctgctacagtggccggcatcatcgtgaccgatgtgatcgctactctgctgctggctctgggagtgttctgcttcgccggacacgaaacaggcagactgtctggcgctgccgatacacaggccctgctgagaaacgaccaagtgtatcagcccctgcgcgacagagatgatgcccagtattctcacctcggcggcaactgggctagaaacaag

SEQ ID NO: 9098 - DNA, 1299 bp, Artificial Sequence
  Synthetic Polynucloetide
atggccttaccagtgaccgccttgctcctgccgctggccttgctgctccacgccgccaggccgagcgtgatcgagctgacacagagccccaagttcatgagcaccagcgtgggcgacagagtgaacgtgacatacaaggccagccagaacgtgggcaccaacgtggcatggttccagcagaagcctggacagagccctaaggtgctgatctacagcgccagctacagatacagcggcgtgcccgatagattcacaggctctggcagcggcaccgacttcaccctgacaatcagcaacgtgcagagcgaggacctggccgagtatttctgccagcagtaccacacataccctctgacctttggcggaggcaccaagctggaaatcaagagaggcggaggcggaagtggaggcggaggatctggcggcggaggctctagaatggctcaggttcagctgcaacagagcggagccgaacttgctagacctggcgcttccgtgaagatgagctgtaaagccagcggctacaccttcaccacctacaccatccactgggtccgaagaaggccaggccacgaccttgagtggatcggctacatcaaccccagcagcggctgctccgactacaaccagaacttcaagggcaagaccacactgaccgccgacaagagcagcaacaccgcctacatgcagctcaacagcctgaccagcgaggacagcgccgtgtactattgtgccagaagggccgactacggcaactacgagtacacttggtttgcctactggggccagggcaccaccgtgacagtttcttctacgcgtcagagcatcaagggcaaccacctggtcaaggtgtacgactaccaagaggacggcagcgtgctgctgacatgtgatgccgaggccaagaacatcacctggtttaaggacggcaagatgatcggcttcctgaccgaggacaagaagaagtggaacctgggcagcaacgctaaggaccccagaggcatgtatcagtgcaagggcagccagaacaagagcaagcccctccaggtgtactaccggatgtgccagaactgcatcgagctgaacgccgctaccatcagcggctttctgttcgccgagatcgtgtccatcttcgtgctggccgtgggcgtgtactttatcgctggacaggatggcgtgcggcagagcagagcttccgataagcaaaccctgctgcctaacgaccagctgtaccagcctctgaaggacagagaggacgaccagtacagccacctccagggcaatcagctgagaagaaac

SEQ ID NO: 9099 - DNA, 1248 bp, Artificial Sequence
  Synthetic Polynucloetide
atggccttaccagtgaccgccttgctcctgccgctggccttgctgctccacgccgccaggccgagcgtgatcgagctgacacagagccccaagttcatgagcaccagcgtgggcgacagagtgaacgtgacatacaaggccagccagaacgtgggcaccaacgtggcatggttccagcagaagcctggacagagccctaaggtgctgatctacagcgccagctacagatacagcggcgtgcccgatagattcacaggctctggcagcggcaccgacttcaccctgacaatcagcaacgtgcagagcgaggacctggccgagtatttctgccagcagtaccacacataccctctgacctttggcggaggcaccaagctggaaatcaagagaggcggaggcggaagtggaggcggaggatctggcggcggaggctctagaatggctcaggttcagctgcaacagagcggagccgaacttgctagacctggcgcttccgtgaagatgagctgtaaagccagcggctacaccttcaccacctacaccatccactgggtccgaagaaggccaggccacgaccttgagtggatcggctacatcaaccccagcagcggctgctccgactacaaccagaacttcaagggcaagaccacactgaccgccgacaagagcagcaacaccgcctacatgcagctcaacagcctgaccagcgaggacagcgccgtgtactattgtgccagaagggccgactacggcaactacgagtacacttggtttgcctactggggccagggcaccaccgtgacagtttcttctacgcgtcagagttttgggttgttggaccctaaattgtgctatctgttggacggaatcctgttcatttacggagtgatcctgaccgcattgttcctgcgggttaagttttccagatccgcagacgcacccgcttaccaacaagggcagaaccaactctacaatgaacttaatttggggcggagggaagagtacgacgttctggacaaaaggaggggacgagatcccgagatgggcggaaagcctcagcgaaggaagaatccgcaagaggggctttataacgaactccagaaagataaaatggcagaagcctatagtgagattgggatgaagggagaaaggaggaggggtaaaggtcacgatgggttgtaccaaggattgagcacagccactaaagatacctatgatgcgctccacatgcaggccctgccgccaaga

SEQ ID NO: 9100 - DNA, 1374 bp, Artificial Sequence
  Synthetic Polynucloetide
atggccttaccagtgaccgccttgctcctgccgctggccttgctgctccacgccgccaggccgagaatggctcaggttcagctgcaacagagcggagccgaacttgctagacctggcgcttccgtgaagatgagctgtaaagccagcggctacaccttcaccacctacaccatccactgggtccgaagaaggccaggccacgaccttgagtggatcggctacatcaaccccagcagcggctgctccgactacaaccagaacttcaagggcaagaccacactgaccgccgacaagagcagcaacaccgcctacatgcagctcaacagcctgaccagcgaggacagcgccgtgtactattgtgccagaagggccgactacggcaactacgagtacacttggtttgcctactggggccagggcaccaccgtgacagtttcttctggcggaggcggaagtggaggcggaggatctggcggcggaggctctagcgtgatcgagctgacacagagccccaagttcatgagcaccagcgtgggcgacagagtgaacgtgacatacaaggccagccagaacgtgggcaccaacgtggcatggttccagcagaagcctggacagagccctaaggtgctgatctacagcgccagctacagatacagcggcgtgcccgatagattcacaggctctggcagcggcaccgacttcaccctgacaatcagcaacgtgcagagcgaggacctggccgagtatttctgccagcagtaccacacataccctctgacctttggcggaggcaccaagctggaaatcaagagaacgcgtgacggtaacgaggagatgggaggaatcactcaaaccccttacaaagtctcaatttcaggaacaactgttatccttacatgtccccagtatcctggcagcgagatcctttggcagcataacgacaagaatatagggggagatgaagacgataagaatatcggatctgacgaggatcacttgagcctgaaagagttctccgagcttgaacaaagcggatattatgtgtgctatccgcgcgggtcaaagccggaagacgctaacttttacctttatctccgagccagagtgtgcgaaaattgcatggaaatggacgttatgtccgttgctacaatagttatcgtagatatatgcatcacgggtggactgcttctgctggtttattattggtccaagaatagaaaggccaaagctaaacccgtgaccagaggcgctggcgcaggcggaaggcaaaggggacaaaacaaagaacggccaccaccagtgccaaatccagattatgagcctattcggaaaggacagagggacctgtactctggcctgaatcagagaagaatc

SEQ ID NO: 9101 - DNA, 1269 bp, Artificial Sequence
  Synthetic Polynucloetide
atggccttaccagtgaccgccttgctcctgccgctggccttgctgctccacgccgccaggccgagaatggctcaggttcagctgcaacagagcggagccgaacttgctagacctggcgcttccgtgaagatgagctgtaaagccagcggctacaccttcaccacctacaccatccactgggtccgaagaaggccaggccacgaccttgagtggatcggctacatcaaccccagcagcggctgctccgactacaaccagaacttcaagggcaagaccacactgaccgccgacaagagcagcaacaccgcctacatgcagctcaacagcctgaccagcgaggacagcgccgtgtactattgtgccagaagggccgactacggcaactacgagtacacttggtttgcctactggggccagggcaccaccgtgacagtttcttctggcggaggcggaagtggaggcggaggatctggcggcggaggctctagcgtgatcgagctgacacagagccccaagttcatgagcaccagcgtgggcgacagagtgaacgtgacatacaaggccagccagaacgtgggcaccaacgtggcatggttccagcagaagcctggacagagccctaaggtgctgatctacagcgccagctacagatacagcggcgtgcccgatagattcacaggctctggcagcggcaccgacttcaccctgacaatcagcaacgtgcagagcgaggacctggccgagtatttctgccagcagtaccacacataccctctgacctttggcggaggcaccaagctggaaatcaagagaacgcgtttcaagatccccatcgaggaactggaagatcgggtgttcgtgaactgcaacacctctatcacctgggtggaaggcaccgtgggaacactgctgagcgacatcaccagactggacctcggcaagcggattctggaccctcggggcatctacagatgcaacggcaccgacatctacaaggacaaagaaagcaccgtgcaggtccactacagaatgtgccagtcctgcgtggaactggaccctgctacagtggccggcatcatcgtgaccgatgtgatcgctactctgctgctggctctgggagtgttctgcttcgccggacacgaaacaggcagactgtctggcgctgccgatacacaggccctgctgagaaacgaccaagtgtatcagcccctgcgcgacagagatgatgcccagtattctcacctcggcggcaactgggctagaaacaag

SEQ ID NO: 9102 - DNA, 1299 bp, Artificial Sequence
  Synthetic Polynucloetide
atggccttaccagtgaccgccttgctcctgccgctggccttgctgctccacgccgccaggccgagaatggctcaggttcagctgcaacagagcggagccgaacttgctagacctggcgcttccgtgaagatgagctgtaaagccagcggctacaccttcaccacctacaccatccactgggtccgaagaaggccaggccacgaccttgagtggatcggctacatcaaccccagcagcggctgctccgactacaaccagaacttcaagggcaagaccacactgaccgccgacaagagcagcaacaccgcctacatgcagctcaacagcctgaccagcgaggacagcgccgtgtactattgtgccagaagggccgactacggcaactacgagtacacttggtttgcctactggggccagggcaccaccgtgacagtttcttctggcggaggcggaagtggaggcggaggatctggcggcggaggctctagcgtgatcgagctgacacagagccccaagttcatgagcaccagcgtgggcgacagagtgaacgtgacatacaaggccagccagaacgtgggcaccaacgtggcatggttccagcagaagcctggacagagccctaaggtgctgatctacagcgccagctacagatacagcggcgtgcccgatagattcacaggctctggcagcggcaccgacttcaccctgacaatcagcaacgtgcagagcgaggacctggccgagtatttctgccagcagtaccacacataccctctgacctttggcggaggcaccaagctggaaatcaagagaacgcgtcagagcatcaagggcaaccacctggtcaaggtgtacgactaccaagaggacggcagcgtgctgctgacatgtgatgccgaggccaagaacatcacctggtttaaggacggcaagatgatcggcttcctgaccgaggacaagaagaagtggaacctgggcagcaacgctaaggaccccagaggcatgtatcagtgcaagggcagccagaacaagagcaagcccctccaggtgtactaccggatgtgccagaactgcatcgagctgaacgccgctaccatcagcggctttctgttcgccgagatcgtgtccatcttcgtgctggccgtgggcgtgtactttatcgctggacaggatggcgtgcggcagagcagagcttccgataagcaaaccctgctgcctaacgaccagctgtaccagcctctgaaggacagagaggacgaccagtacagccacctccagggcaatcagctgagaagaaac

SEQ ID NO: 9103 - DNA, 1248 bp, Artificial Sequence
  Synthetic Polynucloetide
atggccttaccagtgaccgccttgctcctgccgctggccttgctgctccacgccgccaggccgagaatggctcaggttcagctgcaacagagcggagccgaacttgctagacctggcgcttccgtgaagatgagctgtaaagccagcggctacaccttcaccacctacaccatccactgggtccgaagaaggccaggccacgaccttgagtggatcggctacatcaaccccagcagcggctgctccgactacaaccagaacttcaagggcaagaccacactgaccgccgacaagagcagcaacaccgcctacatgcagctcaacagcctgaccagcgaggacagcgccgtgtactattgtgccagaagggccgactacggcaactacgagtacacttggtttgcctactggggccagggcaccaccgtgacagtttcttctggcggaggcggaagtggaggcggaggatctggcggcggaggctctagcgtgatcgagctgacacagagccccaagttcatgagcaccagcgtgggcgacagagtgaacgtgacatacaaggccagccagaacgtgggcaccaacgtggcatggttccagcagaagcctggacagagccctaaggtgctgatctacagcgccagctacagatacagcggcgtgcccgatagattcacaggctctggcagcggcaccgacttcaccctgacaatcagcaacgtgcagagcgaggacctggccgagtatttctgccagcagtaccacacataccctctgacctttggcggaggcaccaagctggaaatcaagagaacgcgtcagagttttgggttgttggaccctaaattgtgctatctgttggacggaatcctgttcatttacggagtgatcctgaccgcattgttcctgcgggttaagttttccagatccgcagacgcacccgcttaccaacaagggcagaaccaactctacaatgaacttaatttggggcggagggaagagtacgacgttctggacaaaaggaggggacgagatcccgagatgggcggaaagcctcagcgaaggaagaatccgcaagaggggctttataacgaactccagaaagataaaatggcagaagcctatagtgagattgggatgaagggagaaaggaggaggggtaaaggtcacgatgggttgtaccaaggattgagcacagccactaaagatacctatgatgcgctccacatgcaggccctgccgccaaga

SEQ ID NO: 9104 - DNA, 1950 bp, Artificial Sequence
  Synthetic Polynucloetide
atggccttaccagtgaccgccttgctcctgccgctggccttgctgctccacgccgccaggccgagcgtgatcgagctgacacagagccccaagttcatgagcaccagcgtgggcgacagagtgaacgtgacatacaaggccagccagaacgtgggcaccaacgtggcatggttccagcagaagcctggacagagccctaaggtgctgatctacagcgccagctacagatacagcggcgtgcccgatagattcacaggctctggcagcggcaccgacttcaccctgacaatcagcaacgtgcagagcgaggacctggccgagtatttctgccagcagtaccacacataccctctgacctttggcggaggcaccaagctggaaatcaagagaggcggaggcggaagtggaggcggaggatctggcggcggaggctctagaatggctcaggttcagctgcaacagagcggagccgaacttgctagacctggcgcttccgtgaagatgagctgtaaagccagcggctacaccttcaccacctacaccatccactgggtccgaagaaggccaggccacgaccttgagtggatcggctacatcaaccccagcagcggctgctccgactacaaccagaacttcaagggcaagaccacactgaccgccgacaagagcagcaacaccgcctacatgcagctcaacagcctgaccagcgaggacagcgccgtgtactattgtgccagaagggccgactacggcaactacgagtacacttggtttgcctactggggccagggcaccaccgtgacagtttcttctacgcgtgggagcggcatccagaaccctgatcctgccgtgtaccagctgcgggatagcaagagcagcgacaagagcgtgtgtctgttcaccgacttcgacagccagaccaacgtgtcccagagcaaggactccgacgtgtacatcaccgataagaccgtgctggacatgcggagcatggacttcaagagcaactccgccgtggcctggtccaacaagtccgatttcgcctgcgccaacgccttcaacaacagcattatccccgaggacacattcttcccaagccccgagagcagctgcgacgtgaagctggtggaaaagagcttcgagacagacaccaacctgaacttccagaacctgagcgtgatcggcttcagaatcctgctgctgaaagtggccggctttaacctgctgatgaccctgcggctgtggtccagccgcgccaagagaagcggatctggcgtgaagcagaccctgaatttcgacctgctgaagctggctggcgacgtggaatccaacccaggcccttctagaggccatatgaccgagtacaagcccacggtgcgcctcgccacccgcgacgacgtccccagggccgtacgcaccctcgccgccgcgttcgccgactaccccgccacgcgccacaccgtcgatccggaccgccacatcgagcgggtcaccgagctgcaagaactcttcctcacgcgcgtcgggctcgacatcggcaaggtgtgggtcgcggacgacggcgccgcggtggcggtctggaccacgccggagagcgtcgaagcgggggcggtgttcgccgagatcggcccgcgcatggccgagttgagcggttcccggctggccgcgcagcaacagatggaaggcctcctggcgccgcaccggcccaaggagcccgcgtggttcctggccaccgtcggcgtctcgcccgaccaccagggcaagggtctgggcagcgccgtcgtgctccccggagtggaggcggccgagcgcgccggggtgcccgccttcctggagacctccgcgccccgcaacctccccttctacgagcggctcggcttcaccgtcaccgccgacgtcgaggtgcccgaaggaccgcgcacctggtgcatgacccgcaagcccggtgcctga

SEQ ID NO: 9105 - DNA, 2046 bp, Artificial Sequence
  Synthetic Polynucloetide
atggccttaccagtgaccgccttgctcctgccgctggccttgctgctccacgccgccaggccgagcgtgatcgagctgacacagagccccaagttcatgagcaccagcgtgggcgacagagtgaacgtgacatacaaggccagccagaacgtgggcaccaacgtggcatggttccagcagaagcctggacagagccctaaggtgctgatctacagcgccagctacagatacagcggcgtgcccgatagattcacaggctctggcagcggcaccgacttcaccctgacaatcagcaacgtgcagagcgaggacctggccgagtatttctgccagcagtaccacacataccctctgacctttggcggaggcaccaagctggaaatcaagagaggcggaggcggaagtggaggcggaggatctggcggcggaggctctagaatggctcaggttcagctgcaacagagcggagccgaacttgctagacctggcgcttccgtgaagatgagctgtaaagccagcggctacaccttcaccacctacaccatccactgggtccgaagaaggccaggccacgaccttgagtggatcggctacatcaaccccagcagcggctgctccgactacaaccagaacttcaagggcaagaccacactgaccgccgacaagagcagcaacaccgcctacatgcagctcaacagcctgaccagcgaggacagcgccgtgtactattgtgccagaagggccgactacggcaactacgagtacacttggtttgcctactggggccagggcaccaccgtgacagtttcttctctcgaggacctgaagaacgtgttcccacctgaggtggccgtgttcgagcctagcgaggccgagatcagccacacccagaaagccaccctcgtgtgcctggctaccggcttctaccccgaccatgtggaactgtcttggtgggtcaacggcaaagaggtgcacagcggcgtgtctaccgacccccagccactgaaagaacagcccgccctgaacgacagccggtactgcctgagcagcagactgagagtgtccgccaccttctggcagaacccccggaaccacttcagatgccaggtgcagttctacggcctgagcgagaacgacgagtggacccaggacagagccaagcccgtgacccagatcgtgtctgccgaagcctggggcagagccgattgcggctttaccagcgagagctaccagcagggcgtgctgagcgccaccatcctgtacgagatcctgctgggcaaggccaccctgtacgccgtgctggtgtctgccctggtgctgatggctatggtcaagcggaaggacagccggggaagggccaagcgatctggatctggagcaacaaacttctcactactcaaacaagcaggtgacgtggaggagaatcccgggcctactagaggccatatgaccgagtacaagcccacggtgcgcctcgccacccgcgacgacgtccccagggccgtacgcaccctcgccgccgcgttcgccgactaccccgccacgcgccacaccgtcgatccggaccgccacatcgagcgggtcaccgagctgcaagaactcttcctcacgcgcgtcgggctcgacatcggcaaggtgtgggtcgcggacgacggcgccgcggtggcggtctggaccacgccggagagcgtcgaagcgggggcggtgttcgccgagatcggcccgcgcatggccgagttgagcggttcccggctggccgcgcagcaacagatggaaggcctcctggcgccgcaccggcccaaggagcccgcgtggttcctggccaccgtcggcgtctcgcccgaccaccagggcaagggtctgggcagcgccgtcgtgctccccggagtggaggcggccgagcgcgccggggtgcccgccttcctggagacctccgcgccccgcaacctccccttctacgagcggctcggcttcaccgtcaccgccgacgtcgaggtgcccgaaggaccgcgcacctggtgcatgacccgcaagcccggtgcctga

SEQ ID NO: 9106 - DNA, 2196 bp, Artificial Sequence
  Synthetic Polynucloetide
atggccttaccagtgaccgccttgctcctgccgctggccttgctgctccacgccgccaggccgagcgtgatcgagctgacacagagccccaagttcatgagcaccagcgtgggcgacagagtgaacgtgacatacaaggccagccagaacgtgggcaccaacgtggcatggttccagcagaagcctggacagagccctaaggtgctgatctacagcgccagctacagatacagcggcgtgcccgatagattcacaggctctggcagcggcaccgacttcaccctgacaatcagcaacgtgcagagcgaggacctggccgagtatttctgccagcagtaccacacataccctctgacctttggcggaggcaccaagctggaaatcaagagaggcggaggcggaagtggaggcggaggatctggcggcggaggctctagaatggctcaggttcagctgcaacagagcggagccgaacttgctagacctggcgcttccgtgaagatgagctgtaaagccagcggctacaccttcaccacctacaccatccactgggtccgaagaaggccaggccacgaccttgagtggatcggctacatcaaccccagcagcggctgctccgactacaaccagaacttcaagggcaagaccacactgaccgccgacaagagcagcaacaccgcctacatgcagctcaacagcctgaccagcgaggacagcgccgtgtactattgtgccagaagggccgactacggcaactacgagtacacttggtttgcctactggggccagggcaccaccgtgacagtttcttctacgcgtgagcagaaactgatctcggaagaggatctggggagcggcaccccattcccttctctggcccctcccatcatgctgctggtggacggcaagcagcagatggtggtcgtgtgcctggtgctggatgtggccccacctggactggacagccccatctggtttagcgccggcaatggctctgccctggacgcctttacctacggcccaagccctgccaccgatggcacctggacaaatctggcccacctgagcctgcccagcgaggaactggcttcttgggagcctctcgtgtgccacacaggacctggcgctgagggacacagcagatccacccagcctatgcacctgtctggcgaggccagcaccgccagaacctgtcctcaggaacctctgagaggcacccctggcggagcactgtggctgggagtgctgagactgctgctgttcaagctgctgctgtttgacctgctgctgacctgctcctgtctgtgcgatcctgccggccctctgccttctcctgccaccaccacaagactgagagccctgggcagccacagactgcaccctgccacagagacaggcggcagagaggccacaagcagccctagaccccagcccagagacagaagatggggcgataccccccctggcagaaagcctggatctccagtccgcgccaagagaagcggatctggcgtgaagcagaccctgaatttcgacctgctgaagctggctggcgacgtggaatccaacccaggcccttctagatctagaggccatatgaccgagtacaagcccacggtgcgcctcgccacccgcgacgacgtccccagggccgtacgcaccctcgccgccgcgttcgccgactaccccgccacgcgccacaccgtcgatccggaccgccacatcgagcgggtcaccgagctgcaagaactcttcctcacgcgcgtcgggctcgacatcggcaaggtgtgggtcgcggacgacggcgccgcggtggcggtctggaccacgccggagagcgtcgaagcgggggcggtgttcgccgagatcggcccgcgcatggccgagttgagcggttcccggctggccgcgcagcaacagatggaaggcctcctggcgccgcaccggcccaaggagcccgcgtggttcctggccaccgtcggcgtctcgcccgaccaccagggcaagggtctgggcagcgccgtcgtgctccccggagtggaggcggccgagcgcgccggggtgcccgccttcctggagacctccgcgccccgcaacctccccttctacgagcggctcggcttcaccgtcaccgccgacgtcgaggtgcccgaaggaccgcgcacctggtgcatgacccgcaagcccggtgcctga

SEQ ID NO: 9107 - DNA, 1623 bp, Artificial Sequence
  Synthetic Polynucloetide
atggccttaccagtgaccgccttgctcctgccgctggccttgctgctccacgccgccaggccgagcgtgatcgagctgacacagagccccaagttcatgagcaccagcgtgggcgacagagtgaacgtgacatacaaggccagccagaacgtgggcaccaacgtggcatggttccagcagaagcctggacagagccctaaggtgctgatctacagcgccagctacagatacagcggcgtgcccgatagattcacaggctctggcagcggcaccgacttcaccctgacaatcagcaacgtgcagagcgaggacctggccgagtatttctgccagcagtaccacacataccctctgacctttggcggaggcaccaagctggaaatcaagagactcgaggacctgaagaacgtgttcccacctgaggtggccgtgttcgagcctagcgaggccgagatcagccacacccagaaagccaccctcgtgtgcctggctaccggcttctaccccgaccatgtggaactgtcttggtgggtcaacggcaaagaggtgcacagcggcgtgtctaccgacccccagccactgaaagaacagcccgccctgaacgacagccggtactgcctgagcagcagactgagagtgtccgccaccttctggcagaacccccggaaccacttcagatgccaggtgcagttctacggcctgagcgagaacgacgagtggacccaggacagagccaagcccgtgacccagatcgtgtctgccgaagcctggggcagagccgattgcggctttaccagcgagagctaccagcagggcgtgctgagcgccaccatcctgtacgagatcctgctgggcaaggccaccctgtacgccgtgctggtgtctgccctggtgctgatggctatggtcaagcggaaggacagccggggaagggccaagcgatctggatctggagcaacaaacttctcactactcaaacaagcaggtgacgtggaggagaatcccgggcctactagaggccatatgaccgagtacaagcccacggtgcgcctcgccacccgcgacgacgtccccagggccgtacgcaccctcgccgccgcgttcgccgactaccccgccacgcgccacaccgtcgatccggaccgccacatcgagcgggtcaccgagctgcaagaactcttcctcacgcgcgtcgggctcgacatcggcaaggtgtgggtcgcggacgacggcgccgcggtggcggtctggaccacgccggagagcgtcgaagcgggggcggtgttcgccgagatcggcccgcgcatggccgagttgagcggttcccggctggccgcgcagcaacagatggaaggcctcctggcgccgcaccggcccaaggagcccgcgtggttcctggccaccgtcggcgtctcgcccgaccaccagggcaagggtctgggcagcgccgtcgtgctccccggagtggaggcggccgagcgcgccggggtgcccgccttcctggagacctccgcgccccgcaacctccccttctacgagcggctcggcttcaccgtcaccgccgacgtcgaggtgcccgaaggaccgcgcacctggtgcatgacccgcaagcccggtgcctga

SEQ ID NO: 9108 - DNA, 930 bp, Artificial Sequence
  Synthetic Polynucloetide
atggccttaccagtgaccgccttgctcctgccgctggccttgctgctccacgccgccaggccgagcgtgatcgagctgacacagagccccaagttcatgagcaccagcgtgggcgacagagtgaacgtgacatacaaggccagccagaacgtgggcaccaacgtggcatggttccagcagaagcctggacagagccctaaggtgctgatctacagcgccagctacagatacagcggcgtgcccgatagattcacaggctctggcagcggcaccgacttcaccctgacaatcagcaacgtgcagagcgaggacctggccgagtatttctgccagcagtaccacacataccctctgacctttggcggaggcaccaagctggaaatcaagagactcgaggacctgaagaacgtgttcccacctgaggtggccgtgttcgagcctagcgaggccgagatcagccacacccagaaagccaccctcgtgtgcctggctaccggcttctaccccgaccatgtggaactgtcttggtgggtcaacggcaaagaggtgcacagcggcgtgtctaccgacccccagccactgaaagaacagcccgccctgaacgacagccggtactgcctgagcagcagactgagagtgtccgccaccttctggcagaacccccggaaccacttcagatgccaggtgcagttctacggcctgagcgagaacgacgagtggacccaggacagagccaagcccgtgacccagatcgtgtctgccgaagcctggggcagagccgattgcggctttaccagcgagagctaccagcagggcgtgctgagcgccaccatcctgtacgagatcctgctgggcaaggccaccctgtacgccgtgctggtgtctgccctggtgctgatggctatggtcaagcggaaggacagccgggga

SEQ ID NO: 9109 - DNA, 1368 bp, Artificial Sequence
  Synthetic Polynucloetide
atggactggatttggcgcatccttttccttgtcggcgctgctaccggcgcgcattccttcgaaagaatggctcaggttcagctgcaacagagcggagccgaacttgctagacctggcgcttccgtgaagatgagctgtaaagccagcggctacaccttcaccacctacaccatccactgggtccgaagaaggccaggccacgaccttgagtggatcggctacatcaaccccagcagcggctgctccgactacaaccagaacttcaagggcaagaccacactgaccgccgacaagagcagcaacaccgcctacatgcagctcaacagcctgaccagcgaggacagcgccgtgtactattgtgccagaagggccgactacggcaactacgagtacacttggtttgcctactggggccagggcaccaccgtgacagtttcttctacgcgtatccagaaccctgatcctgccgtgtaccagctgcgggatagcaagagcagcgacaagagcgtgtgtctgttcaccgacttcgacagccagaccaacgtgtcccagagcaaggactccgacgtgtacatcaccgataagaccgtgctggacatgcggagcatggacttcaagagcaactccgccgtggcctggtccaacaagtccgatttcgcctgcgccaacgccttcaacaacagcattatccccgaggacacattcttcccaagccccgagagcagctgcgacgtgaagctggtggaaaagagcttcgagacagacaccaacctgaacttccagaacctgagcgtgatcggcttcagaatcctgctgctgaaagtggccggctttaacctgctgatgaccctgcggctgtggtccagccgcgccaagagaagcggatctggcgtgaagcagaccctgaatttcgacctgctgaagctggctggcgacgtggaatccaacccaggcccttctagaggccatatggccaagcctttgtctcaagaagaatccaccctcattgaaagagcaacggctacaatcaacagcatccccatctctgaagactacagcgtcgccagcgcagctctctctagcgacggccgcatcttcactggtgtcaatgtatatcattttactgggggaccttgtgcagaactcgtggtgctgggcactgctgctgctgcggcagctggcaacctgacttgtatcgtcgcgatcggaaatgagaacaggggcatcttgagcccctgcggacggtgccgacaggtgcttctcgatctgcatcctgggatcaaagccatagtgaaggacagtgatggacagccgacggcagttgggattcgtgaattgctgccctctggttatgtgtgggagggctga

SEQ ID NO: 9110 - DNA, 867 bp, Artificial Sequence
  Synthetic Polynucloetide
atggactggatttggcgcatccttttccttgtcggcgctgctaccggcgcgcattccttcgaaagaatggctcaggttcagctgcaacagagcggagccgaacttgctagacctggcgcttccgtgaagatgagctgtaaagccagcggctacaccttcaccacctacaccatccactgggtccgaagaaggccaggccacgaccttgagtggatcggctacatcaaccccagcagcggctgctccgactacaaccagaacttcaagggcaagaccacactgaccgccgacaagagcagcaacaccgcctacatgcagctcaacagcctgaccagcgaggacagcgccgtgtactattgtgccagaagggccgactacggcaactacgagtacacttggtttgcctactggggccagggcaccaccgtgacagtttcttctacgcgtatccagaaccctgatcctgccgtgtaccagctgcgggatagcaagagcagcgacaagagcgtgtgtctgttcaccgacttcgacagccagaccaacgtgtcccagagcaaggactccgacgtgtacatcaccgataagaccgtgctggacatgcggagcatggacttcaagagcaactccgccgtggcctggtccaacaagtccgatttcgcctgcgccaacgccttcaacaacagcattatccccgaggacacattcttcccaagccccgagagcagctgcgacgtgaagctggtggaaaagagcttcgagacagacaccaacctgaacttccagaacctgagcgtgatcggcttcagaatcctgctgctgaaagtggccggctttaacctgctgatgaccctgcggctgtggtccagc

SEQ ID NO: 9111 - DNA, 1677 bp, Artificial Sequence
  Synthetic Polynucloetide
atggccttaccagtgaccgccttgctcctgccgctggccttgctgctccacgccgccaggccgagcgtgatcgagctgacacagagccccaagttcatgagcaccagcgtgggcgacagagtgaacgtgacatacaaggccagccagaacgtgggcaccaacgtggcatggttccagcagaagcctggacagagccctaaggtgctgatctacagcgccagctacagatacagcggcgtgcccgatagattcacaggctctggcagcggcaccgacttcaccctgacaatcagcaacgtgcagagcgaggacctggccgagtatttctgccagcagtaccacacataccctctgacctttggcggaggcaccaagctggaaatcaagagactcgaggggaaaccaattcccaaccctcttctgggactggattcaaccggcagcggcgaggacctgaagaacgtgttcccacctgaggtggccgtgttcgagcctagcgaggccgagatcagccacacccagaaagccaccctcgtgtgcctggctaccggcttctaccccgaccatgtggaactgtcttggtgggtcaacggcaaagaggtgcacagcggcgtgtgtaccgacccccagccactgaaagaacagcccgccctgaacgacagccggtactgcctgagcagcagactgagagtgtccgccaccttctggcagaacccccggaaccacttcagatgccaggtgcagttctacggcctgagcgagaacgacgagtggacccaggacagagccaagcccgtgacccagatcgtgtctgccgaagcctggggcagagccgattgcggctttaccagcgagagctaccagcagggcgtgctgagcgccaccatcctgtacgagatcctgctgggcaaggccaccctgtacgccgtgctggtgtctgccctggtgctgatggctatggtcaagcggaaggacagccggggaagggccaagcgatctggatctggagcaacaaacttctcactactcaaacaagcaggtgacgtggaggagaatcccgggcctactagaggccatatgaccgagtacaagcccacggtgcgcctcgccacccgcgacgacgtccccagggccgtacgcaccctcgccgccgcgttcgccgactaccccgccacgcgccacaccgtcgatccggaccgccacatcgagcgggtcaccgagctgcaagaactcttcctcacgcgcgtcgggctcgacatcggcaaggtgtgggtcgcggacgacggcgccgcggtggcggtctggaccacgccggagagcgtcgaagcgggggcggtgttcgccgagatcggcccgcgcatggccgagttgagcggttcccggctggccgcgcagcaacagatggaaggcctcctggcgccgcaccggcccaaggagcccgcgtggttcctggccaccgtcggcgtctcgcccgaccaccagggcaagggtctgggcagcgccgtcgtgctccccggagtggaggcggccgagcgcgccggggtgcccgccttcctggagacctccgcgccccgcaacctccccttctacgagcggctcggcttcaccgtcaccgccgacgtcgaggtgcccgaaggaccgcgcacctggtgcatgacccgcaagcccggtgcctga

SEQ ID NO: 9112 - DNA, 987 bp, Artificial Sequence
  Synthetic Polynucloetide
atggccttaccagtgaccgccttgctcctgccgctggccttgctgctccacgccgccaggccgagcgtgatcgagctgacacagagccccaagttcatgagcaccagcgtgggcgacagagtgaacgtgacatacaaggccagccagaacgtgggcaccaacgtggcatggttccagcagaagcctggacagagccctaaggtgctgatctacagcgccagctacagatacagcggcgtgcccgatagattcacaggctctggcagcggcaccgacttcaccctgacaatcagcaacgtgcagagcgaggacctggccgagtatttctgccagcagtaccacacataccctctgacctttggcggaggcaccaagctggaaatcaagagactcgaggggaaaccaattcccaaccctcttctgggactggattcaaccggcagcggcgaggacctgaagaacgtgttcccacctgaggtggccgtgttcgagcctagcgaggccgagatcagccacacccagaaagccaccctcgtgtgcctggctaccggcttctaccccgaccatgtggaactgtcttggtgggtcaacggcaaagaggtgcacagcggcgtgtgtaccgacccccagccactgaaagaacagcccgccctgaacgacagccggtactgcctgagcagcagactgagagtgtccgccaccttctggcagaacccccggaaccacttcagatgccaggtgcagttctacggcctgagcgagaacgacgagtggacccaggacagagccaagcccgtgacccagatcgtgtctgccgaagcctggggcagagccgattgcggctttaccagcgagagctaccagcagggcgtgctgagcgccaccatcctgtacgagatcctgctgggcaaggccaccctgtacgccgtgctggtgtctgccctggtgctgatggctatggtcaagcggaaggacagccggggatga

SEQ ID NO: 9113 - DNA, 1404 bp, Artificial Sequence
  Synthetic Polynucloetide
atggactggatttggcgcatccttttccttgtcggcgctgctaccggcgcgcattccttcgaaagaatggctcaggttcagctgcaacagagcggagccgaacttgctagacctggcgcttccgtgaagatgagctgtaaagccagcggctacaccttcaccacctacaccatccactgggtccgaagaaggccaggccacgaccttgagtggatcggctacatcaaccccagcagcggctgctccgactacaaccagaacttcaagggcaagaccacactgaccgccgacaagagcagcaacaccgcctacatgcagctcaacagcctgaccagcgaggacagcgccgtgtactattgtgccagaagggccgactacggcaactacgagtacacttggtttgcctactggggccagggcaccaccgtgacagtttcttctacgcgtgagcagaaactgatctcggaagaggatgggagcggcatccagaaccctgatcctgccgtgtaccagctgcgggatagcaagagcagcgacaagagcgtgtgtctgttcaccgacttcgacagccagaccaacgtgtcccagagcaaggactccgacgtgtacatcaccgataagtgcgtgctggacatgcggagcatggacttcaagagcaactccgccgtggcctggtccaacaagtccgatttcgcctgcgccaacgccttcaacaacagcattatccccgaggacacattcttcccaagccccgagagcagctgcgacgtgaagctggtggaaaagagcttcgagacagacaccaacctgaacttccagaacctgagcgtgatcggcttcagaatcctgctgctgaaagtggccggctttaacctgctgatgaccctgcggctgtggtccagccgcgccaagagaagcggatctggcgtgaagcagaccctgaatttcgacctgctgaagctggctggcgacgtggaatccaacccaggcccttctagaggccatatggccaagcctttgtctcaagaagaatccaccctcattgaaagagcaacggctacaatcaacagcatccccatctctgaagactacagcgtcgccagcgcagctctctctagcgacggccgcatcttcactggtgtcaatgtatatcattttactgggggaccttgtgcagaactcgtggtgctgggcactgctgctgctgcggcagctggcaacctgacttgtatcgtcgcgatcggaaatgagaacaggggcatcttgagcccctgcggacggtgccgacaggtgcttctcgatctgcatcctgggatcaaagccatagtgaaggacagtgatggacagccgacggcagttgggattcgtgaattgctgccctctggttatgtgtgggagggctga

SEQ ID NO: 9114 - DNA, 906 bp, Artificial Sequence
  Synthetic Polynucloetide
atggactggatttggcgcatccttttccttgtcggcgctgctaccggcgcgcattccttcgaaagaatggctcaggttcagctgcaacagagcggagccgaacttgctagacctggcgcttccgtgaagatgagctgtaaagccagcggctacaccttcaccacctacaccatccactgggtccgaagaaggccaggccacgaccttgagtggatcggctacatcaaccccagcagcggctgctccgactacaaccagaacttcaagggcaagaccacactgaccgccgacaagagcagcaacaccgcctacatgcagctcaacagcctgaccagcgaggacagcgccgtgtactattgtgccagaagggccgactacggcaactacgagtacacttggtttgcctactggggccagggcaccaccgtgacagtttcttctacgcgtgagcagaaactgatctcggaagaggatgggagcggcatccagaaccctgatcctgccgtgtaccagctgcgggatagcaagagcagcgacaagagcgtgtgtctgttcaccgacttcgacagccagaccaacgtgtcccagagcaaggactccgacgtgtacatcaccgataagtgcgtgctggacatgcggagcatggacttcaagagcaactccgccgtggcctggtccaacaagtccgatttcgcctgcgccaacgccttcaacaacagcattatccccgaggacacattcttcccaagccccgagagcagctgcgacgtgaagctggtggaaaagagcttcgagacagacaccaacctgaacttccagaacctgagcgtgatcggcttcagaatcctgctgctgaaagtggccggctttaacctgctgatgaccctgcggctgtggtccagctga

SEQ ID NO: 9115 - DNA, 1950 bp, Artificial Sequence
  Synthetic Polynucloetide
atggccttaccagtgaccgccttgctcctgccgctggccttgctgctccacgccgccaggccgagcgtgatcgagctgacacagagccccaagttcatgagcaccagcgtgggcgacagagtgaacgtgacatacaaggccagccagaacgtgggcaccaacgtggcatggttccagcagaagcctggacagagccctaaggtgctgatctacagcgccagctacagatacagcggcgtgcccgatagattcacaggctctggcagcggcaccgacttcaccctgacaatcagcaacgtgcagagcgaggacctggccgagtatttctgccagcagtaccacacataccctctgacctttggcggaggcaccaagctggaaatcaagagaggcggaggcggaagtggaggcggaggatctggcggcggaggctctagaatggctcaggttcagctgcaacagagcggagccgaacttgctagacctggcgcttccgtgaagatgagctgtaaagccagcggctacaccttcaccacctacaccatccactgggtccgaagaaggccaggccacgaccttgagtggatcggctacatcaaccccagcagcggctgctccgactacaaccagaacttcaagggcaagaccacactgaccgccgacaagagcagcaacaccgcctacatgcagctcaacagcctgaccagcgaggacagcgccgtgtactattgtgccagaagggccgactacggcaactacgagtacacttggtttgcctactggggccagggcaccaccgtgacagtttcttctacgcgtgggagcggcatccagaaccctgatcctgccgtgtaccagctgcgggatagcaagagcagcgacaagagcgtgtgtctgttcaccgacttcgacagccagaccaacgtgtcccagagcaaggactccgacgtgtacatcaccgataagaccgtgctggacatgcggagcatggacttcaagagcaactccgccgtggcctggtccaacaagtccgatttcgcctgcgccaacgccttcaacaacagcattatccccgaggacacattcttcccaagcagcgacgtgccctgcgacgtgaagctggtggaaaagagcttcgagacagacaccaacctgaacttccagaacctgagcgtgatcggcttcagaatcctgctgctgaaagtggccggctttaacctgctgatgaccctgcggctgtggtccagccgcgccaagagaagcggatctggcgtgaagcagaccctgaatttcgacctgctgaagctggctggcgacgtggaatccaacccaggcccttctagaggccatatgaccgagtacaagcccacggtgcgcctcgccacccgcgacgacgtccccagggccgtacgcaccctcgccgccgcgttcgccgactaccccgccacgcgccacaccgtcgatccggaccgccacatcgagcgggtcaccgagctgcaagaactcttcctcacgcgcgtcgggctcgacatcggcaaggtgtgggtcgcggacgacggcgccgcggtggcggtctggaccacgccggagagcgtcgaagcgggggcggtgttcgccgagatcggcccgcgcatggccgagttgagcggttcccggctggccgcgcagcaacagatggaaggcctcctggcgccgcaccggcccaaggagcccgcgtggttcctggccaccgtcggcgtctcgcccgaccaccagggcaagggtctgggcagcgccgtcgtgctccccggagtggaggcggccgagcgcgccggggtgcccgccttcctggagacctccgcgccccgcaacctccccttctacgagcggctcggcttcaccgtcaccgccgacgtcgaggtgcccgaaggaccgcgcacctggtgcatgacccgcaagcccggtgcctga

SEQ ID NO: 9116 - DNA, 2046 bp, Artificial Sequence
  Synthetic Polynucloetide
atggccttaccagtgaccgccttgctcctgccgctggccttgctgctccacgccgccaggccgagcgtgatcgagctgacacagagccccaagttcatgagcaccagcgtgggcgacagagtgaacgtgacatacaaggccagccagaacgtgggcaccaacgtggcatggttccagcagaagcctggacagagccctaaggtgctgatctacagcgccagctacagatacagcggcgtgcccgatagattcacaggctctggcagcggcaccgacttcaccctgacaatcagcaacgtgcagagcgaggacctggccgagtatttctgccagcagtaccacacataccctctgacctttggcggaggcaccaagctggaaatcaagagaggcggaggcggaagtggaggcggaggatctggcggcggaggctctagaatggctcaggttcagctgcaacagagcggagccgaacttgctagacctggcgcttccgtgaagatgagctgtaaagccagcggctacaccttcaccacctacaccatccactgggtccgaagaaggccaggccacgaccttgagtggatcggctacatcaaccccagcagcggctgctccgactacaaccagaacttcaagggcaagaccacactgaccgccgacaagagcagcaacaccgcctacatgcagctcaacagcctgaccagcgaggacagcgccgtgtactattgtgccagaagggccgactacggcaactacgagtacacttggtttgcctactggggccagggcaccaccgtgacagtttcttctctcgaggacctgaagaacgtgttcccacctgaggtggccgtgttcgagcctagcaaggccgagatcgcccacacccagaaagccaccctcgtgtgcctggctaccggcttctaccccgaccatgtggaactgtcttggtgggtcaacggcaaagaggtgcacagcggcgtgtctaccgacccccagccactgaaagaacagcccgccctgaacgacagccggtactgcctgagcagcagactgagagtgtccgccaccttctggcagaacccccggaaccacttcagatgccaggtgcagttctacggcctgagcgagaacgacgagtggacccaggacagagccaagcccgtgacccagatcgtgtctgccgaagcctggggcagagccgattgcggcatcaccagcgccagctaccaccagggcgtgctgagcgccaccatcctgtacgagatcctgctgggcaaggccaccctgtacgccgtgctggtgtctgccctggtgctgatggctatggtcaagcggaaggacagccggggaagggccaagcgatctggatctggagcaacaaacttctcactactcaaacaagcaggtgacgtggaggagaatcccgggcctactagaggccatatgaccgagtacaagcccacggtgcgcctcgccacccgcgacgacgtccccagggccgtacgcaccctcgccgccgcgttcgccgactaccccgccacgcgccacaccgtcgatccggaccgccacatcgagcgggtcaccgagctgcaagaactcttcctcacgcgcgtcgggctcgacatcggcaaggtgtgggtcgcggacgacggcgccgcggtggcggtctggaccacgccggagagcgtcgaagcgggggcggtgttcgccgagatcggcccgcgcatggccgagttgagcggttcccggctggccgcgcagcaacagatggaaggcctcctggcgccgcaccggcccaaggagcccgcgtggttcctggccaccgtcggcgtctcgcccgaccaccagggcaagggtctgggcagcgccgtcgtgctccccggagtggaggcggccgagcgcgccggggtgcccgccttcctggagacctccgcgccccgcaacctccccttctacgagcggctcggcttcaccgtcaccgccgacgtcgaggtgcccgaaggaccgcgcacctggtgcatgacccgcaagcccggtgcctga

SEQ ID NO: 9117 - DNA, 2115 bp, Artificial Sequence
  Synthetic Polynucloetide
atggccttaccagtgaccgccttgctcctgccgctggccttgctgctccacgccgccaggccgagcgtgatcgagctgacacagagccccaagttcatgagcaccagcgtgggcgacagagtgaacgtgacatacaaggccagccagaacgtgggcaccaacgtggcatggttccagcagaagcctggacagagccctaaggtgctgatctacagcgccagctacagatacagcggcgtgcccgatagattcacaggctctggcagcggcaccgacttcaccctgacaatcagcaacgtgcagagcgaggacctggccgagtatttctgccagcagtaccacacataccctctgacctttggcggaggcaccaagctggaaatcaagagaggcggaggcggaagtggaggcggaggatctggcggcggaggctctagaatggctcaggttcagctgcaacagagcggagccgaacttgctagacctggcgcttccgtgaagatgagctgtaaagccagcggctacaccttcaccacctacaccatccactgggtccgaagaaggccaggccacgaccttgagtggatcggctacatcaaccccagcagcggctgctccgactacaaccagaacttcaagggcaagaccacactgaccgccgacaagagcagcaacaccgcctacatgcagctcaacagcctgaccagcgaggacagcgccgtgtactattgtgccagaagggccgactacggcaactacgagtacacttggtttgcctactggggccagggcaccaccgtgacagtttcttctacgcgtgggtctggaggcggaggcagcggcggaggcgggagcggcgacggtaacgaggagatgggaggaatcactcaaaccccttacaaagtctcaatttcaggaacaactgttatccttacatgtccccagtatcctggcagcgagatcctttggcagcataacgacaagaatatagggggagatgaagacgataagaatatcggatctgacgaggatcacttgagcctgaaagagttctccgagcttgaacaaagcggatattatgtgtgctatccgcgcgggtcaaagccggaagacgctaacttttacctttatctccgagccagagtgtgcgaaaattgcatggaaatggacgttatgtccgttgctacaatagttatcgtagatatatgcatcacgggtggactgcttctgctggtttattattggtccaagaatagaaaggccaaagctaaacccgtgaccagaggcgctggcgcaggcggaaggcaaaggggacaaaacaaagaacggccaccaccagtgccaaatccagattatgagcctattcggaaaggacagagggacctgtactctggcctgaatcagagaagaatccgcgccaagagaagcggatctggcgtgaagcagaccctgaatttcgacctgctgaagctggctggcgacgtggaatccaacccaggcccttctagaggccatatgaccgagtacaagcccacggtgcgcctcgccacccgcgacgacgtccccagggccgtacgcaccctcgccgccgcgttcgccgactaccccgccacgcgccacaccgtcgatccggaccgccacatcgagcgggtcaccgagctgcaagaactcttcctcacgcgcgtcgggctcgacatcggcaaggtgtgggtcgcggacgacggcgccgcggtggcggtctggaccacgccggagagcgtcgaagcgggggcggtgttcgccgagatcggcccgcgcatggccgagttgagcggttcccggctggccgcgcagcaacagatggaaggcctcctggcgccgcaccggcccaaggagcccgcgtggttcctggccaccgtcggcgtctcgcccgaccaccagggcaagggtctgggcagcgccgtcgtgctccccggagtggaggcggccgagcgcgccggggtgcccgccttcctggagacctccgcgccccgcaacctccccttctacgagcggctcggcttcaccgtcaccgccgacgtcgaggtgcccgaaggaccgcgcacctggtgcatgacccgcaagcccggtgcctga

SEQ ID NO: 9118 - DNA, 2010 bp, Artificial Sequence
  Synthetic Polynucloetide
atggccttaccagtgaccgccttgctcctgccgctggccttgctgctccacgccgccaggccgagcgtgatcgagctgacacagagccccaagttcatgagcaccagcgtgggcgacagagtgaacgtgacatacaaggccagccagaacgtgggcaccaacgtggcatggttccagcagaagcctggacagagccctaaggtgctgatctacagcgccagctacagatacagcggcgtgcccgatagattcacaggctctggcagcggcaccgacttcaccctgacaatcagcaacgtgcagagcgaggacctggccgagtatttctgccagcagtaccacacataccctctgacctttggcggaggcaccaagctggaaatcaagagaggcggaggcggaagtggaggcggaggatctggcggcggaggctctagaatggctcaggttcagctgcaacagagcggagccgaacttgctagacctggcgcttccgtgaagatgagctgtaaagccagcggctacaccttcaccacctacaccatccactgggtccgaagaaggccaggccacgaccttgagtggatcggctacatcaaccccagcagcggctgctccgactacaaccagaacttcaagggcaagaccacactgaccgccgacaagagcagcaacaccgcctacatgcagctcaacagcctgaccagcgaggacagcgccgtgtactattgtgccagaagggccgactacggcaactacgagtacacttggtttgcctactggggccagggcaccaccgtgacagtttcttctacgcgtgggtctggaggcggaggcagcggcggaggcgggagcggcttcaagatccccatcgaggaactggaagatcgggtgttcgtgaactgcaacacctctatcacctgggtggaaggcaccgtgggaacactgctgagcgacatcaccagactggacctcggcaagcggattctggaccctcggggcatctacagatgcaacggcaccgacatctacaaggacaaagaaagcaccgtgcaggtccactacagaatgtgccagtcctgcgtggaactggaccctgctacagtggccggcatcatcgtgaccgatgtgatcgctactctgctgctggctctgggagtgttctgcttcgccggacacgaaacaggcagactgtctggcgctgccgatacacaggccctgctgagaaacgaccaagtgtatcagcccctgcgcgacagagatgatgcccagtattctcacctcggcggcaactgggctagaaacaagcgcgccaagagaagcggatctggcgtgaagcagaccctgaatttcgacctgctgaagctggctggcgacgtggaatccaacccaggcccttctagaggccatatgaccgagtacaagcccacggtgcgcctcgccacccgcgacgacgtccccagggccgtacgcaccctcgccgccgcgttcgccgactaccccgccacgcgccacaccgtcgatccggaccgccacatcgagcgggtcaccgagctgcaagaactcttcctcacgcgcgtcgggctcgacatcggcaaggtgtgggtcgcggacgacggcgccgcggtggcggtctggaccacgccggagagcgtcgaagcgggggcggtgttcgccgagatcggcccgcgcatggccgagttgagcggttcccggctggccgcgcagcaacagatggaaggcctcctggcgccgcaccggcccaaggagcccgcgtggttcctggccaccgtcggcgtctcgcccgaccaccagggcaagggtctgggcagcgccgtcgtgctccccggagtggaggcggccgagcgcgccggggtgcccgccttcctggagacctccgcgccccgcaacctccccttctacgagcggctcggcttcaccgtcaccgccgacgtcgaggtgcccgaaggaccgcgcacctggtgcatgacccgcaagcccggtgcctga

SEQ ID NO: 9119 - DNA, 2040 bp, Artificial Sequence
  Synthetic Polynucloetide
atggccttaccagtgaccgccttgctcctgccgctggccttgctgctccacgccgccaggccgagcgtgatcgagctgacacagagccccaagttcatgagcaccagcgtgggcgacagagtgaacgtgacatacaaggccagccagaacgtgggcaccaacgtggcatggttccagcagaagcctggacagagccctaaggtgctgatctacagcgccagctacagatacagcggcgtgcccgatagattcacaggctctggcagcggcaccgacttcaccctgacaatcagcaacgtgcagagcgaggacctggccgagtatttctgccagcagtaccacacataccctctgacctttggcggaggcaccaagctggaaatcaagagaggcggaggcggaagtggaggcggaggatctggcggcggaggctctagaatggctcaggttcagctgcaacagagcggagccgaacttgctagacctggcgcttccgtgaagatgagctgtaaagccagcggctacaccttcaccacctacaccatccactgggtccgaagaaggccaggccacgaccttgagtggatcggctacatcaaccccagcagcggctgctccgactacaaccagaacttcaagggcaagaccacactgaccgccgacaagagcagcaacaccgcctacatgcagctcaacagcctgaccagcgaggacagcgccgtgtactattgtgccagaagggccgactacggcaactacgagtacacttggtttgcctactggggccagggcaccaccgtgacagtttcttctacgcgtgggtctggaggcggaggcagcggcggaggcgggagcggccagagcatcaagggcaaccacctggtcaaggtgtacgactaccaagaggacggcagcgtgctgctgacatgtgatgccgaggccaagaacatcacctggtttaaggacggcaagatgatcggcttcctgaccgaggacaagaagaagtggaacctgggcagcaacgctaaggaccccagaggcatgtatcagtgcaagggcagccagaacaagagcaagcccctccaggtgtactaccggatgtgccagaactgcatcgagctgaacgccgctaccatcagcggctttctgttcgccgagatcgtgtccatcttcgtgctggccgtgggcgtgtactttatcgctggacaggatggcgtgcggcagagcagagcttccgataagcaaaccctgctgcctaacgaccagctgtaccagcctctgaaggacagagaggacgaccagtacagccacctccagggcaatcagctgagaagaaaccgcgccaagagaagcggatctggcgtgaagcagaccctgaatttcgacctgctgaagctggctggcgacgtggaatccaacccaggcccttctagaggccatatgaccgagtacaagcccacggtgcgcctcgccacccgcgacgacgtccccagggccgtacgcaccctcgccgccgcgttcgccgactaccccgccacgcgccacaccgtcgatccggaccgccacatcgagcgggtcaccgagctgcaagaactcttcctcacgcgcgtcgggctcgacatcggcaaggtgtgggtcgcggacgacggcgccgcggtggcggtctggaccacgccggagagcgtcgaagcgggggcggtgttcgccgagatcggcccgcgcatggccgagttgagcggttcccggctggccgcgcagcaacagatggaaggcctcctggcgccgcaccggcccaaggagcccgcgtggttcctggccaccgtcggcgtctcgcccgaccaccagggcaagggtctgggcagcgccgtcgtgctccccggagtggaggcggccgagcgcgccggggtgcccgccttcctggagacctccgcgccccgcaacctccccttctacgagcggctcggcttcaccgtcaccgccgacgtcgaggtgcccgaaggaccgcgcacctggtgcatgacccgcaagcccggtgcctga

SEQ ID NO: 9120 - DNA, 1989 bp, Artificial Sequence
  Synthetic Polynucloetide
atggccttaccagtgaccgccttgctcctgccgctggccttgctgctccacgccgccaggccgagcgtgatcgagctgacacagagccccaagttcatgagcaccagcgtgggcgacagagtgaacgtgacatacaaggccagccagaacgtgggcaccaacgtggcatggttccagcagaagcctggacagagccctaaggtgctgatctacagcgccagctacagatacagcggcgtgcccgatagattcacaggctctggcagcggcaccgacttcaccctgacaatcagcaacgtgcagagcgaggacctggccgagtatttctgccagcagtaccacacataccctctgacctttggcggaggcaccaagctggaaatcaagagaggcggaggcggaagtggaggcggaggatctggcggcggaggctctagaatggctcaggttcagctgcaacagagcggagccgaacttgctagacctggcgcttccgtgaagatgagctgtaaagccagcggctacaccttcaccacctacaccatccactgggtccgaagaaggccaggccacgaccttgagtggatcggctacatcaaccccagcagcggctgctccgactacaaccagaacttcaagggcaagaccacactgaccgccgacaagagcagcaacaccgcctacatgcagctcaacagcctgaccagcgaggacagcgccgtgtactattgtgccagaagggccgactacggcaactacgagtacacttggtttgcctactggggccagggcaccaccgtgacagtttcttctacgcgtgggtctggaggcggaggcagcggcggaggcgggagcggccagagttttgggttgttggaccctaaattgtgctatctgttggacggaatcctgttcatttacggagtgatcctgaccgcattgttcctgcgggttaagttttccagatccgcagacgcacccgcttaccaacaagggcagaaccaactctacaatgaacttaatttggggcggagggaagagtacgacgttctggacaaaaggaggggacgagatcccgagatgggcggaaagcctcagcgaaggaagaatccgcaagaggggctttataacgaactccagaaagataaaatggcagaagcctatagtgagattgggatgaagggagaaaggaggaggggtaaaggtcacgatgggttgtaccaaggattgagcacagccactaaagatacctatgatgcgctccacatgcaggccctgccgccaagacgcgccaagagaagcggatctggcgtgaagcagaccctgaatttcgacctgctgaagctggctggcgacgtggaatccaacccaggcccttctagaggccatatgaccgagtacaagcccacggtgcgcctcgccacccgcgacgacgtccccagggccgtacgcaccctcgccgccgcgttcgccgactaccccgccacgcgccacaccgtcgatccggaccgccacatcgagcgggtcaccgagctgcaagaactcttcctcacgcgcgtcgggctcgacatcggcaaggtgtgggtcgcggacgacggcgccgcggtggcggtctggaccacgccggagagcgtcgaagcgggggcggtgttcgccgagatcggcccgcgcatggccgagttgagcggttcccggctggccgcgcagcaacagatggaaggcctcctggcgccgcaccggcccaaggagcccgcgtggttcctggccaccgtcggcgtctcgcccgaccaccagggcaagggtctgggcagcgccgtcgtgctccccggagtggaggcggccgagcgcgccggggtgcccgccttcctggagacctccgcgccccgcaacctccccttctacgagcggctcggcttcaccgtcaccgccgacgtcgaggtgcccgaaggaccgcgcacctggtgcatgacccgcaagcccggtgcctga

SEQ ID NO: 9121 - DNA, 2289 bp, Artificial Sequence
  Synthetic Polynucloetide
atggccttaccagtgaccgccttgctcctgccgctggccttgctgctccacgccgccaggccggaagtgcagctggttgaatctggcggaggactggttcagcctggcggatctctgagactgtcttgtgccgccagcggcttcagcttcagcgacttttggatgagctgggtccgacaggcccctggcaaaggacttgaatgggtcgccacaatcagccaggccggcagcgagaaggactacgtggactctgtgaagggcagattcaccatcagccgggacaacgccaagaagtccctgtacctccagatgaacagcctgagagccgaggacaccgccgtgtactattgtgcctctggcgtgtacagcttcgactacagaggccagggcaccctggtcacagtctcttctggtaccggcggaggcggatctggcggcggaggtagcggtggcggaggatctgaattcagcgtgatcgagctgacacagagccccaagttcatgagcaccagcgtgggcgacagagtgaacgtgacatacaaggccagccagaacgtgggcaccaacgtggcatggttccagcagaagcctggacagagccctaaggtgctgatctacagcgccagctacagatacagcggcgtgcccgatagattcacaggctctggcagcggcaccgacttcaccctgacaatcagcaacgtgcagagcgaggacctggccgagtatttctgccagcagtaccacacataccctctgacctttggcggaggcaccaagctggaaatcaagagactcgaggacctgaagaacgtgttcccacctgaggtggccgtgttcgagcctagcgaggccgagatcagccacacccagaaagccaccctcgtgtgcctggctaccggcttctaccccgaccatgtggaactgtcttggtgggtcaacggcaaagaggtgcacagcggcgtgtgtaccgacccccagccactgaaagaacagcccgccctgaacgacagccggtactgcctgagcagcagactgagagtgtccgccaccttctggcagaacccccggaaccacttcagatgccaggtgcagttctacggcctgagcgagaacgacgagtggacccaggacagagccaagcccgtgacccagatcgtgtctgccgaagcctggggcagagccgattgcggctttaccagcgagagctaccagcagggcgtgctgagcgccaccatcctgtacgagatcctgctgggcaaggccaccctgtacgccgtgctggtgtctgccctggtgctgatggctatggtcaagcggaaggacagccggggaagggccaagcgatctggatctggagcaacaaacttctcactactcaaacaagcaggtgacgtggaggagaatcccgggcctactagtatggactggatttggcgcatccttttccttgtcggcgctgctaccggcgcgcattccttcgaaagaatggctcaggttcagctgcaacagagcggagccgaacttgctagacctggcgcttccgtgaagatgagctgtaaagccagcggctacaccttcaccacctacaccatccactgggtccgaagaaggccaggccacgaccttgagtggatcggctacatcaaccccagcagcggctgctccgactacaaccagaacttcaagggcaagaccacactgaccgccgacaagagcagcaacaccgcctacatgcagctcaacagcctgaccagcgaggacagcgccgtgtactattgtgccagaagggccgactacggcaactacgagtacacttggtttgcctactggggccagggcaccaccgtgacagtttcttctacgcgtatccagaaccctgatcctgccgtgtaccagctgcgggatagcaagagcagcgacaagagcgtgtgtctgttcaccgacttcgacagccagaccaacgtgtcccagagcaaggactccgacgtgtacatcaccgataagtgcgtgctggacatgcggagcatggacttcaagagcaactccgccgtggcctggtccaacaagtccgatttcgcctgcgccaacgccttcaacaacagcattatccccgaggacacattcttcccaagccccgagagcagctgcgacgtgaagctggtggaaaagagcttcgagacagacaccaacctgaacttccagaacctgagcgtgatcggcttcagaatcctgctgctgaaagtggccggctttaacctgctgatgaccctgcggctgtggtccagc

SEQ ID NO: 9122 - DNA, 2301 bp, Artificial Sequence
  Synthetic Polynucloetide
atggccttaccagtgaccgccttgctcctgccgctggccttgctgctccacgccgccaggccggaagtgcagctggttgaatctggcggaggactggttcagcctggcggatctctgagactgtcttgtgccgccagcggcttcagcttcagcgacttttggatgagctgggtccgacaggcccctggcaaaggacttgaatgggtcgccacaatcagccaggccggcagcgagaaggactacgtggactctgtgaagggcagattcaccatcagccgggacaacgccaagaagtccctgtacctccagatgaacagcctgagagccgaggacaccgccgtgtactattgtgcctctggcgtgtacagcttcgactacagaggccagggcaccctggtcacagtctcttctggtaccggcggaggcggatctggcggcggaggtagcggtggcggaggatctgaattcagcgtgatcgagctgacacagagccccaagttcatgagcaccagcgtgggcgacagagtgaacgtgacatacaaggccagccagaacgtgggcaccaacgtggcatggttccagcagaagcctggacagagccctaaggtgctgatctacagcgccagctacagatacagcggcgtgcccgatagattcacaggctctggcagcggcaccgacttcaccctgacaatcagcaacgtgcagagcgaggacctggccgagtatttctgccagcagtaccacacataccctctgacctttggcggaggcaccaagctggaaatcaagagactcgagatccagaaccctgatcctgccgtgtaccagctgcgggatagcaagagcagcgacaagagcgtgtgtctgttcaccgacttcgacagccagaccaacgtgtcccagagcaaggactccgacgtgtacatcaccgataagtgcgtgctggacatgcggagcatggacttcaagagcaactccgccgtggcctggtccaacaagtccgatttcgcctgcgccaacgccttcaacaacagcattatccccgaggacacattcttcccaagccccgagagcagctgcgacgtgaagctggtggaaaagagcttcgagacagacaccaacctgaacttccagaacctgagcgtgatcggcttcagaatcctgctgctgaaagtggccggctttaacctgctgatgaccctgcggctgtggtccagccgcgccaagagaagcggatctggcgtgaagcagaccctgaatttcgacctgctgaagctggctggcgacgtggaatccaacccaggccctactagtatggactggatttggcgcatccttttccttgtcggcgctgctaccggcgcgcattccttcgaaagaatggctcaggttcagctgcaacagagcggagccgaacttgctagacctggcgcttccgtgaagatgagctgtaaagccagcggctacaccttcaccacctacaccatccactgggtccgaagaaggccaggccacgaccttgagtggatcggctacatcaaccccagcagcggctgctccgactacaaccagaacttcaagggcaagaccacactgaccgccgacaagagcagcaacaccgcctacatgcagctcaacagcctgaccagcgaggacagcgccgtgtactattgtgccagaagggccgactacggcaactacgagtacacttggtttgcctactggggccagggcaccaccgtgacagtttcttctacgcgtgaggacctgaagaacgtgttcccacctgaggtggccgtgttcgagcctagcgaggccgagatcagccacacccagaaagccaccctcgtgtgcctggctaccggcttctaccccgaccatgtggaactgtcttggtgggtcaacggcaaagaggtgcacagcggcgtgtgtaccgacccccagccactgaaagaacagcccgccctgaacgacagccggtactgcctgagcagcagactgagagtgtccgccaccttctggcagaacccccggaaccacttcagatgccaggtgcagttctacggcctgagcgagaacgacgagtggacccaggacagagccaagcccgtgacccagatcgtgtctgccgaagcctggggcagagccgattgcggctttaccagcgagagctaccagcagggcgtgctgagcgccaccatcctgtacgagatcctgctgggcaaggccaccctgtacgccgtgctggtgtctgccctggtgctgatggctatggtcaagcggaaggacagccgggga

SEQ ID NO: 9123 - DNA, 2877 bp, Artificial Sequence
  Synthetic Polynucloetide
atggccttaccagtgaccgccttgctcctgccgctggccttgctgctccacgccgccaggccggaagtgcagctggttgaatctggcggaggactggttcagcctggcggatctctgagactgtcttgtgccgccagcggcttcagcttcagcgacttttggatgagctgggtccgacaggcccctggcaaaggacttgaatgggtcgccacaatcagccaggccggcagcgagaaggactacgtggactctgtgaagggcagattcaccatcagccgggacaacgccaagaagtccctgtacctccagatgaacagcctgagagccgaggacaccgccgtgtactattgtgcctctggcgtgtacagcttcgactacagaggccagggcaccctggtcacagtctcttctggtaccggcggaggcggatctggcggcggaggtagcggtggcggaggatctgaattcagcgtgatcgagctgacacagagccccaagttcatgagcaccagcgtgggcgacagagtgaacgtgacatacaaggccagccagaacgtgggcaccaacgtggcatggttccagcagaagcctggacagagccctaaggtgctgatctacagcgccagctacagatacagcggcgtgcccgatagattcacaggctctggcagcggcaccgacttcaccctgacaatcagcaacgtgcagagcgaggacctggccgagtatttctgccagcagtaccacacataccctctgacctttggcggaggcaccaagctggaaatcaagagactcgaggacctgaagaacgtgttcccacctgaggtggccgtgttcgagcctagcgaggccgagatcagccacacccagaaagccaccctcgtgtgcctggctaccggcttctaccccgaccatgtggaactgtcttggtgggtcaacggcaaagaggtgcacagcggcgtgtctaccgacccccagccactgaaagaacagcccgccctgaacgacagccggtactgcctgagcagcagactgagagtgtccgccaccttctggcagaacccccggaaccacttcagatgccaggtgcagttctacggcctgagcgagaacgacgagtggacccaggacagagccaagcccgtgacccagatcgtgtctgccgaagcctggggcagagccgattgcggatcccagagcttcggcctgctggaccccaagctgtgctacctgctggatggcatcctgttcatctacggcgtgatcctgaccgccctgttcctgagagtgaagttcagcagaagcgccgacgcccctgcctaccagcagggacagaaccaactgtacaacgagctgaacctgggcagacgggaagagtacgacgtgctggacaagcggagaggcagggaccctgagatgggcggaaagccccagcggagaaagaacccccaggaaggactgtataacgaactccagaaagacaagatggccgaagcctacagcgagatcggcatgaagggcgagcggagaagaggcaagggccacgatggcctgtaccagggcctgagcaccgccaccaaggacacctatgacgccctgcacatgcaggccctgcctccaagaagggccaagcgatctggatctggagcaacaaacttctcactactcaaacaagcaggtgacgtggaggagaatcccgggcctactagtatggactggatttggcgcatccttttccttgtcggcgctgctaccggcgcgcattccttcgaaagaatggctcaggttcagctgcaacagagcggagccgaacttgctagacctggcgcttccgtgaagatgagctgtaaagccagcggctacaccttcaccacctacaccatccactgggtccgaagaaggccaggccacgaccttgagtggatcggctacatcaaccccagcagcggctgctccgactacaaccagaacttcaagggcaagaccacactgaccgccgacaagagcagcaacaccgcctacatgcagctcaacagcctgaccagcgaggacagcgccgtgtactattgtgccagaagggccgactacggcaactacgagtacacttggtttgcctactggggccagggcaccaccgtgacagtttcttctacgcgtatccagaaccctgatcctgccgtgtaccagctgcgggatagcaagagcagcgacaagagcgtgtgtctgttcaccgacttcgacagccagaccaacgtgtcccagagcaaggactccgacgtgtacatcaccgataagaccgtgctggacatgcggagcatggacttcaagagcaactccgccgtggcctggtccaacaagtccgatttcgcctgcgccaacgccttcaacaacagcattatccccgaggacacattcttcccaagccccgagagcagctgcggtacccagagttttgggttgttggaccctaaattgtgctatctgttggacggaatcctgttcatttacggagtgatcctgaccgcattgttcctgcgggttaagttttccagatccgcagacgcacccgcttaccaacaagggcagaaccaactctacaatgaacttaatttggggcggagggaagagtacgacgttctggacaaaaggaggggacgagatcccgagatgggcggaaagcctcagcgaaggaagaatccgcaagaggggctttataacgaactccagaaagataaaatggcagaagcctatagtgagattgggatgaagggagaaaggaggaggggtaaaggtcacgatgggttgtaccaaggattgagcacagccactaaagatacctatgatgcgctccacatgcaggccctgccgccaaga

SEQ ID NO: 9124 - DNA, 2367 bp, Artificial Sequence
  Synthetic Polynucloetide
atggccttaccagtgaccgccttgctcctgccgctggccttgctgctccacgccgccaggccggaagtgcagctggttgaatctggcggaggactggttcagcctggcggatctctgagactgtcttgtgccgccagcggcttcagcttcagcgacttttggatgagctgggtccgacaggcccctggcaaaggacttgaatgggtcgccacaatcagccaggccggcagcgagaaggactacgtggactctgtgaagggcagattcaccatcagccgggacaacgccaagaagtccctgtacctccagatgaacagcctgagagccgaggacaccgccgtgtactattgtgcctctggcgtgtacagcttcgactacagaggccagggcaccctggtcacagtctcttctggtaccggcggaggcggatctggcggcggaggtagcggtggcggaggatctgaattcagcgtgatcgagctgacacagagccccaagttcatgagcaccagcgtgggcgacagagtgaacgtgacatacaaggccagccagaacgtgggcaccaacgtggcatggttccagcagaagcctggacagagccctaaggtgctgatctacagcgccagctacagatacagcggcgtgcccgatagattcacaggctctggcagcggcaccgacttcaccctgacaatcagcaacgtgcagagcgaggacctggccgagtatttctgccagcagtaccacacataccctctgacctttggcggaggcaccaagctggaaatcaagagactcgagggacagcctaaggccaatcctaccgtgacactgttccctccaagcagcgaagaactccaggccaacaaggccacacttgtgtgcctgatctccgacttctaccctggggctgtgacagtggcttggaaggccgatggatctcctgtgaaagccggcgtggaaaccaccaagccatccaagcagagcaacaacaaatacgccgccagctcctacctgagcctgacacctgagcagtggaagtcccacagatcctacagctgccaagtgacccacgaaggcagcaccgtggaaaagacagtggcccctacagagtgcagccccatcaagaccgatgtgattacaatggaccccaaggacaactgctccaaggacgccaacgataccctgctgctccagctgaccaacaccagcgcctactacatgtacttgttgctgctgctgaagtccgtggtgtacttcgccatcatcacatgctgcctgctgcggagaaccgccttctgctgcaacggcgagaagtctagggccaagcgatctggatctggagcaacaaacttctcactactcaaacaagcaggtgacgtggaggagaatcccgggcctactagtatggactggatttggcgcatccttttccttgtcggcgctgctaccggcgcgcattccttcgaaagaatggctcaggttcagctgcaacagagcggagccgaacttgctagacctggcgcttccgtgaagatgagctgtaaagccagcggctacaccttcaccacctacaccatccactgggtccgaagaaggccaggccacgaccttgagtggatcggctacatcaaccccagcagcggctgctccgactacaaccagaacttcaagggcaagaccacactgaccgccgacaagagcagcaacaccgcctacatgcagctcaacagcctgaccagcgaggacagcgccgtgtactattgtgccagaagggccgactacggcaactacgagtacacttggtttgcctactggggccagggcaccaccgtgacagtttcttctacgcgtgcctctacaaagggaccctccgtgtttcctctggctcccagcagcaagtctacaagcggaggaacagccgctctgggctgcctggtcaaggattactttcccgagcctgtgaccgtgtcctggaatagcggagcactgacaagcggcgtgcacacctttccagccgtgctgcaaagcagcggcctgtactctctgagcagcgtggtcacagtgcctagctctagcctgggcacccagacctacatctgcaatgtgaaccacaagcctagcaacaccaaggtggacaagagagtggaacccaagagctgtgaagtgaaaaccgactccaccgaccacgtgaagcccaaagagacagagaacaccaagcagcccagcaagagctgccacaagcccaaggccatcgtgcacaccgagaaagtgaacatgatgagcctgaccgtgctgggcctgcggatgctgttcgccaaaaccgtggccgtgaacttcctgctgaccgccaagctgttcttcctc

SEQ ID NO: 9125 - DNA, 2310 bp, Artificial Sequence
  Synthetic Polynucloetide
atggccttaccagtgaccgccttgctcctgccgctggccttgctgctccacgccgccaggccggaagtgcagctggttgaatctggcggaggactggttcagcctggcggatctctgagactgtcttgtgccgccagcggcttcagcttcagcgacttttggatgagctgggtccgacaggcccctggcaaaggacttgaatgggtcgccacaatcagccaggccggcagcgagaaggactacgtggactctgtgaagggcagattcaccatcagccgggacaacgccaagaagtccctgtacctccagatgaacagcctgagagccgaggacaccgccgtgtactattgtgcctctggcgtgtacagcttcgactacagaggccagggcaccctggtcacagtctcttctggtaccggcggaggcggatctggcggcggaggtagcggtggcggaggatctgaattcagcgtgatcgagctgacacagagccccaagttcatgagcaccagcgtgggcgacagagtgaacgtgacatacaaggccagccagaacgtgggcaccaacgtggcatggttccagcagaagcctggacagagccctaaggtgctgatctacagcgccagctacagatacagcggcgtgcccgatagattcacaggctctggcagcggcaccgacttcaccctgacaatcagcaacgtgcagagcgaggacctggccgagtatttctgccagcagtaccacacataccctctgacctttggcggaggcaccaagctggaaatcaagagactcgagggacagcctaaggccaatcctaccgtgacactgttccctccaagcagcgaagaactccaggccaacaaggccacacttgtgtgcctgatctccgacttctaccctggggctgtgacagtggcttggaaggccgatggatctcctgtgaaagccggcgtggaaaccaccaagccatccaagcagagcaacaacaaatacgccgccagctcctacctgagcctgacacctgagcagtggaagtcccacagatcctacagctgccaagtgacccacgaaggcagcaccgtggaaaagacagtggcccctacagagtgcagcggcagagccgattgcggctttaccagcgagagctaccagcagggcgtgctgagcgccaccatcctgtacgagatcctgctgggcaaggccaccctgtacgccgtgctggtgtctgccctggtgctgatggctatggtcaagcggaaggacagccggggacgcgccaagagaagcggatctggcgtgaagcagaccctgaatttcgacctgctgaagctggctggcgacgtggaatccaacccaggccctactagtatggactggatttggcgcatccttttccttgtcggcgctgctaccggcgcgcattccttcgaaagaatggctcaggttcagctgcaacagagcggagccgaacttgctagacctggcgcttccgtgaagatgagctgtaaagccagcggctacaccttcaccacctacaccatccactgggtccgaagaaggccaggccacgaccttgagtggatcggctacatcaaccccagcagcggctgctccgactacaaccagaacttcaagggcaagaccacactgaccgccgacaagagcagcaacaccgcctacatgcagctcaacagcctgaccagcgaggacagcgccgtgtactattgtgccagaagggccgactacggcaactacgagtacacttggtttgcctactggggccagggcaccaccgtgacagtttcttctacgcgtgcctctacaaagggaccctccgtgtttcctctggctcccagcagcaagtctacaagcggaggaacagccgctctgggctgcctggtcaaggattactttcccgagcctgtgaccgtgtcctggaatagcggagcactgacaagcggcgtgcacacctttccagccgtgctgcaaagcagcggcctgtactctctgagcagcgtggtcacagtgcctagctctagcctgggcacccagacctacatctgcaatgtgaaccacaagcctagcaacaccaaggtggacaagagagtggaacccaagagctgtatccccgaggacacattcttcccaagccccgagagcagctgcgacgtgaagctggtggaaaagagcttcgagacagacaccaacctgaacttccagaacctgagcgtgatcggcttcagaatcctgctgctgaaagtggccggctttaacctgctgatgaccctgcggctgtggtccagc

SEQ ID NO: 9126 - DNA, 2712 bp, Artificial Sequence
  Synthetic Polynucloetide
atggccttaccagtgaccgccttgctcctgccgctggccttgctgctccacgccgccaggccggaagtgcagctggttgaatctggcggaggactggttcagcctggcggatctctgagactgtcttgtgccgccagcggcttcagcttcagcgacttttggatgagctgggtccgacaggcccctggcaaaggacttgaatgggtcgccacaatcagccaggccggcagcgagaaggactacgtggactctgtgaagggcagattcaccatcagccgggacaacgccaagaagtccctgtacctccagatgaacagcctgagagccgaggacaccgccgtgtactattgtgcctctggcgtgtacagcttcgactacagaggccagggcaccctggtcacagtctcttctggtaccggcggaggcggatctggcggcggaggtagcggtggcggaggatctgaattcagcgtgatcgagctgacacagagccccaagttcatgagcaccagcgtgggcgacagagtgaacgtgacatacaaggccagccagaacgtgggcaccaacgtggcatggttccagcagaagcctggacagagccctaaggtgctgatctacagcgccagctacagatacagcggcgtgcccgatagattcacaggctctggcagcggcaccgacttcaccctgacaatcagcaacgtgcagagcgaggacctggccgagtatttctgccagcagtaccacacataccctctgacctttggcggaggcaccaagctggaaatcaagagactcgagatccagaaccctgatcctgccgtgtaccagctgcgggatagcaagagcagcgacaagagcgtgtgtctgttcaccgacttcgacagccagaccaacgtgtcccagagcaaggactccgacgtgtacatcaccgataagtgcgtgctggacatgcggagcatggacttcaagagcaactccgccgtggcctggtccaacaagtccgatttcgcctgcgccaacgccttcaacaacagcattatccccgaggacacattcttcccaagccccgagagcagctgcgacgtgaagctggtggaaaagagcttcgagacagacaccaacctgaacttccagaacctgagcgtgatcggcttcagaatcctgctgctgaaagtggccggctttaacctgctgatgaccctgcggctgtggtccagccgcgccaagagaagcggatctggcgtgaagcagaccctgaatttcgacctgctgaagctggctggcgacgtggaatccaacccaggccctactagtatggactggatttggcgcatccttttccttgtcggcgctgctaccggcgcgcattccgggccccagctccagctgcaagagtctggacctggcctggtcaagcctagcgagacactgagcctgacctgtaccgtgtccggcgatagcatcagcagcggcgattactactggggctggatcagacagcctcctggcaaaggactggaatggatcggccacatctactacagcggcgtgacctactacaaccccagcctgaagtccagagtgaccatcagcgtggacaccagccggaaccagttctccctgaagctgtctagcgtgacagccgccgataccgccgtgtactactgcaccagagaggacagcagcaactggcggagtagaggccagggaacactggtcacagttagctctggatccggcggaggcggaagtggaggcggaggatctggcggcggaggctctttcgaaagaatggctcaggttcagctgcaacagagcggagccgaacttgctagacctggcgcttccgtgaagatgagctgtaaagccagcggctacaccttcaccacctacaccatccactgggtccgaagaaggccaggccacgaccttgagtggatcggctacatcaaccccagcagcggctgctccgactacaaccagaacttcaagggcaagaccacactgaccgccgacaagagcagcaacaccgcctacatgcagctcaacagcctgaccagcgaggacagcgccgtgtactattgtgccagaagggccgactacggcaactacgagtacacttggtttgcctactggggccagggcaccaccgtgacagtttcttctacgcgtgaggacctgaagaacgtgttcccacctgaggtggccgtgttcgagcctagcgaggccgagatcagccacacccagaaagccaccctcgtgtgcctggctaccggcttctaccccgaccatgtggaactgtcttggtgggtcaacggcaaagaggtgcacagcggcgtgtgtaccgacccccagccactgaaagaacagcccgccctgaacgacagccggtactgcctgagcagcagactgagagtgtccgccaccttctggcagaacccccggaaccacttcagatgccaggtgcagttctacggcctgagcgagaacgacgagtggacccaggacagagccaagcccgtgacccagatcgtgtctgccgaagcctggggcagagccgattgcggctttaccagcgagagctaccagcagggcgtgctgagcgccaccatcctgtacgagatcctgctgggcaaggccaccctgtacgccgtgctggtgtctgccctggtgctgatggctatggtcaagcggaaggacagccgggga

SEQ ID NO: 9127 - DNA, 3288 bp, Artificial Sequence
  Synthetic Polynucloetide
atggccttaccagtgaccgccttgctcctgccgctggccttgctgctccacgccgccaggccggaagtgcagctggttgaatctggcggaggactggttcagcctggcggatctctgagactgtcttgtgccgccagcggcttcagcttcagcgacttttggatgagctgggtccgacaggcccctggcaaaggacttgaatgggtcgccacaatcagccaggccggcagcgagaaggactacgtggactctgtgaagggcagattcaccatcagccgggacaacgccaagaagtccctgtacctccagatgaacagcctgagagccgaggacaccgccgtgtactattgtgcctctggcgtgtacagcttcgactacagaggccagggcaccctggtcacagtctcttctggtaccggcggaggcggatctggcggcggaggtagcggtggcggaggatctgaattcagcgtgatcgagctgacacagagccccaagttcatgagcaccagcgtgggcgacagagtgaacgtgacatacaaggccagccagaacgtgggcaccaacgtggcatggttccagcagaagcctggacagagccctaaggtgctgatctacagcgccagctacagatacagcggcgtgcccgatagattcacaggctctggcagcggcaccgacttcaccctgacaatcagcaacgtgcagagcgaggacctggccgagtatttctgccagcagtaccacacataccctctgacctttggcggaggcaccaagctggaaatcaagagactcgaggacctgaagaacgtgttcccacctgaggtggccgtgttcgagcctagcgaggccgagatcagccacacccagaaagccaccctcgtgtgcctggctaccggcttctaccccgaccatgtggaactgtcttggtgggtcaacggcaaagaggtgcacagcggcgtgtctaccgacccccagccactgaaagaacagcccgccctgaacgacagccggtactgcctgagcagcagactgagagtgtccgccaccttctggcagaacccccggaaccacttcagatgccaggtgcagttctacggcctgagcgagaacgacgagtggacccaggacagagccaagcccgtgacccagatcgtgtctgccgaagcctggggcagagccgattgcggatcccagagcttcggcctgctggaccccaagctgtgctacctgctggatggcatcctgttcatctacggcgtgatcctgaccgccctgttcctgagagtgaagttcagcagaagcgccgacgcccctgcctaccagcagggacagaaccaactgtacaacgagctgaacctgggcagacgggaagagtacgacgtgctggacaagcggagaggcagggaccctgagatgggcggaaagccccagcggagaaagaacccccaggaaggactgtataacgaactccagaaagacaagatggccgaagcctacagcgagatcggcatgaagggcgagcggagaagaggcaagggccacgatggcctgtaccagggcctgagcaccgccaccaaggacacctatgacgccctgcacatgcaggccctgcctccaagaagggccaagcgatctggatctggagcaacaaacttctcactactcaaacaagcaggtgacgtggaggagaatcccgggcctactagtatggactggatttggcgcatccttttccttgtcggcgctgctaccggcgcgcattccgggccccagctccagctgcaagagtctggacctggcctggtcaagcctagcgagacactgagcctgacctgtaccgtgtccggcgatagcatcagcagcggcgattactactggggctggatcagacagcctcctggcaaaggactggaatggatcggccacatctactacagcggcgtgacctactacaaccccagcctgaagtccagagtgaccatcagcgtggacaccagccggaaccagttctccctgaagctgtctagcgtgacagccgccgataccgccgtgtactactgcaccagagaggacagcagcaactggcggagtagaggccagggaacactggtcacagttagctctggatccggcggaggcggaagtggaggcggaggatctggcggcggaggctctttcgaaagaatggctcaggttcagctgcaacagagcggagccgaacttgctagacctggcgcttccgtgaagatgagctgtaaagccagcggctacaccttcaccacctacaccatccactgggtccgaagaaggccaggccacgaccttgagtggatcggctacatcaaccccagcagcggctgctccgactacaaccagaacttcaagggcaagaccacactgaccgccgacaagagcagcaacaccgcctacatgcagctcaacagcctgaccagcgaggacagcgccgtgtactattgtgccagaagggccgactacggcaactacgagtacacttggtttgcctactggggccagggcaccaccgtgacagtttcttctacgcgtatccagaaccctgatcctgccgtgtaccagctgcgggatagcaagagcagcgacaagagcgtgtgtctgttcaccgacttcgacagccagaccaacgtgtcccagagcaaggactccgacgtgtacatcaccgataagaccgtgctggacatgcggagcatggacttcaagagcaactccgccgtggcctggtccaacaagtccgatttcgcctgcgccaacgccttcaacaacagcattatccccgaggacacattcttcccaagccccgagagcagctgcggtacccagagttttgggttgttggaccctaaattgtgctatctgttggacggaatcctgttcatttacggagtgatcctgaccgcattgttcctgcgggttaagttttccagatccgcagacgcacccgcttaccaacaagggcagaaccaactctacaatgaacttaatttggggcggagggaagagtacgacgttctggacaaaaggaggggacgagatcccgagatgggcggaaagcctcagcgaaggaagaatccgcaagaggggctttataacgaactccagaaagataaaatggcagaagcctatagtgagattgggatgaagggagaaaggaggaggggtaaaggtcacgatgggttgtaccaaggattgagcacagccactaaagatacctatgatgcgctccacatgcaggccctgccgccaaga

SEQ ID NO: 9128 - DNA, 2778 bp, Artificial Sequence
  Synthetic Polynucloetide
atggccttaccagtgaccgccttgctcctgccgctggccttgctgctccacgccgccaggccggaagtgcagctggttgaatctggcggaggactggttcagcctggcggatctctgagactgtcttgtgccgccagcggcttcagcttcagcgacttttggatgagctgggtccgacaggcccctggcaaaggacttgaatgggtcgccacaatcagccaggccggcagcgagaaggactacgtggactctgtgaagggcagattcaccatcagccgggacaacgccaagaagtccctgtacctccagatgaacagcctgagagccgaggacaccgccgtgtactattgtgcctctggcgtgtacagcttcgactacagaggccagggcaccctggtcacagtctcttctggtaccggcggaggcggatctggcggcggaggtagcggtggcggaggatctgaattcagcgtgatcgagctgacacagagccccaagttcatgagcaccagcgtgggcgacagagtgaacgtgacatacaaggccagccagaacgtgggcaccaacgtggcatggttccagcagaagcctggacagagccctaaggtgctgatctacagcgccagctacagatacagcggcgtgcccgatagattcacaggctctggcagcggcaccgacttcaccctgacaatcagcaacgtgcagagcgaggacctggccgagtatttctgccagcagtaccacacataccctctgacctttggcggaggcaccaagctggaaatcaagagactcgagggacagcctaaggccaatcctaccgtgacactgttccctccaagcagcgaagaactccaggccaacaaggccacacttgtgtgcctgatctccgacttctaccctggggctgtgacagtggcttggaaggccgatggatctcctgtgaaagccggcgtggaaaccaccaagccatccaagcagagcaacaacaaatacgccgccagctcctacctgagcctgacacctgagcagtggaagtcccacagatcctacagctgccaagtgacccacgaaggcagcaccgtggaaaagacagtggcccctacagagtgcagccccatcaagaccgatgtgattacaatggaccccaaggacaactgctccaaggacgccaacgataccctgctgctccagctgaccaacaccagcgcctactacatgtacttgttgctgctgctgaagtccgtggtgtacttcgccatcatcacatgctgcctgctgcggagaaccgccttctgctgcaacggcgagaagtctagggccaagcgatctggatctggagcaacaaacttctcactactcaaacaagcaggtgacgtggaggagaatcccgggcctactagtatggactggatttggcgcatccttttccttgtcggcgctgctaccggcgcgcattccgggccccagctccagctgcaagagtctggacctggcctggtcaagcctagcgagacactgagcctgacctgtaccgtgtccggcgatagcatcagcagcggcgattactactggggctggatcagacagcctcctggcaaaggactggaatggatcggccacatctactacagcggcgtgacctactacaaccccagcctgaagtccagagtgaccatcagcgtggacaccagccggaaccagttctccctgaagctgtctagcgtgacagccgccgataccgccgtgtactactgcaccagagaggacagcagcaactggcggagtagaggccagggaacactggtcacagttagctctggatccggcggaggcggaagtggaggcggaggatctggcggcggaggctctttcgaaagaatggctcaggttcagctgcaacagagcggagccgaacttgctagacctggcgcttccgtgaagatgagctgtaaagccagcggctacaccttcaccacctacaccatccactgggtccgaagaaggccaggccacgaccttgagtggatcggctacatcaaccccagcagcggctgctccgactacaaccagaacttcaagggcaagaccacactgaccgccgacaagagcagcaacaccgcctacatgcagctcaacagcctgaccagcgaggacagcgccgtgtactattgtgccagaagggccgactacggcaactacgagtacacttggtttgcctactggggccagggcaccaccgtgacagtttcttctacgcgtgcctctacaaagggaccctccgtgtttcctctggctcccagcagcaagtctacaagcggaggaacagccgctctgggctgcctggtcaaggattactttcccgagcctgtgaccgtgtcctggaatagcggagcactgacaagcggcgtgcacacctttccagccgtgctgcaaagcagcggcctgtactctctgagcagcgtggtcacagtgcctagctctagcctgggcacccagacctacatctgcaatgtgaaccacaagcctagcaacaccaaggtggacaagagagtggaacccaagagctgtgaagtgaaaaccgactccaccgaccacgtgaagcccaaagagacagagaacaccaagcagcccagcaagagctgccacaagcccaaggccatcgtgcacaccgagaaagtgaacatgatgagcctgaccgtgctgggcctgcggatgctgttcgccaaaaccgtggccgtgaacttcctgctgaccgccaagctgttcttcctc

SEQ ID NO: 9129 - DNA, 2721 bp, Artificial Sequence
  Synthetic Polynucloetide
atggccttaccagtgaccgccttgctcctgccgctggccttgctgctccacgccgccaggccggaagtgcagctggttgaatctggcggaggactggttcagcctggcggatctctgagactgtcttgtgccgccagcggcttcagcttcagcgacttttggatgagctgggtccgacaggcccctggcaaaggacttgaatgggtcgccacaatcagccaggccggcagcgagaaggactacgtggactctgtgaagggcagattcaccatcagccgggacaacgccaagaagtccctgtacctccagatgaacagcctgagagccgaggacaccgccgtgtactattgtgcctctggcgtgtacagcttcgactacagaggccagggcaccctggtcacagtctcttctggtaccggcggaggcggatctggcggcggaggtagcggtggcggaggatctgaattcagcgtgatcgagctgacacagagccccaagttcatgagcaccagcgtgggcgacagagtgaacgtgacatacaaggccagccagaacgtgggcaccaacgtggcatggttccagcagaagcctggacagagccctaaggtgctgatctacagcgccagctacagatacagcggcgtgcccgatagattcacaggctctggcagcggcaccgacttcaccctgacaatcagcaacgtgcagagcgaggacctggccgagtatttctgccagcagtaccacacataccctctgacctttggcggaggcaccaagctggaaatcaagagactcgagggacagcctaaggccaatcctaccgtgacactgttccctccaagcagcgaagaactccaggccaacaaggccacacttgtgtgcctgatctccgacttctaccctggggctgtgacagtggcttggaaggccgatggatctcctgtgaaagccggcgtggaaaccaccaagccatccaagcagagcaacaacaaatacgccgccagctcctacctgagcctgacacctgagcagtggaagtcccacagatcctacagctgccaagtgacccacgaaggcagcaccgtggaaaagacagtggcccctacagagtgcagcggcagagccgattgcggctttaccagcgagagctaccagcagggcgtgctgagcgccaccatcctgtacgagatcctgctgggcaaggccaccctgtacgccgtgctggtgtctgccctggtgctgatggctatggtcaagcggaaggacagccggggacgcgccaagagaagcggatctggcgtgaagcagaccctgaatttcgacctgctgaagctggctggcgacgtggaatccaacccaggccctactagtatggactggatttggcgcatccttttccttgtcggcgctgctaccggcgcgcattccgggccccagctccagctgcaagagtctggacctggcctggtcaagcctagcgagacactgagcctgacctgtaccgtgtccggcgatagcatcagcagcggcgattactactggggctggatcagacagcctcctggcaaaggactggaatggatcggccacatctactacagcggcgtgacctactacaaccccagcctgaagtccagagtgaccatcagcgtggacaccagccggaaccagttctccctgaagctgtctagcgtgacagccgccgataccgccgtgtactactgcaccagagaggacagcagcaactggcggagtagaggccagggaacactggtcacagttagctctggatccggcggaggcggaagtggaggcggaggatctggcggcggaggctctttcgaaagaatggctcaggttcagctgcaacagagcggagccgaacttgctagacctggcgcttccgtgaagatgagctgtaaagccagcggctacaccttcaccacctacaccatccactgggtccgaagaaggccaggccacgaccttgagtggatcggctacatcaaccccagcagcggctgctccgactacaaccagaacttcaagggcaagaccacactgaccgccgacaagagcagcaacaccgcctacatgcagctcaacagcctgaccagcgaggacagcgccgtgtactattgtgccagaagggccgactacggcaactacgagtacacttggtttgcctactggggccagggcaccaccgtgacagtttcttctacgcgtgcctctacaaagggaccctccgtgtttcctctggctcccagcagcaagtctacaagcggaggaacagccgctctgggctgcctggtcaaggattactttcccgagcctgtgaccgtgtcctggaatagcggagcactgacaagcggcgtgcacacctttccagccgtgctgcaaagcagcggcctgtactctctgagcagcgtggtcacagtgcctagctctagcctgggcacccagacctacatctgcaatgtgaaccacaagcctagcaacaccaaggtggacaagagagtggaacccaagagctgtatccccgaggacacattcttcccaagccccgagagcagctgcgacgtgaagctggtggaaaagagcttcgagacagacaccaacctgaacttccagaacctgagcgtgatcggcttcagaatcctgctgctgaaagtggccggctttaacctgctgatgaccctgcggctgtggtccagc

SEQ ID NO: 9130 - DNA, 2292 bp, Artificial Sequence
  Synthetic Polynucloetide
atggccttaccagtgaccgccttgctcctgccgctggccttgctgctccacgccgccaggccggaagtgcaggttttggagtctggcggaggactggttcagcctggcggatctctgagactgtcttgtgccgccagcggcttcaccttcagcaactttgccatgagctgggtccgacaggcccctggcaaaggacttgaatgggtgtccacaatcagcggcagcgccggcacaacagattacgccgattctgtgaagggcagattcaccatcagccgggacaacagcaagaaaaccctgtacctccagatgaacagcctgcgcgtggaagataccgccgtgtactactgtgccgatggcagaggccccttcttcgattatcgcggccagggcacactggtcaccgtttcttctggtaccggcggaggcggatctggcggcggaggtagcggtggcggaggatctgaattcagcgtgatcgagctgacacagagccccaagttcatgagcaccagcgtgggcgacagagtgaacgtgacatacaaggccagccagaacgtgggcaccaacgtggcatggttccagcagaagcctggacagagccctaaggtgctgatctacagcgccagctacagatacagcggcgtgcccgatagattcacaggctctggcagcggcaccgacttcaccctgacaatcagcaacgtgcagagcgaggacctggccgagtatttctgccagcagtaccacacataccctctgacctttggcggaggcaccaagctggaaatcaagagactcgaggacctgaagaacgtgttcccacctgaggtggccgtgttcgagcctagcgaggccgagatcagccacacccagaaagccaccctcgtgtgcctggctaccggcttctaccccgaccatgtggaactgtcttggtgggtcaacggcaaagaggtgcacagcggcgtgtgtaccgacccccagccactgaaagaacagcccgccctgaacgacagccggtactgcctgagcagcagactgagagtgtccgccaccttctggcagaacccccggaaccacttcagatgccaggtgcagttctacggcctgagcgagaacgacgagtggacccaggacagagccaagcccgtgacccagatcgtgtctgccgaagcctggggcagagccgattgcggctttaccagcgagagctaccagcagggcgtgctgagcgccaccatcctgtacgagatcctgctgggcaaggccaccctgtacgccgtgctggtgtctgccctggtgctgatggctatggtcaagcggaaggacagccggggaagggccaagcgatctggatctggagcaacaaacttctcactactcaaacaagcaggtgacgtggaggagaatcccgggcctactagtatggactggatttggcgcatccttttccttgtcggcgctgctaccggcgcgcattccttcgaaagaatggctcaggttcagctgcaacagagcggagccgaacttgctagacctggcgcttccgtgaagatgagctgtaaagccagcggctacaccttcaccacctacaccatccactgggtccgaagaaggccaggccacgaccttgagtggatcggctacatcaaccccagcagcggctgctccgactacaaccagaacttcaagggcaagaccacactgaccgccgacaagagcagcaacaccgcctacatgcagctcaacagcctgaccagcgaggacagcgccgtgtactattgtgccagaagggccgactacggcaactacgagtacacttggtttgcctactggggccagggcaccaccgtgacagtttcttctacgcgtatccagaaccctgatcctgccgtgtaccagctgcgggatagcaagagcagcgacaagagcgtgtgtctgttcaccgacttcgacagccagaccaacgtgtcccagagcaaggactccgacgtgtacatcaccgataagtgcgtgctggacatgcggagcatggacttcaagagcaactccgccgtggcctggtccaacaagtccgatttcgcctgcgccaacgccttcaacaacagcattatccccgaggacacattcttcccaagccccgagagcagctgcgacgtgaagctggtggaaaagagcttcgagacagacaccaacctgaacttccagaacctgagcgtgatcggcttcagaatcctgctgctgaaagtggccggctttaacctgctgatgaccctgcggctgtggtccagc

SEQ ID NO: 9131 - DNA, 2295 bp, Artificial Sequence
  Synthetic Polynucloetide
atggccttaccagtgaccgccttgctcctgccgctggccttgctgctccacgccgccaggccgagcgtgatcgagctgacacagagccccaagttcatgagcaccagcgtgggcgacagagtgaacgtgacatacaaggccagccagaacgtgggcaccaacgtggcatggttccagcagaagcctggacagagccctaaggtgctgatctacagcgccagctacagatacagcggcgtgcccgatagattcacaggctctggcagcggcaccgacttcaccctgacaatcagcaacgtgcagagcgaggacctggccgagtatttctgccagcagtaccacacataccctctgacctttggcggaggcaccaagctggaaatcaagagactcgaggacctgaagaacgtgttcccacctgaggtggccgtgttcgagcctagcgaggccgagatcagccacacccagaaagccaccctcgtgtgcctggctaccggcttctaccccgaccatgtggaactgtcttggtgggtcaacggcaaagaggtgcacagcggcgtgtgtaccgacccccagccactgaaagaacagcccgccctgaacgacagccggtactgcctgagcagcagactgagagtgtccgccaccttctggcagaacccccggaaccacttcagatgccaggtgcagttctacggcctgagcgagaacgacgagtggacccaggacagagccaagcccgtgacccagatcgtgtctgccgaagcctggggcagagccgattgcggctttaccagcgagagctaccagcagggcgtgctgagcgccaccatcctgtacgagatcctgctgggcaaggccaccctgtacgccgtgctggtgtctgccctggtgctgatggctatggtcaagcggaaggacagccggggaagggccaagcgatctggatctggagcaacaaacttctcactactcaaacaagcaggtgacgtggaggagaatcccgggcctactagtatggactggatttggcgcatccttttccttgtcggcgctgctaccggcgcccattccgggcccgaagtgcagctggttgaatctggcggaggactggttcaggctggcggatctctgagactgtcttgtgccgccagcggcagaacctttagcatgggctggtttagacaggcccctggcaaagagagagagttcgtcgccgccatcacatactctggcggcagcccttactacgccgactctgtgaagggcagattcaccatcagccgggacaacgccaagaacaccgtgtacctccagatgaacagcctgaagcctgaggacaccgccgtgtactactgcgccgccaatccaacatacggcagcgactggaacgccgagaattggggccagggaacccaagtgacagtgtctagcggatccggcggcggaggatctggcggaggcggatctgggggcggaggctctttcgaaagaatggctcaggttcagctgcaacagagcggagccgaacttgctagacctggcgcttccgtgaagatgagctgtaaagccagcggctacaccttcaccacctacaccatccactgggtccgaagaaggccaggccacgaccttgagtggatcggctacatcaaccccagcagcggctgctccgactacaaccagaacttcaagggcaagaccacactgaccgccgacaagagcagcaacaccgcctacatgcagctcaacagcctgaccagcgaggacagcgccgtgtactattgtgccagaagggccgactacggcaactacgagtacacttggtttgcctactggggccagggcaccaccgtgacagtttcttctacgcgtatccagaaccctgatcctgccgtgtaccagctgcgggatagcaagagcagcgacaagagcgtgtgtctgttcaccgacttcgacagccagaccaacgtgtcccagagcaaggactccgacgtgtacatcaccgataagtgcgtgctggacatgcggagcatggacttcaagagcaactccgccgtggcctggtccaacaagtccgatttcgcctgcgccaacgccttcaacaacagcattatccccgaggacacattcttcccaagccccgagagcagctgcgacgtgaagctggtggaaaagagcttcgagacagacaccaacctgaacttccagaacctgagcgtgatcggcttcagaatcctgctgctgaaagtggccggctttaacctgctgatgaccctgcggctgtggtccagc

SEQ ID NO: 9132 - DNA, 2676 bp, Artificial Sequence
  Synthetic Polynucloetide
atggccttaccagtgaccgccttgctcctgccgctggccttgctgctccacgccgccaggccgagcgtgatcgagctgacacagagccccaagttcatgagcaccagcgtgggcgacagagtgaacgtgacatacaaggccagccagaacgtgggcaccaacgtggcatggttccagcagaagcctggacagagccctaaggtgctgatctacagcgccagctacagatacagcggcgtgcccgatagattcacaggctctggcagcggcaccgacttcaccctgacaatcagcaacgtgcagagcgaggacctggccgagtatttctgccagcagtaccacacataccctctgacctttggcggaggcaccaagctggaaatcaagagactcgaggacctgaagaacgtgttcccacctgaggtggccgtgttcgagcctagcgaggccgagatcagccacacccagaaagccaccctcgtgtgcctggctaccggcttctaccccgaccatgtggaactgtcttggtgggtcaacggcaaagaggtgcacagcggcgtgtgtaccgacccccagccactgaaagaacagcccgccctgaacgacagccggtactgcctgagcagcagactgagagtgtccgccaccttctggcagaacccccggaaccacttcagatgccaggtgcagttctacggcctgagcgagaacgacgagtggacccaggacagagccaagcccgtgacccagatcgtgtctgccgaagcctggggcagagccgattgcggctttaccagcgagagctaccagcagggcgtgctgagcgccaccatcctgtacgagatcctgctgggcaaggccaccctgtacgccgtgctggtgtctgccctggtgctgatggctatggtcaagcggaaggacagccggggaagggccaagcgatctggatctggagcaacaaacttctcactactcaaacaagcaggtgacgtggaggagaatcccgggcctactagtatggactggatttggcgcatccttttccttgtcggcgctgctaccggcgcccattcccaactgcaactgcaagagtctggccctggcctggtcaagccttctgaaaccctgagcctgacctgtaccgtgtccggcggctctatcagcagcggcgattactactggggctggatcagacagcctccaggcaagggactcgaatggatcggcagcatcagctacagcggctccacctactacaacccaagcctgaagtccagagtgaccatcagcgtggacaccagcagaaaccagttctccctgaagctgagcagcgtgacagccgccgatacagccgtgtattattgcaccagagaggacagcagcaactggcggagtagaggacagggcacactggtcacagtgtcctcttctggaggcggtggaagcggtggaggaggatctgaagtgcagctggttgaatctggcggaggactggttcaggctggcggatctctgagactgtcttgtgccgccagcggcagaacctttagcatgggctggtttagacaggcccctggcaaagagagagagttcgtcgccgccatcacatactctggcggcagcccttactacgccgactctgtgaagggcagattcaccatcagccgggacaacgccaagaacaccgtgtacctccagatgaacagcctgaagcctgaggacaccgccgtgtactactgcgccgccaatccaacatacggcagcgactggaacgccgagaattggggccagggaacccaagtgacagtgtctagcggatccggcggcggaggatctggcggaggcggatctgggggcggaggctctttcgaaagaatggctcaggttcagctgcaacagagcggagccgaacttgctagacctggcgcttccgtgaagatgagctgtaaagccagcggctacaccttcaccacctacaccatccactgggtccgaagaaggccaggccacgaccttgagtggatcggctacatcaaccccagcagcggctgctccgactacaaccagaacttcaagggcaagaccacactgaccgccgacaagagcagcaacaccgcctacatgcagctcaacagcctgaccagcgaggacagcgccgtgtactattgtgccagaagggccgactacggcaactacgagtacacttggtttgcctactggggccagggcaccaccgtgacagtttcttctacgcgtatccagaaccctgatcctgccgtgtaccagctgcgggatagcaagagcagcgacaagagcgtgtgtctgttcaccgacttcgacagccagaccaacgtgtcccagagcaaggactccgacgtgtacatcaccgataagtgcgtgctggacatgcggagcatggacttcaagagcaactccgccgtggcctggtccaacaagtccgatttcgcctgcgccaacgccttcaacaacagcattatccccgaggacacattcttcccaagccccgagagcagctgcgacgtgaagctggtggaaaagagcttcgagacagacaccaacctgaacttccagaacctgagcgtgatcggcttcagaatcctgctgctgaaagtggccggctttaacctgctgatgaccctgcggctgtggtccagc

SEQ ID NO: 9133 - DNA, 2703 bp, Artificial Sequence
  Synthetic Polynucloetide
atggccttaccagtgaccgccttgctcctgccgctggccttgctgctccacgccgccaggccggaagtgcaggttttggagtctggcggaggactggttcagcctggcggatctctgagactgtcttgtgccgccagcggcttcaccttcagcaactttgccatgagctgggtccgacaggcccctggcaaaggacttgaatgggtgtccacaatcagcggcagcgccggcacaacagattacgccgattctgtgaagggcagattcaccatcagccgggacaacagcaagaaaaccctgtacctccagatgaacagcctgcgcgtggaagataccgccgtgtactactgtgccgatggcagaggccccttcttcgattatcgcggccagggcacactggtcaccgtttcttctggtaccggcggaggcggatctggcggcggaggtagcggtggcggaggatctgaattcagcgtgatcgagctgacacagagccccaagttcatgagcaccagcgtgggcgacagagtgaacgtgacatacaaggccagccagaacgtgggcaccaacgtggcatggttccagcagaagcctggacagagccctaaggtgctgatctacagcgccagctacagatacagcggcgtgcccgatagattcacaggctctggcagcggcaccgacttcaccctgacaatcagcaacgtgcagagcgaggacctggccgagtatttctgccagcagtaccacacataccctctgacctttggcggaggcaccaagctggaaatcaagagactcgaggacctgaagaacgtgttcccacctgaggtggccgtgttcgagcctagcgaggccgagatcagccacacccagaaagccaccctcgtgtgcctggctaccggcttctaccccgaccatgtggaactgtcttggtgggtcaacggcaaagaggtgcacagcggcgtgtgtaccgacccccagccactgaaagaacagcccgccctgaacgacagccggtactgcctgagcagcagactgagagtgtccgccaccttctggcagaacccccggaaccacttcagatgccaggtgcagttctacggcctgagcgagaacgacgagtggacccaggacagagccaagcccgtgacccagatcgtgtctgccgaagcctggggcagagccgattgcggctttaccagcgagagctaccagcagggcgtgctgagcgccaccatcctgtacgagatcctgctgggcaaggccaccctgtacgccgtgctggtgtctgccctggtgctgatggctatggtcaagcggaaggacagccggggaagggccaagcgatctggatctggagcaacaaacttctcactactcaaacaagcaggtgacgtggaggagaatcccgggcctactagtatggactggatttggcgcatccttttccttgtcggcgctgctaccggcgcccattccgggcccgaagtgcagctggttgaatctggcggaggactggttcaggctggcggatctctgagactgtcttgtgccgccagcggcagaacctttagcatgggctggtttagacaggcccctggcaaagagagagagttcgtcgccgccatcacatacagcggcggcagcccttactacgcctcttctgtcagaggccggttcaccatcagccgggacaacgccaagaacaccgtgtacctccagatgaacagcctgaagccagaggacaccgccgtgtactactgtgccgccaatccaacctacggcagcgactggaatgccgagaattggggccagggcacccaagtgacagtgtctagtggatccggcggcggaggatctggcggaggcggatctgggggcggaggctctttcgaaagaatggctcaggttcagctgcaacagagcggagccgaacttgctagacctggcgcttccgtgaagatgagctgtaaagccagcggctacaccttcaccacctacaccatccactgggtccgaagaaggccaggccacgaccttgagtggatcggctacatcaaccccagcagcggctgctccgactacaaccagaacttcaagggcaagaccacactgaccgccgacaagagcagcaacaccgcctacatgcagctcaacagcctgaccagcgaggacagcgccgtgtactattgtgccagaagggccgactacggcaactacgagtacacttggtttgcctactggggccagggcaccaccgtgacagtttcttctacgcgtatccagaaccctgatcctgccgtgtaccagctgcgggatagcaagagcagcgacaagagcgtgtgtctgttcaccgacttcgacagccagaccaacgtgtcccagagcaaggactccgacgtgtacatcaccgataagtgcgtgctggacatgcggagcatggacttcaagagcaactccgccgtggcctggtccaacaagtccgatttcgcctgcgccaacgccttcaacaacagcattatccccgaggacacattcttcccaagccccgagagcagctgcgacgtgaagctggtggaaaagagcttcgagacagacaccaacctgaacttccagaacctgagcgtgatcggcttcagaatcctgctgctgaaagtggccggctttaacctgctgatgaccctgcggctgtggtccagc

SEQ ID NO: 9134 - DNA, 2172 bp, Artificial Sequence
  Synthetic Polynucloetide
atggccttaccagtgaccgccttgctcctgccgctggccttgctgctccacgccgccaggccggacatccagatgacacagagccctagcagcgtgtccgcctctgtgggagacagagtgaccatcacctgtagagccagccagagcgtgtccagctacctgaactggtatcagcagaagcccggcaaggcccctaagctgctgatctatgctgccagctctctgcagtctggcgtgcccagcagattttctggcagcggctctggcaccgacttcaccctgaccatatctagcctgcagcctgaggacttcgccacctactactgccagcagagctacagcaccccttggacctttggacagggcaccaagctggaaatcaagagaggcggaggcggaagtggaggcggaggatctggcggcggaggctctgaagtgcagctggttgaatcaggtggcggcctggttcagcctggcagaagtctgagactgagctgtgccgccagcggcttcaccttcgacgattacggaatgcactgggtccgacaggcccctggcaaaggacttgaatgggtgtccggcatcagctggaacagcggcagcatcggctatgccgatagcgccaagggcagattcaccatcagccgggacaacagcaagaacaccctgtacctgcagatgaacagcctgagagccgaggacaccgccgtgtactactgtgccaagaggggcaacagcaacagcttcgactattggggccagggcaccctggtcacagtctcttctacgcgtgagcagaaactgatctcggaagaggatctggcgaagcccaccacgacgccagcgccgcgaccaccaacaccggcgcccaccatcgcgtcgcagcccctgtccctgcgcccagaggcgtgccggccagcggcggggggcgcagtgcacacgagggggctggacttcgcctgtgacatctacatctgggcgcccttggccgggacttgtggggtccttctcctgtcactggttatcaccctttactgcaaacggggcagaaagaaactcctgtatatattcaaacaaccatttatgagaccagtacaaactactcaagaggaagatggctgtagctgccgatttccagaagaagaagaaggaggatgtgaactgagagtgaagttcagcaggagcgcagacgcccccgcgtaccagcagggccagaaccagctctataacgagctgaatctaggacgaagagaggagtacgatgttttggacaagagacgtggccgggaccctgagatggggggaaagccgagaaggaagaaccctcaggaaggcctgtacaatgaactgcagaaagataagatggcggaggcctacagtgagattgggatgaaaggcgagcgccggaggggcaaggggcacgatggcctttaccagggtctcagtacagccaccaaggacacctacgacgcccttcacatgcaggccctgccccctcgctctagtggctccggcgagggcagaggaagtctactaacctgcggagatgtggaagaaaatcctggcccacatatgaccgagtacaagcccacggtgcgcctcgccacccgcgacgacgtccccagggccgtacgcaccctcgccgccgcgttcgccgactaccccgccacgcgccacaccgtcgatccggaccgccacatcgagcgggtcaccgagctgcaagaactcttcctcacgcgcgtcgggctcgacatcggcaaggtgtgggtcgcggacgacggcgccgcggtggcggtctggaccacgccggagagcgtcgaagcgggggcggtgttcgccgagatcggcccgcgcatggccgagttgagcggttcccggctggccgcgcagcaacagatggaaggcctcctggcgccgcaccggcccaaggagcccgcgtggttcctggccaccgtcggcgtctcgcccgaccaccagggcaagggtctgggcagcgccgtcgtgctccccggagtggaggcggccgagcgcgccggggtgcccgccttcctggagacctccgcgccccgcaacctccccttctacgagcggctcggcttcaccgtcaccgccgacgtcgaggtgcccgaaggaccgcgcacctggtgcatgacccgcaagcccggtgcctga

SEQ ID NO: 9135 - DNA, 2154 bp, Artificial Sequence
  Synthetic Polynucloetide
atggccttaccagtgaccgccttgctcctgccgctggccttgctgctccacgccgccaggccggacatccagatgacacagagccctagcagcgtgtccgcctctgtgggagacagagtgaccatcacctgtagagccagccagagcgtgtccagctacctgaactggtatcagcagaagcccggcaaggcccctaagctgctgatctatgctgccagctctctgcagtctggcgtgcccagcagattttctggcagcggctctggcaccgacttcaccctgaccatatctagcctgcagcctgaggacttcgccacctactactgccagcagagctacagcaccccttggacctttggacagggcaccaagctggaaatcaagagaggcggaggcggaagtggaggcggaggatctggcggcggaggctctgaagtgcagctggttgaatcaggtggcggcctggttcagcctggcagaagtctgagactgagctgtgccgccagcggcttcaccttcgacgattacggaatgcactgggtccgacaggcccctggcaaaggacttgaatgggtgtccggcatcagctggaacagcggcagcatcggctatgccgatagcgccaagggcagattcaccatcagccgggacaacagcaagaacaccctgtacctgcagatgaacagcctgagagccgaggacaccgccgtgtactactgtgccaagaggggcaacagcaacagcttcgactattggggccagggcaccctggtcacagtctcttctacgcgtgagcagaaactgatctcggaagaggatctgaaaattgaagttatgtatcctcctccttacctagacaatgagaagagcaatggaaccattatccatgtgaaagggaaacacctttgtccaagtcccctatttcccggaccttctaagcccttttgggtgctggtggtggttgggggagtcctggcttgctatagcttgctagtaacagtggcctttattattttctgggtgaggagtaagaggagcaggctcctgcacagtgactacatgaacatgactccacgccgccccggacccacccgcaagcattaccagccctatgccccaccacgcgacttcgcagcctatcgctccagagtgaagttcagcaggagcgcagacgcccccgcgtaccagcagggccagaaccagctctataacgagctcaatctaggacgaagagaggagtacgatgttttggacaagagacgtggccgggaccctgagatggggggaaagccgagaaggaagaaccctcaggaaggcctgtacaatgaactgcagaaagataagatggcggaggcctacagtgagattgggatgaaaggcgagcgccggaggggcaaggggcacgatggcctttaccagggtctcagtacagccaccaaggacacctacgacgcccttcacatgcaggccctgccccctcgctctagtggctccggcgagggcagaggaagtctactaacctgcggagatgtggaagaaaatcctggcccacatatgaccgagtacaagcccacggtgcgcctcgccacccgcgacgacgtccccagggccgtacgcaccctcgccgccgcgttcgccgactaccccgccacgcgccacaccgtcgatccggaccgccacatcgagcgggtcaccgagctgcaagaactcttcctcacgcgcgtcgggctcgacatcggcaaggtgtgggtcgcggacgacggcgccgcggtggcggtctggaccacgccggagagcgtcgaagcgggggcggtgttcgccgagatcggcccgcgcatggccgagttgagcggttcccggctggccgcgcagcaacagatggaaggcctcctggcgccgcaccggcccaaggagcccgcgtggttcctggccaccgtcggcgtctcgcccgaccaccagggcaagggtctgggcagcgccgtcgtgctccccggagtggaggcggccgagcgcgccggggtgcccgccttcctggagacctccgcgccccgcaacctccccttctacgagcggctcggcttcaccgtcaccgccgacgtcgaggtgcccgaaggaccgcgcacctggtgcatgacccgcaagcccggtgcctga

SEQ ID NO: 9136 - DNA, 1482 bp, Artificial Sequence
  Synthetic Polynucloetide
atggccttaccagtgaccgccttgctcctgccgctggccttgctgctccacgccgccaggccggacatccagatgacacagagccctagcagcgtgtccgcctctgtgggagacagagtgaccatcacctgtagagccagccagagcgtgtccagctacctgaactggtatcagcagaagcccggcaaggcccctaagctgctgatctatgctgccagctctctgcagtctggcgtgcccagcagattttctggcagcggctctggcaccgacttcaccctgaccatatctagcctgcagcctgaggacttcgccacctactactgccagcagagctacagcaccccttggacctttggacagggcaccaagctggaaatcaagagaggcggaggcggaagtggaggcggaggatctggcggcggaggctctgaagtgcagctggttgaatcaggtggcggcctggttcagcctggcagaagtctgagactgagctgtgccgccagcggcttcaccttcgacgattacggaatgcactgggtccgacaggcccctggcaaaggacttgaatgggtgtccggcatcagctggaacagcggcagcatcggctatgccgatagcgccaagggcagattcaccatcagccgggacaacagcaagaacaccctgtacctgcagatgaacagcctgagagccgaggacaccgccgtgtactactgtgccaagaggggcaacagcaacagcttcgactattggggccagggcaccctggtcacagtctcttctacgcgtgagcagaaactgatctcggaagaggatctgaaaattgaagttatgtatcctcctccttacctagacaatgagaagagcaatggaaccattatccatgtgaaagggaaacacctttgtccaagtcccctatttcccggaccttctaagcccttttgggtgctggtggtggttgggggagtcctggcttgctatagcttgctagtaacagtggcctttattattttctgggtgaggagtaagaggagcaggctcctgcacagtgactacatgaacatgactccacgccgccccggacccacccgcaagcattaccagccctatgccccaccacgcgacttcgcagcctatcgctccagagtgaagttcagcaggagcgcagacgcccccgcgtaccagcagggccagaaccagctctataacgagctcaatctaggacgaagagaggagtacgatgttttggacaagagacgtggccgggaccctgagatggggggaaagccgagaaggaagaaccctcaggaaggcctgtacaatgaactgcagaaagataagatggcggaggcctacagtgagattgggatgaaaggcgagcgccggaggggcaaggggcacgatggcctttaccagggtctcagtacagccaccaaggacacctacgacgcccttcacatgcaggccctgccccctcgc

SEQ ID NO: 9137 - DNA, 1503 bp, Artificial Sequence
  Synthetic Polynucloetide
atggccttaccagtgaccgccttgctcctgccgctggccttgctgctccacgccgccaggccggacatccagatgacacagagccctagcagcgtgtccgcctctgtgggagacagagtgaccatcacctgtagagccagccagagcgtgtccagctacctgaactggtatcagcagaagcccggcaaggcccctaagctgctgatctatgctgccagctctctgcagtctggcgtgcccagcagattttctggcagcggctctggcaccgacttcaccctgaccatatctagcctgcagcctgaggacttcgccacctactactgccagcagagctacagcaccccttggacctttggacagggcaccaagctggaaatcaagagaggcggaggcggaagtggaggcggaggatctggcggcggaggctctgaagtgcagctggttgaatcaggtggcggcctggttcagcctggcagaagtctgagactgagctgtgccgccagcggcttcaccttcgacgattacggaatgcactgggtccgacaggcccctggcaaaggacttgaatgggtgtccggcatcagctggaacagcggcagcatcggctatgccgatagcgccaagggcagattcaccatcagccgggacaacagcaagaacaccctgtacctgcagatgaacagcctgagagccgaggacaccgccgtgtactactgtgccaagaggggcaacagcaacagcttcgactattggggccagggcaccctggtcacagtctcttctacgcgtgagcagaaactgatctcggaagaggatctggcgaagcccaccacgacgccagcgccgcgaccaccaacaccggcgcccaccatcgcgtcgcagcccctgtccctgcgcccagaggcgtgccggccagcggcggggggcgcagtgcacacgagggggctggacttcgcctgtgacatctacatctgggcgcccttggccgggacttgtggggtccttctcctgtcactggttatcaccctttactgcaaacggggcagaaagaaactcctgtatatattcaaacaaccatttatgagaccagtacaaactactcaagaggaagatggctgtagctgccgatttccagaagaagaagaaggaggatgtgaactgagagtgaagttcagcaggagcgcagacgcccccgcgtaccagcagggccagaaccagctctataacgagctgaatctaggacgaagagaggagtacgatgttttggacaagagacgtggccgggaccctgagatggggggaaagccgagaaggaagaaccctcaggaaggcctgtacaatgaactgcagaaagataagatggcggaggcctacagtgagattgggatgaaaggcgagcgccggaggggcaaggggcacgatggcctttaccagggtctcagtacagccaccaaggacacctacgacgcccttcacatgcaggccctgccccctcgctga

SEQ ID NO: 9138 - DNA, 1503 bp, Artificial Sequence
  Synthetic Polynucloetide
atggccttaccagtgaccgccttgctcctgccgctggccttgctgctccacgccgccaggccggaagtgcagctggttgaatcaggtggcggcctggttcagcctggcagaagtctgagactgagctgtgccgccagcggcttcaccttcgacgattacggaatgcactgggtccgacaggcccctggcaaaggacttgaatgggtgtccggcatcagctggaacagcggcagcatcggctatgccgatagcgccaagggcagattcaccatcagccgggacaacagcaagaacaccctgtacctgcagatgaacagcctgagagccgaggacaccgccgtgtactactgtgccaagaggggcaacagcaacagcttcgactattggggccagggcaccctggtcacagtctcttctggcggaggcggaagtggaggcggaggatctggcggcggaggctctgacatccagatgacacagagccctagcagcgtgtccgcctctgtgggagacagagtgaccatcacctgtagagccagccagagcgtgtccagctacctgaactggtatcagcagaagcccggcaaggcccctaagctgctgatctatgctgccagctctctgcagtctggcgtgcccagcagattttctggcagcggctctggcaccgacttcaccctgaccatatctagcctgcagcctgaggacttcgccacctactactgccagcagagctacagcaccccttggacctttggacagggcaccaagctggaaatcaagagaacgcgtgagcagaaactgatctcggaagaggatctggcgaagcccaccacgacgccagcgccgcgaccaccaacaccggcgcccaccatcgcgtcgcagcccctgtccctgcgcccagaggcgtgccggccagcggcggggggcgcagtgcacacgagggggctggacttcgcctgtgacatctacatctgggcgcccttggccgggacttgtggggtccttctcctgtcactggttatcaccctttactgcaaacggggcagaaagaaactcctgtatatattcaaacaaccatttatgagaccagtacaaactactcaagaggaagatggctgtagctgccgatttccagaagaagaagaaggaggatgtgaactgagagtgaagttcagcaggagcgcagacgcccccgcgtaccagcagggccagaaccagctctataacgagctgaatctaggacgaagagaggagtacgatgttttggacaagagacgtggccgggaccctgagatggggggaaagccgagaaggaagaaccctcaggaaggcctgtacaatgaactgcagaaagataagatggcggaggcctacagtgagattgggatgaaaggcgagcgccggaggggcaaggggcacgatggcctttaccagggtctcagtacagccaccaaggacacctacgacgcccttcacatgcaggccctgccccctcgctga

SEQ ID NO: 9139 - DNA, 2742 bp, Artificial Sequence
  Synthetic Polynucloetide
atggccttaccagtgaccgccttgctcctgccgctggccttgctgctccacgccgccaggccggacatccagatgacacagagccctagcagcgtgtccgcctctgtgggagacagagtgaccatcacctgtagagccagccagagcgtgtccagctacctgaactggtatcagcagaagcccggcaaggcccctaagctgctgatctatgctgccagctctctgcagtctggcgtgcccagcagattttctggcagcggctctggcaccgacttcaccctgaccatatctagcctgcagcctgaggacttcgccacctactactgccagcagagctacagcaccccttggacctttggacagggcaccaagctggaaatcaagagaggcggaggcggaagtggaggcggaggatctggcggcggaggctctgaagtgcagctggttgaatcaggtggcggcctggttcagcctggcagaagtctgagactgagctgtgccgccagcggcttcaccttcgacgattacggaatgcactgggtccgacaggcccctggcaaaggacttgaatgggtgtccggcatcagctggaacagcggcagcatcggctatgccgatagcgccaagggcagattcaccatcagccgggacaacagcaagaacaccctgtacctgcagatgaacagcctgagagccgaggacaccgccgtgtactactgtgccaagaggggcaacagcaacagcttcgactattggggccagggcaccctggtcacagtctcttctacgcgtgagcagaaactgatctcggaagaggatctggcgaagcccaccacgacgccagcgccgcgaccaccaacaccggcgcccaccatcgcgtcgcagcccctgtccctgcgcccagaggcgtgccggccagcggcggggggcgcagtgcacacgagggggctggacttcgcctgtgacatctacatctgggcgcccttggccgggacttgtggggtccttctcctgtcactggttatcaccctttactgcgggcgcgccagagtgaagttcagcaggagcgcagacgcccccgcgtaccagcagggccagaaccagctctataacgagctgaatctaggacgaagagaggagtacgatgttttggacaagagacgtggccgggaccctgagatggggggaaagccgagaaggaagaaccctcaggaaggcctgtacaatgaactgcagaaagataagatggcggaggcctacagtgagattgggatgaaaggcgagcgccggaggggcaaggggcacgatggcctttaccagggtctcagtacagccaccaaggacacctacgacgcccttcacatgcaggccctgccccctcgctctagaggatctggagcaacaaacttctcactactcaaacaagcaggtgacgtggaggagaatcccgggcctgggatccacatggccacttacgaggttctctgtgaggtggcgcggaaactgggcacggatgacagggaagtggtattgttcctcctaaacgtgttcatacctcaacccacactggcccaattaattggagctcttagagctttaaaggaggagggcaggttaacgtttcccctgttagcggaatgtctgtttcgtgcaggtcgcagagacctcttgcgcgacctgcttcacttagacccgcgttttttagagcgccacctagcgggcacaatgagttatttcagcccttatcagctcactgttctccacgtagacggggagctgtgtgcgagggatattaggtctttgatatttttaagcaaggacactatagggtctcgcagcacaccacagacattcttacactgggtgtactgtatggaaaacttagacctactgggtcccactgacgtggatgccctaatgtcaatgcttagatctttgtcaagagtagacctacagcgccaagtgcaaaccctaatgggccttcacctttccggcccatcacactcccaacactatcgccatacaccactcgagaccgatttctacgactacaaggacgacgatgacaagactagtggctccggcgagggcagaggaagtctactaacctgcggagatgtggaagaaaatcctggcccacatatgaccgagtacaagcccacggtgcgcctcgccacccgcgacgacgtccccagggccgtacgcaccctcgccgccgcgttcgccgactaccccgccacgcgccacaccgtcgatccggaccgccacatcgagcgggtcaccgagctgcaagaactcttcctcacgcgcgtcgggctcgacatcggcaaggtgtgggtcgcggacgacggcgccgcggtggcggtctggaccacgccggagagcgtcgaagcgggggcggtgttcgccgagatcggcccgcgcatggccgagttgagcggttcccggctggccgcgcagcaacagatggaaggcctcctggcgccgcaccggcccaaggagcccgcgtggttcctggccaccgtcggcgtctcgcccgaccaccagggcaagggtctgggcagcgccgtcgtgctccccggagtggaggcggccgagcgcgccggggtgcccgccttcctggagacctccgcgccccgcaacctccccttctacgagcggctcggcttcaccgtcaccgccgacgtcgaggtgcccgaaggaccgcgcacctggtgcatgacccgcaagcccggtgcctga

SEQ ID NO: 9140 - DNA, 2562 bp, Artificial Sequence
  Synthetic Polynucloetide
atggccttaccagtgaccgccttgctcctgccgctggccttgctgctccacgccgccaggccggacatccagatgacacagagccctagcagcgtgtccgcctctgtgggagacagagtgaccatcacctgtagagccagccagagcgtgtccagctacctgaactggtatcagcagaagcccggcaaggcccctaagctgctgatctatgctgccagctctctgcagtctggcgtgcccagcagattttctggcagcggctctggcaccgacttcaccctgaccatatctagcctgcagcctgaggacttcgccacctactactgccagcagagctacagcaccccttggacctttggacagggcaccaagctggaaatcaagagactcgagatccagaaccctgatcctgccgtgtaccagctgcgggatagcaagagcagcgacaagagcgtgtgtctgttcaccgacttcgacagccagaccaacgtgtcccagagcaaggactccgacgtgtacatcaccgataagtgcgtgctggacatgcggagcatggacttcaagagcaactccgccgtggcctggtccaacaagtccgatttcgcctgcgccaacgccttcaacaacagcattatccccgaggacacattcttcccaagcagcgacgtgccctgcgacgtgaagctggtggaaaagagcttcgagacagacaccaacctgaacttccagaacctgagcgtgatcggcttcagaatcctgctgctgaaagtggccggctttaacctgctgatgaccctgcggctgtggtccagccgcgccaagagaagcggatctggcgtgaagcagaccctgaatttcgacctgctgaagctggctggcgacgtggaatccaacccaggccctactagtatggactggatttggcgcatccttttccttgtcggcgctgctaccggcgcgcattccttcgaagaagtgcagctggttgaatcaggtggcggcctggttcagcctggcagaagtctgagactgagctgtgccgccagcggcttcaccttcgacgattacggaatgcactgggtccgacaggcccctggcaaaggacttgaatgggtgtccggcatcagctggaacagcggcagcatcggctatgccgatagcgccaagggcagattcaccatcagccgggacaacagcaagaacaccctgtacctgcagatgaacagcctgagagccgaggacaccgccgtgtactactgtgccaagaggggcaacagcaacagcttcgactattggggccagggcaccctggtcacagtctcttctacgcgtgaggacctgaagaacgtgttcccacctgaggtggccgtgttcgagcctagcaaggccgagatcgcccacacccagaaagccaccctcgtgtgcctggctaccggcttctaccccgaccatgtggaactgtcttggtgggtcaacggcaaagaggtgcacagcggcgtgtgtaccgacccccagccactgaaagaacagcccgccctgaacgacagccggtactgcctgagcagcagactgagagtgtccgccaccttctggcagaacccccggaaccacttcagatgccaggtgcagttctacggcctgagcgagaacgacgagtggacccaggacagagccaagcccgtgacccagatcgtgtctgccgaagcctggggcagagccgattgcggcatcaccagcgccagctaccaccagggcgtgctgagcgccaccatcctgtacgagatcctgctgggcaaggccaccctgtacgccgtgctggtgtctgccctggtgctgatggctatggtcaagcggaaggacagccggggaagggccaagcgatctggatctggagcaacaaacttctcactactcaaacaagcaggtgacgtggaggagaatcccgggccttctagaggccatatgaccgagtacaagcccacggtgcgcctcgccacccgcgacgacgtccccagggccgtacgcaccctcgccgccgcgttcgccgactaccccgccacgcgccacaccgtcgatccggaccgccacatcgagcgggtcaccgagctgcaagaactcttcctcacgcgcgtcgggctcgacatcggcaaggtgtgggtcgcggacgacggcgccgcggtggcggtctggaccacgccggagagcgtcgaagcgggggcggtgttcgccgagatcggcccgcgcatggccgagttgagcggttcccggctggccgcgcagcaacagatggaaggcctcctggcgccgcaccggcccaaggagcccgcgtggttcctggccaccgtcggcgtctcgcccgaccaccagggcaagggtctgggcagcgccgtcgtgctccccggagtggaggcggccgagcgcgccggggtgcccgccttcctggagacctccgcgccccgcaacctccccttctacgagcggctcggcttcaccgtcaccgccgacgtcgaggtgcccgaaggaccgcgcacctggtgcatgacccgcaagcccggtgcctga

SEQ ID NO: 9141 - DNA, 2559 bp, Artificial Sequence
  Synthetic Polynucloetide
atggccttaccagtgaccgccttgctcctgccgctggccttgctgctccacgccgccaggccggacatccagatgacacagagccctagcagcgtgtccgcctctgtgggagacagagtgaccatcacctgtagagccagccagagcgtgtccagctacctgaactggtatcagcagaagcccggcaaggcccctaagctgctgatctatgctgccagctctctgcagtctggcgtgcccagcagattttctggcagcggctctggcaccgacttcaccctgaccatatctagcctgcagcctgaggacttcgccacctactactgccagcagagctacagcaccccttggacctttggacagggcaccaagctggaaatcaagagactcgaggacctgaagaacgtgttcccacctgaggtggccgtgttcgagcctagcaaggccgagatcgcccacacccagaaagccaccctcgtgtgcctggctaccggcttctaccccgaccatgtggaactgtcttggtgggtcaacggcaaagaggtgcacagcggcgtgtgtaccgacccccagccactgaaagaacagcccgccctgaacgacagccggtactgcctgagcagcagactgagagtgtccgccaccttctggcagaacccccggaaccacttcagatgccaggtgcagttctacggcctgagcgagaacgacgagtggacccaggacagagccaagcccgtgacccagatcgtgtctgccgaagcctggggcagagccgattgcggcatcaccagcgccagctaccaccagggcgtgctgagcgccaccatcctgtacgagatcctgctgggcaaggccaccctgtacgccgtgctggtgtctgccctggtgctgatggctatggtcaagcggaaggacagccggggaagggccaagcgatctggatctggagcaacaaacttctcactactcaaacaagcaggtgacgtggaggagaatcccgggcctactagtatggactggatttggcgcatccttttccttgtcggcgctgctaccggcgcgcattccttcgaagaagtgcagctggttgaatcaggtggcggcctggttcagcctggcagaagtctgagactgagctgtgccgccagcggcttcaccttcgacgattacggaatgcactgggtccgacaggcccctggcaaaggacttgaatgggtgtccggcatcagctggaacagcggcagcatcggctatgccgatagcgccaagggcagattcaccatcagccgggacaacagcaagaacaccctgtacctgcagatgaacagcctgagagccgaggacaccgccgtgtactactgtgccaagaggggcaacagcaacagcttcgactattggggccagggcaccctggtcacagtctcttctacgcgtatccagaaccctgatcctgccgtgtaccagctgcgggatagcaagagcagcgacaagagcgtgtgtctgttcaccgacttcgacagccagaccaacgtgtcccagagcaaggactccgacgtgtacatcaccgataagtgcgtgctggacatgcggagcatggacttcaagagcaactccgccgtggcctggtccaacaagtccgatttcgcctgcgccaacgccttcaacaacagcattatccccgaggacacattcttcccaagcagcgacgtgccctgcgacgtgaagctggtggaaaagagcttcgagacagacaccaacctgaacttccagaacctgagcgtgatcggcttcagaatcctgctgctgaaagtggccggctttaacctgctgatgaccctgcggctgtggtccagccgcgccaagagaagcggatctggcgtgaagcagaccctgaatttcgacctgctgaagctggctggcgacgtggaatccaacccaggcccttctagaggccatatgaccgagtacaagcccacggtgcgcctcgccacccgcgacgacgtccccagggccgtacgcaccctcgccgccgcgttcgccgactaccccgccacgcgccacaccgtcgatccggaccgccacatcgagcgggtcaccgagctgcaagaactcttcctcacgcgcgtcgggctcgacatcggcaaggtgtgggtcgcggacgacggcgccgcggtggcggtctggaccacgccggagagcgtcgaagcgggggcggtgttcgccgagatcggcccgcgcatggccgagttgagcggttcccggctggccgcgcagcaacagatggaaggcctcctggcgccgcaccggcccaaggagcccgcgtggttcctggccaccgtcggcgtctcgcccgaccaccagggcaagggtctgggcagcgccgtcgtgctccccggagtggaggcggccgagcgcgccggggtgcccgccttcctggagacctccgcgccccgcaacctccccttctacgagcggctcggcttcaccgtcaccgccgacgtcgaggtgcccgaaggaccgcgcacctggtgcatgacccgcaagcccggtgcctga

SEQ ID NO: 9142 - DNA, 1857 bp, Artificial Sequence
  Synthetic Polynucloetide
atggccttaccagtgaccgccttgctcctgccgctggccttgctgctccacgccgccaggccggacatccagatgacacagagccctagcagcgtgtccgcctctgtgggagacagagtgaccatcacctgtagagccagccagagcgtgtccagctacctgaactggtatcagcagaagcccggcaaggcccctaagctgctgatctatgctgccagctctctgcagtctggcgtgcccagcagattttctggcagcggctctggcaccgacttcaccctgaccatatctagcctgcagcctgaggacttcgccacctactactgccagcagagctacagcaccccttggacctttggacagggcaccaagctggaaatcaagagactcgaggacctgaagaacgtgttcccacctgaggtggccgtgttcgagcctagcgaggccgagatcagccacacccagaaagccaccctcgtgtgcctggctaccggcttctaccccgaccatgtggaactgtcttggtgggtcaacggcaaagaggtgcacagcggcgtgtgtaccgacccccagccactgaaagaacagcccgccctgaacgacagccggtactgcctgagcagcagactgagagtgtccgccaccttctggcagaacccccggaaccacttcagatgccaggtgcagttctacggcctgagcgagaacgacgagtggacccaggacagagccaagcccgtgacccagatcgtgtctgccgaagcctggggcagagccgattgcggctttaccagcgagagctaccagcagggcgtgctgagcgccaccatcctgtacgagatcctgctgggcaaggccaccctgtacgccgtgctggtgtctgccctggtgctgatggctatggtcaagcggaaggacagccggggaagggccaagcgatctggatctggagcaacaaacttctcactactcaaacaagcaggtgacgtggaggagaatcccgggcctactagtatggactggatttggcgcatccttttccttgtcggcgctgctaccggcgcgcattccttcgaagaagtgcagctggttgaatcaggtggcggcctggttcagcctggcagaagtctgagactgagctgtgccgccagcggcttcaccttcgacgattacggaatgcactgggtccgacaggcccctggcaaaggacttgaatgggtgtccggcatcagctggaacagcggcagcatcggctatgccgatagcgccaagggcagattcaccatcagccgggacaacagcaagaacaccctgtacctgcagatgaacagcctgagagccgaggacaccgccgtgtactactgtgccaagaggggcaacagcaacagcttcgactattggggccagggcaccctggtcacagtctcttctacgcgtatccagaaccctgatcctgccgtgtaccagctgcgggatagcaagagcagcgacaagagcgtgtgtctgttcaccgacttcgacagccagaccaacgtgtcccagagcaaggactccgacgtgtacatcaccgataagtgcgtgctggacatgcggagcatggacttcaagagcaactccgccgtggcctggtccaacaagtccgatttcgcctgcgccaacgccttcaacaacagcattatccccgaggacacattcttcccaagccccgagagcagctgcgacgtgaagctggtggaaaagagcttcgagacagacaccaacctgaacttccagaacctgagcgtgatcggcttcagaatcctgctgctgaaagtggccggctttaacctgctgatgaccctgcggctgtggtccagc

SEQ ID NO: 9143 - DNA, 2532 bp, Artificial Sequence
  Synthetic Polynucloetide
atggccttaccagtgaccgccttgctcctgccgctggccttgctgctccacgccgccaggccggacatccagatgacacagagccctagcagcgtgtccgcctctgtgggagacagagtgaccatcacctgtagagccagccagagcgtgtccagctacctgaactggtatcagcagaagcccggcaaggcccctaagctgctgatctatgctgccagctctctgcagtctggcgtgcccagcagattttctggcagcggctctggcaccgacttcaccctgaccatatctagcctgcagcctgaggacttcgccacctactactgccagcagagctacagcaccccttggacctttggacagggcaccaagctggaaatcaagagactcgaggacctgaagaacgtgttcccacctgaggtggccgtgttcgagcctagcgaggccgagatcagccacacccagaaagccaccctcgtgtgcctggctaccggcttctaccccgaccatgtggaactgtcttggtgggtcaacggcaaagaggtgcacagcggcgtgtgtaccgacccccagccactgaaagaacagcccgccctgaacgacagccggtactgcctgagcagcagactgagagtgtccgccaccttctggcagaacccccggaaccacttcagatgccaggtgcagttctacggcctgagcgagaacgacgagtggacccaggacagagccaagcccgtgacccagatcgtgtctgccgaagcctggggcagagccgattgcggctttaccagcgagagctaccagcagggcgtgctgagcgccaccatcctgtacgagatcctgctgggcaaggccaccctgtacgccgtgctggtgtctgccctggtgctgatggctatggtcaagcggaaggacagccggggaagggccaagcgatctggatctggagcaacaaacttctcactactcaaacaagcaggtgacgtggaggagaatcccgggcctactagtatggactggatttggcgcatccttttccttgtcggcgctgctaccggcgcgcattccttcgaagaagtgcagctggttgaatcaggtggcggcctggttcagcctggcagaagtctgagactgagctgtgccgccagcggcttcaccttcgacgattacggaatgcactgggtccgacaggcccctggcaaaggacttgaatgggtgtccggcatcagctggaacagcggcagcatcggctatgccgatagcgccaagggcagattcaccatcagccgggacaacagcaagaacaccctgtacctgcagatgaacagcctgagagccgaggacaccgccgtgtactactgtgccaagaggggcaacagcaacagcttcgactattggggccagggcaccctggtcacagtctcttctacgcgtatccagaaccctgatcctgccgtgtaccagctgcgggatagcaagagcagcgacaagagcgtgtgtctgttcaccgacttcgacagccagaccaacgtgtcccagagcaaggactccgacgtgtacatcaccgataagtgcgtgctggacatgcggagcatggacttcaagagcaactccgccgtggcctggtccaacaagtccgatttcgcctgcgccaacgccttcaacaacagcattatccccgaggacacattcttcccaagccccgagagcagctgcgacgtgaagctggtggaaaagagcttcgagacagacaccaacctgaacttccagaacctgagcgtgatcggcttcagaatcctgctgctgaaagtggccggctttaacctgctgatgaccctgcggctgtggtccagccgcgccaagagaagcggatctggcgtgaagcagaccctgaatttcgacctgctgaagctggctggcgacgtggaatccaacccaggcccttctagaggcgggatccacaccatggctacctacgaggtgctgtgcgaggtggcaagaaagctgggcaccgacgacagagaagtggtgctgttcctgctgaacgtgttcatccctcagcctacactggcccagctgatcggtgcactgagagccctgaaagaggaaggccggctgacctttcctctgctggccgaatgcctgttcagagccggaagaagggatctgctgcgggacctgctgcatctggaccccagatttctggaaagacacctggccggcaccatgagctacttcagcccttaccagctgaccgtgctgcacgttgacggcgaactgtgcgccagagatattcggagcctgatcttcctgagcaaggacaccatcggcagccggtctacccctcagacatttctgcactgggtgtactgcatggaaaacctggacctgctcggccccacagatgtggatgccctgatgtccatgctgagaagcctgagcagagtggacctccagagacaggtgcagacactgatgggactgcacctgagcggacctagccacagccagcactacagacacacccct

SEQ ID NO: 9144 - DNA, 1869 bp, Artificial Sequence
  Synthetic Polynucloetide
atggccttaccagtgaccgccttgctcctgccgctggccttgctgctccacgccgccaggccggacatccagatgacacagagccctagcagcgtgtccgcctctgtgggagacagagtgaccatcacctgtagagccagccagagcgtgtccagctacctgaactggtatcagcagaagcccggcaaggcccctaagctgctgatctatgctgccagctctctgcagtctggcgtgcccagcagattttctggcagcggctctggcaccgacttcaccctgaccatatctagcctgcagcctgaggacttcgccacctactactgccagcagagctacagcaccccttggacctttggacagggcaccaagctggaaatcaagagactcgagatccagaaccctgatcctgccgtgtaccagctgcgggatagcaagagcagcgacaagagcgtgtgtctgttcaccgacttcgacagccagaccaacgtgtcccagagcaaggactccgacgtgtacatcaccgataagtgcgtgctggacatgcggagcatggacttcaagagcaactccgccgtggcctggtccaacaagtccgatttcgcctgcgccaacgccttcaacaacagcattatccccgaggacacattcttcccaagccccgagagcagctgcgacgtgaagctggtggaaaagagcttcgagacagacaccaacctgaacttccagaacctgagcgtgatcggcttcagaatcctgctgctgaaagtggccggctttaacctgctgatgaccctgcggctgtggtccagccgcgccaagagaagcggatctggcgtgaagcagaccctgaatttcgacctgctgaagctggctggcgacgtggaatccaacccaggccctactagtatggactggatttggcgcatccttttccttgtcggcgctgctaccggcgcgcattccttcgaagaagtgcagctggttgaatcaggtggcggcctggttcagcctggcagaagtctgagactgagctgtgccgccagcggcttcaccttcgacgattacggaatgcactgggtccgacaggcccctggcaaaggacttgaatgggtgtccggcatcagctggaacagcggcagcatcggctatgccgatagcgccaagggcagattcaccatcagccgggacaacagcaagaacaccctgtacctgcagatgaacagcctgagagccgaggacaccgccgtgtactactgtgccaagaggggcaacagcaacagcttcgactattggggccagggcaccctggtcacagtctcttctacgcgtgaggacctgaagaacgtgttcccacctgaggtggccgtgttcgagcctagcgaggccgagatcagccacacccagaaagccaccctcgtgtgcctggctaccggcttctaccccgaccatgtggaactgtcttggtgggtcaacggcaaagaggtgcacagcggcgtgtgtaccgacccccagccactgaaagaacagcccgccctgaacgacagccggtactgcctgagcagcagactgagagtgtccgccaccttctggcagaacccccggaaccacttcagatgccaggtgcagttctacggcctgagcgagaacgacgagtggacccaggacagagccaagcccgtgacccagatcgtgtctgccgaagcctggggcagagccgattgcggctttaccagcgagagctaccagcagggcgtgctgagcgccaccatcctgtacgagatcctgctgggcaaggccaccctgtacgccgtgctggtgtctgccctggtgctgatggctatggtcaagcggaaggacagccgggga

SEQ ID NO: 9145 - DNA, 2535 bp, Artificial Sequence
  Synthetic Polynucloetide
atggccttaccagtgaccgccttgctcctgccgctggccttgctgctccacgccgccaggccggacatccagatgacacagagccctagcagcgtgtccgcctctgtgggagacagagtgaccatcacctgtagagccagccagagcgtgtccagctacctgaactggtatcagcagaagcccggcaaggcccctaagctgctgatctatgctgccagctctctgcagtctggcgtgcccagcagattttctggcagcggctctggcaccgacttcaccctgaccatatctagcctgcagcctgaggacttcgccacctactactgccagcagagctacagcaccccttggacctttggacagggcaccaagctggaaatcaagagactcgagatccagaaccctgatcctgccgtgtaccagctgcgggatagcaagagcagcgacaagagcgtgtgtctgttcaccgacttcgacagccagaccaacgtgtcccagagcaaggactccgacgtgtacatcaccgataagtgcgtgctggacatgcggagcatggacttcaagagcaactccgccgtggcctggtccaacaagtccgatttcgcctgcgccaacgccttcaacaacagcattatccccgaggacacattcttcccaagccccgagagcagctgcgacgtgaagctggtggaaaagagcttcgagacagacaccaacctgaacttccagaacctgagcgtgatcggcttcagaatcctgctgctgaaagtggccggctttaacctgctgatgaccctgcggctgtggtccagccgcgccaagagaagcggatctggcgtgaagcagaccctgaatttcgacctgctgaagctggctggcgacgtggaatccaacccaggccctactagtatggactggatttggcgcatccttttccttgtcggcgctgctaccggcgcgcattccttcgaagaagtgcagctggttgaatcaggtggcggcctggttcagcctggcagaagtctgagactgagctgtgccgccagcggcttcaccttcgacgattacggaatgcactgggtccgacaggcccctggcaaaggacttgaatgggtgtccggcatcagctggaacagcggcagcatcggctatgccgatagcgccaagggcagattcaccatcagccgggacaacagcaagaacaccctgtacctgcagatgaacagcctgagagccgaggacaccgccgtgtactactgtgccaagaggggcaacagcaacagcttcgactattggggccagggcaccctggtcacagtctcttctacgcgtgaggacctgaagaacgtgttcccacctgaggtggccgtgttcgagcctagcgaggccgagatcagccacacccagaaagccaccctcgtgtgcctggctaccggcttctaccccgaccatgtggaactgtcttggtgggtcaacggcaaagaggtgcacagcggcgtgtgtaccgacccccagccactgaaagaacagcccgccctgaacgacagccggtactgcctgagcagcagactgagagtgtccgccaccttctggcagaacccccggaaccacttcagatgccaggtgcagttctacggcctgagcgagaacgacgagtggacccaggacagagccaagcccgtgacccagatcgtgtctgccgaagcctggggcagagccgattgcggctttaccagcgagagctaccagcagggcgtgctgagcgccaccatcctgtacgagatcctgctgggcaaggccaccctgtacgccgtgctggtgtctgccctggtgctgatggctatggtcaagcggaaggacagccggggaagggccaagcgatctggatctggagcaacaaacttctcactactcaaacaagcaggtgacgtggaggagaatcccgggccttctagaggcgggatccacaccatggctacctacgaggtgctgtgcgaggtggcaagaaagctgggcaccgacgacagagaagtggtgctgttcctgctgaacgtgttcatccctcagcctacactggcccagctgatcggtgcactgagagccctgaaagaggaaggccggctgacctttcctctgctggccgaatgcctgttcagagccggaagaagggatctgctgcgggacctgctgcatctggaccccagatttctggaaagacacctggccggcaccatgagctacttcagcccttaccagctgaccgtgctgcacgttgacggcgaactgtgcgccagagatattcggagcctgatcttcctgagcaaggacaccatcggcagccggtctacccctcagacatttctgcactgggtgtactgcatggaaaacctggacctgctcggccccacagatgtggatgccctgatgtccatgctgagaagcctgagcagagtggacctccagagacaggtgcagacactgatgggactgcacctgagcggacctagccacagccagcactacagacacacccct

SEQ ID NO: 9146 - DNA, 2694 bp, Artificial Sequence
  Synthetic Polynucloetide
atggccttaccagtgaccgccttgctcctgccgctggccttgctgctccacgccgccaggccgctcgaggggaaaccaattcccaaccctcttctgggactggattcaaccggcagcggcgaggacctgaagaacgtgttcccacctgaggtggccgtgttcgagcctagcaaggccgagatcgcccacacccagaaagccaccctcgtgtgcctggctaccggcttctaccccgaccatgtggaactgtcttggtgggtcaacggcaaagaggtgcacagcggcgtgtgtaccgacccccagccactgaaagaacagcccgccctgaacgacagccggtactgcctgagcagcagactgagagtgtccgccaccttctggcagaacccccggaaccacttcagatgccaggtgcagttctacggcctgagcgagaacgacgagtggacccaggacagagccaagcccgtgacccagatcgtgtctgccgaagcctggggcagagccgattgcggcatcaccagcgccagctaccaccagggcgtgctgagcgccaccatcctgtacgagatcctgctgggcaaggccaccctgtacgccgtgctggtgtctgccctggtgctgatggctatggtcaagcggaaggacagccggggaagggccaagcgatctggatctggagcaacaaacttctcactactcaaacaagcaggtgacgtggaggagaatcccgggcctactagcatggccttaccagtgaccgccttgctcctgccgctggccttgctgctccacgccgccaggccggacatccagatgacacagagccctagcagcgtgtccgcctctgtgggagacagagtgaccatcacctgtagagccagccagagcgtgtccagctacctgaactggtatcagcagaagcccggcaaggcccctaagctgctgatctatgctgccagctctctgcagtctggcgtgcccagcagattttctggcagcggctctggcaccgacttcaccctgaccatatctagcctgcagcctgaggacttcgccacctactactgccagcagagctacagcaccccttggacctttggacagggcaccaagctggaaatcaagagaggcggaggcggaagtggaggcggaggatctggcggcggaggctctgaagtgcagctggttgaatcaggtggcggcctggttcagcctggcagaagtctgagactgagctgtgccgccagcggcttcaccttcgacgattacggaatgcactgggtccgacaggcccctggcaaaggacttgaatgggtgtccggcatcagctggaacagcggcagcatcggctatgccgatagcgccaagggcagattcaccatcagccgggacaacagcaagaacaccctgtacctgcagatgaacagcctgagagccgaggacaccgccgtgtactactgtgccaagaggggcaacagcaacagcttcgactattggggccagggcaccctggtcacagtctcttctacgcgtgagcagaaactgatctcggaagaggatgggagcggcatccagaaccctgatcctgccgtgtaccagctgcgggatagcaagagcagcgacaagagcgtgtgtctgttcaccgacttcgacagccagaccaacgtgtcccagagcaaggactccgacgtgtacatcaccgataagtgcgtgctggacatgcggagcatggacttcaagagcaactccgccgtggcctggtccaacaagtccgatttcgcctgcgccaacgccttcaacaacagcattatccccgaggacacattcttcccaagcagcgacgtgccctgcgacgtgaagctggtggaaaagagcttcgagacagacaccaacctgaacttccagaacctgagcgtgatcggcttcagaatcctgctgctgaaagtggccggctttaacctgctgatgaccctgcggctgtggtccagccgcgccaagagaagcggatctggcgtgaagcagaccctgaatttcgacctgctgaagctggctggcgacgtggaatccaacccaggcccttctagaggccatatgaccgagtacaagcccacggtgcgcctcgccacccgcgacgacgtccccagggccgtacgcaccctcgccgccgcgttcgccgactaccccgccacgcgccacaccgtcgatccggaccgccacatcgagcgggtcaccgagctgcaagaactcttcctcacgcgcgtcgggctcgacatcggcaaggtgtgggtcgcggacgacggcgccgcggtggcggtctggaccacgccggagagcgtcgaagcgggggcggtgttcgccgagatcggcccgcgcatggccgagttgagcggttcccggctggccgcgcagcaacagatggaaggcctcctggcgccgcaccggcccaaggagcccgcgtggttcctggccaccgtcggcgtctcgcccgaccaccagggcaagggtctgggcagcgccgtcgtgctccccggagtggaggcggccgagcgcgccggggtgcccgccttcctggagacctccgcgccccgcaacctccccttctacgagcggctcggcttcaccgtcaccgccgacgtcgaggtgcccgaaggaccgcgcacctggtgcatgacccgcaagcccggtgcctga

SEQ ID NO: 9147 - DNA, 2697 bp, Artificial Sequence
  Synthetic Polynucloetide
atggccttaccagtgaccgccttgctcctgccgctggccttgctgctccacgccgccaggccgctcgagcagaaactgatctcggaagaggatctgggctccggcgatcgccctgatcctgccgtgtaccagctgcgggatagcaagagcagcgacaagagcgtgtgtctgttcaccgacttcgacagccagaccaacgtgtcccagagcaaggactccgacgtgtacatcaccgataagtgcgtgctggacatgcggagcatggacttcaagagcaactccgccgtggcctggtccaacaagtccgatttcgcctgcgccaacgccttcaacaacagcattatccccgaggacacattcttcccaagccccgagagcagctgcgacgtgaagctggtggaaaagagcttcgagacagacaccaacctgaacttccagaacctgagcgtgatcggcttcagaatcctgctgctgaaagtggccggctttaacctgctgatgaccctgcggctgtggtccagctctagtcgcgccaagagaagcggatctggcgtgaagcagaccctgaatttcgacctgctgaagctggctggcgacgtggaatccaacccaggccccactagcatggccttaccagtgaccgccttgctcctgccgctggccttgctgctccacgccgccaggccggacatccagatgacacagagccctagcagcgtgtccgcctctgtgggagacagagtgaccatcacctgtagagccagccagagcgtgtccagctacctgaactggtatcagcagaagcccggcaaggcccctaagctgctgatctatgctgccagctctctgcagtctggcgtgcccagcagattttctggcagcggctctggcaccgacttcaccctgaccatatctagcctgcagcctgaggacttcgccacctactactgccagcagagctacagcaccccttggacctttggacagggcaccaagctggaaatcaagagaggcggaggcggaagtggaggcggaggatctggcggcggaggctctgaagtgcagctggttgaatcaggtggcggcctggttcagcctggcagaagtctgagactgagctgtgccgccagcggcttcaccttcgacgattacggaatgcactgggtccgacaggcccctggcaaaggacttgaatgggtgtccggcatcagctggaacagcggcagcatcggctatgccgatagcgccaagggcagattcaccatcagccgggacaacagcaagaacaccctgtacctgcagatgaacagcctgagagccgaggacaccgccgtgtactactgtgccaagaggggcaacagcaacagcttcgactattggggccagggcaccctggtcacagtctcttctacgcgtgggaaaccaattcccaaccctcttctgggactggattcaaccggcagcggcgaggacctgaagaacgtgttcccacctgaggtggccgtgttcgagcctagcgaggccgagatcagccacacccagaaagccaccctcgtgtgcctggctaccggcttctaccccgaccatgtggaactgtcttggtgggtcaacggcaaagaggtgcacagcggcgtgtgtaccgacccccagccactgaaagaacagcccgccctgaacgacagccggtactgcctgagcagcagactgagagtgtccgccaccttctggcagaacccccggaaccacttcagatgccaggtgcagttctacggcctgagcgagaacgacgagtggacccaggacagagccaagcccgtgacccagatcgtgtctgccgaagcctggggcagagccgattgcggctttaccagcgagagctaccagcagggcgtgctgagcgccaccatcctgtacgagatcctgctgggcaaggccaccctgtacgccgtgctggtgtctgccctggtgctgatggctatggtcaagcggaaggacagccggggaagggccaagcgatctggatctggagcaacaaacttctcactactcaaacaagcaggtgacgtggaggagaatcccgggccttctagaggccatatgaccgagtacaagcccacggtgcgcctcgccacccgcgacgacgtccccagggccgtacgcaccctcgccgccgcgttcgccgactaccccgccacgcgccacaccgtcgatccggaccgccacatcgagcgggtcaccgagctgcaagaactcttcctcacgcgcgtcgggctcgacatcggcaaggtgtgggtcgcggacgacggcgccgcggtggcggtctggaccacgccggagagcgtcgaagcgggggcggtgttcgccgagatcggcccgcgcatggccgagttgagcggttcccggctggccgcgcagcaacagatggaaggcctcctggcgccgcaccggcccaaggagcccgcgtggttcctggccaccgtcggcgtctcgcccgaccaccagggcaagggtctgggcagcgccgtcgtgctccccggagtggaggcggccgagcgcgccggggtgcccgccttcctggagacctccgcgccccgcaacctccccttctacgagcggctcggcttcaccgtcaccgccgacgtcgaggtgcccgaaggaccgcgcacctggtgcatgacccgcaagcccggtgcctga

SEQ ID NO: 9148 - DNA, 2559 bp, Artificial Sequence
  Synthetic Polynucloetide
atggccttaccagtgaccgccttgctcctgccgctggccttgctgctccacgccgccaggccggacatccagatgacacagagccctagcagcgtgtccgcctctgtgggagacagagtgaccatcacctgtagagccagccagagcgtgtccagctacctgaactggtatcagcagaagcccggcaaggcccctaagctgctgatctatgctgccagctctctgcagtctggcgtgcccagcagattttctggcagcggctctggcaccgacttcaccctgaccatatctagcctgcagcctgaggacttcgccacctactactgccagcagagctacagcaccccttggacctttggacagggcaccaagctggaaatcaagagactcgaggacctgaagaacgtgttcccacctgaggtggccgtgttcgagcctagcgaggccgagatcagccacacccagaaagccaccctcgtgtgcctggctaccggcttctaccccgaccatgtggaactgtcttggtgggtcaacggcaaagaggtgcacagcggcgtgtctaccgacccccagccactgaaagaacagcccgccctgaacgacagccggtactgcctgagcagcagactgagagtgtccgccaccttctggcagaacccccggaaccacttcagatgccaggtgcagttctacggcctgagcgagaacgacgagtggacccaggacagagccaagcccgtgacccagatcgtgtctgccgaagcctggggcagagccgattgcggctttaccagcgagagctaccagcagggcgtgctgagcgccaccatcctgtacgagatcctgctgggcaaggccaccctgtacgccgtgctggtgtctgccctggtgctgatggctatggtcaagcggaaggacagccggggaagggccaagcgatctggatctggagcaacaaacttctcactactcaaacaagcaggtgacgtggaggagaatcccgggcctactagtatggactggatttggcgcatccttttccttgtcggcgctgctaccggcgcgcattccttcgaagaagtgcagctggttgaatcaggtggcggcctggttcagcctggcagaagtctgagactgagctgtgccgccagcggcttcaccttcgacgattacggaatgcactgggtccgacaggcccctggcaaaggacttgaatgggtgtccggcatcagctggaacagcggcagcatcggctatgccgatagcgccaagggcagattcaccatcagccgggacaacagcaagaacaccctgtacctgcagatgaacagcctgagagccgaggacaccgccgtgtactactgtgccaagaggggcaacagcaacagcttcgactattggggccagggcaccctggtcacagtctcttctacgcgtatccagaaccctgatcctgccgtgtaccagctgcgggatagcaagagcagcgacaagagcgtgtgtctgttcaccgacttcgacagccagaccaacgtgtcccagagcaaggactccgacgtgtacatcaccgataagaccgtgctggacatgcggagcatggacttcaagagcaactccgccgtggcctggtccaacaagtccgatttcgcctgcgccaacgccttcaacaacagcattatccccgaggacacattcttcccaagccccgagagcagctgcgacgtgaagctggtggaaaagagcttcgagacagacaccaacctgaacttccagaacctgagcgtgatcggcttcagaatcctgctgctgaaagtggccggctttaacctgctgatgaccctgcggctgtggtccagccgcgccaagagaagcggatctggcgtgaagcagaccctgaatttcgacctgctgaagctggctggcgacgtggaatccaacccaggcccttctagaggccatatgaccgagtacaagcccacggtgcgcctcgccacccgcgacgacgtccccagggccgtacgcaccctcgccgccgcgttcgccgactaccccgccacgcgccacaccgtcgatccggaccgccacatcgagcgggtcaccgagctgcaagaactcttcctcacgcgcgtcgggctcgacatcggcaaggtgtgggtcgcggacgacggcgccgcggtggcggtctggaccacgccggagagcgtcgaagcgggggcggtgttcgccgagatcggcccgcgcatggccgagttgagcggttcccggctggccgcgcagcaacagatggaaggcctcctggcgccgcaccggcccaaggagcccgcgtggttcctggccaccgtcggcgtctcgcccgaccaccagggcaagggtctgggcagcgccgtcgtgctccccggagtggaggcggccgagcgcgccggggtgcccgccttcctggagacctccgcgccccgcaacctccccttctacgagcggctcggcttcaccgtcaccgccgacgtcgaggtgcccgaaggaccgcgcacctggtgcatgacccgcaagcccggtgcctga

SEQ ID NO: 9149 - DNA, 2805 bp, Artificial Sequence
  Synthetic Polynucloetide
atggccttaccagtgaccgccttgctcctgccgctggccttgctgctccacgccgccaggccggacatccagatgacacagagccctagcagcgtgtccgcctctgtgggagacagagtgaccatcacctgtagagccagccagagcgtgtccagctacctgaactggtatcagcagaagcccggcaaggcccctaagctgctgatctatgctgccagctctctgcagtctggcgtgcccagcagattttctggcagcggctctggcaccgacttcaccctgaccatatctagcctgcagcctgaggacttcgccacctactactgccagcagagctacagcaccccttggacctttggacagggcaccaagctggaaatcaagagactcgaggacctgaagaacgtgttcccacctgaggtggccgtgttcgagcctagcgaggccgagatcagccacacccagaaagccaccctcgtgtgcctggctaccggcttctaccccgaccatgtggaactgtcttggtgggtcaacggcaaagaggtgcacagcggcgtgtctaccgacccccagccactgaaagaacagcccgccctgaacgacagccggtactgcctgagcagcagactgagagtgtccgccaccttctggcagaacccccggaaccacttcagatgccaggtgcagttctacggcctgagcgagaacgacgagtggacccaggacagagccaagcccgtgacccagatcgtgtctgccgaagcctggggcagagccgattgcggctttaccagcgagagctaccagcagggcgtgctgagcgccaccatcctgtacgagatcctgctgggcaaggccaccctgtacgccgtgctggtgtctgccctggtgctgatggctatggtcaagcggaaggacagccggggaagggccaagcgatctggatctggagcaacaaacttctcactactcaaacaagcaggtgacgtggaggagaatcccgggcctactagtatggactggatttggcgcatccttttccttgtcggcgctgctaccggcgcgcattccttcgaagaagtgcagctggttgaatcaggtggcggcctggttcagcctggcagaagtctgagactgagctgtgccgccagcggcttcaccttcgacgattacggaatgcactgggtccgacaggcccctggcaaaggacttgaatgggtgtccggcatcagctggaacagcggcagcatcggctatgccgatagcgccaagggcagattcaccatcagccgggacaacagcaagaacaccctgtacctgcagatgaacagcctgagagccgaggacaccgccgtgtactactgtgccaagaggggcaacagcaacagcttcgactattggggccagggcaccctggtcacagtctcttctacgcgtgagcagaaactgatctcggaagaggatgggagcggcaccccattcccttctctggcccctcccatcatgctgctggtggacggcaagcagcagatggtggtcgtgtgcctggtgctggatgtggccccacctggactggacagccccatctggtttagcgccggcaatggctctgccctggacgcctttacctacggcccaagccctgccaccgatggcacctggacaaatctggcccacctgagcctgcccagcgaggaactggcttcttgggagcctctcgtgtgccacacaggacctggcgctgagggacacagcagatccacccagcctatgcacctgtctggcgaggccagcaccgccagaacctgtcctcaggaacctctgagaggcacccctggcggagcactgtggctgggagtgctgagactgctgctgttcaagctgctgctgtttgacctgctgctgacctgctcctgtctgtgcgatcctgccggccctctgccttctcctgccaccaccacaagactgagagccctgggcagccacagactgcaccctgccacagagacaggcggcagagaggccacaagcagccctagaccccagcccagagacagaagatggggcgataccccccctggcagaaagcctggatctccagtccgcgccaagagaagcggatctggcgtgaagcagaccctgaatttcgacctgctgaagctggctggcgacgtggaatccaacccaggcccttctagaggccatatgaccgagtacaagcccacggtgcgcctcgccacccgcgacgacgtccccagggccgtacgcaccctcgccgccgcgttcgccgactaccccgccacgcgccacaccgtcgatccggaccgccacatcgagcgggtcaccgagctgcaagaactcttcctcacgcgcgtcgggctcgacatcggcaaggtgtgggtcgcggacgacggcgccgcggtggcggtctggaccacgccggagagcgtcgaagcgggggcggtgttcgccgagatcggcccgcgcatggccgagttgagcggttcccggctggccgcgcagcaacagatggaaggcctcctggcgccgcaccggcccaaggagcccgcgtggttcctggccaccgtcggcgtctcgcccgaccaccagggcaagggtctgggcagcgccgtcgtgctccccggagtggaggcggccgagcgcgccggggtgcccgccttcctggagacctccgcgccccgcaacctccccttctacgagcggctcggcttcaccgtcaccgccgacgtcgaggtgcccgaaggaccgcgcacctggtgcatgacccgcaagcccggtgcctga

SEQ ID NO: 9150 - DNA, 2859 bp, Artificial Sequence
  Synthetic Polynucloetide
atggccttaccagtgaccgccttgctcctgccgctggccttgctgctccacgccgccaggccgctcgaggacctgaagaacgtgttcccacctgaggtggccgtgttcgagcctagcgaggccgagatcagccacacccagaaagccaccctcgtgtgcctggctaccggcttctaccccgaccatgtggaactgtcttggtgggtcaacggcaaagaggtgcacagcggcgtgtctaccgacccccagccactgaaagaacagcccgccctgaacgacagccggtactgcctgagcagcagactgagagtgtccgccaccttctggcagaacccccggaaccacttcagatgccaggtgcagttctacggcctgagcgagaacgacgagtggacccaggacagagccaagcccgtgacccagatcgtgtctgccgaagcctggggcagagccgattgcggctttaccagcgagagctaccagcagggcgtgctgagcgccaccatcctgtacgagatcctgctgggcaaggccaccctgtacgccgtgctggtgtctgccctggtgctgatggctatggtcaagcggaaggacagccggggaagggccaagcgatctggatctggagcaacaaacttctcactactcaaacaagcaggtgacgtggaggagaatcccgggcctactagcatggccttaccagtgaccgccttgctcctgccgctggccttgctgctccacgccgccaggccggacatccagatgacacagagccctagcagcgtgtccgcctctgtgggagacagagtgaccatcacctgtagagccagccagagcgtgtccagctacctgaactggtatcagcagaagcccggcaaggcccctaagctgctgatctatgctgccagctctctgcagtctggcgtgcccagcagattttctggcagcggctctggcaccgacttcaccctgaccatatctagcctgcagcctgaggacttcgccacctactactgccagcagagctacagcaccccttggacctttggacagggcaccaagctggaaatcaagagaggcggaggcggaagtggaggcggaggatctggcggcggaggctctgaagtgcagctggttgaatcaggtggcggcctggttcagcctggcagaagtctgagactgagctgtgccgccagcggcttcaccttcgacgattacggaatgcactgggtccgacaggcccctggcaaaggacttgaatgggtgtccggcatcagctggaacagcggcagcatcggctatgccgatagcgccaagggcagattcaccatcagccgggacaacagcaagaacaccctgtacctgcagatgaacagcctgagagccgaggacaccgccgtgtactactgtgccaagaggggcaacagcaacagcttcgactattggggccagggcaccctggtcacagtctcttctacgcgtgagcagaaactgatctcggaagaggatctggggagcggcaccccattcccttctctggcccctcccatcatgctgctggtggacggcaagcagcagatggtggtcgtgtgcctggtgctggatgtggccccacctggactggacagccccatctggtttagcgccggcaatggctctgccctggacgcctttacctacggcccaagccctgccaccgatggcacctggacaaatctggcccacctgagcctgcccagcgaggaactggcttcttgggagcctctcgtgtgccacacaggacctggcgctgagggacacagcagatccacccagcctatgcacctgtctggcgaggccagcaccgccagaacctgtcctcaggaacctctgagaggcacccctggcggagcactgtggctgggagtgctgagactgctgctgttcaagctgctgctgtttgacctgctgctgacctgctcctgtctgtgcgatcctgccggccctctgccttctcctgccaccaccacaagactgagagccctgggcagccacagactgcaccctgccacagagacaggcggcagagaggccacaagcagccctagaccccagcccagagacagaagatggggcgataccccccctggcagaaagcctggatctccagtccgcgccaagagaagcggatctggcgtgaagcagaccctgaatttcgacctgctgaagctggctggcgacgtggaatccaacccaggcccttctagatctagaggccatatgaccgagtacaagcccacggtgcgcctcgccacccgcgacgacgtccccagggccgtacgcaccctcgccgccgcgttcgccgactaccccgccacgcgccacaccgtcgatccggaccgccacatcgagcgggtcaccgagctgcaagaactcttcctcacgcgcgtcgggctcgacatcggcaaggtgtgggtcgcggacgacggcgccgcggtggcggtctggaccacgccggagagcgtcgaagcgggggcggtgttcgccgagatcggcccgcgcatggccgagttgagcggttcccggctggccgcgcagcaacagatggaaggcctcctggcgccgcaccggcccaaggagcccgcgtggttcctggccaccgtcggcgtctcgcccgaccaccagggcaagggtctgggcagcgccgtcgtgctccccggagtggaggcggccgagcgcgccggggtgcccgccttcctggagacctccgcgccccgcaacctccccttctacgagcggctcggcttcaccgtcaccgccgacgtcgaggtgcccgaaggaccgcgcacctggtgcatgacccgcaagcccggtgcctga

SEQ ID NO: 9151 - DNA, 2670 bp, Artificial Sequence
  Synthetic Polynucloetide
atggccttaccagtgaccgccttgctcctgccgctggccttgctgctccacgccgccaggccggacatccagatgacacagagccctagcagcgtgtccgcctctgtgggagacagagtgaccatcacctgtagagccagccagagcgtgtccagctacctgaactggtatcagcagaagcccggcaaggcccctaagctgctgatctatgctgccagctctctgcagtctggcgtgcccagcagattttctggcagcggctctggcaccgacttcaccctgaccatatctagcctgcagcctgaggacttcgccacctactactgccagcagagctacagcaccccttggacctttggacagggcaccaagctggaaatcaagagactcgaggggaaaccaattcccaaccctcttctgggactggattcaaccggcagcggcgacaagcagctggacgccgacgtgtcccccaagcctaccatcttcctgccctctatcgccgagacaaagctccagaaggccggcacctacctgtgcctgctggaaaagttcttcccagatgtgattaagatccactggcaggaaaagaagtccaacaccatcctgggcagccaggaaggcaacaccatgaagaccaacgacacctacatgaagttcagctggctgaccgtgcccgagaagtccctggacaaagaacacagatgcatcgtgcggcacgaaaacaacaagaacggcgtggaccaggaaatcatcttcccacccatcaagaccgatgtgattacaatggaccccaaggacaactgctccaaggacgccaacgataccctgctgctccagctgaccaacaccagcgcctactacatgtacttgttgctgctgctgaagtccgtggtgtacttcgccatcatcacatgctgcctgctgcggagaaccgccttctgctgcaacggcgagaagtctagggccaagcgatctggatctggagcaacaaacttctcactactcaaacaagcaggtgacgtggaggagaatcccgggcctactagtatggactggatttggcgcatccttttccttgtcggcgctgctaccggcgcgcattccttcgaagaagtgcagctggttgaatcaggtggcggcctggttcagcctggcagaagtctgagactgagctgtgccgccagcggcttcaccttcgacgattacggaatgcactgggtccgacaggcccctggcaaaggacttgaatgggtgtccggcatcagctggaacagcggcagcatcggctatgccgatagcgccaagggcagattcaccatcagccgggacaacagcaagaacaccctgtacctgcagatgaacagcctgagagccgaggacaccgccgtgtactactgtgccaagaggggcaacagcaacagcttcgactattggggccagggcaccctggtcacagtctcttctacgcgtgagcagaaactgatctcggaagaggatgggagcggcagccagcctcacaccaagcccagcgtgttcgtgatgaagaacggcaccaacgtggcctgcctcgtgaaagagttctaccccaaggacatcaggatcaacctggtgtccagcaagaagatcaccgagttcgaccccgccatcgtgatctcccccagcggcaagtacaacgccgtgaagctggggaagtacgaggacagcaacagcgtgacctgctccgtgcagcacgacaacaagaccgtgcacagcaccgactttgaagtgaaaaccgactccaccgaccacgtgaagcccaaagagacagagaacaccaagcagcccagcaagagctgccacaagcccaaggccatcgtgcacaccgagaaagtgaacatgatgagcctgaccgtgctgggcctgcggatgctgttcgccaaaaccgtggccgtgaacttcctgctgaccgccaagctgttcttcctccgcgccaagagaagcggatctggcgtgaagcagaccctgaatttcgacctgctgaagctggctggcgacgtggaatccaacccaggcccttctagaggccatatgaccgagtacaagcccacggtgcgcctcgccacccgcgacgacgtccccagggccgtacgcaccctcgccgccgcgttcgccgactaccccgccacgcgccacaccgtcgatccggaccgccacatcgagcgggtcaccgagctgcaagaactcttcctcacgcgcgtcgggctcgacatcggcaaggtgtgggtcgcggacgacggcgccgcggtggcggtctggaccacgccggagagcgtcgaagcgggggcggtgttcgccgagatcggcccgcgcatggccgagttgagcggttcccggctggccgcgcagcaacagatggaaggcctcctggcgccgcaccggcccaaggagcccgcgtggttcctggccaccgtcggcgtctcgcccgaccaccagggcaagggtctgggcagcgccgtcgtgctccccggagtggaggcggccgagcgcgccggggtgcccgccttcctggagacctccgcgccccgcaacctccccttctacgagcggctcggcttcaccgtcaccgccgacgtcgaggtgcccgaaggaccgcgcacctggtgcatgacccgcaagcccggtgcctga

SEQ ID NO: 9152 - DNA, 1881 bp, Artificial Sequence
  Synthetic Polynucloetide
atggccttaccagtgaccgccttgctcctgccgctggccttgctgctccacgccgccaggccggacatccagatgacacagagccctagcagcgtgtccgcctctgtgggagacagagtgaccatcacctgtagagccagccagagcgtgtccagctacctgaactggtatcagcagaagcccggcaaggcccctaagctgctgatctatgctgccagctctctgcagtctggcgtgcccagcagattttctggcagcggctctggcaccgacttcaccctgaccatatctagcctgcagcctgaggacttcgccacctactactgccagcagagctacagcaccccttggacctttggacagggcaccaagctggaaatcaagagactcgagagccagcctcacaccaagcccagcgtgttcgtgatgaagaacggcaccaacgtggcctgcctcgtgaaagagttctaccccaaggacatcaggatcaacctggtgtccagcaagaagatcaccgagttcgaccccgccatcgtgatctcccccagcggcaagtacaacgccgtgaagctggggaagtacgaggacagcaacagcgtgacctgctccgtgcagcacgacaacaagaccgtgcacagcaccgactttgaagtgaaaaccgactccaccgaccacgtgaagcccaaagagacagagaacaccaagcagcccagcaagagctgccacaagcccaaggccatcgtgcacaccgagaaagtgaacatgatgagcctgaccgtgctgggcctgcggatgctgttcgccaaaaccgtggccgtgaacttcctgctgaccgccaagctgttcttcctcagggccaagcgatctggatctggagcaacaaacttctcactactcaaacaagcaggtgacgtggaggagaatcccgggcctactagtatggactggatttggcgcatccttttccttgtcggcgctgctaccggcgcgcattccttcgaagaagtgcagctggttgaatcaggtggcggcctggttcagcctggcagaagtctgagactgagctgtgccgccagcggcttcaccttcgacgattacggaatgcactgggtccgacaggcccctggcaaaggacttgaatgggtgtccggcatcagctggaacagcggcagcatcggctatgccgatagcgccaagggcagattcaccatcagccgggacaacagcaagaacaccctgtacctgcagatgaacagcctgagagccgaggacaccgccgtgtactactgtgccaagaggggcaacagcaacagcttcgactattggggccagggcaccctggtcacagtctcttctacgcgtgacaagcagctggacgccgacgtgtcccccaagcctaccatcttcctgccctctatcgccgagacaaagctccagaaggccggcacctacctgtgcctgctggaaaagttcttcccagatgtgattaagatccactggcaggaaaagaagtccaacaccatcctgggcagccaggaaggcaacaccatgaagaccaacgacacctacatgaagttcagctggctgaccgtgcccgagaagtccctggacaaagaacacagatgcatcgtgcggcacgaaaacaacaagaacggcgtggaccaggaaatcatcttcccacccatcaagaccgatgtgattacaatggaccccaaggacaactgctccaaggacgccaacgataccctgctgctccagctgaccaacaccagcgcctactacatgtacttgttgctgctgctgaagtccgtggtgtacttcgccatcatcacatgctgcctgctgcggagaaccgccttctgctgcaacggcgagaagtct

SEQ ID NO: 9153 - DNA, 2715 bp, Artificial Sequence
  Synthetic Polynucloetide
atggccttaccagtgaccgccttgctcctgccgctggccttgctgctccacgccgccaggccgctcgaggggaaaccaattcccaaccctcttctgggactggattcaaccggcagcggcgacaagcagctggacgccgacgtgtcccccaagcctaccatcttcctgccctctatcgccgagacaaagctccagaaggccggcacctacctgtgcctgctggaaaagttcttcccagatgtgattaagatccactggcaggaaaagaagtccaacaccatcctgggcagccaggaaggcaacaccatgaagaccaacgacacctacatgaagttcagctggctgaccgtgcccgagaagtccctggacaaagaacacagatgcatcgtgcggcacgaaaacaacaagaacggcgtggaccaggaaatcatcttcccacccatcaagaccgatgtgattacaatggaccccaaggacaactgctccaaggacgccaacgataccctgctgctccagctgaccaacaccagcgcctactacatgtacttgttgctgctgctgaagtccgtggtgtacttcgccatcatcacatgctgcctgctgcggagaaccgccttctgctgcaacggcgagaagtctagggccaagcgatctggatctggagcaacaaacttctcactactcaaacaagcaggtgacgtggaggagaatcccgggcctactagcatggccttaccagtgaccgccttgctcctgccgctggccttgctgctccacgccgccaggccggacatccagatgacacagagccctagcagcgtgtccgcctctgtgggagacagagtgaccatcacctgtagagccagccagagcgtgtccagctacctgaactggtatcagcagaagcccggcaaggcccctaagctgctgatctatgctgccagctctctgcagtctggcgtgcccagcagattttctggcagcggctctggcaccgacttcaccctgaccatatctagcctgcagcctgaggacttcgccacctactactgccagcagagctacagcaccccttggacctttggacagggcaccaagctggaaatcaagagaggcggaggcggaagtggaggcggaggatctggcggcggaggctctgaagtgcagctggttgaatcaggtggcggcctggttcagcctggcagaagtctgagactgagctgtgccgccagcggcttcaccttcgacgattacggaatgcactgggtccgacaggcccctggcaaaggacttgaatgggtgtccggcatcagctggaacagcggcagcatcggctatgccgatagcgccaagggcagattcaccatcagccgggacaacagcaagaacaccctgtacctgcagatgaacagcctgagagccgaggacaccgccgtgtactactgtgccaagaggggcaacagcaacagcttcgactattggggccagggcaccctggtcacagtctcttctacgcgtgagcagaaactgatctcggaagaggatgggagcggcagccagcctcacaccaagcccagcgtgttcgtgatgaagaacggcaccaacgtggcctgcctcgtgaaagagttctaccccaaggacatcaggatcaacctggtgtccagcaagaagatcaccgagttcgaccccgccatcgtgatctcccccagcggcaagtacaacgccgtgaagctggggaagtacgaggacagcaacagcgtgacctgctccgtgcagcacgacaacaagaccgtgcacagcaccgactttgaagtgaaaaccgactccaccgaccacgtgaagcccaaagagacagagaacaccaagcagcccagcaagagctgccacaagcccaaggccatcgtgcacaccgagaaagtgaacatgatgagcctgaccgtgctgggcctgcggatgctgttcgccaaaaccgtggccgtgaacttcctgctgaccgccaagctgttcttcctccgcgccaagagaagcggatctggcgtgaagcagaccctgaatttcgacctgctgaagctggctggcgacgtggaatccaacccaggcccttctagaggccatatgaccgagtacaagcccacggtgcgcctcgccacccgcgacgacgtccccagggccgtacgcaccctcgccgccgcgttcgccgactaccccgccacgcgccacaccgtcgatccggaccgccacatcgagcgggtcaccgagctgcaagaactcttcctcacgcgcgtcgggctcgacatcggcaaggtgtgggtcgcggacgacggcgccgcggtggcggtctggaccacgccggagagcgtcgaagcgggggcggtgttcgccgagatcggcccgcgcatggccgagttgagcggttcccggctggccgcgcagcaacagatggaaggcctcctggcgccgcaccggcccaaggagcccgcgtggttcctggccaccgtcggcgtctcgcccgaccaccagggcaagggtctgggcagcgccgtcgtgctccccggagtggaggcggccgagcgcgccggggtgcccgccttcctggagacctccgcgccccgcaacctccccttctacgagcggctcggcttcaccgtcaccgccgacgtcgaggtgcccgaaggaccgcgcacctggtgcatgacccgcaagcccggtgcctga

SEQ ID NO: 9154 - DNA, 3090 bp, Artificial Sequence
  Synthetic Polynucloetide
atggccttaccagtgaccgccttgctcctgccgctggccttgctgctccacgccgccaggccggacatccagatgacacagagccctagcagcgtgtccgcctctgtgggagacagagtgaccatcacctgtagagccagccagagcgtgtccagctacctgaactggtatcagcagaagcccggcaaggcccctaagctgctgatctatgctgccagctctctgcagtctggcgtgcccagcagattttctggcagcggctctggcaccgacttcaccctgaccatatctagcctgcagcctgaggacttcgccacctactactgccagcagagctacagcaccccttggacctttggacagggcaccaagctggaaatcaagagaggacagcctaaggccaatcctaccgtgacactgttccctccaagcagcgaagaactccaggccaacaaggccacacttgtgtgcctgatctccgacttctaccctggggctgtgacagtggcttggaaggccgatggatctcctgtgaaagccggcgtggaaaccaccaagccatccaagcagagcaacaacaaatacgccgccagctcctacctgagcctgacacctgagcagtggaagtcccacagatcctacagctgccaagtgacccacgaaggcagcaccgtggaaaagacagtggcccctacagagtgcagcggatcccagagcttcggcctgctggaccccaagctgtgctacctgctggatggcatcctgttcatctacggcgtgatcctgaccgccctgttcctgagagtgaagttcagcagaagcgccgacgcccctgcctaccagcagggacagaaccaactgtacaacgagctgaacctgggcagacgggaagagtacgacgtgctggacaagcggagaggcagggaccctgagatgggcggaaagccccagcggagaaagaacccccaggaaggactgtataacgaactccagaaagacaagatggccgaagcctacagcgagatcggcatgaagggcgagcggagaagaggcaagggccacgatggcctgtaccagggcctgagcaccgccaccaaggacacctatgacgccctgcacatgcaggccctgcctccaagaagggccaagcgatctggatctggagcaacaaacttctcactactcaaacaagcaggtgacgtggaggagaatcccgggcctactagtatggactggatttggcgcatccttttccttgtcggcgctgctaccggcgcgcattccttcgaagaagtgcagctggttgaatcaggtggcggcctggttcagcctggcagaagtctgagactgagctgtgccgccagcggcttcaccttcgacgattacggaatgcactgggtccgacaggcccctggcaaaggacttgaatgggtgtccggcatcagctggaacagcggcagcatcggctatgccgatagcgccaagggcagattcaccatcagccgggacaacagcaagaacaccctgtacctgcagatgaacagcctgagagccgaggacaccgccgtgtactactgtgccaagaggggcaacagcaacagcttcgactattggggccagggcaccctggtcacagtctcttctgcctctacaaagggaccctccgtgtttcctctggctcccagcagcaagtctacaagcggaggaacagccgctctgggctgcctggtcaaggattactttcccgagcctgtgaccgtgtcctggaatagcggagcactgacaagcggcgtgcacacctttccagccgtgctgcaaagcagcggcctgtactctctgagcagcgtggtcacagtgcctagctctagcctgggcacccagacctacatctgcaatgtgaaccacaagcctagcaacaccaaggtggacaagagagtggaacccaagagctgtggtacccagagttttgggttgttggaccctaaattgtgctatctgttggacggaatcctgttcatttacggagtgatcctgaccgcattgttcctgcgggttaagttttccagatccgcagacgcacccgcttaccaacaagggcagaaccaactctacaatgaacttaatttggggcggagggaagagtacgacgttctggacaaaaggaggggacgagatcccgagatgggcggaaagcctcagcgaaggaagaatccgcaagaggggctttataacgaactccagaaagataaaatggcagaagcctatagtgagattgggatgaagggagaaaggaggaggggtaaaggtcacgatgggttgtaccaaggattgagcacagccactaaagatacctatgatgcgctccacatgcaggccctgccgccaagacgcgccaagagaagcggatctggcgtgaagcagaccctgaatttcgacctgctgaagctggctggcgacgtggaatccaacccaggcccttctagaggccatatgaccgagtacaagcccacggtgcgcctcgccacccgcgacgacgtccccagggccgtacgcaccctcgccgccgcgttcgccgactaccccgccacgcgccacaccgtcgatccggaccgccacatcgagcgggtcaccgagctgcaagaactcttcctcacgcgcgtcgggctcgacatcggcaaggtgtgggtcgcggacgacggcgccgcggtggcggtctggaccacgccggagagcgtcgaagcgggggcggtgttcgccgagatcggcccgcgcatggccgagttgagcggttcccggctggccgcgcagcaacagatggaaggcctcctggcgccgcaccggcccaaggagcccgcgtggttcctggccaccgtcggcgtctcgcccgaccaccagggcaagggtctgggcagcgccgtcgtgctccccggagtggaggcggccgagcgcgccggggtgcccgccttcctggagacctccgcgccccgcaacctccccttctacgagcggctcggcttcaccgtcaccgccgacgtcgaggtgcccgaaggaccgcgcacctggtgcatgacccgcaagcccggtgcctga

SEQ ID NO: 9155 - DNA, 2445 bp, Artificial Sequence
  Synthetic Polynucloetide
atggccttaccagtgaccgccttgctcctgccgctggccttgctgctccacgccgccaggccggacatccagatgacacagagccctagcagcgtgtccgcctctgtgggagacagagtgaccatcacctgtagagccagccagagcgtgtccagctacctgaactggtatcagcagaagcccggcaaggcccctaagctgctgatctatgctgccagctctctgcagtctggcgtgcccagcagattttctggcagcggctctggcaccgacttcaccctgaccatatctagcctgcagcctgaggacttcgccacctactactgccagcagagctacagcaccccttggacctttggacagggcaccaagctggaaatcaagagactcgaggacctgaagaacgtgttcccacctgaggtggccgtgttcgagcctagcgaggccgagatcagccacacccagaaagccaccctcgtgtgcctggctaccggcttctaccccgaccatgtggaactgtcttggtgggtcaacggcaaagaggtgcacagcggcgtgtctaccgacccccagccactgaaagaacagcccgccctgaacgacagccggtactgcctgagcagcagactgagagtgtccgccaccttctggcagaacccccggaaccacttcagatgccaggtgcagttctacggcctgagcgagaacgacgagtggacccaggacagagccaagcccgtgacccagatcgtgtctgccgaagcctggggcagagccgattgcggatcccagagcttcggcctgctggaccccaagctgtgctacctgctggatggcatcctgttcatctacggcgtgatcctgaccgccctgttcctgagagtgaagttcagcagaagcgccgacgcccctgcctaccagcagggacagaaccaactgtacaacgagctgaacctgggcagacgggaagagtacgacgtgctggacaagcggagaggcagggaccctgagatgggcggaaagccccagcggagaaagaacccccaggaaggactgtataacgaactccagaaagacaagatggccgaagcctacagcgagatcggcatgaagggcgagcggagaagaggcaagggccacgatggcctgtaccagggcctgagcaccgccaccaaggacacctatgacgccctgcacatgcaggccctgcctccaagaagggccaagcgatctggatctggagcaacaaacttctcactactcaaacaagcaggtgacgtggaggagaatcccgggcctactagtatggactggatttggcgcatccttttccttgtcggcgctgctaccggcgcgcattccttcgaagaagtgcagctggttgaatcaggtggcggcctggttcagcctggcagaagtctgagactgagctgtgccgccagcggcttcaccttcgacgattacggaatgcactgggtccgacaggcccctggcaaaggacttgaatgggtgtccggcatcagctggaacagcggcagcatcggctatgccgatagcgccaagggcagattcaccatcagccgggacaacagcaagaacaccctgtacctgcagatgaacagcctgagagccgaggacaccgccgtgtactactgtgccaagaggggcaacagcaacagcttcgactattggggccagggcaccctggtcacagtctcttctacgcgtatccagaaccctgatcctgccgtgtaccagctgcgggatagcaagagcagcgacaagagcgtgtgtctgttcaccgacttcgacagccagaccaacgtgtcccagagcaaggactccgacgtgtacatcaccgataagaccgtgctggacatgcggagcatggacttcaagagcaactccgccgtggcctggtccaacaagtccgatttcgcctgcgccaacgccttcaacaacagcattatccccgaggacacattcttcccaagccccgagagcagctgcggtacccagagttttgggttgttggaccctaaattgtgctatctgttggacggaatcctgttcatttacggagtgatcctgaccgcattgttcctgcgggttaagttttccagatccgcagacgcacccgcttaccaacaagggcagaaccaactctacaatgaacttaatttggggcggagggaagagtacgacgttctggacaaaaggaggggacgagatcccgagatgggcggaaagcctcagcgaaggaagaatccgcaagaggggctttataacgaactccagaaagataaaatggcagaagcctatagtgagattgggatgaagggagaaaggaggaggggtaaaggtcacgatgggttgtaccaaggattgagcacagccactaaagatacctatgatgcgctccacatgcaggccctgccgccaaga

SEQ ID NO: 9156 - DNA, 2445 bp, Artificial Sequence
  Synthetic Polynucloetide
atggccttaccagtgaccgccttgctcctgccgctggccttgctgctccacgccgccaggccggacatccagatgacacagagccctagcagcgtgtccgcctctgtgggagacagagtgaccatcacctgtagagccagccagagcgtgtccagctacctgaactggtatcagcagaagcccggcaaggcccctaagctgctgatctatgctgccagctctctgcagtctggcgtgcccagcagattttctggcagcggctctggcaccgacttcaccctgaccatatctagcctgcagcctgaggacttcgccacctactactgccagcagagctacagcaccccttggacctttggacagggcaccaagctggaaatcaagagactcgaggacctgaagaacgtgttcccacctgaggtggccgtgttcgagcctagcaaggccgagatcgcccacacccagaaagccaccctcgtgtgcctggctaccggcttctaccccgaccatgtggaactgtcttggtgggtcaacggcaaagaggtgcacagcggcgtgtgtaccgacccccagccactgaaagaacagcccgccctgaacgacagccggtactgcctgagcagcagactgagagtgtccgccaccttctggcagaacccccggaaccacttcagatgccaggtgcagttctacggcctgagcgagaacgacgagtggacccaggacagagccaagcccgtgacccagatcgtgtctgccgaagcctggggcagagccgattgcggatcccagagcttcggcctgctggaccccaagctgtgctacctgctggatggcatcctgttcatctacggcgtgatcctgaccgccctgttcctgagagtgaagttcagcagaagcgccgacgcccctgcctaccagcagggacagaaccaactgtacaacgagctgaacctgggcagacgggaagagtacgacgtgctggacaagcggagaggcagggaccctgagatgggcggaaagccccagcggagaaagaacccccaggaaggactgtataacgaactccagaaagacaagatggccgaagcctacagcgagatcggcatgaagggcgagcggagaagaggcaagggccacgatggcctgtaccagggcctgagcaccgccaccaaggacacctatgacgccctgcacatgcaggccctgcctccaagaagggccaagcgatctggatctggagcaacaaacttctcactactcaaacaagcaggtgacgtggaggagaatcccgggcctactagtatggactggatttggcgcatccttttccttgtcggcgctgctaccggcgcgcattccttcgaagaagtgcagctggttgaatcaggtggcggcctggttcagcctggcagaagtctgagactgagctgtgccgccagcggcttcaccttcgacgattacggaatgcactgggtccgacaggcccctggcaaaggacttgaatgggtgtccggcatcagctggaacagcggcagcatcggctatgccgatagcgccaagggcagattcaccatcagccgggacaacagcaagaacaccctgtacctgcagatgaacagcctgagagccgaggacaccgccgtgtactactgtgccaagaggggcaacagcaacagcttcgactattggggccagggcaccctggtcacagtctcttctacgcgtatccagaaccctgatcctgccgtgtaccagctgcgggatagcaagagcagcgacaagagcgtgtgtctgttcaccgacttcgacagccagaccaacgtgtcccagagcaaggactccgacgtgtacatcaccgataagtgcgtgctggacatgcggagcatggacttcaagagcaactccgccgtggcctggtccaacaagtccgatttcgcctgcgccaacgccttcaacaacagcattatccccgaggacacattcttcccaagcagcgacgtgccctgcggtacccagagttttgggttgttggaccctaaattgtgctatctgttggacggaatcctgttcatttacggagtgatcctgaccgcattgttcctgcgggttaagttttccagatccgcagacgcacccgcttaccaacaagggcagaaccaactctacaatgaacttaatttggggcggagggaagagtacgacgttctggacaaaaggaggggacgagatcccgagatgggcggaaagcctcagcgaaggaagaatccgcaagaggggctttataacgaactccagaaagataaaatggcagaagcctatagtgagattgggatgaagggagaaaggaggaggggtaaaggtcacgatgggttgtaccaaggattgagcacagccactaaagatacctatgatgcgctccacatgcaggccctgccgccaaga

SEQ ID NO: 9157 - DNA, 2658 bp, Artificial Sequence
  Synthetic Polynucloetide
atggccttaccagtgaccgccttgctcctgccgctggccttgctgctccacgccgccaggccggacatccagatgacacagagccctagcagcgtgtccgcctctgtgggagacagagtgaccatcacctgtagagccagccagagcgtgtccagctacctgaactggtatcagcagaagcccggcaaggcccctaagctgctgatctatgctgccagctctctgcagtctggcgtgcccagcagattttctggcagcggctctggcaccgacttcaccctgaccatatctagcctgcagcctgaggacttcgccacctactactgccagcagagctacagcaccccttggacctttggacagggcaccaagctggaaatcaagagactcgaggggaaaccaattcccaaccctcttctgggactggattcaaccggcagcggcgaggacctgaagaacgtgttcccacctgaggtggccgtgttcgagcctagcgaggccgagatcagccacacccagaaagccaccctcgtgtgcctggctaccggcttctaccccgaccatgtggaactgtcttggtgggtcaacggcaaagaggtgcacagcggcgtgtctaccgacccccagccactgaaagaacagcccgccctgaacgacagccggtactgcctgagcagcagactgagagtgtccgccaccttctggcagaacccccggaaccacttcagatgccaggtgcagttctacggcctgagcgagaacgacgagtggacccaggacagagccaagcccgtgacccagatcgtgtctgccgaagcctggggcagagccgattgcggatcccagagcttcggcctgctggaccccaagctgtgctacctgctggatggcatcctgttcatctacggcgtgatcctgaccgccctgttcctgagagtgaagttcagcagaagcgccgacgcccctgcctaccagcagggacagaaccaactgtacaacgagctgaacctgggcagacgggaagagtacgacgtgctggacaagcggagaggcagggaccctgagatgggcggaaagccccagcggagaaagaacccccaggaaggactgtataacgaactccagaaagacaagatggccgaagcctacagcgagatcggcatgaagggcgagcggagaagaggcaagggccacgatggcctgtaccagggcctgagcaccgccaccaaggacacctatgacgccctgcacatgcaggccctgcctccaagaagggccaagcgatctggatctggagcaacaaacttctcactactcaaacaagcaggtgacgtggaggagaatcccgggcctactagtatggactggatttggcgcatccttttccttgtcggcgctgctaccggcgcgcattccttcgaagaagtgcagctggttgaatcaggtggcggcctggttcagcctggcagaagtctgagactgagctgtgccgccagcggcttcaccttcgacgattacggaatgcactgggtccgacaggcccctggcaaaggacttgaatgggtgtccggcatcagctggaacagcggcagcatcggctatgccgatagcgccaagggcagattcaccatcagccgggacaacagcaagaacaccctgtacctgcagatgaacagcctgagagccgaggacaccgccgtgtactactgtgccaagaggggcaacagcaacagcttcgactattggggccagggcaccctggtcacagtctcttctacgcgtgagcagaaactgatctcggaagaggatgggagcggcatccagaaccctgatcctgccgtgtaccagctgcgggatagcaagagcagcgacaagagcgtgtgtctgttcaccgacttcgacagccagaccaacgtgtcccagagcaaggactccgacgtgtacatcaccgataagaccgtgctggacatgcggagcatggacttcaagagcaactccgccgtggcctggtccaacaagtccgatttcgcctgcgccaacgccttcaacaacagcattatccccgaggacacattcttcccaagccccgagagcagctgcggtacccagagttttgggttgttggaccctaaattgtgctatctgttggacggaatcctgttcatttacggagtgatcctgaccgcattgttcctgaggagcaagcggtcacggctgctccacagcgattacatgaatatgacaccacgaagaccgggtcctactcgcaaacactaccaaccctacgcacctccccgcgactttgcagcgtaccgatctcgggttaagttttccagatccgcagacgcacccgcttaccaacaagggcagaaccaactctacaatgaacttaatttggggcggagggaagagtacgacgttctggacaaaaggaggggacgagatcccgagatgggcggaaagcctcagcgaaggaagaatccgcaagaggggctttataacgaactccagaaagataaaatggcagaagcctatagtgagattgggatgaagggagaaaggaggaggggtaaaggtcacgatgggttgtaccaaggattgagcacagccactaaagatacctatgatgcgctccacatgcaggccctgccgccaaga

SEQ ID NO: 9158 - DNA, 2781 bp, Artificial Sequence
  Synthetic Polynucloetide
atggccttaccagtgaccgccttgctcctgccgctggccttgctgctccacgccgccaggccggacatccagatgacacagagccctagcagcgtgtccgcctctgtgggagacagagtgaccatcacctgtagagccagccagagcgtgtccagctacctgaactggtatcagcagaagcccggcaaggcccctaagctgctgatctatgctgccagctctctgcagtctggcgtgcccagcagattttctggcagcggctctggcaccgacttcaccctgaccatatctagcctgcagcctgaggacttcgccacctactactgccagcagagctacagcaccccttggacctttggacagggcaccaagctggaaatcaagagactcgaggggaaaccaattcccaaccctcttctgggactggattcaaccggcagcggcgaggacctgaagaacgtgttcccacctgaggtggccgtgttcgagcctagcgaggccgagatcagccacacccagaaagccaccctcgtgtgcctggctaccggcttctaccccgaccatgtggaactgtcttggtgggtcaacggcaaagaggtgcacagcggcgtgtctaccgacccccagccactgaaagaacagcccgccctgaacgacagccggtactgcctgagcagcagactgagagtgtccgccaccttctggcagaacccccggaaccacttcagatgccaggtgcagttctacggcctgagcgagaacgacgagtggacccaggacagagccaagcccgtgacccagatcgtgtctgccgaagcctggggcagagccgattgcggatcccagagcttcggcctgctggaccccaagctgtgctacctgctggatggcatcctgttcatctacggcgtgatcctgaccgccctgttcctgaggagtaagaggagcaggctcctgcacagtgactacatgaacatgactccacgccgccccggacccacccgcaagcattaccagccctatgccccaccacgcgacttcgcagcctatcgctccagagtgaagttcagcagaagcgccgacgcccctgcctaccagcagggacagaaccaactgtacaacgagctgaacctgggcagacgggaagagtacgacgtgctggacaagcggagaggcagggaccctgagatgggcggaaagccccagcggagaaagaacccccaggaaggactgtataacgaactccagaaagacaagatggccgaagcctacagcgagatcggcatgaagggcgagcggagaagaggcaagggccacgatggcctgtaccagggcctgagcaccgccaccaaggacacctatgacgccctgcacatgcaggccctgcctccaagaagggccaagcgatctggatctggagcaacaaacttctcactactcaaacaagcaggtgacgtggaggagaatcccgggcctactagtatggactggatttggcgcatccttttccttgtcggcgctgctaccggcgcgcattccttcgaagaagtgcagctggttgaatcaggtggcggcctggttcagcctggcagaagtctgagactgagctgtgccgccagcggcttcaccttcgacgattacggaatgcactgggtccgacaggcccctggcaaaggacttgaatgggtgtccggcatcagctggaacagcggcagcatcggctatgccgatagcgccaagggcagattcaccatcagccgggacaacagcaagaacaccctgtacctgcagatgaacagcctgagagccgaggacaccgccgtgtactactgtgccaagaggggcaacagcaacagcttcgactattggggccagggcaccctggtcacagtctcttctacgcgtgagcagaaactgatctcggaagaggatgggagcggcatccagaaccctgatcctgccgtgtaccagctgcgggatagcaagagcagcgacaagagcgtgtgtctgttcaccgacttcgacagccagaccaacgtgtcccagagcaaggactccgacgtgtacatcaccgataagaccgtgctggacatgcggagcatggacttcaagagcaactccgccgtggcctggtccaacaagtccgatttcgcctgcgccaacgccttcaacaacagcattatccccgaggacacattcttcccaagccccgagagcagctgcggtacccagagttttgggttgttggaccctaaattgtgctatctgttggacggaatcctgttcatttacggagtgatcctgaccgcattgttcctgaggagcaagcggtcacggctgctccacagcgattacatgaatatgacaccacgaagaccgggtcctactcgcaaacactaccaaccctacgcacctccccgcgactttgcagcgtaccgatctcgggttaagttttccagatccgcagacgcacccgcttaccaacaagggcagaaccaactctacaatgaacttaatttggggcggagggaagagtacgacgttctggacaaaaggaggggacgagatcccgagatgggcggaaagcctcagcgaaggaagaatccgcaagaggggctttataacgaactccagaaagataaaatggcagaagcctatagtgagattgggatgaagggagaaaggaggaggggtaaaggtcacgatgggttgtaccaaggattgagcacagccactaaagatacctatgatgcgctccacatgcaggccctgccgccaaga

SEQ ID NO: 9159 - DNA, 2664 bp, Artificial Sequence
  Synthetic Polynucloetide
atggccttaccagtgaccgccttgctcctgccgctggccttgctgctccacgccgccaggccggacatccagatgacacagagccctagcagcgtgtccgcctctgtgggagacagagtgaccatcacctgtagagccagccagagcgtgtccagctacctgaactggtatcagcagaagcccggcaaggcccctaagctgctgatctatgctgccagctctctgcagtctggcgtgcccagcagattttctggcagcggctctggcaccgacttcaccctgaccatatctagcctgcagcctgaggacttcgccacctactactgccagcagagctacagcaccccttggacctttggacagggcaccaagctggaaatcaagagactcgaggggaaaccaattcccaaccctcttctgggactggattcaaccggcagcggcgaggacctgaagaacgtgttcccacctgaggtggccgtgttcgagcctagcgaggccgagatcagccacacccagaaagccaccctcgtgtgcctggctaccggcttctaccccgaccatgtggaactgtcttggtgggtcaacggcaaagaggtgcacagcggcgtgtctaccgacccccagccactgaaagaacagcccgccctgaacgacagccggtactgcctgagcagcagactgagagtgtccgccaccttctggcagaacccccggaaccacttcagatgccaggtgcagttctacggcctgagcgagaacgacgagtggacccaggacagagccaagcccgtgacccagatcgtgtctgccgaagcctggggcagagccgattgcggatcccagagcttcggcctgctggaccccaagctgtgctacctgctggatggcatcctgttcatctacggcgtgatcctgaccgccctgttcctgagagtgaagttcagcagaagcgccgacgcccctgcctaccagcagggacagaaccaactgtacaacgagctgaacctgggcagacgggaagagtacgacgtgctggacaagcggagaggcagggaccctgagatgggcggaaagccccagcggagaaagaacccccaggaaggactgtataacgaactccagaaagacaagatggccgaagcctacagcgagatcggcatgaagggcgagcggagaagaggcaagggccacgatggcctgtaccagggcctgagcaccgccaccaaggacacctatgacgccctgcacatgcaggccctgcctccaagaagggccaagcgatctggatctggagcaacaaacttctcactactcaaacaagcaggtgacgtggaggagaatcccgggcctactagtatggactggatttggcgcatccttttccttgtcggcgctgctaccggcgcgcattccttcgaagaagtgcagctggttgaatcaggtggcggcctggttcagcctggcagaagtctgagactgagctgtgccgccagcggcttcaccttcgacgattacggaatgcactgggtccgacaggcccctggcaaaggacttgaatgggtgtccggcatcagctggaacagcggcagcatcggctatgccgatagcgccaagggcagattcaccatcagccgggacaacagcaagaacaccctgtacctgcagatgaacagcctgagagccgaggacaccgccgtgtactactgtgccaagaggggcaacagcaacagcttcgactattggggccagggcaccctggtcacagtctcttctacgcgtgagcagaaactgatctcggaagaggatctggggagcggcatccagaaccctgatcctgccgtgtaccagctgcgggatagcaagagcagcgacaagagcgtgtgtctgttcaccgacttcgacagccagaccaacgtgtcccagagcaaggactccgacgtgtacatcaccgataagaccgtgctggacatgcggagcatggacttcaagagcaactccgccgtggcctggtccaacaagtccgatttcgcctgcgccaacgccttcaacaacagcattatccccgaggacacattcttcccaagccccgagagcagctgcggtacccagagttttgggttgttggaccctaaattgtgctatctgttggacggaatcctgttcatttacggagtgatcctgaccgcattgttcctgaagagaggccggaagaagctgctgtacatcttcaagcagcctttcatgcggcccgtgcagaccacccaggaagaggacggctgctcctgccggttccccgaggaagaagaaggcggctgcgagctgcgggttaagttttccagatccgcagacgcacccgcttaccaacaagggcagaaccaactctacaatgaacttaatttggggcggagggaagagtacgacgttctggacaaaaggaggggacgagatcccgagatgggcggaaagcctcagcgaaggaagaatccgcaagaggggctttataacgaactccagaaagataaaatggcagaagcctatagtgagattgggatgaagggagaaaggaggaggggtaaaggtcacgatgggttgtaccaaggattgagcacagccactaaagatacctatgatgcgctccacatgcaggccctgccgccaaga

SEQ ID NO: 9160 - DNA, 2790 bp, Artificial Sequence
  Synthetic Polynucloetide
atggccttaccagtgaccgccttgctcctgccgctggccttgctgctccacgccgccaggccggacatccagatgacacagagccctagcagcgtgtccgcctctgtgggagacagagtgaccatcacctgtagagccagccagagcgtgtccagctacctgaactggtatcagcagaagcccggcaaggcccctaagctgctgatctatgctgccagctctctgcagtctggcgtgcccagcagattttctggcagcggctctggcaccgacttcaccctgaccatatctagcctgcagcctgaggacttcgccacctactactgccagcagagctacagcaccccttggacctttggacagggcaccaagctggaaatcaagagactcgaggggaaaccaattcccaaccctcttctgggactggattcaaccggcagcggcgaggacctgaagaacgtgttcccacctgaggtggccgtgttcgagcctagcgaggccgagatcagccacacccagaaagccaccctcgtgtgcctggctaccggcttctaccccgaccatgtggaactgtcttggtgggtcaacggcaaagaggtgcacagcggcgtgtctaccgacccccagccactgaaagaacagcccgccctgaacgacagccggtactgcctgagcagcagactgagagtgtccgccaccttctggcagaacccccggaaccacttcagatgccaggtgcagttctacggcctgagcgagaacgacgagtggacccaggacagagccaagcccgtgacccagatcgtgtctgccgaagcctggggcagagccgattgcggatcccagagcttcggcctgctggaccccaagctgtgctacctgctggatggcatcctgttcatctacggcgtgatcctgaccgccctgttcctgaaacggggcagaaagaaactcctgtatatattcaaacaaccatttatgagaccagtacaaactactcaagaggaagatggctgtagctgccgatttccagaagaagaagaaggaggatgtgaactgagagtgaagttcagcagaagcgccgacgcccctgcctaccagcagggacagaaccaactgtacaacgagctgaacctgggcagacgggaagagtacgacgtgctggacaagcggagaggcagggaccctgagatgggcggaaagccccagcggagaaagaacccccaggaaggactgtataacgaactccagaaagacaagatggccgaagcctacagcgagatcggcatgaagggcgagcggagaagaggcaagggccacgatggcctgtaccagggcctgagcaccgccaccaaggacacctatgacgccctgcacatgcaggccctgcctccaagaagggccaagcgatctggatctggagcaacaaacttctcactactcaaacaagcaggtgacgtggaggagaatcccgggcctactagtatggactggatttggcgcatccttttccttgtcggcgctgctaccggcgcgcattccttcgaagaagtgcagctggttgaatcaggtggcggcctggttcagcctggcagaagtctgagactgagctgtgccgccagcggcttcaccttcgacgattacggaatgcactgggtccgacaggcccctggcaaaggacttgaatgggtgtccggcatcagctggaacagcggcagcatcggctatgccgatagcgccaagggcagattcaccatcagccgggacaacagcaagaacaccctgtacctgcagatgaacagcctgagagccgaggacaccgccgtgtactactgtgccaagaggggcaacagcaacagcttcgactattggggccagggcaccctggtcacagtctcttctacgcgtgagcagaaactgatctcggaagaggatctggggagcggcatccagaaccctgatcctgccgtgtaccagctgcgggatagcaagagcagcgacaagagcgtgtgtctgttcaccgacttcgacagccagaccaacgtgtcccagagcaaggactccgacgtgtacatcaccgataagaccgtgctggacatgcggagcatggacttcaagagcaactccgccgtggcctggtccaacaagtccgatttcgcctgcgccaacgccttcaacaacagcattatccccgaggacacattcttcccaagccccgagagcagctgcggtacccagagttttgggttgttggaccctaaattgtgctatctgttggacggaatcctgttcatttacggagtgatcctgaccgcattgttcctgaagagaggccggaagaagctgctgtacatcttcaagcagcctttcatgcggcccgtgcagaccacccaggaagaggacggctgctcctgccggttccccgaggaagaagaaggcggctgcgagctgcgggttaagttttccagatccgcagacgcacccgcttaccaacaagggcagaaccaactctacaatgaacttaatttggggcggagggaagagtacgacgttctggacaaaaggaggggacgagatcccgagatgggcggaaagcctcagcgaaggaagaatccgcaagaggggctttataacgaactccagaaagataaaatggcagaagcctatagtgagattgggatgaagggagaaaggaggaggggtaaaggtcacgatgggttgtaccaaggattgagcacagccactaaagatacctatgatgcgctccacatgcaggccctgccgccaaga

SEQ ID NO: 9161 - DNA, 2463 bp, Artificial Sequence
  Synthetic Polynucloetide
atggccttaccagtgaccgccttgctcctgccgctggccttgctgctccacgccgccaggccggacatccagatgacacagagccctagcagcgtgtccgcctctgtgggagacagagtgaccatcacctgtagagccagccagagcgtgtccagctacctgaactggtatcagcagaagcccggcaaggcccctaagctgctgatctatgctgccagctctctgcagtctggcgtgcccagcagattttctggcagcggctctggcaccgacttcaccctgaccatatctagcctgcagcctgaggacttcgccacctactactgccagcagagctacagcaccccttggacctttggacagggcaccaagctggaaatcaagagactcgagcagagcttcggcctgctggaccccaagctgtgctacctgctggatggcatcctgttcatctacggcgtgatcctgaccgccctgttcctgagagtgaagttcagcagaagcgccgacgcccctgcctaccagcagggacagaaccaactgtacaacgagctgaacctgggcagacgggaagagtacgacgtgctggacaagcggagaggcagggaccctgagatgggcggaaagccccagcggagaaagaacccccaggaaggactgtataacgaactccagaaagacaagatggccgaagcctacagcgagatcggcatgaagggcgagcggagaagaggcaagggccacgatggcctgtaccagggcctgagcaccgccaccaaggacacctatgacgccctgcacatgcaggccctgcctccaagaagggccaagcgatctggatctggagcaacaaacttctcactactcaaacaagcaggtgacgtggaggagaatcccgggcctactagtatggactggatttggcgcatccttttccttgtcggcgctgctaccggcgcgcattccttcgaagaagtgcagctggttgaatcaggtggcggcctggttcagcctggcagaagtctgagactgagctgtgccgccagcggcttcaccttcgacgattacggaatgcactgggtccgacaggcccctggcaaaggacttgaatgggtgtccggcatcagctggaacagcggcagcatcggctatgccgatagcgccaagggcagattcaccatcagccgggacaacagcaagaacaccctgtacctgcagatgaacagcctgagagccgaggacaccgccgtgtactactgtgccaagaggggcaacagcaacagcttcgactattggggccagggcaccctggtcacagtctcttctacgcgtcagagttttgggttgttggaccctaaattgtgctatctgttggacggaatcctgttcatttacggagtgatcctgaccgcattgttcctgcgggttaagttttccagatccgcagacgcacccgcttaccaacaagggcagaaccaactctacaatgaacttaatttggggcggagggaagagtacgacgttctggacaaaaggaggggacgagatcccgagatgggcggaaagcctcagcgaaggaagaatccgcaagaggggctttataacgaactccagaaagataaaatggcagaagcctatagtgagattgggatgaagggagaaaggaggaggggtaaaggtcacgatgggttgtaccaaggattgagcacagccactaaagatacctatgatgcgctccacatgcaggccctgccgccaagacgcgccaagagaagcggatctggcgtgaagcagaccctgaatttcgacctgctgaagctggctggcgacgtggaatccaacccaggcccttctagaggccatatgaccgagtacaagcccacggtgcgcctcgccacccgcgacgacgtccccagggccgtacgcaccctcgccgccgcgttcgccgactaccccgccacgcgccacaccgtcgatccggaccgccacatcgagcgggtcaccgagctgcaagaactcttcctcacgcgcgtcgggctcgacatcggcaaggtgtgggtcgcggacgacggcgccgcggtggcggtctggaccacgccggagagcgtcgaagcgggggcggtgttcgccgagatcggcccgcgcatggccgagttgagcggttcccggctggccgcgcagcaacagatggaaggcctcctggcgccgcaccggcccaaggagcccgcgtggttcctggccaccgtcggcgtctcgcccgaccaccagggcaagggtctgggcagcgccgtcgtgctccccggagtggaggcggccgagcgcgccggggtgcccgccttcctggagacctccgcgccccgcaacctccccttctacgagcggctcggcttcaccgtcaccgccgacgtcgaggtgcccgaaggaccgcgcacctggtgcatgacccgcaagcccggtgcctga

SEQ ID NO: 9162 - DNA, 1935 bp, Artificial Sequence
  Synthetic Polynucloetide
atggccttaccagtgaccgccttgctcctgccgctggccttgctgctccacgccgccaggccggacatccagatgacacagagccctagcagcgtgtccgcctctgtgggagacagagtgaccatcacctgtagagccagccagagcgtgtccagctacctgaactggtatcagcagaagcccggcaaggcccctaagctgctgatctatgctgccagctctctgcagtctggcgtgcccagcagattttctggcagcggctctggcaccgacttcaccctgaccatatctagcctgcagcctgaggacttcgccacctactactgccagcagagctacagcaccccttggacctttggacagggcaccaagctggaaatcaagagactcgagggacagcctaaggccaatcctaccgtgacactgttccctccaagcagcgaagaactccaggccaacaaggccacacttgtgtgcctgatctccgacttctaccctggggctgtgacagtggcttggaaggccgatggatctcctgtgaaagccggcgtggaaaccaccaagccatccaagcagagcaacaacaaatacgccgccagctcctacctgagcctgacacctgagcagtggaagtcccacagatcctacagctgccaagtgacccacgaaggcagcaccgtggaaaagacagtggcccctacagagtgcagccccatcaagaccgatgtgattacaatggaccccaaggacaactgctccaaggacgccaacgataccctgctgctccagctgaccaacaccagcgcctactacatgtacttgttgctgctgctgaagtccgtggtgtacttcgccatcatcacatgctgcctgctgcggagaaccgccttctgctgcaacggcgagaagtctagggccaagcgatctggatctggagcaacaaacttctcactactcaaacaagcaggtgacgtggaggagaatcccgggcctactagtatggactggatttggcgcatccttttccttgtcggcgctgctaccggcgcgcattccttcgaagaagtgcagctggttgaatcaggtggcggcctggttcagcctggcagaagtctgagactgagctgtgccgccagcggcttcaccttcgacgattacggaatgcactgggtccgacaggcccctggcaaaggacttgaatgggtgtccggcatcagctggaacagcggcagcatcggctatgccgatagcgccaagggcagattcaccatcagccgggacaacagcaagaacaccctgtacctgcagatgaacagcctgagagccgaggacaccgccgtgtactactgtgccaagaggggcaacagcaacagcttcgactattggggccagggcaccctggtcacagtctcttctacgcgtgcctctacaaagggaccctccgtgtttcctctggctcccagcagcaagtctacaagcggaggaacagccgctctgggctgcctggtcaaggattactttcccgagcctgtgaccgtgtcctggaatagcggagcactgacaagcggcgtgcacacctttccagccgtgctgcaaagcagcggcctgtactctctgagcagcgtggtcacagtgcctagctctagcctgggcacccagacctacatctgcaatgtgaaccacaagcctagcaacaccaaggtggacaagagagtggaacccaagagctgtgaagtgaaaaccgactccaccgaccacgtgaagcccaaagagacagagaacaccaagcagcccagcaagagctgccacaagcccaaggccatcgtgcacaccgagaaagtgaacatgatgagcctgaccgtgctgggcctgcggatgctgttcgccaaaaccgtggccgtgaacttcctgctgaccgccaagctgttcttcctc

SEQ ID NO: 9163 - DNA, 1869 bp, Artificial Sequence
  Synthetic Polynucloetide
atggccttaccagtgaccgccttgctcctgccgctggccttgctgctccacgccgccaggccggacatccagatgacacagagccctagcagcgtgtccgcctctgtgggagacagagtgaccatcacctgtagagccagccagagcgtgtccagctacctgaactggtatcagcagaagcccggcaaggcccctaagctgctgatctatgctgccagctctctgcagtctggcgtgcccagcagattttctggcagcggctctggcaccgacttcaccctgaccatatctagcctgcagcctgaggacttcgccacctactactgccagcagagctacagcaccccttggacctttggacagggcaccaagctggaaatcaagagactcgagggacagcctaaggccaatcctaccgtgacactgttccctccaagcagcgaagaactccaggccaacaaggccacacttgtgtgcctgatctccgacttctaccctggggctgtgacagtggcttggaaggccgatggatctcctgtgaaagccggcgtggaaaccaccaagccatccaagcagagcaacaacaaatacgccgccagctcctacctgagcctgacacctgagcagtggaagtcccacagatcctacagctgccaagtgacccacgaaggcagcaccgtggaaaagacagtggcccctacagagtgcagcggcagagccgattgcggcatcaccagcgccagctaccaccagggcgtgctgagcgccaccatcctgtacgagatcctgctgggcaaggccaccctgtacgccgtgctggtgtctgccctggtgctgatggctatggtcaagcggaaggacagccggggaagggccaagcgatctggatctggagcaacaaacttctcactactcaaacaagcaggtgacgtggaggagaatcccgggcctactagtatggactggatttggcgcatccttttccttgtcggcgctgctaccggcgcgcattccttcgaagaagtgcagctggttgaatcaggtggcggcctggttcagcctggcagaagtctgagactgagctgtgccgccagcggcttcaccttcgacgattacggaatgcactgggtccgacaggcccctggcaaaggacttgaatgggtgtccggcatcagctggaacagcggcagcatcggctatgccgatagcgccaagggcagattcaccatcagccgggacaacagcaagaacaccctgtacctgcagatgaacagcctgagagccgaggacaccgccgtgtactactgtgccaagaggggcaacagcaacagcttcgactattggggccagggcaccctggtcacagtctcttctacgcgtgcctctacaaagggaccctccgtgtttcctctggctcccagcagcaagtctacaagcggaggaacagccgctctgggctgcctggtcaaggattactttcccgagcctgtgaccgtgtcctggaatagcggagcactgacaagcggcgtgcacacctttccagccgtgctgcaaagcagcggcctgtactctctgagcagcgtggtcacagtgcctagctctagcctgggcacccagacctacatctgcaatgtgaaccacaagcctagcaacaccaaggtggacaagagagtggaacccaagagctgtatccccgaggacacattcttcccaagcagcgacgtgccctgcgacgtgaagctggtggaaaagagcttcgagacagacaccaacctgaacttccagaacctgagcgtgatcggcttcagaatcctgctgctgaaagtggccggctttaacctgctgatgaccctgcggctgtggtccagc

SEQ ID NO: 9164 - DNA, 1869 bp, Artificial Sequence
  Synthetic Polynucloetide
atggccttaccagtgaccgccttgctcctgccgctggccttgctgctccacgccgccaggccggacatccagatgacacagagccctagcagcgtgtccgcctctgtgggagacagagtgaccatcacctgtagagccagccagagcgtgtccagctacctgaactggtatcagcagaagcccggcaaggcccctaagctgctgatctatgctgccagctctctgcagtctggcgtgcccagcagattttctggcagcggctctggcaccgacttcaccctgaccatatctagcctgcagcctgaggacttcgccacctactactgccagcagagctacagcaccccttggacctttggacagggcaccaagctggaaatcaagagactcgagggacagcctaaggccaatcctaccgtgacactgttccctccaagcagcgaagaactccaggccaacaaggccacacttgtgtgcctgatctccgacttctaccctggggctgtgacagtggcttggaaggccgatggatctcctgtgaaagccggcgtggaaaccaccaagccatccaagcagagcaacaacaaatacgccgccagctcctacctgagcctgacacctgagcagtggaagtcccacagatcctacagctgccaagtgacccacgaaggcagcaccgtggaaaagacagtggcccctacagagtgcagcggcagagccgattgcggctttaccagcgagagctaccagcagggcgtgctgagcgccaccatcctgtacgagatcctgctgggcaaggccaccctgtacgccgtgctggtgtctgccctggtgctgatggctatggtcaagcggaaggacagccggggaagggccaagcgatctggatctggagcaacaaacttctcactactcaaacaagcaggtgacgtggaggagaatcccgggcctactagtatggactggatttggcgcatccttttccttgtcggcgctgctaccggcgcgcattccttcgaagaagtgcagctggttgaatcaggtggcggcctggttcagcctggcagaagtctgagactgagctgtgccgccagcggcttcaccttcgacgattacggaatgcactgggtccgacaggcccctggcaaaggacttgaatgggtgtccggcatcagctggaacagcggcagcatcggctatgccgatagcgccaagggcagattcaccatcagccgggacaacagcaagaacaccctgtacctgcagatgaacagcctgagagccgaggacaccgccgtgtactactgtgccaagaggggcaacagcaacagcttcgactattggggccagggcaccctggtcacagtctcttctacgcgtgcctctacaaagggaccctccgtgtttcctctggctcccagcagcaagtctacaagcggaggaacagccgctctgggctgcctggtcaaggattactttcccgagcctgtgaccgtgtcctggaatagcggagcactgacaagcggcgtgcacacctttccagccgtgctgcaaagcagcggcctgtactctctgagcagcgtggtcacagtgcctagctctagcctgggcacccagacctacatctgcaatgtgaaccacaagcctagcaacaccaaggtggacaagagagtggaacccaagagctgtatccccgaggacacattcttcccaagccccgagagcagctgcgacgtgaagctggtggaaaagagcttcgagacagacaccaacctgaacttccagaacctgagcgtgatcggcttcagaatcctgctgctgaaagtggccggctttaacctgctgatgaccctgcggctgtggtccagc

SEQ ID NO: 9165 - DNA, 1347 bp, Artificial Sequence
  Synthetic Polynucloetide
atggccttaccagtgaccgccttgctcctgccgctggccttgctgctccacgccgccaggccggacatccagatgacacagagccctagcagcgtgtccgcctctgtgggagacagagtgaccatcacctgtagagccagccagagcgtgtccagctacctgaactggtatcagcagaagcccggcaaggcccctaagctgctgatctatgctgccagctctctgcagtctggcgtgcccagcagattttctggcagcggctctggcaccgacttcaccctgaccatatctagcctgcagcctgaggacttcgccacctactactgccagcagagctacagcaccccttggacctttggacagggcaccaagctggaaatcaagagaggcggaggcggaagtggaggcggaggatctggcggcggaggctctgaagtgcagctggttgaatcaggtggcggcctggttcagcctggcagaagtctgagactgagctgtgccgccagcggcttcaccttcgacgattacggaatgcactgggtccgacaggcccctggcaaaggacttgaatgggtgtccggcatcagctggaacagcggcagcatcggctatgccgatagcgccaagggcagattcaccatcagccgggacaacagcaagaacaccctgtacctgcagatgaacagcctgagagccgaggacaccgccgtgtactactgtgccaagaggggcaacagcaacagcttcgactattggggccagggcaccctggtcacagtctcttctacgcgtgacggtaacgaggagatgggaggaatcactcaaaccccttacaaagtctcaatttcaggaacaactgttatccttacatgtccccagtatcctggcagcgagatcctttggcagcataacgacaagaatatagggggagatgaagacgataagaatatcggatctgacgaggatcacttgagcctgaaagagttctccgagcttgaacaaagcggatattatgtgtgctatccgcgcgggtcaaagccggaagacgctaacttttacctttatctccgagccagagtgtgcgaaaattgcatggaaatggacgttatgtccgttgctacaatagttatcgtagatatatgcatcacgggtggactgcttctgctggtttattattggtccaagaatagaaaggccaaagctaaacccgtgaccagaggcgctggcgcaggcggaaggcaaaggggacaaaacaaagaacggccaccaccagtgccaaatccagattatgagcctattcggaaaggacagagggacctgtactctggcctgaatcagagaagaatc

SEQ ID NO: 9166 - DNA, 1242 bp, Artificial Sequence
  Synthetic Polynucloetide
atggccttaccagtgaccgccttgctcctgccgctggccttgctgctccacgccgccaggccggacatccagatgacacagagccctagcagcgtgtccgcctctgtgggagacagagtgaccatcacctgtagagccagccagagcgtgtccagctacctgaactggtatcagcagaagcccggcaaggcccctaagctgctgatctatgctgccagctctctgcagtctggcgtgcccagcagattttctggcagcggctctggcaccgacttcaccctgaccatatctagcctgcagcctgaggacttcgccacctactactgccagcagagctacagcaccccttggacctttggacagggcaccaagctggaaatcaagagaggcggaggcggaagtggaggcggaggatctggcggcggaggctctgaagtgcagctggttgaatcaggtggcggcctggttcagcctggcagaagtctgagactgagctgtgccgccagcggcttcaccttcgacgattacggaatgcactgggtccgacaggcccctggcaaaggacttgaatgggtgtccggcatcagctggaacagcggcagcatcggctatgccgatagcgccaagggcagattcaccatcagccgggacaacagcaagaacaccctgtacctgcagatgaacagcctgagagccgaggacaccgccgtgtactactgtgccaagaggggcaacagcaacagcttcgactattggggccagggcaccctggtcacagtctcttctacgcgtttcaagatccccatcgaggaactggaagatcgggtgttcgtgaactgcaacacctctatcacctgggtggaaggcaccgtgggaacactgctgagcgacatcaccagactggacctcggcaagcggattctggaccctcggggcatctacagatgcaacggcaccgacatctacaaggacaaagaaagcaccgtgcaggtccactacagaatgtgccagtcctgcgtggaactggaccctgctacagtggccggcatcatcgtgaccgatgtgatcgctactctgctgctggctctgggagtgttctgcttcgccggacacgaaacaggcagactgtctggcgctgccgatacacaggccctgctgagaaacgaccaagtgtatcagcccctgcgcgacagagatgatgcccagtattctcacctcggcggcaactgggctagaaacaag

SEQ ID NO: 9167 - DNA, 1272 bp, Artificial Sequence
  Synthetic Polynucloetide
atggccttaccagtgaccgccttgctcctgccgctggccttgctgctccacgccgccaggccggacatccagatgacacagagccctagcagcgtgtccgcctctgtgggagacagagtgaccatcacctgtagagccagccagagcgtgtccagctacctgaactggtatcagcagaagcccggcaaggcccctaagctgctgatctatgctgccagctctctgcagtctggcgtgcccagcagattttctggcagcggctctggcaccgacttcaccctgaccatatctagcctgcagcctgaggacttcgccacctactactgccagcagagctacagcaccccttggacctttggacagggcaccaagctggaaatcaagagaggcggaggcggaagtggaggcggaggatctggcggcggaggctctgaagtgcagctggttgaatcaggtggcggcctggttcagcctggcagaagtctgagactgagctgtgccgccagcggcttcaccttcgacgattacggaatgcactgggtccgacaggcccctggcaaaggacttgaatgggtgtccggcatcagctggaacagcggcagcatcggctatgccgatagcgccaagggcagattcaccatcagccgggacaacagcaagaacaccctgtacctgcagatgaacagcctgagagccgaggacaccgccgtgtactactgtgccaagaggggcaacagcaacagcttcgactattggggccagggcaccctggtcacagtctcttctacgcgtcagagcatcaagggcaaccacctggtcaaggtgtacgactaccaagaggacggcagcgtgctgctgacatgtgatgccgaggccaagaacatcacctggtttaaggacggcaagatgatcggcttcctgaccgaggacaagaagaagtggaacctgggcagcaacgctaaggaccccagaggcatgtatcagtgcaagggcagccagaacaagagcaagcccctccaggtgtactaccggatgtgccagaactgcatcgagctgaacgccgctaccatcagcggctttctgttcgccgagatcgtgtccatcttcgtgctggccgtgggcgtgtactttatcgctggacaggatggcgtgcggcagagcagagcttccgataagcaaaccctgctgcctaacgaccagctgtaccagcctctgaaggacagagaggacgaccagtacagccacctccagggcaatcagctgagaagaaac

SEQ ID NO: 9168 - DNA, 1221 bp, Artificial Sequence
  Synthetic Polynucloetide
atggccttaccagtgaccgccttgctcctgccgctggccttgctgctccacgccgccaggccggacatccagatgacacagagccctagcagcgtgtccgcctctgtgggagacagagtgaccatcacctgtagagccagccagagcgtgtccagctacctgaactggtatcagcagaagcccggcaaggcccctaagctgctgatctatgctgccagctctctgcagtctggcgtgcccagcagattttctggcagcggctctggcaccgacttcaccctgaccatatctagcctgcagcctgaggacttcgccacctactactgccagcagagctacagcaccccttggacctttggacagggcaccaagctggaaatcaagagaggcggaggcggaagtggaggcggaggatctggcggcggaggctctgaagtgcagctggttgaatcaggtggcggcctggttcagcctggcagaagtctgagactgagctgtgccgccagcggcttcaccttcgacgattacggaatgcactgggtccgacaggcccctggcaaaggacttgaatgggtgtccggcatcagctggaacagcggcagcatcggctatgccgatagcgccaagggcagattcaccatcagccgggacaacagcaagaacaccctgtacctgcagatgaacagcctgagagccgaggacaccgccgtgtactactgtgccaagaggggcaacagcaacagcttcgactattggggccagggcaccctggtcacagtctcttctacgcgtcagagttttgggttgttggaccctaaattgtgctatctgttggacggaatcctgttcatttacggagtgatcctgaccgcattgttcctgcgggttaagttttccagatccgcagacgcacccgcttaccaacaagggcagaaccaactctacaatgaacttaatttggggcggagggaagagtacgacgttctggacaaaaggaggggacgagatcccgagatgggcggaaagcctcagcgaaggaagaatccgcaagaggggctttataacgaactccagaaagataaaatggcagaagcctatagtgagattgggatgaagggagaaaggaggaggggtaaaggtcacgatgggttgtaccaaggattgagcacagccactaaagatacctatgatgcgctccacatgcaggccctgccgccaaga

SEQ ID NO: 9169 - DNA, 1347 bp, Artificial Sequence
  Synthetic Polynucloetide
atggccttaccagtgaccgccttgctcctgccgctggccttgctgctccacgccgccaggccggaagtgcagctggttgaatcaggtggcggcctggttcagcctggcagaagtctgagactgagctgtgccgccagcggcttcaccttcgacgattacggaatgcactgggtccgacaggcccctggcaaaggacttgaatgggtgtccggcatcagctggaacagcggcagcatcggctatgccgatagcgccaagggcagattcaccatcagccgggacaacagcaagaacaccctgtacctgcagatgaacagcctgagagccgaggacaccgccgtgtactactgtgccaagaggggcaacagcaacagcttcgactattggggccagggcaccctggtcacagtctcttctggcggaggcggaagtggaggcggaggatctggcggcggaggctctgacatccagatgacacagagccctagcagcgtgtccgcctctgtgggagacagagtgaccatcacctgtagagccagccagagcgtgtccagctacctgaactggtatcagcagaagcccggcaaggcccctaagctgctgatctatgctgccagctctctgcagtctggcgtgcccagcagattttctggcagcggctctggcaccgacttcaccctgaccatatctagcctgcagcctgaggacttcgccacctactactgccagcagagctacagcaccccttggacctttggacagggcaccaagctggaaatcaagagaacgcgtgacggtaacgaggagatgggaggaatcactcaaaccccttacaaagtctcaatttcaggaacaactgttatccttacatgtccccagtatcctggcagcgagatcctttggcagcataacgacaagaatatagggggagatgaagacgataagaatatcggatctgacgaggatcacttgagcctgaaagagttctccgagcttgaacaaagcggatattatgtgtgctatccgcgcgggtcaaagccggaagacgctaacttttacctttatctccgagccagagtgtgcgaaaattgcatggaaatggacgttatgtccgttgctacaatagttatcgtagatatatgcatcacgggtggactgcttctgctggtttattattggtccaagaatagaaaggccaaagctaaacccgtgaccagaggcgctggcgcaggcggaaggcaaaggggacaaaacaaagaacggccaccaccagtgccaaatccagattatgagcctattcggaaaggacagagggacctgtactctggcctgaatcagagaagaatc

SEQ ID NO: 9170 - DNA, 1242 bp, Artificial Sequence
  Synthetic Polynucloetide
atggccttaccagtgaccgccttgctcctgccgctggccttgctgctccacgccgccaggccggaagtgcagctggttgaatcaggtggcggcctggttcagcctggcagaagtctgagactgagctgtgccgccagcggcttcaccttcgacgattacggaatgcactgggtccgacaggcccctggcaaaggacttgaatgggtgtccggcatcagctggaacagcggcagcatcggctatgccgatagcgccaagggcagattcaccatcagccgggacaacagcaagaacaccctgtacctgcagatgaacagcctgagagccgaggacaccgccgtgtactactgtgccaagaggggcaacagcaacagcttcgactattggggccagggcaccctggtcacagtctcttctggcggaggcggaagtggaggcggaggatctggcggcggaggctctgacatccagatgacacagagccctagcagcgtgtccgcctctgtgggagacagagtgaccatcacctgtagagccagccagagcgtgtccagctacctgaactggtatcagcagaagcccggcaaggcccctaagctgctgatctatgctgccagctctctgcagtctggcgtgcccagcagattttctggcagcggctctggcaccgacttcaccctgaccatatctagcctgcagcctgaggacttcgccacctactactgccagcagagctacagcaccccttggacctttggacagggcaccaagctggaaatcaagagaacgcgtttcaagatccccatcgaggaactggaagatcgggtgttcgtgaactgcaacacctctatcacctgggtggaaggcaccgtgggaacactgctgagcgacatcaccagactggacctcggcaagcggattctggaccctcggggcatctacagatgcaacggcaccgacatctacaaggacaaagaaagcaccgtgcaggtccactacagaatgtgccagtcctgcgtggaactggaccctgctacagtggccggcatcatcgtgaccgatgtgatcgctactctgctgctggctctgggagtgttctgcttcgccggacacgaaacaggcagactgtctggcgctgccgatacacaggccctgctgagaaacgaccaagtgtatcagcccctgcgcgacagagatgatgcccagtattctcacctcggcggcaactgggctagaaacaag

SEQ ID NO: 9171 - DNA, 1272 bp, Artificial Sequence
  Synthetic Polynucloetide
atggccttaccagtgaccgccttgctcctgccgctggccttgctgctccacgccgccaggccggaagtgcagctggttgaatcaggtggcggcctggttcagcctggcagaagtctgagactgagctgtgccgccagcggcttcaccttcgacgattacggaatgcactgggtccgacaggcccctggcaaaggacttgaatgggtgtccggcatcagctggaacagcggcagcatcggctatgccgatagcgccaagggcagattcaccatcagccgggacaacagcaagaacaccctgtacctgcagatgaacagcctgagagccgaggacaccgccgtgtactactgtgccaagaggggcaacagcaacagcttcgactattggggccagggcaccctggtcacagtctcttctggcggaggcggaagtggaggcggaggatctggcggcggaggctctgacatccagatgacacagagccctagcagcgtgtccgcctctgtgggagacagagtgaccatcacctgtagagccagccagagcgtgtccagctacctgaactggtatcagcagaagcccggcaaggcccctaagctgctgatctatgctgccagctctctgcagtctggcgtgcccagcagattttctggcagcggctctggcaccgacttcaccctgaccatatctagcctgcagcctgaggacttcgccacctactactgccagcagagctacagcaccccttggacctttggacagggcaccaagctggaaatcaagagaacgcgtcagagcatcaagggcaaccacctggtcaaggtgtacgactaccaagaggacggcagcgtgctgctgacatgtgatgccgaggccaagaacatcacctggtttaaggacggcaagatgatcggcttcctgaccgaggacaagaagaagtggaacctgggcagcaacgctaaggaccccagaggcatgtatcagtgcaagggcagccagaacaagagcaagcccctccaggtgtactaccggatgtgccagaactgcatcgagctgaacgccgctaccatcagcggctttctgttcgccgagatcgtgtccatcttcgtgctggccgtgggcgtgtactttatcgctggacaggatggcgtgcggcagagcagagcttccgataagcaaaccctgctgcctaacgaccagctgtaccagcctctgaaggacagagaggacgaccagtacagccacctccagggcaatcagctgagaagaaac

SEQ ID NO: 9172 - DNA, 1221 bp, Artificial Sequence
  Synthetic Polynucloetide
atggccttaccagtgaccgccttgctcctgccgctggccttgctgctccacgccgccaggccggaagtgcagctggttgaatcaggtggcggcctggttcagcctggcagaagtctgagactgagctgtgccgccagcggcttcaccttcgacgattacggaatgcactgggtccgacaggcccctggcaaaggacttgaatgggtgtccggcatcagctggaacagcggcagcatcggctatgccgatagcgccaagggcagattcaccatcagccgggacaacagcaagaacaccctgtacctgcagatgaacagcctgagagccgaggacaccgccgtgtactactgtgccaagaggggcaacagcaacagcttcgactattggggccagggcaccctggtcacagtctcttctggcggaggcggaagtggaggcggaggatctggcggcggaggctctgacatccagatgacacagagccctagcagcgtgtccgcctctgtgggagacagagtgaccatcacctgtagagccagccagagcgtgtccagctacctgaactggtatcagcagaagcccggcaaggcccctaagctgctgatctatgctgccagctctctgcagtctggcgtgcccagcagattttctggcagcggctctggcaccgacttcaccctgaccatatctagcctgcagcctgaggacttcgccacctactactgccagcagagctacagcaccccttggacctttggacagggcaccaagctggaaatcaagagaacgcgtcagagttttgggttgttggaccctaaattgtgctatctgttggacggaatcctgttcatttacggagtgatcctgaccgcattgttcctgcgggttaagttttccagatccgcagacgcacccgcttaccaacaagggcagaaccaactctacaatgaacttaatttggggcggagggaagagtacgacgttctggacaaaaggaggggacgagatcccgagatgggcggaaagcctcagcgaaggaagaatccgcaagaggggctttataacgaactccagaaagataaaatggcagaagcctatagtgagattgggatgaagggagaaaggaggaggggtaaaggtcacgatgggttgtaccaaggattgagcacagccactaaagatacctatgatgcgctccacatgcaggccctgccgccaaga

SEQ ID NO: 9173 - DNA, 1923 bp, Artificial Sequence
  Synthetic Polynucloetide
atggccttaccagtgaccgccttgctcctgccgctggccttgctgctccacgccgccaggccggacatccagatgacacagagccctagcagcgtgtccgcctctgtgggagacagagtgaccatcacctgtagagccagccagagcgtgtccagctacctgaactggtatcagcagaagcccggcaaggcccctaagctgctgatctatgctgccagctctctgcagtctggcgtgcccagcagattttctggcagcggctctggcaccgacttcaccctgaccatatctagcctgcagcctgaggacttcgccacctactactgccagcagagctacagcaccccttggacctttggacagggcaccaagctggaaatcaagagaggcggaggcggaagtggaggcggaggatctggcggcggaggctctgaagtgcagctggttgaatcaggtggcggcctggttcagcctggcagaagtctgagactgagctgtgccgccagcggcttcaccttcgacgattacggaatgcactgggtccgacaggcccctggcaaaggacttgaatgggtgtccggcatcagctggaacagcggcagcatcggctatgccgatagcgccaagggcagattcaccatcagccgggacaacagcaagaacaccctgtacctgcagatgaacagcctgagagccgaggacaccgccgtgtactactgtgccaagaggggcaacagcaacagcttcgactattggggccagggcaccctggtcacagtctcttctacgcgtgggagcggcatccagaaccctgatcctgccgtgtaccagctgcgggatagcaagagcagcgacaagagcgtgtgtctgttcaccgacttcgacagccagaccaacgtgtcccagagcaaggactccgacgtgtacatcaccgataagaccgtgctggacatgcggagcatggacttcaagagcaactccgccgtggcctggtccaacaagtccgatttcgcctgcgccaacgccttcaacaacagcattatccccgaggacacattcttcccaagccccgagagcagctgcgacgtgaagctggtggaaaagagcttcgagacagacaccaacctgaacttccagaacctgagcgtgatcggcttcagaatcctgctgctgaaagtggccggctttaacctgctgatgaccctgcggctgtggtccagccgcgccaagagaagcggatctggcgtgaagcagaccctgaatttcgacctgctgaagctggctggcgacgtggaatccaacccaggcccttctagaggccatatgaccgagtacaagcccacggtgcgcctcgccacccgcgacgacgtccccagggccgtacgcaccctcgccgccgcgttcgccgactaccccgccacgcgccacaccgtcgatccggaccgccacatcgagcgggtcaccgagctgcaagaactcttcctcacgcgcgtcgggctcgacatcggcaaggtgtgggtcgcggacgacggcgccgcggtggcggtctggaccacgccggagagcgtcgaagcgggggcggtgttcgccgagatcggcccgcgcatggccgagttgagcggttcccggctggccgcgcagcaacagatggaaggcctcctggcgccgcaccggcccaaggagcccgcgtggttcctggccaccgtcggcgtctcgcccgaccaccagggcaagggtctgggcagcgccgtcgtgctccccggagtggaggcggccgagcgcgccggggtgcccgccttcctggagacctccgcgccccgcaacctccccttctacgagcggctcggcttcaccgtcaccgccgacgtcgaggtgcccgaaggaccgcgcacctggtgcatgacccgcaagcccggtgcctga

SEQ ID NO: 9174 - DNA, 2019 bp, Artificial Sequence
  Synthetic Polynucloetide
atggccttaccagtgaccgccttgctcctgccgctggccttgctgctccacgccgccaggccggacatccagatgacacagagccctagcagcgtgtccgcctctgtgggagacagagtgaccatcacctgtagagccagccagagcgtgtccagctacctgaactggtatcagcagaagcccggcaaggcccctaagctgctgatctatgctgccagctctctgcagtctggcgtgcccagcagattttctggcagcggctctggcaccgacttcaccctgaccatatctagcctgcagcctgaggacttcgccacctactactgccagcagagctacagcaccccttggacctttggacagggcaccaagctggaaatcaagagaggcggaggcggaagtggaggcggaggatctggcggcggaggctctgaagtgcagctggttgaatcaggtggcggcctggttcagcctggcagaagtctgagactgagctgtgccgccagcggcttcaccttcgacgattacggaatgcactgggtccgacaggcccctggcaaaggacttgaatgggtgtccggcatcagctggaacagcggcagcatcggctatgccgatagcgccaagggcagattcaccatcagccgggacaacagcaagaacaccctgtacctgcagatgaacagcctgagagccgaggacaccgccgtgtactactgtgccaagaggggcaacagcaacagcttcgactattggggccagggcaccctggtcacagtctcttctctcgaggacctgaagaacgtgttcccacctgaggtggccgtgttcgagcctagcgaggccgagatcagccacacccagaaagccaccctcgtgtgcctggctaccggcttctaccccgaccatgtggaactgtcttggtgggtcaacggcaaagaggtgcacagcggcgtgtctaccgacccccagccactgaaagaacagcccgccctgaacgacagccggtactgcctgagcagcagactgagagtgtccgccaccttctggcagaacccccggaaccacttcagatgccaggtgcagttctacggcctgagcgagaacgacgagtggacccaggacagagccaagcccgtgacccagatcgtgtctgccgaagcctggggcagagccgattgcggctttaccagcgagagctaccagcagggcgtgctgagcgccaccatcctgtacgagatcctgctgggcaaggccaccctgtacgccgtgctggtgtctgccctggtgctgatggctatggtcaagcggaaggacagccggggaagggccaagcgatctggatctggagcaacaaacttctcactactcaaacaagcaggtgacgtggaggagaatcccgggcctactagaggccatatgaccgagtacaagcccacggtgcgcctcgccacccgcgacgacgtccccagggccgtacgcaccctcgccgccgcgttcgccgactaccccgccacgcgccacaccgtcgatccggaccgccacatcgagcgggtcaccgagctgcaagaactcttcctcacgcgcgtcgggctcgacatcggcaaggtgtgggtcgcggacgacggcgccgcggtggcggtctggaccacgccggagagcgtcgaagcgggggcggtgttcgccgagatcggcccgcgcatggccgagttgagcggttcccggctggccgcgcagcaacagatggaaggcctcctggcgccgcaccggcccaaggagcccgcgtggttcctggccaccgtcggcgtctcgcccgaccaccagggcaagggtctgggcagcgccgtcgtgctccccggagtggaggcggccgagcgcgccggggtgcccgccttcctggagacctccgcgccccgcaacctccccttctacgagcggctcggcttcaccgtcaccgccgacgtcgaggtgcccgaaggaccgcgcacctggtgcatgacccgcaagcccggtgcctga

SEQ ID NO: 9175 - DNA, 2169 bp, Artificial Sequence
  Synthetic Polynucloetide
atggccttaccagtgaccgccttgctcctgccgctggccttgctgctccacgccgccaggccggacatccagatgacacagagccctagcagcgtgtccgcctctgtgggagacagagtgaccatcacctgtagagccagccagagcgtgtccagctacctgaactggtatcagcagaagcccggcaaggcccctaagctgctgatctatgctgccagctctctgcagtctggcgtgcccagcagattttctggcagcggctctggcaccgacttcaccctgaccatatctagcctgcagcctgaggacttcgccacctactactgccagcagagctacagcaccccttggacctttggacagggcaccaagctggaaatcaagagaggcggaggcggaagtggaggcggaggatctggcggcggaggctctgaagtgcagctggttgaatcaggtggcggcctggttcagcctggcagaagtctgagactgagctgtgccgccagcggcttcaccttcgacgattacggaatgcactgggtccgacaggcccctggcaaaggacttgaatgggtgtccggcatcagctggaacagcggcagcatcggctatgccgatagcgccaagggcagattcaccatcagccgggacaacagcaagaacaccctgtacctgcagatgaacagcctgagagccgaggacaccgccgtgtactactgtgccaagaggggcaacagcaacagcttcgactattggggccagggcaccctggtcacagtctcttctacgcgtgagcagaaactgatctcggaagaggatctggggagcggcaccccattcccttctctggcccctcccatcatgctgctggtggacggcaagcagcagatggtggtcgtgtgcctggtgctggatgtggccccacctggactggacagccccatctggtttagcgccggcaatggctctgccctggacgcctttacctacggcccaagccctgccaccgatggcacctggacaaatctggcccacctgagcctgcccagcgaggaactggcttcttgggagcctctcgtgtgccacacaggacctggcgctgagggacacagcagatccacccagcctatgcacctgtctggcgaggccagcaccgccagaacctgtcctcaggaacctctgagaggcacccctggcggagcactgtggctgggagtgctgagactgctgctgttcaagctgctgctgtttgacctgctgctgacctgctcctgtctgtgcgatcctgccggccctctgccttctcctgccaccaccacaagactgagagccctgggcagccacagactgcaccctgccacagagacaggcggcagagaggccacaagcagccctagaccccagcccagagacagaagatggggcgataccccccctggcagaaagcctggatctccagtccgcgccaagagaagcggatctggcgtgaagcagaccctgaatttcgacctgctgaagctggctggcgacgtggaatccaacccaggcccttctagatctagaggccatatgaccgagtacaagcccacggtgcgcctcgccacccgcgacgacgtccccagggccgtacgcaccctcgccgccgcgttcgccgactaccccgccacgcgccacaccgtcgatccggaccgccacatcgagcgggtcaccgagctgcaagaactcttcctcacgcgcgtcgggctcgacatcggcaaggtgtgggtcgcggacgacggcgccgcggtggcggtctggaccacgccggagagcgtcgaagcgggggcggtgttcgccgagatcggcccgcgcatggccgagttgagcggttcccggctggccgcgcagcaacagatggaaggcctcctggcgccgcaccggcccaaggagcccgcgtggttcctggccaccgtcggcgtctcgcccgaccaccagggcaagggtctgggcagcgccgtcgtgctccccggagtggaggcggccgagcgcgccggggtgcccgccttcctggagacctccgcgccccgcaacctccccttctacgagcggctcggcttcaccgtcaccgccgacgtcgaggtgcccgaaggaccgcgcacctggtgcatgacccgcaagcccggtgcctga

SEQ ID NO: 9176 - DNA, 1620 bp, Artificial Sequence
  Synthetic Polynucloetide
atggccttaccagtgaccgccttgctcctgccgctggccttgctgctccacgccgccaggccggacatccagatgacacagagccctagcagcgtgtccgcctctgtgggagacagagtgaccatcacctgtagagccagccagagcgtgtccagctacctgaactggtatcagcagaagcccggcaaggcccctaagctgctgatctatgctgccagctctctgcagtctggcgtgcccagcagattttctggcagcggctctggcaccgacttcaccctgaccatatctagcctgcagcctgaggacttcgccacctactactgccagcagagctacagcaccccttggacctttggacagggcaccaagctggaaatcaagagactcgaggacctgaagaacgtgttcccacctgaggtggccgtgttcgagcctagcgaggccgagatcagccacacccagaaagccaccctcgtgtgcctggctaccggcttctaccccgaccatgtggaactgtcttggtgggtcaacggcaaagaggtgcacagcggcgtgtctaccgacccccagccactgaaagaacagcccgccctgaacgacagccggtactgcctgagcagcagactgagagtgtccgccaccttctggcagaacccccggaaccacttcagatgccaggtgcagttctacggcctgagcgagaacgacgagtggacccaggacagagccaagcccgtgacccagatcgtgtctgccgaagcctggggcagagccgattgcggctttaccagcgagagctaccagcagggcgtgctgagcgccaccatcctgtacgagatcctgctgggcaaggccaccctgtacgccgtgctggtgtctgccctggtgctgatggctatggtcaagcggaaggacagccggggaagggccaagcgatctggatctggagcaacaaacttctcactactcaaacaagcaggtgacgtggaggagaatcccgggcctactagaggccatatgaccgagtacaagcccacggtgcgcctcgccacccgcgacgacgtccccagggccgtacgcaccctcgccgccgcgttcgccgactaccccgccacgcgccacaccgtcgatccggaccgccacatcgagcgggtcaccgagctgcaagaactcttcctcacgcgcgtcgggctcgacatcggcaaggtgtgggtcgcggacgacggcgccgcggtggcggtctggaccacgccggagagcgtcgaagcgggggcggtgttcgccgagatcggcccgcgcatggccgagttgagcggttcccggctggccgcgcagcaacagatggaaggcctcctggcgccgcaccggcccaaggagcccgcgtggttcctggccaccgtcggcgtctcgcccgaccaccagggcaagggtctgggcagcgccgtcgtgctccccggagtggaggcggccgagcgcgccggggtgcccgccttcctggagacctccgcgccccgcaacctccccttctacgagcggctcggcttcaccgtcaccgccgacgtcgaggtgcccgaaggaccgcgcacctggtgcatgacccgcaagcccggtgcctga

SEQ ID NO: 9177 - DNA, 927 bp, Artificial Sequence
  Synthetic Polynucloetide
atggccttaccagtgaccgccttgctcctgccgctggccttgctgctccacgccgccaggccggacatccagatgacacagagccctagcagcgtgtccgcctctgtgggagacagagtgaccatcacctgtagagccagccagagcgtgtccagctacctgaactggtatcagcagaagcccggcaaggcccctaagctgctgatctatgctgccagctctctgcagtctggcgtgcccagcagattttctggcagcggctctggcaccgacttcaccctgaccatatctagcctgcagcctgaggacttcgccacctactactgccagcagagctacagcaccccttggacctttggacagggcaccaagctggaaatcaagagactcgaggacctgaagaacgtgttcccacctgaggtggccgtgttcgagcctagcgaggccgagatcagccacacccagaaagccaccctcgtgtgcctggctaccggcttctaccccgaccatgtggaactgtcttggtgggtcaacggcaaagaggtgcacagcggcgtgtctaccgacccccagccactgaaagaacagcccgccctgaacgacagccggtactgcctgagcagcagactgagagtgtccgccaccttctggcagaacccccggaaccacttcagatgccaggtgcagttctacggcctgagcgagaacgacgagtggacccaggacagagccaagcccgtgacccagatcgtgtctgccgaagcctggggcagagccgattgcggctttaccagcgagagctaccagcagggcgtgctgagcgccaccatcctgtacgagatcctgctgggcaaggccaccctgtacgccgtgctggtgtctgccctggtgctgatggctatggtcaagcggaaggacagccgggga

SEQ ID NO: 9178 - DNA, 1344 bp, Artificial Sequence
  Synthetic Polynucloetide
atggactggatttggcgcatccttttccttgtcggcgctgctaccggcgcgcattccttcgaagaagtgcagctggttgaatcaggtggcggcctggttcagcctggcagaagtctgagactgagctgtgccgccagcggcttcaccttcgacgattacggaatgcactgggtccgacaggcccctggcaaaggacttgaatgggtgtccggcatcagctggaacagcggcagcatcggctatgccgatagcgccaagggcagattcaccatcagccgggacaacagcaagaacaccctgtacctgcagatgaacagcctgagagccgaggacaccgccgtgtactactgtgccaagaggggcaacagcaacagcttcgactattggggccagggcaccctggtcacagtctcttctacgcgtatccagaaccctgatcctgccgtgtaccagctgcgggatagcaagagcagcgacaagagcgtgtgtctgttcaccgacttcgacagccagaccaacgtgtcccagagcaaggactccgacgtgtacatcaccgataagaccgtgctggacatgcggagcatggacttcaagagcaactccgccgtggcctggtccaacaagtccgatttcgcctgcgccaacgccttcaacaacagcattatccccgaggacacattcttcccaagccccgagagcagctgcgacgtgaagctggtggaaaagagcttcgagacagacaccaacctgaacttccagaacctgagcgtgatcggcttcagaatcctgctgctgaaagtggccggctttaacctgctgatgaccctgcggctgtggtccagccgcgccaagagaagcggatctggcgtgaagcagaccctgaatttcgacctgctgaagctggctggcgacgtggaatccaacccaggcccttctagaggccatatggccaagcctttgtctcaagaagaatccaccctcattgaaagagcaacggctacaatcaacagcatccccatctctgaagactacagcgtcgccagcgcagctctctctagcgacggccgcatcttcactggtgtcaatgtatatcattttactgggggaccttgtgcagaactcgtggtgctgggcactgctgctgctgcggcagctggcaacctgacttgtatcgtcgcgatcggaaatgagaacaggggcatcttgagcccctgcggacggtgccgacaggtgcttctcgatctgcatcctgggatcaaagccatagtgaaggacagtgatggacagccgacggcagttgggattcgtgaattgctgccctctggttatgtgtgggagggctga

SEQ ID NO: 9179 - DNA, 843 bp, Artificial Sequence
  Synthetic Polynucloetide
atggactggatttggcgcatccttttccttgtcggcgctgctaccggcgcgcattccttcgaagaagtgcagctggttgaatcaggtggcggcctggttcagcctggcagaagtctgagactgagctgtgccgccagcggcttcaccttcgacgattacggaatgcactgggtccgacaggcccctggcaaaggacttgaatgggtgtccggcatcagctggaacagcggcagcatcggctatgccgatagcgccaagggcagattcaccatcagccgggacaacagcaagaacaccctgtacctgcagatgaacagcctgagagccgaggacaccgccgtgtactactgtgccaagaggggcaacagcaacagcttcgactattggggccagggcaccctggtcacagtctcttctacgcgtatccagaaccctgatcctgccgtgtaccagctgcgggatagcaagagcagcgacaagagcgtgtgtctgttcaccgacttcgacagccagaccaacgtgtcccagagcaaggactccgacgtgtacatcaccgataagaccgtgctggacatgcggagcatggacttcaagagcaactccgccgtggcctggtccaacaagtccgatttcgcctgcgccaacgccttcaacaacagcattatccccgaggacacattcttcccaagccccgagagcagctgcgacgtgaagctggtggaaaagagcttcgagacagacaccaacctgaacttccagaacctgagcgtgatcggcttcagaatcctgctgctgaaagtggccggctttaacctgctgatgaccctgcggctgtggtccagc

SEQ ID NO: 9180 - DNA, 1674 bp, Artificial Sequence
  Synthetic Polynucloetide
atggccttaccagtgaccgccttgctcctgccgctggccttgctgctccacgccgccaggccggacatccagatgacacagagccctagcagcgtgtccgcctctgtgggagacagagtgaccatcacctgtagagccagccagagcgtgtccagctacctgaactggtatcagcagaagcccggcaaggcccctaagctgctgatctatgctgccagctctctgcagtctggcgtgcccagcagattttctggcagcggctctggcaccgacttcaccctgaccatatctagcctgcagcctgaggacttcgccacctactactgccagcagagctacagcaccccttggacctttggacagggcaccaagctggaaatcaagagactcgaggggaaaccaattcccaaccctcttctgggactggattcaaccggcagcggcgaggacctgaagaacgtgttcccacctgaggtggccgtgttcgagcctagcgaggccgagatcagccacacccagaaagccaccctcgtgtgcctggctaccggcttctaccccgaccatgtggaactgtcttggtgggtcaacggcaaagaggtgcacagcggcgtgtgtaccgacccccagccactgaaagaacagcccgccctgaacgacagccggtactgcctgagcagcagactgagagtgtccgccaccttctggcagaacccccggaaccacttcagatgccaggtgcagttctacggcctgagcgagaacgacgagtggacccaggacagagccaagcccgtgacccagatcgtgtctgccgaagcctggggcagagccgattgcggctttaccagcgagagctaccagcagggcgtgctgagcgccaccatcctgtacgagatcctgctgggcaaggccaccctgtacgccgtgctggtgtctgccctggtgctgatggctatggtcaagcggaaggacagccggggaagggccaagcgatctggatctggagcaacaaacttctcactactcaaacaagcaggtgacgtggaggagaatcccgggcctactagaggccatatgaccgagtacaagcccacggtgcgcctcgccacccgcgacgacgtccccagggccgtacgcaccctcgccgccgcgttcgccgactaccccgccacgcgccacaccgtcgatccggaccgccacatcgagcgggtcaccgagctgcaagaactcttcctcacgcgcgtcgggctcgacatcggcaaggtgtgggtcgcggacgacggcgccgcggtggcggtctggaccacgccggagagcgtcgaagcgggggcggtgttcgccgagatcggcccgcgcatggccgagttgagcggttcccggctggccgcgcagcaacagatggaaggcctcctggcgccgcaccggcccaaggagcccgcgtggttcctggccaccgtcggcgtctcgcccgaccaccagggcaagggtctgggcagcgccgtcgtgctccccggagtggaggcggccgagcgcgccggggtgcccgccttcctggagacctccgcgccccgcaacctccccttctacgagcggctcggcttcaccgtcaccgccgacgtcgaggtgcccgaaggaccgcgcacctggtgcatgacccgcaagcccggtgcctga

SEQ ID NO: 9181 - DNA, 984 bp, Artificial Sequence
  Synthetic Polynucloetide
atggccttaccagtgaccgccttgctcctgccgctggccttgctgctccacgccgccaggccggacatccagatgacacagagccctagcagcgtgtccgcctctgtgggagacagagtgaccatcacctgtagagccagccagagcgtgtccagctacctgaactggtatcagcagaagcccggcaaggcccctaagctgctgatctatgctgccagctctctgcagtctggcgtgcccagcagattttctggcagcggctctggcaccgacttcaccctgaccatatctagcctgcagcctgaggacttcgccacctactactgccagcagagctacagcaccccttggacctttggacagggcaccaagctggaaatcaagagactcgaggggaaaccaattcccaaccctcttctgggactggattcaaccggcagcggcgaggacctgaagaacgtgttcccacctgaggtggccgtgttcgagcctagcgaggccgagatcagccacacccagaaagccaccctcgtgtgcctggctaccggcttctaccccgaccatgtggaactgtcttggtgggtcaacggcaaagaggtgcacagcggcgtgtgtaccgacccccagccactgaaagaacagcccgccctgaacgacagccggtactgcctgagcagcagactgagagtgtccgccaccttctggcagaacccccggaaccacttcagatgccaggtgcagttctacggcctgagcgagaacgacgagtggacccaggacagagccaagcccgtgacccagatcgtgtctgccgaagcctggggcagagccgattgcggctttaccagcgagagctaccagcagggcgtgctgagcgccaccatcctgtacgagatcctgctgggcaaggccaccctgtacgccgtgctggtgtctgccctggtgctgatggctatggtcaagcggaaggacagccggggatga

SEQ ID NO: 9182 - DNA, 1380 bp, Artificial Sequence
  Synthetic Polynucloetide
atggactggatttggcgcatccttttccttgtcggcgctgctaccggcgcgcattccttcgaagaagtgcagctggttgaatcaggtggcggcctggttcagcctggcagaagtctgagactgagctgtgccgccagcggcttcaccttcgacgattacggaatgcactgggtccgacaggcccctggcaaaggacttgaatgggtgtccggcatcagctggaacagcggcagcatcggctatgccgatagcgccaagggcagattcaccatcagccgggacaacagcaagaacaccctgtacctgcagatgaacagcctgagagccgaggacaccgccgtgtactactgtgccaagaggggcaacagcaacagcttcgactattggggccagggcaccctggtcacagtctcttctacgcgtgagcagaaactgatctcggaagaggatgggagcggcatccagaaccctgatcctgccgtgtaccagctgcgggatagcaagagcagcgacaagagcgtgtgtctgttcaccgacttcgacagccagaccaacgtgtcccagagcaaggactccgacgtgtacatcaccgataagtgcgtgctggacatgcggagcatggacttcaagagcaactccgccgtggcctggtccaacaagtccgatttcgcctgcgccaacgccttcaacaacagcattatccccgaggacacattcttcccaagccccgagagcagctgcgacgtgaagctggtggaaaagagcttcgagacagacaccaacctgaacttccagaacctgagcgtgatcggcttcagaatcctgctgctgaaagtggccggctttaacctgctgatgaccctgcggctgtggtccagccgcgccaagagaagcggatctggcgtgaagcagaccctgaatttcgacctgctgaagctggctggcgacgtggaatccaacccaggcccttctagaggccatatggccaagcctttgtctcaagaagaatccaccctcattgaaagagcaacggctacaatcaacagcatccccatctctgaagactacagcgtcgccagcgcagctctctctagcgacggccgcatcttcactggtgtcaatgtatatcattttactgggggaccttgtgcagaactcgtggtgctgggcactgctgctgctgcggcagctggcaacctgacttgtatcgtcgcgatcggaaatgagaacaggggcatcttgagcccctgcggacggtgccgacaggtgcttctcgatctgcatcctgggatcaaagccatagtgaaggacagtgatggacagccgacggcagttgggattcgtgaattgctgccctctggttatgtgtgggagggctga

SEQ ID NO: 9183 - DNA, 882 bp, Artificial Sequence
  Synthetic Polynucloetide
atggactggatttggcgcatccttttccttgtcggcgctgctaccggcgcgcattccttcgaagaagtgcagctggttgaatcaggtggcggcctggttcagcctggcagaagtctgagactgagctgtgccgccagcggcttcaccttcgacgattacggaatgcactgggtccgacaggcccctggcaaaggacttgaatgggtgtccggcatcagctggaacagcggcagcatcggctatgccgatagcgccaagggcagattcaccatcagccgggacaacagcaagaacaccctgtacctgcagatgaacagcctgagagccgaggacaccgccgtgtactactgtgccaagaggggcaacagcaacagcttcgactattggggccagggcaccctggtcacagtctcttctacgcgtgagcagaaactgatctcggaagaggatgggagcggcatccagaaccctgatcctgccgtgtaccagctgcgggatagcaagagcagcgacaagagcgtgtgtctgttcaccgacttcgacagccagaccaacgtgtcccagagcaaggactccgacgtgtacatcaccgataagtgcgtgctggacatgcggagcatggacttcaagagcaactccgccgtggcctggtccaacaagtccgatttcgcctgcgccaacgccttcaacaacagcattatccccgaggacacattcttcccaagccccgagagcagctgcgacgtgaagctggtggaaaagagcttcgagacagacaccaacctgaacttccagaacctgagcgtgatcggcttcagaatcctgctgctgaaagtggccggctttaacctgctgatgaccctgcggctgtggtccagctga

SEQ ID NO: 9184 - DNA, 1923 bp, Artificial Sequence
  Synthetic Polynucloetide
atggccttaccagtgaccgccttgctcctgccgctggccttgctgctccacgccgccaggccggacatccagatgacacagagccctagcagcgtgtccgcctctgtgggagacagagtgaccatcacctgtagagccagccagagcgtgtccagctacctgaactggtatcagcagaagcccggcaaggcccctaagctgctgatctatgctgccagctctctgcagtctggcgtgcccagcagattttctggcagcggctctggcaccgacttcaccctgaccatatctagcctgcagcctgaggacttcgccacctactactgccagcagagctacagcaccccttggacctttggacagggcaccaagctggaaatcaagagaggcggaggcggaagtggaggcggaggatctggcggcggaggctctgaagtgcagctggttgaatcaggtggcggcctggttcagcctggcagaagtctgagactgagctgtgccgccagcggcttcaccttcgacgattacggaatgcactgggtccgacaggcccctggcaaaggacttgaatgggtgtccggcatcagctggaacagcggcagcatcggctatgccgatagcgccaagggcagattcaccatcagccgggacaacagcaagaacaccctgtacctgcagatgaacagcctgagagccgaggacaccgccgtgtactactgtgccaagaggggcaacagcaacagcttcgactattggggccagggcaccctggtcacagtctcttctacgcgtgggagcggcatccagaaccctgatcctgccgtgtaccagctgcgggatagcaagagcagcgacaagagcgtgtgtctgttcaccgacttcgacagccagaccaacgtgtcccagagcaaggactccgacgtgtacatcaccgataagaccgtgctggacatgcggagcatggacttcaagagcaactccgccgtggcctggtccaacaagtccgatttcgcctgcgccaacgccttcaacaacagcattatccccgaggacacattcttcccaagcagcgacgtgccctgcgacgtgaagctggtggaaaagagcttcgagacagacaccaacctgaacttccagaacctgagcgtgatcggcttcagaatcctgctgctgaaagtggccggctttaacctgctgatgaccctgcggctgtggtccagccgcgccaagagaagcggatctggcgtgaagcagaccctgaatttcgacctgctgaagctggctggcgacgtggaatccaacccaggcccttctagaggccatatgaccgagtacaagcccacggtgcgcctcgccacccgcgacgacgtccccagggccgtacgcaccctcgccgccgcgttcgccgactaccccgccacgcgccacaccgtcgatccggaccgccacatcgagcgggtcaccgagctgcaagaactcttcctcacgcgcgtcgggctcgacatcggcaaggtgtgggtcgcggacgacggcgccgcggtggcggtctggaccacgccggagagcgtcgaagcgggggcggtgttcgccgagatcggcccgcgcatggccgagttgagcggttcccggctggccgcgcagcaacagatggaaggcctcctggcgccgcaccggcccaaggagcccgcgtggttcctggccaccgtcggcgtctcgcccgaccaccagggcaagggtctgggcagcgccgtcgtgctccccggagtggaggcggccgagcgcgccggggtgcccgccttcctggagacctccgcgccccgcaacctccccttctacgagcggctcggcttcaccgtcaccgccgacgtcgaggtgcccgaaggaccgcgcacctggtgcatgacccgcaagcccggtgcctga

SEQ ID NO: 9185 - DNA, 2019 bp, Artificial Sequence
  Synthetic Polynucloetide
atggccttaccagtgaccgccttgctcctgccgctggccttgctgctccacgccgccaggccggacatccagatgacacagagccctagcagcgtgtccgcctctgtgggagacagagtgaccatcacctgtagagccagccagagcgtgtccagctacctgaactggtatcagcagaagcccggcaaggcccctaagctgctgatctatgctgccagctctctgcagtctggcgtgcccagcagattttctggcagcggctctggcaccgacttcaccctgaccatatctagcctgcagcctgaggacttcgccacctactactgccagcagagctacagcaccccttggacctttggacagggcaccaagctggaaatcaagagaggcggaggcggaagtggaggcggaggatctggcggcggaggctctgaagtgcagctggttgaatcaggtggcggcctggttcagcctggcagaagtctgagactgagctgtgccgccagcggcttcaccttcgacgattacggaatgcactgggtccgacaggcccctggcaaaggacttgaatgggtgtccggcatcagctggaacagcggcagcatcggctatgccgatagcgccaagggcagattcaccatcagccgggacaacagcaagaacaccctgtacctgcagatgaacagcctgagagccgaggacaccgccgtgtactactgtgccaagaggggcaacagcaacagcttcgactattggggccagggcaccctggtcacagtctcttctctcgaggacctgaagaacgtgttcccacctgaggtggccgtgttcgagcctagcaaggccgagatcgcccacacccagaaagccaccctcgtgtgcctggctaccggcttctaccccgaccatgtggaactgtcttggtgggtcaacggcaaagaggtgcacagcggcgtgtctaccgacccccagccactgaaagaacagcccgccctgaacgacagccggtactgcctgagcagcagactgagagtgtccgccaccttctggcagaacccccggaaccacttcagatgccaggtgcagttctacggcctgagcgagaacgacgagtggacccaggacagagccaagcccgtgacccagatcgtgtctgccgaagcctggggcagagccgattgcggcatcaccagcgccagctaccaccagggcgtgctgagcgccaccatcctgtacgagatcctgctgggcaaggccaccctgtacgccgtgctggtgtctgccctggtgctgatggctatggtcaagcggaaggacagccggggaagggccaagcgatctggatctggagcaacaaacttctcactactcaaacaagcaggtgacgtggaggagaatcccgggcctactagaggccatatgaccgagtacaagcccacggtgcgcctcgccacccgcgacgacgtccccagggccgtacgcaccctcgccgccgcgttcgccgactaccccgccacgcgccacaccgtcgatccggaccgccacatcgagcgggtcaccgagctgcaagaactcttcctcacgcgcgtcgggctcgacatcggcaaggtgtgggtcgcggacgacggcgccgcggtggcggtctggaccacgccggagagcgtcgaagcgggggcggtgttcgccgagatcggcccgcgcatggccgagttgagcggttcccggctggccgcgcagcaacagatggaaggcctcctggcgccgcaccggcccaaggagcccgcgtggttcctggccaccgtcggcgtctcgcccgaccaccagggcaagggtctgggcagcgccgtcgtgctccccggagtggaggcggccgagcgcgccggggtgcccgccttcctggagacctccgcgccccgcaacctccccttctacgagcggctcggcttcaccgtcaccgccgacgtcgaggtgcccgaaggaccgcgcacctggtgcatgacccgcaagcccggtgcctga

SEQ ID NO: 9186 - DNA, 2088 bp, Artificial Sequence
  Synthetic Polynucloetide
atggccttaccagtgaccgccttgctcctgccgctggccttgctgctccacgccgccaggccggacatccagatgacacagagccctagcagcgtgtccgcctctgtgggagacagagtgaccatcacctgtagagccagccagagcgtgtccagctacctgaactggtatcagcagaagcccggcaaggcccctaagctgctgatctatgctgccagctctctgcagtctggcgtgcccagcagattttctggcagcggctctggcaccgacttcaccctgaccatatctagcctgcagcctgaggacttcgccacctactactgccagcagagctacagcaccccttggacctttggacagggcaccaagctggaaatcaagagaggcggaggcggaagtggaggcggaggatctggcggcggaggctctgaagtgcagctggttgaatcaggtggcggcctggttcagcctggcagaagtctgagactgagctgtgccgccagcggcttcaccttcgacgattacggaatgcactgggtccgacaggcccctggcaaaggacttgaatgggtgtccggcatcagctggaacagcggcagcatcggctatgccgatagcgccaagggcagattcaccatcagccgggacaacagcaagaacaccctgtacctgcagatgaacagcctgagagccgaggacaccgccgtgtactactgtgccaagaggggcaacagcaacagcttcgactattggggccagggcaccctggtcacagtctcttctacgcgtgggtctggaggcggaggcagcggcggaggcgggagcggcgacggtaacgaggagatgggaggaatcactcaaaccccttacaaagtctcaatttcaggaacaactgttatccttacatgtccccagtatcctggcagcgagatcctttggcagcataacgacaagaatatagggggagatgaagacgataagaatatcggatctgacgaggatcacttgagcctgaaagagttctccgagcttgaacaaagcggatattatgtgtgctatccgcgcgggtcaaagccggaagacgctaacttttacctttatctccgagccagagtgtgcgaaaattgcatggaaatggacgttatgtccgttgctacaatagttatcgtagatatatgcatcacgggtggactgcttctgctggtttattattggtccaagaatagaaaggccaaagctaaacccgtgaccagaggcgctggcgcaggcggaaggcaaaggggacaaaacaaagaacggccaccaccagtgccaaatccagattatgagcctattcggaaaggacagagggacctgtactctggcctgaatcagagaagaatccgcgccaagagaagcggatctggcgtgaagcagaccctgaatttcgacctgctgaagctggctggcgacgtggaatccaacccaggcccttctagaggccatatgaccgagtacaagcccacggtgcgcctcgccacccgcgacgacgtccccagggccgtacgcaccctcgccgccgcgttcgccgactaccccgccacgcgccacaccgtcgatccggaccgccacatcgagcgggtcaccgagctgcaagaactcttcctcacgcgcgtcgggctcgacatcggcaaggtgtgggtcgcggacgacggcgccgcggtggcggtctggaccacgccggagagcgtcgaagcgggggcggtgttcgccgagatcggcccgcgcatggccgagttgagcggttcccggctggccgcgcagcaacagatggaaggcctcctggcgccgcaccggcccaaggagcccgcgtggttcctggccaccgtcggcgtctcgcccgaccaccagggcaagggtctgggcagcgccgtcgtgctccccggagtggaggcggccgagcgcgccggggtgcccgccttcctggagacctccgcgccccgcaacctccccttctacgagcggctcggcttcaccgtcaccgccgacgtcgaggtgcccgaaggaccgcgcacctggtgcatgacccgcaagcccggtgcctga

SEQ ID NO: 9187 - DNA, 1983 bp, Artificial Sequence
  Synthetic Polynucloetide
atggccttaccagtgaccgccttgctcctgccgctggccttgctgctccacgccgccaggccggacatccagatgacacagagccctagcagcgtgtccgcctctgtgggagacagagtgaccatcacctgtagagccagccagagcgtgtccagctacctgaactggtatcagcagaagcccggcaaggcccctaagctgctgatctatgctgccagctctctgcagtctggcgtgcccagcagattttctggcagcggctctggcaccgacttcaccctgaccatatctagcctgcagcctgaggacttcgccacctactactgccagcagagctacagcaccccttggacctttggacagggcaccaagctggaaatcaagagaggcggaggcggaagtggaggcggaggatctggcggcggaggctctgaagtgcagctggttgaatcaggtggcggcctggttcagcctggcagaagtctgagactgagctgtgccgccagcggcttcaccttcgacgattacggaatgcactgggtccgacaggcccctggcaaaggacttgaatgggtgtccggcatcagctggaacagcggcagcatcggctatgccgatagcgccaagggcagattcaccatcagccgggacaacagcaagaacaccctgtacctgcagatgaacagcctgagagccgaggacaccgccgtgtactactgtgccaagaggggcaacagcaacagcttcgactattggggccagggcaccctggtcacagtctcttctacgcgtgggtctggaggcggaggcagcggcggaggcgggagcggcttcaagatccccatcgaggaactggaagatcgggtgttcgtgaactgcaacacctctatcacctgggtggaaggcaccgtgggaacactgctgagcgacatcaccagactggacctcggcaagcggattctggaccctcggggcatctacagatgcaacggcaccgacatctacaaggacaaagaaagcaccgtgcaggtccactacagaatgtgccagtcctgcgtggaactggaccctgctacagtggccggcatcatcgtgaccgatgtgatcgctactctgctgctggctctgggagtgttctgcttcgccggacacgaaacaggcagactgtctggcgctgccgatacacaggccctgctgagaaacgaccaagtgtatcagcccctgcgcgacagagatgatgcccagtattctcacctcggcggcaactgggctagaaacaagcgcgccaagagaagcggatctggcgtgaagcagaccctgaatttcgacctgctgaagctggctggcgacgtggaatccaacccaggcccttctagaggccatatgaccgagtacaagcccacggtgcgcctcgccacccgcgacgacgtccccagggccgtacgcaccctcgccgccgcgttcgccgactaccccgccacgcgccacaccgtcgatccggaccgccacatcgagcgggtcaccgagctgcaagaactcttcctcacgcgcgtcgggctcgacatcggcaaggtgtgggtcgcggacgacggcgccgcggtggcggtctggaccacgccggagagcgtcgaagcgggggcggtgttcgccgagatcggcccgcgcatggccgagttgagcggttcccggctggccgcgcagcaacagatggaaggcctcctggcgccgcaccggcccaaggagcccgcgtggttcctggccaccgtcggcgtctcgcccgaccaccagggcaagggtctgggcagcgccgtcgtgctccccggagtggaggcggccgagcgcgccggggtgcccgccttcctggagacctccgcgccccgcaacctccccttctacgagcggctcggcttcaccgtcaccgccgacgtcgaggtgcccgaaggaccgcgcacctggtgcatgacccgcaagcccggtgcctga

SEQ ID NO: 9188 - DNA, 2013 bp, Artificial Sequence
  Synthetic Polynucloetide
atggccttaccagtgaccgccttgctcctgccgctggccttgctgctccacgccgccaggccggacatccagatgacacagagccctagcagcgtgtccgcctctgtgggagacagagtgaccatcacctgtagagccagccagagcgtgtccagctacctgaactggtatcagcagaagcccggcaaggcccctaagctgctgatctatgctgccagctctctgcagtctggcgtgcccagcagattttctggcagcggctctggcaccgacttcaccctgaccatatctagcctgcagcctgaggacttcgccacctactactgccagcagagctacagcaccccttggacctttggacagggcaccaagctggaaatcaagagaggcggaggcggaagtggaggcggaggatctggcggcggaggctctgaagtgcagctggttgaatcaggtggcggcctggttcagcctggcagaagtctgagactgagctgtgccgccagcggcttcaccttcgacgattacggaatgcactgggtccgacaggcccctggcaaaggacttgaatgggtgtccggcatcagctggaacagcggcagcatcggctatgccgatagcgccaagggcagattcaccatcagccgggacaacagcaagaacaccctgtacctgcagatgaacagcctgagagccgaggacaccgccgtgtactactgtgccaagaggggcaacagcaacagcttcgactattggggccagggcaccctggtcacagtctcttctacgcgtgggtctggaggcggaggcagcggcggaggcgggagcggccagagcatcaagggcaaccacctggtcaaggtgtacgactaccaagaggacggcagcgtgctgctgacatgtgatgccgaggccaagaacatcacctggtttaaggacggcaagatgatcggcttcctgaccgaggacaagaagaagtggaacctgggcagcaacgctaaggaccccagaggcatgtatcagtgcaagggcagccagaacaagagcaagcccctccaggtgtactaccggatgtgccagaactgcatcgagctgaacgccgctaccatcagcggctttctgttcgccgagatcgtgtccatcttcgtgctggccgtgggcgtgtactttatcgctggacaggatggcgtgcggcagagcagagcttccgataagcaaaccctgctgcctaacgaccagctgtaccagcctctgaaggacagagaggacgaccagtacagccacctccagggcaatcagctgagaagaaaccgcgccaagagaagcggatctggcgtgaagcagaccctgaatttcgacctgctgaagctggctggcgacgtggaatccaacccaggcccttctagaggccatatgaccgagtacaagcccacggtgcgcctcgccacccgcgacgacgtccccagggccgtacgcaccctcgccgccgcgttcgccgactaccccgccacgcgccacaccgtcgatccggaccgccacatcgagcgggtcaccgagctgcaagaactcttcctcacgcgcgtcgggctcgacatcggcaaggtgtgggtcgcggacgacggcgccgcggtggcggtctggaccacgccggagagcgtcgaagcgggggcggtgttcgccgagatcggcccgcgcatggccgagttgagcggttcccggctggccgcgcagcaacagatggaaggcctcctggcgccgcaccggcccaaggagcccgcgtggttcctggccaccgtcggcgtctcgcccgaccaccagggcaagggtctgggcagcgccgtcgtgctccccggagtggaggcggccgagcgcgccggggtgcccgccttcctggagacctccgcgccccgcaacctccccttctacgagcggctcggcttcaccgtcaccgccgacgtcgaggtgcccgaaggaccgcgcacctggtgcatgacccgcaagcccggtgcctga

SEQ ID NO: 9189 - DNA, 1962 bp, Artificial Sequence
  Synthetic Polynucloetide
atggccttaccagtgaccgccttgctcctgccgctggccttgctgctccacgccgccaggccggacatccagatgacacagagccctagcagcgtgtccgcctctgtgggagacagagtgaccatcacctgtagagccagccagagcgtgtccagctacctgaactggtatcagcagaagcccggcaaggcccctaagctgctgatctatgctgccagctctctgcagtctggcgtgcccagcagattttctggcagcggctctggcaccgacttcaccctgaccatatctagcctgcagcctgaggacttcgccacctactactgccagcagagctacagcaccccttggacctttggacagggcaccaagctggaaatcaagagaggcggaggcggaagtggaggcggaggatctggcggcggaggctctgaagtgcagctggttgaatcaggtggcggcctggttcagcctggcagaagtctgagactgagctgtgccgccagcggcttcaccttcgacgattacggaatgcactgggtccgacaggcccctggcaaaggacttgaatgggtgtccggcatcagctggaacagcggcagcatcggctatgccgatagcgccaagggcagattcaccatcagccgggacaacagcaagaacaccctgtacctgcagatgaacagcctgagagccgaggacaccgccgtgtactactgtgccaagaggggcaacagcaacagcttcgactattggggccagggcaccctggtcacagtctcttctacgcgtgggtctggaggcggaggcagcggcggaggcgggagcggccagagttttgggttgttggaccctaaattgtgctatctgttggacggaatcctgttcatttacggagtgatcctgaccgcattgttcctgcgggttaagttttccagatccgcagacgcacccgcttaccaacaagggcagaaccaactctacaatgaacttaatttggggcggagggaagagtacgacgttctggacaaaaggaggggacgagatcccgagatgggcggaaagcctcagcgaaggaagaatccgcaagaggggctttataacgaactccagaaagataaaatggcagaagcctatagtgagattgggatgaagggagaaaggaggaggggtaaaggtcacgatgggttgtaccaaggattgagcacagccactaaagatacctatgatgcgctccacatgcaggccctgccgccaagacgcgccaagagaagcggatctggcgtgaagcagaccctgaatttcgacctgctgaagctggctggcgacgtggaatccaacccaggcccttctagaggccatatgaccgagtacaagcccacggtgcgcctcgccacccgcgacgacgtccccagggccgtacgcaccctcgccgccgcgttcgccgactaccccgccacgcgccacaccgtcgatccggaccgccacatcgagcgggtcaccgagctgcaagaactcttcctcacgcgcgtcgggctcgacatcggcaaggtgtgggtcgcggacgacggcgccgcggtggcggtctggaccacgccggagagcgtcgaagcgggggcggtgttcgccgagatcggcccgcgcatggccgagttgagcggttcccggctggccgcgcagcaacagatggaaggcctcctggcgccgcaccggcccaaggagcccgcgtggttcctggccaccgtcggcgtctcgcccgaccaccagggcaagggtctgggcagcgccgtcgtgctccccggagtggaggcggccgagcgcgccggggtgcccgccttcctggagacctccgcgccccgcaacctccccttctacgagcggctcggcttcaccgtcaccgccgacgtcgaggtgcccgaaggaccgcgcacctggtgcatgacccgcaagcccggtgcctga

SEQ ID NO: 9190 - DNA, 2262 bp, Artificial Sequence
  Synthetic Polynucloetide
atggccttaccagtgaccgccttgctcctgccgctggccttgctgctccacgccgccaggccggaagtgcagctggttgaatctggcggaggactggttcagcctggcggatctctgagactgtcttgtgccgccagcggcttcagcttcagcgacttttggatgagctgggtccgacaggcccctggcaaaggacttgaatgggtcgccacaatcagccaggccggcagcgagaaggactacgtggactctgtgaagggcagattcaccatcagccgggacaacgccaagaagtccctgtacctccagatgaacagcctgagagccgaggacaccgccgtgtactattgtgcctctggcgtgtacagcttcgactacagaggccagggcaccctggtcacagtctcttctggtaccggcggaggcggatctggcggcggaggtagcggtggcggaggatctgaattcgacatccagatgacacagagccctagcagcgtgtccgcctctgtgggagacagagtgaccatcacctgtagagccagccagagcgtgtccagctacctgaactggtatcagcagaagcccggcaaggcccctaagctgctgatctatgctgccagctctctgcagtctggcgtgcccagcagattttctggcagcggctctggcaccgacttcaccctgaccatatctagcctgcagcctgaggacttcgccacctactactgccagcagagctacagcaccccttggacctttggacagggcaccaagctggaaatcaagagactcgaggacctgaagaacgtgttcccacctgaggtggccgtgttcgagcctagcgaggccgagatcagccacacccagaaagccaccctcgtgtgcctggctaccggcttctaccccgaccatgtggaactgtcttggtgggtcaacggcaaagaggtgcacagcggcgtgtgtaccgacccccagccactgaaagaacagcccgccctgaacgacagccggtactgcctgagcagcagactgagagtgtccgccaccttctggcagaacccccggaaccacttcagatgccaggtgcagttctacggcctgagcgagaacgacgagtggacccaggacagagccaagcccgtgacccagatcgtgtctgccgaagcctggggcagagccgattgcggctttaccagcgagagctaccagcagggcgtgctgagcgccaccatcctgtacgagatcctgctgggcaaggccaccctgtacgccgtgctggtgtctgccctggtgctgatggctatggtcaagcggaaggacagccggggaagggccaagcgatctggatctggagcaacaaacttctcactactcaaacaagcaggtgacgtggaggagaatcccgggcctactagtatggactggatttggcgcatccttttccttgtcggcgctgctaccggcgcgcattccttcgaagaagtgcagctggttgaatcaggtggcggcctggttcagcctggcagaagtctgagactgagctgtgccgccagcggcttcaccttcgacgattacggaatgcactgggtccgacaggcccctggcaaaggacttgaatgggtgtccggcatcagctggaacagcggcagcatcggctatgccgatagcgccaagggcagattcaccatcagccgggacaacagcaagaacaccctgtacctgcagatgaacagcctgagagccgaggacaccgccgtgtactactgtgccaagaggggcaacagcaacagcttcgactattggggccagggcaccctggtcacagtctcttctacgcgtatccagaaccctgatcctgccgtgtaccagctgcgggatagcaagagcagcgacaagagcgtgtgtctgttcaccgacttcgacagccagaccaacgtgtcccagagcaaggactccgacgtgtacatcaccgataagtgcgtgctggacatgcggagcatggacttcaagagcaactccgccgtggcctggtccaacaagtccgatttcgcctgcgccaacgccttcaacaacagcattatccccgaggacacattcttcccaagccccgagagcagctgcgacgtgaagctggtggaaaagagcttcgagacagacaccaacctgaacttccagaacctgagcgtgatcggcttcagaatcctgctgctgaaagtggccggctttaacctgctgatgaccctgcggctgtggtccagc

SEQ ID NO: 9191 - DNA, 2274 bp, Artificial Sequence
  Synthetic Polynucloetide
atggccttaccagtgaccgccttgctcctgccgctggccttgctgctccacgccgccaggccggaagtgcagctggttgaatctggcggaggactggttcagcctggcggatctctgagactgtcttgtgccgccagcggcttcagcttcagcgacttttggatgagctgggtccgacaggcccctggcaaaggacttgaatgggtcgccacaatcagccaggccggcagcgagaaggactacgtggactctgtgaagggcagattcaccatcagccgggacaacgccaagaagtccctgtacctccagatgaacagcctgagagccgaggacaccgccgtgtactattgtgcctctggcgtgtacagcttcgactacagaggccagggcaccctggtcacagtctcttctggtaccggcggaggcggatctggcggcggaggtagcggtggcggaggatctgaattcgacatccagatgacacagagccctagcagcgtgtccgcctctgtgggagacagagtgaccatcacctgtagagccagccagagcgtgtccagctacctgaactggtatcagcagaagcccggcaaggcccctaagctgctgatctatgctgccagctctctgcagtctggcgtgcccagcagattttctggcagcggctctggcaccgacttcaccctgaccatatctagcctgcagcctgaggacttcgccacctactactgccagcagagctacagcaccccttggacctttggacagggcaccaagctggaaatcaagagactcgagatccagaaccctgatcctgccgtgtaccagctgcgggatagcaagagcagcgacaagagcgtgtgtctgttcaccgacttcgacagccagaccaacgtgtcccagagcaaggactccgacgtgtacatcaccgataagtgcgtgctggacatgcggagcatggacttcaagagcaactccgccgtggcctggtccaacaagtccgatttcgcctgcgccaacgccttcaacaacagcattatccccgaggacacattcttcccaagccccgagagcagctgcgacgtgaagctggtggaaaagagcttcgagacagacaccaacctgaacttccagaacctgagcgtgatcggcttcagaatcctgctgctgaaagtggccggctttaacctgctgatgaccctgcggctgtggtccagccgcgccaagagaagcggatctggcgtgaagcagaccctgaatttcgacctgctgaagctggctggcgacgtggaatccaacccaggccctactagtatggactggatttggcgcatccttttccttgtcggcgctgctaccggcgcgcattccttcgaagaagtgcagctggttgaatcaggtggcggcctggttcagcctggcagaagtctgagactgagctgtgccgccagcggcttcaccttcgacgattacggaatgcactgggtccgacaggcccctggcaaaggacttgaatgggtgtccggcatcagctggaacagcggcagcatcggctatgccgatagcgccaagggcagattcaccatcagccgggacaacagcaagaacaccctgtacctgcagatgaacagcctgagagccgaggacaccgccgtgtactactgtgccaagaggggcaacagcaacagcttcgactattggggccagggcaccctggtcacagtctcttctacgcgtgaggacctgaagaacgtgttcccacctgaggtggccgtgttcgagcctagcgaggccgagatcagccacacccagaaagccaccctcgtgtgcctggctaccggcttctaccccgaccatgtggaactgtcttggtgggtcaacggcaaagaggtgcacagcggcgtgtgtaccgacccccagccactgaaagaacagcccgccctgaacgacagccggtactgcctgagcagcagactgagagtgtccgccaccttctggcagaacccccggaaccacttcagatgccaggtgcagttctacggcctgagcgagaacgacgagtggacccaggacagagccaagcccgtgacccagatcgtgtctgccgaagcctggggcagagccgattgcggctttaccagcgagagctaccagcagggcgtgctgagcgccaccatcctgtacgagatcctgctgggcaaggccaccctgtacgccgtgctggtgtctgccctggtgctgatggctatggtcaagcggaaggacagccgggga

SEQ ID NO: 9192 - DNA, 2850 bp, Artificial Sequence
  Synthetic Polynucloetide
atggccttaccagtgaccgccttgctcctgccgctggccttgctgctccacgccgccaggccggaagtgcagctggttgaatctggcggaggactggttcagcctggcggatctctgagactgtcttgtgccgccagcggcttcagcttcagcgacttttggatgagctgggtccgacaggcccctggcaaaggacttgaatgggtcgccacaatcagccaggccggcagcgagaaggactacgtggactctgtgaagggcagattcaccatcagccgggacaacgccaagaagtccctgtacctccagatgaacagcctgagagccgaggacaccgccgtgtactattgtgcctctggcgtgtacagcttcgactacagaggccagggcaccctggtcacagtctcttctggtaccggcggaggcggatctggcggcggaggtagcggtggcggaggatctgaattcgacatccagatgacacagagccctagcagcgtgtccgcctctgtgggagacagagtgaccatcacctgtagagccagccagagcgtgtccagctacctgaactggtatcagcagaagcccggcaaggcccctaagctgctgatctatgctgccagctctctgcagtctggcgtgcccagcagattttctggcagcggctctggcaccgacttcaccctgaccatatctagcctgcagcctgaggacttcgccacctactactgccagcagagctacagcaccccttggacctttggacagggcaccaagctggaaatcaagagactcgaggacctgaagaacgtgttcccacctgaggtggccgtgttcgagcctagcgaggccgagatcagccacacccagaaagccaccctcgtgtgcctggctaccggcttctaccccgaccatgtggaactgtcttggtgggtcaacggcaaagaggtgcacagcggcgtgtctaccgacccccagccactgaaagaacagcccgccctgaacgacagccggtactgcctgagcagcagactgagagtgtccgccaccttctggcagaacccccggaaccacttcagatgccaggtgcagttctacggcctgagcgagaacgacgagtggacccaggacagagccaagcccgtgacccagatcgtgtctgccgaagcctggggcagagccgattgcggatcccagagcttcggcctgctggaccccaagctgtgctacctgctggatggcatcctgttcatctacggcgtgatcctgaccgccctgttcctgagagtgaagttcagcagaagcgccgacgcccctgcctaccagcagggacagaaccaactgtacaacgagctgaacctgggcagacgggaagagtacgacgtgctggacaagcggagaggcagggaccctgagatgggcggaaagccccagcggagaaagaacccccaggaaggactgtataacgaactccagaaagacaagatggccgaagcctacagcgagatcggcatgaagggcgagcggagaagaggcaagggccacgatggcctgtaccagggcctgagcaccgccaccaaggacacctatgacgccctgcacatgcaggccctgcctccaagaagggccaagcgatctggatctggagcaacaaacttctcactactcaaacaagcaggtgacgtggaggagaatcccgggcctactagtatggactggatttggcgcatccttttccttgtcggcgctgctaccggcgcgcattccttcgaagaagtgcagctggttgaatcaggtggcggcctggttcagcctggcagaagtctgagactgagctgtgccgccagcggcttcaccttcgacgattacggaatgcactgggtccgacaggcccctggcaaaggacttgaatgggtgtccggcatcagctggaacagcggcagcatcggctatgccgatagcgccaagggcagattcaccatcagccgggacaacagcaagaacaccctgtacctgcagatgaacagcctgagagccgaggacaccgccgtgtactactgtgccaagaggggcaacagcaacagcttcgactattggggccagggcaccctggtcacagtctcttctacgcgtatccagaaccctgatcctgccgtgtaccagctgcgggatagcaagagcagcgacaagagcgtgtgtctgttcaccgacttcgacagccagaccaacgtgtcccagagcaaggactccgacgtgtacatcaccgataagaccgtgctggacatgcggagcatggacttcaagagcaactccgccgtggcctggtccaacaagtccgatttcgcctgcgccaacgccttcaacaacagcattatccccgaggacacattcttcccaagccccgagagcagctgcggtacccagagttttgggttgttggaccctaaattgtgctatctgttggacggaatcctgttcatttacggagtgatcctgaccgcattgttcctgcgggttaagttttccagatccgcagacgcacccgcttaccaacaagggcagaaccaactctacaatgaacttaatttggggcggagggaagagtacgacgttctggacaaaaggaggggacgagatcccgagatgggcggaaagcctcagcgaaggaagaatccgcaagaggggctttataacgaactccagaaagataaaatggcagaagcctatagtgagattgggatgaagggagaaaggaggaggggtaaaggtcacgatgggttgtaccaaggattgagcacagccactaaagatacctatgatgcgctccacatgcaggccctgccgccaaga

SEQ ID NO: 9193 - DNA, 2340 bp, Artificial Sequence
  Synthetic Polynucloetide
atggccttaccagtgaccgccttgctcctgccgctggccttgctgctccacgccgccaggccggaagtgcagctggttgaatctggcggaggactggttcagcctggcggatctctgagactgtcttgtgccgccagcggcttcagcttcagcgacttttggatgagctgggtccgacaggcccctggcaaaggacttgaatgggtcgccacaatcagccaggccggcagcgagaaggactacgtggactctgtgaagggcagattcaccatcagccgggacaacgccaagaagtccctgtacctccagatgaacagcctgagagccgaggacaccgccgtgtactattgtgcctctggcgtgtacagcttcgactacagaggccagggcaccctggtcacagtctcttctggtaccggcggaggcggatctggcggcggaggtagcggtggcggaggatctgaattcgacatccagatgacacagagccctagcagcgtgtccgcctctgtgggagacagagtgaccatcacctgtagagccagccagagcgtgtccagctacctgaactggtatcagcagaagcccggcaaggcccctaagctgctgatctatgctgccagctctctgcagtctggcgtgcccagcagattttctggcagcggctctggcaccgacttcaccctgaccatatctagcctgcagcctgaggacttcgccacctactactgccagcagagctacagcaccccttggacctttggacagggcaccaagctggaaatcaagagactcgagggacagcctaaggccaatcctaccgtgacactgttccctccaagcagcgaagaactccaggccaacaaggccacacttgtgtgcctgatctccgacttctaccctggggctgtgacagtggcttggaaggccgatggatctcctgtgaaagccggcgtggaaaccaccaagccatccaagcagagcaacaacaaatacgccgccagctcctacctgagcctgacacctgagcagtggaagtcccacagatcctacagctgccaagtgacccacgaaggcagcaccgtggaaaagacagtggcccctacagagtgcagccccatcaagaccgatgtgattacaatggaccccaaggacaactgctccaaggacgccaacgataccctgctgctccagctgaccaacaccagcgcctactacatgtacttgttgctgctgctgaagtccgtggtgtacttcgccatcatcacatgctgcctgctgcggagaaccgccttctgctgcaacggcgagaagtctagggccaagcgatctggatctggagcaacaaacttctcactactcaaacaagcaggtgacgtggaggagaatcccgggcctactagtatggactggatttggcgcatccttttccttgtcggcgctgctaccggcgcgcattccttcgaagaagtgcagctggttgaatcaggtggcggcctggttcagcctggcagaagtctgagactgagctgtgccgccagcggcttcaccttcgacgattacggaatgcactgggtccgacaggcccctggcaaaggacttgaatgggtgtccggcatcagctggaacagcggcagcatcggctatgccgatagcgccaagggcagattcaccatcagccgggacaacagcaagaacaccctgtacctgcagatgaacagcctgagagccgaggacaccgccgtgtactactgtgccaagaggggcaacagcaacagcttcgactattggggccagggcaccctggtcacagtctcttctacgcgtgcctctacaaagggaccctccgtgtttcctctggctcccagcagcaagtctacaagcggaggaacagccgctctgggctgcctggtcaaggattactttcccgagcctgtgaccgtgtcctggaatagcggagcactgacaagcggcgtgcacacctttccagccgtgctgcaaagcagcggcctgtactctctgagcagcgtggtcacagtgcctagctctagcctgggcacccagacctacatctgcaatgtgaaccacaagcctagcaacaccaaggtggacaagagagtggaacccaagagctgtgaagtgaaaaccgactccaccgaccacgtgaagcccaaagagacagagaacaccaagcagcccagcaagagctgccacaagcccaaggccatcgtgcacaccgagaaagtgaacatgatgagcctgaccgtgctgggcctgcggatgctgttcgccaaaaccgtggccgtgaacttcctgctgaccgccaagctgttcttcctc

SEQ ID NO: 9194 - DNA, 2283 bp, Artificial Sequence
  Synthetic Polynucloetide
atggccttaccagtgaccgccttgctcctgccgctggccttgctgctccacgccgccaggccggaagtgcagctggttgaatctggcggaggactggttcagcctggcggatctctgagactgtcttgtgccgccagcggcttcagcttcagcgacttttggatgagctgggtccgacaggcccctggcaaaggacttgaatgggtcgccacaatcagccaggccggcagcgagaaggactacgtggactctgtgaagggcagattcaccatcagccgggacaacgccaagaagtccctgtacctccagatgaacagcctgagagccgaggacaccgccgtgtactattgtgcctctggcgtgtacagcttcgactacagaggccagggcaccctggtcacagtctcttctggtaccggcggaggcggatctggcggcggaggtagcggtggcggaggatctgaattcgacatccagatgacacagagccctagcagcgtgtccgcctctgtgggagacagagtgaccatcacctgtagagccagccagagcgtgtccagctacctgaactggtatcagcagaagcccggcaaggcccctaagctgctgatctatgctgccagctctctgcagtctggcgtgcccagcagattttctggcagcggctctggcaccgacttcaccctgaccatatctagcctgcagcctgaggacttcgccacctactactgccagcagagctacagcaccccttggacctttggacagggcaccaagctggaaatcaagagactcgagggacagcctaaggccaatcctaccgtgacactgttccctccaagcagcgaagaactccaggccaacaaggccacacttgtgtgcctgatctccgacttctaccctggggctgtgacagtggcttggaaggccgatggatctcctgtgaaagccggcgtggaaaccaccaagccatccaagcagagcaacaacaaatacgccgccagctcctacctgagcctgacacctgagcagtggaagtcccacagatcctacagctgccaagtgacccacgaaggcagcaccgtggaaaagacagtggcccctacagagtgcagcggcagagccgattgcggctttaccagcgagagctaccagcagggcgtgctgagcgccaccatcctgtacgagatcctgctgggcaaggccaccctgtacgccgtgctggtgtctgccctggtgctgatggctatggtcaagcggaaggacagccggggacgcgccaagagaagcggatctggcgtgaagcagaccctgaatttcgacctgctgaagctggctggcgacgtggaatccaacccaggccctactagtatggactggatttggcgcatccttttccttgtcggcgctgctaccggcgcgcattccttcgaagaagtgcagctggttgaatcaggtggcggcctggttcagcctggcagaagtctgagactgagctgtgccgccagcggcttcaccttcgacgattacggaatgcactgggtccgacaggcccctggcaaaggacttgaatgggtgtccggcatcagctggaacagcggcagcatcggctatgccgatagcgccaagggcagattcaccatcagccgggacaacagcaagaacaccctgtacctgcagatgaacagcctgagagccgaggacaccgccgtgtactactgtgccaagaggggcaacagcaacagcttcgactattggggccagggcaccctggtcacagtctcttctacgcgtgcctctacaaagggaccctccgtgtttcctctggctcccagcagcaagtctacaagcggaggaacagccgctctgggctgcctggtcaaggattactttcccgagcctgtgaccgtgtcctggaatagcggagcactgacaagcggcgtgcacacctttccagccgtgctgcaaagcagcggcctgtactctctgagcagcgtggtcacagtgcctagctctagcctgggcacccagacctacatctgcaatgtgaaccacaagcctagcaacaccaaggtggacaagagagtggaacccaagagctgtatccccgaggacacattcttcccaagccccgagagcagctgcgacgtgaagctggtggaaaagagcttcgagacagacaccaacctgaacttccagaacctgagcgtgatcggcttcagaatcctgctgctgaaagtggccggctttaacctgctgatgaccctgcggctgtggtccagc

SEQ ID NO: 9195 - DNA, 2685 bp, Artificial Sequence
  Synthetic Polynucloetide
atggccttaccagtgaccgccttgctcctgccgctggccttgctgctccacgccgccaggccggaagtgcagctggttgaatctggcggaggactggttcagcctggcggatctctgagactgtcttgtgccgccagcggcttcagcttcagcgacttttggatgagctgggtccgacaggcccctggcaaaggacttgaatgggtcgccacaatcagccaggccggcagcgagaaggactacgtggactctgtgaagggcagattcaccatcagccgggacaacgccaagaagtccctgtacctccagatgaacagcctgagagccgaggacaccgccgtgtactattgtgcctctggcgtgtacagcttcgactacagaggccagggcaccctggtcacagtctcttctggtaccggcggaggcggatctggcggcggaggtagcggtggcggaggatctgaattcgacatccagatgacacagagccctagcagcgtgtccgcctctgtgggagacagagtgaccatcacctgtagagccagccagagcgtgtccagctacctgaactggtatcagcagaagcccggcaaggcccctaagctgctgatctatgctgccagctctctgcagtctggcgtgcccagcagattttctggcagcggctctggcaccgacttcaccctgaccatatctagcctgcagcctgaggacttcgccacctactactgccagcagagctacagcaccccttggacctttggacagggcaccaagctggaaatcaagagactcgagatccagaaccctgatcctgccgtgtaccagctgcgggatagcaagagcagcgacaagagcgtgtgtctgttcaccgacttcgacagccagaccaacgtgtcccagagcaaggactccgacgtgtacatcaccgataagtgcgtgctggacatgcggagcatggacttcaagagcaactccgccgtggcctggtccaacaagtccgatttcgcctgcgccaacgccttcaacaacagcattatccccgaggacacattcttcccaagccccgagagcagctgcgacgtgaagctggtggaaaagagcttcgagacagacaccaacctgaacttccagaacctgagcgtgatcggcttcagaatcctgctgctgaaagtggccggctttaacctgctgatgaccctgcggctgtggtccagccgcgccaagagaagcggatctggcgtgaagcagaccctgaatttcgacctgctgaagctggctggcgacgtggaatccaacccaggccctactagtatggactggatttggcgcatccttttccttgtcggcgctgctaccggcgcgcattccgggccccagctccagctgcaagagtctggacctggcctggtcaagcctagcgagacactgagcctgacctgtaccgtgtccggcgatagcatcagcagcggcgattactactggggctggatcagacagcctcctggcaaaggactggaatggatcggccacatctactacagcggcgtgacctactacaaccccagcctgaagtccagagtgaccatcagcgtggacaccagccggaaccagttctccctgaagctgtctagcgtgacagccgccgataccgccgtgtactactgcaccagagaggacagcagcaactggcggagtagaggccagggaacactggtcacagttagctctggatccggcggaggcggaagtggaggcggaggatctggcggcggaggctctttcgaagaagtgcagctggttgaatcaggtggcggcctggttcagcctggcagaagtctgagactgagctgtgccgccagcggcttcaccttcgacgattacggaatgcactgggtccgacaggcccctggcaaaggacttgaatgggtgtccggcatcagctggaacagcggcagcatcggctatgccgatagcgccaagggcagattcaccatcagccgggacaacagcaagaacaccctgtacctgcagatgaacagcctgagagccgaggacaccgccgtgtactactgtgccaagaggggcaacagcaacagcttcgactattggggccagggcaccctggtcacagtctcttctacgcgtgaggacctgaagaacgtgttcccacctgaggtggccgtgttcgagcctagcgaggccgagatcagccacacccagaaagccaccctcgtgtgcctggctaccggcttctaccccgaccatgtggaactgtcttggtgggtcaacggcaaagaggtgcacagcggcgtgtgtaccgacccccagccactgaaagaacagcccgccctgaacgacagccggtactgcctgagcagcagactgagagtgtccgccaccttctggcagaacccccggaaccacttcagatgccaggtgcagttctacggcctgagcgagaacgacgagtggacccaggacagagccaagcccgtgacccagatcgtgtctgccgaagcctggggcagagccgattgcggctttaccagcgagagctaccagcagggcgtgctgagcgccaccatcctgtacgagatcctgctgggcaaggccaccctgtacgccgtgctggtgtctgccctggtgctgatggctatggtcaagcggaaggacagccgggga

SEQ ID NO: 9196 - DNA, 3261 bp, Artificial Sequence
  Synthetic Polynucloetide
atggccttaccagtgaccgccttgctcctgccgctggccttgctgctccacgccgccaggccggaagtgcagctggttgaatctggcggaggactggttcagcctggcggatctctgagactgtcttgtgccgccagcggcttcagcttcagcgacttttggatgagctgggtccgacaggcccctggcaaaggacttgaatgggtcgccacaatcagccaggccggcagcgagaaggactacgtggactctgtgaagggcagattcaccatcagccgggacaacgccaagaagtccctgtacctccagatgaacagcctgagagccgaggacaccgccgtgtactattgtgcctctggcgtgtacagcttcgactacagaggccagggcaccctggtcacagtctcttctggtaccggcggaggcggatctggcggcggaggtagcggtggcggaggatctgaattcgacatccagatgacacagagccctagcagcgtgtccgcctctgtgggagacagagtgaccatcacctgtagagccagccagagcgtgtccagctacctgaactggtatcagcagaagcccggcaaggcccctaagctgctgatctatgctgccagctctctgcagtctggcgtgcccagcagattttctggcagcggctctggcaccgacttcaccctgaccatatctagcctgcagcctgaggacttcgccacctactactgccagcagagctacagcaccccttggacctttggacagggcaccaagctggaaatcaagagactcgaggacctgaagaacgtgttcccacctgaggtggccgtgttcgagcctagcgaggccgagatcagccacacccagaaagccaccctcgtgtgcctggctaccggcttctaccccgaccatgtggaactgtcttggtgggtcaacggcaaagaggtgcacagcggcgtgtctaccgacccccagccactgaaagaacagcccgccctgaacgacagccggtactgcctgagcagcagactgagagtgtccgccaccttctggcagaacccccggaaccacttcagatgccaggtgcagttctacggcctgagcgagaacgacgagtggacccaggacagagccaagcccgtgacccagatcgtgtctgccgaagcctggggcagagccgattgcggatcccagagcttcggcctgctggaccccaagctgtgctacctgctggatggcatcctgttcatctacggcgtgatcctgaccgccctgttcctgagagtgaagttcagcagaagcgccgacgcccctgcctaccagcagggacagaaccaactgtacaacgagctgaacctgggcagacgggaagagtacgacgtgctggacaagcggagaggcagggaccctgagatgggcggaaagccccagcggagaaagaacccccaggaaggactgtataacgaactccagaaagacaagatggccgaagcctacagcgagatcggcatgaagggcgagcggagaagaggcaagggccacgatggcctgtaccagggcctgagcaccgccaccaaggacacctatgacgccctgcacatgcaggccctgcctccaagaagggccaagcgatctggatctggagcaacaaacttctcactactcaaacaagcaggtgacgtggaggagaatcccgggcctactagtatggactggatttggcgcatccttttccttgtcggcgctgctaccggcgcgcattccgggccccagctccagctgcaagagtctggacctggcctggtcaagcctagcgagacactgagcctgacctgtaccgtgtccggcgatagcatcagcagcggcgattactactggggctggatcagacagcctcctggcaaaggactggaatggatcggccacatctactacagcggcgtgacctactacaaccccagcctgaagtccagagtgaccatcagcgtggacaccagccggaaccagttctccctgaagctgtctagcgtgacagccgccgataccgccgtgtactactgcaccagagaggacagcagcaactggcggagtagaggccagggaacactggtcacagttagctctggatccggcggaggcggaagtggaggcggaggatctggcggcggaggctctttcgaagaagtgcagctggttgaatcaggtggcggcctggttcagcctggcagaagtctgagactgagctgtgccgccagcggcttcaccttcgacgattacggaatgcactgggtccgacaggcccctggcaaaggacttgaatgggtgtccggcatcagctggaacagcggcagcatcggctatgccgatagcgccaagggcagattcaccatcagccgggacaacagcaagaacaccctgtacctgcagatgaacagcctgagagccgaggacaccgccgtgtactactgtgccaagaggggcaacagcaacagcttcgactattggggccagggcaccctggtcacagtctcttctacgcgtatccagaaccctgatcctgccgtgtaccagctgcgggatagcaagagcagcgacaagagcgtgtgtctgttcaccgacttcgacagccagaccaacgtgtcccagagcaaggactccgacgtgtacatcaccgataagaccgtgctggacatgcggagcatggacttcaagagcaactccgccgtggcctggtccaacaagtccgatttcgcctgcgccaacgccttcaacaacagcattatccccgaggacacattcttcccaagccccgagagcagctgcggtacccagagttttgggttgttggaccctaaattgtgctatctgttggacggaatcctgttcatttacggagtgatcctgaccgcattgttcctgcgggttaagttttccagatccgcagacgcacccgcttaccaacaagggcagaaccaactctacaatgaacttaatttggggcggagggaagagtacgacgttctggacaaaaggaggggacgagatcccgagatgggcggaaagcctcagcgaaggaagaatccgcaagaggggctttataacgaactccagaaagataaaatggcagaagcctatagtgagattgggatgaagggagaaaggaggaggggtaaaggtcacgatgggttgtaccaaggattgagcacagccactaaagatacctatgatgcgctccacatgcaggccctgccgccaaga

SEQ ID NO: 9197 - DNA, 2751 bp, Artificial Sequence
  Synthetic Polynucloetide
atggccttaccagtgaccgccttgctcctgccgctggccttgctgctccacgccgccaggccggaagtgcagctggttgaatctggcggaggactggttcagcctggcggatctctgagactgtcttgtgccgccagcggcttcagcttcagcgacttttggatgagctgggtccgacaggcccctggcaaaggacttgaatgggtcgccacaatcagccaggccggcagcgagaaggactacgtggactctgtgaagggcagattcaccatcagccgggacaacgccaagaagtccctgtacctccagatgaacagcctgagagccgaggacaccgccgtgtactattgtgcctctggcgtgtacagcttcgactacagaggccagggcaccctggtcacagtctcttctggtaccggcggaggcggatctggcggcggaggtagcggtggcggaggatctgaattcgacatccagatgacacagagccctagcagcgtgtccgcctctgtgggagacagagtgaccatcacctgtagagccagccagagcgtgtccagctacctgaactggtatcagcagaagcccggcaaggcccctaagctgctgatctatgctgccagctctctgcagtctggcgtgcccagcagattttctggcagcggctctggcaccgacttcaccctgaccatatctagcctgcagcctgaggacttcgccacctactactgccagcagagctacagcaccccttggacctttggacagggcaccaagctggaaatcaagagactcgagggacagcctaaggccaatcctaccgtgacactgttccctccaagcagcgaagaactccaggccaacaaggccacacttgtgtgcctgatctccgacttctaccctggggctgtgacagtggcttggaaggccgatggatctcctgtgaaagccggcgtggaaaccaccaagccatccaagcagagcaacaacaaatacgccgccagctcctacctgagcctgacacctgagcagtggaagtcccacagatcctacagctgccaagtgacccacgaaggcagcaccgtggaaaagacagtggcccctacagagtgcagccccatcaagaccgatgtgattacaatggaccccaaggacaactgctccaaggacgccaacgataccctgctgctccagctgaccaacaccagcgcctactacatgtacttgttgctgctgctgaagtccgtggtgtacttcgccatcatcacatgctgcctgctgcggagaaccgccttctgctgcaacggcgagaagtctagggccaagcgatctggatctggagcaacaaacttctcactactcaaacaagcaggtgacgtggaggagaatcccgggcctactagtatggactggatttggcgcatccttttccttgtcggcgctgctaccggcgcgcattccgggccccagctccagctgcaagagtctggacctggcctggtcaagcctagcgagacactgagcctgacctgtaccgtgtccggcgatagcatcagcagcggcgattactactggggctggatcagacagcctcctggcaaaggactggaatggatcggccacatctactacagcggcgtgacctactacaaccccagcctgaagtccagagtgaccatcagcgtggacaccagccggaaccagttctccctgaagctgtctagcgtgacagccgccgataccgccgtgtactactgcaccagagaggacagcagcaactggcggagtagaggccagggaacactggtcacagttagctctggatccggcggaggcggaagtggaggcggaggatctggcggcggaggctctttcgaagaagtgcagctggttgaatcaggtggcggcctggttcagcctggcagaagtctgagactgagctgtgccgccagcggcttcaccttcgacgattacggaatgcactgggtccgacaggcccctggcaaaggacttgaatgggtgtccggcatcagctggaacagcggcagcatcggctatgccgatagcgccaagggcagattcaccatcagccgggacaacagcaagaacaccctgtacctgcagatgaacagcctgagagccgaggacaccgccgtgtactactgtgccaagaggggcaacagcaacagcttcgactattggggccagggcaccctggtcacagtctcttctacgcgtgcctctacaaagggaccctccgtgtttcctctggctcccagcagcaagtctacaagcggaggaacagccgctctgggctgcctggtcaaggattactttcccgagcctgtgaccgtgtcctggaatagcggagcactgacaagcggcgtgcacacctttccagccgtgctgcaaagcagcggcctgtactctctgagcagcgtggtcacagtgcctagctctagcctgggcacccagacctacatctgcaatgtgaaccacaagcctagcaacaccaaggtggacaagagagtggaacccaagagctgtgaagtgaaaaccgactccaccgaccacgtgaagcccaaagagacagagaacaccaagcagcccagcaagagctgccacaagcccaaggccatcgtgcacaccgagaaagtgaacatgatgagcctgaccgtgctgggcctgcggatgctgttcgccaaaaccgtggccgtgaacttcctgctgaccgccaagctgttcttcctc

SEQ ID NO: 9198 - DNA, 2694 bp, Artificial Sequence
  Synthetic Polynucloetide
atggccttaccagtgaccgccttgctcctgccgctggccttgctgctccacgccgccaggccggaagtgcagctggttgaatctggcggaggactggttcagcctggcggatctctgagactgtcttgtgccgccagcggcttcagcttcagcgacttttggatgagctgggtccgacaggcccctggcaaaggacttgaatgggtcgccacaatcagccaggccggcagcgagaaggactacgtggactctgtgaagggcagattcaccatcagccgggacaacgccaagaagtccctgtacctccagatgaacagcctgagagccgaggacaccgccgtgtactattgtgcctctggcgtgtacagcttcgactacagaggccagggcaccctggtcacagtctcttctggtaccggcggaggcggatctggcggcggaggtagcggtggcggaggatctgaattcgacatccagatgacacagagccctagcagcgtgtccgcctctgtgggagacagagtgaccatcacctgtagagccagccagagcgtgtccagctacctgaactggtatcagcagaagcccggcaaggcccctaagctgctgatctatgctgccagctctctgcagtctggcgtgcccagcagattttctggcagcggctctggcaccgacttcaccctgaccatatctagcctgcagcctgaggacttcgccacctactactgccagcagagctacagcaccccttggacctttggacagggcaccaagctggaaatcaagagactcgagggacagcctaaggccaatcctaccgtgacactgttccctccaagcagcgaagaactccaggccaacaaggccacacttgtgtgcctgatctccgacttctaccctggggctgtgacagtggcttggaaggccgatggatctcctgtgaaagccggcgtggaaaccaccaagccatccaagcagagcaacaacaaatacgccgccagctcctacctgagcctgacacctgagcagtggaagtcccacagatcctacagctgccaagtgacccacgaaggcagcaccgtggaaaagacagtggcccctacagagtgcagcggcagagccgattgcggctttaccagcgagagctaccagcagggcgtgctgagcgccaccatcctgtacgagatcctgctgggcaaggccaccctgtacgccgtgctggtgtctgccctggtgctgatggctatggtcaagcggaaggacagccggggacgcgccaagagaagcggatctggcgtgaagcagaccctgaatttcgacctgctgaagctggctggcgacgtggaatccaacccaggccctactagtatggactggatttggcgcatccttttccttgtcggcgctgctaccggcgcgcattccgggccccagctccagctgcaagagtctggacctggcctggtcaagcctagcgagacactgagcctgacctgtaccgtgtccggcgatagcatcagcagcggcgattactactggggctggatcagacagcctcctggcaaaggactggaatggatcggccacatctactacagcggcgtgacctactacaaccccagcctgaagtccagagtgaccatcagcgtggacaccagccggaaccagttctccctgaagctgtctagcgtgacagccgccgataccgccgtgtactactgcaccagagaggacagcagcaactggcggagtagaggccagggaacactggtcacagttagctctggatccggcggaggcggaagtggaggcggaggatctggcggcggaggctctttcgaagaagtgcagctggttgaatcaggtggcggcctggttcagcctggcagaagtctgagactgagctgtgccgccagcggcttcaccttcgacgattacggaatgcactgggtccgacaggcccctggcaaaggacttgaatgggtgtccggcatcagctggaacagcggcagcatcggctatgccgatagcgccaagggcagattcaccatcagccgggacaacagcaagaacaccctgtacctgcagatgaacagcctgagagccgaggacaccgccgtgtactactgtgccaagaggggcaacagcaacagcttcgactattggggccagggcaccctggtcacagtctcttctacgcgtgcctctacaaagggaccctccgtgtttcctctggctcccagcagcaagtctacaagcggaggaacagccgctctgggctgcctggtcaaggattactttcccgagcctgtgaccgtgtcctggaatagcggagcactgacaagcggcgtgcacacctttccagccgtgctgcaaagcagcggcctgtactctctgagcagcgtggtcacagtgcctagctctagcctgggcacccagacctacatctgcaatgtgaaccacaagcctagcaacaccaaggtggacaagagagtggaacccaagagctgtatccccgaggacacattcttcccaagccccgagagcagctgcgacgtgaagctggtggaaaagagcttcgagacagacaccaacctgaacttccagaacctgagcgtgatcggcttcagaatcctgctgctgaaagtggccggctttaacctgctgatgaccctgcggctgtggtccagc

SEQ ID NO: 9199 - DNA, 2265 bp, Artificial Sequence
  Synthetic Polynucloetide
atggccttaccagtgaccgccttgctcctgccgctggccttgctgctccacgccgccaggccggaagtgcaggttttggagtctggcggaggactggttcagcctggcggatctctgagactgtcttgtgccgccagcggcttcaccttcagcaactttgccatgagctgggtccgacaggcccctggcaaaggacttgaatgggtgtccacaatcagcggcagcgccggcacaacagattacgccgattctgtgaagggcagattcaccatcagccgggacaacagcaagaaaaccctgtacctccagatgaacagcctgcgcgtggaagataccgccgtgtactactgtgccgatggcagaggccccttcttcgattatcgcggccagggcacactggtcaccgtttcttctggtaccggcggaggcggatctggcggcggaggtagcggtggcggaggatctgaattcgacatccagatgacacagagccctagcagcgtgtccgcctctgtgggagacagagtgaccatcacctgtagagccagccagagcgtgtccagctacctgaactggtatcagcagaagcccggcaaggcccctaagctgctgatctatgctgccagctctctgcagtctggcgtgcccagcagattttctggcagcggctctggcaccgacttcaccctgaccatatctagcctgcagcctgaggacttcgccacctactactgccagcagagctacagcaccccttggacctttggacagggcaccaagctggaaatcaagagactcgaggacctgaagaacgtgttcccacctgaggtggccgtgttcgagcctagcgaggccgagatcagccacacccagaaagccaccctcgtgtgcctggctaccggcttctaccccgaccatgtggaactgtcttggtgggtcaacggcaaagaggtgcacagcggcgtgtgtaccgacccccagccactgaaagaacagcccgccctgaacgacagccggtactgcctgagcagcagactgagagtgtccgccaccttctggcagaacccccggaaccacttcagatgccaggtgcagttctacggcctgagcgagaacgacgagtggacccaggacagagccaagcccgtgacccagatcgtgtctgccgaagcctggggcagagccgattgcggctttaccagcgagagctaccagcagggcgtgctgagcgccaccatcctgtacgagatcctgctgggcaaggccaccctgtacgccgtgctggtgtctgccctggtgctgatggctatggtcaagcggaaggacagccggggaagggccaagcgatctggatctggagcaacaaacttctcactactcaaacaagcaggtgacgtggaggagaatcccgggcctactagtatggactggatttggcgcatccttttccttgtcggcgctgctaccggcgcgcattccttcgaagaagtgcagctggttgaatcaggtggcggcctggttcagcctggcagaagtctgagactgagctgtgccgccagcggcttcaccttcgacgattacggaatgcactgggtccgacaggcccctggcaaaggacttgaatgggtgtccggcatcagctggaacagcggcagcatcggctatgccgatagcgccaagggcagattcaccatcagccgggacaacagcaagaacaccctgtacctgcagatgaacagcctgagagccgaggacaccgccgtgtactactgtgccaagaggggcaacagcaacagcttcgactattggggccagggcaccctggtcacagtctcttctacgcgtatccagaaccctgatcctgccgtgtaccagctgcgggatagcaagagcagcgacaagagcgtgtgtctgttcaccgacttcgacagccagaccaacgtgtcccagagcaaggactccgacgtgtacatcaccgataagtgcgtgctggacatgcggagcatggacttcaagagcaactccgccgtggcctggtccaacaagtccgatttcgcctgcgccaacgccttcaacaacagcattatccccgaggacacattcttcccaagccccgagagcagctgcgacgtgaagctggtggaaaagagcttcgagacagacaccaacctgaacttccagaacctgagcgtgatcggcttcagaatcctgctgctgaaagtggccggctttaacctgctgatgaccctgcggctgtggtccagc

SEQ ID NO: 9200 - DNA, 2268 bp, Artificial Sequence
  Synthetic Polynucloetide
atggccttaccagtgaccgccttgctcctgccgctggccttgctgctccacgccgccaggccggacatccagatgacacagagccctagcagcgtgtccgcctctgtgggagacagagtgaccatcacctgtagagccagccagagcgtgtccagctacctgaactggtatcagcagaagcccggcaaggcccctaagctgctgatctatgctgccagctctctgcagtctggcgtgcccagcagattttctggcagcggctctggcaccgacttcaccctgaccatatctagcctgcagcctgaggacttcgccacctactactgccagcagagctacagcaccccttggacctttggacagggcaccaagctggaaatcaagagactcgaggacctgaagaacgtgttcccacctgaggtggccgtgttcgagcctagcgaggccgagatcagccacacccagaaagccaccctcgtgtgcctggctaccggcttctaccccgaccatgtggaactgtcttggtgggtcaacggcaaagaggtgcacagcggcgtgtgtaccgacccccagccactgaaagaacagcccgccctgaacgacagccggtactgcctgagcagcagactgagagtgtccgccaccttctggcagaacccccggaaccacttcagatgccaggtgcagttctacggcctgagcgagaacgacgagtggacccaggacagagccaagcccgtgacccagatcgtgtctgccgaagcctggggcagagccgattgcggctttaccagcgagagctaccagcagggcgtgctgagcgccaccatcctgtacgagatcctgctgggcaaggccaccctgtacgccgtgctggtgtctgccctggtgctgatggctatggtcaagcggaaggacagccggggaagggccaagcgatctggatctggagcaacaaacttctcactactcaaacaagcaggtgacgtggaggagaatcccgggcctactagtatggactggatttggcgcatccttttccttgtcggcgctgctaccggcgcccattccgggcccgaagtgcagctggttgaatctggcggaggactggttcaggctggcggatctctgagactgtcttgtgccgccagcggcagaacctttagcatgggctggtttagacaggcccctggcaaagagagagagttcgtcgccgccatcacatactctggcggcagcccttactacgccgactctgtgaagggcagattcaccatcagccgggacaacgccaagaacaccgtgtacctccagatgaacagcctgaagcctgaggacaccgccgtgtactactgcgccgccaatccaacatacggcagcgactggaacgccgagaattggggccagggaacccaagtgacagtgtctagcggatccggcggcggaggatctggcggaggcggatctgggggcggaggctctttcgaagaagtgcagctggttgaatcaggtggcggcctggttcagcctggcagaagtctgagactgagctgtgccgccagcggcttcaccttcgacgattacggaatgcactgggtccgacaggcccctggcaaaggacttgaatgggtgtccggcatcagctggaacagcggcagcatcggctatgccgatagcgccaagggcagattcaccatcagccgggacaacagcaagaacaccctgtacctgcagatgaacagcctgagagccgaggacaccgccgtgtactactgtgccaagaggggcaacagcaacagcttcgactattggggccagggcaccctggtcacagtctcttctacgcgtatccagaaccctgatcctgccgtgtaccagctgcgggatagcaagagcagcgacaagagcgtgtgtctgttcaccgacttcgacagccagaccaacgtgtcccagagcaaggactccgacgtgtacatcaccgataagtgcgtgctggacatgcggagcatggacttcaagagcaactccgccgtggcctggtccaacaagtccgatttcgcctgcgccaacgccttcaacaacagcattatccccgaggacacattcttcccaagccccgagagcagctgcgacgtgaagctggtggaaaagagcttcgagacagacaccaacctgaacttccagaacctgagcgtgatcggcttcagaatcctgctgctgaaagtggccggctttaacctgctgatgaccctgcggctgtggtccagc

SEQ ID NO: 9201 - DNA, 2649 bp, Artificial Sequence
  Synthetic Polynucloetide
atggccttaccagtgaccgccttgctcctgccgctggccttgctgctccacgccgccaggccggacatccagatgacacagagccctagcagcgtgtccgcctctgtgggagacagagtgaccatcacctgtagagccagccagagcgtgtccagctacctgaactggtatcagcagaagcccggcaaggcccctaagctgctgatctatgctgccagctctctgcagtctggcgtgcccagcagattttctggcagcggctctggcaccgacttcaccctgaccatatctagcctgcagcctgaggacttcgccacctactactgccagcagagctacagcaccccttggacctttggacagggcaccaagctggaaatcaagagactcgaggacctgaagaacgtgttcccacctgaggtggccgtgttcgagcctagcgaggccgagatcagccacacccagaaagccaccctcgtgtgcctggctaccggcttctaccccgaccatgtggaactgtcttggtgggtcaacggcaaagaggtgcacagcggcgtgtgtaccgacccccagccactgaaagaacagcccgccctgaacgacagccggtactgcctgagcagcagactgagagtgtccgccaccttctggcagaacccccggaaccacttcagatgccaggtgcagttctacggcctgagcgagaacgacgagtggacccaggacagagccaagcccgtgacccagatcgtgtctgccgaagcctggggcagagccgattgcggctttaccagcgagagctaccagcagggcgtgctgagcgccaccatcctgtacgagatcctgctgggcaaggccaccctgtacgccgtgctggtgtctgccctggtgctgatggctatggtcaagcggaaggacagccggggaagggccaagcgatctggatctggagcaacaaacttctcactactcaaacaagcaggtgacgtggaggagaatcccgggcctactagtatggactggatttggcgcatccttttccttgtcggcgctgctaccggcgcccattcccaactgcaactgcaagagtctggccctggcctggtcaagccttctgaaaccctgagcctgacctgtaccgtgtccggcggctctatcagcagcggcgattactactggggctggatcagacagcctccaggcaagggactcgaatggatcggcagcatcagctacagcggctccacctactacaacccaagcctgaagtccagagtgaccatcagcgtggacaccagcagaaaccagttctccctgaagctgagcagcgtgacagccgccgatacagccgtgtattattgcaccagagaggacagcagcaactggcggagtagaggacagggcacactggtcacagtgtcctcttctggaggcggtggaagcggtggaggaggatctgaagtgcagctggttgaatctggcggaggactggttcaggctggcggatctctgagactgtcttgtgccgccagcggcagaacctttagcatgggctggtttagacaggcccctggcaaagagagagagttcgtcgccgccatcacatactctggcggcagcccttactacgccgactctgtgaagggcagattcaccatcagccgggacaacgccaagaacaccgtgtacctccagatgaacagcctgaagcctgaggacaccgccgtgtactactgcgccgccaatccaacatacggcagcgactggaacgccgagaattggggccagggaacccaagtgacagtgtctagcggatccggcggcggaggatctggcggaggcggatctgggggcggaggctctttcgaagaagtgcagctggttgaatcaggtggcggcctggttcagcctggcagaagtctgagactgagctgtgccgccagcggcttcaccttcgacgattacggaatgcactgggtccgacaggcccctggcaaaggacttgaatgggtgtccggcatcagctggaacagcggcagcatcggctatgccgatagcgccaagggcagattcaccatcagccgggacaacagcaagaacaccctgtacctgcagatgaacagcctgagagccgaggacaccgccgtgtactactgtgccaagaggggcaacagcaacagcttcgactattggggccagggcaccctggtcacagtctcttctacgcgtatccagaaccctgatcctgccgtgtaccagctgcgggatagcaagagcagcgacaagagcgtgtgtctgttcaccgacttcgacagccagaccaacgtgtcccagagcaaggactccgacgtgtacatcaccgataagtgcgtgctggacatgcggagcatggacttcaagagcaactccgccgtggcctggtccaacaagtccgatttcgcctgcgccaacgccttcaacaacagcattatccccgaggacacattcttcccaagccccgagagcagctgcgacgtgaagctggtggaaaagagcttcgagacagacaccaacctgaacttccagaacctgagcgtgatcggcttcagaatcctgctgctgaaagtggccggctttaacctgctgatgaccctgcggctgtggtccagc

SEQ ID NO: 9202 - DNA, 2676 bp, Artificial Sequence
  Synthetic Polynucloetide
atggccttaccagtgaccgccttgctcctgccgctggccttgctgctccacgccgccaggccggaagtgcaggttttggagtctggcggaggactggttcagcctggcggatctctgagactgtcttgtgccgccagcggcttcaccttcagcaactttgccatgagctgggtccgacaggcccctggcaaaggacttgaatgggtgtccacaatcagcggcagcgccggcacaacagattacgccgattctgtgaagggcagattcaccatcagccgggacaacagcaagaaaaccctgtacctccagatgaacagcctgcgcgtggaagataccgccgtgtactactgtgccgatggcagaggccccttcttcgattatcgcggccagggcacactggtcaccgtttcttctggtaccggcggaggcggatctggcggcggaggtagcggtggcggaggatctgaattcgacatccagatgacacagagccctagcagcgtgtccgcctctgtgggagacagagtgaccatcacctgtagagccagccagagcgtgtccagctacctgaactggtatcagcagaagcccggcaaggcccctaagctgctgatctatgctgccagctctctgcagtctggcgtgcccagcagattttctggcagcggctctggcaccgacttcaccctgaccatatctagcctgcagcctgaggacttcgccacctactactgccagcagagctacagcaccccttggacctttggacagggcaccaagctggaaatcaagagactcgaggacctgaagaacgtgttcccacctgaggtggccgtgttcgagcctagcgaggccgagatcagccacacccagaaagccaccctcgtgtgcctggctaccggcttctaccccgaccatgtggaactgtcttggtgggtcaacggcaaagaggtgcacagcggcgtgtgtaccgacccccagccactgaaagaacagcccgccctgaacgacagccggtactgcctgagcagcagactgagagtgtccgccaccttctggcagaacccccggaaccacttcagatgccaggtgcagttctacggcctgagcgagaacgacgagtggacccaggacagagccaagcccgtgacccagatcgtgtctgccgaagcctggggcagagccgattgcggctttaccagcgagagctaccagcagggcgtgctgagcgccaccatcctgtacgagatcctgctgggcaaggccaccctgtacgccgtgctggtgtctgccctggtgctgatggctatggtcaagcggaaggacagccggggaagggccaagcgatctggatctggagcaacaaacttctcactactcaaacaagcaggtgacgtggaggagaatcccgggcctactagtatggactggatttggcgcatccttttccttgtcggcgctgctaccggcgcccattccgggcccgaagtgcagctggttgaatctggcggaggactggttcaggctggcggatctctgagactgtcttgtgccgccagcggcagaacctttagcatgggctggtttagacaggcccctggcaaagagagagagttcgtcgccgccatcacatacagcggcggcagcccttactacgcctcttctgtcagaggccggttcaccatcagccgggacaacgccaagaacaccgtgtacctccagatgaacagcctgaagccagaggacaccgccgtgtactactgtgccgccaatccaacctacggcagcgactggaatgccgagaattggggccagggcacccaagtgacagtgtctagtggatccggcggcggaggatctggcggaggcggatctgggggcggaggctctttcgaagaagtgcagctggttgaatcaggtggcggcctggttcagcctggcagaagtctgagactgagctgtgccgccagcggcttcaccttcgacgattacggaatgcactgggtccgacaggcccctggcaaaggacttgaatgggtgtccggcatcagctggaacagcggcagcatcggctatgccgatagcgccaagggcagattcaccatcagccgggacaacagcaagaacaccctgtacctgcagatgaacagcctgagagccgaggacaccgccgtgtactactgtgccaagaggggcaacagcaacagcttcgactattggggccagggcaccctggtcacagtctcttctacgcgtatccagaaccctgatcctgccgtgtaccagctgcgggatagcaagagcagcgacaagagcgtgtgtctgttcaccgacttcgacagccagaccaacgtgtcccagagcaaggactccgacgtgtacatcaccgataagtgcgtgctggacatgcggagcatggacttcaagagcaactccgccgtggcctggtccaacaagtccgatttcgcctgcgccaacgccttcaacaacagcattatccccgaggacacattcttcccaagccccgagagcagctgcgacgtgaagctggtggaaaagagcttcgagacagacaccaacctgaacttccagaacctgagcgtgatcggcttcagaatcctgctgctgaaagtggccggctttaacctgctgatgaccctgcggctgtggtccagc

SEQ ID NO: 9203 - DNA, 2193 bp, Artificial Sequence
  Synthetic Polynucloetide
atggccttaccagtgaccgccttgctcctgccgctggccttgctgctccacgccgccaggccgcagtctgctctgacccagcctagatccgtgtctggctctcctggacagagcgtgaccatcagctgtaccggcacctcttctgacgtgggcagctacaactacgtgtcctggtatcagcagagccccggcaaggcccctaagctgatgatctacgacgtgtccaacagacccagcggcgtgtccaatagattctccggcagcaagagcggcaacaccgccagcctgacaatctctggactccagtctgaggacgaggccgactactactgtaccagctacggcagctacgacatccccgtgatttttggcggaggcaccaaggtggaaatcaaaggcggaggcggaagtggaggcggaggatctggcggcggaggctctcagatgcagctggtgcagtctggggccgaagtgaagaaacctggcagcagcgtgaaggtgtcctgcaaagcaagcggcggcacctttagctcctacgccatctcttgggtccgacaggctccaggacaaggactggaatggatgggcggcatcatccccatcttcggcacagccaattacgcccagaaattccagggcagagtgacaatcaccgccgacaagagcaccagcaccgcctacatggaactgagcagcctgagaagcgacgacaccgccgtgtactactgcgccagagatgaactgtgggccaccaactactactacatggacgtgtggggcaagggcaccctggtcacagtttcttctacgcgtgagcagaaactgatctcggaagaggatctggcgaagcccaccacgacgccagcgccgcgaccaccaacaccggcgcccaccatcgcgtcgcagcccctgtccctgcgcccagaggcgtgccggccagcggcggggggcgcagtgcacacgagggggctggacttcgcctgtgacatctacatctgggcgcccttggccgggacttgtggggtccttctcctgtcactggttatcaccctttactgcaaacggggcagaaagaaactcctgtatatattcaaacaaccatttatgagaccagtacaaactactcaagaggaagatggctgtagctgccgatttccagaagaagaagaaggaggatgtgaactgagagtgaagttcagcaggagcgcagacgcccccgcgtaccagcagggccagaaccagctctataacgagctgaatctaggacgaagagaggagtacgatgttttggacaagagacgtggccgggaccctgagatggggggaaagccgagaaggaagaaccctcaggaaggcctgtacaatgaactgcagaaagataagatggcggaggcctacagtgagattgggatgaaaggcgagcgccggaggggcaaggggcacgatggcctttaccagggtctcagtacagccaccaaggacacctacgacgcccttcacatgcaggccctgccccctcgctctagtggctccggcgagggcagaggaagtctactaacctgcggagatgtggaagaaaatcctggcccacatatgaccgagtacaagcccacggtgcgcctcgccacccgcgacgacgtccccagggccgtacgcaccctcgccgccgcgttcgccgactaccccgccacgcgccacaccgtcgatccggaccgccacatcgagcgggtcaccgagctgcaagaactcttcctcacgcgcgtcgggctcgacatcggcaaggtgtgggtcgcggacgacggcgccgcggtggcggtctggaccacgccggagagcgtcgaagcgggggcggtgttcgccgagatcggcccgcgcatggccgagttgagcggttcccggctggccgcgcagcaacagatggaaggcctcctggcgccgcaccggcccaaggagcccgcgtggttcctggccaccgtcggcgtctcgcccgaccaccagggcaagggtctgggcagcgccgtcgtgctccccggagtggaggcggccgagcgcgccggggtgcccgccttcctggagacctccgcgccccgcaacctccccttctacgagcggctcggcttcaccgtcaccgccgacgtcgaggtgcccgaaggaccgcgcacctggtgcatgacccgcaagcccggtgcctga

SEQ ID NO: 9204 - DNA, 2175 bp, Artificial Sequence
  Synthetic Polynucloetide
atggccttaccagtgaccgccttgctcctgccgctggccttgctgctccacgccgccaggccgcagtctgctctgacccagcctagatccgtgtctggctctcctggacagagcgtgaccatcagctgtaccggcacctcttctgacgtgggcagctacaactacgtgtcctggtatcagcagagccccggcaaggcccctaagctgatgatctacgacgtgtccaacagacccagcggcgtgtccaatagattctccggcagcaagagcggcaacaccgccagcctgacaatctctggactccagtctgaggacgaggccgactactactgtaccagctacggcagctacgacatccccgtgatttttggcggaggcaccaaggtggaaatcaaaggcggaggcggaagtggaggcggaggatctggcggcggaggctctcagatgcagctggtgcagtctggggccgaagtgaagaaacctggcagcagcgtgaaggtgtcctgcaaagcaagcggcggcacctttagctcctacgccatctcttgggtccgacaggctccaggacaaggactggaatggatgggcggcatcatccccatcttcggcacagccaattacgcccagaaattccagggcagagtgacaatcaccgccgacaagagcaccagcaccgcctacatggaactgagcagcctgagaagcgacgacaccgccgtgtactactgcgccagagatgaactgtgggccaccaactactactacatggacgtgtggggcaagggcaccctggtcacagtttcttctacgcgtgagcagaaactgatctcggaagaggatctgaaaattgaagttatgtatcctcctccttacctagacaatgagaagagcaatggaaccattatccatgtgaaagggaaacacctttgtccaagtcccctatttcccggaccttctaagcccttttgggtgctggtggtggttgggggagtcctggcttgctatagcttgctagtaacagtggcctttattattttctgggtgaggagtaagaggagcaggctcctgcacagtgactacatgaacatgactccacgccgccccggacccacccgcaagcattaccagccctatgccccaccacgcgacttcgcagcctatcgctccagagtgaagttcagcaggagcgcagacgcccccgcgtaccagcagggccagaaccagctctataacgagctcaatctaggacgaagagaggagtacgatgttttggacaagagacgtggccgggaccctgagatggggggaaagccgagaaggaagaaccctcaggaaggcctgtacaatgaactgcagaaagataagatggcggaggcctacagtgagattgggatgaaaggcgagcgccggaggggcaaggggcacgatggcctttaccagggtctcagtacagccaccaaggacacctacgacgcccttcacatgcaggccctgccccctcgctctagtggctccggcgagggcagaggaagtctactaacctgcggagatgtggaagaaaatcctggcccacatatgaccgagtacaagcccacggtgcgcctcgccacccgcgacgacgtccccagggccgtacgcaccctcgccgccgcgttcgccgactaccccgccacgcgccacaccgtcgatccggaccgccacatcgagcgggtcaccgagctgcaagaactcttcctcacgcgcgtcgggctcgacatcggcaaggtgtgggtcgcggacgacggcgccgcggtggcggtctggaccacgccggagagcgtcgaagcgggggcggtgttcgccgagatcggcccgcgcatggccgagttgagcggttcccggctggccgcgcagcaacagatggaaggcctcctggcgccgcaccggcccaaggagcccgcgtggttcctggccaccgtcggcgtctcgcccgaccaccagggcaagggtctgggcagcgccgtcgtgctccccggagtggaggcggccgagcgcgccggggtgcccgccttcctggagacctccgcgccccgcaacctccccttctacgagcggctcggcttcaccgtcaccgccgacgtcgaggtgcccgaaggaccgcgcacctggtgcatgacccgcaagcccggtgcctga

SEQ ID NO: 9205 - DNA, 1503 bp, Artificial Sequence
  Synthetic Polynucloetide
atggccttaccagtgaccgccttgctcctgccgctggccttgctgctccacgccgccaggccgcagtctgctctgacccagcctagatccgtgtctggctctcctggacagagcgtgaccatcagctgtaccggcacctcttctgacgtgggcagctacaactacgtgtcctggtatcagcagagccccggcaaggcccctaagctgatgatctacgacgtgtccaacagacccagcggcgtgtccaatagattctccggcagcaagagcggcaacaccgccagcctgacaatctctggactccagtctgaggacgaggccgactactactgtaccagctacggcagctacgacatccccgtgatttttggcggaggcaccaaggtggaaatcaaaggcggaggcggaagtggaggcggaggatctggcggcggaggctctcagatgcagctggtgcagtctggggccgaagtgaagaaacctggcagcagcgtgaaggtgtcctgcaaagcaagcggcggcacctttagctcctacgccatctcttgggtccgacaggctccaggacaaggactggaatggatgggcggcatcatccccatcttcggcacagccaattacgcccagaaattccagggcagagtgacaatcaccgccgacaagagcaccagcaccgcctacatggaactgagcagcctgagaagcgacgacaccgccgtgtactactgcgccagagatgaactgtgggccaccaactactactacatggacgtgtggggcaagggcaccctggtcacagtttcttctacgcgtgagcagaaactgatctcggaagaggatctgaaaattgaagttatgtatcctcctccttacctagacaatgagaagagcaatggaaccattatccatgtgaaagggaaacacctttgtccaagtcccctatttcccggaccttctaagcccttttgggtgctggtggtggttgggggagtcctggcttgctatagcttgctagtaacagtggcctttattattttctgggtgaggagtaagaggagcaggctcctgcacagtgactacatgaacatgactccacgccgccccggacccacccgcaagcattaccagccctatgccccaccacgcgacttcgcagcctatcgctccagagtgaagttcagcaggagcgcagacgcccccgcgtaccagcagggccagaaccagctctataacgagctcaatctaggacgaagagaggagtacgatgttttggacaagagacgtggccgggaccctgagatggggggaaagccgagaaggaagaaccctcaggaaggcctgtacaatgaactgcagaaagataagatggcggaggcctacagtgagattgggatgaaaggcgagcgccggaggggcaaggggcacgatggcctttaccagggtctcagtacagccaccaaggacacctacgacgcccttcacatgcaggccctgccccctcgc

SEQ ID NO: 9206 - DNA, 1524 bp, Artificial Sequence
  Synthetic Polynucloetide
atggccttaccagtgaccgccttgctcctgccgctggccttgctgctccacgccgccaggccgcagtctgctctgacccagcctagatccgtgtctggctctcctggacagagcgtgaccatcagctgtaccggcacctcttctgacgtgggcagctacaactacgtgtcctggtatcagcagagccccggcaaggcccctaagctgatgatctacgacgtgtccaacagacccagcggcgtgtccaatagattctccggcagcaagagcggcaacaccgccagcctgacaatctctggactccagtctgaggacgaggccgactactactgtaccagctacggcagctacgacatccccgtgatttttggcggaggcaccaaggtggaaatcaaaggcggaggcggaagtggaggcggaggatctggcggcggaggctctcagatgcagctggtgcagtctggggccgaagtgaagaaacctggcagcagcgtgaaggtgtcctgcaaagcaagcggcggcacctttagctcctacgccatctcttgggtccgacaggctccaggacaaggactggaatggatgggcggcatcatccccatcttcggcacagccaattacgcccagaaattccagggcagagtgacaatcaccgccgacaagagcaccagcaccgcctacatggaactgagcagcctgagaagcgacgacaccgccgtgtactactgcgccagagatgaactgtgggccaccaactactactacatggacgtgtggggcaagggcaccctggtcacagtttcttctacgcgtgagcagaaactgatctcggaagaggatctggcgaagcccaccacgacgccagcgccgcgaccaccaacaccggcgcccaccatcgcgtcgcagcccctgtccctgcgcccagaggcgtgccggccagcggcggggggcgcagtgcacacgagggggctggacttcgcctgtgacatctacatctgggcgcccttggccgggacttgtggggtccttctcctgtcactggttatcaccctttactgcaaacggggcagaaagaaactcctgtatatattcaaacaaccatttatgagaccagtacaaactactcaagaggaagatggctgtagctgccgatttccagaagaagaagaaggaggatgtgaactgagagtgaagttcagcaggagcgcagacgcccccgcgtaccagcagggccagaaccagctctataacgagctgaatctaggacgaagagaggagtacgatgttttggacaagagacgtggccgggaccctgagatggggggaaagccgagaaggaagaaccctcaggaaggcctgtacaatgaactgcagaaagataagatggcggaggcctacagtgagattgggatgaaaggcgagcgccggaggggcaaggggcacgatggcctttaccagggtctcagtacagccaccaaggacacctacgacgcccttcacatgcaggccctgccccctcgctga

SEQ ID NO: 9207 - DNA, 1524 bp, Artificial Sequence
  Synthetic Polynucloetide
atggccttaccagtgaccgccttgctcctgccgctggccttgctgctccacgccgccaggccgcagatgcagctggtgcagtctggggccgaagtgaagaaacctggcagcagcgtgaaggtgtcctgcaaagcaagcggcggcacctttagctcctacgccatctcttgggtccgacaggctccaggacaaggactggaatggatgggcggcatcatccccatcttcggcacagccaattacgcccagaaattccagggcagagtgacaatcaccgccgacaagagcaccagcaccgcctacatggaactgagcagcctgagaagcgacgacaccgccgtgtactactgcgccagagatgaactgtgggccaccaactactactacatggacgtgtggggcaagggcaccctggtcacagtttcttctggcggaggcggaagtggaggcggaggatctggcggcggaggctctcagtctgctctgacccagcctagatccgtgtctggctctcctggacagagcgtgaccatcagctgtaccggcacctcttctgacgtgggcagctacaactacgtgtcctggtatcagcagagccccggcaaggcccctaagctgatgatctacgacgtgtccaacagacccagcggcgtgtccaatagattctccggcagcaagagcggcaacaccgccagcctgacaatctctggactccagtctgaggacgaggccgactactactgtaccagctacggcagctacgacatccccgtgatttttggcggaggcaccaaggtggaaatcaaaacgcgtgagcagaaactgatctcggaagaggatctggcgaagcccaccacgacgccagcgccgcgaccaccaacaccggcgcccaccatcgcgtcgcagcccctgtccctgcgcccagaggcgtgccggccagcggcggggggcgcagtgcacacgagggggctggacttcgcctgtgacatctacatctgggcgcccttggccgggacttgtggggtccttctcctgtcactggttatcaccctttactgcaaacggggcagaaagaaactcctgtatatattcaaacaaccatttatgagaccagtacaaactactcaagaggaagatggctgtagctgccgatttccagaagaagaagaaggaggatgtgaactgagagtgaagttcagcaggagcgcagacgcccccgcgtaccagcagggccagaaccagctctataacgagctgaatctaggacgaagagaggagtacgatgttttggacaagagacgtggccgggaccctgagatggggggaaagccgagaaggaagaaccctcaggaaggcctgtacaatgaactgcagaaagataagatggcggaggcctacagtgagattgggatgaaaggcgagcgccggaggggcaaggggcacgatggcctttaccagggtctcagtacagccaccaaggacacctacgacgcccttcacatgcaggccctgccccctcgctga

SEQ ID NO: 9208 - DNA, 2763 bp, Artificial Sequence
  Synthetic Polynucloetide
atggccttaccagtgaccgccttgctcctgccgctggccttgctgctccacgccgccaggccgcagtctgctctgacccagcctagatccgtgtctggctctcctggacagagcgtgaccatcagctgtaccggcacctcttctgacgtgggcagctacaactacgtgtcctggtatcagcagagccccggcaaggcccctaagctgatgatctacgacgtgtccaacagacccagcggcgtgtccaatagattctccggcagcaagagcggcaacaccgccagcctgacaatctctggactccagtctgaggacgaggccgactactactgtaccagctacggcagctacgacatccccgtgatttttggcggaggcaccaaggtggaaatcaaaggcggaggcggaagtggaggcggaggatctggcggcggaggctctcagatgcagctggtgcagtctggggccgaagtgaagaaacctggcagcagcgtgaaggtgtcctgcaaagcaagcggcggcacctttagctcctacgccatctcttgggtccgacaggctccaggacaaggactggaatggatgggcggcatcatccccatcttcggcacagccaattacgcccagaaattccagggcagagtgacaatcaccgccgacaagagcaccagcaccgcctacatggaactgagcagcctgagaagcgacgacaccgccgtgtactactgcgccagagatgaactgtgggccaccaactactactacatggacgtgtggggcaagggcaccctggtcacagtttcttctacgcgtgagcagaaactgatctcggaagaggatctggcgaagcccaccacgacgccagcgccgcgaccaccaacaccggcgcccaccatcgcgtcgcagcccctgtccctgcgcccagaggcgtgccggccagcggcggggggcgcagtgcacacgagggggctggacttcgcctgtgacatctacatctgggcgcccttggccgggacttgtggggtccttctcctgtcactggttatcaccctttactgcgggcgcgccagagtgaagttcagcaggagcgcagacgcccccgcgtaccagcagggccagaaccagctctataacgagctgaatctaggacgaagagaggagtacgatgttttggacaagagacgtggccgggaccctgagatggggggaaagccgagaaggaagaaccctcaggaaggcctgtacaatgaactgcagaaagataagatggcggaggcctacagtgagattgggatgaaaggcgagcgccggaggggcaaggggcacgatggcctttaccagggtctcagtacagccaccaaggacacctacgacgcccttcacatgcaggccctgccccctcgctctagaggatctggagcaacaaacttctcactactcaaacaagcaggtgacgtggaggagaatcccgggcctgggatccacatggccacttacgaggttctctgtgaggtggcgcggaaactgggcacggatgacagggaagtggtattgttcctcctaaacgtgttcatacctcaacccacactggcccaattaattggagctcttagagctttaaaggaggagggcaggttaacgtttcccctgttagcggaatgtctgtttcgtgcaggtcgcagagacctcttgcgcgacctgcttcacttagacccgcgttttttagagcgccacctagcgggcacaatgagttatttcagcccttatcagctcactgttctccacgtagacggggagctgtgtgcgagggatattaggtctttgatatttttaagcaaggacactatagggtctcgcagcacaccacagacattcttacactgggtgtactgtatggaaaacttagacctactgggtcccactgacgtggatgccctaatgtcaatgcttagatctttgtcaagagtagacctacagcgccaagtgcaaaccctaatgggccttcacctttccggcccatcacactcccaacactatcgccatacaccactcgagaccgatttctacgactacaaggacgacgatgacaagactagtggctccggcgagggcagaggaagtctactaacctgcggagatgtggaagaaaatcctggcccacatatgaccgagtacaagcccacggtgcgcctcgccacccgcgacgacgtccccagggccgtacgcaccctcgccgccgcgttcgccgactaccccgccacgcgccacaccgtcgatccggaccgccacatcgagcgggtcaccgagctgcaagaactcttcctcacgcgcgtcgggctcgacatcggcaaggtgtgggtcgcggacgacggcgccgcggtggcggtctggaccacgccggagagcgtcgaagcgggggcggtgttcgccgagatcggcccgcgcatggccgagttgagcggttcccggctggccgcgcagcaacagatggaaggcctcctggcgccgcaccggcccaaggagcccgcgtggttcctggccaccgtcggcgtctcgcccgaccaccagggcaagggtctgggcagcgccgtcgtgctccccggagtggaggcggccgagcgcgccggggtgcccgccttcctggagacctccgcgccccgcaacctccccttctacgagcggctcggcttcaccgtcaccgccgacgtcgaggtgcccgaaggaccgcgcacctggtgcatgacccgcaagcccggtgcctga

SEQ ID NO: 9209 - DNA, 2583 bp, Artificial Sequence
  Synthetic Polynucloetide
atggccttaccagtgaccgccttgctcctgccgctggccttgctgctccacgccgccaggccgcagtctgctctgacccagcctagatccgtgtctggctctcctggacagagcgtgaccatcagctgtaccggcacctcttctgacgtgggcagctacaactacgtgtcctggtatcagcagagccccggcaaggcccctaagctgatgatctacgacgtgtccaacagacccagcggcgtgtccaatagattctccggcagcaagagcggcaacaccgccagcctgacaatctctggactccagtctgaggacgaggccgactactactgtaccagctacggcagctacgacatccccgtgatttttggcggaggcaccaaggtggaaatcaaactcgagatccagaaccctgatcctgccgtgtaccagctgcgggatagcaagagcagcgacaagagcgtgtgtctgttcaccgacttcgacagccagaccaacgtgtcccagagcaaggactccgacgtgtacatcaccgataagtgcgtgctggacatgcggagcatggacttcaagagcaactccgccgtggcctggtccaacaagtccgatttcgcctgcgccaacgccttcaacaacagcattatccccgaggacacattcttcccaagcagcgacgtgccctgcgacgtgaagctggtggaaaagagcttcgagacagacaccaacctgaacttccagaacctgagcgtgatcggcttcagaatcctgctgctgaaagtggccggctttaacctgctgatgaccctgcggctgtggtccagccgcgccaagagaagcggatctggcgtgaagcagaccctgaatttcgacctgctgaagctggctggcgacgtggaatccaacccaggccctactagtatggactggatttggcgcatccttttccttgtcggcgctgctaccggcgcgcattccttcgaacagatgcagctggtgcagtctggggccgaagtgaagaaacctggcagcagcgtgaaggtgtcctgcaaagcaagcggcggcacctttagctcctacgccatctcttgggtccgacaggctccaggacaaggactggaatggatgggcggcatcatccccatcttcggcacagccaattacgcccagaaattccagggcagagtgacaatcaccgccgacaagagcaccagcaccgcctacatggaactgagcagcctgagaagcgacgacaccgccgtgtactactgcgccagagatgaactgtgggccaccaactactactacatggacgtgtggggcaagggcaccctggtcacagtttcttctacgcgtgaggacctgaagaacgtgttcccacctgaggtggccgtgttcgagcctagcaaggccgagatcgcccacacccagaaagccaccctcgtgtgcctggctaccggcttctaccccgaccatgtggaactgtcttggtgggtcaacggcaaagaggtgcacagcggcgtgtgtaccgacccccagccactgaaagaacagcccgccctgaacgacagccggtactgcctgagcagcagactgagagtgtccgccaccttctggcagaacccccggaaccacttcagatgccaggtgcagttctacggcctgagcgagaacgacgagtggacccaggacagagccaagcccgtgacccagatcgtgtctgccgaagcctggggcagagccgattgcggcatcaccagcgccagctaccaccagggcgtgctgagcgccaccatcctgtacgagatcctgctgggcaaggccaccctgtacgccgtgctggtgtctgccctggtgctgatggctatggtcaagcggaaggacagccggggaagggccaagcgatctggatctggagcaacaaacttctcactactcaaacaagcaggtgacgtggaggagaatcccgggccttctagaggccatatgaccgagtacaagcccacggtgcgcctcgccacccgcgacgacgtccccagggccgtacgcaccctcgccgccgcgttcgccgactaccccgccacgcgccacaccgtcgatccggaccgccacatcgagcgggtcaccgagctgcaagaactcttcctcacgcgcgtcgggctcgacatcggcaaggtgtgggtcgcggacgacggcgccgcggtggcggtctggaccacgccggagagcgtcgaagcgggggcggtgttcgccgagatcggcccgcgcatggccgagttgagcggttcccggctggccgcgcagcaacagatggaaggcctcctggcgccgcaccggcccaaggagcccgcgtggttcctggccaccgtcggcgtctcgcccgaccaccagggcaagggtctgggcagcgccgtcgtgctccccggagtggaggcggccgagcgcgccggggtgcccgccttcctggagacctccgcgccccgcaacctccccttctacgagcggctcggcttcaccgtcaccgccgacgtcgaggtgcccgaaggaccgcgcacctggtgcatgacccgcaagcccggtgcctga

SEQ ID NO: 9210 - DNA, 2580 bp, Artificial Sequence
  Synthetic Polynucloetide
atggccttaccagtgaccgccttgctcctgccgctggccttgctgctccacgccgccaggccgcagtctgctctgacccagcctagatccgtgtctggctctcctggacagagcgtgaccatcagctgtaccggcacctcttctgacgtgggcagctacaactacgtgtcctggtatcagcagagccccggcaaggcccctaagctgatgatctacgacgtgtccaacagacccagcggcgtgtccaatagattctccggcagcaagagcggcaacaccgccagcctgacaatctctggactccagtctgaggacgaggccgactactactgtaccagctacggcagctacgacatccccgtgatttttggcggaggcaccaaggtggaaatcaaactcgaggacctgaagaacgtgttcccacctgaggtggccgtgttcgagcctagcaaggccgagatcgcccacacccagaaagccaccctcgtgtgcctggctaccggcttctaccccgaccatgtggaactgtcttggtgggtcaacggcaaagaggtgcacagcggcgtgtgtaccgacccccagccactgaaagaacagcccgccctgaacgacagccggtactgcctgagcagcagactgagagtgtccgccaccttctggcagaacccccggaaccacttcagatgccaggtgcagttctacggcctgagcgagaacgacgagtggacccaggacagagccaagcccgtgacccagatcgtgtctgccgaagcctggggcagagccgattgcggcatcaccagcgccagctaccaccagggcgtgctgagcgccaccatcctgtacgagatcctgctgggcaaggccaccctgtacgccgtgctggtgtctgccctggtgctgatggctatggtcaagcggaaggacagccggggaagggccaagcgatctggatctggagcaacaaacttctcactactcaaacaagcaggtgacgtggaggagaatcccgggcctactagtatggactggatttggcgcatccttttccttgtcggcgctgctaccggcgcgcattccttcgaacagatgcagctggtgcagtctggggccgaagtgaagaaacctggcagcagcgtgaaggtgtcctgcaaagcaagcggcggcacctttagctcctacgccatctcttgggtccgacaggctccaggacaaggactggaatggatgggcggcatcatccccatcttcggcacagccaattacgcccagaaattccagggcagagtgacaatcaccgccgacaagagcaccagcaccgcctacatggaactgagcagcctgagaagcgacgacaccgccgtgtactactgcgccagagatgaactgtgggccaccaactactactacatggacgtgtggggcaagggcaccctggtcacagtttcttctacgcgtatccagaaccctgatcctgccgtgtaccagctgcgggatagcaagagcagcgacaagagcgtgtgtctgttcaccgacttcgacagccagaccaacgtgtcccagagcaaggactccgacgtgtacatcaccgataagtgcgtgctggacatgcggagcatggacttcaagagcaactccgccgtggcctggtccaacaagtccgatttcgcctgcgccaacgccttcaacaacagcattatccccgaggacacattcttcccaagcagcgacgtgccctgcgacgtgaagctggtggaaaagagcttcgagacagacaccaacctgaacttccagaacctgagcgtgatcggcttcagaatcctgctgctgaaagtggccggctttaacctgctgatgaccctgcggctgtggtccagccgcgccaagagaagcggatctggcgtgaagcagaccctgaatttcgacctgctgaagctggctggcgacgtggaatccaacccaggcccttctagaggccatatgaccgagtacaagcccacggtgcgcctcgccacccgcgacgacgtccccagggccgtacgcaccctcgccgccgcgttcgccgactaccccgccacgcgccacaccgtcgatccggaccgccacatcgagcgggtcaccgagctgcaagaactcttcctcacgcgcgtcgggctcgacatcggcaaggtgtgggtcgcggacgacggcgccgcggtggcggtctggaccacgccggagagcgtcgaagcgggggcggtgttcgccgagatcggcccgcgcatggccgagttgagcggttcccggctggccgcgcagcaacagatggaaggcctcctggcgccgcaccggcccaaggagcccgcgtggttcctggccaccgtcggcgtctcgcccgaccaccagggcaagggtctgggcagcgccgtcgtgctccccggagtggaggcggccgagcgcgccggggtgcccgccttcctggagacctccgcgccccgcaacctccccttctacgagcggctcggcttcaccgtcaccgccgacgtcgaggtgcccgaaggaccgcgcacctggtgcatgacccgcaagcccggtgcctga

SEQ ID NO: 9211 - DNA, 1878 bp, Artificial Sequence
  Synthetic Polynucloetide
atggccttaccagtgaccgccttgctcctgccgctggccttgctgctccacgccgccaggccgcagtctgctctgacccagcctagatccgtgtctggctctcctggacagagcgtgaccatcagctgtaccggcacctcttctgacgtgggcagctacaactacgtgtcctggtatcagcagagccccggcaaggcccctaagctgatgatctacgacgtgtccaacagacccagcggcgtgtccaatagattctccggcagcaagagcggcaacaccgccagcctgacaatctctggactccagtctgaggacgaggccgactactactgtaccagctacggcagctacgacatccccgtgatttttggcggaggcaccaaggtggaaatcaaactcgaggacctgaagaacgtgttcccacctgaggtggccgtgttcgagcctagcgaggccgagatcagccacacccagaaagccaccctcgtgtgcctggctaccggcttctaccccgaccatgtggaactgtcttggtgggtcaacggcaaagaggtgcacagcggcgtgtgtaccgacccccagccactgaaagaacagcccgccctgaacgacagccggtactgcctgagcagcagactgagagtgtccgccaccttctggcagaacccccggaaccacttcagatgccaggtgcagttctacggcctgagcgagaacgacgagtggacccaggacagagccaagcccgtgacccagatcgtgtctgccgaagcctggggcagagccgattgcggctttaccagcgagagctaccagcagggcgtgctgagcgccaccatcctgtacgagatcctgctgggcaaggccaccctgtacgccgtgctggtgtctgccctggtgctgatggctatggtcaagcggaaggacagccggggaagggccaagcgatctggatctggagcaacaaacttctcactactcaaacaagcaggtgacgtggaggagaatcccgggcctactagtatggactggatttggcgcatccttttccttgtcggcgctgctaccggcgcgcattccttcgaacagatgcagctggtgcagtctggggccgaagtgaagaaacctggcagcagcgtgaaggtgtcctgcaaagcaagcggcggcacctttagctcctacgccatctcttgggtccgacaggctccaggacaaggactggaatggatgggcggcatcatccccatcttcggcacagccaattacgcccagaaattccagggcagagtgacaatcaccgccgacaagagcaccagcaccgcctacatggaactgagcagcctgagaagcgacgacaccgccgtgtactactgcgccagagatgaactgtgggccaccaactactactacatggacgtgtggggcaagggcaccctggtcacagtttcttctacgcgtatccagaaccctgatcctgccgtgtaccagctgcgggatagcaagagcagcgacaagagcgtgtgtctgttcaccgacttcgacagccagaccaacgtgtcccagagcaaggactccgacgtgtacatcaccgataagtgcgtgctggacatgcggagcatggacttcaagagcaactccgccgtggcctggtccaacaagtccgatttcgcctgcgccaacgccttcaacaacagcattatccccgaggacacattcttcccaagccccgagagcagctgcgacgtgaagctggtggaaaagagcttcgagacagacaccaacctgaacttccagaacctgagcgtgatcggcttcagaatcctgctgctgaaagtggccggctttaacctgctgatgaccctgcggctgtggtccagc

SEQ ID NO: 9212 - DNA, 2553 bp, Artificial Sequence
  Synthetic Polynucloetide
atggccttaccagtgaccgccttgctcctgccgctggccttgctgctccacgccgccaggccgcagtctgctctgacccagcctagatccgtgtctggctctcctggacagagcgtgaccatcagctgtaccggcacctcttctgacgtgggcagctacaactacgtgtcctggtatcagcagagccccggcaaggcccctaagctgatgatctacgacgtgtccaacagacccagcggcgtgtccaatagattctccggcagcaagagcggcaacaccgccagcctgacaatctctggactccagtctgaggacgaggccgactactactgtaccagctacggcagctacgacatccccgtgatttttggcggaggcaccaaggtggaaatcaaactcgaggacctgaagaacgtgttcccacctgaggtggccgtgttcgagcctagcgaggccgagatcagccacacccagaaagccaccctcgtgtgcctggctaccggcttctaccccgaccatgtggaactgtcttggtgggtcaacggcaaagaggtgcacagcggcgtgtgtaccgacccccagccactgaaagaacagcccgccctgaacgacagccggtactgcctgagcagcagactgagagtgtccgccaccttctggcagaacccccggaaccacttcagatgccaggtgcagttctacggcctgagcgagaacgacgagtggacccaggacagagccaagcccgtgacccagatcgtgtctgccgaagcctggggcagagccgattgcggctttaccagcgagagctaccagcagggcgtgctgagcgccaccatcctgtacgagatcctgctgggcaaggccaccctgtacgccgtgctggtgtctgccctggtgctgatggctatggtcaagcggaaggacagccggggaagggccaagcgatctggatctggagcaacaaacttctcactactcaaacaagcaggtgacgtggaggagaatcccgggcctactagtatggactggatttggcgcatccttttccttgtcggcgctgctaccggcgcgcattccttcgaacagatgcagctggtgcagtctggggccgaagtgaagaaacctggcagcagcgtgaaggtgtcctgcaaagcaagcggcggcacctttagctcctacgccatctcttgggtccgacaggctccaggacaaggactggaatggatgggcggcatcatccccatcttcggcacagccaattacgcccagaaattccagggcagagtgacaatcaccgccgacaagagcaccagcaccgcctacatggaactgagcagcctgagaagcgacgacaccgccgtgtactactgcgccagagatgaactgtgggccaccaactactactacatggacgtgtggggcaagggcaccctggtcacagtttcttctacgcgtatccagaaccctgatcctgccgtgtaccagctgcgggatagcaagagcagcgacaagagcgtgtgtctgttcaccgacttcgacagccagaccaacgtgtcccagagcaaggactccgacgtgtacatcaccgataagtgcgtgctggacatgcggagcatggacttcaagagcaactccgccgtggcctggtccaacaagtccgatttcgcctgcgccaacgccttcaacaacagcattatccccgaggacacattcttcccaagccccgagagcagctgcgacgtgaagctggtggaaaagagcttcgagacagacaccaacctgaacttccagaacctgagcgtgatcggcttcagaatcctgctgctgaaagtggccggctttaacctgctgatgaccctgcggctgtggtccagccgcgccaagagaagcggatctggcgtgaagcagaccctgaatttcgacctgctgaagctggctggcgacgtggaatccaacccaggcccttctagaggcgggatccacaccatggctacctacgaggtgctgtgcgaggtggcaagaaagctgggcaccgacgacagagaagtggtgctgttcctgctgaacgtgttcatccctcagcctacactggcccagctgatcggtgcactgagagccctgaaagaggaaggccggctgacctttcctctgctggccgaatgcctgttcagagccggaagaagggatctgctgcgggacctgctgcatctggaccccagatttctggaaagacacctggccggcaccatgagctacttcagcccttaccagctgaccgtgctgcacgttgacggcgaactgtgcgccagagatattcggagcctgatcttcctgagcaaggacaccatcggcagccggtctacccctcagacatttctgcactgggtgtactgcatggaaaacctggacctgctcggccccacagatgtggatgccctgatgtccatgctgagaagcctgagcagagtggacctccagagacaggtgcagacactgatgggactgcacctgagcggacctagccacagccagcactacagacacacccct

SEQ ID NO: 9213 - DNA, 1890 bp, Artificial Sequence
  Synthetic Polynucloetide
atggccttaccagtgaccgccttgctcctgccgctggccttgctgctccacgccgccaggccgcagtctgctctgacccagcctagatccgtgtctggctctcctggacagagcgtgaccatcagctgtaccggcacctcttctgacgtgggcagctacaactacgtgtcctggtatcagcagagccccggcaaggcccctaagctgatgatctacgacgtgtccaacagacccagcggcgtgtccaatagattctccggcagcaagagcggcaacaccgccagcctgacaatctctggactccagtctgaggacgaggccgactactactgtaccagctacggcagctacgacatccccgtgatttttggcggaggcaccaaggtggaaatcaaactcgagatccagaaccctgatcctgccgtgtaccagctgcgggatagcaagagcagcgacaagagcgtgtgtctgttcaccgacttcgacagccagaccaacgtgtcccagagcaaggactccgacgtgtacatcaccgataagtgcgtgctggacatgcggagcatggacttcaagagcaactccgccgtggcctggtccaacaagtccgatttcgcctgcgccaacgccttcaacaacagcattatccccgaggacacattcttcccaagccccgagagcagctgcgacgtgaagctggtggaaaagagcttcgagacagacaccaacctgaacttccagaacctgagcgtgatcggcttcagaatcctgctgctgaaagtggccggctttaacctgctgatgaccctgcggctgtggtccagccgcgccaagagaagcggatctggcgtgaagcagaccctgaatttcgacctgctgaagctggctggcgacgtggaatccaacccaggccctactagtatggactggatttggcgcatccttttccttgtcggcgctgctaccggcgcgcattccttcgaacagatgcagctggtgcagtctggggccgaagtgaagaaacctggcagcagcgtgaaggtgtcctgcaaagcaagcggcggcacctttagctcctacgccatctcttgggtccgacaggctccaggacaaggactggaatggatgggcggcatcatccccatcttcggcacagccaattacgcccagaaattccagggcagagtgacaatcaccgccgacaagagcaccagcaccgcctacatggaactgagcagcctgagaagcgacgacaccgccgtgtactactgcgccagagatgaactgtgggccaccaactactactacatggacgtgtggggcaagggcaccctggtcacagtttcttctacgcgtgaggacctgaagaacgtgttcccacctgaggtggccgtgttcgagcctagcgaggccgagatcagccacacccagaaagccaccctcgtgtgcctggctaccggcttctaccccgaccatgtggaactgtcttggtgggtcaacggcaaagaggtgcacagcggcgtgtgtaccgacccccagccactgaaagaacagcccgccctgaacgacagccggtactgcctgagcagcagactgagagtgtccgccaccttctggcagaacccccggaaccacttcagatgccaggtgcagttctacggcctgagcgagaacgacgagtggacccaggacagagccaagcccgtgacccagatcgtgtctgccgaagcctggggcagagccgattgcggctttaccagcgagagctaccagcagggcgtgctgagcgccaccatcctgtacgagatcctgctgggcaaggccaccctgtacgccgtgctggtgtctgccctggtgctgatggctatggtcaagcggaaggacagccgggga

SEQ ID NO: 9214 - DNA, 2556 bp, Artificial Sequence
  Synthetic Polynucloetide
atggccttaccagtgaccgccttgctcctgccgctggccttgctgctccacgccgccaggccgcagtctgctctgacccagcctagatccgtgtctggctctcctggacagagcgtgaccatcagctgtaccggcacctcttctgacgtgggcagctacaactacgtgtcctggtatcagcagagccccggcaaggcccctaagctgatgatctacgacgtgtccaacagacccagcggcgtgtccaatagattctccggcagcaagagcggcaacaccgccagcctgacaatctctggactccagtctgaggacgaggccgactactactgtaccagctacggcagctacgacatccccgtgatttttggcggaggcaccaaggtggaaatcaaactcgagatccagaaccctgatcctgccgtgtaccagctgcgggatagcaagagcagcgacaagagcgtgtgtctgttcaccgacttcgacagccagaccaacgtgtcccagagcaaggactccgacgtgtacatcaccgataagtgcgtgctggacatgcggagcatggacttcaagagcaactccgccgtggcctggtccaacaagtccgatttcgcctgcgccaacgccttcaacaacagcattatccccgaggacacattcttcccaagccccgagagcagctgcgacgtgaagctggtggaaaagagcttcgagacagacaccaacctgaacttccagaacctgagcgtgatcggcttcagaatcctgctgctgaaagtggccggctttaacctgctgatgaccctgcggctgtggtccagccgcgccaagagaagcggatctggcgtgaagcagaccctgaatttcgacctgctgaagctggctggcgacgtggaatccaacccaggccctactagtatggactggatttggcgcatccttttccttgtcggcgctgctaccggcgcgcattccttcgaacagatgcagctggtgcagtctggggccgaagtgaagaaacctggcagcagcgtgaaggtgtcctgcaaagcaagcggcggcacctttagctcctacgccatctcttgggtccgacaggctccaggacaaggactggaatggatgggcggcatcatccccatcttcggcacagccaattacgcccagaaattccagggcagagtgacaatcaccgccgacaagagcaccagcaccgcctacatggaactgagcagcctgagaagcgacgacaccgccgtgtactactgcgccagagatgaactgtgggccaccaactactactacatggacgtgtggggcaagggcaccctggtcacagtttcttctacgcgtgaggacctgaagaacgtgttcccacctgaggtggccgtgttcgagcctagcgaggccgagatcagccacacccagaaagccaccctcgtgtgcctggctaccggcttctaccccgaccatgtggaactgtcttggtgggtcaacggcaaagaggtgcacagcggcgtgtgtaccgacccccagccactgaaagaacagcccgccctgaacgacagccggtactgcctgagcagcagactgagagtgtccgccaccttctggcagaacccccggaaccacttcagatgccaggtgcagttctacggcctgagcgagaacgacgagtggacccaggacagagccaagcccgtgacccagatcgtgtctgccgaagcctggggcagagccgattgcggctttaccagcgagagctaccagcagggcgtgctgagcgccaccatcctgtacgagatcctgctgggcaaggccaccctgtacgccgtgctggtgtctgccctggtgctgatggctatggtcaagcggaaggacagccggggaagggccaagcgatctggatctggagcaacaaacttctcactactcaaacaagcaggtgacgtggaggagaatcccgggccttctagaggcgggatccacaccatggctacctacgaggtgctgtgcgaggtggcaagaaagctgggcaccgacgacagagaagtggtgctgttcctgctgaacgtgttcatccctcagcctacactggcccagctgatcggtgcactgagagccctgaaagaggaaggccggctgacctttcctctgctggccgaatgcctgttcagagccggaagaagggatctgctgcgggacctgctgcatctggaccccagatttctggaaagacacctggccggcaccatgagctacttcagcccttaccagctgaccgtgctgcacgttgacggcgaactgtgcgccagagatattcggagcctgatcttcctgagcaaggacaccatcggcagccggtctacccctcagacatttctgcactgggtgtactgcatggaaaacctggacctgctcggccccacagatgtggatgccctgatgtccatgctgagaagcctgagcagagtggacctccagagacaggtgcagacactgatgggactgcacctgagcggacctagccacagccagcactacagacacacccct

SEQ ID NO: 9215 - DNA, 2715 bp, Artificial Sequence
  Synthetic Polynucloetide
atggccttaccagtgaccgccttgctcctgccgctggccttgctgctccacgccgccaggccgctcgaggggaaaccaattcccaaccctcttctgggactggattcaaccggcagcggcgaggacctgaagaacgtgttcccacctgaggtggccgtgttcgagcctagcaaggccgagatcgcccacacccagaaagccaccctcgtgtgcctggctaccggcttctaccccgaccatgtggaactgtcttggtgggtcaacggcaaagaggtgcacagcggcgtgtgtaccgacccccagccactgaaagaacagcccgccctgaacgacagccggtactgcctgagcagcagactgagagtgtccgccaccttctggcagaacccccggaaccacttcagatgccaggtgcagttctacggcctgagcgagaacgacgagtggacccaggacagagccaagcccgtgacccagatcgtgtctgccgaagcctggggcagagccgattgcggcatcaccagcgccagctaccaccagggcgtgctgagcgccaccatcctgtacgagatcctgctgggcaaggccaccctgtacgccgtgctggtgtctgccctggtgctgatggctatggtcaagcggaaggacagccggggaagggccaagcgatctggatctggagcaacaaacttctcactactcaaacaagcaggtgacgtggaggagaatcccgggcctactagcatggccttaccagtgaccgccttgctcctgccgctggccttgctgctccacgccgccaggccgcagtctgctctgacccagcctagatccgtgtctggctctcctggacagagcgtgaccatcagctgtaccggcacctcttctgacgtgggcagctacaactacgtgtcctggtatcagcagagccccggcaaggcccctaagctgatgatctacgacgtgtccaacagacccagcggcgtgtccaatagattctccggcagcaagagcggcaacaccgccagcctgacaatctctggactccagtctgaggacgaggccgactactactgtaccagctacggcagctacgacatccccgtgatttttggcggaggcaccaaggtggaaatcaaaggcggaggcggaagtggaggcggaggatctggcggcggaggctctcagatgcagctggtgcagtctggggccgaagtgaagaaacctggcagcagcgtgaaggtgtcctgcaaagcaagcggcggcacctttagctcctacgccatctcttgggtccgacaggctccaggacaaggactggaatggatgggcggcatcatccccatcttcggcacagccaattacgcccagaaattccagggcagagtgacaatcaccgccgacaagagcaccagcaccgcctacatggaactgagcagcctgagaagcgacgacaccgccgtgtactactgcgccagagatgaactgtgggccaccaactactactacatggacgtgtggggcaagggcaccctggtcacagtttcttctacgcgtgagcagaaactgatctcggaagaggatgggagcggcatccagaaccctgatcctgccgtgtaccagctgcgggatagcaagagcagcgacaagagcgtgtgtctgttcaccgacttcgacagccagaccaacgtgtcccagagcaaggactccgacgtgtacatcaccgataagtgcgtgctggacatgcggagcatggacttcaagagcaactccgccgtggcctggtccaacaagtccgatttcgcctgcgccaacgccttcaacaacagcattatccccgaggacacattcttcccaagcagcgacgtgccctgcgacgtgaagctggtggaaaagagcttcgagacagacaccaacctgaacttccagaacctgagcgtgatcggcttcagaatcctgctgctgaaagtggccggctttaacctgctgatgaccctgcggctgtggtccagccgcgccaagagaagcggatctggcgtgaagcagaccctgaatttcgacctgctgaagctggctggcgacgtggaatccaacccaggcccttctagaggccatatgaccgagtacaagcccacggtgcgcctcgccacccgcgacgacgtccccagggccgtacgcaccctcgccgccgcgttcgccgactaccccgccacgcgccacaccgtcgatccggaccgccacatcgagcgggtcaccgagctgcaagaactcttcctcacgcgcgtcgggctcgacatcggcaaggtgtgggtcgcggacgacggcgccgcggtggcggtctggaccacgccggagagcgtcgaagcgggggcggtgttcgccgagatcggcccgcgcatggccgagttgagcggttcccggctggccgcgcagcaacagatggaaggcctcctggcgccgcaccggcccaaggagcccgcgtggttcctggccaccgtcggcgtctcgcccgaccaccagggcaagggtctgggcagcgccgtcgtgctccccggagtggaggcggccgagcgcgccggggtgcccgccttcctggagacctccgcgccccgcaacctccccttctacgagcggctcggcttcaccgtcaccgccgacgtcgaggtgcccgaaggaccgcgcacctggtgcatgacccgcaagcccggtgcctga

SEQ ID NO: 9216 - DNA, 2718 bp, Artificial Sequence
  Synthetic Polynucloetide
atggccttaccagtgaccgccttgctcctgccgctggccttgctgctccacgccgccaggccgctcgagcagaaactgatctcggaagaggatctgggctccggcgatcgccctgatcctgccgtgtaccagctgcgggatagcaagagcagcgacaagagcgtgtgtctgttcaccgacttcgacagccagaccaacgtgtcccagagcaaggactccgacgtgtacatcaccgataagtgcgtgctggacatgcggagcatggacttcaagagcaactccgccgtggcctggtccaacaagtccgatttcgcctgcgccaacgccttcaacaacagcattatccccgaggacacattcttcccaagccccgagagcagctgcgacgtgaagctggtggaaaagagcttcgagacagacaccaacctgaacttccagaacctgagcgtgatcggcttcagaatcctgctgctgaaagtggccggctttaacctgctgatgaccctgcggctgtggtccagctctagtcgcgccaagagaagcggatctggcgtgaagcagaccctgaatttcgacctgctgaagctggctggcgacgtggaatccaacccaggccccactagcatggccttaccagtgaccgccttgctcctgccgctggccttgctgctccacgccgccaggccgcagtctgctctgacccagcctagatccgtgtctggctctcctggacagagcgtgaccatcagctgtaccggcacctcttctgacgtgggcagctacaactacgtgtcctggtatcagcagagccccggcaaggcccctaagctgatgatctacgacgtgtccaacagacccagcggcgtgtccaatagattctccggcagcaagagcggcaacaccgccagcctgacaatctctggactccagtctgaggacgaggccgactactactgtaccagctacggcagctacgacatccccgtgatttttggcggaggcaccaaggtggaaatcaaaggcggaggcggaagtggaggcggaggatctggcggcggaggctctcagatgcagctggtgcagtctggggccgaagtgaagaaacctggcagcagcgtgaaggtgtcctgcaaagcaagcggcggcacctttagctcctacgccatctcttgggtccgacaggctccaggacaaggactggaatggatgggcggcatcatccccatcttcggcacagccaattacgcccagaaattccagggcagagtgacaatcaccgccgacaagagcaccagcaccgcctacatggaactgagcagcctgagaagcgacgacaccgccgtgtactactgcgccagagatgaactgtgggccaccaactactactacatggacgtgtggggcaagggcaccctggtcacagtttcttctacgcgtgggaaaccaattcccaaccctcttctgggactggattcaaccggcagcggcgaggacctgaagaacgtgttcccacctgaggtggccgtgttcgagcctagcgaggccgagatcagccacacccagaaagccaccctcgtgtgcctggctaccggcttctaccccgaccatgtggaactgtcttggtgggtcaacggcaaagaggtgcacagcggcgtgtgtaccgacccccagccactgaaagaacagcccgccctgaacgacagccggtactgcctgagcagcagactgagagtgtccgccaccttctggcagaacccccggaaccacttcagatgccaggtgcagttctacggcctgagcgagaacgacgagtggacccaggacagagccaagcccgtgacccagatcgtgtctgccgaagcctggggcagagccgattgcggctttaccagcgagagctaccagcagggcgtgctgagcgccaccatcctgtacgagatcctgctgggcaaggccaccctgtacgccgtgctggtgtctgccctggtgctgatggctatggtcaagcggaaggacagccggggaagggccaagcgatctggatctggagcaacaaacttctcactactcaaacaagcaggtgacgtggaggagaatcccgggccttctagaggccatatgaccgagtacaagcccacggtgcgcctcgccacccgcgacgacgtccccagggccgtacgcaccctcgccgccgcgttcgccgactaccccgccacgcgccacaccgtcgatccggaccgccacatcgagcgggtcaccgagctgcaagaactcttcctcacgcgcgtcgggctcgacatcggcaaggtgtgggtcgcggacgacggcgccgcggtggcggtctggaccacgccggagagcgtcgaagcgggggcggtgttcgccgagatcggcccgcgcatggccgagttgagcggttcccggctggccgcgcagcaacagatggaaggcctcctggcgccgcaccggcccaaggagcccgcgtggttcctggccaccgtcggcgtctcgcccgaccaccagggcaagggtctgggcagcgccgtcgtgctccccggagtggaggcggccgagcgcgccggggtgcccgccttcctggagacctccgcgccccgcaacctccccttctacgagcggctcggcttcaccgtcaccgccgacgtcgaggtgcccgaaggaccgcgcacctggtgcatgacccgcaagcccggtgcctga

SEQ ID NO: 9217 - DNA, 2580 bp, Artificial Sequence
  Synthetic Polynucloetide
atggccttaccagtgaccgccttgctcctgccgctggccttgctgctccacgccgccaggccgcagtctgctctgacccagcctagatccgtgtctggctctcctggacagagcgtgaccatcagctgtaccggcacctcttctgacgtgggcagctacaactacgtgtcctggtatcagcagagccccggcaaggcccctaagctgatgatctacgacgtgtccaacagacccagcggcgtgtccaatagattctccggcagcaagagcggcaacaccgccagcctgacaatctctggactccagtctgaggacgaggccgactactactgtaccagctacggcagctacgacatccccgtgatttttggcggaggcaccaaggtggaaatcaaactcgaggacctgaagaacgtgttcccacctgaggtggccgtgttcgagcctagcgaggccgagatcagccacacccagaaagccaccctcgtgtgcctggctaccggcttctaccccgaccatgtggaactgtcttggtgggtcaacggcaaagaggtgcacagcggcgtgtctaccgacccccagccactgaaagaacagcccgccctgaacgacagccggtactgcctgagcagcagactgagagtgtccgccaccttctggcagaacccccggaaccacttcagatgccaggtgcagttctacggcctgagcgagaacgacgagtggacccaggacagagccaagcccgtgacccagatcgtgtctgccgaagcctggggcagagccgattgcggctttaccagcgagagctaccagcagggcgtgctgagcgccaccatcctgtacgagatcctgctgggcaaggccaccctgtacgccgtgctggtgtctgccctggtgctgatggctatggtcaagcggaaggacagccggggaagggccaagcgatctggatctggagcaacaaacttctcactactcaaacaagcaggtgacgtggaggagaatcccgggcctactagtatggactggatttggcgcatccttttccttgtcggcgctgctaccggcgcgcattccttcgaacagatgcagctggtgcagtctggggccgaagtgaagaaacctggcagcagcgtgaaggtgtcctgcaaagcaagcggcggcacctttagctcctacgccatctcttgggtccgacaggctccaggacaaggactggaatggatgggcggcatcatccccatcttcggcacagccaattacgcccagaaattccagggcagagtgacaatcaccgccgacaagagcaccagcaccgcctacatggaactgagcagcctgagaagcgacgacaccgccgtgtactactgcgccagagatgaactgtgggccaccaactactactacatggacgtgtggggcaagggcaccctggtcacagtttcttctacgcgtatccagaaccctgatcctgccgtgtaccagctgcgggatagcaagagcagcgacaagagcgtgtgtctgttcaccgacttcgacagccagaccaacgtgtcccagagcaaggactccgacgtgtacatcaccgataagaccgtgctggacatgcggagcatggacttcaagagcaactccgccgtggcctggtccaacaagtccgatttcgcctgcgccaacgccttcaacaacagcattatccccgaggacacattcttcccaagccccgagagcagctgcgacgtgaagctggtggaaaagagcttcgagacagacaccaacctgaacttccagaacctgagcgtgatcggcttcagaatcctgctgctgaaagtggccggctttaacctgctgatgaccctgcggctgtggtccagccgcgccaagagaagcggatctggcgtgaagcagaccctgaatttcgacctgctgaagctggctggcgacgtggaatccaacccaggcccttctagaggccatatgaccgagtacaagcccacggtgcgcctcgccacccgcgacgacgtccccagggccgtacgcaccctcgccgccgcgttcgccgactaccccgccacgcgccacaccgtcgatccggaccgccacatcgagcgggtcaccgagctgcaagaactcttcctcacgcgcgtcgggctcgacatcggcaaggtgtgggtcgcggacgacggcgccgcggtggcggtctggaccacgccggagagcgtcgaagcgggggcggtgttcgccgagatcggcccgcgcatggccgagttgagcggttcccggctggccgcgcagcaacagatggaaggcctcctggcgccgcaccggcccaaggagcccgcgtggttcctggccaccgtcggcgtctcgcccgaccaccagggcaagggtctgggcagcgccgtcgtgctccccggagtggaggcggccgagcgcgccggggtgcccgccttcctggagacctccgcgccccgcaacctccccttctacgagcggctcggcttcaccgtcaccgccgacgtcgaggtgcccgaaggaccgcgcacctggtgcatgacccgcaagcccggtgcctga

SEQ ID NO: 9218 - DNA, 2826 bp, Artificial Sequence
  Synthetic Polynucloetide
atggccttaccagtgaccgccttgctcctgccgctggccttgctgctccacgccgccaggccgcagtctgctctgacccagcctagatccgtgtctggctctcctggacagagcgtgaccatcagctgtaccggcacctcttctgacgtgggcagctacaactacgtgtcctggtatcagcagagccccggcaaggcccctaagctgatgatctacgacgtgtccaacagacccagcggcgtgtccaatagattctccggcagcaagagcggcaacaccgccagcctgacaatctctggactccagtctgaggacgaggccgactactactgtaccagctacggcagctacgacatccccgtgatttttggcggaggcaccaaggtggaaatcaaactcgaggacctgaagaacgtgttcccacctgaggtggccgtgttcgagcctagcgaggccgagatcagccacacccagaaagccaccctcgtgtgcctggctaccggcttctaccccgaccatgtggaactgtcttggtgggtcaacggcaaagaggtgcacagcggcgtgtctaccgacccccagccactgaaagaacagcccgccctgaacgacagccggtactgcctgagcagcagactgagagtgtccgccaccttctggcagaacccccggaaccacttcagatgccaggtgcagttctacggcctgagcgagaacgacgagtggacccaggacagagccaagcccgtgacccagatcgtgtctgccgaagcctggggcagagccgattgcggctttaccagcgagagctaccagcagggcgtgctgagcgccaccatcctgtacgagatcctgctgggcaaggccaccctgtacgccgtgctggtgtctgccctggtgctgatggctatggtcaagcggaaggacagccggggaagggccaagcgatctggatctggagcaacaaacttctcactactcaaacaagcaggtgacgtggaggagaatcccgggcctactagtatggactggatttggcgcatccttttccttgtcggcgctgctaccggcgcgcattccttcgaacagatgcagctggtgcagtctggggccgaagtgaagaaacctggcagcagcgtgaaggtgtcctgcaaagcaagcggcggcacctttagctcctacgccatctcttgggtccgacaggctccaggacaaggactggaatggatgggcggcatcatccccatcttcggcacagccaattacgcccagaaattccagggcagagtgacaatcaccgccgacaagagcaccagcaccgcctacatggaactgagcagcctgagaagcgacgacaccgccgtgtactactgcgccagagatgaactgtgggccaccaactactactacatggacgtgtggggcaagggcaccctggtcacagtttcttctacgcgtgagcagaaactgatctcggaagaggatgggagcggcaccccattcccttctctggcccctcccatcatgctgctggtggacggcaagcagcagatggtggtcgtgtgcctggtgctggatgtggccccacctggactggacagccccatctggtttagcgccggcaatggctctgccctggacgcctttacctacggcccaagccctgccaccgatggcacctggacaaatctggcccacctgagcctgcccagcgaggaactggcttcttgggagcctctcgtgtgccacacaggacctggcgctgagggacacagcagatccacccagcctatgcacctgtctggcgaggccagcaccgccagaacctgtcctcaggaacctctgagaggcacccctggcggagcactgtggctgggagtgctgagactgctgctgttcaagctgctgctgtttgacctgctgctgacctgctcctgtctgtgcgatcctgccggccctctgccttctcctgccaccaccacaagactgagagccctgggcagccacagactgcaccctgccacagagacaggcggcagagaggccacaagcagccctagaccccagcccagagacagaagatggggcgataccccccctggcagaaagcctggatctccagtccgcgccaagagaagcggatctggcgtgaagcagaccctgaatttcgacctgctgaagctggctggcgacgtggaatccaacccaggcccttctagaggccatatgaccgagtacaagcccacggtgcgcctcgccacccgcgacgacgtccccagggccgtacgcaccctcgccgccgcgttcgccgactaccccgccacgcgccacaccgtcgatccggaccgccacatcgagcgggtcaccgagctgcaagaactcttcctcacgcgcgtcgggctcgacatcggcaaggtgtgggtcgcggacgacggcgccgcggtggcggtctggaccacgccggagagcgtcgaagcgggggcggtgttcgccgagatcggcccgcgcatggccgagttgagcggttcccggctggccgcgcagcaacagatggaaggcctcctggcgccgcaccggcccaaggagcccgcgtggttcctggccaccgtcggcgtctcgcccgaccaccagggcaagggtctgggcagcgccgtcgtgctccccggagtggaggcggccgagcgcgccggggtgcccgccttcctggagacctccgcgccccgcaacctccccttctacgagcggctcggcttcaccgtcaccgccgacgtcgaggtgcccgaaggaccgcgcacctggtgcatgacccgcaagcccggtgcctga

SEQ ID NO: 9219 - DNA, 2880 bp, Artificial Sequence
  Synthetic Polynucloetide
atggccttaccagtgaccgccttgctcctgccgctggccttgctgctccacgccgccaggccgctcgaggacctgaagaacgtgttcccacctgaggtggccgtgttcgagcctagcgaggccgagatcagccacacccagaaagccaccctcgtgtgcctggctaccggcttctaccccgaccatgtggaactgtcttggtgggtcaacggcaaagaggtgcacagcggcgtgtctaccgacccccagccactgaaagaacagcccgccctgaacgacagccggtactgcctgagcagcagactgagagtgtccgccaccttctggcagaacccccggaaccacttcagatgccaggtgcagttctacggcctgagcgagaacgacgagtggacccaggacagagccaagcccgtgacccagatcgtgtctgccgaagcctggggcagagccgattgcggctttaccagcgagagctaccagcagggcgtgctgagcgccaccatcctgtacgagatcctgctgggcaaggccaccctgtacgccgtgctggtgtctgccctggtgctgatggctatggtcaagcggaaggacagccggggaagggccaagcgatctggatctggagcaacaaacttctcactactcaaacaagcaggtgacgtggaggagaatcccgggcctactagcatggccttaccagtgaccgccttgctcctgccgctggccttgctgctccacgccgccaggccgcagtctgctctgacccagcctagatccgtgtctggctctcctggacagagcgtgaccatcagctgtaccggcacctcttctgacgtgggcagctacaactacgtgtcctggtatcagcagagccccggcaaggcccctaagctgatgatctacgacgtgtccaacagacccagcggcgtgtccaatagattctccggcagcaagagcggcaacaccgccagcctgacaatctctggactccagtctgaggacgaggccgactactactgtaccagctacggcagctacgacatccccgtgatttttggcggaggcaccaaggtggaaatcaaaggcggaggcggaagtggaggcggaggatctggcggcggaggctctcagatgcagctggtgcagtctggggccgaagtgaagaaacctggcagcagcgtgaaggtgtcctgcaaagcaagcggcggcacctttagctcctacgccatctcttgggtccgacaggctccaggacaaggactggaatggatgggcggcatcatccccatcttcggcacagccaattacgcccagaaattccagggcagagtgacaatcaccgccgacaagagcaccagcaccgcctacatggaactgagcagcctgagaagcgacgacaccgccgtgtactactgcgccagagatgaactgtgggccaccaactactactacatggacgtgtggggcaagggcaccctggtcacagtttcttctacgcgtgagcagaaactgatctcggaagaggatctggggagcggcaccccattcccttctctggcccctcccatcatgctgctggtggacggcaagcagcagatggtggtcgtgtgcctggtgctggatgtggccccacctggactggacagccccatctggtttagcgccggcaatggctctgccctggacgcctttacctacggcccaagccctgccaccgatggcacctggacaaatctggcccacctgagcctgcccagcgaggaactggcttcttgggagcctctcgtgtgccacacaggacctggcgctgagggacacagcagatccacccagcctatgcacctgtctggcgaggccagcaccgccagaacctgtcctcaggaacctctgagaggcacccctggcggagcactgtggctgggagtgctgagactgctgctgttcaagctgctgctgtttgacctgctgctgacctgctcctgtctgtgcgatcctgccggccctctgccttctcctgccaccaccacaagactgagagccctgggcagccacagactgcaccctgccacagagacaggcggcagagaggccacaagcagccctagaccccagcccagagacagaagatggggcgataccccccctggcagaaagcctggatctccagtccgcgccaagagaagcggatctggcgtgaagcagaccctgaatttcgacctgctgaagctggctggcgacgtggaatccaacccaggcccttctagatctagaggccatatgaccgagtacaagcccacggtgcgcctcgccacccgcgacgacgtccccagggccgtacgcaccctcgccgccgcgttcgccgactaccccgccacgcgccacaccgtcgatccggaccgccacatcgagcgggtcaccgagctgcaagaactcttcctcacgcgcgtcgggctcgacatcggcaaggtgtgggtcgcggacgacggcgccgcggtggcggtctggaccacgccggagagcgtcgaagcgggggcggtgttcgccgagatcggcccgcgcatggccgagttgagcggttcccggctggccgcgcagcaacagatggaaggcctcctggcgccgcaccggcccaaggagcccgcgtggttcctggccaccgtcggcgtctcgcccgaccaccagggcaagggtctgggcagcgccgtcgtgctccccggagtggaggcggccgagcgcgccggggtgcccgccttcctggagacctccgcgccccgcaacctccccttctacgagcggctcggcttcaccgtcaccgccgacgtcgaggtgcccgaaggaccgcgcacctggtgcatgacccgcaagcccggtgcctga

SEQ ID NO: 9220 - DNA, 2691 bp, Artificial Sequence
  Synthetic Polynucloetide
atggccttaccagtgaccgccttgctcctgccgctggccttgctgctccacgccgccaggccgcagtctgctctgacccagcctagatccgtgtctggctctcctggacagagcgtgaccatcagctgtaccggcacctcttctgacgtgggcagctacaactacgtgtcctggtatcagcagagccccggcaaggcccctaagctgatgatctacgacgtgtccaacagacccagcggcgtgtccaatagattctccggcagcaagagcggcaacaccgccagcctgacaatctctggactccagtctgaggacgaggccgactactactgtaccagctacggcagctacgacatccccgtgatttttggcggaggcaccaaggtggaaatcaaactcgaggggaaaccaattcccaaccctcttctgggactggattcaaccggcagcggcgacaagcagctggacgccgacgtgtcccccaagcctaccatcttcctgccctctatcgccgagacaaagctccagaaggccggcacctacctgtgcctgctggaaaagttcttcccagatgtgattaagatccactggcaggaaaagaagtccaacaccatcctgggcagccaggaaggcaacaccatgaagaccaacgacacctacatgaagttcagctggctgaccgtgcccgagaagtccctggacaaagaacacagatgcatcgtgcggcacgaaaacaacaagaacggcgtggaccaggaaatcatcttcccacccatcaagaccgatgtgattacaatggaccccaaggacaactgctccaaggacgccaacgataccctgctgctccagctgaccaacaccagcgcctactacatgtacttgttgctgctgctgaagtccgtggtgtacttcgccatcatcacatgctgcctgctgcggagaaccgccttctgctgcaacggcgagaagtctagggccaagcgatctggatctggagcaacaaacttctcactactcaaacaagcaggtgacgtggaggagaatcccgggcctactagtatggactggatttggcgcatccttttccttgtcggcgctgctaccggcgcgcattccttcgaacagatgcagctggtgcagtctggggccgaagtgaagaaacctggcagcagcgtgaaggtgtcctgcaaagcaagcggcggcacctttagctcctacgccatctcttgggtccgacaggctccaggacaaggactggaatggatgggcggcatcatccccatcttcggcacagccaattacgcccagaaattccagggcagagtgacaatcaccgccgacaagagcaccagcaccgcctacatggaactgagcagcctgagaagcgacgacaccgccgtgtactactgcgccagagatgaactgtgggccaccaactactactacatggacgtgtggggcaagggcaccctggtcacagtttcttctacgcgtgagcagaaactgatctcggaagaggatgggagcggcagccagcctcacaccaagcccagcgtgttcgtgatgaagaacggcaccaacgtggcctgcctcgtgaaagagttctaccccaaggacatcaggatcaacctggtgtccagcaagaagatcaccgagttcgaccccgccatcgtgatctcccccagcggcaagtacaacgccgtgaagctggggaagtacgaggacagcaacagcgtgacctgctccgtgcagcacgacaacaagaccgtgcacagcaccgactttgaagtgaaaaccgactccaccgaccacgtgaagcccaaagagacagagaacaccaagcagcccagcaagagctgccacaagcccaaggccatcgtgcacaccgagaaagtgaacatgatgagcctgaccgtgctgggcctgcggatgctgttcgccaaaaccgtggccgtgaacttcctgctgaccgccaagctgttcttcctccgcgccaagagaagcggatctggcgtgaagcagaccctgaatttcgacctgctgaagctggctggcgacgtggaatccaacccaggcccttctagaggccatatgaccgagtacaagcccacggtgcgcctcgccacccgcgacgacgtccccagggccgtacgcaccctcgccgccgcgttcgccgactaccccgccacgcgccacaccgtcgatccggaccgccacatcgagcgggtcaccgagctgcaagaactcttcctcacgcgcgtcgggctcgacatcggcaaggtgtgggtcgcggacgacggcgccgcggtggcggtctggaccacgccggagagcgtcgaagcgggggcggtgttcgccgagatcggcccgcgcatggccgagttgagcggttcccggctggccgcgcagcaacagatggaaggcctcctggcgccgcaccggcccaaggagcccgcgtggttcctggccaccgtcggcgtctcgcccgaccaccagggcaagggtctgggcagcgccgtcgtgctccccggagtggaggcggccgagcgcgccggggtgcccgccttcctggagacctccgcgccccgcaacctccccttctacgagcggctcggcttcaccgtcaccgccgacgtcgaggtgcccgaaggaccgcgcacctggtgcatgacccgcaagcccggtgcctga

SEQ ID NO: 9221 - DNA, 1902 bp, Artificial Sequence
  Synthetic Polynucloetide
atggccttaccagtgaccgccttgctcctgccgctggccttgctgctccacgccgccaggccgcagtctgctctgacccagcctagatccgtgtctggctctcctggacagagcgtgaccatcagctgtaccggcacctcttctgacgtgggcagctacaactacgtgtcctggtatcagcagagccccggcaaggcccctaagctgatgatctacgacgtgtccaacagacccagcggcgtgtccaatagattctccggcagcaagagcggcaacaccgccagcctgacaatctctggactccagtctgaggacgaggccgactactactgtaccagctacggcagctacgacatccccgtgatttttggcggaggcaccaaggtggaaatcaaactcgagagccagcctcacaccaagcccagcgtgttcgtgatgaagaacggcaccaacgtggcctgcctcgtgaaagagttctaccccaaggacatcaggatcaacctggtgtccagcaagaagatcaccgagttcgaccccgccatcgtgatctcccccagcggcaagtacaacgccgtgaagctggggaagtacgaggacagcaacagcgtgacctgctccgtgcagcacgacaacaagaccgtgcacagcaccgactttgaagtgaaaaccgactccaccgaccacgtgaagcccaaagagacagagaacaccaagcagcccagcaagagctgccacaagcccaaggccatcgtgcacaccgagaaagtgaacatgatgagcctgaccgtgctgggcctgcggatgctgttcgccaaaaccgtggccgtgaacttcctgctgaccgccaagctgttcttcctcagggccaagcgatctggatctggagcaacaaacttctcactactcaaacaagcaggtgacgtggaggagaatcccgggcctactagtatggactggatttggcgcatccttttccttgtcggcgctgctaccggcgcgcattccttcgaacagatgcagctggtgcagtctggggccgaagtgaagaaacctggcagcagcgtgaaggtgtcctgcaaagcaagcggcggcacctttagctcctacgccatctcttgggtccgacaggctccaggacaaggactggaatggatgggcggcatcatccccatcttcggcacagccaattacgcccagaaattccagggcagagtgacaatcaccgccgacaagagcaccagcaccgcctacatggaactgagcagcctgagaagcgacgacaccgccgtgtactactgcgccagagatgaactgtgggccaccaactactactacatggacgtgtggggcaagggcaccctggtcacagtttcttctacgcgtgacaagcagctggacgccgacgtgtcccccaagcctaccatcttcctgccctctatcgccgagacaaagctccagaaggccggcacctacctgtgcctgctggaaaagttcttcccagatgtgattaagatccactggcaggaaaagaagtccaacaccatcctgggcagccaggaaggcaacaccatgaagaccaacgacacctacatgaagttcagctggctgaccgtgcccgagaagtccctggacaaagaacacagatgcatcgtgcggcacgaaaacaacaagaacggcgtggaccaggaaatcatcttcccacccatcaagaccgatgtgattacaatggaccccaaggacaactgctccaaggacgccaacgataccctgctgctccagctgaccaacaccagcgcctactacatgtacttgttgctgctgctgaagtccgtggtgtacttcgccatcatcacatgctgcctgctgcggagaaccgccttctgctgcaacggcgagaagtct

SEQ ID NO: 9222 - DNA, 2736 bp, Artificial Sequence
  Synthetic Polynucloetide
atggccttaccagtgaccgccttgctcctgccgctggccttgctgctccacgccgccaggccgctcgaggggaaaccaattcccaaccctcttctgggactggattcaaccggcagcggcgacaagcagctggacgccgacgtgtcccccaagcctaccatcttcctgccctctatcgccgagacaaagctccagaaggccggcacctacctgtgcctgctggaaaagttcttcccagatgtgattaagatccactggcaggaaaagaagtccaacaccatcctgggcagccaggaaggcaacaccatgaagaccaacgacacctacatgaagttcagctggctgaccgtgcccgagaagtccctggacaaagaacacagatgcatcgtgcggcacgaaaacaacaagaacggcgtggaccaggaaatcatcttcccacccatcaagaccgatgtgattacaatggaccccaaggacaactgctccaaggacgccaacgataccctgctgctccagctgaccaacaccagcgcctactacatgtacttgttgctgctgctgaagtccgtggtgtacttcgccatcatcacatgctgcctgctgcggagaaccgccttctgctgcaacggcgagaagtctagggccaagcgatctggatctggagcaacaaacttctcactactcaaacaagcaggtgacgtggaggagaatcccgggcctactagcatggccttaccagtgaccgccttgctcctgccgctggccttgctgctccacgccgccaggccgcagtctgctctgacccagcctagatccgtgtctggctctcctggacagagcgtgaccatcagctgtaccggcacctcttctgacgtgggcagctacaactacgtgtcctggtatcagcagagccccggcaaggcccctaagctgatgatctacgacgtgtccaacagacccagcggcgtgtccaatagattctccggcagcaagagcggcaacaccgccagcctgacaatctctggactccagtctgaggacgaggccgactactactgtaccagctacggcagctacgacatccccgtgatttttggcggaggcaccaaggtggaaatcaaaggcggaggcggaagtggaggcggaggatctggcggcggaggctctcagatgcagctggtgcagtctggggccgaagtgaagaaacctggcagcagcgtgaaggtgtcctgcaaagcaagcggcggcacctttagctcctacgccatctcttgggtccgacaggctccaggacaaggactggaatggatgggcggcatcatccccatcttcggcacagccaattacgcccagaaattccagggcagagtgacaatcaccgccgacaagagcaccagcaccgcctacatggaactgagcagcctgagaagcgacgacaccgccgtgtactactgcgccagagatgaactgtgggccaccaactactactacatggacgtgtggggcaagggcaccctggtcacagtttcttctacgcgtgagcagaaactgatctcggaagaggatgggagcggcagccagcctcacaccaagcccagcgtgttcgtgatgaagaacggcaccaacgtggcctgcctcgtgaaagagttctaccccaaggacatcaggatcaacctggtgtccagcaagaagatcaccgagttcgaccccgccatcgtgatctcccccagcggcaagtacaacgccgtgaagctggggaagtacgaggacagcaacagcgtgacctgctccgtgcagcacgacaacaagaccgtgcacagcaccgactttgaagtgaaaaccgactccaccgaccacgtgaagcccaaagagacagagaacaccaagcagcccagcaagagctgccacaagcccaaggccatcgtgcacaccgagaaagtgaacatgatgagcctgaccgtgctgggcctgcggatgctgttcgccaaaaccgtggccgtgaacttcctgctgaccgccaagctgttcttcctccgcgccaagagaagcggatctggcgtgaagcagaccctgaatttcgacctgctgaagctggctggcgacgtggaatccaacccaggcccttctagaggccatatgaccgagtacaagcccacggtgcgcctcgccacccgcgacgacgtccccagggccgtacgcaccctcgccgccgcgttcgccgactaccccgccacgcgccacaccgtcgatccggaccgccacatcgagcgggtcaccgagctgcaagaactcttcctcacgcgcgtcgggctcgacatcggcaaggtgtgggtcgcggacgacggcgccgcggtggcggtctggaccacgccggagagcgtcgaagcgggggcggtgttcgccgagatcggcccgcgcatggccgagttgagcggttcccggctggccgcgcagcaacagatggaaggcctcctggcgccgcaccggcccaaggagcccgcgtggttcctggccaccgtcggcgtctcgcccgaccaccagggcaagggtctgggcagcgccgtcgtgctccccggagtggaggcggccgagcgcgccggggtgcccgccttcctggagacctccgcgccccgcaacctccccttctacgagcggctcggcttcaccgtcaccgccgacgtcgaggtgcccgaaggaccgcgcacctggtgcatgacccgcaagcccggtgcctga

SEQ ID NO: 9223 - DNA, 3111 bp, Artificial Sequence
  Synthetic Polynucloetide
atggccttaccagtgaccgccttgctcctgccgctggccttgctgctccacgccgccaggccgcagtctgctctgacccagcctagatccgtgtctggctctcctggacagagcgtgaccatcagctgtaccggcacctcttctgacgtgggcagctacaactacgtgtcctggtatcagcagagccccggcaaggcccctaagctgatgatctacgacgtgtccaacagacccagcggcgtgtccaatagattctccggcagcaagagcggcaacaccgccagcctgacaatctctggactccagtctgaggacgaggccgactactactgtaccagctacggcagctacgacatccccgtgatttttggcggaggcaccaaggtggaaatcaaaggacagcctaaggccaatcctaccgtgacactgttccctccaagcagcgaagaactccaggccaacaaggccacacttgtgtgcctgatctccgacttctaccctggggctgtgacagtggcttggaaggccgatggatctcctgtgaaagccggcgtggaaaccaccaagccatccaagcagagcaacaacaaatacgccgccagctcctacctgagcctgacacctgagcagtggaagtcccacagatcctacagctgccaagtgacccacgaaggcagcaccgtggaaaagacagtggcccctacagagtgcagcggatcccagagcttcggcctgctggaccccaagctgtgctacctgctggatggcatcctgttcatctacggcgtgatcctgaccgccctgttcctgagagtgaagttcagcagaagcgccgacgcccctgcctaccagcagggacagaaccaactgtacaacgagctgaacctgggcagacgggaagagtacgacgtgctggacaagcggagaggcagggaccctgagatgggcggaaagccccagcggagaaagaacccccaggaaggactgtataacgaactccagaaagacaagatggccgaagcctacagcgagatcggcatgaagggcgagcggagaagaggcaagggccacgatggcctgtaccagggcctgagcaccgccaccaaggacacctatgacgccctgcacatgcaggccctgcctccaagaagggccaagcgatctggatctggagcaacaaacttctcactactcaaacaagcaggtgacgtggaggagaatcccgggcctactagtatggactggatttggcgcatccttttccttgtcggcgctgctaccggcgcgcattccttcgaacagatgcagctggtgcagtctggggccgaagtgaagaaacctggcagcagcgtgaaggtgtcctgcaaagcaagcggcggcacctttagctcctacgccatctcttgggtccgacaggctccaggacaaggactggaatggatgggcggcatcatccccatcttcggcacagccaattacgcccagaaattccagggcagagtgacaatcaccgccgacaagagcaccagcaccgcctacatggaactgagcagcctgagaagcgacgacaccgccgtgtactactgcgccagagatgaactgtgggccaccaactactactacatggacgtgtggggcaagggcaccctggtcacagtttcttctgcctctacaaagggaccctccgtgtttcctctggctcccagcagcaagtctacaagcggaggaacagccgctctgggctgcctggtcaaggattactttcccgagcctgtgaccgtgtcctggaatagcggagcactgacaagcggcgtgcacacctttccagccgtgctgcaaagcagcggcctgtactctctgagcagcgtggtcacagtgcctagctctagcctgggcacccagacctacatctgcaatgtgaaccacaagcctagcaacaccaaggtggacaagagagtggaacccaagagctgtggtacccagagttttgggttgttggaccctaaattgtgctatctgttggacggaatcctgttcatttacggagtgatcctgaccgcattgttcctgcgggttaagttttccagatccgcagacgcacccgcttaccaacaagggcagaaccaactctacaatgaacttaatttggggcggagggaagagtacgacgttctggacaaaaggaggggacgagatcccgagatgggcggaaagcctcagcgaaggaagaatccgcaagaggggctttataacgaactccagaaagataaaatggcagaagcctatagtgagattgggatgaagggagaaaggaggaggggtaaaggtcacgatgggttgtaccaaggattgagcacagccactaaagatacctatgatgcgctccacatgcaggccctgccgccaagacgcgccaagagaagcggatctggcgtgaagcagaccctgaatttcgacctgctgaagctggctggcgacgtggaatccaacccaggcccttctagaggccatatgaccgagtacaagcccacggtgcgcctcgccacccgcgacgacgtccccagggccgtacgcaccctcgccgccgcgttcgccgactaccccgccacgcgccacaccgtcgatccggaccgccacatcgagcgggtcaccgagctgcaagaactcttcctcacgcgcgtcgggctcgacatcggcaaggtgtgggtcgcggacgacggcgccgcggtggcggtctggaccacgccggagagcgtcgaagcgggggcggtgttcgccgagatcggcccgcgcatggccgagttgagcggttcccggctggccgcgcagcaacagatggaaggcctcctggcgccgcaccggcccaaggagcccgcgtggttcctggccaccgtcggcgtctcgcccgaccaccagggcaagggtctgggcagcgccgtcgtgctccccggagtggaggcggccgagcgcgccggggtgcccgccttcctggagacctccgcgccccgcaacctccccttctacgagcggctcggcttcaccgtcaccgccgacgtcgaggtgcccgaaggaccgcgcacctggtgcatgacccgcaagcccggtgcctga

SEQ ID NO: 9224 - DNA, 2466 bp, Artificial Sequence
  Synthetic Polynucloetide
atggccttaccagtgaccgccttgctcctgccgctggccttgctgctccacgccgccaggccgcagtctgctctgacccagcctagatccgtgtctggctctcctggacagagcgtgaccatcagctgtaccggcacctcttctgacgtgggcagctacaactacgtgtcctggtatcagcagagccccggcaaggcccctaagctgatgatctacgacgtgtccaacagacccagcggcgtgtccaatagattctccggcagcaagagcggcaacaccgccagcctgacaatctctggactccagtctgaggacgaggccgactactactgtaccagctacggcagctacgacatccccgtgatttttggcggaggcaccaaggtggaaatcaaactcgaggacctgaagaacgtgttcccacctgaggtggccgtgttcgagcctagcgaggccgagatcagccacacccagaaagccaccctcgtgtgcctggctaccggcttctaccccgaccatgtggaactgtcttggtgggtcaacggcaaagaggtgcacagcggcgtgtctaccgacccccagccactgaaagaacagcccgccctgaacgacagccggtactgcctgagcagcagactgagagtgtccgccaccttctggcagaacccccggaaccacttcagatgccaggtgcagttctacggcctgagcgagaacgacgagtggacccaggacagagccaagcccgtgacccagatcgtgtctgccgaagcctggggcagagccgattgcggatcccagagcttcggcctgctggaccccaagctgtgctacctgctggatggcatcctgttcatctacggcgtgatcctgaccgccctgttcctgagagtgaagttcagcagaagcgccgacgcccctgcctaccagcagggacagaaccaactgtacaacgagctgaacctgggcagacgggaagagtacgacgtgctggacaagcggagaggcagggaccctgagatgggcggaaagccccagcggagaaagaacccccaggaaggactgtataacgaactccagaaagacaagatggccgaagcctacagcgagatcggcatgaagggcgagcggagaagaggcaagggccacgatggcctgtaccagggcctgagcaccgccaccaaggacacctatgacgccctgcacatgcaggccctgcctccaagaagggccaagcgatctggatctggagcaacaaacttctcactactcaaacaagcaggtgacgtggaggagaatcccgggcctactagtatggactggatttggcgcatccttttccttgtcggcgctgctaccggcgcgcattccttcgaacagatgcagctggtgcagtctggggccgaagtgaagaaacctggcagcagcgtgaaggtgtcctgcaaagcaagcggcggcacctttagctcctacgccatctcttgggtccgacaggctccaggacaaggactggaatggatgggcggcatcatccccatcttcggcacagccaattacgcccagaaattccagggcagagtgacaatcaccgccgacaagagcaccagcaccgcctacatggaactgagcagcctgagaagcgacgacaccgccgtgtactactgcgccagagatgaactgtgggccaccaactactactacatggacgtgtggggcaagggcaccctggtcacagtttcttctacgcgtatccagaaccctgatcctgccgtgtaccagctgcgggatagcaagagcagcgacaagagcgtgtgtctgttcaccgacttcgacagccagaccaacgtgtcccagagcaaggactccgacgtgtacatcaccgataagaccgtgctggacatgcggagcatggacttcaagagcaactccgccgtggcctggtccaacaagtccgatttcgcctgcgccaacgccttcaacaacagcattatccccgaggacacattcttcccaagccccgagagcagctgcggtacccagagttttgggttgttggaccctaaattgtgctatctgttggacggaatcctgttcatttacggagtgatcctgaccgcattgttcctgcgggttaagttttccagatccgcagacgcacccgcttaccaacaagggcagaaccaactctacaatgaacttaatttggggcggagggaagagtacgacgttctggacaaaaggaggggacgagatcccgagatgggcggaaagcctcagcgaaggaagaatccgcaagaggggctttataacgaactccagaaagataaaatggcagaagcctatagtgagattgggatgaagggagaaaggaggaggggtaaaggtcacgatgggttgtaccaaggattgagcacagccactaaagatacctatgatgcgctccacatgcaggccctgccgccaaga

SEQ ID NO: 9225 - DNA, 2466 bp, Artificial Sequence
  Synthetic Polynucloetide
atggccttaccagtgaccgccttgctcctgccgctggccttgctgctccacgccgccaggccgcagtctgctctgacccagcctagatccgtgtctggctctcctggacagagcgtgaccatcagctgtaccggcacctcttctgacgtgggcagctacaactacgtgtcctggtatcagcagagccccggcaaggcccctaagctgatgatctacgacgtgtccaacagacccagcggcgtgtccaatagattctccggcagcaagagcggcaacaccgccagcctgacaatctctggactccagtctgaggacgaggccgactactactgtaccagctacggcagctacgacatccccgtgatttttggcggaggcaccaaggtggaaatcaaactcgaggacctgaagaacgtgttcccacctgaggtggccgtgttcgagcctagcaaggccgagatcgcccacacccagaaagccaccctcgtgtgcctggctaccggcttctaccccgaccatgtggaactgtcttggtgggtcaacggcaaagaggtgcacagcggcgtgtgtaccgacccccagccactgaaagaacagcccgccctgaacgacagccggtactgcctgagcagcagactgagagtgtccgccaccttctggcagaacccccggaaccacttcagatgccaggtgcagttctacggcctgagcgagaacgacgagtggacccaggacagagccaagcccgtgacccagatcgtgtctgccgaagcctggggcagagccgattgcggatcccagagcttcggcctgctggaccccaagctgtgctacctgctggatggcatcctgttcatctacggcgtgatcctgaccgccctgttcctgagagtgaagttcagcagaagcgccgacgcccctgcctaccagcagggacagaaccaactgtacaacgagctgaacctgggcagacgggaagagtacgacgtgctggacaagcggagaggcagggaccctgagatgggcggaaagccccagcggagaaagaacccccaggaaggactgtataacgaactccagaaagacaagatggccgaagcctacagcgagatcggcatgaagggcgagcggagaagaggcaagggccacgatggcctgtaccagggcctgagcaccgccaccaaggacacctatgacgccctgcacatgcaggccctgcctccaagaagggccaagcgatctggatctggagcaacaaacttctcactactcaaacaagcaggtgacgtggaggagaatcccgggcctactagtatggactggatttggcgcatccttttccttgtcggcgctgctaccggcgcgcattccttcgaacagatgcagctggtgcagtctggggccgaagtgaagaaacctggcagcagcgtgaaggtgtcctgcaaagcaagcggcggcacctttagctcctacgccatctcttgggtccgacaggctccaggacaaggactggaatggatgggcggcatcatccccatcttcggcacagccaattacgcccagaaattccagggcagagtgacaatcaccgccgacaagagcaccagcaccgcctacatggaactgagcagcctgagaagcgacgacaccgccgtgtactactgcgccagagatgaactgtgggccaccaactactactacatggacgtgtggggcaagggcaccctggtcacagtttcttctacgcgtatccagaaccctgatcctgccgtgtaccagctgcgggatagcaagagcagcgacaagagcgtgtgtctgttcaccgacttcgacagccagaccaacgtgtcccagagcaaggactccgacgtgtacatcaccgataagtgcgtgctggacatgcggagcatggacttcaagagcaactccgccgtggcctggtccaacaagtccgatttcgcctgcgccaacgccttcaacaacagcattatccccgaggacacattcttcccaagcagcgacgtgccctgcggtacccagagttttgggttgttggaccctaaattgtgctatctgttggacggaatcctgttcatttacggagtgatcctgaccgcattgttcctgcgggttaagttttccagatccgcagacgcacccgcttaccaacaagggcagaaccaactctacaatgaacttaatttggggcggagggaagagtacgacgttctggacaaaaggaggggacgagatcccgagatgggcggaaagcctcagcgaaggaagaatccgcaagaggggctttataacgaactccagaaagataaaatggcagaagcctatagtgagattgggatgaagggagaaaggaggaggggtaaaggtcacgatgggttgtaccaaggattgagcacagccactaaagatacctatgatgcgctccacatgcaggccctgccgccaaga

SEQ ID NO: 9226 - DNA, 2679 bp, Artificial Sequence
  Synthetic Polynucloetide
atggccttaccagtgaccgccttgctcctgccgctggccttgctgctccacgccgccaggccgcagtctgctctgacccagcctagatccgtgtctggctctcctggacagagcgtgaccatcagctgtaccggcacctcttctgacgtgggcagctacaactacgtgtcctggtatcagcagagccccggcaaggcccctaagctgatgatctacgacgtgtccaacagacccagcggcgtgtccaatagattctccggcagcaagagcggcaacaccgccagcctgacaatctctggactccagtctgaggacgaggccgactactactgtaccagctacggcagctacgacatccccgtgatttttggcggaggcaccaaggtggaaatcaaactcgaggggaaaccaattcccaaccctcttctgggactggattcaaccggcagcggcgaggacctgaagaacgtgttcccacctgaggtggccgtgttcgagcctagcgaggccgagatcagccacacccagaaagccaccctcgtgtgcctggctaccggcttctaccccgaccatgtggaactgtcttggtgggtcaacggcaaagaggtgcacagcggcgtgtctaccgacccccagccactgaaagaacagcccgccctgaacgacagccggtactgcctgagcagcagactgagagtgtccgccaccttctggcagaacccccggaaccacttcagatgccaggtgcagttctacggcctgagcgagaacgacgagtggacccaggacagagccaagcccgtgacccagatcgtgtctgccgaagcctggggcagagccgattgcggatcccagagcttcggcctgctggaccccaagctgtgctacctgctggatggcatcctgttcatctacggcgtgatcctgaccgccctgttcctgagagtgaagttcagcagaagcgccgacgcccctgcctaccagcagggacagaaccaactgtacaacgagctgaacctgggcagacgggaagagtacgacgtgctggacaagcggagaggcagggaccctgagatgggcggaaagccccagcggagaaagaacccccaggaaggactgtataacgaactccagaaagacaagatggccgaagcctacagcgagatcggcatgaagggcgagcggagaagaggcaagggccacgatggcctgtaccagggcctgagcaccgccaccaaggacacctatgacgccctgcacatgcaggccctgcctccaagaagggccaagcgatctggatctggagcaacaaacttctcactactcaaacaagcaggtgacgtggaggagaatcccgggcctactagtatggactggatttggcgcatccttttccttgtcggcgctgctaccggcgcgcattccttcgaacagatgcagctggtgcagtctggggccgaagtgaagaaacctggcagcagcgtgaaggtgtcctgcaaagcaagcggcggcacctttagctcctacgccatctcttgggtccgacaggctccaggacaaggactggaatggatgggcggcatcatccccatcttcggcacagccaattacgcccagaaattccagggcagagtgacaatcaccgccgacaagagcaccagcaccgcctacatggaactgagcagcctgagaagcgacgacaccgccgtgtactactgcgccagagatgaactgtgggccaccaactactactacatggacgtgtggggcaagggcaccctggtcacagtttcttctacgcgtgagcagaaactgatctcggaagaggatgggagcggcatccagaaccctgatcctgccgtgtaccagctgcgggatagcaagagcagcgacaagagcgtgtgtctgttcaccgacttcgacagccagaccaacgtgtcccagagcaaggactccgacgtgtacatcaccgataagaccgtgctggacatgcggagcatggacttcaagagcaactccgccgtggcctggtccaacaagtccgatttcgcctgcgccaacgccttcaacaacagcattatccccgaggacacattcttcccaagccccgagagcagctgcggtacccagagttttgggttgttggaccctaaattgtgctatctgttggacggaatcctgttcatttacggagtgatcctgaccgcattgttcctgaggagcaagcggtcacggctgctccacagcgattacatgaatatgacaccacgaagaccgggtcctactcgcaaacactaccaaccctacgcacctccccgcgactttgcagcgtaccgatctcgggttaagttttccagatccgcagacgcacccgcttaccaacaagggcagaaccaactctacaatgaacttaatttggggcggagggaagagtacgacgttctggacaaaaggaggggacgagatcccgagatgggcggaaagcctcagcgaaggaagaatccgcaagaggggctttataacgaactccagaaagataaaatggcagaagcctatagtgagattgggatgaagggagaaaggaggaggggtaaaggtcacgatgggttgtaccaaggattgagcacagccactaaagatacctatgatgcgctccacatgcaggccctgccgccaaga

SEQ ID NO: 9227 - DNA, 2802 bp, Artificial Sequence
  Synthetic Polynucloetide
atggccttaccagtgaccgccttgctcctgccgctggccttgctgctccacgccgccaggccgcagtctgctctgacccagcctagatccgtgtctggctctcctggacagagcgtgaccatcagctgtaccggcacctcttctgacgtgggcagctacaactacgtgtcctggtatcagcagagccccggcaaggcccctaagctgatgatctacgacgtgtccaacagacccagcggcgtgtccaatagattctccggcagcaagagcggcaacaccgccagcctgacaatctctggactccagtctgaggacgaggccgactactactgtaccagctacggcagctacgacatccccgtgatttttggcggaggcaccaaggtggaaatcaaactcgaggggaaaccaattcccaaccctcttctgggactggattcaaccggcagcggcgaggacctgaagaacgtgttcccacctgaggtggccgtgttcgagcctagcgaggccgagatcagccacacccagaaagccaccctcgtgtgcctggctaccggcttctaccccgaccatgtggaactgtcttggtgggtcaacggcaaagaggtgcacagcggcgtgtctaccgacccccagccactgaaagaacagcccgccctgaacgacagccggtactgcctgagcagcagactgagagtgtccgccaccttctggcagaacccccggaaccacttcagatgccaggtgcagttctacggcctgagcgagaacgacgagtggacccaggacagagccaagcccgtgacccagatcgtgtctgccgaagcctggggcagagccgattgcggatcccagagcttcggcctgctggaccccaagctgtgctacctgctggatggcatcctgttcatctacggcgtgatcctgaccgccctgttcctgaggagtaagaggagcaggctcctgcacagtgactacatgaacatgactccacgccgccccggacccacccgcaagcattaccagccctatgccccaccacgcgacttcgcagcctatcgctccagagtgaagttcagcagaagcgccgacgcccctgcctaccagcagggacagaaccaactgtacaacgagctgaacctgggcagacgggaagagtacgacgtgctggacaagcggagaggcagggaccctgagatgggcggaaagccccagcggagaaagaacccccaggaaggactgtataacgaactccagaaagacaagatggccgaagcctacagcgagatcggcatgaagggcgagcggagaagaggcaagggccacgatggcctgtaccagggcctgagcaccgccaccaaggacacctatgacgccctgcacatgcaggccctgcctccaagaagggccaagcgatctggatctggagcaacaaacttctcactactcaaacaagcaggtgacgtggaggagaatcccgggcctactagtatggactggatttggcgcatccttttccttgtcggcgctgctaccggcgcgcattccttcgaacagatgcagctggtgcagtctggggccgaagtgaagaaacctggcagcagcgtgaaggtgtcctgcaaagcaagcggcggcacctttagctcctacgccatctcttgggtccgacaggctccaggacaaggactggaatggatgggcggcatcatccccatcttcggcacagccaattacgcccagaaattccagggcagagtgacaatcaccgccgacaagagcaccagcaccgcctacatggaactgagcagcctgagaagcgacgacaccgccgtgtactactgcgccagagatgaactgtgggccaccaactactactacatggacgtgtggggcaagggcaccctggtcacagtttcttctacgcgtgagcagaaactgatctcggaagaggatgggagcggcatccagaaccctgatcctgccgtgtaccagctgcgggatagcaagagcagcgacaagagcgtgtgtctgttcaccgacttcgacagccagaccaacgtgtcccagagcaaggactccgacgtgtacatcaccgataagaccgtgctggacatgcggagcatggacttcaagagcaactccgccgtggcctggtccaacaagtccgatttcgcctgcgccaacgccttcaacaacagcattatccccgaggacacattcttcccaagccccgagagcagctgcggtacccagagttttgggttgttggaccctaaattgtgctatctgttggacggaatcctgttcatttacggagtgatcctgaccgcattgttcctgaggagcaagcggtcacggctgctccacagcgattacatgaatatgacaccacgaagaccgggtcctactcgcaaacactaccaaccctacgcacctccccgcgactttgcagcgtaccgatctcgggttaagttttccagatccgcagacgcacccgcttaccaacaagggcagaaccaactctacaatgaacttaatttggggcggagggaagagtacgacgttctggacaaaaggaggggacgagatcccgagatgggcggaaagcctcagcgaaggaagaatccgcaagaggggctttataacgaactccagaaagataaaatggcagaagcctatagtgagattgggatgaagggagaaaggaggaggggtaaaggtcacgatgggttgtaccaaggattgagcacagccactaaagatacctatgatgcgctccacatgcaggccctgccgccaaga

SEQ ID NO: 9228 - DNA, 2685 bp, Artificial Sequence
  Synthetic Polynucloetide
atggccttaccagtgaccgccttgctcctgccgctggccttgctgctccacgccgccaggccgcagtctgctctgacccagcctagatccgtgtctggctctcctggacagagcgtgaccatcagctgtaccggcacctcttctgacgtgggcagctacaactacgtgtcctggtatcagcagagccccggcaaggcccctaagctgatgatctacgacgtgtccaacagacccagcggcgtgtccaatagattctccggcagcaagagcggcaacaccgccagcctgacaatctctggactccagtctgaggacgaggccgactactactgtaccagctacggcagctacgacatccccgtgatttttggcggaggcaccaaggtggaaatcaaactcgaggggaaaccaattcccaaccctcttctgggactggattcaaccggcagcggcgaggacctgaagaacgtgttcccacctgaggtggccgtgttcgagcctagcgaggccgagatcagccacacccagaaagccaccctcgtgtgcctggctaccggcttctaccccgaccatgtggaactgtcttggtgggtcaacggcaaagaggtgcacagcggcgtgtctaccgacccccagccactgaaagaacagcccgccctgaacgacagccggtactgcctgagcagcagactgagagtgtccgccaccttctggcagaacccccggaaccacttcagatgccaggtgcagttctacggcctgagcgagaacgacgagtggacccaggacagagccaagcccgtgacccagatcgtgtctgccgaagcctggggcagagccgattgcggatcccagagcttcggcctgctggaccccaagctgtgctacctgctggatggcatcctgttcatctacggcgtgatcctgaccgccctgttcctgagagtgaagttcagcagaagcgccgacgcccctgcctaccagcagggacagaaccaactgtacaacgagctgaacctgggcagacgggaagagtacgacgtgctggacaagcggagaggcagggaccctgagatgggcggaaagccccagcggagaaagaacccccaggaaggactgtataacgaactccagaaagacaagatggccgaagcctacagcgagatcggcatgaagggcgagcggagaagaggcaagggccacgatggcctgtaccagggcctgagcaccgccaccaaggacacctatgacgccctgcacatgcaggccctgcctccaagaagggccaagcgatctggatctggagcaacaaacttctcactactcaaacaagcaggtgacgtggaggagaatcccgggcctactagtatggactggatttggcgcatccttttccttgtcggcgctgctaccggcgcgcattccttcgaacagatgcagctggtgcagtctggggccgaagtgaagaaacctggcagcagcgtgaaggtgtcctgcaaagcaagcggcggcacctttagctcctacgccatctcttgggtccgacaggctccaggacaaggactggaatggatgggcggcatcatccccatcttcggcacagccaattacgcccagaaattccagggcagagtgacaatcaccgccgacaagagcaccagcaccgcctacatggaactgagcagcctgagaagcgacgacaccgccgtgtactactgcgccagagatgaactgtgggccaccaactactactacatggacgtgtggggcaagggcaccctggtcacagtttcttctacgcgtgagcagaaactgatctcggaagaggatctggggagcggcatccagaaccctgatcctgccgtgtaccagctgcgggatagcaagagcagcgacaagagcgtgtgtctgttcaccgacttcgacagccagaccaacgtgtcccagagcaaggactccgacgtgtacatcaccgataagaccgtgctggacatgcggagcatggacttcaagagcaactccgccgtggcctggtccaacaagtccgatttcgcctgcgccaacgccttcaacaacagcattatccccgaggacacattcttcccaagccccgagagcagctgcggtacccagagttttgggttgttggaccctaaattgtgctatctgttggacggaatcctgttcatttacggagtgatcctgaccgcattgttcctgaagagaggccggaagaagctgctgtacatcttcaagcagcctttcatgcggcccgtgcagaccacccaggaagaggacggctgctcctgccggttccccgaggaagaagaaggcggctgcgagctgcgggttaagttttccagatccgcagacgcacccgcttaccaacaagggcagaaccaactctacaatgaacttaatttggggcggagggaagagtacgacgttctggacaaaaggaggggacgagatcccgagatgggcggaaagcctcagcgaaggaagaatccgcaagaggggctttataacgaactccagaaagataaaatggcagaagcctatagtgagattgggatgaagggagaaaggaggaggggtaaaggtcacgatgggttgtaccaaggattgagcacagccactaaagatacctatgatgcgctccacatgcaggccctgccgccaaga

SEQ ID NO: 9229 - DNA, 2811 bp, Artificial Sequence
  Synthetic Polynucloetide
atggccttaccagtgaccgccttgctcctgccgctggccttgctgctccacgccgccaggccgcagtctgctctgacccagcctagatccgtgtctggctctcctggacagagcgtgaccatcagctgtaccggcacctcttctgacgtgggcagctacaactacgtgtcctggtatcagcagagccccggcaaggcccctaagctgatgatctacgacgtgtccaacagacccagcggcgtgtccaatagattctccggcagcaagagcggcaacaccgccagcctgacaatctctggactccagtctgaggacgaggccgactactactgtaccagctacggcagctacgacatccccgtgatttttggcggaggcaccaaggtggaaatcaaactcgaggggaaaccaattcccaaccctcttctgggactggattcaaccggcagcggcgaggacctgaagaacgtgttcccacctgaggtggccgtgttcgagcctagcgaggccgagatcagccacacccagaaagccaccctcgtgtgcctggctaccggcttctaccccgaccatgtggaactgtcttggtgggtcaacggcaaagaggtgcacagcggcgtgtctaccgacccccagccactgaaagaacagcccgccctgaacgacagccggtactgcctgagcagcagactgagagtgtccgccaccttctggcagaacccccggaaccacttcagatgccaggtgcagttctacggcctgagcgagaacgacgagtggacccaggacagagccaagcccgtgacccagatcgtgtctgccgaagcctggggcagagccgattgcggatcccagagcttcggcctgctggaccccaagctgtgctacctgctggatggcatcctgttcatctacggcgtgatcctgaccgccctgttcctgaaacggggcagaaagaaactcctgtatatattcaaacaaccatttatgagaccagtacaaactactcaagaggaagatggctgtagctgccgatttccagaagaagaagaaggaggatgtgaactgagagtgaagttcagcagaagcgccgacgcccctgcctaccagcagggacagaaccaactgtacaacgagctgaacctgggcagacgggaagagtacgacgtgctggacaagcggagaggcagggaccctgagatgggcggaaagccccagcggagaaagaacccccaggaaggactgtataacgaactccagaaagacaagatggccgaagcctacagcgagatcggcatgaagggcgagcggagaagaggcaagggccacgatggcctgtaccagggcctgagcaccgccaccaaggacacctatgacgccctgcacatgcaggccctgcctccaagaagggccaagcgatctggatctggagcaacaaacttctcactactcaaacaagcaggtgacgtggaggagaatcccgggcctactagtatggactggatttggcgcatccttttccttgtcggcgctgctaccggcgcgcattccttcgaacagatgcagctggtgcagtctggggccgaagtgaagaaacctggcagcagcgtgaaggtgtcctgcaaagcaagcggcggcacctttagctcctacgccatctcttgggtccgacaggctccaggacaaggactggaatggatgggcggcatcatccccatcttcggcacagccaattacgcccagaaattccagggcagagtgacaatcaccgccgacaagagcaccagcaccgcctacatggaactgagcagcctgagaagcgacgacaccgccgtgtactactgcgccagagatgaactgtgggccaccaactactactacatggacgtgtggggcaagggcaccctggtcacagtttcttctacgcgtgagcagaaactgatctcggaagaggatctggggagcggcatccagaaccctgatcctgccgtgtaccagctgcgggatagcaagagcagcgacaagagcgtgtgtctgttcaccgacttcgacagccagaccaacgtgtcccagagcaaggactccgacgtgtacatcaccgataagaccgtgctggacatgcggagcatggacttcaagagcaactccgccgtggcctggtccaacaagtccgatttcgcctgcgccaacgccttcaacaacagcattatccccgaggacacattcttcccaagccccgagagcagctgcggtacccagagttttgggttgttggaccctaaattgtgctatctgttggacggaatcctgttcatttacggagtgatcctgaccgcattgttcctgaagagaggccggaagaagctgctgtacatcttcaagcagcctttcatgcggcccgtgcagaccacccaggaagaggacggctgctcctgccggttccccgaggaagaagaaggcggctgcgagctgcgggttaagttttccagatccgcagacgcacccgcttaccaacaagggcagaaccaactctacaatgaacttaatttggggcggagggaagagtacgacgttctggacaaaaggaggggacgagatcccgagatgggcggaaagcctcagcgaaggaagaatccgcaagaggggctttataacgaactccagaaagataaaatggcagaagcctatagtgagattgggatgaagggagaaaggaggaggggtaaaggtcacgatgggttgtaccaaggattgagcacagccactaaagatacctatgatgcgctccacatgcaggccctgccgccaaga

SEQ ID NO: 9230 - DNA, 2484 bp, Artificial Sequence
  Synthetic Polynucloetide
atggccttaccagtgaccgccttgctcctgccgctggccttgctgctccacgccgccaggccgcagtctgctctgacccagcctagatccgtgtctggctctcctggacagagcgtgaccatcagctgtaccggcacctcttctgacgtgggcagctacaactacgtgtcctggtatcagcagagccccggcaaggcccctaagctgatgatctacgacgtgtccaacagacccagcggcgtgtccaatagattctccggcagcaagagcggcaacaccgccagcctgacaatctctggactccagtctgaggacgaggccgactactactgtaccagctacggcagctacgacatccccgtgatttttggcggaggcaccaaggtggaaatcaaactcgagcagagcttcggcctgctggaccccaagctgtgctacctgctggatggcatcctgttcatctacggcgtgatcctgaccgccctgttcctgagagtgaagttcagcagaagcgccgacgcccctgcctaccagcagggacagaaccaactgtacaacgagctgaacctgggcagacgggaagagtacgacgtgctggacaagcggagaggcagggaccctgagatgggcggaaagccccagcggagaaagaacccccaggaaggactgtataacgaactccagaaagacaagatggccgaagcctacagcgagatcggcatgaagggcgagcggagaagaggcaagggccacgatggcctgtaccagggcctgagcaccgccaccaaggacacctatgacgccctgcacatgcaggccctgcctccaagaagggccaagcgatctggatctggagcaacaaacttctcactactcaaacaagcaggtgacgtggaggagaatcccgggcctactagtatggactggatttggcgcatccttttccttgtcggcgctgctaccggcgcgcattccttcgaacagatgcagctggtgcagtctggggccgaagtgaagaaacctggcagcagcgtgaaggtgtcctgcaaagcaagcggcggcacctttagctcctacgccatctcttgggtccgacaggctccaggacaaggactggaatggatgggcggcatcatccccatcttcggcacagccaattacgcccagaaattccagggcagagtgacaatcaccgccgacaagagcaccagcaccgcctacatggaactgagcagcctgagaagcgacgacaccgccgtgtactactgcgccagagatgaactgtgggccaccaactactactacatggacgtgtggggcaagggcaccctggtcacagtttcttctacgcgtcagagttttgggttgttggaccctaaattgtgctatctgttggacggaatcctgttcatttacggagtgatcctgaccgcattgttcctgcgggttaagttttccagatccgcagacgcacccgcttaccaacaagggcagaaccaactctacaatgaacttaatttggggcggagggaagagtacgacgttctggacaaaaggaggggacgagatcccgagatgggcggaaagcctcagcgaaggaagaatccgcaagaggggctttataacgaactccagaaagataaaatggcagaagcctatagtgagattgggatgaagggagaaaggaggaggggtaaaggtcacgatgggttgtaccaaggattgagcacagccactaaagatacctatgatgcgctccacatgcaggccctgccgccaagacgcgccaagagaagcggatctggcgtgaagcagaccctgaatttcgacctgctgaagctggctggcgacgtggaatccaacccaggcccttctagaggccatatgaccgagtacaagcccacggtgcgcctcgccacccgcgacgacgtccccagggccgtacgcaccctcgccgccgcgttcgccgactaccccgccacgcgccacaccgtcgatccggaccgccacatcgagcgggtcaccgagctgcaagaactcttcctcacgcgcgtcgggctcgacatcggcaaggtgtgggtcgcggacgacggcgccgcggtggcggtctggaccacgccggagagcgtcgaagcgggggcggtgttcgccgagatcggcccgcgcatggccgagttgagcggttcccggctggccgcgcagcaacagatggaaggcctcctggcgccgcaccggcccaaggagcccgcgtggttcctggccaccgtcggcgtctcgcccgaccaccagggcaagggtctgggcagcgccgtcgtgctccccggagtggaggcggccgagcgcgccggggtgcccgccttcctggagacctccgcgccccgcaacctccccttctacgagcggctcggcttcaccgtcaccgccgacgtcgaggtgcccgaaggaccgcgcacctggtgcatgacccgcaagcccggtgcctga

SEQ ID NO: 9231 - DNA, 1956 bp, Artificial Sequence
  Synthetic Polynucloetide
atggccttaccagtgaccgccttgctcctgccgctggccttgctgctccacgccgccaggccgcagtctgctctgacccagcctagatccgtgtctggctctcctggacagagcgtgaccatcagctgtaccggcacctcttctgacgtgggcagctacaactacgtgtcctggtatcagcagagccccggcaaggcccctaagctgatgatctacgacgtgtccaacagacccagcggcgtgtccaatagattctccggcagcaagagcggcaacaccgccagcctgacaatctctggactccagtctgaggacgaggccgactactactgtaccagctacggcagctacgacatccccgtgatttttggcggaggcaccaaggtggaaatcaaactcgagggacagcctaaggccaatcctaccgtgacactgttccctccaagcagcgaagaactccaggccaacaaggccacacttgtgtgcctgatctccgacttctaccctggggctgtgacagtggcttggaaggccgatggatctcctgtgaaagccggcgtggaaaccaccaagccatccaagcagagcaacaacaaatacgccgccagctcctacctgagcctgacacctgagcagtggaagtcccacagatcctacagctgccaagtgacccacgaaggcagcaccgtggaaaagacagtggcccctacagagtgcagccccatcaagaccgatgtgattacaatggaccccaaggacaactgctccaaggacgccaacgataccctgctgctccagctgaccaacaccagcgcctactacatgtacttgttgctgctgctgaagtccgtggtgtacttcgccatcatcacatgctgcctgctgcggagaaccgccttctgctgcaacggcgagaagtctagggccaagcgatctggatctggagcaacaaacttctcactactcaaacaagcaggtgacgtggaggagaatcccgggcctactagtatggactggatttggcgcatccttttccttgtcggcgctgctaccggcgcgcattccttcgaacagatgcagctggtgcagtctggggccgaagtgaagaaacctggcagcagcgtgaaggtgtcctgcaaagcaagcggcggcacctttagctcctacgccatctcttgggtccgacaggctccaggacaaggactggaatggatgggcggcatcatccccatcttcggcacagccaattacgcccagaaattccagggcagagtgacaatcaccgccgacaagagcaccagcaccgcctacatggaactgagcagcctgagaagcgacgacaccgccgtgtactactgcgccagagatgaactgtgggccaccaactactactacatggacgtgtggggcaagggcaccctggtcacagtttcttctacgcgtgcctctacaaagggaccctccgtgtttcctctggctcccagcagcaagtctacaagcggaggaacagccgctctgggctgcctggtcaaggattactttcccgagcctgtgaccgtgtcctggaatagcggagcactgacaagcggcgtgcacacctttccagccgtgctgcaaagcagcggcctgtactctctgagcagcgtggtcacagtgcctagctctagcctgggcacccagacctacatctgcaatgtgaaccacaagcctagcaacaccaaggtggacaagagagtggaacccaagagctgtgaagtgaaaaccgactccaccgaccacgtgaagcccaaagagacagagaacaccaagcagcccagcaagagctgccacaagcccaaggccatcgtgcacaccgagaaagtgaacatgatgagcctgaccgtgctgggcctgcggatgctgttcgccaaaaccgtggccgtgaacttcctgctgaccgccaagctgttcttcctc

SEQ ID NO: 9232 - DNA, 1890 bp, Artificial Sequence
  Synthetic Polynucloetide
atggccttaccagtgaccgccttgctcctgccgctggccttgctgctccacgccgccaggccgcagtctgctctgacccagcctagatccgtgtctggctctcctggacagagcgtgaccatcagctgtaccggcacctcttctgacgtgggcagctacaactacgtgtcctggtatcagcagagccccggcaaggcccctaagctgatgatctacgacgtgtccaacagacccagcggcgtgtccaatagattctccggcagcaagagcggcaacaccgccagcctgacaatctctggactccagtctgaggacgaggccgactactactgtaccagctacggcagctacgacatccccgtgatttttggcggaggcaccaaggtggaaatcaaactcgagggacagcctaaggccaatcctaccgtgacactgttccctccaagcagcgaagaactccaggccaacaaggccacacttgtgtgcctgatctccgacttctaccctggggctgtgacagtggcttggaaggccgatggatctcctgtgaaagccggcgtggaaaccaccaagccatccaagcagagcaacaacaaatacgccgccagctcctacctgagcctgacacctgagcagtggaagtcccacagatcctacagctgccaagtgacccacgaaggcagcaccgtggaaaagacagtggcccctacagagtgcagcggcagagccgattgcggcatcaccagcgccagctaccaccagggcgtgctgagcgccaccatcctgtacgagatcctgctgggcaaggccaccctgtacgccgtgctggtgtctgccctggtgctgatggctatggtcaagcggaaggacagccggggaagggccaagcgatctggatctggagcaacaaacttctcactactcaaacaagcaggtgacgtggaggagaatcccgggcctactagtatggactggatttggcgcatccttttccttgtcggcgctgctaccggcgcgcattccttcgaacagatgcagctggtgcagtctggggccgaagtgaagaaacctggcagcagcgtgaaggtgtcctgcaaagcaagcggcggcacctttagctcctacgccatctcttgggtccgacaggctccaggacaaggactggaatggatgggcggcatcatccccatcttcggcacagccaattacgcccagaaattccagggcagagtgacaatcaccgccgacaagagcaccagcaccgcctacatggaactgagcagcctgagaagcgacgacaccgccgtgtactactgcgccagagatgaactgtgggccaccaactactactacatggacgtgtggggcaagggcaccctggtcacagtttcttctacgcgtgcctctacaaagggaccctccgtgtttcctctggctcccagcagcaagtctacaagcggaggaacagccgctctgggctgcctggtcaaggattactttcccgagcctgtgaccgtgtcctggaatagcggagcactgacaagcggcgtgcacacctttccagccgtgctgcaaagcagcggcctgtactctctgagcagcgtggtcacagtgcctagctctagcctgggcacccagacctacatctgcaatgtgaaccacaagcctagcaacaccaaggtggacaagagagtggaacccaagagctgtatccccgaggacacattcttcccaagcagcgacgtgccctgcgacgtgaagctggtggaaaagagcttcgagacagacaccaacctgaacttccagaacctgagcgtgatcggcttcagaatcctgctgctgaaagtggccggctttaacctgctgatgaccctgcggctgtggtccagc

SEQ ID NO: 9233 - DNA, 1890 bp, Artificial Sequence
  Synthetic Polynucloetide
atggccttaccagtgaccgccttgctcctgccgctggccttgctgctccacgccgccaggccgcagtctgctctgacccagcctagatccgtgtctggctctcctggacagagcgtgaccatcagctgtaccggcacctcttctgacgtgggcagctacaactacgtgtcctggtatcagcagagccccggcaaggcccctaagctgatgatctacgacgtgtccaacagacccagcggcgtgtccaatagattctccggcagcaagagcggcaacaccgccagcctgacaatctctggactccagtctgaggacgaggccgactactactgtaccagctacggcagctacgacatccccgtgatttttggcggaggcaccaaggtggaaatcaaactcgagggacagcctaaggccaatcctaccgtgacactgttccctccaagcagcgaagaactccaggccaacaaggccacacttgtgtgcctgatctccgacttctaccctggggctgtgacagtggcttggaaggccgatggatctcctgtgaaagccggcgtggaaaccaccaagccatccaagcagagcaacaacaaatacgccgccagctcctacctgagcctgacacctgagcagtggaagtcccacagatcctacagctgccaagtgacccacgaaggcagcaccgtggaaaagacagtggcccctacagagtgcagcggcagagccgattgcggctttaccagcgagagctaccagcagggcgtgctgagcgccaccatcctgtacgagatcctgctgggcaaggccaccctgtacgccgtgctggtgtctgccctggtgctgatggctatggtcaagcggaaggacagccggggaagggccaagcgatctggatctggagcaacaaacttctcactactcaaacaagcaggtgacgtggaggagaatcccgggcctactagtatggactggatttggcgcatccttttccttgtcggcgctgctaccggcgcgcattccttcgaacagatgcagctggtgcagtctggggccgaagtgaagaaacctggcagcagcgtgaaggtgtcctgcaaagcaagcggcggcacctttagctcctacgccatctcttgggtccgacaggctccaggacaaggactggaatggatgggcggcatcatccccatcttcggcacagccaattacgcccagaaattccagggcagagtgacaatcaccgccgacaagagcaccagcaccgcctacatggaactgagcagcctgagaagcgacgacaccgccgtgtactactgcgccagagatgaactgtgggccaccaactactactacatggacgtgtggggcaagggcaccctggtcacagtttcttctacgcgtgcctctacaaagggaccctccgtgtttcctctggctcccagcagcaagtctacaagcggaggaacagccgctctgggctgcctggtcaaggattactttcccgagcctgtgaccgtgtcctggaatagcggagcactgacaagcggcgtgcacacctttccagccgtgctgcaaagcagcggcctgtactctctgagcagcgtggtcacagtgcctagctctagcctgggcacccagacctacatctgcaatgtgaaccacaagcctagcaacaccaaggtggacaagagagtggaacccaagagctgtatccccgaggacacattcttcccaagccccgagagcagctgcgacgtgaagctggtggaaaagagcttcgagacagacaccaacctgaacttccagaacctgagcgtgatcggcttcagaatcctgctgctgaaagtggccggctttaacctgctgatgaccctgcggctgtggtccagc

SEQ ID NO: 9234 - DNA, 1368 bp, Artificial Sequence
  Synthetic Polynucloetide
atggccttaccagtgaccgccttgctcctgccgctggccttgctgctccacgccgccaggccgcagtctgctctgacccagcctagatccgtgtctggctctcctggacagagcgtgaccatcagctgtaccggcacctcttctgacgtgggcagctacaactacgtgtcctggtatcagcagagccccggcaaggcccctaagctgatgatctacgacgtgtccaacagacccagcggcgtgtccaatagattctccggcagcaagagcggcaacaccgccagcctgacaatctctggactccagtctgaggacgaggccgactactactgtaccagctacggcagctacgacatccccgtgatttttggcggaggcaccaaggtggaaatcaaaggcggaggcggaagtggaggcggaggatctggcggcggaggctctcagatgcagctggtgcagtctggggccgaagtgaagaaacctggcagcagcgtgaaggtgtcctgcaaagcaagcggcggcacctttagctcctacgccatctcttgggtccgacaggctccaggacaaggactggaatggatgggcggcatcatccccatcttcggcacagccaattacgcccagaaattccagggcagagtgacaatcaccgccgacaagagcaccagcaccgcctacatggaactgagcagcctgagaagcgacgacaccgccgtgtactactgcgccagagatgaactgtgggccaccaactactactacatggacgtgtggggcaagggcaccctggtcacagtttcttctacgcgtgacggtaacgaggagatgggaggaatcactcaaaccccttacaaagtctcaatttcaggaacaactgttatccttacatgtccccagtatcctggcagcgagatcctttggcagcataacgacaagaatatagggggagatgaagacgataagaatatcggatctgacgaggatcacttgagcctgaaagagttctccgagcttgaacaaagcggatattatgtgtgctatccgcgcgggtcaaagccggaagacgctaacttttacctttatctccgagccagagtgtgcgaaaattgcatggaaatggacgttatgtccgttgctacaatagttatcgtagatatatgcatcacgggtggactgcttctgctggtttattattggtccaagaatagaaaggccaaagctaaacccgtgaccagaggcgctggcgcaggcggaaggcaaaggggacaaaacaaagaacggccaccaccagtgccaaatccagattatgagcctattcggaaaggacagagggacctgtactctggcctgaatcagagaagaatc

SEQ ID NO: 9235 - DNA, 1263 bp, Artificial Sequence
  Synthetic Polynucloetide
atggccttaccagtgaccgccttgctcctgccgctggccttgctgctccacgccgccaggccgcagtctgctctgacccagcctagatccgtgtctggctctcctggacagagcgtgaccatcagctgtaccggcacctcttctgacgtgggcagctacaactacgtgtcctggtatcagcagagccccggcaaggcccctaagctgatgatctacgacgtgtccaacagacccagcggcgtgtccaatagattctccggcagcaagagcggcaacaccgccagcctgacaatctctggactccagtctgaggacgaggccgactactactgtaccagctacggcagctacgacatccccgtgatttttggcggaggcaccaaggtggaaatcaaaggcggaggcggaagtggaggcggaggatctggcggcggaggctctcagatgcagctggtgcagtctggggccgaagtgaagaaacctggcagcagcgtgaaggtgtcctgcaaagcaagcggcggcacctttagctcctacgccatctcttgggtccgacaggctccaggacaaggactggaatggatgggcggcatcatccccatcttcggcacagccaattacgcccagaaattccagggcagagtgacaatcaccgccgacaagagcaccagcaccgcctacatggaactgagcagcctgagaagcgacgacaccgccgtgtactactgcgccagagatgaactgtgggccaccaactactactacatggacgtgtggggcaagggcaccctggtcacagtttcttctacgcgtttcaagatccccatcgaggaactggaagatcgggtgttcgtgaactgcaacacctctatcacctgggtggaaggcaccgtgggaacactgctgagcgacatcaccagactggacctcggcaagcggattctggaccctcggggcatctacagatgcaacggcaccgacatctacaaggacaaagaaagcaccgtgcaggtccactacagaatgtgccagtcctgcgtggaactggaccctgctacagtggccggcatcatcgtgaccgatgtgatcgctactctgctgctggctctgggagtgttctgcttcgccggacacgaaacaggcagactgtctggcgctgccgatacacaggccctgctgagaaacgaccaagtgtatcagcccctgcgcgacagagatgatgcccagtattctcacctcggcggcaactgggctagaaacaag

SEQ ID NO: 9236 - DNA, 1293 bp, Artificial Sequence
  Synthetic Polynucloetide
atggccttaccagtgaccgccttgctcctgccgctggccttgctgctccacgccgccaggccgcagtctgctctgacccagcctagatccgtgtctggctctcctggacagagcgtgaccatcagctgtaccggcacctcttctgacgtgggcagctacaactacgtgtcctggtatcagcagagccccggcaaggcccctaagctgatgatctacgacgtgtccaacagacccagcggcgtgtccaatagattctccggcagcaagagcggcaacaccgccagcctgacaatctctggactccagtctgaggacgaggccgactactactgtaccagctacggcagctacgacatccccgtgatttttggcggaggcaccaaggtggaaatcaaaggcggaggcggaagtggaggcggaggatctggcggcggaggctctcagatgcagctggtgcagtctggggccgaagtgaagaaacctggcagcagcgtgaaggtgtcctgcaaagcaagcggcggcacctttagctcctacgccatctcttgggtccgacaggctccaggacaaggactggaatggatgggcggcatcatccccatcttcggcacagccaattacgcccagaaattccagggcagagtgacaatcaccgccgacaagagcaccagcaccgcctacatggaactgagcagcctgagaagcgacgacaccgccgtgtactactgcgccagagatgaactgtgggccaccaactactactacatggacgtgtggggcaagggcaccctggtcacagtttcttctacgcgtcagagcatcaagggcaaccacctggtcaaggtgtacgactaccaagaggacggcagcgtgctgctgacatgtgatgccgaggccaagaacatcacctggtttaaggacggcaagatgatcggcttcctgaccgaggacaagaagaagtggaacctgggcagcaacgctaaggaccccagaggcatgtatcagtgcaagggcagccagaacaagagcaagcccctccaggtgtactaccggatgtgccagaactgcatcgagctgaacgccgctaccatcagcggctttctgttcgccgagatcgtgtccatcttcgtgctggccgtgggcgtgtactttatcgctggacaggatggcgtgcggcagagcagagcttccgataagcaaaccctgctgcctaacgaccagctgtaccagcctctgaaggacagagaggacgaccagtacagccacctccagggcaatcagctgagaagaaac

SEQ ID NO: 9237 - DNA, 1242 bp, Artificial Sequence
  Synthetic Polynucloetide
atggccttaccagtgaccgccttgctcctgccgctggccttgctgctccacgccgccaggccgcagtctgctctgacccagcctagatccgtgtctggctctcctggacagagcgtgaccatcagctgtaccggcacctcttctgacgtgggcagctacaactacgtgtcctggtatcagcagagccccggcaaggcccctaagctgatgatctacgacgtgtccaacagacccagcggcgtgtccaatagattctccggcagcaagagcggcaacaccgccagcctgacaatctctggactccagtctgaggacgaggccgactactactgtaccagctacggcagctacgacatccccgtgatttttggcggaggcaccaaggtggaaatcaaaggcggaggcggaagtggaggcggaggatctggcggcggaggctctcagatgcagctggtgcagtctggggccgaagtgaagaaacctggcagcagcgtgaaggtgtcctgcaaagcaagcggcggcacctttagctcctacgccatctcttgggtccgacaggctccaggacaaggactggaatggatgggcggcatcatccccatcttcggcacagccaattacgcccagaaattccagggcagagtgacaatcaccgccgacaagagcaccagcaccgcctacatggaactgagcagcctgagaagcgacgacaccgccgtgtactactgcgccagagatgaactgtgggccaccaactactactacatggacgtgtggggcaagggcaccctggtcacagtttcttctacgcgtcagagttttgggttgttggaccctaaattgtgctatctgttggacggaatcctgttcatttacggagtgatcctgaccgcattgttcctgcgggttaagttttccagatccgcagacgcacccgcttaccaacaagggcagaaccaactctacaatgaacttaatttggggcggagggaagagtacgacgttctggacaaaaggaggggacgagatcccgagatgggcggaaagcctcagcgaaggaagaatccgcaagaggggctttataacgaactccagaaagataaaatggcagaagcctatagtgagattgggatgaagggagaaaggaggaggggtaaaggtcacgatgggttgtaccaaggattgagcacagccactaaagatacctatgatgcgctccacatgcaggccctgccgccaaga

SEQ ID NO: 9238 - DNA, 1368 bp, Artificial Sequence
  Synthetic Polynucloetide
atggccttaccagtgaccgccttgctcctgccgctggccttgctgctccacgccgccaggccgcagatgcagctggtgcagtctggggccgaagtgaagaaacctggcagcagcgtgaaggtgtcctgcaaagcaagcggcggcacctttagctcctacgccatctcttgggtccgacaggctccaggacaaggactggaatggatgggcggcatcatccccatcttcggcacagccaattacgcccagaaattccagggcagagtgacaatcaccgccgacaagagcaccagcaccgcctacatggaactgagcagcctgagaagcgacgacaccgccgtgtactactgcgccagagatgaactgtgggccaccaactactactacatggacgtgtggggcaagggcaccctggtcacagtttcttctggcggaggcggaagtggaggcggaggatctggcggcggaggctctcagtctgctctgacccagcctagatccgtgtctggctctcctggacagagcgtgaccatcagctgtaccggcacctcttctgacgtgggcagctacaactacgtgtcctggtatcagcagagccccggcaaggcccctaagctgatgatctacgacgtgtccaacagacccagcggcgtgtccaatagattctccggcagcaagagcggcaacaccgccagcctgacaatctctggactccagtctgaggacgaggccgactactactgtaccagctacggcagctacgacatccccgtgatttttggcggaggcaccaaggtggaaatcaaaacgcgtgacggtaacgaggagatgggaggaatcactcaaaccccttacaaagtctcaatttcaggaacaactgttatccttacatgtccccagtatcctggcagcgagatcctttggcagcataacgacaagaatatagggggagatgaagacgataagaatatcggatctgacgaggatcacttgagcctgaaagagttctccgagcttgaacaaagcggatattatgtgtgctatccgcgcgggtcaaagccggaagacgctaacttttacctttatctccgagccagagtgtgcgaaaattgcatggaaatggacgttatgtccgttgctacaatagttatcgtagatatatgcatcacgggtggactgcttctgctggtttattattggtccaagaatagaaaggccaaagctaaacccgtgaccagaggcgctggcgcaggcggaaggcaaaggggacaaaacaaagaacggccaccaccagtgccaaatccagattatgagcctattcggaaaggacagagggacctgtactctggcctgaatcagagaagaatc

SEQ ID NO: 9239 - DNA, 1263 bp, Artificial Sequence
  Synthetic Polynucloetide
atggccttaccagtgaccgccttgctcctgccgctggccttgctgctccacgccgccaggccgcagatgcagctggtgcagtctggggccgaagtgaagaaacctggcagcagcgtgaaggtgtcctgcaaagcaagcggcggcacctttagctcctacgccatctcttgggtccgacaggctccaggacaaggactggaatggatgggcggcatcatccccatcttcggcacagccaattacgcccagaaattccagggcagagtgacaatcaccgccgacaagagcaccagcaccgcctacatggaactgagcagcctgagaagcgacgacaccgccgtgtactactgcgccagagatgaactgtgggccaccaactactactacatggacgtgtggggcaagggcaccctggtcacagtttcttctggcggaggcggaagtggaggcggaggatctggcggcggaggctctcagtctgctctgacccagcctagatccgtgtctggctctcctggacagagcgtgaccatcagctgtaccggcacctcttctgacgtgggcagctacaactacgtgtcctggtatcagcagagccccggcaaggcccctaagctgatgatctacgacgtgtccaacagacccagcggcgtgtccaatagattctccggcagcaagagcggcaacaccgccagcctgacaatctctggactccagtctgaggacgaggccgactactactgtaccagctacggcagctacgacatccccgtgatttttggcggaggcaccaaggtggaaatcaaaacgcgtttcaagatccccatcgaggaactggaagatcgggtgttcgtgaactgcaacacctctatcacctgggtggaaggcaccgtgggaacactgctgagcgacatcaccagactggacctcggcaagcggattctggaccctcggggcatctacagatgcaacggcaccgacatctacaaggacaaagaaagcaccgtgcaggtccactacagaatgtgccagtcctgcgtggaactggaccctgctacagtggccggcatcatcgtgaccgatgtgatcgctactctgctgctggctctgggagtgttctgcttcgccggacacgaaacaggcagactgtctggcgctgccgatacacaggccctgctgagaaacgaccaagtgtatcagcccctgcgcgacagagatgatgcccagtattctcacctcggcggcaactgggctagaaacaag

SEQ ID NO: 9240 - DNA, 1293 bp, Artificial Sequence
  Synthetic Polynucloetide
atggccttaccagtgaccgccttgctcctgccgctggccttgctgctccacgccgccaggccgcagatgcagctggtgcagtctggggccgaagtgaagaaacctggcagcagcgtgaaggtgtcctgcaaagcaagcggcggcacctttagctcctacgccatctcttgggtccgacaggctccaggacaaggactggaatggatgggcggcatcatccccatcttcggcacagccaattacgcccagaaattccagggcagagtgacaatcaccgccgacaagagcaccagcaccgcctacatggaactgagcagcctgagaagcgacgacaccgccgtgtactactgcgccagagatgaactgtgggccaccaactactactacatggacgtgtggggcaagggcaccctggtcacagtttcttctggcggaggcggaagtggaggcggaggatctggcggcggaggctctcagtctgctctgacccagcctagatccgtgtctggctctcctggacagagcgtgaccatcagctgtaccggcacctcttctgacgtgggcagctacaactacgtgtcctggtatcagcagagccccggcaaggcccctaagctgatgatctacgacgtgtccaacagacccagcggcgtgtccaatagattctccggcagcaagagcggcaacaccgccagcctgacaatctctggactccagtctgaggacgaggccgactactactgtaccagctacggcagctacgacatccccgtgatttttggcggaggcaccaaggtggaaatcaaaacgcgtcagagcatcaagggcaaccacctggtcaaggtgtacgactaccaagaggacggcagcgtgctgctgacatgtgatgccgaggccaagaacatcacctggtttaaggacggcaagatgatcggcttcctgaccgaggacaagaagaagtggaacctgggcagcaacgctaaggaccccagaggcatgtatcagtgcaagggcagccagaacaagagcaagcccctccaggtgtactaccggatgtgccagaactgcatcgagctgaacgccgctaccatcagcggctttctgttcgccgagatcgtgtccatcttcgtgctggccgtgggcgtgtactttatcgctggacaggatggcgtgcggcagagcagagcttccgataagcaaaccctgctgcctaacgaccagctgtaccagcctctgaaggacagagaggacgaccagtacagccacctccagggcaatcagctgagaagaaac

SEQ ID NO: 9241 - DNA, 1242 bp, Artificial Sequence
  Synthetic Polynucloetide
atggccttaccagtgaccgccttgctcctgccgctggccttgctgctccacgccgccaggccgcagatgcagctggtgcagtctggggccgaagtgaagaaacctggcagcagcgtgaaggtgtcctgcaaagcaagcggcggcacctttagctcctacgccatctcttgggtccgacaggctccaggacaaggactggaatggatgggcggcatcatccccatcttcggcacagccaattacgcccagaaattccagggcagagtgacaatcaccgccgacaagagcaccagcaccgcctacatggaactgagcagcctgagaagcgacgacaccgccgtgtactactgcgccagagatgaactgtgggccaccaactactactacatggacgtgtggggcaagggcaccctggtcacagtttcttctggcggaggcggaagtggaggcggaggatctggcggcggaggctctcagtctgctctgacccagcctagatccgtgtctggctctcctggacagagcgtgaccatcagctgtaccggcacctcttctgacgtgggcagctacaactacgtgtcctggtatcagcagagccccggcaaggcccctaagctgatgatctacgacgtgtccaacagacccagcggcgtgtccaatagattctccggcagcaagagcggcaacaccgccagcctgacaatctctggactccagtctgaggacgaggccgactactactgtaccagctacggcagctacgacatccccgtgatttttggcggaggcaccaaggtggaaatcaaaacgcgtcagagttttgggttgttggaccctaaattgtgctatctgttggacggaatcctgttcatttacggagtgatcctgaccgcattgttcctgcgggttaagttttccagatccgcagacgcacccgcttaccaacaagggcagaaccaactctacaatgaacttaatttggggcggagggaagagtacgacgttctggacaaaaggaggggacgagatcccgagatgggcggaaagcctcagcgaaggaagaatccgcaagaggggctttataacgaactccagaaagataaaatggcagaagcctatagtgagattgggatgaagggagaaaggaggaggggtaaaggtcacgatgggttgtaccaaggattgagcacagccactaaagatacctatgatgcgctccacatgcaggccctgccgccaaga

SEQ ID NO: 9242 - DNA, 1944 bp, Artificial Sequence
  Synthetic Polynucloetide
atggccttaccagtgaccgccttgctcctgccgctggccttgctgctccacgccgccaggccgcagtctgctctgacccagcctagatccgtgtctggctctcctggacagagcgtgaccatcagctgtaccggcacctcttctgacgtgggcagctacaactacgtgtcctggtatcagcagagccccggcaaggcccctaagctgatgatctacgacgtgtccaacagacccagcggcgtgtccaatagattctccggcagcaagagcggcaacaccgccagcctgacaatctctggactccagtctgaggacgaggccgactactactgtaccagctacggcagctacgacatccccgtgatttttggcggaggcaccaaggtggaaatcaaaggcggaggcggaagtggaggcggaggatctggcggcggaggctctcagatgcagctggtgcagtctggggccgaagtgaagaaacctggcagcagcgtgaaggtgtcctgcaaagcaagcggcggcacctttagctcctacgccatctcttgggtccgacaggctccaggacaaggactggaatggatgggcggcatcatccccatcttcggcacagccaattacgcccagaaattccagggcagagtgacaatcaccgccgacaagagcaccagcaccgcctacatggaactgagcagcctgagaagcgacgacaccgccgtgtactactgcgccagagatgaactgtgggccaccaactactactacatggacgtgtggggcaagggcaccctggtcacagtttcttctacgcgtgggagcggcatccagaaccctgatcctgccgtgtaccagctgcgggatagcaagagcagcgacaagagcgtgtgtctgttcaccgacttcgacagccagaccaacgtgtcccagagcaaggactccgacgtgtacatcaccgataagaccgtgctggacatgcggagcatggacttcaagagcaactccgccgtggcctggtccaacaagtccgatttcgcctgcgccaacgccttcaacaacagcattatccccgaggacacattcttcccaagccccgagagcagctgcgacgtgaagctggtggaaaagagcttcgagacagacaccaacctgaacttccagaacctgagcgtgatcggcttcagaatcctgctgctgaaagtggccggctttaacctgctgatgaccctgcggctgtggtccagccgcgccaagagaagcggatctggcgtgaagcagaccctgaatttcgacctgctgaagctggctggcgacgtggaatccaacccaggcccttctagaggccatatgaccgagtacaagcccacggtgcgcctcgccacccgcgacgacgtccccagggccgtacgcaccctcgccgccgcgttcgccgactaccccgccacgcgccacaccgtcgatccggaccgccacatcgagcgggtcaccgagctgcaagaactcttcctcacgcgcgtcgggctcgacatcggcaaggtgtgggtcgcggacgacggcgccgcggtggcggtctggaccacgccggagagcgtcgaagcgggggcggtgttcgccgagatcggcccgcgcatggccgagttgagcggttcccggctggccgcgcagcaacagatggaaggcctcctggcgccgcaccggcccaaggagcccgcgtggttcctggccaccgtcggcgtctcgcccgaccaccagggcaagggtctgggcagcgccgtcgtgctccccggagtggaggcggccgagcgcgccggggtgcccgccttcctggagacctccgcgccccgcaacctccccttctacgagcggctcggcttcaccgtcaccgccgacgtcgaggtgcccgaaggaccgcgcacctggtgcatgacccgcaagcccggtgcctga

SEQ ID NO: 9243 - DNA, 2040 bp, Artificial Sequence
  Synthetic Polynucloetide
atggccttaccagtgaccgccttgctcctgccgctggccttgctgctccacgccgccaggccgcagtctgctctgacccagcctagatccgtgtctggctctcctggacagagcgtgaccatcagctgtaccggcacctcttctgacgtgggcagctacaactacgtgtcctggtatcagcagagccccggcaaggcccctaagctgatgatctacgacgtgtccaacagacccagcggcgtgtccaatagattctccggcagcaagagcggcaacaccgccagcctgacaatctctggactccagtctgaggacgaggccgactactactgtaccagctacggcagctacgacatccccgtgatttttggcggaggcaccaaggtggaaatcaaaggcggaggcggaagtggaggcggaggatctggcggcggaggctctcagatgcagctggtgcagtctggggccgaagtgaagaaacctggcagcagcgtgaaggtgtcctgcaaagcaagcggcggcacctttagctcctacgccatctcttgggtccgacaggctccaggacaaggactggaatggatgggcggcatcatccccatcttcggcacagccaattacgcccagaaattccagggcagagtgacaatcaccgccgacaagagcaccagcaccgcctacatggaactgagcagcctgagaagcgacgacaccgccgtgtactactgcgccagagatgaactgtgggccaccaactactactacatggacgtgtggggcaagggcaccctggtcacagtttcttctctcgaggacctgaagaacgtgttcccacctgaggtggccgtgttcgagcctagcgaggccgagatcagccacacccagaaagccaccctcgtgtgcctggctaccggcttctaccccgaccatgtggaactgtcttggtgggtcaacggcaaagaggtgcacagcggcgtgtctaccgacccccagccactgaaagaacagcccgccctgaacgacagccggtactgcctgagcagcagactgagagtgtccgccaccttctggcagaacccccggaaccacttcagatgccaggtgcagttctacggcctgagcgagaacgacgagtggacccaggacagagccaagcccgtgacccagatcgtgtctgccgaagcctggggcagagccgattgcggctttaccagcgagagctaccagcagggcgtgctgagcgccaccatcctgtacgagatcctgctgggcaaggccaccctgtacgccgtgctggtgtctgccctggtgctgatggctatggtcaagcggaaggacagccggggaagggccaagcgatctggatctggagcaacaaacttctcactactcaaacaagcaggtgacgtggaggagaatcccgggcctactagaggccatatgaccgagtacaagcccacggtgcgcctcgccacccgcgacgacgtccccagggccgtacgcaccctcgccgccgcgttcgccgactaccccgccacgcgccacaccgtcgatccggaccgccacatcgagcgggtcaccgagctgcaagaactcttcctcacgcgcgtcgggctcgacatcggcaaggtgtgggtcgcggacgacggcgccgcggtggcggtctggaccacgccggagagcgtcgaagcgggggcggtgttcgccgagatcggcccgcgcatggccgagttgagcggttcccggctggccgcgcagcaacagatggaaggcctcctggcgccgcaccggcccaaggagcccgcgtggttcctggccaccgtcggcgtctcgcccgaccaccagggcaagggtctgggcagcgccgtcgtgctccccggagtggaggcggccgagcgcgccggggtgcccgccttcctggagacctccgcgccccgcaacctccccttctacgagcggctcggcttcaccgtcaccgccgacgtcgaggtgcccgaaggaccgcgcacctggtgcatgacccgcaagcccggtgcctga

SEQ ID NO: 9244 - DNA, 2190 bp, Artificial Sequence
  Synthetic Polynucloetide
atggccttaccagtgaccgccttgctcctgccgctggccttgctgctccacgccgccaggccgcagtctgctctgacccagcctagatccgtgtctggctctcctggacagagcgtgaccatcagctgtaccggcacctcttctgacgtgggcagctacaactacgtgtcctggtatcagcagagccccggcaaggcccctaagctgatgatctacgacgtgtccaacagacccagcggcgtgtccaatagattctccggcagcaagagcggcaacaccgccagcctgacaatctctggactccagtctgaggacgaggccgactactactgtaccagctacggcagctacgacatccccgtgatttttggcggaggcaccaaggtggaaatcaaaggcggaggcggaagtggaggcggaggatctggcggcggaggctctcagatgcagctggtgcagtctggggccgaagtgaagaaacctggcagcagcgtgaaggtgtcctgcaaagcaagcggcggcacctttagctcctacgccatctcttgggtccgacaggctccaggacaaggactggaatggatgggcggcatcatccccatcttcggcacagccaattacgcccagaaattccagggcagagtgacaatcaccgccgacaagagcaccagcaccgcctacatggaactgagcagcctgagaagcgacgacaccgccgtgtactactgcgccagagatgaactgtgggccaccaactactactacatggacgtgtggggcaagggcaccctggtcacagtttcttctacgcgtgagcagaaactgatctcggaagaggatctggggagcggcaccccattcccttctctggcccctcccatcatgctgctggtggacggcaagcagcagatggtggtcgtgtgcctggtgctggatgtggccccacctggactggacagccccatctggtttagcgccggcaatggctctgccctggacgcctttacctacggcccaagccctgccaccgatggcacctggacaaatctggcccacctgagcctgcccagcgaggaactggcttcttgggagcctctcgtgtgccacacaggacctggcgctgagggacacagcagatccacccagcctatgcacctgtctggcgaggccagcaccgccagaacctgtcctcaggaacctctgagaggcacccctggcggagcactgtggctgggagtgctgagactgctgctgttcaagctgctgctgtttgacctgctgctgacctgctcctgtctgtgcgatcctgccggccctctgccttctcctgccaccaccacaagactgagagccctgggcagccacagactgcaccctgccacagagacaggcggcagagaggccacaagcagccctagaccccagcccagagacagaagatggggcgataccccccctggcagaaagcctggatctccagtccgcgccaagagaagcggatctggcgtgaagcagaccctgaatttcgacctgctgaagctggctggcgacgtggaatccaacccaggcccttctagatctagaggccatatgaccgagtacaagcccacggtgcgcctcgccacccgcgacgacgtccccagggccgtacgcaccctcgccgccgcgttcgccgactaccccgccacgcgccacaccgtcgatccggaccgccacatcgagcgggtcaccgagctgcaagaactcttcctcacgcgcgtcgggctcgacatcggcaaggtgtgggtcgcggacgacggcgccgcggtggcggtctggaccacgccggagagcgtcgaagcgggggcggtgttcgccgagatcggcccgcgcatggccgagttgagcggttcccggctggccgcgcagcaacagatggaaggcctcctggcgccgcaccggcccaaggagcccgcgtggttcctggccaccgtcggcgtctcgcccgaccaccagggcaagggtctgggcagcgccgtcgtgctccccggagtggaggcggccgagcgcgccggggtgcccgccttcctggagacctccgcgccccgcaacctccccttctacgagcggctcggcttcaccgtcaccgccgacgtcgaggtgcccgaaggaccgcgcacctggtgcatgacccgcaagcccggtgcctga

SEQ ID NO: 9245 - DNA, 1629 bp, Artificial Sequence
  Synthetic Polynucloetide
atggccttaccagtgaccgccttgctcctgccgctggccttgctgctccacgccgccaggccgcagtctgctctgacccagcctagatccgtgtctggctctcctggacagagcgtgaccatcagctgtaccggcacctcttctgacgtgggcagctacaactacgtgtcctggtatcagcagagccccggcaaggcccctaagctgatgatctacgacgtgtccaacagacccagcggcgtgtccaatagattctccggcagcaagagcggcaacaccgccagcctgacaatctctggactccagtctgaggacgaggccgactactactgtaccagctacggcagctacgacatccccgtgatttttggcggaggcaccaaggtggaaatcaaactcgaggacctgaagaacgtgttcccacctgaggtggccgtgttcgagcctagcgaggccgagatcagccacacccagaaagccaccctcgtgtgcctggctaccggcttctaccccgaccatgtggaactgtcttggtgggtcaacggcaaagaggtgcacagcggcgtgtctaccgacccccagccactgaaagaacagcccgccctgaacgacagccggtactgcctgagcagcagactgagagtgtccgccaccttctggcagaacccccggaaccacttcagatgccaggtgcagttctacggcctgagcgagaacgacgagtggacccaggacagagccaagcccgtgacccagatcgtgtctgccgaagcctggggcagagccgattgcggctttaccagcgagagctaccagcagggcgtgctgagcgccaccatcctgtacgagatcctgctgggcaaggccaccctgtacgccgtgctggtgtctgccctggtgctgatggctatggtcaagcggaaggacagccggggaagggccaagcgatctggatctggagcaacaaacttctcactactcaaacaagcaggtgacgtggaggagaatcccgggcctactagaggccatatgaccgagtacaagcccacggtgcgcctcgccacccgcgacgacgtccccagggccgtacgcaccctcgccgccgcgttcgccgactaccccgccacgcgccacaccgtcgatccggaccgccacatcgagcgggtcaccgagctgcaagaactcttcctcacgcgcgtcgggctcgacatcggcaaggtgtgggtcgcggacgacggcgccgcggtggcggtctggaccacgccggagagcgtcgaagcgggggcggtgttcgccgagatcggcccgcgcatggccgagttgagcggttcccggctggccgcgcagcaacagatggaaggcctcctggcgccgcaccggcccaaggagcccgcgtggttcctggccaccgtcggcgtctcgcccgaccaccagggcaagggtctgggcagcgccgtcgtgctccccggagtggaggcggccgagcgcgccggggtgcccgccttcctggagacctccgcgccccgcaacctccccttctacgagcggctcggcttcaccgtcaccgccgacgtcgaggtgcccgaaggaccgcgcacctggtgcatgacccgcaagcccggtgcctga

SEQ ID NO: 9246 - DNA, 936 bp, Artificial Sequence
  Synthetic Polynucloetide
atggccttaccagtgaccgccttgctcctgccgctggccttgctgctccacgccgccaggccgcagtctgctctgacccagcctagatccgtgtctggctctcctggacagagcgtgaccatcagctgtaccggcacctcttctgacgtgggcagctacaactacgtgtcctggtatcagcagagccccggcaaggcccctaagctgatgatctacgacgtgtccaacagacccagcggcgtgtccaatagattctccggcagcaagagcggcaacaccgccagcctgacaatctctggactccagtctgaggacgaggccgactactactgtaccagctacggcagctacgacatccccgtgatttttggcggaggcaccaaggtggaaatcaaactcgaggacctgaagaacgtgttcccacctgaggtggccgtgttcgagcctagcgaggccgagatcagccacacccagaaagccaccctcgtgtgcctggctaccggcttctaccccgaccatgtggaactgtcttggtgggtcaacggcaaagaggtgcacagcggcgtgtctaccgacccccagccactgaaagaacagcccgccctgaacgacagccggtactgcctgagcagcagactgagagtgtccgccaccttctggcagaacccccggaaccacttcagatgccaggtgcagttctacggcctgagcgagaacgacgagtggacccaggacagagccaagcccgtgacccagatcgtgtctgccgaagcctggggcagagccgattgcggctttaccagcgagagctaccagcagggcgtgctgagcgccaccatcctgtacgagatcctgctgggcaaggccaccctgtacgccgtgctggtgtctgccctggtgctgatggctatggtcaagcggaaggacagccgggga

SEQ ID NO: 9247 - DNA, 1356 bp, Artificial Sequence
  Synthetic Polynucloetide
atggactggatttggcgcatccttttccttgtcggcgctgctaccggcgcgcattccttcgaacagatgcagctggtgcagtctggggccgaagtgaagaaacctggcagcagcgtgaaggtgtcctgcaaagcaagcggcggcacctttagctcctacgccatctcttgggtccgacaggctccaggacaaggactggaatggatgggcggcatcatccccatcttcggcacagccaattacgcccagaaattccagggcagagtgacaatcaccgccgacaagagcaccagcaccgcctacatggaactgagcagcctgagaagcgacgacaccgccgtgtactactgcgccagagatgaactgtgggccaccaactactactacatggacgtgtggggcaagggcaccctggtcacagtttcttctacgcgtatccagaaccctgatcctgccgtgtaccagctgcgggatagcaagagcagcgacaagagcgtgtgtctgttcaccgacttcgacagccagaccaacgtgtcccagagcaaggactccgacgtgtacatcaccgataagaccgtgctggacatgcggagcatggacttcaagagcaactccgccgtggcctggtccaacaagtccgatttcgcctgcgccaacgccttcaacaacagcattatccccgaggacacattcttcccaagccccgagagcagctgcgacgtgaagctggtggaaaagagcttcgagacagacaccaacctgaacttccagaacctgagcgtgatcggcttcagaatcctgctgctgaaagtggccggctttaacctgctgatgaccctgcggctgtggtccagccgcgccaagagaagcggatctggcgtgaagcagaccctgaatttcgacctgctgaagctggctggcgacgtggaatccaacccaggcccttctagaggccatatggccaagcctttgtctcaagaagaatccaccctcattgaaagagcaacggctacaatcaacagcatccccatctctgaagactacagcgtcgccagcgcagctctctctagcgacggccgcatcttcactggtgtcaatgtatatcattttactgggggaccttgtgcagaactcgtggtgctgggcactgctgctgctgcggcagctggcaacctgacttgtatcgtcgcgatcggaaatgagaacaggggcatcttgagcccctgcggacggtgccgacaggtgcttctcgatctgcatcctgggatcaaagccatagtgaaggacagtgatggacagccgacggcagttgggattcgtgaattgctgccctctggttatgtgtgggagggctga

SEQ ID NO: 9248 - DNA, 855 bp, Artificial Sequence
  Synthetic Polynucloetide
atggactggatttggcgcatccttttccttgtcggcgctgctaccggcgcgcattccttcgaacagatgcagctggtgcagtctggggccgaagtgaagaaacctggcagcagcgtgaaggtgtcctgcaaagcaagcggcggcacctttagctcctacgccatctcttgggtccgacaggctccaggacaaggactggaatggatgggcggcatcatccccatcttcggcacagccaattacgcccagaaattccagggcagagtgacaatcaccgccgacaagagcaccagcaccgcctacatggaactgagcagcctgagaagcgacgacaccgccgtgtactactgcgccagagatgaactgtgggccaccaactactactacatggacgtgtggggcaagggcaccctggtcacagtttcttctacgcgtatccagaaccctgatcctgccgtgtaccagctgcgggatagcaagagcagcgacaagagcgtgtgtctgttcaccgacttcgacagccagaccaacgtgtcccagagcaaggactccgacgtgtacatcaccgataagaccgtgctggacatgcggagcatggacttcaagagcaactccgccgtggcctggtccaacaagtccgatttcgcctgcgccaacgccttcaacaacagcattatccccgaggacacattcttcccaagccccgagagcagctgcgacgtgaagctggtggaaaagagcttcgagacagacaccaacctgaacttccagaacctgagcgtgatcggcttcagaatcctgctgctgaaagtggccggctttaacctgctgatgaccctgcggctgtggtccagc

SEQ ID NO: 9249 - DNA, 1683 bp, Artificial Sequence
  Synthetic Polynucloetide
atggccttaccagtgaccgccttgctcctgccgctggccttgctgctccacgccgccaggccgcagtctgctctgacccagcctagatccgtgtctggctctcctggacagagcgtgaccatcagctgtaccggcacctcttctgacgtgggcagctacaactacgtgtcctggtatcagcagagccccggcaaggcccctaagctgatgatctacgacgtgtccaacagacccagcggcgtgtccaatagattctccggcagcaagagcggcaacaccgccagcctgacaatctctggactccagtctgaggacgaggccgactactactgtaccagctacggcagctacgacatccccgtgatttttggcggaggcaccaaggtggaaatcaaactcgaggggaaaccaattcccaaccctcttctgggactggattcaaccggcagcggcgaggacctgaagaacgtgttcccacctgaggtggccgtgttcgagcctagcgaggccgagatcagccacacccagaaagccaccctcgtgtgcctggctaccggcttctaccccgaccatgtggaactgtcttggtgggtcaacggcaaagaggtgcacagcggcgtgtgtaccgacccccagccactgaaagaacagcccgccctgaacgacagccggtactgcctgagcagcagactgagagtgtccgccaccttctggcagaacccccggaaccacttcagatgccaggtgcagttctacggcctgagcgagaacgacgagtggacccaggacagagccaagcccgtgacccagatcgtgtctgccgaagcctggggcagagccgattgcggctttaccagcgagagctaccagcagggcgtgctgagcgccaccatcctgtacgagatcctgctgggcaaggccaccctgtacgccgtgctggtgtctgccctggtgctgatggctatggtcaagcggaaggacagccggggaagggccaagcgatctggatctggagcaacaaacttctcactactcaaacaagcaggtgacgtggaggagaatcccgggcctactagaggccatatgaccgagtacaagcccacggtgcgcctcgccacccgcgacgacgtccccagggccgtacgcaccctcgccgccgcgttcgccgactaccccgccacgcgccacaccgtcgatccggaccgccacatcgagcgggtcaccgagctgcaagaactcttcctcacgcgcgtcgggctcgacatcggcaaggtgtgggtcgcggacgacggcgccgcggtggcggtctggaccacgccggagagcgtcgaagcgggggcggtgttcgccgagatcggcccgcgcatggccgagttgagcggttcccggctggccgcgcagcaacagatggaaggcctcctggcgccgcaccggcccaaggagcccgcgtggttcctggccaccgtcggcgtctcgcccgaccaccagggcaagggtctgggcagcgccgtcgtgctccccggagtggaggcggccgagcgcgccggggtgcccgccttcctggagacctccgcgccccgcaacctccccttctacgagcggctcggcttcaccgtcaccgccgacgtcgaggtgcccgaaggaccgcgcacctggtgcatgacccgcaagcccggtgcctga

SEQ ID NO: 9250 - DNA, 993 bp, Artificial Sequence
  Synthetic Polynucloetide
atggccttaccagtgaccgccttgctcctgccgctggccttgctgctccacgccgccaggccgcagtctgctctgacccagcctagatccgtgtctggctctcctggacagagcgtgaccatcagctgtaccggcacctcttctgacgtgggcagctacaactacgtgtcctggtatcagcagagccccggcaaggcccctaagctgatgatctacgacgtgtccaacagacccagcggcgtgtccaatagattctccggcagcaagagcggcaacaccgccagcctgacaatctctggactccagtctgaggacgaggccgactactactgtaccagctacggcagctacgacatccccgtgatttttggcggaggcaccaaggtggaaatcaaactcgaggggaaaccaattcccaaccctcttctgggactggattcaaccggcagcggcgaggacctgaagaacgtgttcccacctgaggtggccgtgttcgagcctagcgaggccgagatcagccacacccagaaagccaccctcgtgtgcctggctaccggcttctaccccgaccatgtggaactgtcttggtgggtcaacggcaaagaggtgcacagcggcgtgtgtaccgacccccagccactgaaagaacagcccgccctgaacgacagccggtactgcctgagcagcagactgagagtgtccgccaccttctggcagaacccccggaaccacttcagatgccaggtgcagttctacggcctgagcgagaacgacgagtggacccaggacagagccaagcccgtgacccagatcgtgtctgccgaagcctggggcagagccgattgcggctttaccagcgagagctaccagcagggcgtgctgagcgccaccatcctgtacgagatcctgctgggcaaggccaccctgtacgccgtgctggtgtctgccctggtgctgatggctatggtcaagcggaaggacagccggggatga

SEQ ID NO: 9251 - DNA, 1392 bp, Artificial Sequence
  Synthetic Polynucloetide
atggactggatttggcgcatccttttccttgtcggcgctgctaccggcgcgcattccttcgaacagatgcagctggtgcagtctggggccgaagtgaagaaacctggcagcagcgtgaaggtgtcctgcaaagcaagcggcggcacctttagctcctacgccatctcttgggtccgacaggctccaggacaaggactggaatggatgggcggcatcatccccatcttcggcacagccaattacgcccagaaattccagggcagagtgacaatcaccgccgacaagagcaccagcaccgcctacatggaactgagcagcctgagaagcgacgacaccgccgtgtactactgcgccagagatgaactgtgggccaccaactactactacatggacgtgtggggcaagggcaccctggtcacagtttcttctacgcgtgagcagaaactgatctcggaagaggatgggagcggcatccagaaccctgatcctgccgtgtaccagctgcgggatagcaagagcagcgacaagagcgtgtgtctgttcaccgacttcgacagccagaccaacgtgtcccagagcaaggactccgacgtgtacatcaccgataagtgcgtgctggacatgcggagcatggacttcaagagcaactccgccgtggcctggtccaacaagtccgatttcgcctgcgccaacgccttcaacaacagcattatccccgaggacacattcttcccaagccccgagagcagctgcgacgtgaagctggtggaaaagagcttcgagacagacaccaacctgaacttccagaacctgagcgtgatcggcttcagaatcctgctgctgaaagtggccggctttaacctgctgatgaccctgcggctgtggtccagccgcgccaagagaagcggatctggcgtgaagcagaccctgaatttcgacctgctgaagctggctggcgacgtggaatccaacccaggcccttctagaggccatatggccaagcctttgtctcaagaagaatccaccctcattgaaagagcaacggctacaatcaacagcatccccatctctgaagactacagcgtcgccagcgcagctctctctagcgacggccgcatcttcactggtgtcaatgtatatcattttactgggggaccttgtgcagaactcgtggtgctgggcactgctgctgctgcggcagctggcaacctgacttgtatcgtcgcgatcggaaatgagaacaggggcatcttgagcccctgcggacggtgccgacaggtgcttctcgatctgcatcctgggatcaaagccatagtgaaggacagtgatggacagccgacggcagttgggattcgtgaattgctgccctctggttatgtgtgggagggctga

SEQ ID NO: 9252 - DNA, 894 bp, Artificial Sequence
  Synthetic Polynucloetide
atggactggatttggcgcatccttttccttgtcggcgctgctaccggcgcgcattccttcgaacagatgcagctggtgcagtctggggccgaagtgaagaaacctggcagcagcgtgaaggtgtcctgcaaagcaagcggcggcacctttagctcctacgccatctcttgggtccgacaggctccaggacaaggactggaatggatgggcggcatcatccccatcttcggcacagccaattacgcccagaaattccagggcagagtgacaatcaccgccgacaagagcaccagcaccgcctacatggaactgagcagcctgagaagcgacgacaccgccgtgtactactgcgccagagatgaactgtgggccaccaactactactacatggacgtgtggggcaagggcaccctggtcacagtttcttctacgcgtgagcagaaactgatctcggaagaggatgggagcggcatccagaaccctgatcctgccgtgtaccagctgcgggatagcaagagcagcgacaagagcgtgtgtctgttcaccgacttcgacagccagaccaacgtgtcccagagcaaggactccgacgtgtacatcaccgataagtgcgtgctggacatgcggagcatggacttcaagagcaactccgccgtggcctggtccaacaagtccgatttcgcctgcgccaacgccttcaacaacagcattatccccgaggacacattcttcccaagccccgagagcagctgcgacgtgaagctggtggaaaagagcttcgagacagacaccaacctgaacttccagaacctgagcgtgatcggcttcagaatcctgctgctgaaagtggccggctttaacctgctgatgaccctgcggctgtggtccagctga

SEQ ID NO: 9253 - DNA, 1944 bp, Artificial Sequence
  Synthetic Polynucloetide
atggccttaccagtgaccgccttgctcctgccgctggccttgctgctccacgccgccaggccgcagtctgctctgacccagcctagatccgtgtctggctctcctggacagagcgtgaccatcagctgtaccggcacctcttctgacgtgggcagctacaactacgtgtcctggtatcagcagagccccggcaaggcccctaagctgatgatctacgacgtgtccaacagacccagcggcgtgtccaatagattctccggcagcaagagcggcaacaccgccagcctgacaatctctggactccagtctgaggacgaggccgactactactgtaccagctacggcagctacgacatccccgtgatttttggcggaggcaccaaggtggaaatcaaaggcggaggcggaagtggaggcggaggatctggcggcggaggctctcagatgcagctggtgcagtctggggccgaagtgaagaaacctggcagcagcgtgaaggtgtcctgcaaagcaagcggcggcacctttagctcctacgccatctcttgggtccgacaggctccaggacaaggactggaatggatgggcggcatcatccccatcttcggcacagccaattacgcccagaaattccagggcagagtgacaatcaccgccgacaagagcaccagcaccgcctacatggaactgagcagcctgagaagcgacgacaccgccgtgtactactgcgccagagatgaactgtgggccaccaactactactacatggacgtgtggggcaagggcaccctggtcacagtttcttctacgcgtgggagcggcatccagaaccctgatcctgccgtgtaccagctgcgggatagcaagagcagcgacaagagcgtgtgtctgttcaccgacttcgacagccagaccaacgtgtcccagagcaaggactccgacgtgtacatcaccgataagaccgtgctggacatgcggagcatggacttcaagagcaactccgccgtggcctggtccaacaagtccgatttcgcctgcgccaacgccttcaacaacagcattatccccgaggacacattcttcccaagcagcgacgtgccctgcgacgtgaagctggtggaaaagagcttcgagacagacaccaacctgaacttccagaacctgagcgtgatcggcttcagaatcctgctgctgaaagtggccggctttaacctgctgatgaccctgcggctgtggtccagccgcgccaagagaagcggatctggcgtgaagcagaccctgaatttcgacctgctgaagctggctggcgacgtggaatccaacccaggcccttctagaggccatatgaccgagtacaagcccacggtgcgcctcgccacccgcgacgacgtccccagggccgtacgcaccctcgccgccgcgttcgccgactaccccgccacgcgccacaccgtcgatccggaccgccacatcgagcgggtcaccgagctgcaagaactcttcctcacgcgcgtcgggctcgacatcggcaaggtgtgggtcgcggacgacggcgccgcggtggcggtctggaccacgccggagagcgtcgaagcgggggcggtgttcgccgagatcggcccgcgcatggccgagttgagcggttcccggctggccgcgcagcaacagatggaaggcctcctggcgccgcaccggcccaaggagcccgcgtggttcctggccaccgtcggcgtctcgcccgaccaccagggcaagggtctgggcagcgccgtcgtgctccccggagtggaggcggccgagcgcgccggggtgcccgccttcctggagacctccgcgccccgcaacctccccttctacgagcggctcggcttcaccgtcaccgccgacgtcgaggtgcccgaaggaccgcgcacctggtgcatgacccgcaagcccggtgcctga

SEQ ID NO: 9254 - DNA, 2040 bp, Artificial Sequence
  Synthetic Polynucloetide
atggccttaccagtgaccgccttgctcctgccgctggccttgctgctccacgccgccaggccgcagtctgctctgacccagcctagatccgtgtctggctctcctggacagagcgtgaccatcagctgtaccggcacctcttctgacgtgggcagctacaactacgtgtcctggtatcagcagagccccggcaaggcccctaagctgatgatctacgacgtgtccaacagacccagcggcgtgtccaatagattctccggcagcaagagcggcaacaccgccagcctgacaatctctggactccagtctgaggacgaggccgactactactgtaccagctacggcagctacgacatccccgtgatttttggcggaggcaccaaggtggaaatcaaaggcggaggcggaagtggaggcggaggatctggcggcggaggctctcagatgcagctggtgcagtctggggccgaagtgaagaaacctggcagcagcgtgaaggtgtcctgcaaagcaagcggcggcacctttagctcctacgccatctcttgggtccgacaggctccaggacaaggactggaatggatgggcggcatcatccccatcttcggcacagccaattacgcccagaaattccagggcagagtgacaatcaccgccgacaagagcaccagcaccgcctacatggaactgagcagcctgagaagcgacgacaccgccgtgtactactgcgccagagatgaactgtgggccaccaactactactacatggacgtgtggggcaagggcaccctggtcacagtttcttctctcgaggacctgaagaacgtgttcccacctgaggtggccgtgttcgagcctagcaaggccgagatcgcccacacccagaaagccaccctcgtgtgcctggctaccggcttctaccccgaccatgtggaactgtcttggtgggtcaacggcaaagaggtgcacagcggcgtgtctaccgacccccagccactgaaagaacagcccgccctgaacgacagccggtactgcctgagcagcagactgagagtgtccgccaccttctggcagaacccccggaaccacttcagatgccaggtgcagttctacggcctgagcgagaacgacgagtggacccaggacagagccaagcccgtgacccagatcgtgtctgccgaagcctggggcagagccgattgcggcatcaccagcgccagctaccaccagggcgtgctgagcgccaccatcctgtacgagatcctgctgggcaaggccaccctgtacgccgtgctggtgtctgccctggtgctgatggctatggtcaagcggaaggacagccggggaagggccaagcgatctggatctggagcaacaaacttctcactactcaaacaagcaggtgacgtggaggagaatcccgggcctactagaggccatatgaccgagtacaagcccacggtgcgcctcgccacccgcgacgacgtccccagggccgtacgcaccctcgccgccgcgttcgccgactaccccgccacgcgccacaccgtcgatccggaccgccacatcgagcgggtcaccgagctgcaagaactcttcctcacgcgcgtcgggctcgacatcggcaaggtgtgggtcgcggacgacggcgccgcggtggcggtctggaccacgccggagagcgtcgaagcgggggcggtgttcgccgagatcggcccgcgcatggccgagttgagcggttcccggctggccgcgcagcaacagatggaaggcctcctggcgccgcaccggcccaaggagcccgcgtggttcctggccaccgtcggcgtctcgcccgaccaccagggcaagggtctgggcagcgccgtcgtgctccccggagtggaggcggccgagcgcgccggggtgcccgccttcctggagacctccgcgccccgcaacctccccttctacgagcggctcggcttcaccgtcaccgccgacgtcgaggtgcccgaaggaccgcgcacctggtgcatgacccgcaagcccggtgcctga

SEQ ID NO: 9255 - DNA, 2109 bp, Artificial Sequence
  Synthetic Polynucloetide
atggccttaccagtgaccgccttgctcctgccgctggccttgctgctccacgccgccaggccgcagtctgctctgacccagcctagatccgtgtctggctctcctggacagagcgtgaccatcagctgtaccggcacctcttctgacgtgggcagctacaactacgtgtcctggtatcagcagagccccggcaaggcccctaagctgatgatctacgacgtgtccaacagacccagcggcgtgtccaatagattctccggcagcaagagcggcaacaccgccagcctgacaatctctggactccagtctgaggacgaggccgactactactgtaccagctacggcagctacgacatccccgtgatttttggcggaggcaccaaggtggaaatcaaaggcggaggcggaagtggaggcggaggatctggcggcggaggctctcagatgcagctggtgcagtctggggccgaagtgaagaaacctggcagcagcgtgaaggtgtcctgcaaagcaagcggcggcacctttagctcctacgccatctcttgggtccgacaggctccaggacaaggactggaatggatgggcggcatcatccccatcttcggcacagccaattacgcccagaaattccagggcagagtgacaatcaccgccgacaagagcaccagcaccgcctacatggaactgagcagcctgagaagcgacgacaccgccgtgtactactgcgccagagatgaactgtgggccaccaactactactacatggacgtgtggggcaagggcaccctggtcacagtttcttctacgcgtgggtctggaggcggaggcagcggcggaggcgggagcggcgacggtaacgaggagatgggaggaatcactcaaaccccttacaaagtctcaatttcaggaacaactgttatccttacatgtccccagtatcctggcagcgagatcctttggcagcataacgacaagaatatagggggagatgaagacgataagaatatcggatctgacgaggatcacttgagcctgaaagagttctccgagcttgaacaaagcggatattatgtgtgctatccgcgcgggtcaaagccggaagacgctaacttttacctttatctccgagccagagtgtgcgaaaattgcatggaaatggacgttatgtccgttgctacaatagttatcgtagatatatgcatcacgggtggactgcttctgctggtttattattggtccaagaatagaaaggccaaagctaaacccgtgaccagaggcgctggcgcaggcggaaggcaaaggggacaaaacaaagaacggccaccaccagtgccaaatccagattatgagcctattcggaaaggacagagggacctgtactctggcctgaatcagagaagaatccgcgccaagagaagcggatctggcgtgaagcagaccctgaatttcgacctgctgaagctggctggcgacgtggaatccaacccaggcccttctagaggccatatgaccgagtacaagcccacggtgcgcctcgccacccgcgacgacgtccccagggccgtacgcaccctcgccgccgcgttcgccgactaccccgccacgcgccacaccgtcgatccggaccgccacatcgagcgggtcaccgagctgcaagaactcttcctcacgcgcgtcgggctcgacatcggcaaggtgtgggtcgcggacgacggcgccgcggtggcggtctggaccacgccggagagcgtcgaagcgggggcggtgttcgccgagatcggcccgcgcatggccgagttgagcggttcccggctggccgcgcagcaacagatggaaggcctcctggcgccgcaccggcccaaggagcccgcgtggttcctggccaccgtcggcgtctcgcccgaccaccagggcaagggtctgggcagcgccgtcgtgctccccggagtggaggcggccgagcgcgccggggtgcccgccttcctggagacctccgcgccccgcaacctccccttctacgagcggctcggcttcaccgtcaccgccgacgtcgaggtgcccgaaggaccgcgcacctggtgcatgacccgcaagcccggtgcctga

SEQ ID NO: 9256 - DNA, 2004 bp, Artificial Sequence
  Synthetic Polynucloetide
atggccttaccagtgaccgccttgctcctgccgctggccttgctgctccacgccgccaggccgcagtctgctctgacccagcctagatccgtgtctggctctcctggacagagcgtgaccatcagctgtaccggcacctcttctgacgtgggcagctacaactacgtgtcctggtatcagcagagccccggcaaggcccctaagctgatgatctacgacgtgtccaacagacccagcggcgtgtccaatagattctccggcagcaagagcggcaacaccgccagcctgacaatctctggactccagtctgaggacgaggccgactactactgtaccagctacggcagctacgacatccccgtgatttttggcggaggcaccaaggtggaaatcaaaggcggaggcggaagtggaggcggaggatctggcggcggaggctctcagatgcagctggtgcagtctggggccgaagtgaagaaacctggcagcagcgtgaaggtgtcctgcaaagcaagcggcggcacctttagctcctacgccatctcttgggtccgacaggctccaggacaaggactggaatggatgggcggcatcatccccatcttcggcacagccaattacgcccagaaattccagggcagagtgacaatcaccgccgacaagagcaccagcaccgcctacatggaactgagcagcctgagaagcgacgacaccgccgtgtactactgcgccagagatgaactgtgggccaccaactactactacatggacgtgtggggcaagggcaccctggtcacagtttcttctacgcgtgggtctggaggcggaggcagcggcggaggcgggagcggcttcaagatccccatcgaggaactggaagatcgggtgttcgtgaactgcaacacctctatcacctgggtggaaggcaccgtgggaacactgctgagcgacatcaccagactggacctcggcaagcggattctggaccctcggggcatctacagatgcaacggcaccgacatctacaaggacaaagaaagcaccgtgcaggtccactacagaatgtgccagtcctgcgtggaactggaccctgctacagtggccggcatcatcgtgaccgatgtgatcgctactctgctgctggctctgggagtgttctgcttcgccggacacgaaacaggcagactgtctggcgctgccgatacacaggccctgctgagaaacgaccaagtgtatcagcccctgcgcgacagagatgatgcccagtattctcacctcggcggcaactgggctagaaacaagcgcgccaagagaagcggatctggcgtgaagcagaccctgaatttcgacctgctgaagctggctggcgacgtggaatccaacccaggcccttctagaggccatatgaccgagtacaagcccacggtgcgcctcgccacccgcgacgacgtccccagggccgtacgcaccctcgccgccgcgttcgccgactaccccgccacgcgccacaccgtcgatccggaccgccacatcgagcgggtcaccgagctgcaagaactcttcctcacgcgcgtcgggctcgacatcggcaaggtgtgggtcgcggacgacggcgccgcggtggcggtctggaccacgccggagagcgtcgaagcgggggcggtgttcgccgagatcggcccgcgcatggccgagttgagcggttcccggctggccgcgcagcaacagatggaaggcctcctggcgccgcaccggcccaaggagcccgcgtggttcctggccaccgtcggcgtctcgcccgaccaccagggcaagggtctgggcagcgccgtcgtgctccccggagtggaggcggccgagcgcgccggggtgcccgccttcctggagacctccgcgccccgcaacctccccttctacgagcggctcggcttcaccgtcaccgccgacgtcgaggtgcccgaaggaccgcgcacctggtgcatgacccgcaagcccggtgcctga

SEQ ID NO: 9257 - DNA, 2034 bp, Artificial Sequence
  Synthetic Polynucloetide
atggccttaccagtgaccgccttgctcctgccgctggccttgctgctccacgccgccaggccgcagtctgctctgacccagcctagatccgtgtctggctctcctggacagagcgtgaccatcagctgtaccggcacctcttctgacgtgggcagctacaactacgtgtcctggtatcagcagagccccggcaaggcccctaagctgatgatctacgacgtgtccaacagacccagcggcgtgtccaatagattctccggcagcaagagcggcaacaccgccagcctgacaatctctggactccagtctgaggacgaggccgactactactgtaccagctacggcagctacgacatccccgtgatttttggcggaggcaccaaggtggaaatcaaaggcggaggcggaagtggaggcggaggatctggcggcggaggctctcagatgcagctggtgcagtctggggccgaagtgaagaaacctggcagcagcgtgaaggtgtcctgcaaagcaagcggcggcacctttagctcctacgccatctcttgggtccgacaggctccaggacaaggactggaatggatgggcggcatcatccccatcttcggcacagccaattacgcccagaaattccagggcagagtgacaatcaccgccgacaagagcaccagcaccgcctacatggaactgagcagcctgagaagcgacgacaccgccgtgtactactgcgccagagatgaactgtgggccaccaactactactacatggacgtgtggggcaagggcaccctggtcacagtttcttctacgcgtgggtctggaggcggaggcagcggcggaggcgggagcggccagagcatcaagggcaaccacctggtcaaggtgtacgactaccaagaggacggcagcgtgctgctgacatgtgatgccgaggccaagaacatcacctggtttaaggacggcaagatgatcggcttcctgaccgaggacaagaagaagtggaacctgggcagcaacgctaaggaccccagaggcatgtatcagtgcaagggcagccagaacaagagcaagcccctccaggtgtactaccggatgtgccagaactgcatcgagctgaacgccgctaccatcagcggctttctgttcgccgagatcgtgtccatcttcgtgctggccgtgggcgtgtactttatcgctggacaggatggcgtgcggcagagcagagcttccgataagcaaaccctgctgcctaacgaccagctgtaccagcctctgaaggacagagaggacgaccagtacagccacctccagggcaatcagctgagaagaaaccgcgccaagagaagcggatctggcgtgaagcagaccctgaatttcgacctgctgaagctggctggcgacgtggaatccaacccaggcccttctagaggccatatgaccgagtacaagcccacggtgcgcctcgccacccgcgacgacgtccccagggccgtacgcaccctcgccgccgcgttcgccgactaccccgccacgcgccacaccgtcgatccggaccgccacatcgagcgggtcaccgagctgcaagaactcttcctcacgcgcgtcgggctcgacatcggcaaggtgtgggtcgcggacgacggcgccgcggtggcggtctggaccacgccggagagcgtcgaagcgggggcggtgttcgccgagatcggcccgcgcatggccgagttgagcggttcccggctggccgcgcagcaacagatggaaggcctcctggcgccgcaccggcccaaggagcccgcgtggttcctggccaccgtcggcgtctcgcccgaccaccagggcaagggtctgggcagcgccgtcgtgctccccggagtggaggcggccgagcgcgccggggtgcccgccttcctggagacctccgcgccccgcaacctccccttctacgagcggctcggcttcaccgtcaccgccgacgtcgaggtgcccgaaggaccgcgcacctggtgcatgacccgcaagcccggtgcctga

SEQ ID NO: 9258 - DNA, 1983 bp, Artificial Sequence
  Synthetic Polynucloetide
atggccttaccagtgaccgccttgctcctgccgctggccttgctgctccacgccgccaggccgcagtctgctctgacccagcctagatccgtgtctggctctcctggacagagcgtgaccatcagctgtaccggcacctcttctgacgtgggcagctacaactacgtgtcctggtatcagcagagccccggcaaggcccctaagctgatgatctacgacgtgtccaacagacccagcggcgtgtccaatagattctccggcagcaagagcggcaacaccgccagcctgacaatctctggactccagtctgaggacgaggccgactactactgtaccagctacggcagctacgacatccccgtgatttttggcggaggcaccaaggtggaaatcaaaggcggaggcggaagtggaggcggaggatctggcggcggaggctctcagatgcagctggtgcagtctggggccgaagtgaagaaacctggcagcagcgtgaaggtgtcctgcaaagcaagcggcggcacctttagctcctacgccatctcttgggtccgacaggctccaggacaaggactggaatggatgggcggcatcatccccatcttcggcacagccaattacgcccagaaattccagggcagagtgacaatcaccgccgacaagagcaccagcaccgcctacatggaactgagcagcctgagaagcgacgacaccgccgtgtactactgcgccagagatgaactgtgggccaccaactactactacatggacgtgtggggcaagggcaccctggtcacagtttcttctacgcgtgggtctggaggcggaggcagcggcggaggcgggagcggccagagttttgggttgttggaccctaaattgtgctatctgttggacggaatcctgttcatttacggagtgatcctgaccgcattgttcctgcgggttaagttttccagatccgcagacgcacccgcttaccaacaagggcagaaccaactctacaatgaacttaatttggggcggagggaagagtacgacgttctggacaaaaggaggggacgagatcccgagatgggcggaaagcctcagcgaaggaagaatccgcaagaggggctttataacgaactccagaaagataaaatggcagaagcctatagtgagattgggatgaagggagaaaggaggaggggtaaaggtcacgatgggttgtaccaaggattgagcacagccactaaagatacctatgatgcgctccacatgcaggccctgccgccaagacgcgccaagagaagcggatctggcgtgaagcagaccctgaatttcgacctgctgaagctggctggcgacgtggaatccaacccaggcccttctagaggccatatgaccgagtacaagcccacggtgcgcctcgccacccgcgacgacgtccccagggccgtacgcaccctcgccgccgcgttcgccgactaccccgccacgcgccacaccgtcgatccggaccgccacatcgagcgggtcaccgagctgcaagaactcttcctcacgcgcgtcgggctcgacatcggcaaggtgtgggtcgcggacgacggcgccgcggtggcggtctggaccacgccggagagcgtcgaagcgggggcggtgttcgccgagatcggcccgcgcatggccgagttgagcggttcccggctggccgcgcagcaacagatggaaggcctcctggcgccgcaccggcccaaggagcccgcgtggttcctggccaccgtcggcgtctcgcccgaccaccagggcaagggtctgggcagcgccgtcgtgctccccggagtggaggcggccgagcgcgccggggtgcccgccttcctggagacctccgcgccccgcaacctccccttctacgagcggctcggcttcaccgtcaccgccgacgtcgaggtgcccgaaggaccgcgcacctggtgcatgacccgcaagcccggtgcctga

SEQ ID NO: 9259 - DNA, 2283 bp, Artificial Sequence
  Synthetic Polynucloetide
atggccttaccagtgaccgccttgctcctgccgctggccttgctgctccacgccgccaggccggaagtgcagctggttgaatctggcggaggactggttcagcctggcggatctctgagactgtcttgtgccgccagcggcttcagcttcagcgacttttggatgagctgggtccgacaggcccctggcaaaggacttgaatgggtcgccacaatcagccaggccggcagcgagaaggactacgtggactctgtgaagggcagattcaccatcagccgggacaacgccaagaagtccctgtacctccagatgaacagcctgagagccgaggacaccgccgtgtactattgtgcctctggcgtgtacagcttcgactacagaggccagggcaccctggtcacagtctcttctggtaccggcggaggcggatctggcggcggaggtagcggtggcggaggatctgaattccagtctgctctgacccagcctagatccgtgtctggctctcctggacagagcgtgaccatcagctgtaccggcacctcttctgacgtgggcagctacaactacgtgtcctggtatcagcagagccccggcaaggcccctaagctgatgatctacgacgtgtccaacagacccagcggcgtgtccaatagattctccggcagcaagagcggcaacaccgccagcctgacaatctctggactccagtctgaggacgaggccgactactactgtaccagctacggcagctacgacatccccgtgatttttggcggaggcaccaaggtggaaatcaaactcgaggacctgaagaacgtgttcccacctgaggtggccgtgttcgagcctagcgaggccgagatcagccacacccagaaagccaccctcgtgtgcctggctaccggcttctaccccgaccatgtggaactgtcttggtgggtcaacggcaaagaggtgcacagcggcgtgtgtaccgacccccagccactgaaagaacagcccgccctgaacgacagccggtactgcctgagcagcagactgagagtgtccgccaccttctggcagaacccccggaaccacttcagatgccaggtgcagttctacggcctgagcgagaacgacgagtggacccaggacagagccaagcccgtgacccagatcgtgtctgccgaagcctggggcagagccgattgcggctttaccagcgagagctaccagcagggcgtgctgagcgccaccatcctgtacgagatcctgctgggcaaggccaccctgtacgccgtgctggtgtctgccctggtgctgatggctatggtcaagcggaaggacagccggggaagggccaagcgatctggatctggagcaacaaacttctcactactcaaacaagcaggtgacgtggaggagaatcccgggcctactagtatggactggatttggcgcatccttttccttgtcggcgctgctaccggcgcgcattccttcgaacagatgcagctggtgcagtctggggccgaagtgaagaaacctggcagcagcgtgaaggtgtcctgcaaagcaagcggcggcacctttagctcctacgccatctcttgggtccgacaggctccaggacaaggactggaatggatgggcggcatcatccccatcttcggcacagccaattacgcccagaaattccagggcagagtgacaatcaccgccgacaagagcaccagcaccgcctacatggaactgagcagcctgagaagcgacgacaccgccgtgtactactgcgccagagatgaactgtgggccaccaactactactacatggacgtgtggggcaagggcaccctggtcacagtttcttctacgcgtatccagaaccctgatcctgccgtgtaccagctgcgggatagcaagagcagcgacaagagcgtgtgtctgttcaccgacttcgacagccagaccaacgtgtcccagagcaaggactccgacgtgtacatcaccgataagtgcgtgctggacatgcggagcatggacttcaagagcaactccgccgtggcctggtccaacaagtccgatttcgcctgcgccaacgccttcaacaacagcattatccccgaggacacattcttcccaagccccgagagcagctgcgacgtgaagctggtggaaaagagcttcgagacagacaccaacctgaacttccagaacctgagcgtgatcggcttcagaatcctgctgctgaaagtggccggctttaacctgctgatgaccctgcggctgtggtccagc

SEQ ID NO: 9260 - DNA, 2295 bp, Artificial Sequence
  Synthetic Polynucloetide
atggccttaccagtgaccgccttgctcctgccgctggccttgctgctccacgccgccaggccggaagtgcagctggttgaatctggcggaggactggttcagcctggcggatctctgagactgtcttgtgccgccagcggcttcagcttcagcgacttttggatgagctgggtccgacaggcccctggcaaaggacttgaatgggtcgccacaatcagccaggccggcagcgagaaggactacgtggactctgtgaagggcagattcaccatcagccgggacaacgccaagaagtccctgtacctccagatgaacagcctgagagccgaggacaccgccgtgtactattgtgcctctggcgtgtacagcttcgactacagaggccagggcaccctggtcacagtctcttctggtaccggcggaggcggatctggcggcggaggtagcggtggcggaggatctgaattccagtctgctctgacccagcctagatccgtgtctggctctcctggacagagcgtgaccatcagctgtaccggcacctcttctgacgtgggcagctacaactacgtgtcctggtatcagcagagccccggcaaggcccctaagctgatgatctacgacgtgtccaacagacccagcggcgtgtccaatagattctccggcagcaagagcggcaacaccgccagcctgacaatctctggactccagtctgaggacgaggccgactactactgtaccagctacggcagctacgacatccccgtgatttttggcggaggcaccaaggtggaaatcaaactcgagatccagaaccctgatcctgccgtgtaccagctgcgggatagcaagagcagcgacaagagcgtgtgtctgttcaccgacttcgacagccagaccaacgtgtcccagagcaaggactccgacgtgtacatcaccgataagtgcgtgctggacatgcggagcatggacttcaagagcaactccgccgtggcctggtccaacaagtccgatttcgcctgcgccaacgccttcaacaacagcattatccccgaggacacattcttcccaagccccgagagcagctgcgacgtgaagctggtggaaaagagcttcgagacagacaccaacctgaacttccagaacctgagcgtgatcggcttcagaatcctgctgctgaaagtggccggctttaacctgctgatgaccctgcggctgtggtccagccgcgccaagagaagcggatctggcgtgaagcagaccctgaatttcgacctgctgaagctggctggcgacgtggaatccaacccaggccctactagtatggactggatttggcgcatccttttccttgtcggcgctgctaccggcgcgcattccttcgaacagatgcagctggtgcagtctggggccgaagtgaagaaacctggcagcagcgtgaaggtgtcctgcaaagcaagcggcggcacctttagctcctacgccatctcttgggtccgacaggctccaggacaaggactggaatggatgggcggcatcatccccatcttcggcacagccaattacgcccagaaattccagggcagagtgacaatcaccgccgacaagagcaccagcaccgcctacatggaactgagcagcctgagaagcgacgacaccgccgtgtactactgcgccagagatgaactgtgggccaccaactactactacatggacgtgtggggcaagggcaccctggtcacagtttcttctacgcgtgaggacctgaagaacgtgttcccacctgaggtggccgtgttcgagcctagcgaggccgagatcagccacacccagaaagccaccctcgtgtgcctggctaccggcttctaccccgaccatgtggaactgtcttggtgggtcaacggcaaagaggtgcacagcggcgtgtgtaccgacccccagccactgaaagaacagcccgccctgaacgacagccggtactgcctgagcagcagactgagagtgtccgccaccttctggcagaacccccggaaccacttcagatgccaggtgcagttctacggcctgagcgagaacgacgagtggacccaggacagagccaagcccgtgacccagatcgtgtctgccgaagcctggggcagagccgattgcggctttaccagcgagagctaccagcagggcgtgctgagcgccaccatcctgtacgagatcctgctgggcaaggccaccctgtacgccgtgctggtgtctgccctggtgctgatggctatggtcaagcggaaggacagccgggga

SEQ ID NO: 9261 - DNA, 2871 bp, Artificial Sequence
  Synthetic Polynucloetide
atggccttaccagtgaccgccttgctcctgccgctggccttgctgctccacgccgccaggccggaagtgcagctggttgaatctggcggaggactggttcagcctggcggatctctgagactgtcttgtgccgccagcggcttcagcttcagcgacttttggatgagctgggtccgacaggcccctggcaaaggacttgaatgggtcgccacaatcagccaggccggcagcgagaaggactacgtggactctgtgaagggcagattcaccatcagccgggacaacgccaagaagtccctgtacctccagatgaacagcctgagagccgaggacaccgccgtgtactattgtgcctctggcgtgtacagcttcgactacagaggccagggcaccctggtcacagtctcttctggtaccggcggaggcggatctggcggcggaggtagcggtggcggaggatctgaattccagtctgctctgacccagcctagatccgtgtctggctctcctggacagagcgtgaccatcagctgtaccggcacctcttctgacgtgggcagctacaactacgtgtcctggtatcagcagagccccggcaaggcccctaagctgatgatctacgacgtgtccaacagacccagcggcgtgtccaatagattctccggcagcaagagcggcaacaccgccagcctgacaatctctggactccagtctgaggacgaggccgactactactgtaccagctacggcagctacgacatccccgtgatttttggcggaggcaccaaggtggaaatcaaactcgaggacctgaagaacgtgttcccacctgaggtggccgtgttcgagcctagcgaggccgagatcagccacacccagaaagccaccctcgtgtgcctggctaccggcttctaccccgaccatgtggaactgtcttggtgggtcaacggcaaagaggtgcacagcggcgtgtctaccgacccccagccactgaaagaacagcccgccctgaacgacagccggtactgcctgagcagcagactgagagtgtccgccaccttctggcagaacccccggaaccacttcagatgccaggtgcagttctacggcctgagcgagaacgacgagtggacccaggacagagccaagcccgtgacccagatcgtgtctgccgaagcctggggcagagccgattgcggatcccagagcttcggcctgctggaccccaagctgtgctacctgctggatggcatcctgttcatctacggcgtgatcctgaccgccctgttcctgagagtgaagttcagcagaagcgccgacgcccctgcctaccagcagggacagaaccaactgtacaacgagctgaacctgggcagacgggaagagtacgacgtgctggacaagcggagaggcagggaccctgagatgggcggaaagccccagcggagaaagaacccccaggaaggactgtataacgaactccagaaagacaagatggccgaagcctacagcgagatcggcatgaagggcgagcggagaagaggcaagggccacgatggcctgtaccagggcctgagcaccgccaccaaggacacctatgacgccctgcacatgcaggccctgcctccaagaagggccaagcgatctggatctggagcaacaaacttctcactactcaaacaagcaggtgacgtggaggagaatcccgggcctactagtatggactggatttggcgcatccttttccttgtcggcgctgctaccggcgcgcattccttcgaacagatgcagctggtgcagtctggggccgaagtgaagaaacctggcagcagcgtgaaggtgtcctgcaaagcaagcggcggcacctttagctcctacgccatctcttgggtccgacaggctccaggacaaggactggaatggatgggcggcatcatccccatcttcggcacagccaattacgcccagaaattccagggcagagtgacaatcaccgccgacaagagcaccagcaccgcctacatggaactgagcagcctgagaagcgacgacaccgccgtgtactactgcgccagagatgaactgtgggccaccaactactactacatggacgtgtggggcaagggcaccctggtcacagtttcttctacgcgtatccagaaccctgatcctgccgtgtaccagctgcgggatagcaagagcagcgacaagagcgtgtgtctgttcaccgacttcgacagccagaccaacgtgtcccagagcaaggactccgacgtgtacatcaccgataagaccgtgctggacatgcggagcatggacttcaagagcaactccgccgtggcctggtccaacaagtccgatttcgcctgcgccaacgccttcaacaacagcattatccccgaggacacattcttcccaagccccgagagcagctgcggtacccagagttttgggttgttggaccctaaattgtgctatctgttggacggaatcctgttcatttacggagtgatcctgaccgcattgttcctgcgggttaagttttccagatccgcagacgcacccgcttaccaacaagggcagaaccaactctacaatgaacttaatttggggcggagggaagagtacgacgttctggacaaaaggaggggacgagatcccgagatgggcggaaagcctcagcgaaggaagaatccgcaagaggggctttataacgaactccagaaagataaaatggcagaagcctatagtgagattgggatgaagggagaaaggaggaggggtaaaggtcacgatgggttgtaccaaggattgagcacagccactaaagatacctatgatgcgctccacatgcaggccctgccgccaaga

SEQ ID NO: 9262 - DNA, 2361 bp, Artificial Sequence
  Synthetic Polynucloetide
atggccttaccagtgaccgccttgctcctgccgctggccttgctgctccacgccgccaggccggaagtgcagctggttgaatctggcggaggactggttcagcctggcggatctctgagactgtcttgtgccgccagcggcttcagcttcagcgacttttggatgagctgggtccgacaggcccctggcaaaggacttgaatgggtcgccacaatcagccaggccggcagcgagaaggactacgtggactctgtgaagggcagattcaccatcagccgggacaacgccaagaagtccctgtacctccagatgaacagcctgagagccgaggacaccgccgtgtactattgtgcctctggcgtgtacagcttcgactacagaggccagggcaccctggtcacagtctcttctggtaccggcggaggcggatctggcggcggaggtagcggtggcggaggatctgaattccagtctgctctgacccagcctagatccgtgtctggctctcctggacagagcgtgaccatcagctgtaccggcacctcttctgacgtgggcagctacaactacgtgtcctggtatcagcagagccccggcaaggcccctaagctgatgatctacgacgtgtccaacagacccagcggcgtgtccaatagattctccggcagcaagagcggcaacaccgccagcctgacaatctctggactccagtctgaggacgaggccgactactactgtaccagctacggcagctacgacatccccgtgatttttggcggaggcaccaaggtggaaatcaaactcgagggacagcctaaggccaatcctaccgtgacactgttccctccaagcagcgaagaactccaggccaacaaggccacacttgtgtgcctgatctccgacttctaccctggggctgtgacagtggcttggaaggccgatggatctcctgtgaaagccggcgtggaaaccaccaagccatccaagcagagcaacaacaaatacgccgccagctcctacctgagcctgacacctgagcagtggaagtcccacagatcctacagctgccaagtgacccacgaaggcagcaccgtggaaaagacagtggcccctacagagtgcagccccatcaagaccgatgtgattacaatggaccccaaggacaactgctccaaggacgccaacgataccctgctgctccagctgaccaacaccagcgcctactacatgtacttgttgctgctgctgaagtccgtggtgtacttcgccatcatcacatgctgcctgctgcggagaaccgccttctgctgcaacggcgagaagtctagggccaagcgatctggatctggagcaacaaacttctcactactcaaacaagcaggtgacgtggaggagaatcccgggcctactagtatggactggatttggcgcatccttttccttgtcggcgctgctaccggcgcgcattccttcgaacagatgcagctggtgcagtctggggccgaagtgaagaaacctggcagcagcgtgaaggtgtcctgcaaagcaagcggcggcacctttagctcctacgccatctcttgggtccgacaggctccaggacaaggactggaatggatgggcggcatcatccccatcttcggcacagccaattacgcccagaaattccagggcagagtgacaatcaccgccgacaagagcaccagcaccgcctacatggaactgagcagcctgagaagcgacgacaccgccgtgtactactgcgccagagatgaactgtgggccaccaactactactacatggacgtgtggggcaagggcaccctggtcacagtttcttctacgcgtgcctctacaaagggaccctccgtgtttcctctggctcccagcagcaagtctacaagcggaggaacagccgctctgggctgcctggtcaaggattactttcccgagcctgtgaccgtgtcctggaatagcggagcactgacaagcggcgtgcacacctttccagccgtgctgcaaagcagcggcctgtactctctgagcagcgtggtcacagtgcctagctctagcctgggcacccagacctacatctgcaatgtgaaccacaagcctagcaacaccaaggtggacaagagagtggaacccaagagctgtgaagtgaaaaccgactccaccgaccacgtgaagcccaaagagacagagaacaccaagcagcccagcaagagctgccacaagcccaaggccatcgtgcacaccgagaaagtgaacatgatgagcctgaccgtgctgggcctgcggatgctgttcgccaaaaccgtggccgtgaacttcctgctgaccgccaagctgttcttcctc

SEQ ID NO: 9263 - DNA, 2304 bp, Artificial Sequence
  Synthetic Polynucloetide
atggccttaccagtgaccgccttgctcctgccgctggccttgctgctccacgccgccaggccggaagtgcagctggttgaatctggcggaggactggttcagcctggcggatctctgagactgtcttgtgccgccagcggcttcagcttcagcgacttttggatgagctgggtccgacaggcccctggcaaaggacttgaatgggtcgccacaatcagccaggccggcagcgagaaggactacgtggactctgtgaagggcagattcaccatcagccgggacaacgccaagaagtccctgtacctccagatgaacagcctgagagccgaggacaccgccgtgtactattgtgcctctggcgtgtacagcttcgactacagaggccagggcaccctggtcacagtctcttctggtaccggcggaggcggatctggcggcggaggtagcggtggcggaggatctgaattccagtctgctctgacccagcctagatccgtgtctggctctcctggacagagcgtgaccatcagctgtaccggcacctcttctgacgtgggcagctacaactacgtgtcctggtatcagcagagccccggcaaggcccctaagctgatgatctacgacgtgtccaacagacccagcggcgtgtccaatagattctccggcagcaagagcggcaacaccgccagcctgacaatctctggactccagtctgaggacgaggccgactactactgtaccagctacggcagctacgacatccccgtgatttttggcggaggcaccaaggtggaaatcaaactcgagggacagcctaaggccaatcctaccgtgacactgttccctccaagcagcgaagaactccaggccaacaaggccacacttgtgtgcctgatctccgacttctaccctggggctgtgacagtggcttggaaggccgatggatctcctgtgaaagccggcgtggaaaccaccaagccatccaagcagagcaacaacaaatacgccgccagctcctacctgagcctgacacctgagcagtggaagtcccacagatcctacagctgccaagtgacccacgaaggcagcaccgtggaaaagacagtggcccctacagagtgcagcggcagagccgattgcggctttaccagcgagagctaccagcagggcgtgctgagcgccaccatcctgtacgagatcctgctgggcaaggccaccctgtacgccgtgctggtgtctgccctggtgctgatggctatggtcaagcggaaggacagccggggacgcgccaagagaagcggatctggcgtgaagcagaccctgaatttcgacctgctgaagctggctggcgacgtggaatccaacccaggccctactagtatggactggatttggcgcatccttttccttgtcggcgctgctaccggcgcgcattccttcgaacagatgcagctggtgcagtctggggccgaagtgaagaaacctggcagcagcgtgaaggtgtcctgcaaagcaagcggcggcacctttagctcctacgccatctcttgggtccgacaggctccaggacaaggactggaatggatgggcggcatcatccccatcttcggcacagccaattacgcccagaaattccagggcagagtgacaatcaccgccgacaagagcaccagcaccgcctacatggaactgagcagcctgagaagcgacgacaccgccgtgtactactgcgccagagatgaactgtgggccaccaactactactacatggacgtgtggggcaagggcaccctggtcacagtttcttctacgcgtgcctctacaaagggaccctccgtgtttcctctggctcccagcagcaagtctacaagcggaggaacagccgctctgggctgcctggtcaaggattactttcccgagcctgtgaccgtgtcctggaatagcggagcactgacaagcggcgtgcacacctttccagccgtgctgcaaagcagcggcctgtactctctgagcagcgtggtcacagtgcctagctctagcctgggcacccagacctacatctgcaatgtgaaccacaagcctagcaacaccaaggtggacaagagagtggaacccaagagctgtatccccgaggacacattcttcccaagccccgagagcagctgcgacgtgaagctggtggaaaagagcttcgagacagacaccaacctgaacttccagaacctgagcgtgatcggcttcagaatcctgctgctgaaagtggccggctttaacctgctgatgaccctgcggctgtggtccagc

SEQ ID NO: 9264 - DNA, 2706 bp, Artificial Sequence
  Synthetic Polynucloetide
atggccttaccagtgaccgccttgctcctgccgctggccttgctgctccacgccgccaggccggaagtgcagctggttgaatctggcggaggactggttcagcctggcggatctctgagactgtcttgtgccgccagcggcttcagcttcagcgacttttggatgagctgggtccgacaggcccctggcaaaggacttgaatgggtcgccacaatcagccaggccggcagcgagaaggactacgtggactctgtgaagggcagattcaccatcagccgggacaacgccaagaagtccctgtacctccagatgaacagcctgagagccgaggacaccgccgtgtactattgtgcctctggcgtgtacagcttcgactacagaggccagggcaccctggtcacagtctcttctggtaccggcggaggcggatctggcggcggaggtagcggtggcggaggatctgaattccagtctgctctgacccagcctagatccgtgtctggctctcctggacagagcgtgaccatcagctgtaccggcacctcttctgacgtgggcagctacaactacgtgtcctggtatcagcagagccccggcaaggcccctaagctgatgatctacgacgtgtccaacagacccagcggcgtgtccaatagattctccggcagcaagagcggcaacaccgccagcctgacaatctctggactccagtctgaggacgaggccgactactactgtaccagctacggcagctacgacatccccgtgatttttggcggaggcaccaaggtggaaatcaaactcgagatccagaaccctgatcctgccgtgtaccagctgcgggatagcaagagcagcgacaagagcgtgtgtctgttcaccgacttcgacagccagaccaacgtgtcccagagcaaggactccgacgtgtacatcaccgataagtgcgtgctggacatgcggagcatggacttcaagagcaactccgccgtggcctggtccaacaagtccgatttcgcctgcgccaacgccttcaacaacagcattatccccgaggacacattcttcccaagccccgagagcagctgcgacgtgaagctggtggaaaagagcttcgagacagacaccaacctgaacttccagaacctgagcgtgatcggcttcagaatcctgctgctgaaagtggccggctttaacctgctgatgaccctgcggctgtggtccagccgcgccaagagaagcggatctggcgtgaagcagaccctgaatttcgacctgctgaagctggctggcgacgtggaatccaacccaggccctactagtatggactggatttggcgcatccttttccttgtcggcgctgctaccggcgcgcattccgggccccagctccagctgcaagagtctggacctggcctggtcaagcctagcgagacactgagcctgacctgtaccgtgtccggcgatagcatcagcagcggcgattactactggggctggatcagacagcctcctggcaaaggactggaatggatcggccacatctactacagcggcgtgacctactacaaccccagcctgaagtccagagtgaccatcagcgtggacaccagccggaaccagttctccctgaagctgtctagcgtgacagccgccgataccgccgtgtactactgcaccagagaggacagcagcaactggcggagtagaggccagggaacactggtcacagttagctctggatccggcggaggcggaagtggaggcggaggatctggcggcggaggctctttcgaacagatgcagctggtgcagtctggggccgaagtgaagaaacctggcagcagcgtgaaggtgtcctgcaaagcaagcggcggcacctttagctcctacgccatctcttgggtccgacaggctccaggacaaggactggaatggatgggcggcatcatccccatcttcggcacagccaattacgcccagaaattccagggcagagtgacaatcaccgccgacaagagcaccagcaccgcctacatggaactgagcagcctgagaagcgacgacaccgccgtgtactactgcgccagagatgaactgtgggccaccaactactactacatggacgtgtggggcaagggcaccctggtcacagtttcttctacgcgtgaggacctgaagaacgtgttcccacctgaggtggccgtgttcgagcctagcgaggccgagatcagccacacccagaaagccaccctcgtgtgcctggctaccggcttctaccccgaccatgtggaactgtcttggtgggtcaacggcaaagaggtgcacagcggcgtgtgtaccgacccccagccactgaaagaacagcccgccctgaacgacagccggtactgcctgagcagcagactgagagtgtccgccaccttctggcagaacccccggaaccacttcagatgccaggtgcagttctacggcctgagcgagaacgacgagtggacccaggacagagccaagcccgtgacccagatcgtgtctgccgaagcctggggcagagccgattgcggctttaccagcgagagctaccagcagggcgtgctgagcgccaccatcctgtacgagatcctgctgggcaaggccaccctgtacgccgtgctggtgtctgccctggtgctgatggctatggtcaagcggaaggacagccgggga

SEQ ID NO: 9265 - DNA, 3282 bp, Artificial Sequence
  Synthetic Polynucloetide
atggccttaccagtgaccgccttgctcctgccgctggccttgctgctccacgccgccaggccggaagtgcagctggttgaatctggcggaggactggttcagcctggcggatctctgagactgtcttgtgccgccagcggcttcagcttcagcgacttttggatgagctgggtccgacaggcccctggcaaaggacttgaatgggtcgccacaatcagccaggccggcagcgagaaggactacgtggactctgtgaagggcagattcaccatcagccgggacaacgccaagaagtccctgtacctccagatgaacagcctgagagccgaggacaccgccgtgtactattgtgcctctggcgtgtacagcttcgactacagaggccagggcaccctggtcacagtctcttctggtaccggcggaggcggatctggcggcggaggtagcggtggcggaggatctgaattccagtctgctctgacccagcctagatccgtgtctggctctcctggacagagcgtgaccatcagctgtaccggcacctcttctgacgtgggcagctacaactacgtgtcctggtatcagcagagccccggcaaggcccctaagctgatgatctacgacgtgtccaacagacccagcggcgtgtccaatagattctccggcagcaagagcggcaacaccgccagcctgacaatctctggactccagtctgaggacgaggccgactactactgtaccagctacggcagctacgacatccccgtgatttttggcggaggcaccaaggtggaaatcaaactcgaggacctgaagaacgtgttcccacctgaggtggccgtgttcgagcctagcgaggccgagatcagccacacccagaaagccaccctcgtgtgcctggctaccggcttctaccccgaccatgtggaactgtcttggtgggtcaacggcaaagaggtgcacagcggcgtgtctaccgacccccagccactgaaagaacagcccgccctgaacgacagccggtactgcctgagcagcagactgagagtgtccgccaccttctggcagaacccccggaaccacttcagatgccaggtgcagttctacggcctgagcgagaacgacgagtggacccaggacagagccaagcccgtgacccagatcgtgtctgccgaagcctggggcagagccgattgcggatcccagagcttcggcctgctggaccccaagctgtgctacctgctggatggcatcctgttcatctacggcgtgatcctgaccgccctgttcctgagagtgaagttcagcagaagcgccgacgcccctgcctaccagcagggacagaaccaactgtacaacgagctgaacctgggcagacgggaagagtacgacgtgctggacaagcggagaggcagggaccctgagatgggcggaaagccccagcggagaaagaacccccaggaaggactgtataacgaactccagaaagacaagatggccgaagcctacagcgagatcggcatgaagggcgagcggagaagaggcaagggccacgatggcctgtaccagggcctgagcaccgccaccaaggacacctatgacgccctgcacatgcaggccctgcctccaagaagggccaagcgatctggatctggagcaacaaacttctcactactcaaacaagcaggtgacgtggaggagaatcccgggcctactagtatggactggatttggcgcatccttttccttgtcggcgctgctaccggcgcgcattccgggccccagctccagctgcaagagtctggacctggcctggtcaagcctagcgagacactgagcctgacctgtaccgtgtccggcgatagcatcagcagcggcgattactactggggctggatcagacagcctcctggcaaaggactggaatggatcggccacatctactacagcggcgtgacctactacaaccccagcctgaagtccagagtgaccatcagcgtggacaccagccggaaccagttctccctgaagctgtctagcgtgacagccgccgataccgccgtgtactactgcaccagagaggacagcagcaactggcggagtagaggccagggaacactggtcacagttagctctggatccggcggaggcggaagtggaggcggaggatctggcggcggaggctctttcgaacagatgcagctggtgcagtctggggccgaagtgaagaaacctggcagcagcgtgaaggtgtcctgcaaagcaagcggcggcacctttagctcctacgccatctcttgggtccgacaggctccaggacaaggactggaatggatgggcggcatcatccccatcttcggcacagccaattacgcccagaaattccagggcagagtgacaatcaccgccgacaagagcaccagcaccgcctacatggaactgagcagcctgagaagcgacgacaccgccgtgtactactgcgccagagatgaactgtgggccaccaactactactacatggacgtgtggggcaagggcaccctggtcacagtttcttctacgcgtatccagaaccctgatcctgccgtgtaccagctgcgggatagcaagagcagcgacaagagcgtgtgtctgttcaccgacttcgacagccagaccaacgtgtcccagagcaaggactccgacgtgtacatcaccgataagaccgtgctggacatgcggagcatggacttcaagagcaactccgccgtggcctggtccaacaagtccgatttcgcctgcgccaacgccttcaacaacagcattatccccgaggacacattcttcccaagccccgagagcagctgcggtacccagagttttgggttgttggaccctaaattgtgctatctgttggacggaatcctgttcatttacggagtgatcctgaccgcattgttcctgcgggttaagttttccagatccgcagacgcacccgcttaccaacaagggcagaaccaactctacaatgaacttaatttggggcggagggaagagtacgacgttctggacaaaaggaggggacgagatcccgagatgggcggaaagcctcagcgaaggaagaatccgcaagaggggctttataacgaactccagaaagataaaatggcagaagcctatagtgagattgggatgaagggagaaaggaggaggggtaaaggtcacgatgggttgtaccaaggattgagcacagccactaaagatacctatgatgcgctccacatgcaggccctgccgccaaga

SEQ ID NO: 9266 - DNA, 2772 bp, Artificial Sequence
  Synthetic Polynucloetide
atggccttaccagtgaccgccttgctcctgccgctggccttgctgctccacgccgccaggccggaagtgcagctggttgaatctggcggaggactggttcagcctggcggatctctgagactgtcttgtgccgccagcggcttcagcttcagcgacttttggatgagctgggtccgacaggcccctggcaaaggacttgaatgggtcgccacaatcagccaggccggcagcgagaaggactacgtggactctgtgaagggcagattcaccatcagccgggacaacgccaagaagtccctgtacctccagatgaacagcctgagagccgaggacaccgccgtgtactattgtgcctctggcgtgtacagcttcgactacagaggccagggcaccctggtcacagtctcttctggtaccggcggaggcggatctggcggcggaggtagcggtggcggaggatctgaattccagtctgctctgacccagcctagatccgtgtctggctctcctggacagagcgtgaccatcagctgtaccggcacctcttctgacgtgggcagctacaactacgtgtcctggtatcagcagagccccggcaaggcccctaagctgatgatctacgacgtgtccaacagacccagcggcgtgtccaatagattctccggcagcaagagcggcaacaccgccagcctgacaatctctggactccagtctgaggacgaggccgactactactgtaccagctacggcagctacgacatccccgtgatttttggcggaggcaccaaggtggaaatcaaactcgagggacagcctaaggccaatcctaccgtgacactgttccctccaagcagcgaagaactccaggccaacaaggccacacttgtgtgcctgatctccgacttctaccctggggctgtgacagtggcttggaaggccgatggatctcctgtgaaagccggcgtggaaaccaccaagccatccaagcagagcaacaacaaatacgccgccagctcctacctgagcctgacacctgagcagtggaagtcccacagatcctacagctgccaagtgacccacgaaggcagcaccgtggaaaagacagtggcccctacagagtgcagccccatcaagaccgatgtgattacaatggaccccaaggacaactgctccaaggacgccaacgataccctgctgctccagctgaccaacaccagcgcctactacatgtacttgttgctgctgctgaagtccgtggtgtacttcgccatcatcacatgctgcctgctgcggagaaccgccttctgctgcaacggcgagaagtctagggccaagcgatctggatctggagcaacaaacttctcactactcaaacaagcaggtgacgtggaggagaatcccgggcctactagtatggactggatttggcgcatccttttccttgtcggcgctgctaccggcgcgcattccgggccccagctccagctgcaagagtctggacctggcctggtcaagcctagcgagacactgagcctgacctgtaccgtgtccggcgatagcatcagcagcggcgattactactggggctggatcagacagcctcctggcaaaggactggaatggatcggccacatctactacagcggcgtgacctactacaaccccagcctgaagtccagagtgaccatcagcgtggacaccagccggaaccagttctccctgaagctgtctagcgtgacagccgccgataccgccgtgtactactgcaccagagaggacagcagcaactggcggagtagaggccagggaacactggtcacagttagctctggatccggcggaggcggaagtggaggcggaggatctggcggcggaggctctttcgaacagatgcagctggtgcagtctggggccgaagtgaagaaacctggcagcagcgtgaaggtgtcctgcaaagcaagcggcggcacctttagctcctacgccatctcttgggtccgacaggctccaggacaaggactggaatggatgggcggcatcatccccatcttcggcacagccaattacgcccagaaattccagggcagagtgacaatcaccgccgacaagagcaccagcaccgcctacatggaactgagcagcctgagaagcgacgacaccgccgtgtactactgcgccagagatgaactgtgggccaccaactactactacatggacgtgtggggcaagggcaccctggtcacagtttcttctacgcgtgcctctacaaagggaccctccgtgtttcctctggctcccagcagcaagtctacaagcggaggaacagccgctctgggctgcctggtcaaggattactttcccgagcctgtgaccgtgtcctggaatagcggagcactgacaagcggcgtgcacacctttccagccgtgctgcaaagcagcggcctgtactctctgagcagcgtggtcacagtgcctagctctagcctgggcacccagacctacatctgcaatgtgaaccacaagcctagcaacaccaaggtggacaagagagtggaacccaagagctgtgaagtgaaaaccgactccaccgaccacgtgaagcccaaagagacagagaacaccaagcagcccagcaagagctgccacaagcccaaggccatcgtgcacaccgagaaagtgaacatgatgagcctgaccgtgctgggcctgcggatgctgttcgccaaaaccgtggccgtgaacttcctgctgaccgccaagctgttcttcctc

SEQ ID NO: 9267 - DNA, 2715 bp, Artificial Sequence
  Synthetic Polynucloetide
atggccttaccagtgaccgccttgctcctgccgctggccttgctgctccacgccgccaggccggaagtgcagctggttgaatctggcggaggactggttcagcctggcggatctctgagactgtcttgtgccgccagcggcttcagcttcagcgacttttggatgagctgggtccgacaggcccctggcaaaggacttgaatgggtcgccacaatcagccaggccggcagcgagaaggactacgtggactctgtgaagggcagattcaccatcagccgggacaacgccaagaagtccctgtacctccagatgaacagcctgagagccgaggacaccgccgtgtactattgtgcctctggcgtgtacagcttcgactacagaggccagggcaccctggtcacagtctcttctggtaccggcggaggcggatctggcggcggaggtagcggtggcggaggatctgaattccagtctgctctgacccagcctagatccgtgtctggctctcctggacagagcgtgaccatcagctgtaccggcacctcttctgacgtgggcagctacaactacgtgtcctggtatcagcagagccccggcaaggcccctaagctgatgatctacgacgtgtccaacagacccagcggcgtgtccaatagattctccggcagcaagagcggcaacaccgccagcctgacaatctctggactccagtctgaggacgaggccgactactactgtaccagctacggcagctacgacatccccgtgatttttggcggaggcaccaaggtggaaatcaaactcgagggacagcctaaggccaatcctaccgtgacactgttccctccaagcagcgaagaactccaggccaacaaggccacacttgtgtgcctgatctccgacttctaccctggggctgtgacagtggcttggaaggccgatggatctcctgtgaaagccggcgtggaaaccaccaagccatccaagcagagcaacaacaaatacgccgccagctcctacctgagcctgacacctgagcagtggaagtcccacagatcctacagctgccaagtgacccacgaaggcagcaccgtggaaaagacagtggcccctacagagtgcagcggcagagccgattgcggctttaccagcgagagctaccagcagggcgtgctgagcgccaccatcctgtacgagatcctgctgggcaaggccaccctgtacgccgtgctggtgtctgccctggtgctgatggctatggtcaagcggaaggacagccggggacgcgccaagagaagcggatctggcgtgaagcagaccctgaatttcgacctgctgaagctggctggcgacgtggaatccaacccaggccctactagtatggactggatttggcgcatccttttccttgtcggcgctgctaccggcgcgcattccgggccccagctccagctgcaagagtctggacctggcctggtcaagcctagcgagacactgagcctgacctgtaccgtgtccggcgatagcatcagcagcggcgattactactggggctggatcagacagcctcctggcaaaggactggaatggatcggccacatctactacagcggcgtgacctactacaaccccagcctgaagtccagagtgaccatcagcgtggacaccagccggaaccagttctccctgaagctgtctagcgtgacagccgccgataccgccgtgtactactgcaccagagaggacagcagcaactggcggagtagaggccagggaacactggtcacagttagctctggatccggcggaggcggaagtggaggcggaggatctggcggcggaggctctttcgaacagatgcagctggtgcagtctggggccgaagtgaagaaacctggcagcagcgtgaaggtgtcctgcaaagcaagcggcggcacctttagctcctacgccatctcttgggtccgacaggctccaggacaaggactggaatggatgggcggcatcatccccatcttcggcacagccaattacgcccagaaattccagggcagagtgacaatcaccgccgacaagagcaccagcaccgcctacatggaactgagcagcctgagaagcgacgacaccgccgtgtactactgcgccagagatgaactgtgggccaccaactactactacatggacgtgtggggcaagggcaccctggtcacagtttcttctacgcgtgcctctacaaagggaccctccgtgtttcctctggctcccagcagcaagtctacaagcggaggaacagccgctctgggctgcctggtcaaggattactttcccgagcctgtgaccgtgtcctggaatagcggagcactgacaagcggcgtgcacacctttccagccgtgctgcaaagcagcggcctgtactctctgagcagcgtggtcacagtgcctagctctagcctgggcacccagacctacatctgcaatgtgaaccacaagcctagcaacaccaaggtggacaagagagtggaacccaagagctgtatccccgaggacacattcttcccaagccccgagagcagctgcgacgtgaagctggtggaaaagagcttcgagacagacaccaacctgaacttccagaacctgagcgtgatcggcttcagaatcctgctgctgaaagtggccggctttaacctgctgatgaccctgcggctgtggtccagc

SEQ ID NO: 9268 - DNA, 2286 bp, Artificial Sequence
  Synthetic Polynucloetide
atggccttaccagtgaccgccttgctcctgccgctggccttgctgctccacgccgccaggccggaagtgcaggttttggagtctggcggaggactggttcagcctggcggatctctgagactgtcttgtgccgccagcggcttcaccttcagcaactttgccatgagctgggtccgacaggcccctggcaaaggacttgaatgggtgtccacaatcagcggcagcgccggcacaacagattacgccgattctgtgaagggcagattcaccatcagccgggacaacagcaagaaaaccctgtacctccagatgaacagcctgcgcgtggaagataccgccgtgtactactgtgccgatggcagaggccccttcttcgattatcgcggccagggcacactggtcaccgtttcttctggtaccggcggaggcggatctggcggcggaggtagcggtggcggaggatctgaattccagtctgctctgacccagcctagatccgtgtctggctctcctggacagagcgtgaccatcagctgtaccggcacctcttctgacgtgggcagctacaactacgtgtcctggtatcagcagagccccggcaaggcccctaagctgatgatctacgacgtgtccaacagacccagcggcgtgtccaatagattctccggcagcaagagcggcaacaccgccagcctgacaatctctggactccagtctgaggacgaggccgactactactgtaccagctacggcagctacgacatccccgtgatttttggcggaggcaccaaggtggaaatcaaactcgaggacctgaagaacgtgttcccacctgaggtggccgtgttcgagcctagcgaggccgagatcagccacacccagaaagccaccctcgtgtgcctggctaccggcttctaccccgaccatgtggaactgtcttggtgggtcaacggcaaagaggtgcacagcggcgtgtgtaccgacccccagccactgaaagaacagcccgccctgaacgacagccggtactgcctgagcagcagactgagagtgtccgccaccttctggcagaacccccggaaccacttcagatgccaggtgcagttctacggcctgagcgagaacgacgagtggacccaggacagagccaagcccgtgacccagatcgtgtctgccgaagcctggggcagagccgattgcggctttaccagcgagagctaccagcagggcgtgctgagcgccaccatcctgtacgagatcctgctgggcaaggccaccctgtacgccgtgctggtgtctgccctggtgctgatggctatggtcaagcggaaggacagccggggaagggccaagcgatctggatctggagcaacaaacttctcactactcaaacaagcaggtgacgtggaggagaatcccgggcctactagtatggactggatttggcgcatccttttccttgtcggcgctgctaccggcgcgcattccttcgaacagatgcagctggtgcagtctggggccgaagtgaagaaacctggcagcagcgtgaaggtgtcctgcaaagcaagcggcggcacctttagctcctacgccatctcttgggtccgacaggctccaggacaaggactggaatggatgggcggcatcatccccatcttcggcacagccaattacgcccagaaattccagggcagagtgacaatcaccgccgacaagagcaccagcaccgcctacatggaactgagcagcctgagaagcgacgacaccgccgtgtactactgcgccagagatgaactgtgggccaccaactactactacatggacgtgtggggcaagggcaccctggtcacagtttcttctacgcgtatccagaaccctgatcctgccgtgtaccagctgcgggatagcaagagcagcgacaagagcgtgtgtctgttcaccgacttcgacagccagaccaacgtgtcccagagcaaggactccgacgtgtacatcaccgataagtgcgtgctggacatgcggagcatggacttcaagagcaactccgccgtggcctggtccaacaagtccgatttcgcctgcgccaacgccttcaacaacagcattatccccgaggacacattcttcccaagccccgagagcagctgcgacgtgaagctggtggaaaagagcttcgagacagacaccaacctgaacttccagaacctgagcgtgatcggcttcagaatcctgctgctgaaagtggccggctttaacctgctgatgaccctgcggctgtggtccagc

SEQ ID NO: 9269 - DNA, 2289 bp, Artificial Sequence
  Synthetic Polynucloetide
atggccttaccagtgaccgccttgctcctgccgctggccttgctgctccacgccgccaggccgcagtctgctctgacccagcctagatccgtgtctggctctcctggacagagcgtgaccatcagctgtaccggcacctcttctgacgtgggcagctacaactacgtgtcctggtatcagcagagccccggcaaggcccctaagctgatgatctacgacgtgtccaacagacccagcggcgtgtccaatagattctccggcagcaagagcggcaacaccgccagcctgacaatctctggactccagtctgaggacgaggccgactactactgtaccagctacggcagctacgacatccccgtgatttttggcggaggcaccaaggtggaaatcaaactcgaggacctgaagaacgtgttcccacctgaggtggccgtgttcgagcctagcgaggccgagatcagccacacccagaaagccaccctcgtgtgcctggctaccggcttctaccccgaccatgtggaactgtcttggtgggtcaacggcaaagaggtgcacagcggcgtgtgtaccgacccccagccactgaaagaacagcccgccctgaacgacagccggtactgcctgagcagcagactgagagtgtccgccaccttctggcagaacccccggaaccacttcagatgccaggtgcagttctacggcctgagcgagaacgacgagtggacccaggacagagccaagcccgtgacccagatcgtgtctgccgaagcctggggcagagccgattgcggctttaccagcgagagctaccagcagggcgtgctgagcgccaccatcctgtacgagatcctgctgggcaaggccaccctgtacgccgtgctggtgtctgccctggtgctgatggctatggtcaagcggaaggacagccggggaagggccaagcgatctggatctggagcaacaaacttctcactactcaaacaagcaggtgacgtggaggagaatcccgggcctactagtatggactggatttggcgcatccttttccttgtcggcgctgctaccggcgcccattccgggcccgaagtgcagctggttgaatctggcggaggactggttcaggctggcggatctctgagactgtcttgtgccgccagcggcagaacctttagcatgggctggtttagacaggcccctggcaaagagagagagttcgtcgccgccatcacatactctggcggcagcccttactacgccgactctgtgaagggcagattcaccatcagccgggacaacgccaagaacaccgtgtacctccagatgaacagcctgaagcctgaggacaccgccgtgtactactgcgccgccaatccaacatacggcagcgactggaacgccgagaattggggccagggaacccaagtgacagtgtctagcggatccggcggcggaggatctggcggaggcggatctgggggcggaggctctttcgaacagatgcagctggtgcagtctggggccgaagtgaagaaacctggcagcagcgtgaaggtgtcctgcaaagcaagcggcggcacctttagctcctacgccatctcttgggtccgacaggctccaggacaaggactggaatggatgggcggcatcatccccatcttcggcacagccaattacgcccagaaattccagggcagagtgacaatcaccgccgacaagagcaccagcaccgcctacatggaactgagcagcctgagaagcgacgacaccgccgtgtactactgcgccagagatgaactgtgggccaccaactactactacatggacgtgtggggcaagggcaccctggtcacagtttcttctacgcgtatccagaaccctgatcctgccgtgtaccagctgcgggatagcaagagcagcgacaagagcgtgtgtctgttcaccgacttcgacagccagaccaacgtgtcccagagcaaggactccgacgtgtacatcaccgataagtgcgtgctggacatgcggagcatggacttcaagagcaactccgccgtggcctggtccaacaagtccgatttcgcctgcgccaacgccttcaacaacagcattatccccgaggacacattcttcccaagccccgagagcagctgcgacgtgaagctggtggaaaagagcttcgagacagacaccaacctgaacttccagaacctgagcgtgatcggcttcagaatcctgctgctgaaagtggccggctttaacctgctgatgaccctgcggctgtggtccagc

SEQ ID NO: 9270 - DNA, 2670 bp, Artificial Sequence
  Synthetic Polynucloetide
atggccttaccagtgaccgccttgctcctgccgctggccttgctgctccacgccgccaggccgcagtctgctctgacccagcctagatccgtgtctggctctcctggacagagcgtgaccatcagctgtaccggcacctcttctgacgtgggcagctacaactacgtgtcctggtatcagcagagccccggcaaggcccctaagctgatgatctacgacgtgtccaacagacccagcggcgtgtccaatagattctccggcagcaagagcggcaacaccgccagcctgacaatctctggactccagtctgaggacgaggccgactactactgtaccagctacggcagctacgacatccccgtgatttttggcggaggcaccaaggtggaaatcaaactcgaggacctgaagaacgtgttcccacctgaggtggccgtgttcgagcctagcgaggccgagatcagccacacccagaaagccaccctcgtgtgcctggctaccggcttctaccccgaccatgtggaactgtcttggtgggtcaacggcaaagaggtgcacagcggcgtgtgtaccgacccccagccactgaaagaacagcccgccctgaacgacagccggtactgcctgagcagcagactgagagtgtccgccaccttctggcagaacccccggaaccacttcagatgccaggtgcagttctacggcctgagcgagaacgacgagtggacccaggacagagccaagcccgtgacccagatcgtgtctgccgaagcctggggcagagccgattgcggctttaccagcgagagctaccagcagggcgtgctgagcgccaccatcctgtacgagatcctgctgggcaaggccaccctgtacgccgtgctggtgtctgccctggtgctgatggctatggtcaagcggaaggacagccggggaagggccaagcgatctggatctggagcaacaaacttctcactactcaaacaagcaggtgacgtggaggagaatcccgggcctactagtatggactggatttggcgcatccttttccttgtcggcgctgctaccggcgcccattcccaactgcaactgcaagagtctggccctggcctggtcaagccttctgaaaccctgagcctgacctgtaccgtgtccggcggctctatcagcagcggcgattactactggggctggatcagacagcctccaggcaagggactcgaatggatcggcagcatcagctacagcggctccacctactacaacccaagcctgaagtccagagtgaccatcagcgtggacaccagcagaaaccagttctccctgaagctgagcagcgtgacagccgccgatacagccgtgtattattgcaccagagaggacagcagcaactggcggagtagaggacagggcacactggtcacagtgtcctcttctggaggcggtggaagcggtggaggaggatctgaagtgcagctggttgaatctggcggaggactggttcaggctggcggatctctgagactgtcttgtgccgccagcggcagaacctttagcatgggctggtttagacaggcccctggcaaagagagagagttcgtcgccgccatcacatactctggcggcagcccttactacgccgactctgtgaagggcagattcaccatcagccgggacaacgccaagaacaccgtgtacctccagatgaacagcctgaagcctgaggacaccgccgtgtactactgcgccgccaatccaacatacggcagcgactggaacgccgagaattggggccagggaacccaagtgacagtgtctagcggatccggcggcggaggatctggcggaggcggatctgggggcggaggctctttcgaacagatgcagctggtgcagtctggggccgaagtgaagaaacctggcagcagcgtgaaggtgtcctgcaaagcaagcggcggcacctttagctcctacgccatctcttgggtccgacaggctccaggacaaggactggaatggatgggcggcatcatccccatcttcggcacagccaattacgcccagaaattccagggcagagtgacaatcaccgccgacaagagcaccagcaccgcctacatggaactgagcagcctgagaagcgacgacaccgccgtgtactactgcgccagagatgaactgtgggccaccaactactactacatggacgtgtggggcaagggcaccctggtcacagtttcttctacgcgtatccagaaccctgatcctgccgtgtaccagctgcgggatagcaagagcagcgacaagagcgtgtgtctgttcaccgacttcgacagccagaccaacgtgtcccagagcaaggactccgacgtgtacatcaccgataagtgcgtgctggacatgcggagcatggacttcaagagcaactccgccgtggcctggtccaacaagtccgatttcgcctgcgccaacgccttcaacaacagcattatccccgaggacacattcttcccaagccccgagagcagctgcgacgtgaagctggtggaaaagagcttcgagacagacaccaacctgaacttccagaacctgagcgtgatcggcttcagaatcctgctgctgaaagtggccggctttaacctgctgatgaccctgcggctgtggtccagc

SEQ ID NO: 9271 - DNA, 2697 bp, Artificial Sequence
  Synthetic Polynucloetide
atggccttaccagtgaccgccttgctcctgccgctggccttgctgctccacgccgccaggccggaagtgcaggttttggagtctggcggaggactggttcagcctggcggatctctgagactgtcttgtgccgccagcggcttcaccttcagcaactttgccatgagctgggtccgacaggcccctggcaaaggacttgaatgggtgtccacaatcagcggcagcgccggcacaacagattacgccgattctgtgaagggcagattcaccatcagccgggacaacagcaagaaaaccctgtacctccagatgaacagcctgcgcgtggaagataccgccgtgtactactgtgccgatggcagaggccccttcttcgattatcgcggccagggcacactggtcaccgtttcttctggtaccggcggaggcggatctggcggcggaggtagcggtggcggaggatctgaattccagtctgctctgacccagcctagatccgtgtctggctctcctggacagagcgtgaccatcagctgtaccggcacctcttctgacgtgggcagctacaactacgtgtcctggtatcagcagagccccggcaaggcccctaagctgatgatctacgacgtgtccaacagacccagcggcgtgtccaatagattctccggcagcaagagcggcaacaccgccagcctgacaatctctggactccagtctgaggacgaggccgactactactgtaccagctacggcagctacgacatccccgtgatttttggcggaggcaccaaggtggaaatcaaactcgaggacctgaagaacgtgttcccacctgaggtggccgtgttcgagcctagcgaggccgagatcagccacacccagaaagccaccctcgtgtgcctggctaccggcttctaccccgaccatgtggaactgtcttggtgggtcaacggcaaagaggtgcacagcggcgtgtgtaccgacccccagccactgaaagaacagcccgccctgaacgacagccggtactgcctgagcagcagactgagagtgtccgccaccttctggcagaacccccggaaccacttcagatgccaggtgcagttctacggcctgagcgagaacgacgagtggacccaggacagagccaagcccgtgacccagatcgtgtctgccgaagcctggggcagagccgattgcggctttaccagcgagagctaccagcagggcgtgctgagcgccaccatcctgtacgagatcctgctgggcaaggccaccctgtacgccgtgctggtgtctgccctggtgctgatggctatggtcaagcggaaggacagccggggaagggccaagcgatctggatctggagcaacaaacttctcactactcaaacaagcaggtgacgtggaggagaatcccgggcctactagtatggactggatttggcgcatccttttccttgtcggcgctgctaccggcgcccattccgggcccgaagtgcagctggttgaatctggcggaggactggttcaggctggcggatctctgagactgtcttgtgccgccagcggcagaacctttagcatgggctggtttagacaggcccctggcaaagagagagagttcgtcgccgccatcacatacagcggcggcagcccttactacgcctcttctgtcagaggccggttcaccatcagccgggacaacgccaagaacaccgtgtacctccagatgaacagcctgaagccagaggacaccgccgtgtactactgtgccgccaatccaacctacggcagcgactggaatgccgagaattggggccagggcacccaagtgacagtgtctagtggatccggcggcggaggatctggcggaggcggatctgggggcggaggctctttcgaacagatgcagctggtgcagtctggggccgaagtgaagaaacctggcagcagcgtgaaggtgtcctgcaaagcaagcggcggcacctttagctcctacgccatctcttgggtccgacaggctccaggacaaggactggaatggatgggcggcatcatccccatcttcggcacagccaattacgcccagaaattccagggcagagtgacaatcaccgccgacaagagcaccagcaccgcctacatggaactgagcagcctgagaagcgacgacaccgccgtgtactactgcgccagagatgaactgtgggccaccaactactactacatggacgtgtggggcaagggcaccctggtcacagtttcttctacgcgtatccagaaccctgatcctgccgtgtaccagctgcgggatagcaagagcagcgacaagagcgtgtgtctgttcaccgacttcgacagccagaccaacgtgtcccagagcaaggactccgacgtgtacatcaccgataagtgcgtgctggacatgcggagcatggacttcaagagcaactccgccgtggcctggtccaacaagtccgatttcgcctgcgccaacgccttcaacaacagcattatccccgaggacacattcttcccaagccccgagagcagctgcgacgtgaagctggtggaaaagagcttcgagacagacaccaacctgaacttccagaacctgagcgtgatcggcttcagaatcctgctgctgaaagtggccggctttaacctgctgatgaccctgcggctgtggtccagc

SEQ ID NO: 9272 - DNA, 2172 bp, Artificial Sequence
  Synthetic Polynucloetide
atggccttaccagtgaccgccttgctcctgccgctggccttgctgctccacgccgccaggccggacgtggtcatgacacagagcccttctagcctgtctgccagcgtgggcgacagagtgaccatcacctgtaaagccagccagagcgtgtccagctacctgaactggtatcagcagaagcccggcaaggcccctaagctgctgatctatgctgccagcagcctggaaacaggcgtgcccagcagattttctggcagcggctctggcaccgacttcaccctgacaatatccagcctccagcctgaggacttcgccacctactactgtcagcagagctacagcaccccttggacctttggccagggcaccaaggtggaaatcaagagaggcggaggcggaagtggaggcggaggatctggcggcggaggctctgaagttcagctggttgaatctggcggcggactcgttagacctggcggatctctgagactgagctgtgccgccagcggcttcaccttcgatgattacggcatgagctgggtccgacaggcccctggaaaaggactggaatgggtgtccggcatcagctggaatagcggctctatcggctacgccgacagcgtgaagggcagattcaccatcagccgggacaacgccaagaacagcctgtacctccagatgaactccctgagagccgaggacacagccctgtactactgtgccaagcggggcaacagcaacagcttcgattattggggccagggaaccaccgtgaccgtgtcatctacgcgtgagcagaaactgatctcggaagaggatctggcgaagcccaccacgacgccagcgccgcgaccaccaacaccggcgcccaccatcgcgtcgcagcccctgtccctgcgcccagaggcgtgccggccagcggcggggggcgcagtgcacacgagggggctggacttcgcctgtgacatctacatctgggcgcccttggccgggacttgtggggtccttctcctgtcactggttatcaccctttactgcaaacggggcagaaagaaactcctgtatatattcaaacaaccatttatgagaccagtacaaactactcaagaggaagatggctgtagctgccgatttccagaagaagaagaaggaggatgtgaactgagagtgaagttcagcaggagcgcagacgcccccgcgtaccagcagggccagaaccagctctataacgagctgaatctaggacgaagagaggagtacgatgttttggacaagagacgtggccgggaccctgagatggggggaaagccgagaaggaagaaccctcaggaaggcctgtacaatgaactgcagaaagataagatggcggaggcctacagtgagattgggatgaaaggcgagcgccggaggggcaaggggcacgatggcctttaccagggtctcagtacagccaccaaggacacctacgacgcccttcacatgcaggccctgccccctcgctctagtggctccggcgagggcagaggaagtctactaacctgcggagatgtggaagaaaatcctggcccacatatgaccgagtacaagcccacggtgcgcctcgccacccgcgacgacgtccccagggccgtacgcaccctcgccgccgcgttcgccgactaccccgccacgcgccacaccgtcgatccggaccgccacatcgagcgggtcaccgagctgcaagaactcttcctcacgcgcgtcgggctcgacatcggcaaggtgtgggtcgcggacgacggcgccgcggtggcggtctggaccacgccggagagcgtcgaagcgggggcggtgttcgccgagatcggcccgcgcatggccgagttgagcggttcccggctggccgcgcagcaacagatggaaggcctcctggcgccgcaccggcccaaggagcccgcgtggttcctggccaccgtcggcgtctcgcccgaccaccagggcaagggtctgggcagcgccgtcgtgctccccggagtggaggcggccgagcgcgccggggtgcccgccttcctggagacctccgcgccccgcaacctccccttctacgagcggctcggcttcaccgtcaccgccgacgtcgaggtgcccgaaggaccgcgcacctggtgcatgacccgcaagcccggtgcctga

SEQ ID NO: 9273 - DNA, 2154 bp, Artificial Sequence
  Synthetic Polynucloetide
atggccttaccagtgaccgccttgctcctgccgctggccttgctgctccacgccgccaggccggacgtggtcatgacacagagcccttctagcctgtctgccagcgtgggcgacagagtgaccatcacctgtaaagccagccagagcgtgtccagctacctgaactggtatcagcagaagcccggcaaggcccctaagctgctgatctatgctgccagcagcctggaaacaggcgtgcccagcagattttctggcagcggctctggcaccgacttcaccctgacaatatccagcctccagcctgaggacttcgccacctactactgtcagcagagctacagcaccccttggacctttggccagggcaccaaggtggaaatcaagagaggcggaggcggaagtggaggcggaggatctggcggcggaggctctgaagttcagctggttgaatctggcggcggactcgttagacctggcggatctctgagactgagctgtgccgccagcggcttcaccttcgatgattacggcatgagctgggtccgacaggcccctggaaaaggactggaatgggtgtccggcatcagctggaatagcggctctatcggctacgccgacagcgtgaagggcagattcaccatcagccgggacaacgccaagaacagcctgtacctccagatgaactccctgagagccgaggacacagccctgtactactgtgccaagcggggcaacagcaacagcttcgattattggggccagggaaccaccgtgaccgtgtcatctacgcgtgagcagaaactgatctcggaagaggatctgaaaattgaagttatgtatcctcctccttacctagacaatgagaagagcaatggaaccattatccatgtgaaagggaaacacctttgtccaagtcccctatttcccggaccttctaagcccttttgggtgctggtggtggttgggggagtcctggcttgctatagcttgctagtaacagtggcctttattattttctgggtgaggagtaagaggagcaggctcctgcacagtgactacatgaacatgactccacgccgccccggacccacccgcaagcattaccagccctatgccccaccacgcgacttcgcagcctatcgctccagagtgaagttcagcaggagcgcagacgcccccgcgtaccagcagggccagaaccagctctataacgagctcaatctaggacgaagagaggagtacgatgttttggacaagagacgtggccgggaccctgagatggggggaaagccgagaaggaagaaccctcaggaaggcctgtacaatgaactgcagaaagataagatggcggaggcctacagtgagattgggatgaaaggcgagcgccggaggggcaaggggcacgatggcctttaccagggtctcagtacagccaccaaggacacctacgacgcccttcacatgcaggccctgccccctcgctctagtggctccggcgagggcagaggaagtctactaacctgcggagatgtggaagaaaatcctggcccacatatgaccgagtacaagcccacggtgcgcctcgccacccgcgacgacgtccccagggccgtacgcaccctcgccgccgcgttcgccgactaccccgccacgcgccacaccgtcgatccggaccgccacatcgagcgggtcaccgagctgcaagaactcttcctcacgcgcgtcgggctcgacatcggcaaggtgtgggtcgcggacgacggcgccgcggtggcggtctggaccacgccggagagcgtcgaagcgggggcggtgttcgccgagatcggcccgcgcatggccgagttgagcggttcccggctggccgcgcagcaacagatggaaggcctcctggcgccgcaccggcccaaggagcccgcgtggttcctggccaccgtcggcgtctcgcccgaccaccagggcaagggtctgggcagcgccgtcgtgctccccggagtggaggcggccgagcgcgccggggtgcccgccttcctggagacctccgcgccccgcaacctccccttctacgagcggctcggcttcaccgtcaccgccgacgtcgaggtgcccgaaggaccgcgcacctggtgcatgacccgcaagcccggtgcctga

SEQ ID NO: 9274 - DNA, 1482 bp, Artificial Sequence
  Synthetic Polynucloetide
atggccttaccagtgaccgccttgctcctgccgctggccttgctgctccacgccgccaggccggacgtggtcatgacacagagcccttctagcctgtctgccagcgtgggcgacagagtgaccatcacctgtaaagccagccagagcgtgtccagctacctgaactggtatcagcagaagcccggcaaggcccctaagctgctgatctatgctgccagcagcctggaaacaggcgtgcccagcagattttctggcagcggctctggcaccgacttcaccctgacaatatccagcctccagcctgaggacttcgccacctactactgtcagcagagctacagcaccccttggacctttggccagggcaccaaggtggaaatcaagagaggcggaggcggaagtggaggcggaggatctggcggcggaggctctgaagttcagctggttgaatctggcggcggactcgttagacctggcggatctctgagactgagctgtgccgccagcggcttcaccttcgatgattacggcatgagctgggtccgacaggcccctggaaaaggactggaatgggtgtccggcatcagctggaatagcggctctatcggctacgccgacagcgtgaagggcagattcaccatcagccgggacaacgccaagaacagcctgtacctccagatgaactccctgagagccgaggacacagccctgtactactgtgccaagcggggcaacagcaacagcttcgattattggggccagggaaccaccgtgaccgtgtcatctacgcgtgagcagaaactgatctcggaagaggatctgaaaattgaagttatgtatcctcctccttacctagacaatgagaagagcaatggaaccattatccatgtgaaagggaaacacctttgtccaagtcccctatttcccggaccttctaagcccttttgggtgctggtggtggttgggggagtcctggcttgctatagcttgctagtaacagtggcctttattattttctgggtgaggagtaagaggagcaggctcctgcacagtgactacatgaacatgactccacgccgccccggacccacccgcaagcattaccagccctatgccccaccacgcgacttcgcagcctatcgctccagagtgaagttcagcaggagcgcagacgcccccgcgtaccagcagggccagaaccagctctataacgagctcaatctaggacgaagagaggagtacgatgttttggacaagagacgtggccgggaccctgagatggggggaaagccgagaaggaagaaccctcaggaaggcctgtacaatgaactgcagaaagataagatggcggaggcctacagtgagattgggatgaaaggcgagcgccggaggggcaaggggcacgatggcctttaccagggtctcagtacagccaccaaggacacctacgacgcccttcacatgcaggccctgccccctcgc

SEQ ID NO: 9275 - DNA, 1503 bp, Artificial Sequence
  Synthetic Polynucloetide
atggccttaccagtgaccgccttgctcctgccgctggccttgctgctccacgccgccaggccggacgtggtcatgacacagagcccttctagcctgtctgccagcgtgggcgacagagtgaccatcacctgtaaagccagccagagcgtgtccagctacctgaactggtatcagcagaagcccggcaaggcccctaagctgctgatctatgctgccagcagcctggaaacaggcgtgcccagcagattttctggcagcggctctggcaccgacttcaccctgacaatatccagcctccagcctgaggacttcgccacctactactgtcagcagagctacagcaccccttggacctttggccagggcaccaaggtggaaatcaagagaggcggaggcggaagtggaggcggaggatctggcggcggaggctctgaagttcagctggttgaatctggcggcggactcgttagacctggcggatctctgagactgagctgtgccgccagcggcttcaccttcgatgattacggcatgagctgggtccgacaggcccctggaaaaggactggaatgggtgtccggcatcagctggaatagcggctctatcggctacgccgacagcgtgaagggcagattcaccatcagccgggacaacgccaagaacagcctgtacctccagatgaactccctgagagccgaggacacagccctgtactactgtgccaagcggggcaacagcaacagcttcgattattggggccagggaaccaccgtgaccgtgtcatctacgcgtgagcagaaactgatctcggaagaggatctggcgaagcccaccacgacgccagcgccgcgaccaccaacaccggcgcccaccatcgcgtcgcagcccctgtccctgcgcccagaggcgtgccggccagcggcggggggcgcagtgcacacgagggggctggacttcgcctgtgacatctacatctgggcgcccttggccgggacttgtggggtccttctcctgtcactggttatcaccctttactgcaaacggggcagaaagaaactcctgtatatattcaaacaaccatttatgagaccagtacaaactactcaagaggaagatggctgtagctgccgatttccagaagaagaagaaggaggatgtgaactgagagtgaagttcagcaggagcgcagacgcccccgcgtaccagcagggccagaaccagctctataacgagctgaatctaggacgaagagaggagtacgatgttttggacaagagacgtggccgggaccctgagatggggggaaagccgagaaggaagaaccctcaggaaggcctgtacaatgaactgcagaaagataagatggcggaggcctacagtgagattgggatgaaaggcgagcgccggaggggcaaggggcacgatggcctttaccagggtctcagtacagccaccaaggacacctacgacgcccttcacatgcaggccctgccccctcgctga

SEQ ID NO: 9276 - DNA, 1503 bp, Artificial Sequence
  Synthetic Polynucloetide
atggccttaccagtgaccgccttgctcctgccgctggccttgctgctccacgccgccaggccggaagttcagctggttgaatctggcggcggactcgttagacctggcggatctctgagactgagctgtgccgccagcggcttcaccttcgatgattacggcatgagctgggtccgacaggcccctggaaaaggactggaatgggtgtccggcatcagctggaatagcggctctatcggctacgccgacagcgtgaagggcagattcaccatcagccgggacaacgccaagaacagcctgtacctccagatgaactccctgagagccgaggacacagccctgtactactgtgccaagcggggcaacagcaacagcttcgattattggggccagggaaccaccgtgaccgtgtcatctggcggaggcggaagtggaggcggaggatctggcggcggaggctctgacgtggtcatgacacagagcccttctagcctgtctgccagcgtgggcgacagagtgaccatcacctgtaaagccagccagagcgtgtccagctacctgaactggtatcagcagaagcccggcaaggcccctaagctgctgatctatgctgccagcagcctggaaacaggcgtgcccagcagattttctggcagcggctctggcaccgacttcaccctgacaatatccagcctccagcctgaggacttcgccacctactactgtcagcagagctacagcaccccttggacctttggccagggcaccaaggtggaaatcaagagaacgcgtgagcagaaactgatctcggaagaggatctggcgaagcccaccacgacgccagcgccgcgaccaccaacaccggcgcccaccatcgcgtcgcagcccctgtccctgcgcccagaggcgtgccggccagcggcggggggcgcagtgcacacgagggggctggacttcgcctgtgacatctacatctgggcgcccttggccgggacttgtggggtccttctcctgtcactggttatcaccctttactgcaaacggggcagaaagaaactcctgtatatattcaaacaaccatttatgagaccagtacaaactactcaagaggaagatggctgtagctgccgatttccagaagaagaagaaggaggatgtgaactgagagtgaagttcagcaggagcgcagacgcccccgcgtaccagcagggccagaaccagctctataacgagctgaatctaggacgaagagaggagtacgatgttttggacaagagacgtggccgggaccctgagatggggggaaagccgagaaggaagaaccctcaggaaggcctgtacaatgaactgcagaaagataagatggcggaggcctacagtgagattgggatgaaaggcgagcgccggaggggcaaggggcacgatggcctttaccagggtctcagtacagccaccaaggacacctacgacgcccttcacatgcaggccctgccccctcgctga

SEQ ID NO: 9277 - DNA, 2742 bp, Artificial Sequence
  Synthetic Polynucloetide
atggccttaccagtgaccgccttgctcctgccgctggccttgctgctccacgccgccaggccggacgtggtcatgacacagagcccttctagcctgtctgccagcgtgggcgacagagtgaccatcacctgtaaagccagccagagcgtgtccagctacctgaactggtatcagcagaagcccggcaaggcccctaagctgctgatctatgctgccagcagcctggaaacaggcgtgcccagcagattttctggcagcggctctggcaccgacttcaccctgacaatatccagcctccagcctgaggacttcgccacctactactgtcagcagagctacagcaccccttggacctttggccagggcaccaaggtggaaatcaagagaggcggaggcggaagtggaggcggaggatctggcggcggaggctctgaagttcagctggttgaatctggcggcggactcgttagacctggcggatctctgagactgagctgtgccgccagcggcttcaccttcgatgattacggcatgagctgggtccgacaggcccctggaaaaggactggaatgggtgtccggcatcagctggaatagcggctctatcggctacgccgacagcgtgaagggcagattcaccatcagccgggacaacgccaagaacagcctgtacctccagatgaactccctgagagccgaggacacagccctgtactactgtgccaagcggggcaacagcaacagcttcgattattggggccagggaaccaccgtgaccgtgtcatctacgcgtgagcagaaactgatctcggaagaggatctggcgaagcccaccacgacgccagcgccgcgaccaccaacaccggcgcccaccatcgcgtcgcagcccctgtccctgcgcccagaggcgtgccggccagcggcggggggcgcagtgcacacgagggggctggacttcgcctgtgacatctacatctgggcgcccttggccgggacttgtggggtccttctcctgtcactggttatcaccctttactgcgggcgcgccagagtgaagttcagcaggagcgcagacgcccccgcgtaccagcagggccagaaccagctctataacgagctgaatctaggacgaagagaggagtacgatgttttggacaagagacgtggccgggaccctgagatggggggaaagccgagaaggaagaaccctcaggaaggcctgtacaatgaactgcagaaagataagatggcggaggcctacagtgagattgggatgaaaggcgagcgccggaggggcaaggggcacgatggcctttaccagggtctcagtacagccaccaaggacacctacgacgcccttcacatgcaggccctgccccctcgctctagaggatctggagcaacaaacttctcactactcaaacaagcaggtgacgtggaggagaatcccgggcctgggatccacatggccacttacgaggttctctgtgaggtggcgcggaaactgggcacggatgacagggaagtggtattgttcctcctaaacgtgttcatacctcaacccacactggcccaattaattggagctcttagagctttaaaggaggagggcaggttaacgtttcccctgttagcggaatgtctgtttcgtgcaggtcgcagagacctcttgcgcgacctgcttcacttagacccgcgttttttagagcgccacctagcgggcacaatgagttatttcagcccttatcagctcactgttctccacgtagacggggagctgtgtgcgagggatattaggtctttgatatttttaagcaaggacactatagggtctcgcagcacaccacagacattcttacactgggtgtactgtatggaaaacttagacctactgggtcccactgacgtggatgccctaatgtcaatgcttagatctttgtcaagagtagacctacagcgccaagtgcaaaccctaatgggccttcacctttccggcccatcacactcccaacactatcgccatacaccactcgagaccgatttctacgactacaaggacgacgatgacaagactagtggctccggcgagggcagaggaagtctactaacctgcggagatgtggaagaaaatcctggcccacatatgaccgagtacaagcccacggtgcgcctcgccacccgcgacgacgtccccagggccgtacgcaccctcgccgccgcgttcgccgactaccccgccacgcgccacaccgtcgatccggaccgccacatcgagcgggtcaccgagctgcaagaactcttcctcacgcgcgtcgggctcgacatcggcaaggtgtgggtcgcggacgacggcgccgcggtggcggtctggaccacgccggagagcgtcgaagcgggggcggtgttcgccgagatcggcccgcgcatggccgagttgagcggttcccggctggccgcgcagcaacagatggaaggcctcctggcgccgcaccggcccaaggagcccgcgtggttcctggccaccgtcggcgtctcgcccgaccaccagggcaagggtctgggcagcgccgtcgtgctccccggagtggaggcggccgagcgcgccggggtgcccgccttcctggagacctccgcgccccgcaacctccccttctacgagcggctcggcttcaccgtcaccgccgacgtcgaggtgcccgaaggaccgcgcacctggtgcatgacccgcaagcccggtgcctga

SEQ ID NO: 9278 - DNA, 2562 bp, Artificial Sequence
  Synthetic Polynucloetide
atggccttaccagtgaccgccttgctcctgccgctggccttgctgctccacgccgccaggccggacgtggtcatgacacagagcccttctagcctgtctgccagcgtgggcgacagagtgaccatcacctgtaaagccagccagagcgtgtccagctacctgaactggtatcagcagaagcccggcaaggcccctaagctgctgatctatgctgccagcagcctggaaacaggcgtgcccagcagattttctggcagcggctctggcaccgacttcaccctgacaatatccagcctccagcctgaggacttcgccacctactactgtcagcagagctacagcaccccttggacctttggccagggcaccaaggtggaaatcaagagactcgagatccagaaccctgatcctgccgtgtaccagctgcgggatagcaagagcagcgacaagagcgtgtgtctgttcaccgacttcgacagccagaccaacgtgtcccagagcaaggactccgacgtgtacatcaccgataagtgcgtgctggacatgcggagcatggacttcaagagcaactccgccgtggcctggtccaacaagtccgatttcgcctgcgccaacgccttcaacaacagcattatccccgaggacacattcttcccaagcagcgacgtgccctgcgacgtgaagctggtggaaaagagcttcgagacagacaccaacctgaacttccagaacctgagcgtgatcggcttcagaatcctgctgctgaaagtggccggctttaacctgctgatgaccctgcggctgtggtccagccgcgccaagagaagcggatctggcgtgaagcagaccctgaatttcgacctgctgaagctggctggcgacgtggaatccaacccaggccctactagtatggactggatttggcgcatccttttccttgtcggcgctgctaccggcgcgcattccttcgaagaagttcagctggttgaatctggcggcggactcgttagacctggcggatctctgagactgagctgtgccgccagcggcttcaccttcgatgattacggcatgagctgggtccgacaggcccctggaaaaggactggaatgggtgtccggcatcagctggaatagcggctctatcggctacgccgacagcgtgaagggcagattcaccatcagccgggacaacgccaagaacagcctgtacctccagatgaactccctgagagccgaggacacagccctgtactactgtgccaagcggggcaacagcaacagcttcgattattggggccagggaaccaccgtgaccgtgtcatctacgcgtgaggacctgaagaacgtgttcccacctgaggtggccgtgttcgagcctagcaaggccgagatcgcccacacccagaaagccaccctcgtgtgcctggctaccggcttctaccccgaccatgtggaactgtcttggtgggtcaacggcaaagaggtgcacagcggcgtgtgtaccgacccccagccactgaaagaacagcccgccctgaacgacagccggtactgcctgagcagcagactgagagtgtccgccaccttctggcagaacccccggaaccacttcagatgccaggtgcagttctacggcctgagcgagaacgacgagtggacccaggacagagccaagcccgtgacccagatcgtgtctgccgaagcctggggcagagccgattgcggcatcaccagcgccagctaccaccagggcgtgctgagcgccaccatcctgtacgagatcctgctgggcaaggccaccctgtacgccgtgctggtgtctgccctggtgctgatggctatggtcaagcggaaggacagccggggaagggccaagcgatctggatctggagcaacaaacttctcactactcaaacaagcaggtgacgtggaggagaatcccgggccttctagaggccatatgaccgagtacaagcccacggtgcgcctcgccacccgcgacgacgtccccagggccgtacgcaccctcgccgccgcgttcgccgactaccccgccacgcgccacaccgtcgatccggaccgccacatcgagcgggtcaccgagctgcaagaactcttcctcacgcgcgtcgggctcgacatcggcaaggtgtgggtcgcggacgacggcgccgcggtggcggtctggaccacgccggagagcgtcgaagcgggggcggtgttcgccgagatcggcccgcgcatggccgagttgagcggttcccggctggccgcgcagcaacagatggaaggcctcctggcgccgcaccggcccaaggagcccgcgtggttcctggccaccgtcggcgtctcgcccgaccaccagggcaagggtctgggcagcgccgtcgtgctccccggagtggaggcggccgagcgcgccggggtgcccgccttcctggagacctccgcgccccgcaacctccccttctacgagcggctcggcttcaccgtcaccgccgacgtcgaggtgcccgaaggaccgcgcacctggtgcatgacccgcaagcccggtgcctga

SEQ ID NO: 9279 - DNA, 2559 bp, Artificial Sequence
  Synthetic Polynucloetide
atggccttaccagtgaccgccttgctcctgccgctggccttgctgctccacgccgccaggccggacgtggtcatgacacagagcccttctagcctgtctgccagcgtgggcgacagagtgaccatcacctgtaaagccagccagagcgtgtccagctacctgaactggtatcagcagaagcccggcaaggcccctaagctgctgatctatgctgccagcagcctggaaacaggcgtgcccagcagattttctggcagcggctctggcaccgacttcaccctgacaatatccagcctccagcctgaggacttcgccacctactactgtcagcagagctacagcaccccttggacctttggccagggcaccaaggtggaaatcaagagactcgaggacctgaagaacgtgttcccacctgaggtggccgtgttcgagcctagcaaggccgagatcgcccacacccagaaagccaccctcgtgtgcctggctaccggcttctaccccgaccatgtggaactgtcttggtgggtcaacggcaaagaggtgcacagcggcgtgtgtaccgacccccagccactgaaagaacagcccgccctgaacgacagccggtactgcctgagcagcagactgagagtgtccgccaccttctggcagaacccccggaaccacttcagatgccaggtgcagttctacggcctgagcgagaacgacgagtggacccaggacagagccaagcccgtgacccagatcgtgtctgccgaagcctggggcagagccgattgcggcatcaccagcgccagctaccaccagggcgtgctgagcgccaccatcctgtacgagatcctgctgggcaaggccaccctgtacgccgtgctggtgtctgccctggtgctgatggctatggtcaagcggaaggacagccggggaagggccaagcgatctggatctggagcaacaaacttctcactactcaaacaagcaggtgacgtggaggagaatcccgggcctactagtatggactggatttggcgcatccttttccttgtcggcgctgctaccggcgcgcattccttcgaagaagttcagctggttgaatctggcggcggactcgttagacctggcggatctctgagactgagctgtgccgccagcggcttcaccttcgatgattacggcatgagctgggtccgacaggcccctggaaaaggactggaatgggtgtccggcatcagctggaatagcggctctatcggctacgccgacagcgtgaagggcagattcaccatcagccgggacaacgccaagaacagcctgtacctccagatgaactccctgagagccgaggacacagccctgtactactgtgccaagcggggcaacagcaacagcttcgattattggggccagggaaccaccgtgaccgtgtcatctacgcgtatccagaaccctgatcctgccgtgtaccagctgcgggatagcaagagcagcgacaagagcgtgtgtctgttcaccgacttcgacagccagaccaacgtgtcccagagcaaggactccgacgtgtacatcaccgataagtgcgtgctggacatgcggagcatggacttcaagagcaactccgccgtggcctggtccaacaagtccgatttcgcctgcgccaacgccttcaacaacagcattatccccgaggacacattcttcccaagcagcgacgtgccctgcgacgtgaagctggtggaaaagagcttcgagacagacaccaacctgaacttccagaacctgagcgtgatcggcttcagaatcctgctgctgaaagtggccggctttaacctgctgatgaccctgcggctgtggtccagccgcgccaagagaagcggatctggcgtgaagcagaccctgaatttcgacctgctgaagctggctggcgacgtggaatccaacccaggcccttctagaggccatatgaccgagtacaagcccacggtgcgcctcgccacccgcgacgacgtccccagggccgtacgcaccctcgccgccgcgttcgccgactaccccgccacgcgccacaccgtcgatccggaccgccacatcgagcgggtcaccgagctgcaagaactcttcctcacgcgcgtcgggctcgacatcggcaaggtgtgggtcgcggacgacggcgccgcggtggcggtctggaccacgccggagagcgtcgaagcgggggcggtgttcgccgagatcggcccgcgcatggccgagttgagcggttcccggctggccgcgcagcaacagatggaaggcctcctggcgccgcaccggcccaaggagcccgcgtggttcctggccaccgtcggcgtctcgcccgaccaccagggcaagggtctgggcagcgccgtcgtgctccccggagtggaggcggccgagcgcgccggggtgcccgccttcctggagacctccgcgccccgcaacctccccttctacgagcggctcggcttcaccgtcaccgccgacgtcgaggtgcccgaaggaccgcgcacctggtgcatgacccgcaagcccggtgcctga

SEQ ID NO: 9280 - DNA, 1857 bp, Artificial Sequence
  Synthetic Polynucloetide
atggccttaccagtgaccgccttgctcctgccgctggccttgctgctccacgccgccaggccggacgtggtcatgacacagagcccttctagcctgtctgccagcgtgggcgacagagtgaccatcacctgtaaagccagccagagcgtgtccagctacctgaactggtatcagcagaagcccggcaaggcccctaagctgctgatctatgctgccagcagcctggaaacaggcgtgcccagcagattttctggcagcggctctggcaccgacttcaccctgacaatatccagcctccagcctgaggacttcgccacctactactgtcagcagagctacagcaccccttggacctttggccagggcaccaaggtggaaatcaagagactcgaggacctgaagaacgtgttcccacctgaggtggccgtgttcgagcctagcgaggccgagatcagccacacccagaaagccaccctcgtgtgcctggctaccggcttctaccccgaccatgtggaactgtcttggtgggtcaacggcaaagaggtgcacagcggcgtgtgtaccgacccccagccactgaaagaacagcccgccctgaacgacagccggtactgcctgagcagcagactgagagtgtccgccaccttctggcagaacccccggaaccacttcagatgccaggtgcagttctacggcctgagcgagaacgacgagtggacccaggacagagccaagcccgtgacccagatcgtgtctgccgaagcctggggcagagccgattgcggctttaccagcgagagctaccagcagggcgtgctgagcgccaccatcctgtacgagatcctgctgggcaaggccaccctgtacgccgtgctggtgtctgccctggtgctgatggctatggtcaagcggaaggacagccggggaagggccaagcgatctggatctggagcaacaaacttctcactactcaaacaagcaggtgacgtggaggagaatcccgggcctactagtatggactggatttggcgcatccttttccttgtcggcgctgctaccggcgcgcattccttcgaagaagttcagctggttgaatctggcggcggactcgttagacctggcggatctctgagactgagctgtgccgccagcggcttcaccttcgatgattacggcatgagctgggtccgacaggcccctggaaaaggactggaatgggtgtccggcatcagctggaatagcggctctatcggctacgccgacagcgtgaagggcagattcaccatcagccgggacaacgccaagaacagcctgtacctccagatgaactccctgagagccgaggacacagccctgtactactgtgccaagcggggcaacagcaacagcttcgattattggggccagggaaccaccgtgaccgtgtcatctacgcgtatccagaaccctgatcctgccgtgtaccagctgcgggatagcaagagcagcgacaagagcgtgtgtctgttcaccgacttcgacagccagaccaacgtgtcccagagcaaggactccgacgtgtacatcaccgataagtgcgtgctggacatgcggagcatggacttcaagagcaactccgccgtggcctggtccaacaagtccgatttcgcctgcgccaacgccttcaacaacagcattatccccgaggacacattcttcccaagccccgagagcagctgcgacgtgaagctggtggaaaagagcttcgagacagacaccaacctgaacttccagaacctgagcgtgatcggcttcagaatcctgctgctgaaagtggccggctttaacctgctgatgaccctgcggctgtggtccagc

SEQ ID NO: 9281 - DNA, 2532 bp, Artificial Sequence
  Synthetic Polynucloetide
atggccttaccagtgaccgccttgctcctgccgctggccttgctgctccacgccgccaggccggacgtggtcatgacacagagcccttctagcctgtctgccagcgtgggcgacagagtgaccatcacctgtaaagccagccagagcgtgtccagctacctgaactggtatcagcagaagcccggcaaggcccctaagctgctgatctatgctgccagcagcctggaaacaggcgtgcccagcagattttctggcagcggctctggcaccgacttcaccctgacaatatccagcctccagcctgaggacttcgccacctactactgtcagcagagctacagcaccccttggacctttggccagggcaccaaggtggaaatcaagagactcgaggacctgaagaacgtgttcccacctgaggtggccgtgttcgagcctagcgaggccgagatcagccacacccagaaagccaccctcgtgtgcctggctaccggcttctaccccgaccatgtggaactgtcttggtgggtcaacggcaaagaggtgcacagcggcgtgtgtaccgacccccagccactgaaagaacagcccgccctgaacgacagccggtactgcctgagcagcagactgagagtgtccgccaccttctggcagaacccccggaaccacttcagatgccaggtgcagttctacggcctgagcgagaacgacgagtggacccaggacagagccaagcccgtgacccagatcgtgtctgccgaagcctggggcagagccgattgcggctttaccagcgagagctaccagcagggcgtgctgagcgccaccatcctgtacgagatcctgctgggcaaggccaccctgtacgccgtgctggtgtctgccctggtgctgatggctatggtcaagcggaaggacagccggggaagggccaagcgatctggatctggagcaacaaacttctcactactcaaacaagcaggtgacgtggaggagaatcccgggcctactagtatggactggatttggcgcatccttttccttgtcggcgctgctaccggcgcgcattccttcgaagaagttcagctggttgaatctggcggcggactcgttagacctggcggatctctgagactgagctgtgccgccagcggcttcaccttcgatgattacggcatgagctgggtccgacaggcccctggaaaaggactggaatgggtgtccggcatcagctggaatagcggctctatcggctacgccgacagcgtgaagggcagattcaccatcagccgggacaacgccaagaacagcctgtacctccagatgaactccctgagagccgaggacacagccctgtactactgtgccaagcggggcaacagcaacagcttcgattattggggccagggaaccaccgtgaccgtgtcatctacgcgtatccagaaccctgatcctgccgtgtaccagctgcgggatagcaagagcagcgacaagagcgtgtgtctgttcaccgacttcgacagccagaccaacgtgtcccagagcaaggactccgacgtgtacatcaccgataagtgcgtgctggacatgcggagcatggacttcaagagcaactccgccgtggcctggtccaacaagtccgatttcgcctgcgccaacgccttcaacaacagcattatccccgaggacacattcttcccaagccccgagagcagctgcgacgtgaagctggtggaaaagagcttcgagacagacaccaacctgaacttccagaacctgagcgtgatcggcttcagaatcctgctgctgaaagtggccggctttaacctgctgatgaccctgcggctgtggtccagccgcgccaagagaagcggatctggcgtgaagcagaccctgaatttcgacctgctgaagctggctggcgacgtggaatccaacccaggcccttctagaggcgggatccacaccatggctacctacgaggtgctgtgcgaggtggcaagaaagctgggcaccgacgacagagaagtggtgctgttcctgctgaacgtgttcatccctcagcctacactggcccagctgatcggtgcactgagagccctgaaagaggaaggccggctgacctttcctctgctggccgaatgcctgttcagagccggaagaagggatctgctgcgggacctgctgcatctggaccccagatttctggaaagacacctggccggcaccatgagctacttcagcccttaccagctgaccgtgctgcacgttgacggcgaactgtgcgccagagatattcggagcctgatcttcctgagcaaggacaccatcggcagccggtctacccctcagacatttctgcactgggtgtactgcatggaaaacctggacctgctcggccccacagatgtggatgccctgatgtccatgctgagaagcctgagcagagtggacctccagagacaggtgcagacactgatgggactgcacctgagcggacctagccacagccagcactacagacacacccct

SEQ ID NO: 9282 - DNA, 1869 bp, Artificial Sequence
  Synthetic Polynucloetide
atggccttaccagtgaccgccttgctcctgccgctggccttgctgctccacgccgccaggccggacgtggtcatgacacagagcccttctagcctgtctgccagcgtgggcgacagagtgaccatcacctgtaaagccagccagagcgtgtccagctacctgaactggtatcagcagaagcccggcaaggcccctaagctgctgatctatgctgccagcagcctggaaacaggcgtgcccagcagattttctggcagcggctctggcaccgacttcaccctgacaatatccagcctccagcctgaggacttcgccacctactactgtcagcagagctacagcaccccttggacctttggccagggcaccaaggtggaaatcaagagactcgagatccagaaccctgatcctgccgtgtaccagctgcgggatagcaagagcagcgacaagagcgtgtgtctgttcaccgacttcgacagccagaccaacgtgtcccagagcaaggactccgacgtgtacatcaccgataagtgcgtgctggacatgcggagcatggacttcaagagcaactccgccgtggcctggtccaacaagtccgatttcgcctgcgccaacgccttcaacaacagcattatccccgaggacacattcttcccaagccccgagagcagctgcgacgtgaagctggtggaaaagagcttcgagacagacaccaacctgaacttccagaacctgagcgtgatcggcttcagaatcctgctgctgaaagtggccggctttaacctgctgatgaccctgcggctgtggtccagccgcgccaagagaagcggatctggcgtgaagcagaccctgaatttcgacctgctgaagctggctggcgacgtggaatccaacccaggccctactagtatggactggatttggcgcatccttttccttgtcggcgctgctaccggcgcgcattccttcgaagaagttcagctggttgaatctggcggcggactcgttagacctggcggatctctgagactgagctgtgccgccagcggcttcaccttcgatgattacggcatgagctgggtccgacaggcccctggaaaaggactggaatgggtgtccggcatcagctggaatagcggctctatcggctacgccgacagcgtgaagggcagattcaccatcagccgggacaacgccaagaacagcctgtacctccagatgaactccctgagagccgaggacacagccctgtactactgtgccaagcggggcaacagcaacagcttcgattattggggccagggaaccaccgtgaccgtgtcatctacgcgtgaggacctgaagaacgtgttcccacctgaggtggccgtgttcgagcctagcgaggccgagatcagccacacccagaaagccaccctcgtgtgcctggctaccggcttctaccccgaccatgtggaactgtcttggtgggtcaacggcaaagaggtgcacagcggcgtgtgtaccgacccccagccactgaaagaacagcccgccctgaacgacagccggtactgcctgagcagcagactgagagtgtccgccaccttctggcagaacccccggaaccacttcagatgccaggtgcagttctacggcctgagcgagaacgacgagtggacccaggacagagccaagcccgtgacccagatcgtgtctgccgaagcctggggcagagccgattgcggctttaccagcgagagctaccagcagggcgtgctgagcgccaccatcctgtacgagatcctgctgggcaaggccaccctgtacgccgtgctggtgtctgccctggtgctgatggctatggtcaagcggaaggacagccgggga

SEQ ID NO: 9283 - DNA, 2535 bp, Artificial Sequence
  Synthetic Polynucloetide
atggccttaccagtgaccgccttgctcctgccgctggccttgctgctccacgccgccaggccggacgtggtcatgacacagagcccttctagcctgtctgccagcgtgggcgacagagtgaccatcacctgtaaagccagccagagcgtgtccagctacctgaactggtatcagcagaagcccggcaaggcccctaagctgctgatctatgctgccagcagcctggaaacaggcgtgcccagcagattttctggcagcggctctggcaccgacttcaccctgacaatatccagcctccagcctgaggacttcgccacctactactgtcagcagagctacagcaccccttggacctttggccagggcaccaaggtggaaatcaagagactcgagatccagaaccctgatcctgccgtgtaccagctgcgggatagcaagagcagcgacaagagcgtgtgtctgttcaccgacttcgacagccagaccaacgtgtcccagagcaaggactccgacgtgtacatcaccgataagtgcgtgctggacatgcggagcatggacttcaagagcaactccgccgtggcctggtccaacaagtccgatttcgcctgcgccaacgccttcaacaacagcattatccccgaggacacattcttcccaagccccgagagcagctgcgacgtgaagctggtggaaaagagcttcgagacagacaccaacctgaacttccagaacctgagcgtgatcggcttcagaatcctgctgctgaaagtggccggctttaacctgctgatgaccctgcggctgtggtccagccgcgccaagagaagcggatctggcgtgaagcagaccctgaatttcgacctgctgaagctggctggcgacgtggaatccaacccaggccctactagtatggactggatttggcgcatccttttccttgtcggcgctgctaccggcgcgcattccttcgaagaagttcagctggttgaatctggcggcggactcgttagacctggcggatctctgagactgagctgtgccgccagcggcttcaccttcgatgattacggcatgagctgggtccgacaggcccctggaaaaggactggaatgggtgtccggcatcagctggaatagcggctctatcggctacgccgacagcgtgaagggcagattcaccatcagccgggacaacgccaagaacagcctgtacctccagatgaactccctgagagccgaggacacagccctgtactactgtgccaagcggggcaacagcaacagcttcgattattggggccagggaaccaccgtgaccgtgtcatctacgcgtgaggacctgaagaacgtgttcccacctgaggtggccgtgttcgagcctagcgaggccgagatcagccacacccagaaagccaccctcgtgtgcctggctaccggcttctaccccgaccatgtggaactgtcttggtgggtcaacggcaaagaggtgcacagcggcgtgtgtaccgacccccagccactgaaagaacagcccgccctgaacgacagccggtactgcctgagcagcagactgagagtgtccgccaccttctggcagaacccccggaaccacttcagatgccaggtgcagttctacggcctgagcgagaacgacgagtggacccaggacagagccaagcccgtgacccagatcgtgtctgccgaagcctggggcagagccgattgcggctttaccagcgagagctaccagcagggcgtgctgagcgccaccatcctgtacgagatcctgctgggcaaggccaccctgtacgccgtgctggtgtctgccctggtgctgatggctatggtcaagcggaaggacagccggggaagggccaagcgatctggatctggagcaacaaacttctcactactcaaacaagcaggtgacgtggaggagaatcccgggccttctagaggcgggatccacaccatggctacctacgaggtgctgtgcgaggtggcaagaaagctgggcaccgacgacagagaagtggtgctgttcctgctgaacgtgttcatccctcagcctacactggcccagctgatcggtgcactgagagccctgaaagaggaaggccggctgacctttcctctgctggccgaatgcctgttcagagccggaagaagggatctgctgcgggacctgctgcatctggaccccagatttctggaaagacacctggccggcaccatgagctacttcagcccttaccagctgaccgtgctgcacgttgacggcgaactgtgcgccagagatattcggagcctgatcttcctgagcaaggacaccatcggcagccggtctacccctcagacatttctgcactgggtgtactgcatggaaaacctggacctgctcggccccacagatgtggatgccctgatgtccatgctgagaagcctgagcagagtggacctccagagacaggtgcagacactgatgggactgcacctgagcggacctagccacagccagcactacagacacacccct

SEQ ID NO: 9284 - DNA, 2694 bp, Artificial Sequence
  Synthetic Polynucloetide
atggccttaccagtgaccgccttgctcctgccgctggccttgctgctccacgccgccaggccgctcgaggggaaaccaattcccaaccctcttctgggactggattcaaccggcagcggcgaggacctgaagaacgtgttcccacctgaggtggccgtgttcgagcctagcaaggccgagatcgcccacacccagaaagccaccctcgtgtgcctggctaccggcttctaccccgaccatgtggaactgtcttggtgggtcaacggcaaagaggtgcacagcggcgtgtgtaccgacccccagccactgaaagaacagcccgccctgaacgacagccggtactgcctgagcagcagactgagagtgtccgccaccttctggcagaacccccggaaccacttcagatgccaggtgcagttctacggcctgagcgagaacgacgagtggacccaggacagagccaagcccgtgacccagatcgtgtctgccgaagcctggggcagagccgattgcggcatcaccagcgccagctaccaccagggcgtgctgagcgccaccatcctgtacgagatcctgctgggcaaggccaccctgtacgccgtgctggtgtctgccctggtgctgatggctatggtcaagcggaaggacagccggggaagggccaagcgatctggatctggagcaacaaacttctcactactcaaacaagcaggtgacgtggaggagaatcccgggcctactagcatggccttaccagtgaccgccttgctcctgccgctggccttgctgctccacgccgccaggccggacgtggtcatgacacagagcccttctagcctgtctgccagcgtgggcgacagagtgaccatcacctgtaaagccagccagagcgtgtccagctacctgaactggtatcagcagaagcccggcaaggcccctaagctgctgatctatgctgccagcagcctggaaacaggcgtgcccagcagattttctggcagcggctctggcaccgacttcaccctgacaatatccagcctccagcctgaggacttcgccacctactactgtcagcagagctacagcaccccttggacctttggccagggcaccaaggtggaaatcaagagaggcggaggcggaagtggaggcggaggatctggcggcggaggctctgaagttcagctggttgaatctggcggcggactcgttagacctggcggatctctgagactgagctgtgccgccagcggcttcaccttcgatgattacggcatgagctgggtccgacaggcccctggaaaaggactggaatgggtgtccggcatcagctggaatagcggctctatcggctacgccgacagcgtgaagggcagattcaccatcagccgggacaacgccaagaacagcctgtacctccagatgaactccctgagagccgaggacacagccctgtactactgtgccaagcggggcaacagcaacagcttcgattattggggccagggaaccaccgtgaccgtgtcatctacgcgtgagcagaaactgatctcggaagaggatgggagcggcatccagaaccctgatcctgccgtgtaccagctgcgggatagcaagagcagcgacaagagcgtgtgtctgttcaccgacttcgacagccagaccaacgtgtcccagagcaaggactccgacgtgtacatcaccgataagtgcgtgctggacatgcggagcatggacttcaagagcaactccgccgtggcctggtccaacaagtccgatttcgcctgcgccaacgccttcaacaacagcattatccccgaggacacattcttcccaagcagcgacgtgccctgcgacgtgaagctggtggaaaagagcttcgagacagacaccaacctgaacttccagaacctgagcgtgatcggcttcagaatcctgctgctgaaagtggccggctttaacctgctgatgaccctgcggctgtggtccagccgcgccaagagaagcggatctggcgtgaagcagaccctgaatttcgacctgctgaagctggctggcgacgtggaatccaacccaggcccttctagaggccatatgaccgagtacaagcccacggtgcgcctcgccacccgcgacgacgtccccagggccgtacgcaccctcgccgccgcgttcgccgactaccccgccacgcgccacaccgtcgatccggaccgccacatcgagcgggtcaccgagctgcaagaactcttcctcacgcgcgtcgggctcgacatcggcaaggtgtgggtcgcggacgacggcgccgcggtggcggtctggaccacgccggagagcgtcgaagcgggggcggtgttcgccgagatcggcccgcgcatggccgagttgagcggttcccggctggccgcgcagcaacagatggaaggcctcctggcgccgcaccggcccaaggagcccgcgtggttcctggccaccgtcggcgtctcgcccgaccaccagggcaagggtctgggcagcgccgtcgtgctccccggagtggaggcggccgagcgcgccggggtgcccgccttcctggagacctccgcgccccgcaacctccccttctacgagcggctcggcttcaccgtcaccgccgacgtcgaggtgcccgaaggaccgcgcacctggtgcatgacccgcaagcccggtgcctga

SEQ ID NO: 9285 - DNA, 2697 bp, Artificial Sequence
  Synthetic Polynucloetide
atggccttaccagtgaccgccttgctcctgccgctggccttgctgctccacgccgccaggccgctcgagcagaaactgatctcggaagaggatctgggctccggcgatcgccctgatcctgccgtgtaccagctgcgggatagcaagagcagcgacaagagcgtgtgtctgttcaccgacttcgacagccagaccaacgtgtcccagagcaaggactccgacgtgtacatcaccgataagtgcgtgctggacatgcggagcatggacttcaagagcaactccgccgtggcctggtccaacaagtccgatttcgcctgcgccaacgccttcaacaacagcattatccccgaggacacattcttcccaagccccgagagcagctgcgacgtgaagctggtggaaaagagcttcgagacagacaccaacctgaacttccagaacctgagcgtgatcggcttcagaatcctgctgctgaaagtggccggctttaacctgctgatgaccctgcggctgtggtccagctctagtcgcgccaagagaagcggatctggcgtgaagcagaccctgaatttcgacctgctgaagctggctggcgacgtggaatccaacccaggccccactagcatggccttaccagtgaccgccttgctcctgccgctggccttgctgctccacgccgccaggccggacgtggtcatgacacagagcccttctagcctgtctgccagcgtgggcgacagagtgaccatcacctgtaaagccagccagagcgtgtccagctacctgaactggtatcagcagaagcccggcaaggcccctaagctgctgatctatgctgccagcagcctggaaacaggcgtgcccagcagattttctggcagcggctctggcaccgacttcaccctgacaatatccagcctccagcctgaggacttcgccacctactactgtcagcagagctacagcaccccttggacctttggccagggcaccaaggtggaaatcaagagaggcggaggcggaagtggaggcggaggatctggcggcggaggctctgaagttcagctggttgaatctggcggcggactcgttagacctggcggatctctgagactgagctgtgccgccagcggcttcaccttcgatgattacggcatgagctgggtccgacaggcccctggaaaaggactggaatgggtgtccggcatcagctggaatagcggctctatcggctacgccgacagcgtgaagggcagattcaccatcagccgggacaacgccaagaacagcctgtacctccagatgaactccctgagagccgaggacacagccctgtactactgtgccaagcggggcaacagcaacagcttcgattattggggccagggaaccaccgtgaccgtgtcatctacgcgtgggaaaccaattcccaaccctcttctgggactggattcaaccggcagcggcgaggacctgaagaacgtgttcccacctgaggtggccgtgttcgagcctagcgaggccgagatcagccacacccagaaagccaccctcgtgtgcctggctaccggcttctaccccgaccatgtggaactgtcttggtgggtcaacggcaaagaggtgcacagcggcgtgtgtaccgacccccagccactgaaagaacagcccgccctgaacgacagccggtactgcctgagcagcagactgagagtgtccgccaccttctggcagaacccccggaaccacttcagatgccaggtgcagttctacggcctgagcgagaacgacgagtggacccaggacagagccaagcccgtgacccagatcgtgtctgccgaagcctggggcagagccgattgcggctttaccagcgagagctaccagcagggcgtgctgagcgccaccatcctgtacgagatcctgctgggcaaggccaccctgtacgccgtgctggtgtctgccctggtgctgatggctatggtcaagcggaaggacagccggggaagggccaagcgatctggatctggagcaacaaacttctcactactcaaacaagcaggtgacgtggaggagaatcccgggccttctagaggccatatgaccgagtacaagcccacggtgcgcctcgccacccgcgacgacgtccccagggccgtacgcaccctcgccgccgcgttcgccgactaccccgccacgcgccacaccgtcgatccggaccgccacatcgagcgggtcaccgagctgcaagaactcttcctcacgcgcgtcgggctcgacatcggcaaggtgtgggtcgcggacgacggcgccgcggtggcggtctggaccacgccggagagcgtcgaagcgggggcggtgttcgccgagatcggcccgcgcatggccgagttgagcggttcccggctggccgcgcagcaacagatggaaggcctcctggcgccgcaccggcccaaggagcccgcgtggttcctggccaccgtcggcgtctcgcccgaccaccagggcaagggtctgggcagcgccgtcgtgctccccggagtggaggcggccgagcgcgccggggtgcccgccttcctggagacctccgcgccccgcaacctccccttctacgagcggctcggcttcaccgtcaccgccgacgtcgaggtgcccgaaggaccgcgcacctggtgcatgacccgcaagcccggtgcctga

SEQ ID NO: 9286 - DNA, 2559 bp, Artificial Sequence
  Synthetic Polynucloetide
atggccttaccagtgaccgccttgctcctgccgctggccttgctgctccacgccgccaggccggacgtggtcatgacacagagcccttctagcctgtctgccagcgtgggcgacagagtgaccatcacctgtaaagccagccagagcgtgtccagctacctgaactggtatcagcagaagcccggcaaggcccctaagctgctgatctatgctgccagcagcctggaaacaggcgtgcccagcagattttctggcagcggctctggcaccgacttcaccctgacaatatccagcctccagcctgaggacttcgccacctactactgtcagcagagctacagcaccccttggacctttggccagggcaccaaggtggaaatcaagagactcgaggacctgaagaacgtgttcccacctgaggtggccgtgttcgagcctagcgaggccgagatcagccacacccagaaagccaccctcgtgtgcctggctaccggcttctaccccgaccatgtggaactgtcttggtgggtcaacggcaaagaggtgcacagcggcgtgtctaccgacccccagccactgaaagaacagcccgccctgaacgacagccggtactgcctgagcagcagactgagagtgtccgccaccttctggcagaacccccggaaccacttcagatgccaggtgcagttctacggcctgagcgagaacgacgagtggacccaggacagagccaagcccgtgacccagatcgtgtctgccgaagcctggggcagagccgattgcggctttaccagcgagagctaccagcagggcgtgctgagcgccaccatcctgtacgagatcctgctgggcaaggccaccctgtacgccgtgctggtgtctgccctggtgctgatggctatggtcaagcggaaggacagccggggaagggccaagcgatctggatctggagcaacaaacttctcactactcaaacaagcaggtgacgtggaggagaatcccgggcctactagtatggactggatttggcgcatccttttccttgtcggcgctgctaccggcgcgcattccttcgaagaagttcagctggttgaatctggcggcggactcgttagacctggcggatctctgagactgagctgtgccgccagcggcttcaccttcgatgattacggcatgagctgggtccgacaggcccctggaaaaggactggaatgggtgtccggcatcagctggaatagcggctctatcggctacgccgacagcgtgaagggcagattcaccatcagccgggacaacgccaagaacagcctgtacctccagatgaactccctgagagccgaggacacagccctgtactactgtgccaagcggggcaacagcaacagcttcgattattggggccagggaaccaccgtgaccgtgtcatctacgcgtatccagaaccctgatcctgccgtgtaccagctgcgggatagcaagagcagcgacaagagcgtgtgtctgttcaccgacttcgacagccagaccaacgtgtcccagagcaaggactccgacgtgtacatcaccgataagaccgtgctggacatgcggagcatggacttcaagagcaactccgccgtggcctggtccaacaagtccgatttcgcctgcgccaacgccttcaacaacagcattatccccgaggacacattcttcccaagccccgagagcagctgcgacgtgaagctggtggaaaagagcttcgagacagacaccaacctgaacttccagaacctgagcgtgatcggcttcagaatcctgctgctgaaagtggccggctttaacctgctgatgaccctgcggctgtggtccagccgcgccaagagaagcggatctggcgtgaagcagaccctgaatttcgacctgctgaagctggctggcgacgtggaatccaacccaggcccttctagaggccatatgaccgagtacaagcccacggtgcgcctcgccacccgcgacgacgtccccagggccgtacgcaccctcgccgccgcgttcgccgactaccccgccacgcgccacaccgtcgatccggaccgccacatcgagcgggtcaccgagctgcaagaactcttcctcacgcgcgtcgggctcgacatcggcaaggtgtgggtcgcggacgacggcgccgcggtggcggtctggaccacgccggagagcgtcgaagcgggggcggtgttcgccgagatcggcccgcgcatggccgagttgagcggttcccggctggccgcgcagcaacagatggaaggcctcctggcgccgcaccggcccaaggagcccgcgtggttcctggccaccgtcggcgtctcgcccgaccaccagggcaagggtctgggcagcgccgtcgtgctccccggagtggaggcggccgagcgcgccggggtgcccgccttcctggagacctccgcgccccgcaacctccccttctacgagcggctcggcttcaccgtcaccgccgacgtcgaggtgcccgaaggaccgcgcacctggtgcatgacccgcaagcccggtgcctga

SEQ ID NO: 9287 - DNA, 2805 bp, Artificial Sequence
  Synthetic Polynucloetide
atggccttaccagtgaccgccttgctcctgccgctggccttgctgctccacgccgccaggccggacgtggtcatgacacagagcccttctagcctgtctgccagcgtgggcgacagagtgaccatcacctgtaaagccagccagagcgtgtccagctacctgaactggtatcagcagaagcccggcaaggcccctaagctgctgatctatgctgccagcagcctggaaacaggcgtgcccagcagattttctggcagcggctctggcaccgacttcaccctgacaatatccagcctccagcctgaggacttcgccacctactactgtcagcagagctacagcaccccttggacctttggccagggcaccaaggtggaaatcaagagactcgaggacctgaagaacgtgttcccacctgaggtggccgtgttcgagcctagcgaggccgagatcagccacacccagaaagccaccctcgtgtgcctggctaccggcttctaccccgaccatgtggaactgtcttggtgggtcaacggcaaagaggtgcacagcggcgtgtctaccgacccccagccactgaaagaacagcccgccctgaacgacagccggtactgcctgagcagcagactgagagtgtccgccaccttctggcagaacccccggaaccacttcagatgccaggtgcagttctacggcctgagcgagaacgacgagtggacccaggacagagccaagcccgtgacccagatcgtgtctgccgaagcctggggcagagccgattgcggctttaccagcgagagctaccagcagggcgtgctgagcgccaccatcctgtacgagatcctgctgggcaaggccaccctgtacgccgtgctggtgtctgccctggtgctgatggctatggtcaagcggaaggacagccggggaagggccaagcgatctggatctggagcaacaaacttctcactactcaaacaagcaggtgacgtggaggagaatcccgggcctactagtatggactggatttggcgcatccttttccttgtcggcgctgctaccggcgcgcattccttcgaagaagttcagctggttgaatctggcggcggactcgttagacctggcggatctctgagactgagctgtgccgccagcggcttcaccttcgatgattacggcatgagctgggtccgacaggcccctggaaaaggactggaatgggtgtccggcatcagctggaatagcggctctatcggctacgccgacagcgtgaagggcagattcaccatcagccgggacaacgccaagaacagcctgtacctccagatgaactccctgagagccgaggacacagccctgtactactgtgccaagcggggcaacagcaacagcttcgattattggggccagggaaccaccgtgaccgtgtcatctacgcgtgagcagaaactgatctcggaagaggatgggagcggcaccccattcccttctctggcccctcccatcatgctgctggtggacggcaagcagcagatggtggtcgtgtgcctggtgctggatgtggccccacctggactggacagccccatctggtttagcgccggcaatggctctgccctggacgcctttacctacggcccaagccctgccaccgatggcacctggacaaatctggcccacctgagcctgcccagcgaggaactggcttcttgggagcctctcgtgtgccacacaggacctggcgctgagggacacagcagatccacccagcctatgcacctgtctggcgaggccagcaccgccagaacctgtcctcaggaacctctgagaggcacccctggcggagcactgtggctgggagtgctgagactgctgctgttcaagctgctgctgtttgacctgctgctgacctgctcctgtctgtgcgatcctgccggccctctgccttctcctgccaccaccacaagactgagagccctgggcagccacagactgcaccctgccacagagacaggcggcagagaggccacaagcagccctagaccccagcccagagacagaagatggggcgataccccccctggcagaaagcctggatctccagtccgcgccaagagaagcggatctggcgtgaagcagaccctgaatttcgacctgctgaagctggctggcgacgtggaatccaacccaggcccttctagaggccatatgaccgagtacaagcccacggtgcgcctcgccacccgcgacgacgtccccagggccgtacgcaccctcgccgccgcgttcgccgactaccccgccacgcgccacaccgtcgatccggaccgccacatcgagcgggtcaccgagctgcaagaactcttcctcacgcgcgtcgggctcgacatcggcaaggtgtgggtcgcggacgacggcgccgcggtggcggtctggaccacgccggagagcgtcgaagcgggggcggtgttcgccgagatcggcccgcgcatggccgagttgagcggttcccggctggccgcgcagcaacagatggaaggcctcctggcgccgcaccggcccaaggagcccgcgtggttcctggccaccgtcggcgtctcgcccgaccaccagggcaagggtctgggcagcgccgtcgtgctccccggagtggaggcggccgagcgcgccggggtgcccgccttcctggagacctccgcgccccgcaacctccccttctacgagcggctcggcttcaccgtcaccgccgacgtcgaggtgcccgaaggaccgcgcacctggtgcatgacccgcaagcccggtgcctga

SEQ ID NO: 9288 - DNA, 2859 bp, Artificial Sequence
  Synthetic Polynucloetide
atggccttaccagtgaccgccttgctcctgccgctggccttgctgctccacgccgccaggccgctcgaggacctgaagaacgtgttcccacctgaggtggccgtgttcgagcctagcgaggccgagatcagccacacccagaaagccaccctcgtgtgcctggctaccggcttctaccccgaccatgtggaactgtcttggtgggtcaacggcaaagaggtgcacagcggcgtgtctaccgacccccagccactgaaagaacagcccgccctgaacgacagccggtactgcctgagcagcagactgagagtgtccgccaccttctggcagaacccccggaaccacttcagatgccaggtgcagttctacggcctgagcgagaacgacgagtggacccaggacagagccaagcccgtgacccagatcgtgtctgccgaagcctggggcagagccgattgcggctttaccagcgagagctaccagcagggcgtgctgagcgccaccatcctgtacgagatcctgctgggcaaggccaccctgtacgccgtgctggtgtctgccctggtgctgatggctatggtcaagcggaaggacagccggggaagggccaagcgatctggatctggagcaacaaacttctcactactcaaacaagcaggtgacgtggaggagaatcccgggcctactagcatggccttaccagtgaccgccttgctcctgccgctggccttgctgctccacgccgccaggccggacgtggtcatgacacagagcccttctagcctgtctgccagcgtgggcgacagagtgaccatcacctgtaaagccagccagagcgtgtccagctacctgaactggtatcagcagaagcccggcaaggcccctaagctgctgatctatgctgccagcagcctggaaacaggcgtgcccagcagattttctggcagcggctctggcaccgacttcaccctgacaatatccagcctccagcctgaggacttcgccacctactactgtcagcagagctacagcaccccttggacctttggccagggcaccaaggtggaaatcaagagaggcggaggcggaagtggaggcggaggatctggcggcggaggctctgaagttcagctggttgaatctggcggcggactcgttagacctggcggatctctgagactgagctgtgccgccagcggcttcaccttcgatgattacggcatgagctgggtccgacaggcccctggaaaaggactggaatgggtgtccggcatcagctggaatagcggctctatcggctacgccgacagcgtgaagggcagattcaccatcagccgggacaacgccaagaacagcctgtacctccagatgaactccctgagagccgaggacacagccctgtactactgtgccaagcggggcaacagcaacagcttcgattattggggccagggaaccaccgtgaccgtgtcatctacgcgtgagcagaaactgatctcggaagaggatctggggagcggcaccccattcccttctctggcccctcccatcatgctgctggtggacggcaagcagcagatggtggtcgtgtgcctggtgctggatgtggccccacctggactggacagccccatctggtttagcgccggcaatggctctgccctggacgcctttacctacggcccaagccctgccaccgatggcacctggacaaatctggcccacctgagcctgcccagcgaggaactggcttcttgggagcctctcgtgtgccacacaggacctggcgctgagggacacagcagatccacccagcctatgcacctgtctggcgaggccagcaccgccagaacctgtcctcaggaacctctgagaggcacccctggcggagcactgtggctgggagtgctgagactgctgctgttcaagctgctgctgtttgacctgctgctgacctgctcctgtctgtgcgatcctgccggccctctgccttctcctgccaccaccacaagactgagagccctgggcagccacagactgcaccctgccacagagacaggcggcagagaggccacaagcagccctagaccccagcccagagacagaagatggggcgataccccccctggcagaaagcctggatctccagtccgcgccaagagaagcggatctggcgtgaagcagaccctgaatttcgacctgctgaagctggctggcgacgtggaatccaacccaggcccttctagatctagaggccatatgaccgagtacaagcccacggtgcgcctcgccacccgcgacgacgtccccagggccgtacgcaccctcgccgccgcgttcgccgactaccccgccacgcgccacaccgtcgatccggaccgccacatcgagcgggtcaccgagctgcaagaactcttcctcacgcgcgtcgggctcgacatcggcaaggtgtgggtcgcggacgacggcgccgcggtggcggtctggaccacgccggagagcgtcgaagcgggggcggtgttcgccgagatcggcccgcgcatggccgagttgagcggttcccggctggccgcgcagcaacagatggaaggcctcctggcgccgcaccggcccaaggagcccgcgtggttcctggccaccgtcggcgtctcgcccgaccaccagggcaagggtctgggcagcgccgtcgtgctccccggagtggaggcggccgagcgcgccggggtgcccgccttcctggagacctccgcgccccgcaacctccccttctacgagcggctcggcttcaccgtcaccgccgacgtcgaggtgcccgaaggaccgcgcacctggtgcatgacccgcaagcccggtgcctga

SEQ ID NO: 9289 - DNA, 2670 bp, Artificial Sequence
  Synthetic Polynucloetide
atggccttaccagtgaccgccttgctcctgccgctggccttgctgctccacgccgccaggccggacgtggtcatgacacagagcccttctagcctgtctgccagcgtgggcgacagagtgaccatcacctgtaaagccagccagagcgtgtccagctacctgaactggtatcagcagaagcccggcaaggcccctaagctgctgatctatgctgccagcagcctggaaacaggcgtgcccagcagattttctggcagcggctctggcaccgacttcaccctgacaatatccagcctccagcctgaggacttcgccacctactactgtcagcagagctacagcaccccttggacctttggccagggcaccaaggtggaaatcaagagactcgaggggaaaccaattcccaaccctcttctgggactggattcaaccggcagcggcgacaagcagctggacgccgacgtgtcccccaagcctaccatcttcctgccctctatcgccgagacaaagctccagaaggccggcacctacctgtgcctgctggaaaagttcttcccagatgtgattaagatccactggcaggaaaagaagtccaacaccatcctgggcagccaggaaggcaacaccatgaagaccaacgacacctacatgaagttcagctggctgaccgtgcccgagaagtccctggacaaagaacacagatgcatcgtgcggcacgaaaacaacaagaacggcgtggaccaggaaatcatcttcccacccatcaagaccgatgtgattacaatggaccccaaggacaactgctccaaggacgccaacgataccctgctgctccagctgaccaacaccagcgcctactacatgtacttgttgctgctgctgaagtccgtggtgtacttcgccatcatcacatgctgcctgctgcggagaaccgccttctgctgcaacggcgagaagtctagggccaagcgatctggatctggagcaacaaacttctcactactcaaacaagcaggtgacgtggaggagaatcccgggcctactagtatggactggatttggcgcatccttttccttgtcggcgctgctaccggcgcgcattccttcgaagaagttcagctggttgaatctggcggcggactcgttagacctggcggatctctgagactgagctgtgccgccagcggcttcaccttcgatgattacggcatgagctgggtccgacaggcccctggaaaaggactggaatgggtgtccggcatcagctggaatagcggctctatcggctacgccgacagcgtgaagggcagattcaccatcagccgggacaacgccaagaacagcctgtacctccagatgaactccctgagagccgaggacacagccctgtactactgtgccaagcggggcaacagcaacagcttcgattattggggccagggaaccaccgtgaccgtgtcatctacgcgtgagcagaaactgatctcggaagaggatgggagcggcagccagcctcacaccaagcccagcgtgttcgtgatgaagaacggcaccaacgtggcctgcctcgtgaaagagttctaccccaaggacatcaggatcaacctggtgtccagcaagaagatcaccgagttcgaccccgccatcgtgatctcccccagcggcaagtacaacgccgtgaagctggggaagtacgaggacagcaacagcgtgacctgctccgtgcagcacgacaacaagaccgtgcacagcaccgactttgaagtgaaaaccgactccaccgaccacgtgaagcccaaagagacagagaacaccaagcagcccagcaagagctgccacaagcccaaggccatcgtgcacaccgagaaagtgaacatgatgagcctgaccgtgctgggcctgcggatgctgttcgccaaaaccgtggccgtgaacttcctgctgaccgccaagctgttcttcctccgcgccaagagaagcggatctggcgtgaagcagaccctgaatttcgacctgctgaagctggctggcgacgtggaatccaacccaggcccttctagaggccatatgaccgagtacaagcccacggtgcgcctcgccacccgcgacgacgtccccagggccgtacgcaccctcgccgccgcgttcgccgactaccccgccacgcgccacaccgtcgatccggaccgccacatcgagcgggtcaccgagctgcaagaactcttcctcacgcgcgtcgggctcgacatcggcaaggtgtgggtcgcggacgacggcgccgcggtggcggtctggaccacgccggagagcgtcgaagcgggggcggtgttcgccgagatcggcccgcgcatggccgagttgagcggttcccggctggccgcgcagcaacagatggaaggcctcctggcgccgcaccggcccaaggagcccgcgtggttcctggccaccgtcggcgtctcgcccgaccaccagggcaagggtctgggcagcgccgtcgtgctccccggagtggaggcggccgagcgcgccggggtgcccgccttcctggagacctccgcgccccgcaacctccccttctacgagcggctcggcttcaccgtcaccgccgacgtcgaggtgcccgaaggaccgcgcacctggtgcatgacccgcaagcccggtgcctga

SEQ ID NO: 9290 - DNA, 1881 bp, Artificial Sequence
  Synthetic Polynucloetide
atggccttaccagtgaccgccttgctcctgccgctggccttgctgctccacgccgccaggccggacgtggtcatgacacagagcccttctagcctgtctgccagcgtgggcgacagagtgaccatcacctgtaaagccagccagagcgtgtccagctacctgaactggtatcagcagaagcccggcaaggcccctaagctgctgatctatgctgccagcagcctggaaacaggcgtgcccagcagattttctggcagcggctctggcaccgacttcaccctgacaatatccagcctccagcctgaggacttcgccacctactactgtcagcagagctacagcaccccttggacctttggccagggcaccaaggtggaaatcaagagactcgagagccagcctcacaccaagcccagcgtgttcgtgatgaagaacggcaccaacgtggcctgcctcgtgaaagagttctaccccaaggacatcaggatcaacctggtgtccagcaagaagatcaccgagttcgaccccgccatcgtgatctcccccagcggcaagtacaacgccgtgaagctggggaagtacgaggacagcaacagcgtgacctgctccgtgcagcacgacaacaagaccgtgcacagcaccgactttgaagtgaaaaccgactccaccgaccacgtgaagcccaaagagacagagaacaccaagcagcccagcaagagctgccacaagcccaaggccatcgtgcacaccgagaaagtgaacatgatgagcctgaccgtgctgggcctgcggatgctgttcgccaaaaccgtggccgtgaacttcctgctgaccgccaagctgttcttcctcagggccaagcgatctggatctggagcaacaaacttctcactactcaaacaagcaggtgacgtggaggagaatcccgggcctactagtatggactggatttggcgcatccttttccttgtcggcgctgctaccggcgcgcattccttcgaagaagttcagctggttgaatctggcggcggactcgttagacctggcggatctctgagactgagctgtgccgccagcggcttcaccttcgatgattacggcatgagctgggtccgacaggcccctggaaaaggactggaatgggtgtccggcatcagctggaatagcggctctatcggctacgccgacagcgtgaagggcagattcaccatcagccgggacaacgccaagaacagcctgtacctccagatgaactccctgagagccgaggacacagccctgtactactgtgccaagcggggcaacagcaacagcttcgattattggggccagggaaccaccgtgaccgtgtcatctacgcgtgacaagcagctggacgccgacgtgtcccccaagcctaccatcttcctgccctctatcgccgagacaaagctccagaaggccggcacctacctgtgcctgctggaaaagttcttcccagatgtgattaagatccactggcaggaaaagaagtccaacaccatcctgggcagccaggaaggcaacaccatgaagaccaacgacacctacatgaagttcagctggctgaccgtgcccgagaagtccctggacaaagaacacagatgcatcgtgcggcacgaaaacaacaagaacggcgtggaccaggaaatcatcttcccacccatcaagaccgatgtgattacaatggaccccaaggacaactgctccaaggacgccaacgataccctgctgctccagctgaccaacaccagcgcctactacatgtacttgttgctgctgctgaagtccgtggtgtacttcgccatcatcacatgctgcctgctgcggagaaccgccttctgctgcaacggcgagaagtct

SEQ ID NO: 9291 - DNA, 2715 bp, Artificial Sequence
  Synthetic Polynucloetide
atggccttaccagtgaccgccttgctcctgccgctggccttgctgctccacgccgccaggccgctcgaggggaaaccaattcccaaccctcttctgggactggattcaaccggcagcggcgacaagcagctggacgccgacgtgtcccccaagcctaccatcttcctgccctctatcgccgagacaaagctccagaaggccggcacctacctgtgcctgctggaaaagttcttcccagatgtgattaagatccactggcaggaaaagaagtccaacaccatcctgggcagccaggaaggcaacaccatgaagaccaacgacacctacatgaagttcagctggctgaccgtgcccgagaagtccctggacaaagaacacagatgcatcgtgcggcacgaaaacaacaagaacggcgtggaccaggaaatcatcttcccacccatcaagaccgatgtgattacaatggaccccaaggacaactgctccaaggacgccaacgataccctgctgctccagctgaccaacaccagcgcctactacatgtacttgttgctgctgctgaagtccgtggtgtacttcgccatcatcacatgctgcctgctgcggagaaccgccttctgctgcaacggcgagaagtctagggccaagcgatctggatctggagcaacaaacttctcactactcaaacaagcaggtgacgtggaggagaatcccgggcctactagcatggccttaccagtgaccgccttgctcctgccgctggccttgctgctccacgccgccaggccggacgtggtcatgacacagagcccttctagcctgtctgccagcgtgggcgacagagtgaccatcacctgtaaagccagccagagcgtgtccagctacctgaactggtatcagcagaagcccggcaaggcccctaagctgctgatctatgctgccagcagcctggaaacaggcgtgcccagcagattttctggcagcggctctggcaccgacttcaccctgacaatatccagcctccagcctgaggacttcgccacctactactgtcagcagagctacagcaccccttggacctttggccagggcaccaaggtggaaatcaagagaggcggaggcggaagtggaggcggaggatctggcggcggaggctctgaagttcagctggttgaatctggcggcggactcgttagacctggcggatctctgagactgagctgtgccgccagcggcttcaccttcgatgattacggcatgagctgggtccgacaggcccctggaaaaggactggaatgggtgtccggcatcagctggaatagcggctctatcggctacgccgacagcgtgaagggcagattcaccatcagccgggacaacgccaagaacagcctgtacctccagatgaactccctgagagccgaggacacagccctgtactactgtgccaagcggggcaacagcaacagcttcgattattggggccagggaaccaccgtgaccgtgtcatctacgcgtgagcagaaactgatctcggaagaggatgggagcggcagccagcctcacaccaagcccagcgtgttcgtgatgaagaacggcaccaacgtggcctgcctcgtgaaagagttctaccccaaggacatcaggatcaacctggtgtccagcaagaagatcaccgagttcgaccccgccatcgtgatctcccccagcggcaagtacaacgccgtgaagctggggaagtacgaggacagcaacagcgtgacctgctccgtgcagcacgacaacaagaccgtgcacagcaccgactttgaagtgaaaaccgactccaccgaccacgtgaagcccaaagagacagagaacaccaagcagcccagcaagagctgccacaagcccaaggccatcgtgcacaccgagaaagtgaacatgatgagcctgaccgtgctgggcctgcggatgctgttcgccaaaaccgtggccgtgaacttcctgctgaccgccaagctgttcttcctccgcgccaagagaagcggatctggcgtgaagcagaccctgaatttcgacctgctgaagctggctggcgacgtggaatccaacccaggcccttctagaggccatatgaccgagtacaagcccacggtgcgcctcgccacccgcgacgacgtccccagggccgtacgcaccctcgccgccgcgttcgccgactaccccgccacgcgccacaccgtcgatccggaccgccacatcgagcgggtcaccgagctgcaagaactcttcctcacgcgcgtcgggctcgacatcggcaaggtgtgggtcgcggacgacggcgccgcggtggcggtctggaccacgccggagagcgtcgaagcgggggcggtgttcgccgagatcggcccgcgcatggccgagttgagcggttcccggctggccgcgcagcaacagatggaaggcctcctggcgccgcaccggcccaaggagcccgcgtggttcctggccaccgtcggcgtctcgcccgaccaccagggcaagggtctgggcagcgccgtcgtgctccccggagtggaggcggccgagcgcgccggggtgcccgccttcctggagacctccgcgccccgcaacctccccttctacgagcggctcggcttcaccgtcaccgccgacgtcgaggtgcccgaaggaccgcgcacctggtgcatgacccgcaagcccggtgcctga

SEQ ID NO: 9292 - DNA, 3090 bp, Artificial Sequence
  Synthetic Polynucloetide
atggccttaccagtgaccgccttgctcctgccgctggccttgctgctccacgccgccaggccggacgtggtcatgacacagagcccttctagcctgtctgccagcgtgggcgacagagtgaccatcacctgtaaagccagccagagcgtgtccagctacctgaactggtatcagcagaagcccggcaaggcccctaagctgctgatctatgctgccagcagcctggaaacaggcgtgcccagcagattttctggcagcggctctggcaccgacttcaccctgacaatatccagcctccagcctgaggacttcgccacctactactgtcagcagagctacagcaccccttggacctttggccagggcaccaaggtggaaatcaagagaggacagcctaaggccaatcctaccgtgacactgttccctccaagcagcgaagaactccaggccaacaaggccacacttgtgtgcctgatctccgacttctaccctggggctgtgacagtggcttggaaggccgatggatctcctgtgaaagccggcgtggaaaccaccaagccatccaagcagagcaacaacaaatacgccgccagctcctacctgagcctgacacctgagcagtggaagtcccacagatcctacagctgccaagtgacccacgaaggcagcaccgtggaaaagacagtggcccctacagagtgcagcggatcccagagcttcggcctgctggaccccaagctgtgctacctgctggatggcatcctgttcatctacggcgtgatcctgaccgccctgttcctgagagtgaagttcagcagaagcgccgacgcccctgcctaccagcagggacagaaccaactgtacaacgagctgaacctgggcagacgggaagagtacgacgtgctggacaagcggagaggcagggaccctgagatgggcggaaagccccagcggagaaagaacccccaggaaggactgtataacgaactccagaaagacaagatggccgaagcctacagcgagatcggcatgaagggcgagcggagaagaggcaagggccacgatggcctgtaccagggcctgagcaccgccaccaaggacacctatgacgccctgcacatgcaggccctgcctccaagaagggccaagcgatctggatctggagcaacaaacttctcactactcaaacaagcaggtgacgtggaggagaatcccgggcctactagtatggactggatttggcgcatccttttccttgtcggcgctgctaccggcgcgcattccttcgaagaagttcagctggttgaatctggcggcggactcgttagacctggcggatctctgagactgagctgtgccgccagcggcttcaccttcgatgattacggcatgagctgggtccgacaggcccctggaaaaggactggaatgggtgtccggcatcagctggaatagcggctctatcggctacgccgacagcgtgaagggcagattcaccatcagccgggacaacgccaagaacagcctgtacctccagatgaactccctgagagccgaggacacagccctgtactactgtgccaagcggggcaacagcaacagcttcgattattggggccagggaaccaccgtgaccgtgtcatctgcctctacaaagggaccctccgtgtttcctctggctcccagcagcaagtctacaagcggaggaacagccgctctgggctgcctggtcaaggattactttcccgagcctgtgaccgtgtcctggaatagcggagcactgacaagcggcgtgcacacctttccagccgtgctgcaaagcagcggcctgtactctctgagcagcgtggtcacagtgcctagctctagcctgggcacccagacctacatctgcaatgtgaaccacaagcctagcaacaccaaggtggacaagagagtggaacccaagagctgtggtacccagagttttgggttgttggaccctaaattgtgctatctgttggacggaatcctgttcatttacggagtgatcctgaccgcattgttcctgcgggttaagttttccagatccgcagacgcacccgcttaccaacaagggcagaaccaactctacaatgaacttaatttggggcggagggaagagtacgacgttctggacaaaaggaggggacgagatcccgagatgggcggaaagcctcagcgaaggaagaatccgcaagaggggctttataacgaactccagaaagataaaatggcagaagcctatagtgagattgggatgaagggagaaaggaggaggggtaaaggtcacgatgggttgtaccaaggattgagcacagccactaaagatacctatgatgcgctccacatgcaggccctgccgccaagacgcgccaagagaagcggatctggcgtgaagcagaccctgaatttcgacctgctgaagctggctggcgacgtggaatccaacccaggcccttctagaggccatatgaccgagtacaagcccacggtgcgcctcgccacccgcgacgacgtccccagggccgtacgcaccctcgccgccgcgttcgccgactaccccgccacgcgccacaccgtcgatccggaccgccacatcgagcgggtcaccgagctgcaagaactcttcctcacgcgcgtcgggctcgacatcggcaaggtgtgggtcgcggacgacggcgccgcggtggcggtctggaccacgccggagagcgtcgaagcgggggcggtgttcgccgagatcggcccgcgcatggccgagttgagcggttcccggctggccgcgcagcaacagatggaaggcctcctggcgccgcaccggcccaaggagcccgcgtggttcctggccaccgtcggcgtctcgcccgaccaccagggcaagggtctgggcagcgccgtcgtgctccccggagtggaggcggccgagcgcgccggggtgcccgccttcctggagacctccgcgccccgcaacctccccttctacgagcggctcggcttcaccgtcaccgccgacgtcgaggtgcccgaaggaccgcgcacctggtgcatgacccgcaagcccggtgcctga

SEQ ID NO: 9293 - DNA, 2445 bp, Artificial Sequence
  Synthetic Polynucloetide
atggccttaccagtgaccgccttgctcctgccgctggccttgctgctccacgccgccaggccggacgtggtcatgacacagagcccttctagcctgtctgccagcgtgggcgacagagtgaccatcacctgtaaagccagccagagcgtgtccagctacctgaactggtatcagcagaagcccggcaaggcccctaagctgctgatctatgctgccagcagcctggaaacaggcgtgcccagcagattttctggcagcggctctggcaccgacttcaccctgacaatatccagcctccagcctgaggacttcgccacctactactgtcagcagagctacagcaccccttggacctttggccagggcaccaaggtggaaatcaagagactcgaggacctgaagaacgtgttcccacctgaggtggccgtgttcgagcctagcgaggccgagatcagccacacccagaaagccaccctcgtgtgcctggctaccggcttctaccccgaccatgtggaactgtcttggtgggtcaacggcaaagaggtgcacagcggcgtgtctaccgacccccagccactgaaagaacagcccgccctgaacgacagccggtactgcctgagcagcagactgagagtgtccgccaccttctggcagaacccccggaaccacttcagatgccaggtgcagttctacggcctgagcgagaacgacgagtggacccaggacagagccaagcccgtgacccagatcgtgtctgccgaagcctggggcagagccgattgcggatcccagagcttcggcctgctggaccccaagctgtgctacctgctggatggcatcctgttcatctacggcgtgatcctgaccgccctgttcctgagagtgaagttcagcagaagcgccgacgcccctgcctaccagcagggacagaaccaactgtacaacgagctgaacctgggcagacgggaagagtacgacgtgctggacaagcggagaggcagggaccctgagatgggcggaaagccccagcggagaaagaacccccaggaaggactgtataacgaactccagaaagacaagatggccgaagcctacagcgagatcggcatgaagggcgagcggagaagaggcaagggccacgatggcctgtaccagggcctgagcaccgccaccaaggacacctatgacgccctgcacatgcaggccctgcctccaagaagggccaagcgatctggatctggagcaacaaacttctcactactcaaacaagcaggtgacgtggaggagaatcccgggcctactagtatggactggatttggcgcatccttttccttgtcggcgctgctaccggcgcgcattccttcgaagaagttcagctggttgaatctggcggcggactcgttagacctggcggatctctgagactgagctgtgccgccagcggcttcaccttcgatgattacggcatgagctgggtccgacaggcccctggaaaaggactggaatgggtgtccggcatcagctggaatagcggctctatcggctacgccgacagcgtgaagggcagattcaccatcagccgggacaacgccaagaacagcctgtacctccagatgaactccctgagagccgaggacacagccctgtactactgtgccaagcggggcaacagcaacagcttcgattattggggccagggaaccaccgtgaccgtgtcatctacgcgtatccagaaccctgatcctgccgtgtaccagctgcgggatagcaagagcagcgacaagagcgtgtgtctgttcaccgacttcgacagccagaccaacgtgtcccagagcaaggactccgacgtgtacatcaccgataagaccgtgctggacatgcggagcatggacttcaagagcaactccgccgtggcctggtccaacaagtccgatttcgcctgcgccaacgccttcaacaacagcattatccccgaggacacattcttcccaagccccgagagcagctgcggtacccagagttttgggttgttggaccctaaattgtgctatctgttggacggaatcctgttcatttacggagtgatcctgaccgcattgttcctgcgggttaagttttccagatccgcagacgcacccgcttaccaacaagggcagaaccaactctacaatgaacttaatttggggcggagggaagagtacgacgttctggacaaaaggaggggacgagatcccgagatgggcggaaagcctcagcgaaggaagaatccgcaagaggggctttataacgaactccagaaagataaaatggcagaagcctatagtgagattgggatgaagggagaaaggaggaggggtaaaggtcacgatgggttgtaccaaggattgagcacagccactaaagatacctatgatgcgctccacatgcaggccctgccgccaaga

SEQ ID NO: 9294 - DNA, 2445 bp, Artificial Sequence
  Synthetic Polynucloetide
atggccttaccagtgaccgccttgctcctgccgctggccttgctgctccacgccgccaggccggacgtggtcatgacacagagcccttctagcctgtctgccagcgtgggcgacagagtgaccatcacctgtaaagccagccagagcgtgtccagctacctgaactggtatcagcagaagcccggcaaggcccctaagctgctgatctatgctgccagcagcctggaaacaggcgtgcccagcagattttctggcagcggctctggcaccgacttcaccctgacaatatccagcctccagcctgaggacttcgccacctactactgtcagcagagctacagcaccccttggacctttggccagggcaccaaggtggaaatcaagagactcgaggacctgaagaacgtgttcccacctgaggtggccgtgttcgagcctagcaaggccgagatcgcccacacccagaaagccaccctcgtgtgcctggctaccggcttctaccccgaccatgtggaactgtcttggtgggtcaacggcaaagaggtgcacagcggcgtgtgtaccgacccccagccactgaaagaacagcccgccctgaacgacagccggtactgcctgagcagcagactgagagtgtccgccaccttctggcagaacccccggaaccacttcagatgccaggtgcagttctacggcctgagcgagaacgacgagtggacccaggacagagccaagcccgtgacccagatcgtgtctgccgaagcctggggcagagccgattgcggatcccagagcttcggcctgctggaccccaagctgtgctacctgctggatggcatcctgttcatctacggcgtgatcctgaccgccctgttcctgagagtgaagttcagcagaagcgccgacgcccctgcctaccagcagggacagaaccaactgtacaacgagctgaacctgggcagacgggaagagtacgacgtgctggacaagcggagaggcagggaccctgagatgggcggaaagccccagcggagaaagaacccccaggaaggactgtataacgaactccagaaagacaagatggccgaagcctacagcgagatcggcatgaagggcgagcggagaagaggcaagggccacgatggcctgtaccagggcctgagcaccgccaccaaggacacctatgacgccctgcacatgcaggccctgcctccaagaagggccaagcgatctggatctggagcaacaaacttctcactactcaaacaagcaggtgacgtggaggagaatcccgggcctactagtatggactggatttggcgcatccttttccttgtcggcgctgctaccggcgcgcattccttcgaagaagttcagctggttgaatctggcggcggactcgttagacctggcggatctctgagactgagctgtgccgccagcggcttcaccttcgatgattacggcatgagctgggtccgacaggcccctggaaaaggactggaatgggtgtccggcatcagctggaatagcggctctatcggctacgccgacagcgtgaagggcagattcaccatcagccgggacaacgccaagaacagcctgtacctccagatgaactccctgagagccgaggacacagccctgtactactgtgccaagcggggcaacagcaacagcttcgattattggggccagggaaccaccgtgaccgtgtcatctacgcgtatccagaaccctgatcctgccgtgtaccagctgcgggatagcaagagcagcgacaagagcgtgtgtctgttcaccgacttcgacagccagaccaacgtgtcccagagcaaggactccgacgtgtacatcaccgataagtgcgtgctggacatgcggagcatggacttcaagagcaactccgccgtggcctggtccaacaagtccgatttcgcctgcgccaacgccttcaacaacagcattatccccgaggacacattcttcccaagcagcgacgtgccctgcggtacccagagttttgggttgttggaccctaaattgtgctatctgttggacggaatcctgttcatttacggagtgatcctgaccgcattgttcctgcgggttaagttttccagatccgcagacgcacccgcttaccaacaagggcagaaccaactctacaatgaacttaatttggggcggagggaagagtacgacgttctggacaaaaggaggggacgagatcccgagatgggcggaaagcctcagcgaaggaagaatccgcaagaggggctttataacgaactccagaaagataaaatggcagaagcctatagtgagattgggatgaagggagaaaggaggaggggtaaaggtcacgatgggttgtaccaaggattgagcacagccactaaagatacctatgatgcgctccacatgcaggccctgccgccaaga

SEQ ID NO: 9295 - DNA, 2658 bp, Artificial Sequence
  Synthetic Polynucloetide
atggccttaccagtgaccgccttgctcctgccgctggccttgctgctccacgccgccaggccggacgtggtcatgacacagagcccttctagcctgtctgccagcgtgggcgacagagtgaccatcacctgtaaagccagccagagcgtgtccagctacctgaactggtatcagcagaagcccggcaaggcccctaagctgctgatctatgctgccagcagcctggaaacaggcgtgcccagcagattttctggcagcggctctggcaccgacttcaccctgacaatatccagcctccagcctgaggacttcgccacctactactgtcagcagagctacagcaccccttggacctttggccagggcaccaaggtggaaatcaagagactcgaggggaaaccaattcccaaccctcttctgggactggattcaaccggcagcggcgaggacctgaagaacgtgttcccacctgaggtggccgtgttcgagcctagcgaggccgagatcagccacacccagaaagccaccctcgtgtgcctggctaccggcttctaccccgaccatgtggaactgtcttggtgggtcaacggcaaagaggtgcacagcggcgtgtctaccgacccccagccactgaaagaacagcccgccctgaacgacagccggtactgcctgagcagcagactgagagtgtccgccaccttctggcagaacccccggaaccacttcagatgccaggtgcagttctacggcctgagcgagaacgacgagtggacccaggacagagccaagcccgtgacccagatcgtgtctgccgaagcctggggcagagccgattgcggatcccagagcttcggcctgctggaccccaagctgtgctacctgctggatggcatcctgttcatctacggcgtgatcctgaccgccctgttcctgagagtgaagttcagcagaagcgccgacgcccctgcctaccagcagggacagaaccaactgtacaacgagctgaacctgggcagacgggaagagtacgacgtgctggacaagcggagaggcagggaccctgagatgggcggaaagccccagcggagaaagaacccccaggaaggactgtataacgaactccagaaagacaagatggccgaagcctacagcgagatcggcatgaagggcgagcggagaagaggcaagggccacgatggcctgtaccagggcctgagcaccgccaccaaggacacctatgacgccctgcacatgcaggccctgcctccaagaagggccaagcgatctggatctggagcaacaaacttctcactactcaaacaagcaggtgacgtggaggagaatcccgggcctactagtatggactggatttggcgcatccttttccttgtcggcgctgctaccggcgcgcattccttcgaagaagttcagctggttgaatctggcggcggactcgttagacctggcggatctctgagactgagctgtgccgccagcggcttcaccttcgatgattacggcatgagctgggtccgacaggcccctggaaaaggactggaatgggtgtccggcatcagctggaatagcggctctatcggctacgccgacagcgtgaagggcagattcaccatcagccgggacaacgccaagaacagcctgtacctccagatgaactccctgagagccgaggacacagccctgtactactgtgccaagcggggcaacagcaacagcttcgattattggggccagggaaccaccgtgaccgtgtcatctacgcgtgagcagaaactgatctcggaagaggatgggagcggcatccagaaccctgatcctgccgtgtaccagctgcgggatagcaagagcagcgacaagagcgtgtgtctgttcaccgacttcgacagccagaccaacgtgtcccagagcaaggactccgacgtgtacatcaccgataagaccgtgctggacatgcggagcatggacttcaagagcaactccgccgtggcctggtccaacaagtccgatttcgcctgcgccaacgccttcaacaacagcattatccccgaggacacattcttcccaagccccgagagcagctgcggtacccagagttttgggttgttggaccctaaattgtgctatctgttggacggaatcctgttcatttacggagtgatcctgaccgcattgttcctgaggagcaagcggtcacggctgctccacagcgattacatgaatatgacaccacgaagaccgggtcctactcgcaaacactaccaaccctacgcacctccccgcgactttgcagcgtaccgatctcgggttaagttttccagatccgcagacgcacccgcttaccaacaagggcagaaccaactctacaatgaacttaatttggggcggagggaagagtacgacgttctggacaaaaggaggggacgagatcccgagatgggcggaaagcctcagcgaaggaagaatccgcaagaggggctttataacgaactccagaaagataaaatggcagaagcctatagtgagattgggatgaagggagaaaggaggaggggtaaaggtcacgatgggttgtaccaaggattgagcacagccactaaagatacctatgatgcgctccacatgcaggccctgccgccaaga

SEQ ID NO: 9296 - DNA, 2781 bp, Artificial Sequence
  Synthetic Polynucloetide
atggccttaccagtgaccgccttgctcctgccgctggccttgctgctccacgccgccaggccggacgtggtcatgacacagagcccttctagcctgtctgccagcgtgggcgacagagtgaccatcacctgtaaagccagccagagcgtgtccagctacctgaactggtatcagcagaagcccggcaaggcccctaagctgctgatctatgctgccagcagcctggaaacaggcgtgcccagcagattttctggcagcggctctggcaccgacttcaccctgacaatatccagcctccagcctgaggacttcgccacctactactgtcagcagagctacagcaccccttggacctttggccagggcaccaaggtggaaatcaagagactcgaggggaaaccaattcccaaccctcttctgggactggattcaaccggcagcggcgaggacctgaagaacgtgttcccacctgaggtggccgtgttcgagcctagcgaggccgagatcagccacacccagaaagccaccctcgtgtgcctggctaccggcttctaccccgaccatgtggaactgtcttggtgggtcaacggcaaagaggtgcacagcggcgtgtctaccgacccccagccactgaaagaacagcccgccctgaacgacagccggtactgcctgagcagcagactgagagtgtccgccaccttctggcagaacccccggaaccacttcagatgccaggtgcagttctacggcctgagcgagaacgacgagtggacccaggacagagccaagcccgtgacccagatcgtgtctgccgaagcctggggcagagccgattgcggatcccagagcttcggcctgctggaccccaagctgtgctacctgctggatggcatcctgttcatctacggcgtgatcctgaccgccctgttcctgaggagtaagaggagcaggctcctgcacagtgactacatgaacatgactccacgccgccccggacccacccgcaagcattaccagccctatgccccaccacgcgacttcgcagcctatcgctccagagtgaagttcagcagaagcgccgacgcccctgcctaccagcagggacagaaccaactgtacaacgagctgaacctgggcagacgggaagagtacgacgtgctggacaagcggagaggcagggaccctgagatgggcggaaagccccagcggagaaagaacccccaggaaggactgtataacgaactccagaaagacaagatggccgaagcctacagcgagatcggcatgaagggcgagcggagaagaggcaagggccacgatggcctgtaccagggcctgagcaccgccaccaaggacacctatgacgccctgcacatgcaggccctgcctccaagaagggccaagcgatctggatctggagcaacaaacttctcactactcaaacaagcaggtgacgtggaggagaatcccgggcctactagtatggactggatttggcgcatccttttccttgtcggcgctgctaccggcgcgcattccttcgaagaagttcagctggttgaatctggcggcggactcgttagacctggcggatctctgagactgagctgtgccgccagcggcttcaccttcgatgattacggcatgagctgggtccgacaggcccctggaaaaggactggaatgggtgtccggcatcagctggaatagcggctctatcggctacgccgacagcgtgaagggcagattcaccatcagccgggacaacgccaagaacagcctgtacctccagatgaactccctgagagccgaggacacagccctgtactactgtgccaagcggggcaacagcaacagcttcgattattggggccagggaaccaccgtgaccgtgtcatctacgcgtgagcagaaactgatctcggaagaggatgggagcggcatccagaaccctgatcctgccgtgtaccagctgcgggatagcaagagcagcgacaagagcgtgtgtctgttcaccgacttcgacagccagaccaacgtgtcccagagcaaggactccgacgtgtacatcaccgataagaccgtgctggacatgcggagcatggacttcaagagcaactccgccgtggcctggtccaacaagtccgatttcgcctgcgccaacgccttcaacaacagcattatccccgaggacacattcttcccaagccccgagagcagctgcggtacccagagttttgggttgttggaccctaaattgtgctatctgttggacggaatcctgttcatttacggagtgatcctgaccgcattgttcctgaggagcaagcggtcacggctgctccacagcgattacatgaatatgacaccacgaagaccgggtcctactcgcaaacactaccaaccctacgcacctccccgcgactttgcagcgtaccgatctcgggttaagttttccagatccgcagacgcacccgcttaccaacaagggcagaaccaactctacaatgaacttaatttggggcggagggaagagtacgacgttctggacaaaaggaggggacgagatcccgagatgggcggaaagcctcagcgaaggaagaatccgcaagaggggctttataacgaactccagaaagataaaatggcagaagcctatagtgagattgggatgaagggagaaaggaggaggggtaaaggtcacgatgggttgtaccaaggattgagcacagccactaaagatacctatgatgcgctccacatgcaggccctgccgccaaga

SEQ ID NO: 9297 - DNA, 2664 bp, Artificial Sequence
  Synthetic Polynucloetide
atggccttaccagtgaccgccttgctcctgccgctggccttgctgctccacgccgccaggccggacgtggtcatgacacagagcccttctagcctgtctgccagcgtgggcgacagagtgaccatcacctgtaaagccagccagagcgtgtccagctacctgaactggtatcagcagaagcccggcaaggcccctaagctgctgatctatgctgccagcagcctggaaacaggcgtgcccagcagattttctggcagcggctctggcaccgacttcaccctgacaatatccagcctccagcctgaggacttcgccacctactactgtcagcagagctacagcaccccttggacctttggccagggcaccaaggtggaaatcaagagactcgaggggaaaccaattcccaaccctcttctgggactggattcaaccggcagcggcgaggacctgaagaacgtgttcccacctgaggtggccgtgttcgagcctagcgaggccgagatcagccacacccagaaagccaccctcgtgtgcctggctaccggcttctaccccgaccatgtggaactgtcttggtgggtcaacggcaaagaggtgcacagcggcgtgtctaccgacccccagccactgaaagaacagcccgccctgaacgacagccggtactgcctgagcagcagactgagagtgtccgccaccttctggcagaacccccggaaccacttcagatgccaggtgcagttctacggcctgagcgagaacgacgagtggacccaggacagagccaagcccgtgacccagatcgtgtctgccgaagcctggggcagagccgattgcggatcccagagcttcggcctgctggaccccaagctgtgctacctgctggatggcatcctgttcatctacggcgtgatcctgaccgccctgttcctgagagtgaagttcagcagaagcgccgacgcccctgcctaccagcagggacagaaccaactgtacaacgagctgaacctgggcagacgggaagagtacgacgtgctggacaagcggagaggcagggaccctgagatgggcggaaagccccagcggagaaagaacccccaggaaggactgtataacgaactccagaaagacaagatggccgaagcctacagcgagatcggcatgaagggcgagcggagaagaggcaagggccacgatggcctgtaccagggcctgagcaccgccaccaaggacacctatgacgccctgcacatgcaggccctgcctccaagaagggccaagcgatctggatctggagcaacaaacttctcactactcaaacaagcaggtgacgtggaggagaatcccgggcctactagtatggactggatttggcgcatccttttccttgtcggcgctgctaccggcgcgcattccttcgaagaagttcagctggttgaatctggcggcggactcgttagacctggcggatctctgagactgagctgtgccgccagcggcttcaccttcgatgattacggcatgagctgggtccgacaggcccctggaaaaggactggaatgggtgtccggcatcagctggaatagcggctctatcggctacgccgacagcgtgaagggcagattcaccatcagccgggacaacgccaagaacagcctgtacctccagatgaactccctgagagccgaggacacagccctgtactactgtgccaagcggggcaacagcaacagcttcgattattggggccagggaaccaccgtgaccgtgtcatctacgcgtgagcagaaactgatctcggaagaggatctggggagcggcatccagaaccctgatcctgccgtgtaccagctgcgggatagcaagagcagcgacaagagcgtgtgtctgttcaccgacttcgacagccagaccaacgtgtcccagagcaaggactccgacgtgtacatcaccgataagaccgtgctggacatgcggagcatggacttcaagagcaactccgccgtggcctggtccaacaagtccgatttcgcctgcgccaacgccttcaacaacagcattatccccgaggacacattcttcccaagccccgagagcagctgcggtacccagagttttgggttgttggaccctaaattgtgctatctgttggacggaatcctgttcatttacggagtgatcctgaccgcattgttcctgaagagaggccggaagaagctgctgtacatcttcaagcagcctttcatgcggcccgtgcagaccacccaggaagaggacggctgctcctgccggttccccgaggaagaagaaggcggctgcgagctgcgggttaagttttccagatccgcagacgcacccgcttaccaacaagggcagaaccaactctacaatgaacttaatttggggcggagggaagagtacgacgttctggacaaaaggaggggacgagatcccgagatgggcggaaagcctcagcgaaggaagaatccgcaagaggggctttataacgaactccagaaagataaaatggcagaagcctatagtgagattgggatgaagggagaaaggaggaggggtaaaggtcacgatgggttgtaccaaggattgagcacagccactaaagatacctatgatgcgctccacatgcaggccctgccgccaaga

SEQ ID NO: 9298 - DNA, 2790 bp, Artificial Sequence
  Synthetic Polynucloetide
atggccttaccagtgaccgccttgctcctgccgctggccttgctgctccacgccgccaggccggacgtggtcatgacacagagcccttctagcctgtctgccagcgtgggcgacagagtgaccatcacctgtaaagccagccagagcgtgtccagctacctgaactggtatcagcagaagcccggcaaggcccctaagctgctgatctatgctgccagcagcctggaaacaggcgtgcccagcagattttctggcagcggctctggcaccgacttcaccctgacaatatccagcctccagcctgaggacttcgccacctactactgtcagcagagctacagcaccccttggacctttggccagggcaccaaggtggaaatcaagagactcgaggggaaaccaattcccaaccctcttctgggactggattcaaccggcagcggcgaggacctgaagaacgtgttcccacctgaggtggccgtgttcgagcctagcgaggccgagatcagccacacccagaaagccaccctcgtgtgcctggctaccggcttctaccccgaccatgtggaactgtcttggtgggtcaacggcaaagaggtgcacagcggcgtgtctaccgacccccagccactgaaagaacagcccgccctgaacgacagccggtactgcctgagcagcagactgagagtgtccgccaccttctggcagaacccccggaaccacttcagatgccaggtgcagttctacggcctgagcgagaacgacgagtggacccaggacagagccaagcccgtgacccagatcgtgtctgccgaagcctggggcagagccgattgcggatcccagagcttcggcctgctggaccccaagctgtgctacctgctggatggcatcctgttcatctacggcgtgatcctgaccgccctgttcctgaaacggggcagaaagaaactcctgtatatattcaaacaaccatttatgagaccagtacaaactactcaagaggaagatggctgtagctgccgatttccagaagaagaagaaggaggatgtgaactgagagtgaagttcagcagaagcgccgacgcccctgcctaccagcagggacagaaccaactgtacaacgagctgaacctgggcagacgggaagagtacgacgtgctggacaagcggagaggcagggaccctgagatgggcggaaagccccagcggagaaagaacccccaggaaggactgtataacgaactccagaaagacaagatggccgaagcctacagcgagatcggcatgaagggcgagcggagaagaggcaagggccacgatggcctgtaccagggcctgagcaccgccaccaaggacacctatgacgccctgcacatgcaggccctgcctccaagaagggccaagcgatctggatctggagcaacaaacttctcactactcaaacaagcaggtgacgtggaggagaatcccgggcctactagtatggactggatttggcgcatccttttccttgtcggcgctgctaccggcgcgcattccttcgaagaagttcagctggttgaatctggcggcggactcgttagacctggcggatctctgagactgagctgtgccgccagcggcttcaccttcgatgattacggcatgagctgggtccgacaggcccctggaaaaggactggaatgggtgtccggcatcagctggaatagcggctctatcggctacgccgacagcgtgaagggcagattcaccatcagccgggacaacgccaagaacagcctgtacctccagatgaactccctgagagccgaggacacagccctgtactactgtgccaagcggggcaacagcaacagcttcgattattggggccagggaaccaccgtgaccgtgtcatctacgcgtgagcagaaactgatctcggaagaggatctggggagcggcatccagaaccctgatcctgccgtgtaccagctgcgggatagcaagagcagcgacaagagcgtgtgtctgttcaccgacttcgacagccagaccaacgtgtcccagagcaaggactccgacgtgtacatcaccgataagaccgtgctggacatgcggagcatggacttcaagagcaactccgccgtggcctggtccaacaagtccgatttcgcctgcgccaacgccttcaacaacagcattatccccgaggacacattcttcccaagccccgagagcagctgcggtacccagagttttgggttgttggaccctaaattgtgctatctgttggacggaatcctgttcatttacggagtgatcctgaccgcattgttcctgaagagaggccggaagaagctgctgtacatcttcaagcagcctttcatgcggcccgtgcagaccacccaggaagaggacggctgctcctgccggttccccgaggaagaagaaggcggctgcgagctgcgggttaagttttccagatccgcagacgcacccgcttaccaacaagggcagaaccaactctacaatgaacttaatttggggcggagggaagagtacgacgttctggacaaaaggaggggacgagatcccgagatgggcggaaagcctcagcgaaggaagaatccgcaagaggggctttataacgaactccagaaagataaaatggcagaagcctatagtgagattgggatgaagggagaaaggaggaggggtaaaggtcacgatgggttgtaccaaggattgagcacagccactaaagatacctatgatgcgctccacatgcaggccctgccgccaaga

SEQ ID NO: 9299 - DNA, 2463 bp, Artificial Sequence
  Synthetic Polynucloetide
atggccttaccagtgaccgccttgctcctgccgctggccttgctgctccacgccgccaggccggacgtggtcatgacacagagcccttctagcctgtctgccagcgtgggcgacagagtgaccatcacctgtaaagccagccagagcgtgtccagctacctgaactggtatcagcagaagcccggcaaggcccctaagctgctgatctatgctgccagcagcctggaaacaggcgtgcccagcagattttctggcagcggctctggcaccgacttcaccctgacaatatccagcctccagcctgaggacttcgccacctactactgtcagcagagctacagcaccccttggacctttggccagggcaccaaggtggaaatcaagagactcgagcagagcttcggcctgctggaccccaagctgtgctacctgctggatggcatcctgttcatctacggcgtgatcctgaccgccctgttcctgagagtgaagttcagcagaagcgccgacgcccctgcctaccagcagggacagaaccaactgtacaacgagctgaacctgggcagacgggaagagtacgacgtgctggacaagcggagaggcagggaccctgagatgggcggaaagccccagcggagaaagaacccccaggaaggactgtataacgaactccagaaagacaagatggccgaagcctacagcgagatcggcatgaagggcgagcggagaagaggcaagggccacgatggcctgtaccagggcctgagcaccgccaccaaggacacctatgacgccctgcacatgcaggccctgcctccaagaagggccaagcgatctggatctggagcaacaaacttctcactactcaaacaagcaggtgacgtggaggagaatcccgggcctactagtatggactggatttggcgcatccttttccttgtcggcgctgctaccggcgcgcattccttcgaagaagttcagctggttgaatctggcggcggactcgttagacctggcggatctctgagactgagctgtgccgccagcggcttcaccttcgatgattacggcatgagctgggtccgacaggcccctggaaaaggactggaatgggtgtccggcatcagctggaatagcggctctatcggctacgccgacagcgtgaagggcagattcaccatcagccgggacaacgccaagaacagcctgtacctccagatgaactccctgagagccgaggacacagccctgtactactgtgccaagcggggcaacagcaacagcttcgattattggggccagggaaccaccgtgaccgtgtcatctacgcgtcagagttttgggttgttggaccctaaattgtgctatctgttggacggaatcctgttcatttacggagtgatcctgaccgcattgttcctgcgggttaagttttccagatccgcagacgcacccgcttaccaacaagggcagaaccaactctacaatgaacttaatttggggcggagggaagagtacgacgttctggacaaaaggaggggacgagatcccgagatgggcggaaagcctcagcgaaggaagaatccgcaagaggggctttataacgaactccagaaagataaaatggcagaagcctatagtgagattgggatgaagggagaaaggaggaggggtaaaggtcacgatgggttgtaccaaggattgagcacagccactaaagatacctatgatgcgctccacatgcaggccctgccgccaagacgcgccaagagaagcggatctggcgtgaagcagaccctgaatttcgacctgctgaagctggctggcgacgtggaatccaacccaggcccttctagaggccatatgaccgagtacaagcccacggtgcgcctcgccacccgcgacgacgtccccagggccgtacgcaccctcgccgccgcgttcgccgactaccccgccacgcgccacaccgtcgatccggaccgccacatcgagcgggtcaccgagctgcaagaactcttcctcacgcgcgtcgggctcgacatcggcaaggtgtgggtcgcggacgacggcgccgcggtggcggtctggaccacgccggagagcgtcgaagcgggggcggtgttcgccgagatcggcccgcgcatggccgagttgagcggttcccggctggccgcgcagcaacagatggaaggcctcctggcgccgcaccggcccaaggagcccgcgtggttcctggccaccgtcggcgtctcgcccgaccaccagggcaagggtctgggcagcgccgtcgtgctccccggagtggaggcggccgagcgcgccggggtgcccgccttcctggagacctccgcgccccgcaacctccccttctacgagcggctcggcttcaccgtcaccgccgacgtcgaggtgcccgaaggaccgcgcacctggtgcatgacccgcaagcccggtgcctga

SEQ ID NO: 9300 - DNA, 1935 bp, Artificial Sequence
  Synthetic Polynucloetide
atggccttaccagtgaccgccttgctcctgccgctggccttgctgctccacgccgccaggccggacgtggtcatgacacagagcccttctagcctgtctgccagcgtgggcgacagagtgaccatcacctgtaaagccagccagagcgtgtccagctacctgaactggtatcagcagaagcccggcaaggcccctaagctgctgatctatgctgccagcagcctggaaacaggcgtgcccagcagattttctggcagcggctctggcaccgacttcaccctgacaatatccagcctccagcctgaggacttcgccacctactactgtcagcagagctacagcaccccttggacctttggccagggcaccaaggtggaaatcaagagactcgagggacagcctaaggccaatcctaccgtgacactgttccctccaagcagcgaagaactccaggccaacaaggccacacttgtgtgcctgatctccgacttctaccctggggctgtgacagtggcttggaaggccgatggatctcctgtgaaagccggcgtggaaaccaccaagccatccaagcagagcaacaacaaatacgccgccagctcctacctgagcctgacacctgagcagtggaagtcccacagatcctacagctgccaagtgacccacgaaggcagcaccgtggaaaagacagtggcccctacagagtgcagccccatcaagaccgatgtgattacaatggaccccaaggacaactgctccaaggacgccaacgataccctgctgctccagctgaccaacaccagcgcctactacatgtacttgttgctgctgctgaagtccgtggtgtacttcgccatcatcacatgctgcctgctgcggagaaccgccttctgctgcaacggcgagaagtctagggccaagcgatctggatctggagcaacaaacttctcactactcaaacaagcaggtgacgtggaggagaatcccgggcctactagtatggactggatttggcgcatccttttccttgtcggcgctgctaccggcgcgcattccttcgaagaagttcagctggttgaatctggcggcggactcgttagacctggcggatctctgagactgagctgtgccgccagcggcttcaccttcgatgattacggcatgagctgggtccgacaggcccctggaaaaggactggaatgggtgtccggcatcagctggaatagcggctctatcggctacgccgacagcgtgaagggcagattcaccatcagccgggacaacgccaagaacagcctgtacctccagatgaactccctgagagccgaggacacagccctgtactactgtgccaagcggggcaacagcaacagcttcgattattggggccagggaaccaccgtgaccgtgtcatctacgcgtgcctctacaaagggaccctccgtgtttcctctggctcccagcagcaagtctacaagcggaggaacagccgctctgggctgcctggtcaaggattactttcccgagcctgtgaccgtgtcctggaatagcggagcactgacaagcggcgtgcacacctttccagccgtgctgcaaagcagcggcctgtactctctgagcagcgtggtcacagtgcctagctctagcctgggcacccagacctacatctgcaatgtgaaccacaagcctagcaacaccaaggtggacaagagagtggaacccaagagctgtgaagtgaaaaccgactccaccgaccacgtgaagcccaaagagacagagaacaccaagcagcccagcaagagctgccacaagcccaaggccatcgtgcacaccgagaaagtgaacatgatgagcctgaccgtgctgggcctgcggatgctgttcgccaaaaccgtggccgtgaacttcctgctgaccgccaagctgttcttcctc

SEQ ID NO: 9301 - DNA, 1869 bp, Artificial Sequence
  Synthetic Polynucloetide
atggccttaccagtgaccgccttgctcctgccgctggccttgctgctccacgccgccaggccggacgtggtcatgacacagagcccttctagcctgtctgccagcgtgggcgacagagtgaccatcacctgtaaagccagccagagcgtgtccagctacctgaactggtatcagcagaagcccggcaaggcccctaagctgctgatctatgctgccagcagcctggaaacaggcgtgcccagcagattttctggcagcggctctggcaccgacttcaccctgacaatatccagcctccagcctgaggacttcgccacctactactgtcagcagagctacagcaccccttggacctttggccagggcaccaaggtggaaatcaagagactcgagggacagcctaaggccaatcctaccgtgacactgttccctccaagcagcgaagaactccaggccaacaaggccacacttgtgtgcctgatctccgacttctaccctggggctgtgacagtggcttggaaggccgatggatctcctgtgaaagccggcgtggaaaccaccaagccatccaagcagagcaacaacaaatacgccgccagctcctacctgagcctgacacctgagcagtggaagtcccacagatcctacagctgccaagtgacccacgaaggcagcaccgtggaaaagacagtggcccctacagagtgcagcggcagagccgattgcggcatcaccagcgccagctaccaccagggcgtgctgagcgccaccatcctgtacgagatcctgctgggcaaggccaccctgtacgccgtgctggtgtctgccctggtgctgatggctatggtcaagcggaaggacagccggggaagggccaagcgatctggatctggagcaacaaacttctcactactcaaacaagcaggtgacgtggaggagaatcccgggcctactagtatggactggatttggcgcatccttttccttgtcggcgctgctaccggcgcgcattccttcgaagaagttcagctggttgaatctggcggcggactcgttagacctggcggatctctgagactgagctgtgccgccagcggcttcaccttcgatgattacggcatgagctgggtccgacaggcccctggaaaaggactggaatgggtgtccggcatcagctggaatagcggctctatcggctacgccgacagcgtgaagggcagattcaccatcagccgggacaacgccaagaacagcctgtacctccagatgaactccctgagagccgaggacacagccctgtactactgtgccaagcggggcaacagcaacagcttcgattattggggccagggaaccaccgtgaccgtgtcatctacgcgtgcctctacaaagggaccctccgtgtttcctctggctcccagcagcaagtctacaagcggaggaacagccgctctgggctgcctggtcaaggattactttcccgagcctgtgaccgtgtcctggaatagcggagcactgacaagcggcgtgcacacctttccagccgtgctgcaaagcagcggcctgtactctctgagcagcgtggtcacagtgcctagctctagcctgggcacccagacctacatctgcaatgtgaaccacaagcctagcaacaccaaggtggacaagagagtggaacccaagagctgtatccccgaggacacattcttcccaagcagcgacgtgccctgcgacgtgaagctggtggaaaagagcttcgagacagacaccaacctgaacttccagaacctgagcgtgatcggcttcagaatcctgctgctgaaagtggccggctttaacctgctgatgaccctgcggctgtggtccagc

SEQ ID NO: 9302 - DNA, 1869 bp, Artificial Sequence
  Synthetic Polynucloetide
atggccttaccagtgaccgccttgctcctgccgctggccttgctgctccacgccgccaggccggacgtggtcatgacacagagcccttctagcctgtctgccagcgtgggcgacagagtgaccatcacctgtaaagccagccagagcgtgtccagctacctgaactggtatcagcagaagcccggcaaggcccctaagctgctgatctatgctgccagcagcctggaaacaggcgtgcccagcagattttctggcagcggctctggcaccgacttcaccctgacaatatccagcctccagcctgaggacttcgccacctactactgtcagcagagctacagcaccccttggacctttggccagggcaccaaggtggaaatcaagagactcgagggacagcctaaggccaatcctaccgtgacactgttccctccaagcagcgaagaactccaggccaacaaggccacacttgtgtgcctgatctccgacttctaccctggggctgtgacagtggcttggaaggccgatggatctcctgtgaaagccggcgtggaaaccaccaagccatccaagcagagcaacaacaaatacgccgccagctcctacctgagcctgacacctgagcagtggaagtcccacagatcctacagctgccaagtgacccacgaaggcagcaccgtggaaaagacagtggcccctacagagtgcagcggcagagccgattgcggctttaccagcgagagctaccagcagggcgtgctgagcgccaccatcctgtacgagatcctgctgggcaaggccaccctgtacgccgtgctggtgtctgccctggtgctgatggctatggtcaagcggaaggacagccggggaagggccaagcgatctggatctggagcaacaaacttctcactactcaaacaagcaggtgacgtggaggagaatcccgggcctactagtatggactggatttggcgcatccttttccttgtcggcgctgctaccggcgcgcattccttcgaagaagttcagctggttgaatctggcggcggactcgttagacctggcggatctctgagactgagctgtgccgccagcggcttcaccttcgatgattacggcatgagctgggtccgacaggcccctggaaaaggactggaatgggtgtccggcatcagctggaatagcggctctatcggctacgccgacagcgtgaagggcagattcaccatcagccgggacaacgccaagaacagcctgtacctccagatgaactccctgagagccgaggacacagccctgtactactgtgccaagcggggcaacagcaacagcttcgattattggggccagggaaccaccgtgaccgtgtcatctacgcgtgcctctacaaagggaccctccgtgtttcctctggctcccagcagcaagtctacaagcggaggaacagccgctctgggctgcctggtcaaggattactttcccgagcctgtgaccgtgtcctggaatagcggagcactgacaagcggcgtgcacacctttccagccgtgctgcaaagcagcggcctgtactctctgagcagcgtggtcacagtgcctagctctagcctgggcacccagacctacatctgcaatgtgaaccacaagcctagcaacaccaaggtggacaagagagtggaacccaagagctgtatccccgaggacacattcttcccaagccccgagagcagctgcgacgtgaagctggtggaaaagagcttcgagacagacaccaacctgaacttccagaacctgagcgtgatcggcttcagaatcctgctgctgaaagtggccggctttaacctgctgatgaccctgcggctgtggtccagc

SEQ ID NO: 9303 - DNA, 1347 bp, Artificial Sequence
  Synthetic Polynucloetide
atggccttaccagtgaccgccttgctcctgccgctggccttgctgctccacgccgccaggccggacgtggtcatgacacagagcccttctagcctgtctgccagcgtgggcgacagagtgaccatcacctgtaaagccagccagagcgtgtccagctacctgaactggtatcagcagaagcccggcaaggcccctaagctgctgatctatgctgccagcagcctggaaacaggcgtgcccagcagattttctggcagcggctctggcaccgacttcaccctgacaatatccagcctccagcctgaggacttcgccacctactactgtcagcagagctacagcaccccttggacctttggccagggcaccaaggtggaaatcaagagaggcggaggcggaagtggaggcggaggatctggcggcggaggctctgaagttcagctggttgaatctggcggcggactcgttagacctggcggatctctgagactgagctgtgccgccagcggcttcaccttcgatgattacggcatgagctgggtccgacaggcccctggaaaaggactggaatgggtgtccggcatcagctggaatagcggctctatcggctacgccgacagcgtgaagggcagattcaccatcagccgggacaacgccaagaacagcctgtacctccagatgaactccctgagagccgaggacacagccctgtactactgtgccaagcggggcaacagcaacagcttcgattattggggccagggaaccaccgtgaccgtgtcatctacgcgtgacggtaacgaggagatgggaggaatcactcaaaccccttacaaagtctcaatttcaggaacaactgttatccttacatgtccccagtatcctggcagcgagatcctttggcagcataacgacaagaatatagggggagatgaagacgataagaatatcggatctgacgaggatcacttgagcctgaaagagttctccgagcttgaacaaagcggatattatgtgtgctatccgcgcgggtcaaagccggaagacgctaacttttacctttatctccgagccagagtgtgcgaaaattgcatggaaatggacgttatgtccgttgctacaatagttatcgtagatatatgcatcacgggtggactgcttctgctggtttattattggtccaagaatagaaaggccaaagctaaacccgtgaccagaggcgctggcgcaggcggaaggcaaaggggacaaaacaaagaacggccaccaccagtgccaaatccagattatgagcctattcggaaaggacagagggacctgtactctggcctgaatcagagaagaatc

SEQ ID NO: 9304 - DNA, 1242 bp, Artificial Sequence
  Synthetic Polynucloetide
atggccttaccagtgaccgccttgctcctgccgctggccttgctgctccacgccgccaggccggacgtggtcatgacacagagcccttctagcctgtctgccagcgtgggcgacagagtgaccatcacctgtaaagccagccagagcgtgtccagctacctgaactggtatcagcagaagcccggcaaggcccctaagctgctgatctatgctgccagcagcctggaaacaggcgtgcccagcagattttctggcagcggctctggcaccgacttcaccctgacaatatccagcctccagcctgaggacttcgccacctactactgtcagcagagctacagcaccccttggacctttggccagggcaccaaggtggaaatcaagagaggcggaggcggaagtggaggcggaggatctggcggcggaggctctgaagttcagctggttgaatctggcggcggactcgttagacctggcggatctctgagactgagctgtgccgccagcggcttcaccttcgatgattacggcatgagctgggtccgacaggcccctggaaaaggactggaatgggtgtccggcatcagctggaatagcggctctatcggctacgccgacagcgtgaagggcagattcaccatcagccgggacaacgccaagaacagcctgtacctccagatgaactccctgagagccgaggacacagccctgtactactgtgccaagcggggcaacagcaacagcttcgattattggggccagggaaccaccgtgaccgtgtcatctacgcgtttcaagatccccatcgaggaactggaagatcgggtgttcgtgaactgcaacacctctatcacctgggtggaaggcaccgtgggaacactgctgagcgacatcaccagactggacctcggcaagcggattctggaccctcggggcatctacagatgcaacggcaccgacatctacaaggacaaagaaagcaccgtgcaggtccactacagaatgtgccagtcctgcgtggaactggaccctgctacagtggccggcatcatcgtgaccgatgtgatcgctactctgctgctggctctgggagtgttctgcttcgccggacacgaaacaggcagactgtctggcgctgccgatacacaggccctgctgagaaacgaccaagtgtatcagcccctgcgcgacagagatgatgcccagtattctcacctcggcggcaactgggctagaaacaag

SEQ ID NO: 9305 - DNA, 1272 bp, Artificial Sequence
  Synthetic Polynucloetide
atggccttaccagtgaccgccttgctcctgccgctggccttgctgctccacgccgccaggccggacgtggtcatgacacagagcccttctagcctgtctgccagcgtgggcgacagagtgaccatcacctgtaaagccagccagagcgtgtccagctacctgaactggtatcagcagaagcccggcaaggcccctaagctgctgatctatgctgccagcagcctggaaacaggcgtgcccagcagattttctggcagcggctctggcaccgacttcaccctgacaatatccagcctccagcctgaggacttcgccacctactactgtcagcagagctacagcaccccttggacctttggccagggcaccaaggtggaaatcaagagaggcggaggcggaagtggaggcggaggatctggcggcggaggctctgaagttcagctggttgaatctggcggcggactcgttagacctggcggatctctgagactgagctgtgccgccagcggcttcaccttcgatgattacggcatgagctgggtccgacaggcccctggaaaaggactggaatgggtgtccggcatcagctggaatagcggctctatcggctacgccgacagcgtgaagggcagattcaccatcagccgggacaacgccaagaacagcctgtacctccagatgaactccctgagagccgaggacacagccctgtactactgtgccaagcggggcaacagcaacagcttcgattattggggccagggaaccaccgtgaccgtgtcatctacgcgtcagagcatcaagggcaaccacctggtcaaggtgtacgactaccaagaggacggcagcgtgctgctgacatgtgatgccgaggccaagaacatcacctggtttaaggacggcaagatgatcggcttcctgaccgaggacaagaagaagtggaacctgggcagcaacgctaaggaccccagaggcatgtatcagtgcaagggcagccagaacaagagcaagcccctccaggtgtactaccggatgtgccagaactgcatcgagctgaacgccgctaccatcagcggctttctgttcgccgagatcgtgtccatcttcgtgctggccgtgggcgtgtactttatcgctggacaggatggcgtgcggcagagcagagcttccgataagcaaaccctgctgcctaacgaccagctgtaccagcctctgaaggacagagaggacgaccagtacagccacctccagggcaatcagctgagaagaaac

SEQ ID NO: 9306 - DNA, 1221 bp, Artificial Sequence
  Synthetic Polynucloetide
atggccttaccagtgaccgccttgctcctgccgctggccttgctgctccacgccgccaggccggacgtggtcatgacacagagcccttctagcctgtctgccagcgtgggcgacagagtgaccatcacctgtaaagccagccagagcgtgtccagctacctgaactggtatcagcagaagcccggcaaggcccctaagctgctgatctatgctgccagcagcctggaaacaggcgtgcccagcagattttctggcagcggctctggcaccgacttcaccctgacaatatccagcctccagcctgaggacttcgccacctactactgtcagcagagctacagcaccccttggacctttggccagggcaccaaggtggaaatcaagagaggcggaggcggaagtggaggcggaggatctggcggcggaggctctgaagttcagctggttgaatctggcggcggactcgttagacctggcggatctctgagactgagctgtgccgccagcggcttcaccttcgatgattacggcatgagctgggtccgacaggcccctggaaaaggactggaatgggtgtccggcatcagctggaatagcggctctatcggctacgccgacagcgtgaagggcagattcaccatcagccgggacaacgccaagaacagcctgtacctccagatgaactccctgagagccgaggacacagccctgtactactgtgccaagcggggcaacagcaacagcttcgattattggggccagggaaccaccgtgaccgtgtcatctacgcgtcagagttttgggttgttggaccctaaattgtgctatctgttggacggaatcctgttcatttacggagtgatcctgaccgcattgttcctgcgggttaagttttccagatccgcagacgcacccgcttaccaacaagggcagaaccaactctacaatgaacttaatttggggcggagggaagagtacgacgttctggacaaaaggaggggacgagatcccgagatgggcggaaagcctcagcgaaggaagaatccgcaagaggggctttataacgaactccagaaagataaaatggcagaagcctatagtgagattgggatgaagggagaaaggaggaggggtaaaggtcacgatgggttgtaccaaggattgagcacagccactaaagatacctatgatgcgctccacatgcaggccctgccgccaaga

SEQ ID NO: 9307 - DNA, 1347 bp, Artificial Sequence
  Synthetic Polynucloetide
atggccttaccagtgaccgccttgctcctgccgctggccttgctgctccacgccgccaggccggaagttcagctggttgaatctggcggcggactcgttagacctggcggatctctgagactgagctgtgccgccagcggcttcaccttcgatgattacggcatgagctgggtccgacaggcccctggaaaaggactggaatgggtgtccggcatcagctggaatagcggctctatcggctacgccgacagcgtgaagggcagattcaccatcagccgggacaacgccaagaacagcctgtacctccagatgaactccctgagagccgaggacacagccctgtactactgtgccaagcggggcaacagcaacagcttcgattattggggccagggaaccaccgtgaccgtgtcatctggcggaggcggaagtggaggcggaggatctggcggcggaggctctgacgtggtcatgacacagagcccttctagcctgtctgccagcgtgggcgacagagtgaccatcacctgtaaagccagccagagcgtgtccagctacctgaactggtatcagcagaagcccggcaaggcccctaagctgctgatctatgctgccagcagcctggaaacaggcgtgcccagcagattttctggcagcggctctggcaccgacttcaccctgacaatatccagcctccagcctgaggacttcgccacctactactgtcagcagagctacagcaccccttggacctttggccagggcaccaaggtggaaatcaagagaacgcgtgacggtaacgaggagatgggaggaatcactcaaaccccttacaaagtctcaatttcaggaacaactgttatccttacatgtccccagtatcctggcagcgagatcctttggcagcataacgacaagaatatagggggagatgaagacgataagaatatcggatctgacgaggatcacttgagcctgaaagagttctccgagcttgaacaaagcggatattatgtgtgctatccgcgcgggtcaaagccggaagacgctaacttttacctttatctccgagccagagtgtgcgaaaattgcatggaaatggacgttatgtccgttgctacaatagttatcgtagatatatgcatcacgggtggactgcttctgctggtttattattggtccaagaatagaaaggccaaagctaaacccgtgaccagaggcgctggcgcaggcggaaggcaaaggggacaaaacaaagaacggccaccaccagtgccaaatccagattatgagcctattcggaaaggacagagggacctgtactctggcctgaatcagagaagaatc

SEQ ID NO: 9308 - DNA, 1242 bp, Artificial Sequence
  Synthetic Polynucloetide
atggccttaccagtgaccgccttgctcctgccgctggccttgctgctccacgccgccaggccggaagttcagctggttgaatctggcggcggactcgttagacctggcggatctctgagactgagctgtgccgccagcggcttcaccttcgatgattacggcatgagctgggtccgacaggcccctggaaaaggactggaatgggtgtccggcatcagctggaatagcggctctatcggctacgccgacagcgtgaagggcagattcaccatcagccgggacaacgccaagaacagcctgtacctccagatgaactccctgagagccgaggacacagccctgtactactgtgccaagcggggcaacagcaacagcttcgattattggggccagggaaccaccgtgaccgtgtcatctggcggaggcggaagtggaggcggaggatctggcggcggaggctctgacgtggtcatgacacagagcccttctagcctgtctgccagcgtgggcgacagagtgaccatcacctgtaaagccagccagagcgtgtccagctacctgaactggtatcagcagaagcccggcaaggcccctaagctgctgatctatgctgccagcagcctggaaacaggcgtgcccagcagattttctggcagcggctctggcaccgacttcaccctgacaatatccagcctccagcctgaggacttcgccacctactactgtcagcagagctacagcaccccttggacctttggccagggcaccaaggtggaaatcaagagaacgcgtttcaagatccccatcgaggaactggaagatcgggtgttcgtgaactgcaacacctctatcacctgggtggaaggcaccgtgggaacactgctgagcgacatcaccagactggacctcggcaagcggattctggaccctcggggcatctacagatgcaacggcaccgacatctacaaggacaaagaaagcaccgtgcaggtccactacagaatgtgccagtcctgcgtggaactggaccctgctacagtggccggcatcatcgtgaccgatgtgatcgctactctgctgctggctctgggagtgttctgcttcgccggacacgaaacaggcagactgtctggcgctgccgatacacaggccctgctgagaaacgaccaagtgtatcagcccctgcgcgacagagatgatgcccagtattctcacctcggcggcaactgggctagaaacaag

SEQ ID NO: 9309 - DNA, 1272 bp, Artificial Sequence
  Synthetic Polynucloetide
atggccttaccagtgaccgccttgctcctgccgctggccttgctgctccacgccgccaggccggaagttcagctggttgaatctggcggcggactcgttagacctggcggatctctgagactgagctgtgccgccagcggcttcaccttcgatgattacggcatgagctgggtccgacaggcccctggaaaaggactggaatgggtgtccggcatcagctggaatagcggctctatcggctacgccgacagcgtgaagggcagattcaccatcagccgggacaacgccaagaacagcctgtacctccagatgaactccctgagagccgaggacacagccctgtactactgtgccaagcggggcaacagcaacagcttcgattattggggccagggaaccaccgtgaccgtgtcatctggcggaggcggaagtggaggcggaggatctggcggcggaggctctgacgtggtcatgacacagagcccttctagcctgtctgccagcgtgggcgacagagtgaccatcacctgtaaagccagccagagcgtgtccagctacctgaactggtatcagcagaagcccggcaaggcccctaagctgctgatctatgctgccagcagcctggaaacaggcgtgcccagcagattttctggcagcggctctggcaccgacttcaccctgacaatatccagcctccagcctgaggacttcgccacctactactgtcagcagagctacagcaccccttggacctttggccagggcaccaaggtggaaatcaagagaacgcgtcagagcatcaagggcaaccacctggtcaaggtgtacgactaccaagaggacggcagcgtgctgctgacatgtgatgccgaggccaagaacatcacctggtttaaggacggcaagatgatcggcttcctgaccgaggacaagaagaagtggaacctgggcagcaacgctaaggaccccagaggcatgtatcagtgcaagggcagccagaacaagagcaagcccctccaggtgtactaccggatgtgccagaactgcatcgagctgaacgccgctaccatcagcggctttctgttcgccgagatcgtgtccatcttcgtgctggccgtgggcgtgtactttatcgctggacaggatggcgtgcggcagagcagagcttccgataagcaaaccctgctgcctaacgaccagctgtaccagcctctgaaggacagagaggacgaccagtacagccacctccagggcaatcagctgagaagaaac

SEQ ID NO: 9310 - DNA, 1221 bp, Artificial Sequence
  Synthetic Polynucloetide
atggccttaccagtgaccgccttgctcctgccgctggccttgctgctccacgccgccaggccggaagttcagctggttgaatctggcggcggactcgttagacctggcggatctctgagactgagctgtgccgccagcggcttcaccttcgatgattacggcatgagctgggtccgacaggcccctggaaaaggactggaatgggtgtccggcatcagctggaatagcggctctatcggctacgccgacagcgtgaagggcagattcaccatcagccgggacaacgccaagaacagcctgtacctccagatgaactccctgagagccgaggacacagccctgtactactgtgccaagcggggcaacagcaacagcttcgattattggggccagggaaccaccgtgaccgtgtcatctggcggaggcggaagtggaggcggaggatctggcggcggaggctctgacgtggtcatgacacagagcccttctagcctgtctgccagcgtgggcgacagagtgaccatcacctgtaaagccagccagagcgtgtccagctacctgaactggtatcagcagaagcccggcaaggcccctaagctgctgatctatgctgccagcagcctggaaacaggcgtgcccagcagattttctggcagcggctctggcaccgacttcaccctgacaatatccagcctccagcctgaggacttcgccacctactactgtcagcagagctacagcaccccttggacctttggccagggcaccaaggtggaaatcaagagaacgcgtcagagttttgggttgttggaccctaaattgtgctatctgttggacggaatcctgttcatttacggagtgatcctgaccgcattgttcctgcgggttaagttttccagatccgcagacgcacccgcttaccaacaagggcagaaccaactctacaatgaacttaatttggggcggagggaagagtacgacgttctggacaaaaggaggggacgagatcccgagatgggcggaaagcctcagcgaaggaagaatccgcaagaggggctttataacgaactccagaaagataaaatggcagaagcctatagtgagattgggatgaagggagaaaggaggaggggtaaaggtcacgatgggttgtaccaaggattgagcacagccactaaagatacctatgatgcgctccacatgcaggccctgccgccaaga

SEQ ID NO: 9311 - DNA, 1923 bp, Artificial Sequence
  Synthetic Polynucloetide
atggccttaccagtgaccgccttgctcctgccgctggccttgctgctccacgccgccaggccggacgtggtcatgacacagagcccttctagcctgtctgccagcgtgggcgacagagtgaccatcacctgtaaagccagccagagcgtgtccagctacctgaactggtatcagcagaagcccggcaaggcccctaagctgctgatctatgctgccagcagcctggaaacaggcgtgcccagcagattttctggcagcggctctggcaccgacttcaccctgacaatatccagcctccagcctgaggacttcgccacctactactgtcagcagagctacagcaccccttggacctttggccagggcaccaaggtggaaatcaagagaggcggaggcggaagtggaggcggaggatctggcggcggaggctctgaagttcagctggttgaatctggcggcggactcgttagacctggcggatctctgagactgagctgtgccgccagcggcttcaccttcgatgattacggcatgagctgggtccgacaggcccctggaaaaggactggaatgggtgtccggcatcagctggaatagcggctctatcggctacgccgacagcgtgaagggcagattcaccatcagccgggacaacgccaagaacagcctgtacctccagatgaactccctgagagccgaggacacagccctgtactactgtgccaagcggggcaacagcaacagcttcgattattggggccagggaaccaccgtgaccgtgtcatctacgcgtgggagcggcatccagaaccctgatcctgccgtgtaccagctgcgggatagcaagagcagcgacaagagcgtgtgtctgttcaccgacttcgacagccagaccaacgtgtcccagagcaaggactccgacgtgtacatcaccgataagaccgtgctggacatgcggagcatggacttcaagagcaactccgccgtggcctggtccaacaagtccgatttcgcctgcgccaacgccttcaacaacagcattatccccgaggacacattcttcccaagccccgagagcagctgcgacgtgaagctggtggaaaagagcttcgagacagacaccaacctgaacttccagaacctgagcgtgatcggcttcagaatcctgctgctgaaagtggccggctttaacctgctgatgaccctgcggctgtggtccagccgcgccaagagaagcggatctggcgtgaagcagaccctgaatttcgacctgctgaagctggctggcgacgtggaatccaacccaggcccttctagaggccatatgaccgagtacaagcccacggtgcgcctcgccacccgcgacgacgtccccagggccgtacgcaccctcgccgccgcgttcgccgactaccccgccacgcgccacaccgtcgatccggaccgccacatcgagcgggtcaccgagctgcaagaactcttcctcacgcgcgtcgggctcgacatcggcaaggtgtgggtcgcggacgacggcgccgcggtggcggtctggaccacgccggagagcgtcgaagcgggggcggtgttcgccgagatcggcccgcgcatggccgagttgagcggttcccggctggccgcgcagcaacagatggaaggcctcctggcgccgcaccggcccaaggagcccgcgtggttcctggccaccgtcggcgtctcgcccgaccaccagggcaagggtctgggcagcgccgtcgtgctccccggagtggaggcggccgagcgcgccggggtgcccgccttcctggagacctccgcgccccgcaacctccccttctacgagcggctcggcttcaccgtcaccgccgacgtcgaggtgcccgaaggaccgcgcacctggtgcatgacccgcaagcccggtgcctga

SEQ ID NO: 9312 - DNA, 2019 bp, Artificial Sequence
  Synthetic Polynucloetide
atggccttaccagtgaccgccttgctcctgccgctggccttgctgctccacgccgccaggccggacgtggtcatgacacagagcccttctagcctgtctgccagcgtgggcgacagagtgaccatcacctgtaaagccagccagagcgtgtccagctacctgaactggtatcagcagaagcccggcaaggcccctaagctgctgatctatgctgccagcagcctggaaacaggcgtgcccagcagattttctggcagcggctctggcaccgacttcaccctgacaatatccagcctccagcctgaggacttcgccacctactactgtcagcagagctacagcaccccttggacctttggccagggcaccaaggtggaaatcaagagaggcggaggcggaagtggaggcggaggatctggcggcggaggctctgaagttcagctggttgaatctggcggcggactcgttagacctggcggatctctgagactgagctgtgccgccagcggcttcaccttcgatgattacggcatgagctgggtccgacaggcccctggaaaaggactggaatgggtgtccggcatcagctggaatagcggctctatcggctacgccgacagcgtgaagggcagattcaccatcagccgggacaacgccaagaacagcctgtacctccagatgaactccctgagagccgaggacacagccctgtactactgtgccaagcggggcaacagcaacagcttcgattattggggccagggaaccaccgtgaccgtgtcatctctcgaggacctgaagaacgtgttcccacctgaggtggccgtgttcgagcctagcgaggccgagatcagccacacccagaaagccaccctcgtgtgcctggctaccggcttctaccccgaccatgtggaactgtcttggtgggtcaacggcaaagaggtgcacagcggcgtgtctaccgacccccagccactgaaagaacagcccgccctgaacgacagccggtactgcctgagcagcagactgagagtgtccgccaccttctggcagaacccccggaaccacttcagatgccaggtgcagttctacggcctgagcgagaacgacgagtggacccaggacagagccaagcccgtgacccagatcgtgtctgccgaagcctggggcagagccgattgcggctttaccagcgagagctaccagcagggcgtgctgagcgccaccatcctgtacgagatcctgctgggcaaggccaccctgtacgccgtgctggtgtctgccctggtgctgatggctatggtcaagcggaaggacagccggggaagggccaagcgatctggatctggagcaacaaacttctcactactcaaacaagcaggtgacgtggaggagaatcccgggcctactagaggccatatgaccgagtacaagcccacggtgcgcctcgccacccgcgacgacgtccccagggccgtacgcaccctcgccgccgcgttcgccgactaccccgccacgcgccacaccgtcgatccggaccgccacatcgagcgggtcaccgagctgcaagaactcttcctcacgcgcgtcgggctcgacatcggcaaggtgtgggtcgcggacgacggcgccgcggtggcggtctggaccacgccggagagcgtcgaagcgggggcggtgttcgccgagatcggcccgcgcatggccgagttgagcggttcccggctggccgcgcagcaacagatggaaggcctcctggcgccgcaccggcccaaggagcccgcgtggttcctggccaccgtcggcgtctcgcccgaccaccagggcaagggtctgggcagcgccgtcgtgctccccggagtggaggcggccgagcgcgccggggtgcccgccttcctggagacctccgcgccccgcaacctccccttctacgagcggctcggcttcaccgtcaccgccgacgtcgaggtgcccgaaggaccgcgcacctggtgcatgacccgcaagcccggtgcctga

SEQ ID NO: 9313 - DNA, 2169 bp, Artificial Sequence
  Synthetic Polynucloetide
atggccttaccagtgaccgccttgctcctgccgctggccttgctgctccacgccgccaggccggacgtggtcatgacacagagcccttctagcctgtctgccagcgtgggcgacagagtgaccatcacctgtaaagccagccagagcgtgtccagctacctgaactggtatcagcagaagcccggcaaggcccctaagctgctgatctatgctgccagcagcctggaaacaggcgtgcccagcagattttctggcagcggctctggcaccgacttcaccctgacaatatccagcctccagcctgaggacttcgccacctactactgtcagcagagctacagcaccccttggacctttggccagggcaccaaggtggaaatcaagagaggcggaggcggaagtggaggcggaggatctggcggcggaggctctgaagttcagctggttgaatctggcggcggactcgttagacctggcggatctctgagactgagctgtgccgccagcggcttcaccttcgatgattacggcatgagctgggtccgacaggcccctggaaaaggactggaatgggtgtccggcatcagctggaatagcggctctatcggctacgccgacagcgtgaagggcagattcaccatcagccgggacaacgccaagaacagcctgtacctccagatgaactccctgagagccgaggacacagccctgtactactgtgccaagcggggcaacagcaacagcttcgattattggggccagggaaccaccgtgaccgtgtcatctacgcgtgagcagaaactgatctcggaagaggatctggggagcggcaccccattcccttctctggcccctcccatcatgctgctggtggacggcaagcagcagatggtggtcgtgtgcctggtgctggatgtggccccacctggactggacagccccatctggtttagcgccggcaatggctctgccctggacgcctttacctacggcccaagccctgccaccgatggcacctggacaaatctggcccacctgagcctgcccagcgaggaactggcttcttgggagcctctcgtgtgccacacaggacctggcgctgagggacacagcagatccacccagcctatgcacctgtctggcgaggccagcaccgccagaacctgtcctcaggaacctctgagaggcacccctggcggagcactgtggctgggagtgctgagactgctgctgttcaagctgctgctgtttgacctgctgctgacctgctcctgtctgtgcgatcctgccggccctctgccttctcctgccaccaccacaagactgagagccctgggcagccacagactgcaccctgccacagagacaggcggcagagaggccacaagcagccctagaccccagcccagagacagaagatggggcgataccccccctggcagaaagcctggatctccagtccgcgccaagagaagcggatctggcgtgaagcagaccctgaatttcgacctgctgaagctggctggcgacgtggaatccaacccaggcccttctagatctagaggccatatgaccgagtacaagcccacggtgcgcctcgccacccgcgacgacgtccccagggccgtacgcaccctcgccgccgcgttcgccgactaccccgccacgcgccacaccgtcgatccggaccgccacatcgagcgggtcaccgagctgcaagaactcttcctcacgcgcgtcgggctcgacatcggcaaggtgtgggtcgcggacgacggcgccgcggtggcggtctggaccacgccggagagcgtcgaagcgggggcggtgttcgccgagatcggcccgcgcatggccgagttgagcggttcccggctggccgcgcagcaacagatggaaggcctcctggcgccgcaccggcccaaggagcccgcgtggttcctggccaccgtcggcgtctcgcccgaccaccagggcaagggtctgggcagcgccgtcgtgctccccggagtggaggcggccgagcgcgccggggtgcccgccttcctggagacctccgcgccccgcaacctccccttctacgagcggctcggcttcaccgtcaccgccgacgtcgaggtgcccgaaggaccgcgcacctggtgcatgacccgcaagcccggtgcctga

SEQ ID NO: 9314 - DNA, 1620 bp, Artificial Sequence
  Synthetic Polynucloetide
atggccttaccagtgaccgccttgctcctgccgctggccttgctgctccacgccgccaggccggacgtggtcatgacacagagcccttctagcctgtctgccagcgtgggcgacagagtgaccatcacctgtaaagccagccagagcgtgtccagctacctgaactggtatcagcagaagcccggcaaggcccctaagctgctgatctatgctgccagcagcctggaaacaggcgtgcccagcagattttctggcagcggctctggcaccgacttcaccctgacaatatccagcctccagcctgaggacttcgccacctactactgtcagcagagctacagcaccccttggacctttggccagggcaccaaggtggaaatcaagagactcgaggacctgaagaacgtgttcccacctgaggtggccgtgttcgagcctagcgaggccgagatcagccacacccagaaagccaccctcgtgtgcctggctaccggcttctaccccgaccatgtggaactgtcttggtgggtcaacggcaaagaggtgcacagcggcgtgtctaccgacccccagccactgaaagaacagcccgccctgaacgacagccggtactgcctgagcagcagactgagagtgtccgccaccttctggcagaacccccggaaccacttcagatgccaggtgcagttctacggcctgagcgagaacgacgagtggacccaggacagagccaagcccgtgacccagatcgtgtctgccgaagcctggggcagagccgattgcggctttaccagcgagagctaccagcagggcgtgctgagcgccaccatcctgtacgagatcctgctgggcaaggccaccctgtacgccgtgctggtgtctgccctggtgctgatggctatggtcaagcggaaggacagccggggaagggccaagcgatctggatctggagcaacaaacttctcactactcaaacaagcaggtgacgtggaggagaatcccgggcctactagaggccatatgaccgagtacaagcccacggtgcgcctcgccacccgcgacgacgtccccagggccgtacgcaccctcgccgccgcgttcgccgactaccccgccacgcgccacaccgtcgatccggaccgccacatcgagcgggtcaccgagctgcaagaactcttcctcacgcgcgtcgggctcgacatcggcaaggtgtgggtcgcggacgacggcgccgcggtggcggtctggaccacgccggagagcgtcgaagcgggggcggtgttcgccgagatcggcccgcgcatggccgagttgagcggttcccggctggccgcgcagcaacagatggaaggcctcctggcgccgcaccggcccaaggagcccgcgtggttcctggccaccgtcggcgtctcgcccgaccaccagggcaagggtctgggcagcgccgtcgtgctccccggagtggaggcggccgagcgcgccggggtgcccgccttcctggagacctccgcgccccgcaacctccccttctacgagcggctcggcttcaccgtcaccgccgacgtcgaggtgcccgaaggaccgcgcacctggtgcatgacccgcaagcccggtgcctga

SEQ ID NO: 9315 - DNA, 927 bp, Artificial Sequence
  Synthetic Polynucloetide
atggccttaccagtgaccgccttgctcctgccgctggccttgctgctccacgccgccaggccggacgtggtcatgacacagagcccttctagcctgtctgccagcgtgggcgacagagtgaccatcacctgtaaagccagccagagcgtgtccagctacctgaactggtatcagcagaagcccggcaaggcccctaagctgctgatctatgctgccagcagcctggaaacaggcgtgcccagcagattttctggcagcggctctggcaccgacttcaccctgacaatatccagcctccagcctgaggacttcgccacctactactgtcagcagagctacagcaccccttggacctttggccagggcaccaaggtggaaatcaagagactcgaggacctgaagaacgtgttcccacctgaggtggccgtgttcgagcctagcgaggccgagatcagccacacccagaaagccaccctcgtgtgcctggctaccggcttctaccccgaccatgtggaactgtcttggtgggtcaacggcaaagaggtgcacagcggcgtgtctaccgacccccagccactgaaagaacagcccgccctgaacgacagccggtactgcctgagcagcagactgagagtgtccgccaccttctggcagaacccccggaaccacttcagatgccaggtgcagttctacggcctgagcgagaacgacgagtggacccaggacagagccaagcccgtgacccagatcgtgtctgccgaagcctggggcagagccgattgcggctttaccagcgagagctaccagcagggcgtgctgagcgccaccatcctgtacgagatcctgctgggcaaggccaccctgtacgccgtgctggtgtctgccctggtgctgatggctatggtcaagcggaaggacagccgggga

SEQ ID NO: 9316 - DNA, 1344 bp, Artificial Sequence
  Synthetic Polynucloetide
atggactggatttggcgcatccttttccttgtcggcgctgctaccggcgcgcattccttcgaagaagttcagctggttgaatctggcggcggactcgttagacctggcggatctctgagactgagctgtgccgccagcggcttcaccttcgatgattacggcatgagctgggtccgacaggcccctggaaaaggactggaatgggtgtccggcatcagctggaatagcggctctatcggctacgccgacagcgtgaagggcagattcaccatcagccgggacaacgccaagaacagcctgtacctccagatgaactccctgagagccgaggacacagccctgtactactgtgccaagcggggcaacagcaacagcttcgattattggggccagggaaccaccgtgaccgtgtcatctacgcgtatccagaaccctgatcctgccgtgtaccagctgcgggatagcaagagcagcgacaagagcgtgtgtctgttcaccgacttcgacagccagaccaacgtgtcccagagcaaggactccgacgtgtacatcaccgataagaccgtgctggacatgcggagcatggacttcaagagcaactccgccgtggcctggtccaacaagtccgatttcgcctgcgccaacgccttcaacaacagcattatccccgaggacacattcttcccaagccccgagagcagctgcgacgtgaagctggtggaaaagagcttcgagacagacaccaacctgaacttccagaacctgagcgtgatcggcttcagaatcctgctgctgaaagtggccggctttaacctgctgatgaccctgcggctgtggtccagccgcgccaagagaagcggatctggcgtgaagcagaccctgaatttcgacctgctgaagctggctggcgacgtggaatccaacccaggcccttctagaggccatatggccaagcctttgtctcaagaagaatccaccctcattgaaagagcaacggctacaatcaacagcatccccatctctgaagactacagcgtcgccagcgcagctctctctagcgacggccgcatcttcactggtgtcaatgtatatcattttactgggggaccttgtgcagaactcgtggtgctgggcactgctgctgctgcggcagctggcaacctgacttgtatcgtcgcgatcggaaatgagaacaggggcatcttgagcccctgcggacggtgccgacaggtgcttctcgatctgcatcctgggatcaaagccatagtgaaggacagtgatggacagccgacggcagttgggattcgtgaattgctgccctctggttatgtgtgggagggctga

SEQ ID NO: 9317 - DNA, 843 bp, Artificial Sequence
  Synthetic Polynucloetide
atggactggatttggcgcatccttttccttgtcggcgctgctaccggcgcgcattccttcgaagaagttcagctggttgaatctggcggcggactcgttagacctggcggatctctgagactgagctgtgccgccagcggcttcaccttcgatgattacggcatgagctgggtccgacaggcccctggaaaaggactggaatgggtgtccggcatcagctggaatagcggctctatcggctacgccgacagcgtgaagggcagattcaccatcagccgggacaacgccaagaacagcctgtacctccagatgaactccctgagagccgaggacacagccctgtactactgtgccaagcggggcaacagcaacagcttcgattattggggccagggaaccaccgtgaccgtgtcatctacgcgtatccagaaccctgatcctgccgtgtaccagctgcgggatagcaagagcagcgacaagagcgtgtgtctgttcaccgacttcgacagccagaccaacgtgtcccagagcaaggactccgacgtgtacatcaccgataagaccgtgctggacatgcggagcatggacttcaagagcaactccgccgtggcctggtccaacaagtccgatttcgcctgcgccaacgccttcaacaacagcattatccccgaggacacattcttcccaagccccgagagcagctgcgacgtgaagctggtggaaaagagcttcgagacagacaccaacctgaacttccagaacctgagcgtgatcggcttcagaatcctgctgctgaaagtggccggctttaacctgctgatgaccctgcggctgtggtccagc

SEQ ID NO: 9318 - DNA, 1674 bp, Artificial Sequence
  Synthetic Polynucloetide
atggccttaccagtgaccgccttgctcctgccgctggccttgctgctccacgccgccaggccggacgtggtcatgacacagagcccttctagcctgtctgccagcgtgggcgacagagtgaccatcacctgtaaagccagccagagcgtgtccagctacctgaactggtatcagcagaagcccggcaaggcccctaagctgctgatctatgctgccagcagcctggaaacaggcgtgcccagcagattttctggcagcggctctggcaccgacttcaccctgacaatatccagcctccagcctgaggacttcgccacctactactgtcagcagagctacagcaccccttggacctttggccagggcaccaaggtggaaatcaagagactcgaggggaaaccaattcccaaccctcttctgggactggattcaaccggcagcggcgaggacctgaagaacgtgttcccacctgaggtggccgtgttcgagcctagcgaggccgagatcagccacacccagaaagccaccctcgtgtgcctggctaccggcttctaccccgaccatgtggaactgtcttggtgggtcaacggcaaagaggtgcacagcggcgtgtgtaccgacccccagccactgaaagaacagcccgccctgaacgacagccggtactgcctgagcagcagactgagagtgtccgccaccttctggcagaacccccggaaccacttcagatgccaggtgcagttctacggcctgagcgagaacgacgagtggacccaggacagagccaagcccgtgacccagatcgtgtctgccgaagcctggggcagagccgattgcggctttaccagcgagagctaccagcagggcgtgctgagcgccaccatcctgtacgagatcctgctgggcaaggccaccctgtacgccgtgctggtgtctgccctggtgctgatggctatggtcaagcggaaggacagccggggaagggccaagcgatctggatctggagcaacaaacttctcactactcaaacaagcaggtgacgtggaggagaatcccgggcctactagaggccatatgaccgagtacaagcccacggtgcgcctcgccacccgcgacgacgtccccagggccgtacgcaccctcgccgccgcgttcgccgactaccccgccacgcgccacaccgtcgatccggaccgccacatcgagcgggtcaccgagctgcaagaactcttcctcacgcgcgtcgggctcgacatcggcaaggtgtgggtcgcggacgacggcgccgcggtggcggtctggaccacgccggagagcgtcgaagcgggggcggtgttcgccgagatcggcccgcgcatggccgagttgagcggttcccggctggccgcgcagcaacagatggaaggcctcctggcgccgcaccggcccaaggagcccgcgtggttcctggccaccgtcggcgtctcgcccgaccaccagggcaagggtctgggcagcgccgtcgtgctccccggagtggaggcggccgagcgcgccggggtgcccgccttcctggagacctccgcgccccgcaacctccccttctacgagcggctcggcttcaccgtcaccgccgacgtcgaggtgcccgaaggaccgcgcacctggtgcatgacccgcaagcccggtgcctga

SEQ ID NO: 9319 - DNA, 984 bp, Artificial Sequence
  Synthetic Polynucloetide
atggccttaccagtgaccgccttgctcctgccgctggccttgctgctccacgccgccaggccggacgtggtcatgacacagagcccttctagcctgtctgccagcgtgggcgacagagtgaccatcacctgtaaagccagccagagcgtgtccagctacctgaactggtatcagcagaagcccggcaaggcccctaagctgctgatctatgctgccagcagcctggaaacaggcgtgcccagcagattttctggcagcggctctggcaccgacttcaccctgacaatatccagcctccagcctgaggacttcgccacctactactgtcagcagagctacagcaccccttggacctttggccagggcaccaaggtggaaatcaagagactcgaggggaaaccaattcccaaccctcttctgggactggattcaaccggcagcggcgaggacctgaagaacgtgttcccacctgaggtggccgtgttcgagcctagcgaggccgagatcagccacacccagaaagccaccctcgtgtgcctggctaccggcttctaccccgaccatgtggaactgtcttggtgggtcaacggcaaagaggtgcacagcggcgtgtgtaccgacccccagccactgaaagaacagcccgccctgaacgacagccggtactgcctgagcagcagactgagagtgtccgccaccttctggcagaacccccggaaccacttcagatgccaggtgcagttctacggcctgagcgagaacgacgagtggacccaggacagagccaagcccgtgacccagatcgtgtctgccgaagcctggggcagagccgattgcggctttaccagcgagagctaccagcagggcgtgctgagcgccaccatcctgtacgagatcctgctgggcaaggccaccctgtacgccgtgctggtgtctgccctggtgctgatggctatggtcaagcggaaggacagccggggatga

SEQ ID NO: 9320 - DNA, 1380 bp, Artificial Sequence
  Synthetic Polynucloetide
atggactggatttggcgcatccttttccttgtcggcgctgctaccggcgcgcattccttcgaagaagttcagctggttgaatctggcggcggactcgttagacctggcggatctctgagactgagctgtgccgccagcggcttcaccttcgatgattacggcatgagctgggtccgacaggcccctggaaaaggactggaatgggtgtccggcatcagctggaatagcggctctatcggctacgccgacagcgtgaagggcagattcaccatcagccgggacaacgccaagaacagcctgtacctccagatgaactccctgagagccgaggacacagccctgtactactgtgccaagcggggcaacagcaacagcttcgattattggggccagggaaccaccgtgaccgtgtcatctacgcgtgagcagaaactgatctcggaagaggatgggagcggcatccagaaccctgatcctgccgtgtaccagctgcgggatagcaagagcagcgacaagagcgtgtgtctgttcaccgacttcgacagccagaccaacgtgtcccagagcaaggactccgacgtgtacatcaccgataagtgcgtgctggacatgcggagcatggacttcaagagcaactccgccgtggcctggtccaacaagtccgatttcgcctgcgccaacgccttcaacaacagcattatccccgaggacacattcttcccaagccccgagagcagctgcgacgtgaagctggtggaaaagagcttcgagacagacaccaacctgaacttccagaacctgagcgtgatcggcttcagaatcctgctgctgaaagtggccggctttaacctgctgatgaccctgcggctgtggtccagccgcgccaagagaagcggatctggcgtgaagcagaccctgaatttcgacctgctgaagctggctggcgacgtggaatccaacccaggcccttctagaggccatatggccaagcctttgtctcaagaagaatccaccctcattgaaagagcaacggctacaatcaacagcatccccatctctgaagactacagcgtcgccagcgcagctctctctagcgacggccgcatcttcactggtgtcaatgtatatcattttactgggggaccttgtgcagaactcgtggtgctgggcactgctgctgctgcggcagctggcaacctgacttgtatcgtcgcgatcggaaatgagaacaggggcatcttgagcccctgcggacggtgccgacaggtgcttctcgatctgcatcctgggatcaaagccatagtgaaggacagtgatggacagccgacggcagttgggattcgtgaattgctgccctctggttatgtgtgggagggctga

SEQ ID NO: 9321 - DNA, 882 bp, Artificial Sequence
  Synthetic Polynucloetide
atggactggatttggcgcatccttttccttgtcggcgctgctaccggcgcgcattccttcgaagaagttcagctggttgaatctggcggcggactcgttagacctggcggatctctgagactgagctgtgccgccagcggcttcaccttcgatgattacggcatgagctgggtccgacaggcccctggaaaaggactggaatgggtgtccggcatcagctggaatagcggctctatcggctacgccgacagcgtgaagggcagattcaccatcagccgggacaacgccaagaacagcctgtacctccagatgaactccctgagagccgaggacacagccctgtactactgtgccaagcggggcaacagcaacagcttcgattattggggccagggaaccaccgtgaccgtgtcatctacgcgtgagcagaaactgatctcggaagaggatgggagcggcatccagaaccctgatcctgccgtgtaccagctgcgggatagcaagagcagcgacaagagcgtgtgtctgttcaccgacttcgacagccagaccaacgtgtcccagagcaaggactccgacgtgtacatcaccgataagtgcgtgctggacatgcggagcatggacttcaagagcaactccgccgtggcctggtccaacaagtccgatttcgcctgcgccaacgccttcaacaacagcattatccccgaggacacattcttcccaagccccgagagcagctgcgacgtgaagctggtggaaaagagcttcgagacagacaccaacctgaacttccagaacctgagcgtgatcggcttcagaatcctgctgctgaaagtggccggctttaacctgctgatgaccctgcggctgtggtccagctga

SEQ ID NO: 9322 - DNA, 1923 bp, Artificial Sequence
  Synthetic Polynucloetide
atggccttaccagtgaccgccttgctcctgccgctggccttgctgctccacgccgccaggccggacgtggtcatgacacagagcccttctagcctgtctgccagcgtgggcgacagagtgaccatcacctgtaaagccagccagagcgtgtccagctacctgaactggtatcagcagaagcccggcaaggcccctaagctgctgatctatgctgccagcagcctggaaacaggcgtgcccagcagattttctggcagcggctctggcaccgacttcaccctgacaatatccagcctccagcctgaggacttcgccacctactactgtcagcagagctacagcaccccttggacctttggccagggcaccaaggtggaaatcaagagaggcggaggcggaagtggaggcggaggatctggcggcggaggctctgaagttcagctggttgaatctggcggcggactcgttagacctggcggatctctgagactgagctgtgccgccagcggcttcaccttcgatgattacggcatgagctgggtccgacaggcccctggaaaaggactggaatgggtgtccggcatcagctggaatagcggctctatcggctacgccgacagcgtgaagggcagattcaccatcagccgggacaacgccaagaacagcctgtacctccagatgaactccctgagagccgaggacacagccctgtactactgtgccaagcggggcaacagcaacagcttcgattattggggccagggaaccaccgtgaccgtgtcatctacgcgtgggagcggcatccagaaccctgatcctgccgtgtaccagctgcgggatagcaagagcagcgacaagagcgtgtgtctgttcaccgacttcgacagccagaccaacgtgtcccagagcaaggactccgacgtgtacatcaccgataagaccgtgctggacatgcggagcatggacttcaagagcaactccgccgtggcctggtccaacaagtccgatttcgcctgcgccaacgccttcaacaacagcattatccccgaggacacattcttcccaagcagcgacgtgccctgcgacgtgaagctggtggaaaagagcttcgagacagacaccaacctgaacttccagaacctgagcgtgatcggcttcagaatcctgctgctgaaagtggccggctttaacctgctgatgaccctgcggctgtggtccagccgcgccaagagaagcggatctggcgtgaagcagaccctgaatttcgacctgctgaagctggctggcgacgtggaatccaacccaggcccttctagaggccatatgaccgagtacaagcccacggtgcgcctcgccacccgcgacgacgtccccagggccgtacgcaccctcgccgccgcgttcgccgactaccccgccacgcgccacaccgtcgatccggaccgccacatcgagcgggtcaccgagctgcaagaactcttcctcacgcgcgtcgggctcgacatcggcaaggtgtgggtcgcggacgacggcgccgcggtggcggtctggaccacgccggagagcgtcgaagcgggggcggtgttcgccgagatcggcccgcgcatggccgagttgagcggttcccggctggccgcgcagcaacagatggaaggcctcctggcgccgcaccggcccaaggagcccgcgtggttcctggccaccgtcggcgtctcgcccgaccaccagggcaagggtctgggcagcgccgtcgtgctccccggagtggaggcggccgagcgcgccggggtgcccgccttcctggagacctccgcgccccgcaacctccccttctacgagcggctcggcttcaccgtcaccgccgacgtcgaggtgcccgaaggaccgcgcacctggtgcatgacccgcaagcccggtgcctga

SEQ ID NO: 9323 - DNA, 2019 bp, Artificial Sequence
  Synthetic Polynucloetide
atggccttaccagtgaccgccttgctcctgccgctggccttgctgctccacgccgccaggccggacgtggtcatgacacagagcccttctagcctgtctgccagcgtgggcgacagagtgaccatcacctgtaaagccagccagagcgtgtccagctacctgaactggtatcagcagaagcccggcaaggcccctaagctgctgatctatgctgccagcagcctggaaacaggcgtgcccagcagattttctggcagcggctctggcaccgacttcaccctgacaatatccagcctccagcctgaggacttcgccacctactactgtcagcagagctacagcaccccttggacctttggccagggcaccaaggtggaaatcaagagaggcggaggcggaagtggaggcggaggatctggcggcggaggctctgaagttcagctggttgaatctggcggcggactcgttagacctggcggatctctgagactgagctgtgccgccagcggcttcaccttcgatgattacggcatgagctgggtccgacaggcccctggaaaaggactggaatgggtgtccggcatcagctggaatagcggctctatcggctacgccgacagcgtgaagggcagattcaccatcagccgggacaacgccaagaacagcctgtacctccagatgaactccctgagagccgaggacacagccctgtactactgtgccaagcggggcaacagcaacagcttcgattattggggccagggaaccaccgtgaccgtgtcatctctcgaggacctgaagaacgtgttcccacctgaggtggccgtgttcgagcctagcaaggccgagatcgcccacacccagaaagccaccctcgtgtgcctggctaccggcttctaccccgaccatgtggaactgtcttggtgggtcaacggcaaagaggtgcacagcggcgtgtctaccgacccccagccactgaaagaacagcccgccctgaacgacagccggtactgcctgagcagcagactgagagtgtccgccaccttctggcagaacccccggaaccacttcagatgccaggtgcagttctacggcctgagcgagaacgacgagtggacccaggacagagccaagcccgtgacccagatcgtgtctgccgaagcctggggcagagccgattgcggcatcaccagcgccagctaccaccagggcgtgctgagcgccaccatcctgtacgagatcctgctgggcaaggccaccctgtacgccgtgctggtgtctgccctggtgctgatggctatggtcaagcggaaggacagccggggaagggccaagcgatctggatctggagcaacaaacttctcactactcaaacaagcaggtgacgtggaggagaatcccgggcctactagaggccatatgaccgagtacaagcccacggtgcgcctcgccacccgcgacgacgtccccagggccgtacgcaccctcgccgccgcgttcgccgactaccccgccacgcgccacaccgtcgatccggaccgccacatcgagcgggtcaccgagctgcaagaactcttcctcacgcgcgtcgggctcgacatcggcaaggtgtgggtcgcggacgacggcgccgcggtggcggtctggaccacgccggagagcgtcgaagcgggggcggtgttcgccgagatcggcccgcgcatggccgagttgagcggttcccggctggccgcgcagcaacagatggaaggcctcctggcgccgcaccggcccaaggagcccgcgtggttcctggccaccgtcggcgtctcgcccgaccaccagggcaagggtctgggcagcgccgtcgtgctccccggagtggaggcggccgagcgcgccggggtgcccgccttcctggagacctccgcgccccgcaacctccccttctacgagcggctcggcttcaccgtcaccgccgacgtcgaggtgcccgaaggaccgcgcacctggtgcatgacccgcaagcccggtgcctga

SEQ ID NO: 9324 - DNA, 2088 bp, Artificial Sequence
  Synthetic Polynucloetide
atggccttaccagtgaccgccttgctcctgccgctggccttgctgctccacgccgccaggccggacgtggtcatgacacagagcccttctagcctgtctgccagcgtgggcgacagagtgaccatcacctgtaaagccagccagagcgtgtccagctacctgaactggtatcagcagaagcccggcaaggcccctaagctgctgatctatgctgccagcagcctggaaacaggcgtgcccagcagattttctggcagcggctctggcaccgacttcaccctgacaatatccagcctccagcctgaggacttcgccacctactactgtcagcagagctacagcaccccttggacctttggccagggcaccaaggtggaaatcaagagaggcggaggcggaagtggaggcggaggatctggcggcggaggctctgaagttcagctggttgaatctggcggcggactcgttagacctggcggatctctgagactgagctgtgccgccagcggcttcaccttcgatgattacggcatgagctgggtccgacaggcccctggaaaaggactggaatgggtgtccggcatcagctggaatagcggctctatcggctacgccgacagcgtgaagggcagattcaccatcagccgggacaacgccaagaacagcctgtacctccagatgaactccctgagagccgaggacacagccctgtactactgtgccaagcggggcaacagcaacagcttcgattattggggccagggaaccaccgtgaccgtgtcatctacgcgtgggtctggaggcggaggcagcggcggaggcgggagcggcgacggtaacgaggagatgggaggaatcactcaaaccccttacaaagtctcaatttcaggaacaactgttatccttacatgtccccagtatcctggcagcgagatcctttggcagcataacgacaagaatatagggggagatgaagacgataagaatatcggatctgacgaggatcacttgagcctgaaagagttctccgagcttgaacaaagcggatattatgtgtgctatccgcgcgggtcaaagccggaagacgctaacttttacctttatctccgagccagagtgtgcgaaaattgcatggaaatggacgttatgtccgttgctacaatagttatcgtagatatatgcatcacgggtggactgcttctgctggtttattattggtccaagaatagaaaggccaaagctaaacccgtgaccagaggcgctggcgcaggcggaaggcaaaggggacaaaacaaagaacggccaccaccagtgccaaatccagattatgagcctattcggaaaggacagagggacctgtactctggcctgaatcagagaagaatccgcgccaagagaagcggatctggcgtgaagcagaccctgaatttcgacctgctgaagctggctggcgacgtggaatccaacccaggcccttctagaggccatatgaccgagtacaagcccacggtgcgcctcgccacccgcgacgacgtccccagggccgtacgcaccctcgccgccgcgttcgccgactaccccgccacgcgccacaccgtcgatccggaccgccacatcgagcgggtcaccgagctgcaagaactcttcctcacgcgcgtcgggctcgacatcggcaaggtgtgggtcgcggacgacggcgccgcggtggcggtctggaccacgccggagagcgtcgaagcgggggcggtgttcgccgagatcggcccgcgcatggccgagttgagcggttcccggctggccgcgcagcaacagatggaaggcctcctggcgccgcaccggcccaaggagcccgcgtggttcctggccaccgtcggcgtctcgcccgaccaccagggcaagggtctgggcagcgccgtcgtgctccccggagtggaggcggccgagcgcgccggggtgcccgccttcctggagacctccgcgccccgcaacctccccttctacgagcggctcggcttcaccgtcaccgccgacgtcgaggtgcccgaaggaccgcgcacctggtgcatgacccgcaagcccggtgcctga

SEQ ID NO: 9325 - DNA, 1983 bp, Artificial Sequence
  Synthetic Polynucloetide
atggccttaccagtgaccgccttgctcctgccgctggccttgctgctccacgccgccaggccggacgtggtcatgacacagagcccttctagcctgtctgccagcgtgggcgacagagtgaccatcacctgtaaagccagccagagcgtgtccagctacctgaactggtatcagcagaagcccggcaaggcccctaagctgctgatctatgctgccagcagcctggaaacaggcgtgcccagcagattttctggcagcggctctggcaccgacttcaccctgacaatatccagcctccagcctgaggacttcgccacctactactgtcagcagagctacagcaccccttggacctttggccagggcaccaaggtggaaatcaagagaggcggaggcggaagtggaggcggaggatctggcggcggaggctctgaagttcagctggttgaatctggcggcggactcgttagacctggcggatctctgagactgagctgtgccgccagcggcttcaccttcgatgattacggcatgagctgggtccgacaggcccctggaaaaggactggaatgggtgtccggcatcagctggaatagcggctctatcggctacgccgacagcgtgaagggcagattcaccatcagccgggacaacgccaagaacagcctgtacctccagatgaactccctgagagccgaggacacagccctgtactactgtgccaagcggggcaacagcaacagcttcgattattggggccagggaaccaccgtgaccgtgtcatctacgcgtgggtctggaggcggaggcagcggcggaggcgggagcggcttcaagatccccatcgaggaactggaagatcgggtgttcgtgaactgcaacacctctatcacctgggtggaaggcaccgtgggaacactgctgagcgacatcaccagactggacctcggcaagcggattctggaccctcggggcatctacagatgcaacggcaccgacatctacaaggacaaagaaagcaccgtgcaggtccactacagaatgtgccagtcctgcgtggaactggaccctgctacagtggccggcatcatcgtgaccgatgtgatcgctactctgctgctggctctgggagtgttctgcttcgccggacacgaaacaggcagactgtctggcgctgccgatacacaggccctgctgagaaacgaccaagtgtatcagcccctgcgcgacagagatgatgcccagtattctcacctcggcggcaactgggctagaaacaagcgcgccaagagaagcggatctggcgtgaagcagaccctgaatttcgacctgctgaagctggctggcgacgtggaatccaacccaggcccttctagaggccatatgaccgagtacaagcccacggtgcgcctcgccacccgcgacgacgtccccagggccgtacgcaccctcgccgccgcgttcgccgactaccccgccacgcgccacaccgtcgatccggaccgccacatcgagcgggtcaccgagctgcaagaactcttcctcacgcgcgtcgggctcgacatcggcaaggtgtgggtcgcggacgacggcgccgcggtggcggtctggaccacgccggagagcgtcgaagcgggggcggtgttcgccgagatcggcccgcgcatggccgagttgagcggttcccggctggccgcgcagcaacagatggaaggcctcctggcgccgcaccggcccaaggagcccgcgtggttcctggccaccgtcggcgtctcgcccgaccaccagggcaagggtctgggcagcgccgtcgtgctccccggagtggaggcggccgagcgcgccggggtgcccgccttcctggagacctccgcgccccgcaacctccccttctacgagcggctcggcttcaccgtcaccgccgacgtcgaggtgcccgaaggaccgcgcacctggtgcatgacccgcaagcccggtgcctga

SEQ ID NO: 9326 - DNA, 2013 bp, Artificial Sequence
  Synthetic Polynucloetide
atggccttaccagtgaccgccttgctcctgccgctggccttgctgctccacgccgccaggccggacgtggtcatgacacagagcccttctagcctgtctgccagcgtgggcgacagagtgaccatcacctgtaaagccagccagagcgtgtccagctacctgaactggtatcagcagaagcccggcaaggcccctaagctgctgatctatgctgccagcagcctggaaacaggcgtgcccagcagattttctggcagcggctctggcaccgacttcaccctgacaatatccagcctccagcctgaggacttcgccacctactactgtcagcagagctacagcaccccttggacctttggccagggcaccaaggtggaaatcaagagaggcggaggcggaagtggaggcggaggatctggcggcggaggctctgaagttcagctggttgaatctggcggcggactcgttagacctggcggatctctgagactgagctgtgccgccagcggcttcaccttcgatgattacggcatgagctgggtccgacaggcccctggaaaaggactggaatgggtgtccggcatcagctggaatagcggctctatcggctacgccgacagcgtgaagggcagattcaccatcagccgggacaacgccaagaacagcctgtacctccagatgaactccctgagagccgaggacacagccctgtactactgtgccaagcggggcaacagcaacagcttcgattattggggccagggaaccaccgtgaccgtgtcatctacgcgtgggtctggaggcggaggcagcggcggaggcgggagcggccagagcatcaagggcaaccacctggtcaaggtgtacgactaccaagaggacggcagcgtgctgctgacatgtgatgccgaggccaagaacatcacctggtttaaggacggcaagatgatcggcttcctgaccgaggacaagaagaagtggaacctgggcagcaacgctaaggaccccagaggcatgtatcagtgcaagggcagccagaacaagagcaagcccctccaggtgtactaccggatgtgccagaactgcatcgagctgaacgccgctaccatcagcggctttctgttcgccgagatcgtgtccatcttcgtgctggccgtgggcgtgtactttatcgctggacaggatggcgtgcggcagagcagagcttccgataagcaaaccctgctgcctaacgaccagctgtaccagcctctgaaggacagagaggacgaccagtacagccacctccagggcaatcagctgagaagaaaccgcgccaagagaagcggatctggcgtgaagcagaccctgaatttcgacctgctgaagctggctggcgacgtggaatccaacccaggcccttctagaggccatatgaccgagtacaagcccacggtgcgcctcgccacccgcgacgacgtccccagggccgtacgcaccctcgccgccgcgttcgccgactaccccgccacgcgccacaccgtcgatccggaccgccacatcgagcgggtcaccgagctgcaagaactcttcctcacgcgcgtcgggctcgacatcggcaaggtgtgggtcgcggacgacggcgccgcggtggcggtctggaccacgccggagagcgtcgaagcgggggcggtgttcgccgagatcggcccgcgcatggccgagttgagcggttcccggctggccgcgcagcaacagatggaaggcctcctggcgccgcaccggcccaaggagcccgcgtggttcctggccaccgtcggcgtctcgcccgaccaccagggcaagggtctgggcagcgccgtcgtgctccccggagtggaggcggccgagcgcgccggggtgcccgccttcctggagacctccgcgccccgcaacctccccttctacgagcggctcggcttcaccgtcaccgccgacgtcgaggtgcccgaaggaccgcgcacctggtgcatgacccgcaagcccggtgcctga

SEQ ID NO: 9327 - DNA, 1962 bp, Artificial Sequence
  Synthetic Polynucloetide
atggccttaccagtgaccgccttgctcctgccgctggccttgctgctccacgccgccaggccggacgtggtcatgacacagagcccttctagcctgtctgccagcgtgggcgacagagtgaccatcacctgtaaagccagccagagcgtgtccagctacctgaactggtatcagcagaagcccggcaaggcccctaagctgctgatctatgctgccagcagcctggaaacaggcgtgcccagcagattttctggcagcggctctggcaccgacttcaccctgacaatatccagcctccagcctgaggacttcgccacctactactgtcagcagagctacagcaccccttggacctttggccagggcaccaaggtggaaatcaagagaggcggaggcggaagtggaggcggaggatctggcggcggaggctctgaagttcagctggttgaatctggcggcggactcgttagacctggcggatctctgagactgagctgtgccgccagcggcttcaccttcgatgattacggcatgagctgggtccgacaggcccctggaaaaggactggaatgggtgtccggcatcagctggaatagcggctctatcggctacgccgacagcgtgaagggcagattcaccatcagccgggacaacgccaagaacagcctgtacctccagatgaactccctgagagccgaggacacagccctgtactactgtgccaagcggggcaacagcaacagcttcgattattggggccagggaaccaccgtgaccgtgtcatctacgcgtgggtctggaggcggaggcagcggcggaggcgggagcggccagagttttgggttgttggaccctaaattgtgctatctgttggacggaatcctgttcatttacggagtgatcctgaccgcattgttcctgcgggttaagttttccagatccgcagacgcacccgcttaccaacaagggcagaaccaactctacaatgaacttaatttggggcggagggaagagtacgacgttctggacaaaaggaggggacgagatcccgagatgggcggaaagcctcagcgaaggaagaatccgcaagaggggctttataacgaactccagaaagataaaatggcagaagcctatagtgagattgggatgaagggagaaaggaggaggggtaaaggtcacgatgggttgtaccaaggattgagcacagccactaaagatacctatgatgcgctccacatgcaggccctgccgccaagacgcgccaagagaagcggatctggcgtgaagcagaccctgaatttcgacctgctgaagctggctggcgacgtggaatccaacccaggcccttctagaggccatatgaccgagtacaagcccacggtgcgcctcgccacccgcgacgacgtccccagggccgtacgcaccctcgccgccgcgttcgccgactaccccgccacgcgccacaccgtcgatccggaccgccacatcgagcgggtcaccgagctgcaagaactcttcctcacgcgcgtcgggctcgacatcggcaaggtgtgggtcgcggacgacggcgccgcggtggcggtctggaccacgccggagagcgtcgaagcgggggcggtgttcgccgagatcggcccgcgcatggccgagttgagcggttcccggctggccgcgcagcaacagatggaaggcctcctggcgccgcaccggcccaaggagcccgcgtggttcctggccaccgtcggcgtctcgcccgaccaccagggcaagggtctgggcagcgccgtcgtgctccccggagtggaggcggccgagcgcgccggggtgcccgccttcctggagacctccgcgccccgcaacctccccttctacgagcggctcggcttcaccgtcaccgccgacgtcgaggtgcccgaaggaccgcgcacctggtgcatgacccgcaagcccggtgcctga

SEQ ID NO: 9328 - DNA, 2262 bp, Artificial Sequence
  Synthetic Polynucloetide
atggccttaccagtgaccgccttgctcctgccgctggccttgctgctccacgccgccaggccggaagtgcagctggttgaatctggcggaggactggttcagcctggcggatctctgagactgtcttgtgccgccagcggcttcagcttcagcgacttttggatgagctgggtccgacaggcccctggcaaaggacttgaatgggtcgccacaatcagccaggccggcagcgagaaggactacgtggactctgtgaagggcagattcaccatcagccgggacaacgccaagaagtccctgtacctccagatgaacagcctgagagccgaggacaccgccgtgtactattgtgcctctggcgtgtacagcttcgactacagaggccagggcaccctggtcacagtctcttctggtaccggcggaggcggatctggcggcggaggtagcggtggcggaggatctgaattcgacgtggtcatgacacagagcccttctagcctgtctgccagcgtgggcgacagagtgaccatcacctgtaaagccagccagagcgtgtccagctacctgaactggtatcagcagaagcccggcaaggcccctaagctgctgatctatgctgccagcagcctggaaacaggcgtgcccagcagattttctggcagcggctctggcaccgacttcaccctgacaatatccagcctccagcctgaggacttcgccacctactactgtcagcagagctacagcaccccttggacctttggccagggcaccaaggtggaaatcaagagactcgaggacctgaagaacgtgttcccacctgaggtggccgtgttcgagcctagcgaggccgagatcagccacacccagaaagccaccctcgtgtgcctggctaccggcttctaccccgaccatgtggaactgtcttggtgggtcaacggcaaagaggtgcacagcggcgtgtgtaccgacccccagccactgaaagaacagcccgccctgaacgacagccggtactgcctgagcagcagactgagagtgtccgccaccttctggcagaacccccggaaccacttcagatgccaggtgcagttctacggcctgagcgagaacgacgagtggacccaggacagagccaagcccgtgacccagatcgtgtctgccgaagcctggggcagagccgattgcggctttaccagcgagagctaccagcagggcgtgctgagcgccaccatcctgtacgagatcctgctgggcaaggccaccctgtacgccgtgctggtgtctgccctggtgctgatggctatggtcaagcggaaggacagccggggaagggccaagcgatctggatctggagcaacaaacttctcactactcaaacaagcaggtgacgtggaggagaatcccgggcctactagtatggactggatttggcgcatccttttccttgtcggcgctgctaccggcgcgcattccttcgaagaagttcagctggttgaatctggcggcggactcgttagacctggcggatctctgagactgagctgtgccgccagcggcttcaccttcgatgattacggcatgagctgggtccgacaggcccctggaaaaggactggaatgggtgtccggcatcagctggaatagcggctctatcggctacgccgacagcgtgaagggcagattcaccatcagccgggacaacgccaagaacagcctgtacctccagatgaactccctgagagccgaggacacagccctgtactactgtgccaagcggggcaacagcaacagcttcgattattggggccagggaaccaccgtgaccgtgtcatctacgcgtatccagaaccctgatcctgccgtgtaccagctgcgggatagcaagagcagcgacaagagcgtgtgtctgttcaccgacttcgacagccagaccaacgtgtcccagagcaaggactccgacgtgtacatcaccgataagtgcgtgctggacatgcggagcatggacttcaagagcaactccgccgtggcctggtccaacaagtccgatttcgcctgcgccaacgccttcaacaacagcattatccccgaggacacattcttcccaagccccgagagcagctgcgacgtgaagctggtggaaaagagcttcgagacagacaccaacctgaacttccagaacctgagcgtgatcggcttcagaatcctgctgctgaaagtggccggctttaacctgctgatgaccctgcggctgtggtccagc

SEQ ID NO: 9329 - DNA, 2274 bp, Artificial Sequence
  Synthetic Polynucloetide
atggccttaccagtgaccgccttgctcctgccgctggccttgctgctccacgccgccaggccggaagtgcagctggttgaatctggcggaggactggttcagcctggcggatctctgagactgtcttgtgccgccagcggcttcagcttcagcgacttttggatgagctgggtccgacaggcccctggcaaaggacttgaatgggtcgccacaatcagccaggccggcagcgagaaggactacgtggactctgtgaagggcagattcaccatcagccgggacaacgccaagaagtccctgtacctccagatgaacagcctgagagccgaggacaccgccgtgtactattgtgcctctggcgtgtacagcttcgactacagaggccagggcaccctggtcacagtctcttctggtaccggcggaggcggatctggcggcggaggtagcggtggcggaggatctgaattcgacgtggtcatgacacagagcccttctagcctgtctgccagcgtgggcgacagagtgaccatcacctgtaaagccagccagagcgtgtccagctacctgaactggtatcagcagaagcccggcaaggcccctaagctgctgatctatgctgccagcagcctggaaacaggcgtgcccagcagattttctggcagcggctctggcaccgacttcaccctgacaatatccagcctccagcctgaggacttcgccacctactactgtcagcagagctacagcaccccttggacctttggccagggcaccaaggtggaaatcaagagactcgagatccagaaccctgatcctgccgtgtaccagctgcgggatagcaagagcagcgacaagagcgtgtgtctgttcaccgacttcgacagccagaccaacgtgtcccagagcaaggactccgacgtgtacatcaccgataagtgcgtgctggacatgcggagcatggacttcaagagcaactccgccgtggcctggtccaacaagtccgatttcgcctgcgccaacgccttcaacaacagcattatccccgaggacacattcttcccaagccccgagagcagctgcgacgtgaagctggtggaaaagagcttcgagacagacaccaacctgaacttccagaacctgagcgtgatcggcttcagaatcctgctgctgaaagtggccggctttaacctgctgatgaccctgcggctgtggtccagccgcgccaagagaagcggatctggcgtgaagcagaccctgaatttcgacctgctgaagctggctggcgacgtggaatccaacccaggccctactagtatggactggatttggcgcatccttttccttgtcggcgctgctaccggcgcgcattccttcgaagaagttcagctggttgaatctggcggcggactcgttagacctggcggatctctgagactgagctgtgccgccagcggcttcaccttcgatgattacggcatgagctgggtccgacaggcccctggaaaaggactggaatgggtgtccggcatcagctggaatagcggctctatcggctacgccgacagcgtgaagggcagattcaccatcagccgggacaacgccaagaacagcctgtacctccagatgaactccctgagagccgaggacacagccctgtactactgtgccaagcggggcaacagcaacagcttcgattattggggccagggaaccaccgtgaccgtgtcatctacgcgtgaggacctgaagaacgtgttcccacctgaggtggccgtgttcgagcctagcgaggccgagatcagccacacccagaaagccaccctcgtgtgcctggctaccggcttctaccccgaccatgtggaactgtcttggtgggtcaacggcaaagaggtgcacagcggcgtgtgtaccgacccccagccactgaaagaacagcccgccctgaacgacagccggtactgcctgagcagcagactgagagtgtccgccaccttctggcagaacccccggaaccacttcagatgccaggtgcagttctacggcctgagcgagaacgacgagtggacccaggacagagccaagcccgtgacccagatcgtgtctgccgaagcctggggcagagccgattgcggctttaccagcgagagctaccagcagggcgtgctgagcgccaccatcctgtacgagatcctgctgggcaaggccaccctgtacgccgtgctggtgtctgccctggtgctgatggctatggtcaagcggaaggacagccgggga

SEQ ID NO: 9330 - DNA, 2850 bp, Artificial Sequence
  Synthetic Polynucloetide
atggccttaccagtgaccgccttgctcctgccgctggccttgctgctccacgccgccaggccggaagtgcagctggttgaatctggcggaggactggttcagcctggcggatctctgagactgtcttgtgccgccagcggcttcagcttcagcgacttttggatgagctgggtccgacaggcccctggcaaaggacttgaatgggtcgccacaatcagccaggccggcagcgagaaggactacgtggactctgtgaagggcagattcaccatcagccgggacaacgccaagaagtccctgtacctccagatgaacagcctgagagccgaggacaccgccgtgtactattgtgcctctggcgtgtacagcttcgactacagaggccagggcaccctggtcacagtctcttctggtaccggcggaggcggatctggcggcggaggtagcggtggcggaggatctgaattcgacgtggtcatgacacagagcccttctagcctgtctgccagcgtgggcgacagagtgaccatcacctgtaaagccagccagagcgtgtccagctacctgaactggtatcagcagaagcccggcaaggcccctaagctgctgatctatgctgccagcagcctggaaacaggcgtgcccagcagattttctggcagcggctctggcaccgacttcaccctgacaatatccagcctccagcctgaggacttcgccacctactactgtcagcagagctacagcaccccttggacctttggccagggcaccaaggtggaaatcaagagactcgaggacctgaagaacgtgttcccacctgaggtggccgtgttcgagcctagcgaggccgagatcagccacacccagaaagccaccctcgtgtgcctggctaccggcttctaccccgaccatgtggaactgtcttggtgggtcaacggcaaagaggtgcacagcggcgtgtctaccgacccccagccactgaaagaacagcccgccctgaacgacagccggtactgcctgagcagcagactgagagtgtccgccaccttctggcagaacccccggaaccacttcagatgccaggtgcagttctacggcctgagcgagaacgacgagtggacccaggacagagccaagcccgtgacccagatcgtgtctgccgaagcctggggcagagccgattgcggatcccagagcttcggcctgctggaccccaagctgtgctacctgctggatggcatcctgttcatctacggcgtgatcctgaccgccctgttcctgagagtgaagttcagcagaagcgccgacgcccctgcctaccagcagggacagaaccaactgtacaacgagctgaacctgggcagacgggaagagtacgacgtgctggacaagcggagaggcagggaccctgagatgggcggaaagccccagcggagaaagaacccccaggaaggactgtataacgaactccagaaagacaagatggccgaagcctacagcgagatcggcatgaagggcgagcggagaagaggcaagggccacgatggcctgtaccagggcctgagcaccgccaccaaggacacctatgacgccctgcacatgcaggccctgcctccaagaagggccaagcgatctggatctggagcaacaaacttctcactactcaaacaagcaggtgacgtggaggagaatcccgggcctactagtatggactggatttggcgcatccttttccttgtcggcgctgctaccggcgcgcattccttcgaagaagttcagctggttgaatctggcggcggactcgttagacctggcggatctctgagactgagctgtgccgccagcggcttcaccttcgatgattacggcatgagctgggtccgacaggcccctggaaaaggactggaatgggtgtccggcatcagctggaatagcggctctatcggctacgccgacagcgtgaagggcagattcaccatcagccgggacaacgccaagaacagcctgtacctccagatgaactccctgagagccgaggacacagccctgtactactgtgccaagcggggcaacagcaacagcttcgattattggggccagggaaccaccgtgaccgtgtcatctacgcgtatccagaaccctgatcctgccgtgtaccagctgcgggatagcaagagcagcgacaagagcgtgtgtctgttcaccgacttcgacagccagaccaacgtgtcccagagcaaggactccgacgtgtacatcaccgataagaccgtgctggacatgcggagcatggacttcaagagcaactccgccgtggcctggtccaacaagtccgatttcgcctgcgccaacgccttcaacaacagcattatccccgaggacacattcttcccaagccccgagagcagctgcggtacccagagttttgggttgttggaccctaaattgtgctatctgttggacggaatcctgttcatttacggagtgatcctgaccgcattgttcctgcgggttaagttttccagatccgcagacgcacccgcttaccaacaagggcagaaccaactctacaatgaacttaatttggggcggagggaagagtacgacgttctggacaaaaggaggggacgagatcccgagatgggcggaaagcctcagcgaaggaagaatccgcaagaggggctttataacgaactccagaaagataaaatggcagaagcctatagtgagattgggatgaagggagaaaggaggaggggtaaaggtcacgatgggttgtaccaaggattgagcacagccactaaagatacctatgatgcgctccacatgcaggccctgccgccaaga

SEQ ID NO: 9331 - DNA, 2340 bp, Artificial Sequence
  Synthetic Polynucloetide
atggccttaccagtgaccgccttgctcctgccgctggccttgctgctccacgccgccaggccggaagtgcagctggttgaatctggcggaggactggttcagcctggcggatctctgagactgtcttgtgccgccagcggcttcagcttcagcgacttttggatgagctgggtccgacaggcccctggcaaaggacttgaatgggtcgccacaatcagccaggccggcagcgagaaggactacgtggactctgtgaagggcagattcaccatcagccgggacaacgccaagaagtccctgtacctccagatgaacagcctgagagccgaggacaccgccgtgtactattgtgcctctggcgtgtacagcttcgactacagaggccagggcaccctggtcacagtctcttctggtaccggcggaggcggatctggcggcggaggtagcggtggcggaggatctgaattcgacgtggtcatgacacagagcccttctagcctgtctgccagcgtgggcgacagagtgaccatcacctgtaaagccagccagagcgtgtccagctacctgaactggtatcagcagaagcccggcaaggcccctaagctgctgatctatgctgccagcagcctggaaacaggcgtgcccagcagattttctggcagcggctctggcaccgacttcaccctgacaatatccagcctccagcctgaggacttcgccacctactactgtcagcagagctacagcaccccttggacctttggccagggcaccaaggtggaaatcaagagactcgagggacagcctaaggccaatcctaccgtgacactgttccctccaagcagcgaagaactccaggccaacaaggccacacttgtgtgcctgatctccgacttctaccctggggctgtgacagtggcttggaaggccgatggatctcctgtgaaagccggcgtggaaaccaccaagccatccaagcagagcaacaacaaatacgccgccagctcctacctgagcctgacacctgagcagtggaagtcccacagatcctacagctgccaagtgacccacgaaggcagcaccgtggaaaagacagtggcccctacagagtgcagccccatcaagaccgatgtgattacaatggaccccaaggacaactgctccaaggacgccaacgataccctgctgctccagctgaccaacaccagcgcctactacatgtacttgttgctgctgctgaagtccgtggtgtacttcgccatcatcacatgctgcctgctgcggagaaccgccttctgctgcaacggcgagaagtctagggccaagcgatctggatctggagcaacaaacttctcactactcaaacaagcaggtgacgtggaggagaatcccgggcctactagtatggactggatttggcgcatccttttccttgtcggcgctgctaccggcgcgcattccttcgaagaagttcagctggttgaatctggcggcggactcgttagacctggcggatctctgagactgagctgtgccgccagcggcttcaccttcgatgattacggcatgagctgggtccgacaggcccctggaaaaggactggaatgggtgtccggcatcagctggaatagcggctctatcggctacgccgacagcgtgaagggcagattcaccatcagccgggacaacgccaagaacagcctgtacctccagatgaactccctgagagccgaggacacagccctgtactactgtgccaagcggggcaacagcaacagcttcgattattggggccagggaaccaccgtgaccgtgtcatctacgcgtgcctctacaaagggaccctccgtgtttcctctggctcccagcagcaagtctacaagcggaggaacagccgctctgggctgcctggtcaaggattactttcccgagcctgtgaccgtgtcctggaatagcggagcactgacaagcggcgtgcacacctttccagccgtgctgcaaagcagcggcctgtactctctgagcagcgtggtcacagtgcctagctctagcctgggcacccagacctacatctgcaatgtgaaccacaagcctagcaacaccaaggtggacaagagagtggaacccaagagctgtgaagtgaaaaccgactccaccgaccacgtgaagcccaaagagacagagaacaccaagcagcccagcaagagctgccacaagcccaaggccatcgtgcacaccgagaaagtgaacatgatgagcctgaccgtgctgggcctgcggatgctgttcgccaaaaccgtggccgtgaacttcctgctgaccgccaagctgttcttcctc

SEQ ID NO: 9332 - DNA, 2283 bp, Artificial Sequence
  Synthetic Polynucloetide
atggccttaccagtgaccgccttgctcctgccgctggccttgctgctccacgccgccaggccggaagtgcagctggttgaatctggcggaggactggttcagcctggcggatctctgagactgtcttgtgccgccagcggcttcagcttcagcgacttttggatgagctgggtccgacaggcccctggcaaaggacttgaatgggtcgccacaatcagccaggccggcagcgagaaggactacgtggactctgtgaagggcagattcaccatcagccgggacaacgccaagaagtccctgtacctccagatgaacagcctgagagccgaggacaccgccgtgtactattgtgcctctggcgtgtacagcttcgactacagaggccagggcaccctggtcacagtctcttctggtaccggcggaggcggatctggcggcggaggtagcggtggcggaggatctgaattcgacgtggtcatgacacagagcccttctagcctgtctgccagcgtgggcgacagagtgaccatcacctgtaaagccagccagagcgtgtccagctacctgaactggtatcagcagaagcccggcaaggcccctaagctgctgatctatgctgccagcagcctggaaacaggcgtgcccagcagattttctggcagcggctctggcaccgacttcaccctgacaatatccagcctccagcctgaggacttcgccacctactactgtcagcagagctacagcaccccttggacctttggccagggcaccaaggtggaaatcaagagactcgagggacagcctaaggccaatcctaccgtgacactgttccctccaagcagcgaagaactccaggccaacaaggccacacttgtgtgcctgatctccgacttctaccctggggctgtgacagtggcttggaaggccgatggatctcctgtgaaagccggcgtggaaaccaccaagccatccaagcagagcaacaacaaatacgccgccagctcctacctgagcctgacacctgagcagtggaagtcccacagatcctacagctgccaagtgacccacgaaggcagcaccgtggaaaagacagtggcccctacagagtgcagcggcagagccgattgcggctttaccagcgagagctaccagcagggcgtgctgagcgccaccatcctgtacgagatcctgctgggcaaggccaccctgtacgccgtgctggtgtctgccctggtgctgatggctatggtcaagcggaaggacagccggggacgcgccaagagaagcggatctggcgtgaagcagaccctgaatttcgacctgctgaagctggctggcgacgtggaatccaacccaggccctactagtatggactggatttggcgcatccttttccttgtcggcgctgctaccggcgcgcattccttcgaagaagttcagctggttgaatctggcggcggactcgttagacctggcggatctctgagactgagctgtgccgccagcggcttcaccttcgatgattacggcatgagctgggtccgacaggcccctggaaaaggactggaatgggtgtccggcatcagctggaatagcggctctatcggctacgccgacagcgtgaagggcagattcaccatcagccgggacaacgccaagaacagcctgtacctccagatgaactccctgagagccgaggacacagccctgtactactgtgccaagcggggcaacagcaacagcttcgattattggggccagggaaccaccgtgaccgtgtcatctacgcgtgcctctacaaagggaccctccgtgtttcctctggctcccagcagcaagtctacaagcggaggaacagccgctctgggctgcctggtcaaggattactttcccgagcctgtgaccgtgtcctggaatagcggagcactgacaagcggcgtgcacacctttccagccgtgctgcaaagcagcggcctgtactctctgagcagcgtggtcacagtgcctagctctagcctgggcacccagacctacatctgcaatgtgaaccacaagcctagcaacaccaaggtggacaagagagtggaacccaagagctgtatccccgaggacacattcttcccaagccccgagagcagctgcgacgtgaagctggtggaaaagagcttcgagacagacaccaacctgaacttccagaacctgagcgtgatcggcttcagaatcctgctgctgaaagtggccggctttaacctgctgatgaccctgcggctgtggtccagc

SEQ ID NO: 9333 - DNA, 2685 bp, Artificial Sequence
  Synthetic Polynucloetide
atggccttaccagtgaccgccttgctcctgccgctggccttgctgctccacgccgccaggccggaagtgcagctggttgaatctggcggaggactggttcagcctggcggatctctgagactgtcttgtgccgccagcggcttcagcttcagcgacttttggatgagctgggtccgacaggcccctggcaaaggacttgaatgggtcgccacaatcagccaggccggcagcgagaaggactacgtggactctgtgaagggcagattcaccatcagccgggacaacgccaagaagtccctgtacctccagatgaacagcctgagagccgaggacaccgccgtgtactattgtgcctctggcgtgtacagcttcgactacagaggccagggcaccctggtcacagtctcttctggtaccggcggaggcggatctggcggcggaggtagcggtggcggaggatctgaattcgacgtggtcatgacacagagcccttctagcctgtctgccagcgtgggcgacagagtgaccatcacctgtaaagccagccagagcgtgtccagctacctgaactggtatcagcagaagcccggcaaggcccctaagctgctgatctatgctgccagcagcctggaaacaggcgtgcccagcagattttctggcagcggctctggcaccgacttcaccctgacaatatccagcctccagcctgaggacttcgccacctactactgtcagcagagctacagcaccccttggacctttggccagggcaccaaggtggaaatcaagagactcgagatccagaaccctgatcctgccgtgtaccagctgcgggatagcaagagcagcgacaagagcgtgtgtctgttcaccgacttcgacagccagaccaacgtgtcccagagcaaggactccgacgtgtacatcaccgataagtgcgtgctggacatgcggagcatggacttcaagagcaactccgccgtggcctggtccaacaagtccgatttcgcctgcgccaacgccttcaacaacagcattatccccgaggacacattcttcccaagccccgagagcagctgcgacgtgaagctggtggaaaagagcttcgagacagacaccaacctgaacttccagaacctgagcgtgatcggcttcagaatcctgctgctgaaagtggccggctttaacctgctgatgaccctgcggctgtggtccagccgcgccaagagaagcggatctggcgtgaagcagaccctgaatttcgacctgctgaagctggctggcgacgtggaatccaacccaggccctactagtatggactggatttggcgcatccttttccttgtcggcgctgctaccggcgcgcattccgggccccagctccagctgcaagagtctggacctggcctggtcaagcctagcgagacactgagcctgacctgtaccgtgtccggcgatagcatcagcagcggcgattactactggggctggatcagacagcctcctggcaaaggactggaatggatcggccacatctactacagcggcgtgacctactacaaccccagcctgaagtccagagtgaccatcagcgtggacaccagccggaaccagttctccctgaagctgtctagcgtgacagccgccgataccgccgtgtactactgcaccagagaggacagcagcaactggcggagtagaggccagggaacactggtcacagttagctctggatccggcggaggcggaagtggaggcggaggatctggcggcggaggctctttcgaagaagttcagctggttgaatctggcggcggactcgttagacctggcggatctctgagactgagctgtgccgccagcggcttcaccttcgatgattacggcatgagctgggtccgacaggcccctggaaaaggactggaatgggtgtccggcatcagctggaatagcggctctatcggctacgccgacagcgtgaagggcagattcaccatcagccgggacaacgccaagaacagcctgtacctccagatgaactccctgagagccgaggacacagccctgtactactgtgccaagcggggcaacagcaacagcttcgattattggggccagggaaccaccgtgaccgtgtcatctacgcgtgaggacctgaagaacgtgttcccacctgaggtggccgtgttcgagcctagcgaggccgagatcagccacacccagaaagccaccctcgtgtgcctggctaccggcttctaccccgaccatgtggaactgtcttggtgggtcaacggcaaagaggtgcacagcggcgtgtgtaccgacccccagccactgaaagaacagcccgccctgaacgacagccggtactgcctgagcagcagactgagagtgtccgccaccttctggcagaacccccggaaccacttcagatgccaggtgcagttctacggcctgagcgagaacgacgagtggacccaggacagagccaagcccgtgacccagatcgtgtctgccgaagcctggggcagagccgattgcggctttaccagcgagagctaccagcagggcgtgctgagcgccaccatcctgtacgagatcctgctgggcaaggccaccctgtacgccgtgctggtgtctgccctggtgctgatggctatggtcaagcggaaggacagccgggga

SEQ ID NO: 9334 - DNA, 3261 bp, Artificial Sequence
  Synthetic Polynucloetide
atggccttaccagtgaccgccttgctcctgccgctggccttgctgctccacgccgccaggccggaagtgcagctggttgaatctggcggaggactggttcagcctggcggatctctgagactgtcttgtgccgccagcggcttcagcttcagcgacttttggatgagctgggtccgacaggcccctggcaaaggacttgaatgggtcgccacaatcagccaggccggcagcgagaaggactacgtggactctgtgaagggcagattcaccatcagccgggacaacgccaagaagtccctgtacctccagatgaacagcctgagagccgaggacaccgccgtgtactattgtgcctctggcgtgtacagcttcgactacagaggccagggcaccctggtcacagtctcttctggtaccggcggaggcggatctggcggcggaggtagcggtggcggaggatctgaattcgacgtggtcatgacacagagcccttctagcctgtctgccagcgtgggcgacagagtgaccatcacctgtaaagccagccagagcgtgtccagctacctgaactggtatcagcagaagcccggcaaggcccctaagctgctgatctatgctgccagcagcctggaaacaggcgtgcccagcagattttctggcagcggctctggcaccgacttcaccctgacaatatccagcctccagcctgaggacttcgccacctactactgtcagcagagctacagcaccccttggacctttggccagggcaccaaggtggaaatcaagagactcgaggacctgaagaacgtgttcccacctgaggtggccgtgttcgagcctagcgaggccgagatcagccacacccagaaagccaccctcgtgtgcctggctaccggcttctaccccgaccatgtggaactgtcttggtgggtcaacggcaaagaggtgcacagcggcgtgtctaccgacccccagccactgaaagaacagcccgccctgaacgacagccggtactgcctgagcagcagactgagagtgtccgccaccttctggcagaacccccggaaccacttcagatgccaggtgcagttctacggcctgagcgagaacgacgagtggacccaggacagagccaagcccgtgacccagatcgtgtctgccgaagcctggggcagagccgattgcggatcccagagcttcggcctgctggaccccaagctgtgctacctgctggatggcatcctgttcatctacggcgtgatcctgaccgccctgttcctgagagtgaagttcagcagaagcgccgacgcccctgcctaccagcagggacagaaccaactgtacaacgagctgaacctgggcagacgggaagagtacgacgtgctggacaagcggagaggcagggaccctgagatgggcggaaagccccagcggagaaagaacccccaggaaggactgtataacgaactccagaaagacaagatggccgaagcctacagcgagatcggcatgaagggcgagcggagaagaggcaagggccacgatggcctgtaccagggcctgagcaccgccaccaaggacacctatgacgccctgcacatgcaggccctgcctccaagaagggccaagcgatctggatctggagcaacaaacttctcactactcaaacaagcaggtgacgtggaggagaatcccgggcctactagtatggactggatttggcgcatccttttccttgtcggcgctgctaccggcgcgcattccgggccccagctccagctgcaagagtctggacctggcctggtcaagcctagcgagacactgagcctgacctgtaccgtgtccggcgatagcatcagcagcggcgattactactggggctggatcagacagcctcctggcaaaggactggaatggatcggccacatctactacagcggcgtgacctactacaaccccagcctgaagtccagagtgaccatcagcgtggacaccagccggaaccagttctccctgaagctgtctagcgtgacagccgccgataccgccgtgtactactgcaccagagaggacagcagcaactggcggagtagaggccagggaacactggtcacagttagctctggatccggcggaggcggaagtggaggcggaggatctggcggcggaggctctttcgaagaagttcagctggttgaatctggcggcggactcgttagacctggcggatctctgagactgagctgtgccgccagcggcttcaccttcgatgattacggcatgagctgggtccgacaggcccctggaaaaggactggaatgggtgtccggcatcagctggaatagcggctctatcggctacgccgacagcgtgaagggcagattcaccatcagccgggacaacgccaagaacagcctgtacctccagatgaactccctgagagccgaggacacagccctgtactactgtgccaagcggggcaacagcaacagcttcgattattggggccagggaaccaccgtgaccgtgtcatctacgcgtatccagaaccctgatcctgccgtgtaccagctgcgggatagcaagagcagcgacaagagcgtgtgtctgttcaccgacttcgacagccagaccaacgtgtcccagagcaaggactccgacgtgtacatcaccgataagaccgtgctggacatgcggagcatggacttcaagagcaactccgccgtggcctggtccaacaagtccgatttcgcctgcgccaacgccttcaacaacagcattatccccgaggacacattcttcccaagccccgagagcagctgcggtacccagagttttgggttgttggaccctaaattgtgctatctgttggacggaatcctgttcatttacggagtgatcctgaccgcattgttcctgcgggttaagttttccagatccgcagacgcacccgcttaccaacaagggcagaaccaactctacaatgaacttaatttggggcggagggaagagtacgacgttctggacaaaaggaggggacgagatcccgagatgggcggaaagcctcagcgaaggaagaatccgcaagaggggctttataacgaactccagaaagataaaatggcagaagcctatagtgagattgggatgaagggagaaaggaggaggggtaaaggtcacgatgggttgtaccaaggattgagcacagccactaaagatacctatgatgcgctccacatgcaggccctgccgccaaga

SEQ ID NO: 9335 - DNA, 2751 bp, Artificial Sequence
  Synthetic Polynucloetide
atggccttaccagtgaccgccttgctcctgccgctggccttgctgctccacgccgccaggccggaagtgcagctggttgaatctggcggaggactggttcagcctggcggatctctgagactgtcttgtgccgccagcggcttcagcttcagcgacttttggatgagctgggtccgacaggcccctggcaaaggacttgaatgggtcgccacaatcagccaggccggcagcgagaaggactacgtggactctgtgaagggcagattcaccatcagccgggacaacgccaagaagtccctgtacctccagatgaacagcctgagagccgaggacaccgccgtgtactattgtgcctctggcgtgtacagcttcgactacagaggccagggcaccctggtcacagtctcttctggtaccggcggaggcggatctggcggcggaggtagcggtggcggaggatctgaattcgacgtggtcatgacacagagcccttctagcctgtctgccagcgtgggcgacagagtgaccatcacctgtaaagccagccagagcgtgtccagctacctgaactggtatcagcagaagcccggcaaggcccctaagctgctgatctatgctgccagcagcctggaaacaggcgtgcccagcagattttctggcagcggctctggcaccgacttcaccctgacaatatccagcctccagcctgaggacttcgccacctactactgtcagcagagctacagcaccccttggacctttggccagggcaccaaggtggaaatcaagagactcgagggacagcctaaggccaatcctaccgtgacactgttccctccaagcagcgaagaactccaggccaacaaggccacacttgtgtgcctgatctccgacttctaccctggggctgtgacagtggcttggaaggccgatggatctcctgtgaaagccggcgtggaaaccaccaagccatccaagcagagcaacaacaaatacgccgccagctcctacctgagcctgacacctgagcagtggaagtcccacagatcctacagctgccaagtgacccacgaaggcagcaccgtggaaaagacagtggcccctacagagtgcagccccatcaagaccgatgtgattacaatggaccccaaggacaactgctccaaggacgccaacgataccctgctgctccagctgaccaacaccagcgcctactacatgtacttgttgctgctgctgaagtccgtggtgtacttcgccatcatcacatgctgcctgctgcggagaaccgccttctgctgcaacggcgagaagtctagggccaagcgatctggatctggagcaacaaacttctcactactcaaacaagcaggtgacgtggaggagaatcccgggcctactagtatggactggatttggcgcatccttttccttgtcggcgctgctaccggcgcgcattccgggccccagctccagctgcaagagtctggacctggcctggtcaagcctagcgagacactgagcctgacctgtaccgtgtccggcgatagcatcagcagcggcgattactactggggctggatcagacagcctcctggcaaaggactggaatggatcggccacatctactacagcggcgtgacctactacaaccccagcctgaagtccagagtgaccatcagcgtggacaccagccggaaccagttctccctgaagctgtctagcgtgacagccgccgataccgccgtgtactactgcaccagagaggacagcagcaactggcggagtagaggccagggaacactggtcacagttagctctggatccggcggaggcggaagtggaggcggaggatctggcggcggaggctctttcgaagaagttcagctggttgaatctggcggcggactcgttagacctggcggatctctgagactgagctgtgccgccagcggcttcaccttcgatgattacggcatgagctgggtccgacaggcccctggaaaaggactggaatgggtgtccggcatcagctggaatagcggctctatcggctacgccgacagcgtgaagggcagattcaccatcagccgggacaacgccaagaacagcctgtacctccagatgaactccctgagagccgaggacacagccctgtactactgtgccaagcggggcaacagcaacagcttcgattattggggccagggaaccaccgtgaccgtgtcatctacgcgtgcctctacaaagggaccctccgtgtttcctctggctcccagcagcaagtctacaagcggaggaacagccgctctgggctgcctggtcaaggattactttcccgagcctgtgaccgtgtcctggaatagcggagcactgacaagcggcgtgcacacctttccagccgtgctgcaaagcagcggcctgtactctctgagcagcgtggtcacagtgcctagctctagcctgggcacccagacctacatctgcaatgtgaaccacaagcctagcaacaccaaggtggacaagagagtggaacccaagagctgtgaagtgaaaaccgactccaccgaccacgtgaagcccaaagagacagagaacaccaagcagcccagcaagagctgccacaagcccaaggccatcgtgcacaccgagaaagtgaacatgatgagcctgaccgtgctgggcctgcggatgctgttcgccaaaaccgtggccgtgaacttcctgctgaccgccaagctgttcttcctc

SEQ ID NO: 9336 - DNA, 2694 bp, Artificial Sequence
  Synthetic Polynucloetide
atggccttaccagtgaccgccttgctcctgccgctggccttgctgctccacgccgccaggccggaagtgcagctggttgaatctggcggaggactggttcagcctggcggatctctgagactgtcttgtgccgccagcggcttcagcttcagcgacttttggatgagctgggtccgacaggcccctggcaaaggacttgaatgggtcgccacaatcagccaggccggcagcgagaaggactacgtggactctgtgaagggcagattcaccatcagccgggacaacgccaagaagtccctgtacctccagatgaacagcctgagagccgaggacaccgccgtgtactattgtgcctctggcgtgtacagcttcgactacagaggccagggcaccctggtcacagtctcttctggtaccggcggaggcggatctggcggcggaggtagcggtggcggaggatctgaattcgacgtggtcatgacacagagcccttctagcctgtctgccagcgtgggcgacagagtgaccatcacctgtaaagccagccagagcgtgtccagctacctgaactggtatcagcagaagcccggcaaggcccctaagctgctgatctatgctgccagcagcctggaaacaggcgtgcccagcagattttctggcagcggctctggcaccgacttcaccctgacaatatccagcctccagcctgaggacttcgccacctactactgtcagcagagctacagcaccccttggacctttggccagggcaccaaggtggaaatcaagagactcgagggacagcctaaggccaatcctaccgtgacactgttccctccaagcagcgaagaactccaggccaacaaggccacacttgtgtgcctgatctccgacttctaccctggggctgtgacagtggcttggaaggccgatggatctcctgtgaaagccggcgtggaaaccaccaagccatccaagcagagcaacaacaaatacgccgccagctcctacctgagcctgacacctgagcagtggaagtcccacagatcctacagctgccaagtgacccacgaaggcagcaccgtggaaaagacagtggcccctacagagtgcagcggcagagccgattgcggctttaccagcgagagctaccagcagggcgtgctgagcgccaccatcctgtacgagatcctgctgggcaaggccaccctgtacgccgtgctggtgtctgccctggtgctgatggctatggtcaagcggaaggacagccggggacgcgccaagagaagcggatctggcgtgaagcagaccctgaatttcgacctgctgaagctggctggcgacgtggaatccaacccaggccctactagtatggactggatttggcgcatccttttccttgtcggcgctgctaccggcgcgcattccgggccccagctccagctgcaagagtctggacctggcctggtcaagcctagcgagacactgagcctgacctgtaccgtgtccggcgatagcatcagcagcggcgattactactggggctggatcagacagcctcctggcaaaggactggaatggatcggccacatctactacagcggcgtgacctactacaaccccagcctgaagtccagagtgaccatcagcgtggacaccagccggaaccagttctccctgaagctgtctagcgtgacagccgccgataccgccgtgtactactgcaccagagaggacagcagcaactggcggagtagaggccagggaacactggtcacagttagctctggatccggcggaggcggaagtggaggcggaggatctggcggcggaggctctttcgaagaagttcagctggttgaatctggcggcggactcgttagacctggcggatctctgagactgagctgtgccgccagcggcttcaccttcgatgattacggcatgagctgggtccgacaggcccctggaaaaggactggaatgggtgtccggcatcagctggaatagcggctctatcggctacgccgacagcgtgaagggcagattcaccatcagccgggacaacgccaagaacagcctgtacctccagatgaactccctgagagccgaggacacagccctgtactactgtgccaagcggggcaacagcaacagcttcgattattggggccagggaaccaccgtgaccgtgtcatctacgcgtgcctctacaaagggaccctccgtgtttcctctggctcccagcagcaagtctacaagcggaggaacagccgctctgggctgcctggtcaaggattactttcccgagcctgtgaccgtgtcctggaatagcggagcactgacaagcggcgtgcacacctttccagccgtgctgcaaagcagcggcctgtactctctgagcagcgtggtcacagtgcctagctctagcctgggcacccagacctacatctgcaatgtgaaccacaagcctagcaacaccaaggtggacaagagagtggaacccaagagctgtatccccgaggacacattcttcccaagccccgagagcagctgcgacgtgaagctggtggaaaagagcttcgagacagacaccaacctgaacttccagaacctgagcgtgatcggcttcagaatcctgctgctgaaagtggccggctttaacctgctgatgaccctgcggctgtggtccagc

SEQ ID NO: 9337 - DNA, 2265 bp, Artificial Sequence
  Synthetic Polynucloetide
atggccttaccagtgaccgccttgctcctgccgctggccttgctgctccacgccgccaggccggaagtgcaggttttggagtctggcggaggactggttcagcctggcggatctctgagactgtcttgtgccgccagcggcttcaccttcagcaactttgccatgagctgggtccgacaggcccctggcaaaggacttgaatgggtgtccacaatcagcggcagcgccggcacaacagattacgccgattctgtgaagggcagattcaccatcagccgggacaacagcaagaaaaccctgtacctccagatgaacagcctgcgcgtggaagataccgccgtgtactactgtgccgatggcagaggccccttcttcgattatcgcggccagggcacactggtcaccgtttcttctggtaccggcggaggcggatctggcggcggaggtagcggtggcggaggatctgaattcgacgtggtcatgacacagagcccttctagcctgtctgccagcgtgggcgacagagtgaccatcacctgtaaagccagccagagcgtgtccagctacctgaactggtatcagcagaagcccggcaaggcccctaagctgctgatctatgctgccagcagcctggaaacaggcgtgcccagcagattttctggcagcggctctggcaccgacttcaccctgacaatatccagcctccagcctgaggacttcgccacctactactgtcagcagagctacagcaccccttggacctttggccagggcaccaaggtggaaatcaagagactcgaggacctgaagaacgtgttcccacctgaggtggccgtgttcgagcctagcgaggccgagatcagccacacccagaaagccaccctcgtgtgcctggctaccggcttctaccccgaccatgtggaactgtcttggtgggtcaacggcaaagaggtgcacagcggcgtgtgtaccgacccccagccactgaaagaacagcccgccctgaacgacagccggtactgcctgagcagcagactgagagtgtccgccaccttctggcagaacccccggaaccacttcagatgccaggtgcagttctacggcctgagcgagaacgacgagtggacccaggacagagccaagcccgtgacccagatcgtgtctgccgaagcctggggcagagccgattgcggctttaccagcgagagctaccagcagggcgtgctgagcgccaccatcctgtacgagatcctgctgggcaaggccaccctgtacgccgtgctggtgtctgccctggtgctgatggctatggtcaagcggaaggacagccggggaagggccaagcgatctggatctggagcaacaaacttctcactactcaaacaagcaggtgacgtggaggagaatcccgggcctactagtatggactggatttggcgcatccttttccttgtcggcgctgctaccggcgcgcattccttcgaagaagttcagctggttgaatctggcggcggactcgttagacctggcggatctctgagactgagctgtgccgccagcggcttcaccttcgatgattacggcatgagctgggtccgacaggcccctggaaaaggactggaatgggtgtccggcatcagctggaatagcggctctatcggctacgccgacagcgtgaagggcagattcaccatcagccgggacaacgccaagaacagcctgtacctccagatgaactccctgagagccgaggacacagccctgtactactgtgccaagcggggcaacagcaacagcttcgattattggggccagggaaccaccgtgaccgtgtcatctacgcgtatccagaaccctgatcctgccgtgtaccagctgcgggatagcaagagcagcgacaagagcgtgtgtctgttcaccgacttcgacagccagaccaacgtgtcccagagcaaggactccgacgtgtacatcaccgataagtgcgtgctggacatgcggagcatggacttcaagagcaactccgccgtggcctggtccaacaagtccgatttcgcctgcgccaacgccttcaacaacagcattatccccgaggacacattcttcccaagccccgagagcagctgcgacgtgaagctggtggaaaagagcttcgagacagacaccaacctgaacttccagaacctgagcgtgatcggcttcagaatcctgctgctgaaagtggccggctttaacctgctgatgaccctgcggctgtggtccagc

SEQ ID NO: 9338 - DNA, 2268 bp, Artificial Sequence
  Synthetic Polynucloetide
atggccttaccagtgaccgccttgctcctgccgctggccttgctgctccacgccgccaggccggacgtggtcatgacacagagcccttctagcctgtctgccagcgtgggcgacagagtgaccatcacctgtaaagccagccagagcgtgtccagctacctgaactggtatcagcagaagcccggcaaggcccctaagctgctgatctatgctgccagcagcctggaaacaggcgtgcccagcagattttctggcagcggctctggcaccgacttcaccctgacaatatccagcctccagcctgaggacttcgccacctactactgtcagcagagctacagcaccccttggacctttggccagggcaccaaggtggaaatcaagagactcgaggacctgaagaacgtgttcccacctgaggtggccgtgttcgagcctagcgaggccgagatcagccacacccagaaagccaccctcgtgtgcctggctaccggcttctaccccgaccatgtggaactgtcttggtgggtcaacggcaaagaggtgcacagcggcgtgtgtaccgacccccagccactgaaagaacagcccgccctgaacgacagccggtactgcctgagcagcagactgagagtgtccgccaccttctggcagaacccccggaaccacttcagatgccaggtgcagttctacggcctgagcgagaacgacgagtggacccaggacagagccaagcccgtgacccagatcgtgtctgccgaagcctggggcagagccgattgcggctttaccagcgagagctaccagcagggcgtgctgagcgccaccatcctgtacgagatcctgctgggcaaggccaccctgtacgccgtgctggtgtctgccctggtgctgatggctatggtcaagcggaaggacagccggggaagggccaagcgatctggatctggagcaacaaacttctcactactcaaacaagcaggtgacgtggaggagaatcccgggcctactagtatggactggatttggcgcatccttttccttgtcggcgctgctaccggcgcccattccgggcccgaagtgcagctggttgaatctggcggaggactggttcaggctggcggatctctgagactgtcttgtgccgccagcggcagaacctttagcatgggctggtttagacaggcccctggcaaagagagagagttcgtcgccgccatcacatactctggcggcagcccttactacgccgactctgtgaagggcagattcaccatcagccgggacaacgccaagaacaccgtgtacctccagatgaacagcctgaagcctgaggacaccgccgtgtactactgcgccgccaatccaacatacggcagcgactggaacgccgagaattggggccagggaacccaagtgacagtgtctagcggatccggcggcggaggatctggcggaggcggatctgggggcggaggctctttcgaagaagttcagctggttgaatctggcggcggactcgttagacctggcggatctctgagactgagctgtgccgccagcggcttcaccttcgatgattacggcatgagctgggtccgacaggcccctggaaaaggactggaatgggtgtccggcatcagctggaatagcggctctatcggctacgccgacagcgtgaagggcagattcaccatcagccgggacaacgccaagaacagcctgtacctccagatgaactccctgagagccgaggacacagccctgtactactgtgccaagcggggcaacagcaacagcttcgattattggggccagggaaccaccgtgaccgtgtcatctacgcgtatccagaaccctgatcctgccgtgtaccagctgcgggatagcaagagcagcgacaagagcgtgtgtctgttcaccgacttcgacagccagaccaacgtgtcccagagcaaggactccgacgtgtacatcaccgataagtgcgtgctggacatgcggagcatggacttcaagagcaactccgccgtggcctggtccaacaagtccgatttcgcctgcgccaacgccttcaacaacagcattatccccgaggacacattcttcccaagccccgagagcagctgcgacgtgaagctggtggaaaagagcttcgagacagacaccaacctgaacttccagaacctgagcgtgatcggcttcagaatcctgctgctgaaagtggccggctttaacctgctgatgaccctgcggctgtggtccagc

SEQ ID NO: 9339 - DNA, 2649 bp, Artificial Sequence
  Synthetic Polynucloetide
atggccttaccagtgaccgccttgctcctgccgctggccttgctgctccacgccgccaggccggacgtggtcatgacacagagcccttctagcctgtctgccagcgtgggcgacagagtgaccatcacctgtaaagccagccagagcgtgtccagctacctgaactggtatcagcagaagcccggcaaggcccctaagctgctgatctatgctgccagcagcctggaaacaggcgtgcccagcagattttctggcagcggctctggcaccgacttcaccctgacaatatccagcctccagcctgaggacttcgccacctactactgtcagcagagctacagcaccccttggacctttggccagggcaccaaggtggaaatcaagagactcgaggacctgaagaacgtgttcccacctgaggtggccgtgttcgagcctagcgaggccgagatcagccacacccagaaagccaccctcgtgtgcctggctaccggcttctaccccgaccatgtggaactgtcttggtgggtcaacggcaaagaggtgcacagcggcgtgtgtaccgacccccagccactgaaagaacagcccgccctgaacgacagccggtactgcctgagcagcagactgagagtgtccgccaccttctggcagaacccccggaaccacttcagatgccaggtgcagttctacggcctgagcgagaacgacgagtggacccaggacagagccaagcccgtgacccagatcgtgtctgccgaagcctggggcagagccgattgcggctttaccagcgagagctaccagcagggcgtgctgagcgccaccatcctgtacgagatcctgctgggcaaggccaccctgtacgccgtgctggtgtctgccctggtgctgatggctatggtcaagcggaaggacagccggggaagggccaagcgatctggatctggagcaacaaacttctcactactcaaacaagcaggtgacgtggaggagaatcccgggcctactagtatggactggatttggcgcatccttttccttgtcggcgctgctaccggcgcccattcccaactgcaactgcaagagtctggccctggcctggtcaagccttctgaaaccctgagcctgacctgtaccgtgtccggcggctctatcagcagcggcgattactactggggctggatcagacagcctccaggcaagggactcgaatggatcggcagcatcagctacagcggctccacctactacaacccaagcctgaagtccagagtgaccatcagcgtggacaccagcagaaaccagttctccctgaagctgagcagcgtgacagccgccgatacagccgtgtattattgcaccagagaggacagcagcaactggcggagtagaggacagggcacactggtcacagtgtcctcttctggaggcggtggaagcggtggaggaggatctgaagtgcagctggttgaatctggcggaggactggttcaggctggcggatctctgagactgtcttgtgccgccagcggcagaacctttagcatgggctggtttagacaggcccctggcaaagagagagagttcgtcgccgccatcacatactctggcggcagcccttactacgccgactctgtgaagggcagattcaccatcagccgggacaacgccaagaacaccgtgtacctccagatgaacagcctgaagcctgaggacaccgccgtgtactactgcgccgccaatccaacatacggcagcgactggaacgccgagaattggggccagggaacccaagtgacagtgtctagcggatccggcggcggaggatctggcggaggcggatctgggggcggaggctctttcgaagaagttcagctggttgaatctggcggcggactcgttagacctggcggatctctgagactgagctgtgccgccagcggcttcaccttcgatgattacggcatgagctgggtccgacaggcccctggaaaaggactggaatgggtgtccggcatcagctggaatagcggctctatcggctacgccgacagcgtgaagggcagattcaccatcagccgggacaacgccaagaacagcctgtacctccagatgaactccctgagagccgaggacacagccctgtactactgtgccaagcggggcaacagcaacagcttcgattattggggccagggaaccaccgtgaccgtgtcatctacgcgtatccagaaccctgatcctgccgtgtaccagctgcgggatagcaagagcagcgacaagagcgtgtgtctgttcaccgacttcgacagccagaccaacgtgtcccagagcaaggactccgacgtgtacatcaccgataagtgcgtgctggacatgcggagcatggacttcaagagcaactccgccgtggcctggtccaacaagtccgatttcgcctgcgccaacgccttcaacaacagcattatccccgaggacacattcttcccaagccccgagagcagctgcgacgtgaagctggtggaaaagagcttcgagacagacaccaacctgaacttccagaacctgagcgtgatcggcttcagaatcctgctgctgaaagtggccggctttaacctgctgatgaccctgcggctgtggtccagc

SEQ ID NO: 9340 - DNA, 2676 bp, Artificial Sequence
  Synthetic Polynucloetide
atggccttaccagtgaccgccttgctcctgccgctggccttgctgctccacgccgccaggccggaagtgcaggttttggagtctggcggaggactggttcagcctggcggatctctgagactgtcttgtgccgccagcggcttcaccttcagcaactttgccatgagctgggtccgacaggcccctggcaaaggacttgaatgggtgtccacaatcagcggcagcgccggcacaacagattacgccgattctgtgaagggcagattcaccatcagccgggacaacagcaagaaaaccctgtacctccagatgaacagcctgcgcgtggaagataccgccgtgtactactgtgccgatggcagaggccccttcttcgattatcgcggccagggcacactggtcaccgtttcttctggtaccggcggaggcggatctggcggcggaggtagcggtggcggaggatctgaattcgacgtggtcatgacacagagcccttctagcctgtctgccagcgtgggcgacagagtgaccatcacctgtaaagccagccagagcgtgtccagctacctgaactggtatcagcagaagcccggcaaggcccctaagctgctgatctatgctgccagcagcctggaaacaggcgtgcccagcagattttctggcagcggctctggcaccgacttcaccctgacaatatccagcctccagcctgaggacttcgccacctactactgtcagcagagctacagcaccccttggacctttggccagggcaccaaggtggaaatcaagagactcgaggacctgaagaacgtgttcccacctgaggtggccgtgttcgagcctagcgaggccgagatcagccacacccagaaagccaccctcgtgtgcctggctaccggcttctaccccgaccatgtggaactgtcttggtgggtcaacggcaaagaggtgcacagcggcgtgtgtaccgacccccagccactgaaagaacagcccgccctgaacgacagccggtactgcctgagcagcagactgagagtgtccgccaccttctggcagaacccccggaaccacttcagatgccaggtgcagttctacggcctgagcgagaacgacgagtggacccaggacagagccaagcccgtgacccagatcgtgtctgccgaagcctggggcagagccgattgcggctttaccagcgagagctaccagcagggcgtgctgagcgccaccatcctgtacgagatcctgctgggcaaggccaccctgtacgccgtgctggtgtctgccctggtgctgatggctatggtcaagcggaaggacagccggggaagggccaagcgatctggatctggagcaacaaacttctcactactcaaacaagcaggtgacgtggaggagaatcccgggcctactagtatggactggatttggcgcatccttttccttgtcggcgctgctaccggcgcccattccgggcccgaagtgcagctggttgaatctggcggaggactggttcaggctggcggatctctgagactgtcttgtgccgccagcggcagaacctttagcatgggctggtttagacaggcccctggcaaagagagagagttcgtcgccgccatcacatacagcggcggcagcccttactacgcctcttctgtcagaggccggttcaccatcagccgggacaacgccaagaacaccgtgtacctccagatgaacagcctgaagccagaggacaccgccgtgtactactgtgccgccaatccaacctacggcagcgactggaatgccgagaattggggccagggcacccaagtgacagtgtctagtggatccggcggcggaggatctggcggaggcggatctgggggcggaggctctttcgaagaagttcagctggttgaatctggcggcggactcgttagacctggcggatctctgagactgagctgtgccgccagcggcttcaccttcgatgattacggcatgagctgggtccgacaggcccctggaaaaggactggaatgggtgtccggcatcagctggaatagcggctctatcggctacgccgacagcgtgaagggcagattcaccatcagccgggacaacgccaagaacagcctgtacctccagatgaactccctgagagccgaggacacagccctgtactactgtgccaagcggggcaacagcaacagcttcgattattggggccagggaaccaccgtgaccgtgtcatctacgcgtatccagaaccctgatcctgccgtgtaccagctgcgggatagcaagagcagcgacaagagcgtgtgtctgttcaccgacttcgacagccagaccaacgtgtcccagagcaaggactccgacgtgtacatcaccgataagtgcgtgctggacatgcggagcatggacttcaagagcaactccgccgtggcctggtccaacaagtccgatttcgcctgcgccaacgccttcaacaacagcattatccccgaggacacattcttcccaagccccgagagcagctgcgacgtgaagctggtggaaaagagcttcgagacagacaccaacctgaacttccagaacctgagcgtgatcggcttcagaatcctgctgctgaaagtggccggctttaacctgctgatgaccctgcggctgtggtccagc

SEQ ID NO: 9341 - DNA, 2172 bp, Artificial Sequence
  Synthetic Polynucloetide
atggccttaccagtgaccgccttgctcctgccgctggccttgctgctccacgccgccaggccggacatccagatgacacagagccctagcagcgtgtccgcctctgtgggagacagagtgaccatcacctgtagagccagccagagcatcagcagctacctgaactggtatcagcagaagcccggcaaggcccctaaactgctgatctatgccgccagctctctccagagcggagtgcctagcagattttctggcagcggctccggcaccgatttcaccctgacaatatccagcctccagcctgaggacttcgccacctactactgccagcagagctacagcaccccttggacctttggacagggcaccaaggtggaaatcaagagaggcggaggcggaagtggaggcggaggatctggcggcggaggctctgaagtgcagctggttgaatcaggtggcggcctggttcagcctggcagaagtctgagactgagctgtgccgcctccggcttcaccttcgatgattacgccatgcactgggtccgacaggcccctggaaaaggactggaatgggtgtccggcatcagctggaatagcggctctatcggctacgccgattccgccaagggcagattcaccatcagccgggacaacagcaagaacaccctgtacctccagatgaactccctgagagccgaggacaccgccgtgtactactgtgccaagaggggcaacagcaacagcttcgactattggggccagggcaccctggtcacagtctcttctacgcgtgagcagaaactgatctcggaagaggatctggcgaagcccaccacgacgccagcgccgcgaccaccaacaccggcgcccaccatcgcgtcgcagcccctgtccctgcgcccagaggcgtgccggccagcggcggggggcgcagtgcacacgagggggctggacttcgcctgtgacatctacatctgggcgcccttggccgggacttgtggggtccttctcctgtcactggttatcaccctttactgcaaacggggcagaaagaaactcctgtatatattcaaacaaccatttatgagaccagtacaaactactcaagaggaagatggctgtagctgccgatttccagaagaagaagaaggaggatgtgaactgagagtgaagttcagcaggagcgcagacgcccccgcgtaccagcagggccagaaccagctctataacgagctgaatctaggacgaagagaggagtacgatgttttggacaagagacgtggccgggaccctgagatggggggaaagccgagaaggaagaaccctcaggaaggcctgtacaatgaactgcagaaagataagatggcggaggcctacagtgagattgggatgaaaggcgagcgccggaggggcaaggggcacgatggcctttaccagggtctcagtacagccaccaaggacacctacgacgcccttcacatgcaggccctgccccctcgctctagtggctccggcgagggcagaggaagtctactaacctgcggagatgtggaagaaaatcctggcccacatatgaccgagtacaagcccacggtgcgcctcgccacccgcgacgacgtccccagggccgtacgcaccctcgccgccgcgttcgccgactaccccgccacgcgccacaccgtcgatccggaccgccacatcgagcgggtcaccgagctgcaagaactcttcctcacgcgcgtcgggctcgacatcggcaaggtgtgggtcgcggacgacggcgccgcggtggcggtctggaccacgccggagagcgtcgaagcgggggcggtgttcgccgagatcggcccgcgcatggccgagttgagcggttcccggctggccgcgcagcaacagatggaaggcctcctggcgccgcaccggcccaaggagcccgcgtggttcctggccaccgtcggcgtctcgcccgaccaccagggcaagggtctgggcagcgccgtcgtgctccccggagtggaggcggccgagcgcgccggggtgcccgccttcctggagacctccgcgccccgcaacctccccttctacgagcggctcggcttcaccgtcaccgccgacgtcgaggtgcccgaaggaccgcgcacctggtgcatgacccgcaagcccggtgcctga

SEQ ID NO: 9342 - DNA, 2154 bp, Artificial Sequence
  Synthetic Polynucloetide
atggccttaccagtgaccgccttgctcctgccgctggccttgctgctccacgccgccaggccggacatccagatgacacagagccctagcagcgtgtccgcctctgtgggagacagagtgaccatcacctgtagagccagccagagcatcagcagctacctgaactggtatcagcagaagcccggcaaggcccctaaactgctgatctatgccgccagctctctccagagcggagtgcctagcagattttctggcagcggctccggcaccgatttcaccctgacaatatccagcctccagcctgaggacttcgccacctactactgccagcagagctacagcaccccttggacctttggacagggcaccaaggtggaaatcaagagaggcggaggcggaagtggaggcggaggatctggcggcggaggctctgaagtgcagctggttgaatcaggtggcggcctggttcagcctggcagaagtctgagactgagctgtgccgcctccggcttcaccttcgatgattacgccatgcactgggtccgacaggcccctggaaaaggactggaatgggtgtccggcatcagctggaatagcggctctatcggctacgccgattccgccaagggcagattcaccatcagccgggacaacagcaagaacaccctgtacctccagatgaactccctgagagccgaggacaccgccgtgtactactgtgccaagaggggcaacagcaacagcttcgactattggggccagggcaccctggtcacagtctcttctacgcgtgagcagaaactgatctcggaagaggatctgaaaattgaagttatgtatcctcctccttacctagacaatgagaagagcaatggaaccattatccatgtgaaagggaaacacctttgtccaagtcccctatttcccggaccttctaagcccttttgggtgctggtggtggttgggggagtcctggcttgctatagcttgctagtaacagtggcctttattattttctgggtgaggagtaagaggagcaggctcctgcacagtgactacatgaacatgactccacgccgccccggacccacccgcaagcattaccagccctatgccccaccacgcgacttcgcagcctatcgctccagagtgaagttcagcaggagcgcagacgcccccgcgtaccagcagggccagaaccagctctataacgagctcaatctaggacgaagagaggagtacgatgttttggacaagagacgtggccgggaccctgagatggggggaaagccgagaaggaagaaccctcaggaaggcctgtacaatgaactgcagaaagataagatggcggaggcctacagtgagattgggatgaaaggcgagcgccggaggggcaaggggcacgatggcctttaccagggtctcagtacagccaccaaggacacctacgacgcccttcacatgcaggccctgccccctcgctctagtggctccggcgagggcagaggaagtctactaacctgcggagatgtggaagaaaatcctggcccacatatgaccgagtacaagcccacggtgcgcctcgccacccgcgacgacgtccccagggccgtacgcaccctcgccgccgcgttcgccgactaccccgccacgcgccacaccgtcgatccggaccgccacatcgagcgggtcaccgagctgcaagaactcttcctcacgcgcgtcgggctcgacatcggcaaggtgtgggtcgcggacgacggcgccgcggtggcggtctggaccacgccggagagcgtcgaagcgggggcggtgttcgccgagatcggcccgcgcatggccgagttgagcggttcccggctggccgcgcagcaacagatggaaggcctcctggcgccgcaccggcccaaggagcccgcgtggttcctggccaccgtcggcgtctcgcccgaccaccagggcaagggtctgggcagcgccgtcgtgctccccggagtggaggcggccgagcgcgccggggtgcccgccttcctggagacctccgcgccccgcaacctccccttctacgagcggctcggcttcaccgtcaccgccgacgtcgaggtgcccgaaggaccgcgcacctggtgcatgacccgcaagcccggtgcctga

SEQ ID NO: 9343 - DNA, 1482 bp, Artificial Sequence
  Synthetic Polynucloetide
atggccttaccagtgaccgccttgctcctgccgctggccttgctgctccacgccgccaggccggacatccagatgacacagagccctagcagcgtgtccgcctctgtgggagacagagtgaccatcacctgtagagccagccagagcatcagcagctacctgaactggtatcagcagaagcccggcaaggcccctaaactgctgatctatgccgccagctctctccagagcggagtgcctagcagattttctggcagcggctccggcaccgatttcaccctgacaatatccagcctccagcctgaggacttcgccacctactactgccagcagagctacagcaccccttggacctttggacagggcaccaaggtggaaatcaagagaggcggaggcggaagtggaggcggaggatctggcggcggaggctctgaagtgcagctggttgaatcaggtggcggcctggttcagcctggcagaagtctgagactgagctgtgccgcctccggcttcaccttcgatgattacgccatgcactgggtccgacaggcccctggaaaaggactggaatgggtgtccggcatcagctggaatagcggctctatcggctacgccgattccgccaagggcagattcaccatcagccgggacaacagcaagaacaccctgtacctccagatgaactccctgagagccgaggacaccgccgtgtactactgtgccaagaggggcaacagcaacagcttcgactattggggccagggcaccctggtcacagtctcttctacgcgtgagcagaaactgatctcggaagaggatctgaaaattgaagttatgtatcctcctccttacctagacaatgagaagagcaatggaaccattatccatgtgaaagggaaacacctttgtccaagtcccctatttcccggaccttctaagcccttttgggtgctggtggtggttgggggagtcctggcttgctatagcttgctagtaacagtggcctttattattttctgggtgaggagtaagaggagcaggctcctgcacagtgactacatgaacatgactccacgccgccccggacccacccgcaagcattaccagccctatgccccaccacgcgacttcgcagcctatcgctccagagtgaagttcagcaggagcgcagacgcccccgcgtaccagcagggccagaaccagctctataacgagctcaatctaggacgaagagaggagtacgatgttttggacaagagacgtggccgggaccctgagatggggggaaagccgagaaggaagaaccctcaggaaggcctgtacaatgaactgcagaaagataagatggcggaggcctacagtgagattgggatgaaaggcgagcgccggaggggcaaggggcacgatggcctttaccagggtctcagtacagccaccaaggacacctacgacgcccttcacatgcaggccctgccccctcgc

SEQ ID NO: 9344 - DNA, 1503 bp, Artificial Sequence
  Synthetic Polynucloetide
atggccttaccagtgaccgccttgctcctgccgctggccttgctgctccacgccgccaggccggacatccagatgacacagagccctagcagcgtgtccgcctctgtgggagacagagtgaccatcacctgtagagccagccagagcatcagcagctacctgaactggtatcagcagaagcccggcaaggcccctaaactgctgatctatgccgccagctctctccagagcggagtgcctagcagattttctggcagcggctccggcaccgatttcaccctgacaatatccagcctccagcctgaggacttcgccacctactactgccagcagagctacagcaccccttggacctttggacagggcaccaaggtggaaatcaagagaggcggaggcggaagtggaggcggaggatctggcggcggaggctctgaagtgcagctggttgaatcaggtggcggcctggttcagcctggcagaagtctgagactgagctgtgccgcctccggcttcaccttcgatgattacgccatgcactgggtccgacaggcccctggaaaaggactggaatgggtgtccggcatcagctggaatagcggctctatcggctacgccgattccgccaagggcagattcaccatcagccgggacaacagcaagaacaccctgtacctccagatgaactccctgagagccgaggacaccgccgtgtactactgtgccaagaggggcaacagcaacagcttcgactattggggccagggcaccctggtcacagtctcttctacgcgtgagcagaaactgatctcggaagaggatctggcgaagcccaccacgacgccagcgccgcgaccaccaacaccggcgcccaccatcgcgtcgcagcccctgtccctgcgcccagaggcgtgccggccagcggcggggggcgcagtgcacacgagggggctggacttcgcctgtgacatctacatctgggcgcccttggccgggacttgtggggtccttctcctgtcactggttatcaccctttactgcaaacggggcagaaagaaactcctgtatatattcaaacaaccatttatgagaccagtacaaactactcaagaggaagatggctgtagctgccgatttccagaagaagaagaaggaggatgtgaactgagagtgaagttcagcaggagcgcagacgcccccgcgtaccagcagggccagaaccagctctataacgagctgaatctaggacgaagagaggagtacgatgttttggacaagagacgtggccgggaccctgagatggggggaaagccgagaaggaagaaccctcaggaaggcctgtacaatgaactgcagaaagataagatggcggaggcctacagtgagattgggatgaaaggcgagcgccggaggggcaaggggcacgatggcctttaccagggtctcagtacagccaccaaggacacctacgacgcccttcacatgcaggccctgccccctcgctga

SEQ ID NO: 9345 - DNA, 1503 bp, Artificial Sequence
  Synthetic Polynucloetide
atggccttaccagtgaccgccttgctcctgccgctggccttgctgctccacgccgccaggccggaagtgcagctggttgaatcaggtggcggcctggttcagcctggcagaagtctgagactgagctgtgccgcctccggcttcaccttcgatgattacgccatgcactgggtccgacaggcccctggaaaaggactggaatgggtgtccggcatcagctggaatagcggctctatcggctacgccgattccgccaagggcagattcaccatcagccgggacaacagcaagaacaccctgtacctccagatgaactccctgagagccgaggacaccgccgtgtactactgtgccaagaggggcaacagcaacagcttcgactattggggccagggcaccctggtcacagtctcttctggcggaggcggaagtggaggcggaggatctggcggcggaggctctgacatccagatgacacagagccctagcagcgtgtccgcctctgtgggagacagagtgaccatcacctgtagagccagccagagcatcagcagctacctgaactggtatcagcagaagcccggcaaggcccctaaactgctgatctatgccgccagctctctccagagcggagtgcctagcagattttctggcagcggctccggcaccgatttcaccctgacaatatccagcctccagcctgaggacttcgccacctactactgccagcagagctacagcaccccttggacctttggacagggcaccaaggtggaaatcaagagaacgcgtgagcagaaactgatctcggaagaggatctggcgaagcccaccacgacgccagcgccgcgaccaccaacaccggcgcccaccatcgcgtcgcagcccctgtccctgcgcccagaggcgtgccggccagcggcggggggcgcagtgcacacgagggggctggacttcgcctgtgacatctacatctgggcgcccttggccgggacttgtggggtccttctcctgtcactggttatcaccctttactgcaaacggggcagaaagaaactcctgtatatattcaaacaaccatttatgagaccagtacaaactactcaagaggaagatggctgtagctgccgatttccagaagaagaagaaggaggatgtgaactgagagtgaagttcagcaggagcgcagacgcccccgcgtaccagcagggccagaaccagctctataacgagctgaatctaggacgaagagaggagtacgatgttttggacaagagacgtggccgggaccctgagatggggggaaagccgagaaggaagaaccctcaggaaggcctgtacaatgaactgcagaaagataagatggcggaggcctacagtgagattgggatgaaaggcgagcgccggaggggcaaggggcacgatggcctttaccagggtctcagtacagccaccaaggacacctacgacgcccttcacatgcaggccctgccccctcgctga

SEQ ID NO: 9346 - DNA, 2742 bp, Artificial Sequence
  Synthetic Polynucloetide
atggccttaccagtgaccgccttgctcctgccgctggccttgctgctccacgccgccaggccggacatccagatgacacagagccctagcagcgtgtccgcctctgtgggagacagagtgaccatcacctgtagagccagccagagcatcagcagctacctgaactggtatcagcagaagcccggcaaggcccctaaactgctgatctatgccgccagctctctccagagcggagtgcctagcagattttctggcagcggctccggcaccgatttcaccctgacaatatccagcctccagcctgaggacttcgccacctactactgccagcagagctacagcaccccttggacctttggacagggcaccaaggtggaaatcaagagaggcggaggcggaagtggaggcggaggatctggcggcggaggctctgaagtgcagctggttgaatcaggtggcggcctggttcagcctggcagaagtctgagactgagctgtgccgcctccggcttcaccttcgatgattacgccatgcactgggtccgacaggcccctggaaaaggactggaatgggtgtccggcatcagctggaatagcggctctatcggctacgccgattccgccaagggcagattcaccatcagccgggacaacagcaagaacaccctgtacctccagatgaactccctgagagccgaggacaccgccgtgtactactgtgccaagaggggcaacagcaacagcttcgactattggggccagggcaccctggtcacagtctcttctacgcgtgagcagaaactgatctcggaagaggatctggcgaagcccaccacgacgccagcgccgcgaccaccaacaccggcgcccaccatcgcgtcgcagcccctgtccctgcgcccagaggcgtgccggccagcggcggggggcgcagtgcacacgagggggctggacttcgcctgtgacatctacatctgggcgcccttggccgggacttgtggggtccttctcctgtcactggttatcaccctttactgcgggcgcgccagagtgaagttcagcaggagcgcagacgcccccgcgtaccagcagggccagaaccagctctataacgagctgaatctaggacgaagagaggagtacgatgttttggacaagagacgtggccgggaccctgagatggggggaaagccgagaaggaagaaccctcaggaaggcctgtacaatgaactgcagaaagataagatggcggaggcctacagtgagattgggatgaaaggcgagcgccggaggggcaaggggcacgatggcctttaccagggtctcagtacagccaccaaggacacctacgacgcccttcacatgcaggccctgccccctcgctctagaggatctggagcaacaaacttctcactactcaaacaagcaggtgacgtggaggagaatcccgggcctgggatccacatggccacttacgaggttctctgtgaggtggcgcggaaactgggcacggatgacagggaagtggtattgttcctcctaaacgtgttcatacctcaacccacactggcccaattaattggagctcttagagctttaaaggaggagggcaggttaacgtttcccctgttagcggaatgtctgtttcgtgcaggtcgcagagacctcttgcgcgacctgcttcacttagacccgcgttttttagagcgccacctagcgggcacaatgagttatttcagcccttatcagctcactgttctccacgtagacggggagctgtgtgcgagggatattaggtctttgatatttttaagcaaggacactatagggtctcgcagcacaccacagacattcttacactgggtgtactgtatggaaaacttagacctactgggtcccactgacgtggatgccctaatgtcaatgcttagatctttgtcaagagtagacctacagcgccaagtgcaaaccctaatgggccttcacctttccggcccatcacactcccaacactatcgccatacaccactcgagaccgatttctacgactacaaggacgacgatgacaagactagtggctccggcgagggcagaggaagtctactaacctgcggagatgtggaagaaaatcctggcccacatatgaccgagtacaagcccacggtgcgcctcgccacccgcgacgacgtccccagggccgtacgcaccctcgccgccgcgttcgccgactaccccgccacgcgccacaccgtcgatccggaccgccacatcgagcgggtcaccgagctgcaagaactcttcctcacgcgcgtcgggctcgacatcggcaaggtgtgggtcgcggacgacggcgccgcggtggcggtctggaccacgccggagagcgtcgaagcgggggcggtgttcgccgagatcggcccgcgcatggccgagttgagcggttcccggctggccgcgcagcaacagatggaaggcctcctggcgccgcaccggcccaaggagcccgcgtggttcctggccaccgtcggcgtctcgcccgaccaccagggcaagggtctgggcagcgccgtcgtgctccccggagtggaggcggccgagcgcgccggggtgcccgccttcctggagacctccgcgccccgcaacctccccttctacgagcggctcggcttcaccgtcaccgccgacgtcgaggtgcccgaaggaccgcgcacctggtgcatgacccgcaagcccggtgcctga

SEQ ID NO: 9347 - DNA, 2562 bp, Artificial Sequence
  Synthetic Polynucloetide
atggccttaccagtgaccgccttgctcctgccgctggccttgctgctccacgccgccaggccggacatccagatgacacagagccctagcagcgtgtccgcctctgtgggagacagagtgaccatcacctgtagagccagccagagcatcagcagctacctgaactggtatcagcagaagcccggcaaggcccctaaactgctgatctatgccgccagctctctccagagcggagtgcctagcagattttctggcagcggctccggcaccgatttcaccctgacaatatccagcctccagcctgaggacttcgccacctactactgccagcagagctacagcaccccttggacctttggacagggcaccaaggtggaaatcaagagactcgagatccagaaccctgatcctgccgtgtaccagctgcgggatagcaagagcagcgacaagagcgtgtgtctgttcaccgacttcgacagccagaccaacgtgtcccagagcaaggactccgacgtgtacatcaccgataagtgcgtgctggacatgcggagcatggacttcaagagcaactccgccgtggcctggtccaacaagtccgatttcgcctgcgccaacgccttcaacaacagcattatccccgaggacacattcttcccaagcagcgacgtgccctgcgacgtgaagctggtggaaaagagcttcgagacagacaccaacctgaacttccagaacctgagcgtgatcggcttcagaatcctgctgctgaaagtggccggctttaacctgctgatgaccctgcggctgtggtccagccgcgccaagagaagcggatctggcgtgaagcagaccctgaatttcgacctgctgaagctggctggcgacgtggaatccaacccaggccctactagtatggactggatttggcgcatccttttccttgtcggcgctgctaccggcgcgcattccttcgaagaagtgcagctggttgaatcaggtggcggcctggttcagcctggcagaagtctgagactgagctgtgccgcctccggcttcaccttcgatgattacgccatgcactgggtccgacaggcccctggaaaaggactggaatgggtgtccggcatcagctggaatagcggctctatcggctacgccgattccgccaagggcagattcaccatcagccgggacaacagcaagaacaccctgtacctccagatgaactccctgagagccgaggacaccgccgtgtactactgtgccaagaggggcaacagcaacagcttcgactattggggccagggcaccctggtcacagtctcttctacgcgtgaggacctgaagaacgtgttcccacctgaggtggccgtgttcgagcctagcaaggccgagatcgcccacacccagaaagccaccctcgtgtgcctggctaccggcttctaccccgaccatgtggaactgtcttggtgggtcaacggcaaagaggtgcacagcggcgtgtgtaccgacccccagccactgaaagaacagcccgccctgaacgacagccggtactgcctgagcagcagactgagagtgtccgccaccttctggcagaacccccggaaccacttcagatgccaggtgcagttctacggcctgagcgagaacgacgagtggacccaggacagagccaagcccgtgacccagatcgtgtctgccgaagcctggggcagagccgattgcggcatcaccagcgccagctaccaccagggcgtgctgagcgccaccatcctgtacgagatcctgctgggcaaggccaccctgtacgccgtgctggtgtctgccctggtgctgatggctatggtcaagcggaaggacagccggggaagggccaagcgatctggatctggagcaacaaacttctcactactcaaacaagcaggtgacgtggaggagaatcccgggccttctagaggccatatgaccgagtacaagcccacggtgcgcctcgccacccgcgacgacgtccccagggccgtacgcaccctcgccgccgcgttcgccgactaccccgccacgcgccacaccgtcgatccggaccgccacatcgagcgggtcaccgagctgcaagaactcttcctcacgcgcgtcgggctcgacatcggcaaggtgtgggtcgcggacgacggcgccgcggtggcggtctggaccacgccggagagcgtcgaagcgggggcggtgttcgccgagatcggcccgcgcatggccgagttgagcggttcccggctggccgcgcagcaacagatggaaggcctcctggcgccgcaccggcccaaggagcccgcgtggttcctggccaccgtcggcgtctcgcccgaccaccagggcaagggtctgggcagcgccgtcgtgctccccggagtggaggcggccgagcgcgccggggtgcccgccttcctggagacctccgcgccccgcaacctccccttctacgagcggctcggcttcaccgtcaccgccgacgtcgaggtgcccgaaggaccgcgcacctggtgcatgacccgcaagcccggtgcctga

SEQ ID NO: 9348 - DNA, 2559 bp, Artificial Sequence
  Synthetic Polynucloetide
atggccttaccagtgaccgccttgctcctgccgctggccttgctgctccacgccgccaggccggacatccagatgacacagagccctagcagcgtgtccgcctctgtgggagacagagtgaccatcacctgtagagccagccagagcatcagcagctacctgaactggtatcagcagaagcccggcaaggcccctaaactgctgatctatgccgccagctctctccagagcggagtgcctagcagattttctggcagcggctccggcaccgatttcaccctgacaatatccagcctccagcctgaggacttcgccacctactactgccagcagagctacagcaccccttggacctttggacagggcaccaaggtggaaatcaagagactcgaggacctgaagaacgtgttcccacctgaggtggccgtgttcgagcctagcaaggccgagatcgcccacacccagaaagccaccctcgtgtgcctggctaccggcttctaccccgaccatgtggaactgtcttggtgggtcaacggcaaagaggtgcacagcggcgtgtgtaccgacccccagccactgaaagaacagcccgccctgaacgacagccggtactgcctgagcagcagactgagagtgtccgccaccttctggcagaacccccggaaccacttcagatgccaggtgcagttctacggcctgagcgagaacgacgagtggacccaggacagagccaagcccgtgacccagatcgtgtctgccgaagcctggggcagagccgattgcggcatcaccagcgccagctaccaccagggcgtgctgagcgccaccatcctgtacgagatcctgctgggcaaggccaccctgtacgccgtgctggtgtctgccctggtgctgatggctatggtcaagcggaaggacagccggggaagggccaagcgatctggatctggagcaacaaacttctcactactcaaacaagcaggtgacgtggaggagaatcccgggcctactagtatggactggatttggcgcatccttttccttgtcggcgctgctaccggcgcgcattccttcgaagaagtgcagctggttgaatcaggtggcggcctggttcagcctggcagaagtctgagactgagctgtgccgcctccggcttcaccttcgatgattacgccatgcactgggtccgacaggcccctggaaaaggactggaatgggtgtccggcatcagctggaatagcggctctatcggctacgccgattccgccaagggcagattcaccatcagccgggacaacagcaagaacaccctgtacctccagatgaactccctgagagccgaggacaccgccgtgtactactgtgccaagaggggcaacagcaacagcttcgactattggggccagggcaccctggtcacagtctcttctacgcgtatccagaaccctgatcctgccgtgtaccagctgcgggatagcaagagcagcgacaagagcgtgtgtctgttcaccgacttcgacagccagaccaacgtgtcccagagcaaggactccgacgtgtacatcaccgataagtgcgtgctggacatgcggagcatggacttcaagagcaactccgccgtggcctggtccaacaagtccgatttcgcctgcgccaacgccttcaacaacagcattatccccgaggacacattcttcccaagcagcgacgtgccctgcgacgtgaagctggtggaaaagagcttcgagacagacaccaacctgaacttccagaacctgagcgtgatcggcttcagaatcctgctgctgaaagtggccggctttaacctgctgatgaccctgcggctgtggtccagccgcgccaagagaagcggatctggcgtgaagcagaccctgaatttcgacctgctgaagctggctggcgacgtggaatccaacccaggcccttctagaggccatatgaccgagtacaagcccacggtgcgcctcgccacccgcgacgacgtccccagggccgtacgcaccctcgccgccgcgttcgccgactaccccgccacgcgccacaccgtcgatccggaccgccacatcgagcgggtcaccgagctgcaagaactcttcctcacgcgcgtcgggctcgacatcggcaaggtgtgggtcgcggacgacggcgccgcggtggcggtctggaccacgccggagagcgtcgaagcgggggcggtgttcgccgagatcggcccgcgcatggccgagttgagcggttcccggctggccgcgcagcaacagatggaaggcctcctggcgccgcaccggcccaaggagcccgcgtggttcctggccaccgtcggcgtctcgcccgaccaccagggcaagggtctgggcagcgccgtcgtgctccccggagtggaggcggccgagcgcgccggggtgcccgccttcctggagacctccgcgccccgcaacctccccttctacgagcggctcggcttcaccgtcaccgccgacgtcgaggtgcccgaaggaccgcgcacctggtgcatgacccgcaagcccggtgcctga

SEQ ID NO: 9349 - DNA, 1857 bp, Artificial Sequence
  Synthetic Polynucloetide
atggccttaccagtgaccgccttgctcctgccgctggccttgctgctccacgccgccaggccggacatccagatgacacagagccctagcagcgtgtccgcctctgtgggagacagagtgaccatcacctgtagagccagccagagcatcagcagctacctgaactggtatcagcagaagcccggcaaggcccctaaactgctgatctatgccgccagctctctccagagcggagtgcctagcagattttctggcagcggctccggcaccgatttcaccctgacaatatccagcctccagcctgaggacttcgccacctactactgccagcagagctacagcaccccttggacctttggacagggcaccaaggtggaaatcaagagactcgaggacctgaagaacgtgttcccacctgaggtggccgtgttcgagcctagcgaggccgagatcagccacacccagaaagccaccctcgtgtgcctggctaccggcttctaccccgaccatgtggaactgtcttggtgggtcaacggcaaagaggtgcacagcggcgtgtgtaccgacccccagccactgaaagaacagcccgccctgaacgacagccggtactgcctgagcagcagactgagagtgtccgccaccttctggcagaacccccggaaccacttcagatgccaggtgcagttctacggcctgagcgagaacgacgagtggacccaggacagagccaagcccgtgacccagatcgtgtctgccgaagcctggggcagagccgattgcggctttaccagcgagagctaccagcagggcgtgctgagcgccaccatcctgtacgagatcctgctgggcaaggccaccctgtacgccgtgctggtgtctgccctggtgctgatggctatggtcaagcggaaggacagccggggaagggccaagcgatctggatctggagcaacaaacttctcactactcaaacaagcaggtgacgtggaggagaatcccgggcctactagtatggactggatttggcgcatccttttccttgtcggcgctgctaccggcgcgcattccttcgaagaagtgcagctggttgaatcaggtggcggcctggttcagcctggcagaagtctgagactgagctgtgccgcctccggcttcaccttcgatgattacgccatgcactgggtccgacaggcccctggaaaaggactggaatgggtgtccggcatcagctggaatagcggctctatcggctacgccgattccgccaagggcagattcaccatcagccgggacaacagcaagaacaccctgtacctccagatgaactccctgagagccgaggacaccgccgtgtactactgtgccaagaggggcaacagcaacagcttcgactattggggccagggcaccctggtcacagtctcttctacgcgtatccagaaccctgatcctgccgtgtaccagctgcgggatagcaagagcagcgacaagagcgtgtgtctgttcaccgacttcgacagccagaccaacgtgtcccagagcaaggactccgacgtgtacatcaccgataagtgcgtgctggacatgcggagcatggacttcaagagcaactccgccgtggcctggtccaacaagtccgatttcgcctgcgccaacgccttcaacaacagcattatccccgaggacacattcttcccaagccccgagagcagctgcgacgtgaagctggtggaaaagagcttcgagacagacaccaacctgaacttccagaacctgagcgtgatcggcttcagaatcctgctgctgaaagtggccggctttaacctgctgatgaccctgcggctgtggtccagc

SEQ ID NO: 9350 - DNA, 2532 bp, Artificial Sequence
  Synthetic Polynucloetide
atggccttaccagtgaccgccttgctcctgccgctggccttgctgctccacgccgccaggccggacatccagatgacacagagccctagcagcgtgtccgcctctgtgggagacagagtgaccatcacctgtagagccagccagagcatcagcagctacctgaactggtatcagcagaagcccggcaaggcccctaaactgctgatctatgccgccagctctctccagagcggagtgcctagcagattttctggcagcggctccggcaccgatttcaccctgacaatatccagcctccagcctgaggacttcgccacctactactgccagcagagctacagcaccccttggacctttggacagggcaccaaggtggaaatcaagagactcgaggacctgaagaacgtgttcccacctgaggtggccgtgttcgagcctagcgaggccgagatcagccacacccagaaagccaccctcgtgtgcctggctaccggcttctaccccgaccatgtggaactgtcttggtgggtcaacggcaaagaggtgcacagcggcgtgtgtaccgacccccagccactgaaagaacagcccgccctgaacgacagccggtactgcctgagcagcagactgagagtgtccgccaccttctggcagaacccccggaaccacttcagatgccaggtgcagttctacggcctgagcgagaacgacgagtggacccaggacagagccaagcccgtgacccagatcgtgtctgccgaagcctggggcagagccgattgcggctttaccagcgagagctaccagcagggcgtgctgagcgccaccatcctgtacgagatcctgctgggcaaggccaccctgtacgccgtgctggtgtctgccctggtgctgatggctatggtcaagcggaaggacagccggggaagggccaagcgatctggatctggagcaacaaacttctcactactcaaacaagcaggtgacgtggaggagaatcccgggcctactagtatggactggatttggcgcatccttttccttgtcggcgctgctaccggcgcgcattccttcgaagaagtgcagctggttgaatcaggtggcggcctggttcagcctggcagaagtctgagactgagctgtgccgcctccggcttcaccttcgatgattacgccatgcactgggtccgacaggcccctggaaaaggactggaatgggtgtccggcatcagctggaatagcggctctatcggctacgccgattccgccaagggcagattcaccatcagccgggacaacagcaagaacaccctgtacctccagatgaactccctgagagccgaggacaccgccgtgtactactgtgccaagaggggcaacagcaacagcttcgactattggggccagggcaccctggtcacagtctcttctacgcgtatccagaaccctgatcctgccgtgtaccagctgcgggatagcaagagcagcgacaagagcgtgtgtctgttcaccgacttcgacagccagaccaacgtgtcccagagcaaggactccgacgtgtacatcaccgataagtgcgtgctggacatgcggagcatggacttcaagagcaactccgccgtggcctggtccaacaagtccgatttcgcctgcgccaacgccttcaacaacagcattatccccgaggacacattcttcccaagccccgagagcagctgcgacgtgaagctggtggaaaagagcttcgagacagacaccaacctgaacttccagaacctgagcgtgatcggcttcagaatcctgctgctgaaagtggccggctttaacctgctgatgaccctgcggctgtggtccagccgcgccaagagaagcggatctggcgtgaagcagaccctgaatttcgacctgctgaagctggctggcgacgtggaatccaacccaggcccttctagaggcgggatccacaccatggctacctacgaggtgctgtgcgaggtggcaagaaagctgggcaccgacgacagagaagtggtgctgttcctgctgaacgtgttcatccctcagcctacactggcccagctgatcggtgcactgagagccctgaaagaggaaggccggctgacctttcctctgctggccgaatgcctgttcagagccggaagaagggatctgctgcgggacctgctgcatctggaccccagatttctggaaagacacctggccggcaccatgagctacttcagcccttaccagctgaccgtgctgcacgttgacggcgaactgtgcgccagagatattcggagcctgatcttcctgagcaaggacaccatcggcagccggtctacccctcagacatttctgcactgggtgtactgcatggaaaacctggacctgctcggccccacagatgtggatgccctgatgtccatgctgagaagcctgagcagagtggacctccagagacaggtgcagacactgatgggactgcacctgagcggacctagccacagccagcactacagacacacccct

SEQ ID NO: 9351 - DNA, 1869 bp, Artificial Sequence
  Synthetic Polynucloetide
atggccttaccagtgaccgccttgctcctgccgctggccttgctgctccacgccgccaggccggacatccagatgacacagagccctagcagcgtgtccgcctctgtgggagacagagtgaccatcacctgtagagccagccagagcatcagcagctacctgaactggtatcagcagaagcccggcaaggcccctaaactgctgatctatgccgccagctctctccagagcggagtgcctagcagattttctggcagcggctccggcaccgatttcaccctgacaatatccagcctccagcctgaggacttcgccacctactactgccagcagagctacagcaccccttggacctttggacagggcaccaaggtggaaatcaagagactcgagatccagaaccctgatcctgccgtgtaccagctgcgggatagcaagagcagcgacaagagcgtgtgtctgttcaccgacttcgacagccagaccaacgtgtcccagagcaaggactccgacgtgtacatcaccgataagtgcgtgctggacatgcggagcatggacttcaagagcaactccgccgtggcctggtccaacaagtccgatttcgcctgcgccaacgccttcaacaacagcattatccccgaggacacattcttcccaagccccgagagcagctgcgacgtgaagctggtggaaaagagcttcgagacagacaccaacctgaacttccagaacctgagcgtgatcggcttcagaatcctgctgctgaaagtggccggctttaacctgctgatgaccctgcggctgtggtccagccgcgccaagagaagcggatctggcgtgaagcagaccctgaatttcgacctgctgaagctggctggcgacgtggaatccaacccaggccctactagtatggactggatttggcgcatccttttccttgtcggcgctgctaccggcgcgcattccttcgaagaagtgcagctggttgaatcaggtggcggcctggttcagcctggcagaagtctgagactgagctgtgccgcctccggcttcaccttcgatgattacgccatgcactgggtccgacaggcccctggaaaaggactggaatgggtgtccggcatcagctggaatagcggctctatcggctacgccgattccgccaagggcagattcaccatcagccgggacaacagcaagaacaccctgtacctccagatgaactccctgagagccgaggacaccgccgtgtactactgtgccaagaggggcaacagcaacagcttcgactattggggccagggcaccctggtcacagtctcttctacgcgtgaggacctgaagaacgtgttcccacctgaggtggccgtgttcgagcctagcgaggccgagatcagccacacccagaaagccaccctcgtgtgcctggctaccggcttctaccccgaccatgtggaactgtcttggtgggtcaacggcaaagaggtgcacagcggcgtgtgtaccgacccccagccactgaaagaacagcccgccctgaacgacagccggtactgcctgagcagcagactgagagtgtccgccaccttctggcagaacccccggaaccacttcagatgccaggtgcagttctacggcctgagcgagaacgacgagtggacccaggacagagccaagcccgtgacccagatcgtgtctgccgaagcctggggcagagccgattgcggctttaccagcgagagctaccagcagggcgtgctgagcgccaccatcctgtacgagatcctgctgggcaaggccaccctgtacgccgtgctggtgtctgccctggtgctgatggctatggtcaagcggaaggacagccgggga

SEQ ID NO: 9352 - DNA, 2535 bp, Artificial Sequence
  Synthetic Polynucloetide
atggccttaccagtgaccgccttgctcctgccgctggccttgctgctccacgccgccaggccggacatccagatgacacagagccctagcagcgtgtccgcctctgtgggagacagagtgaccatcacctgtagagccagccagagcatcagcagctacctgaactggtatcagcagaagcccggcaaggcccctaaactgctgatctatgccgccagctctctccagagcggagtgcctagcagattttctggcagcggctccggcaccgatttcaccctgacaatatccagcctccagcctgaggacttcgccacctactactgccagcagagctacagcaccccttggacctttggacagggcaccaaggtggaaatcaagagactcgagatccagaaccctgatcctgccgtgtaccagctgcgggatagcaagagcagcgacaagagcgtgtgtctgttcaccgacttcgacagccagaccaacgtgtcccagagcaaggactccgacgtgtacatcaccgataagtgcgtgctggacatgcggagcatggacttcaagagcaactccgccgtggcctggtccaacaagtccgatttcgcctgcgccaacgccttcaacaacagcattatccccgaggacacattcttcccaagccccgagagcagctgcgacgtgaagctggtggaaaagagcttcgagacagacaccaacctgaacttccagaacctgagcgtgatcggcttcagaatcctgctgctgaaagtggccggctttaacctgctgatgaccctgcggctgtggtccagccgcgccaagagaagcggatctggcgtgaagcagaccctgaatttcgacctgctgaagctggctggcgacgtggaatccaacccaggccctactagtatggactggatttggcgcatccttttccttgtcggcgctgctaccggcgcgcattccttcgaagaagtgcagctggttgaatcaggtggcggcctggttcagcctggcagaagtctgagactgagctgtgccgcctccggcttcaccttcgatgattacgccatgcactgggtccgacaggcccctggaaaaggactggaatgggtgtccggcatcagctggaatagcggctctatcggctacgccgattccgccaagggcagattcaccatcagccgggacaacagcaagaacaccctgtacctccagatgaactccctgagagccgaggacaccgccgtgtactactgtgccaagaggggcaacagcaacagcttcgactattggggccagggcaccctggtcacagtctcttctacgcgtgaggacctgaagaacgtgttcccacctgaggtggccgtgttcgagcctagcgaggccgagatcagccacacccagaaagccaccctcgtgtgcctggctaccggcttctaccccgaccatgtggaactgtcttggtgggtcaacggcaaagaggtgcacagcggcgtgtgtaccgacccccagccactgaaagaacagcccgccctgaacgacagccggtactgcctgagcagcagactgagagtgtccgccaccttctggcagaacccccggaaccacttcagatgccaggtgcagttctacggcctgagcgagaacgacgagtggacccaggacagagccaagcccgtgacccagatcgtgtctgccgaagcctggggcagagccgattgcggctttaccagcgagagctaccagcagggcgtgctgagcgccaccatcctgtacgagatcctgctgggcaaggccaccctgtacgccgtgctggtgtctgccctggtgctgatggctatggtcaagcggaaggacagccggggaagggccaagcgatctggatctggagcaacaaacttctcactactcaaacaagcaggtgacgtggaggagaatcccgggccttctagaggcgggatccacaccatggctacctacgaggtgctgtgcgaggtggcaagaaagctgggcaccgacgacagagaagtggtgctgttcctgctgaacgtgttcatccctcagcctacactggcccagctgatcggtgcactgagagccctgaaagaggaaggccggctgacctttcctctgctggccgaatgcctgttcagagccggaagaagggatctgctgcgggacctgctgcatctggaccccagatttctggaaagacacctggccggcaccatgagctacttcagcccttaccagctgaccgtgctgcacgttgacggcgaactgtgcgccagagatattcggagcctgatcttcctgagcaaggacaccatcggcagccggtctacccctcagacatttctgcactgggtgtactgcatggaaaacctggacctgctcggccccacagatgtggatgccctgatgtccatgctgagaagcctgagcagagtggacctccagagacaggtgcagacactgatgggactgcacctgagcggacctagccacagccagcactacagacacacccct

SEQ ID NO: 9353 - DNA, 2694 bp, Artificial Sequence
  Synthetic Polynucloetide
atggccttaccagtgaccgccttgctcctgccgctggccttgctgctccacgccgccaggccgctcgaggggaaaccaattcccaaccctcttctgggactggattcaaccggcagcggcgaggacctgaagaacgtgttcccacctgaggtggccgtgttcgagcctagcaaggccgagatcgcccacacccagaaagccaccctcgtgtgcctggctaccggcttctaccccgaccatgtggaactgtcttggtgggtcaacggcaaagaggtgcacagcggcgtgtgtaccgacccccagccactgaaagaacagcccgccctgaacgacagccggtactgcctgagcagcagactgagagtgtccgccaccttctggcagaacccccggaaccacttcagatgccaggtgcagttctacggcctgagcgagaacgacgagtggacccaggacagagccaagcccgtgacccagatcgtgtctgccgaagcctggggcagagccgattgcggcatcaccagcgccagctaccaccagggcgtgctgagcgccaccatcctgtacgagatcctgctgggcaaggccaccctgtacgccgtgctggtgtctgccctggtgctgatggctatggtcaagcggaaggacagccggggaagggccaagcgatctggatctggagcaacaaacttctcactactcaaacaagcaggtgacgtggaggagaatcccgggcctactagcatggccttaccagtgaccgccttgctcctgccgctggccttgctgctccacgccgccaggccggacatccagatgacacagagccctagcagcgtgtccgcctctgtgggagacagagtgaccatcacctgtagagccagccagagcatcagcagctacctgaactggtatcagcagaagcccggcaaggcccctaaactgctgatctatgccgccagctctctccagagcggagtgcctagcagattttctggcagcggctccggcaccgatttcaccctgacaatatccagcctccagcctgaggacttcgccacctactactgccagcagagctacagcaccccttggacctttggacagggcaccaaggtggaaatcaagagaggcggaggcggaagtggaggcggaggatctggcggcggaggctctgaagtgcagctggttgaatcaggtggcggcctggttcagcctggcagaagtctgagactgagctgtgccgcctccggcttcaccttcgatgattacgccatgcactgggtccgacaggcccctggaaaaggactggaatgggtgtccggcatcagctggaatagcggctctatcggctacgccgattccgccaagggcagattcaccatcagccgggacaacagcaagaacaccctgtacctccagatgaactccctgagagccgaggacaccgccgtgtactactgtgccaagaggggcaacagcaacagcttcgactattggggccagggcaccctggtcacagtctcttctacgcgtgagcagaaactgatctcggaagaggatgggagcggcatccagaaccctgatcctgccgtgtaccagctgcgggatagcaagagcagcgacaagagcgtgtgtctgttcaccgacttcgacagccagaccaacgtgtcccagagcaaggactccgacgtgtacatcaccgataagtgcgtgctggacatgcggagcatggacttcaagagcaactccgccgtggcctggtccaacaagtccgatttcgcctgcgccaacgccttcaacaacagcattatccccgaggacacattcttcccaagcagcgacgtgccctgcgacgtgaagctggtggaaaagagcttcgagacagacaccaacctgaacttccagaacctgagcgtgatcggcttcagaatcctgctgctgaaagtggccggctttaacctgctgatgaccctgcggctgtggtccagccgcgccaagagaagcggatctggcgtgaagcagaccctgaatttcgacctgctgaagctggctggcgacgtggaatccaacccaggcccttctagaggccatatgaccgagtacaagcccacggtgcgcctcgccacccgcgacgacgtccccagggccgtacgcaccctcgccgccgcgttcgccgactaccccgccacgcgccacaccgtcgatccggaccgccacatcgagcgggtcaccgagctgcaagaactcttcctcacgcgcgtcgggctcgacatcggcaaggtgtgggtcgcggacgacggcgccgcggtggcggtctggaccacgccggagagcgtcgaagcgggggcggtgttcgccgagatcggcccgcgcatggccgagttgagcggttcccggctggccgcgcagcaacagatggaaggcctcctggcgccgcaccggcccaaggagcccgcgtggttcctggccaccgtcggcgtctcgcccgaccaccagggcaagggtctgggcagcgccgtcgtgctccccggagtggaggcggccgagcgcgccggggtgcccgccttcctggagacctccgcgccccgcaacctccccttctacgagcggctcggcttcaccgtcaccgccgacgtcgaggtgcccgaaggaccgcgcacctggtgcatgacccgcaagcccggtgcctga

SEQ ID NO: 9354 - DNA, 2697 bp, Artificial Sequence
  Synthetic Polynucloetide
atggccttaccagtgaccgccttgctcctgccgctggccttgctgctccacgccgccaggccgctcgagcagaaactgatctcggaagaggatctgggctccggcgatcgccctgatcctgccgtgtaccagctgcgggatagcaagagcagcgacaagagcgtgtgtctgttcaccgacttcgacagccagaccaacgtgtcccagagcaaggactccgacgtgtacatcaccgataagtgcgtgctggacatgcggagcatggacttcaagagcaactccgccgtggcctggtccaacaagtccgatttcgcctgcgccaacgccttcaacaacagcattatccccgaggacacattcttcccaagccccgagagcagctgcgacgtgaagctggtggaaaagagcttcgagacagacaccaacctgaacttccagaacctgagcgtgatcggcttcagaatcctgctgctgaaagtggccggctttaacctgctgatgaccctgcggctgtggtccagctctagtcgcgccaagagaagcggatctggcgtgaagcagaccctgaatttcgacctgctgaagctggctggcgacgtggaatccaacccaggccccactagcatggccttaccagtgaccgccttgctcctgccgctggccttgctgctccacgccgccaggccggacatccagatgacacagagccctagcagcgtgtccgcctctgtgggagacagagtgaccatcacctgtagagccagccagagcatcagcagctacctgaactggtatcagcagaagcccggcaaggcccctaaactgctgatctatgccgccagctctctccagagcggagtgcctagcagattttctggcagcggctccggcaccgatttcaccctgacaatatccagcctccagcctgaggacttcgccacctactactgccagcagagctacagcaccccttggacctttggacagggcaccaaggtggaaatcaagagaggcggaggcggaagtggaggcggaggatctggcggcggaggctctgaagtgcagctggttgaatcaggtggcggcctggttcagcctggcagaagtctgagactgagctgtgccgcctccggcttcaccttcgatgattacgccatgcactgggtccgacaggcccctggaaaaggactggaatgggtgtccggcatcagctggaatagcggctctatcggctacgccgattccgccaagggcagattcaccatcagccgggacaacagcaagaacaccctgtacctccagatgaactccctgagagccgaggacaccgccgtgtactactgtgccaagaggggcaacagcaacagcttcgactattggggccagggcaccctggtcacagtctcttctacgcgtgggaaaccaattcccaaccctcttctgggactggattcaaccggcagcggcgaggacctgaagaacgtgttcccacctgaggtggccgtgttcgagcctagcgaggccgagatcagccacacccagaaagccaccctcgtgtgcctggctaccggcttctaccccgaccatgtggaactgtcttggtgggtcaacggcaaagaggtgcacagcggcgtgtgtaccgacccccagccactgaaagaacagcccgccctgaacgacagccggtactgcctgagcagcagactgagagtgtccgccaccttctggcagaacccccggaaccacttcagatgccaggtgcagttctacggcctgagcgagaacgacgagtggacccaggacagagccaagcccgtgacccagatcgtgtctgccgaagcctggggcagagccgattgcggctttaccagcgagagctaccagcagggcgtgctgagcgccaccatcctgtacgagatcctgctgggcaaggccaccctgtacgccgtgctggtgtctgccctggtgctgatggctatggtcaagcggaaggacagccggggaagggccaagcgatctggatctggagcaacaaacttctcactactcaaacaagcaggtgacgtggaggagaatcccgggccttctagaggccatatgaccgagtacaagcccacggtgcgcctcgccacccgcgacgacgtccccagggccgtacgcaccctcgccgccgcgttcgccgactaccccgccacgcgccacaccgtcgatccggaccgccacatcgagcgggtcaccgagctgcaagaactcttcctcacgcgcgtcgggctcgacatcggcaaggtgtgggtcgcggacgacggcgccgcggtggcggtctggaccacgccggagagcgtcgaagcgggggcggtgttcgccgagatcggcccgcgcatggccgagttgagcggttcccggctggccgcgcagcaacagatggaaggcctcctggcgccgcaccggcccaaggagcccgcgtggttcctggccaccgtcggcgtctcgcccgaccaccagggcaagggtctgggcagcgccgtcgtgctccccggagtggaggcggccgagcgcgccggggtgcccgccttcctggagacctccgcgccccgcaacctccccttctacgagcggctcggcttcaccgtcaccgccgacgtcgaggtgcccgaaggaccgcgcacctggtgcatgacccgcaagcccggtgcctga

SEQ ID NO: 9355 - DNA, 2559 bp, Artificial Sequence
  Synthetic Polynucloetide
atggccttaccagtgaccgccttgctcctgccgctggccttgctgctccacgccgccaggccggacatccagatgacacagagccctagcagcgtgtccgcctctgtgggagacagagtgaccatcacctgtagagccagccagagcatcagcagctacctgaactggtatcagcagaagcccggcaaggcccctaaactgctgatctatgccgccagctctctccagagcggagtgcctagcagattttctggcagcggctccggcaccgatttcaccctgacaatatccagcctccagcctgaggacttcgccacctactactgccagcagagctacagcaccccttggacctttggacagggcaccaaggtggaaatcaagagactcgaggacctgaagaacgtgttcccacctgaggtggccgtgttcgagcctagcgaggccgagatcagccacacccagaaagccaccctcgtgtgcctggctaccggcttctaccccgaccatgtggaactgtcttggtgggtcaacggcaaagaggtgcacagcggcgtgtctaccgacccccagccactgaaagaacagcccgccctgaacgacagccggtactgcctgagcagcagactgagagtgtccgccaccttctggcagaacccccggaaccacttcagatgccaggtgcagttctacggcctgagcgagaacgacgagtggacccaggacagagccaagcccgtgacccagatcgtgtctgccgaagcctggggcagagccgattgcggctttaccagcgagagctaccagcagggcgtgctgagcgccaccatcctgtacgagatcctgctgggcaaggccaccctgtacgccgtgctggtgtctgccctggtgctgatggctatggtcaagcggaaggacagccggggaagggccaagcgatctggatctggagcaacaaacttctcactactcaaacaagcaggtgacgtggaggagaatcccgggcctactagtatggactggatttggcgcatccttttccttgtcggcgctgctaccggcgcgcattccttcgaagaagtgcagctggttgaatcaggtggcggcctggttcagcctggcagaagtctgagactgagctgtgccgcctccggcttcaccttcgatgattacgccatgcactgggtccgacaggcccctggaaaaggactggaatgggtgtccggcatcagctggaatagcggctctatcggctacgccgattccgccaagggcagattcaccatcagccgggacaacagcaagaacaccctgtacctccagatgaactccctgagagccgaggacaccgccgtgtactactgtgccaagaggggcaacagcaacagcttcgactattggggccagggcaccctggtcacagtctcttctacgcgtatccagaaccctgatcctgccgtgtaccagctgcgggatagcaagagcagcgacaagagcgtgtgtctgttcaccgacttcgacagccagaccaacgtgtcccagagcaaggactccgacgtgtacatcaccgataagaccgtgctggacatgcggagcatggacttcaagagcaactccgccgtggcctggtccaacaagtccgatttcgcctgcgccaacgccttcaacaacagcattatccccgaggacacattcttcccaagccccgagagcagctgcgacgtgaagctggtggaaaagagcttcgagacagacaccaacctgaacttccagaacctgagcgtgatcggcttcagaatcctgctgctgaaagtggccggctttaacctgctgatgaccctgcggctgtggtccagccgcgccaagagaagcggatctggcgtgaagcagaccctgaatttcgacctgctgaagctggctggcgacgtggaatccaacccaggcccttctagaggccatatgaccgagtacaagcccacggtgcgcctcgccacccgcgacgacgtccccagggccgtacgcaccctcgccgccgcgttcgccgactaccccgccacgcgccacaccgtcgatccggaccgccacatcgagcgggtcaccgagctgcaagaactcttcctcacgcgcgtcgggctcgacatcggcaaggtgtgggtcgcggacgacggcgccgcggtggcggtctggaccacgccggagagcgtcgaagcgggggcggtgttcgccgagatcggcccgcgcatggccgagttgagcggttcccggctggccgcgcagcaacagatggaaggcctcctggcgccgcaccggcccaaggagcccgcgtggttcctggccaccgtcggcgtctcgcccgaccaccagggcaagggtctgggcagcgccgtcgtgctccccggagtggaggcggccgagcgcgccggggtgcccgccttcctggagacctccgcgccccgcaacctccccttctacgagcggctcggcttcaccgtcaccgccgacgtcgaggtgcccgaaggaccgcgcacctggtgcatgacccgcaagcccggtgcctga

SEQ ID NO: 9356 - DNA, 2805 bp, Artificial Sequence
  Synthetic Polynucloetide
atggccttaccagtgaccgccttgctcctgccgctggccttgctgctccacgccgccaggccggacatccagatgacacagagccctagcagcgtgtccgcctctgtgggagacagagtgaccatcacctgtagagccagccagagcatcagcagctacctgaactggtatcagcagaagcccggcaaggcccctaaactgctgatctatgccgccagctctctccagagcggagtgcctagcagattttctggcagcggctccggcaccgatttcaccctgacaatatccagcctccagcctgaggacttcgccacctactactgccagcagagctacagcaccccttggacctttggacagggcaccaaggtggaaatcaagagactcgaggacctgaagaacgtgttcccacctgaggtggccgtgttcgagcctagcgaggccgagatcagccacacccagaaagccaccctcgtgtgcctggctaccggcttctaccccgaccatgtggaactgtcttggtgggtcaacggcaaagaggtgcacagcggcgtgtctaccgacccccagccactgaaagaacagcccgccctgaacgacagccggtactgcctgagcagcagactgagagtgtccgccaccttctggcagaacccccggaaccacttcagatgccaggtgcagttctacggcctgagcgagaacgacgagtggacccaggacagagccaagcccgtgacccagatcgtgtctgccgaagcctggggcagagccgattgcggctttaccagcgagagctaccagcagggcgtgctgagcgccaccatcctgtacgagatcctgctgggcaaggccaccctgtacgccgtgctggtgtctgccctggtgctgatggctatggtcaagcggaaggacagccggggaagggccaagcgatctggatctggagcaacaaacttctcactactcaaacaagcaggtgacgtggaggagaatcccgggcctactagtatggactggatttggcgcatccttttccttgtcggcgctgctaccggcgcgcattccttcgaagaagtgcagctggttgaatcaggtggcggcctggttcagcctggcagaagtctgagactgagctgtgccgcctccggcttcaccttcgatgattacgccatgcactgggtccgacaggcccctggaaaaggactggaatgggtgtccggcatcagctggaatagcggctctatcggctacgccgattccgccaagggcagattcaccatcagccgggacaacagcaagaacaccctgtacctccagatgaactccctgagagccgaggacaccgccgtgtactactgtgccaagaggggcaacagcaacagcttcgactattggggccagggcaccctggtcacagtctcttctacgcgtgagcagaaactgatctcggaagaggatgggagcggcaccccattcccttctctggcccctcccatcatgctgctggtggacggcaagcagcagatggtggtcgtgtgcctggtgctggatgtggccccacctggactggacagccccatctggtttagcgccggcaatggctctgccctggacgcctttacctacggcccaagccctgccaccgatggcacctggacaaatctggcccacctgagcctgcccagcgaggaactggcttcttgggagcctctcgtgtgccacacaggacctggcgctgagggacacagcagatccacccagcctatgcacctgtctggcgaggccagcaccgccagaacctgtcctcaggaacctctgagaggcacccctggcggagcactgtggctgggagtgctgagactgctgctgttcaagctgctgctgtttgacctgctgctgacctgctcctgtctgtgcgatcctgccggccctctgccttctcctgccaccaccacaagactgagagccctgggcagccacagactgcaccctgccacagagacaggcggcagagaggccacaagcagccctagaccccagcccagagacagaagatggggcgataccccccctggcagaaagcctggatctccagtccgcgccaagagaagcggatctggcgtgaagcagaccctgaatttcgacctgctgaagctggctggcgacgtggaatccaacccaggcccttctagaggccatatgaccgagtacaagcccacggtgcgcctcgccacccgcgacgacgtccccagggccgtacgcaccctcgccgccgcgttcgccgactaccccgccacgcgccacaccgtcgatccggaccgccacatcgagcgggtcaccgagctgcaagaactcttcctcacgcgcgtcgggctcgacatcggcaaggtgtgggtcgcggacgacggcgccgcggtggcggtctggaccacgccggagagcgtcgaagcgggggcggtgttcgccgagatcggcccgcgcatggccgagttgagcggttcccggctggccgcgcagcaacagatggaaggcctcctggcgccgcaccggcccaaggagcccgcgtggttcctggccaccgtcggcgtctcgcccgaccaccagggcaagggtctgggcagcgccgtcgtgctccccggagtggaggcggccgagcgcgccggggtgcccgccttcctggagacctccgcgccccgcaacctccccttctacgagcggctcggcttcaccgtcaccgccgacgtcgaggtgcccgaaggaccgcgcacctggtgcatgacccgcaagcccggtgcctga

SEQ ID NO: 9357 - DNA, 2859 bp, Artificial Sequence
  Synthetic Polynucloetide
atggccttaccagtgaccgccttgctcctgccgctggccttgctgctccacgccgccaggccgctcgaggacctgaagaacgtgttcccacctgaggtggccgtgttcgagcctagcgaggccgagatcagccacacccagaaagccaccctcgtgtgcctggctaccggcttctaccccgaccatgtggaactgtcttggtgggtcaacggcaaagaggtgcacagcggcgtgtctaccgacccccagccactgaaagaacagcccgccctgaacgacagccggtactgcctgagcagcagactgagagtgtccgccaccttctggcagaacccccggaaccacttcagatgccaggtgcagttctacggcctgagcgagaacgacgagtggacccaggacagagccaagcccgtgacccagatcgtgtctgccgaagcctggggcagagccgattgcggctttaccagcgagagctaccagcagggcgtgctgagcgccaccatcctgtacgagatcctgctgggcaaggccaccctgtacgccgtgctggtgtctgccctggtgctgatggctatggtcaagcggaaggacagccggggaagggccaagcgatctggatctggagcaacaaacttctcactactcaaacaagcaggtgacgtggaggagaatcccgggcctactagcatggccttaccagtgaccgccttgctcctgccgctggccttgctgctccacgccgccaggccggacatccagatgacacagagccctagcagcgtgtccgcctctgtgggagacagagtgaccatcacctgtagagccagccagagcatcagcagctacctgaactggtatcagcagaagcccggcaaggcccctaaactgctgatctatgccgccagctctctccagagcggagtgcctagcagattttctggcagcggctccggcaccgatttcaccctgacaatatccagcctccagcctgaggacttcgccacctactactgccagcagagctacagcaccccttggacctttggacagggcaccaaggtggaaatcaagagaggcggaggcggaagtggaggcggaggatctggcggcggaggctctgaagtgcagctggttgaatcaggtggcggcctggttcagcctggcagaagtctgagactgagctgtgccgcctccggcttcaccttcgatgattacgccatgcactgggtccgacaggcccctggaaaaggactggaatgggtgtccggcatcagctggaatagcggctctatcggctacgccgattccgccaagggcagattcaccatcagccgggacaacagcaagaacaccctgtacctccagatgaactccctgagagccgaggacaccgccgtgtactactgtgccaagaggggcaacagcaacagcttcgactattggggccagggcaccctggtcacagtctcttctacgcgtgagcagaaactgatctcggaagaggatctggggagcggcaccccattcccttctctggcccctcccatcatgctgctggtggacggcaagcagcagatggtggtcgtgtgcctggtgctggatgtggccccacctggactggacagccccatctggtttagcgccggcaatggctctgccctggacgcctttacctacggcccaagccctgccaccgatggcacctggacaaatctggcccacctgagcctgcccagcgaggaactggcttcttgggagcctctcgtgtgccacacaggacctggcgctgagggacacagcagatccacccagcctatgcacctgtctggcgaggccagcaccgccagaacctgtcctcaggaacctctgagaggcacccctggcggagcactgtggctgggagtgctgagactgctgctgttcaagctgctgctgtttgacctgctgctgacctgctcctgtctgtgcgatcctgccggccctctgccttctcctgccaccaccacaagactgagagccctgggcagccacagactgcaccctgccacagagacaggcggcagagaggccacaagcagccctagaccccagcccagagacagaagatggggcgataccccccctggcagaaagcctggatctccagtccgcgccaagagaagcggatctggcgtgaagcagaccctgaatttcgacctgctgaagctggctggcgacgtggaatccaacccaggcccttctagatctagaggccatatgaccgagtacaagcccacggtgcgcctcgccacccgcgacgacgtccccagggccgtacgcaccctcgccgccgcgttcgccgactaccccgccacgcgccacaccgtcgatccggaccgccacatcgagcgggtcaccgagctgcaagaactcttcctcacgcgcgtcgggctcgacatcggcaaggtgtgggtcgcggacgacggcgccgcggtggcggtctggaccacgccggagagcgtcgaagcgggggcggtgttcgccgagatcggcccgcgcatggccgagttgagcggttcccggctggccgcgcagcaacagatggaaggcctcctggcgccgcaccggcccaaggagcccgcgtggttcctggccaccgtcggcgtctcgcccgaccaccagggcaagggtctgggcagcgccgtcgtgctccccggagtggaggcggccgagcgcgccggggtgcccgccttcctggagacctccgcgccccgcaacctccccttctacgagcggctcggcttcaccgtcaccgccgacgtcgaggtgcccgaaggaccgcgcacctggtgcatgacccgcaagcccggtgcctga

SEQ ID NO: 9358 - DNA, 2670 bp, Artificial Sequence
  Synthetic Polynucloetide
atggccttaccagtgaccgccttgctcctgccgctggccttgctgctccacgccgccaggccggacatccagatgacacagagccctagcagcgtgtccgcctctgtgggagacagagtgaccatcacctgtagagccagccagagcatcagcagctacctgaactggtatcagcagaagcccggcaaggcccctaaactgctgatctatgccgccagctctctccagagcggagtgcctagcagattttctggcagcggctccggcaccgatttcaccctgacaatatccagcctccagcctgaggacttcgccacctactactgccagcagagctacagcaccccttggacctttggacagggcaccaaggtggaaatcaagagactcgaggggaaaccaattcccaaccctcttctgggactggattcaaccggcagcggcgacaagcagctggacgccgacgtgtcccccaagcctaccatcttcctgccctctatcgccgagacaaagctccagaaggccggcacctacctgtgcctgctggaaaagttcttcccagatgtgattaagatccactggcaggaaaagaagtccaacaccatcctgggcagccaggaaggcaacaccatgaagaccaacgacacctacatgaagttcagctggctgaccgtgcccgagaagtccctggacaaagaacacagatgcatcgtgcggcacgaaaacaacaagaacggcgtggaccaggaaatcatcttcccacccatcaagaccgatgtgattacaatggaccccaaggacaactgctccaaggacgccaacgataccctgctgctccagctgaccaacaccagcgcctactacatgtacttgttgctgctgctgaagtccgtggtgtacttcgccatcatcacatgctgcctgctgcggagaaccgccttctgctgcaacggcgagaagtctagggccaagcgatctggatctggagcaacaaacttctcactactcaaacaagcaggtgacgtggaggagaatcccgggcctactagtatggactggatttggcgcatccttttccttgtcggcgctgctaccggcgcgcattccttcgaagaagtgcagctggttgaatcaggtggcggcctggttcagcctggcagaagtctgagactgagctgtgccgcctccggcttcaccttcgatgattacgccatgcactgggtccgacaggcccctggaaaaggactggaatgggtgtccggcatcagctggaatagcggctctatcggctacgccgattccgccaagggcagattcaccatcagccgggacaacagcaagaacaccctgtacctccagatgaactccctgagagccgaggacaccgccgtgtactactgtgccaagaggggcaacagcaacagcttcgactattggggccagggcaccctggtcacagtctcttctacgcgtgagcagaaactgatctcggaagaggatgggagcggcagccagcctcacaccaagcccagcgtgttcgtgatgaagaacggcaccaacgtggcctgcctcgtgaaagagttctaccccaaggacatcaggatcaacctggtgtccagcaagaagatcaccgagttcgaccccgccatcgtgatctcccccagcggcaagtacaacgccgtgaagctggggaagtacgaggacagcaacagcgtgacctgctccgtgcagcacgacaacaagaccgtgcacagcaccgactttgaagtgaaaaccgactccaccgaccacgtgaagcccaaagagacagagaacaccaagcagcccagcaagagctgccacaagcccaaggccatcgtgcacaccgagaaagtgaacatgatgagcctgaccgtgctgggcctgcggatgctgttcgccaaaaccgtggccgtgaacttcctgctgaccgccaagctgttcttcctccgcgccaagagaagcggatctggcgtgaagcagaccctgaatttcgacctgctgaagctggctggcgacgtggaatccaacccaggcccttctagaggccatatgaccgagtacaagcccacggtgcgcctcgccacccgcgacgacgtccccagggccgtacgcaccctcgccgccgcgttcgccgactaccccgccacgcgccacaccgtcgatccggaccgccacatcgagcgggtcaccgagctgcaagaactcttcctcacgcgcgtcgggctcgacatcggcaaggtgtgggtcgcggacgacggcgccgcggtggcggtctggaccacgccggagagcgtcgaagcgggggcggtgttcgccgagatcggcccgcgcatggccgagttgagcggttcccggctggccgcgcagcaacagatggaaggcctcctggcgccgcaccggcccaaggagcccgcgtggttcctggccaccgtcggcgtctcgcccgaccaccagggcaagggtctgggcagcgccgtcgtgctccccggagtggaggcggccgagcgcgccggggtgcccgccttcctggagacctccgcgccccgcaacctccccttctacgagcggctcggcttcaccgtcaccgccgacgtcgaggtgcccgaaggaccgcgcacctggtgcatgacccgcaagcccggtgcctga

SEQ ID NO: 9359 - DNA, 1881 bp, Artificial Sequence
  Synthetic Polynucloetide
atggccttaccagtgaccgccttgctcctgccgctggccttgctgctccacgccgccaggccggacatccagatgacacagagccctagcagcgtgtccgcctctgtgggagacagagtgaccatcacctgtagagccagccagagcatcagcagctacctgaactggtatcagcagaagcccggcaaggcccctaaactgctgatctatgccgccagctctctccagagcggagtgcctagcagattttctggcagcggctccggcaccgatttcaccctgacaatatccagcctccagcctgaggacttcgccacctactactgccagcagagctacagcaccccttggacctttggacagggcaccaaggtggaaatcaagagactcgagagccagcctcacaccaagcccagcgtgttcgtgatgaagaacggcaccaacgtggcctgcctcgtgaaagagttctaccccaaggacatcaggatcaacctggtgtccagcaagaagatcaccgagttcgaccccgccatcgtgatctcccccagcggcaagtacaacgccgtgaagctggggaagtacgaggacagcaacagcgtgacctgctccgtgcagcacgacaacaagaccgtgcacagcaccgactttgaagtgaaaaccgactccaccgaccacgtgaagcccaaagagacagagaacaccaagcagcccagcaagagctgccacaagcccaaggccatcgtgcacaccgagaaagtgaacatgatgagcctgaccgtgctgggcctgcggatgctgttcgccaaaaccgtggccgtgaacttcctgctgaccgccaagctgttcttcctcagggccaagcgatctggatctggagcaacaaacttctcactactcaaacaagcaggtgacgtggaggagaatcccgggcctactagtatggactggatttggcgcatccttttccttgtcggcgctgctaccggcgcgcattccttcgaagaagtgcagctggttgaatcaggtggcggcctggttcagcctggcagaagtctgagactgagctgtgccgcctccggcttcaccttcgatgattacgccatgcactgggtccgacaggcccctggaaaaggactggaatgggtgtccggcatcagctggaatagcggctctatcggctacgccgattccgccaagggcagattcaccatcagccgggacaacagcaagaacaccctgtacctccagatgaactccctgagagccgaggacaccgccgtgtactactgtgccaagaggggcaacagcaacagcttcgactattggggccagggcaccctggtcacagtctcttctacgcgtgacaagcagctggacgccgacgtgtcccccaagcctaccatcttcctgccctctatcgccgagacaaagctccagaaggccggcacctacctgtgcctgctggaaaagttcttcccagatgtgattaagatccactggcaggaaaagaagtccaacaccatcctgggcagccaggaaggcaacaccatgaagaccaacgacacctacatgaagttcagctggctgaccgtgcccgagaagtccctggacaaagaacacagatgcatcgtgcggcacgaaaacaacaagaacggcgtggaccaggaaatcatcttcccacccatcaagaccgatgtgattacaatggaccccaaggacaactgctccaaggacgccaacgataccctgctgctccagctgaccaacaccagcgcctactacatgtacttgttgctgctgctgaagtccgtggtgtacttcgccatcatcacatgctgcctgctgcggagaaccgccttctgctgcaacggcgagaagtct

SEQ ID NO: 9360 - DNA, 2715 bp, Artificial Sequence
  Synthetic Polynucloetide
atggccttaccagtgaccgccttgctcctgccgctggccttgctgctccacgccgccaggccgctcgaggggaaaccaattcccaaccctcttctgggactggattcaaccggcagcggcgacaagcagctggacgccgacgtgtcccccaagcctaccatcttcctgccctctatcgccgagacaaagctccagaaggccggcacctacctgtgcctgctggaaaagttcttcccagatgtgattaagatccactggcaggaaaagaagtccaacaccatcctgggcagccaggaaggcaacaccatgaagaccaacgacacctacatgaagttcagctggctgaccgtgcccgagaagtccctggacaaagaacacagatgcatcgtgcggcacgaaaacaacaagaacggcgtggaccaggaaatcatcttcccacccatcaagaccgatgtgattacaatggaccccaaggacaactgctccaaggacgccaacgataccctgctgctccagctgaccaacaccagcgcctactacatgtacttgttgctgctgctgaagtccgtggtgtacttcgccatcatcacatgctgcctgctgcggagaaccgccttctgctgcaacggcgagaagtctagggccaagcgatctggatctggagcaacaaacttctcactactcaaacaagcaggtgacgtggaggagaatcccgggcctactagcatggccttaccagtgaccgccttgctcctgccgctggccttgctgctccacgccgccaggccggacatccagatgacacagagccctagcagcgtgtccgcctctgtgggagacagagtgaccatcacctgtagagccagccagagcatcagcagctacctgaactggtatcagcagaagcccggcaaggcccctaaactgctgatctatgccgccagctctctccagagcggagtgcctagcagattttctggcagcggctccggcaccgatttcaccctgacaatatccagcctccagcctgaggacttcgccacctactactgccagcagagctacagcaccccttggacctttggacagggcaccaaggtggaaatcaagagaggcggaggcggaagtggaggcggaggatctggcggcggaggctctgaagtgcagctggttgaatcaggtggcggcctggttcagcctggcagaagtctgagactgagctgtgccgcctccggcttcaccttcgatgattacgccatgcactgggtccgacaggcccctggaaaaggactggaatgggtgtccggcatcagctggaatagcggctctatcggctacgccgattccgccaagggcagattcaccatcagccgggacaacagcaagaacaccctgtacctccagatgaactccctgagagccgaggacaccgccgtgtactactgtgccaagaggggcaacagcaacagcttcgactattggggccagggcaccctggtcacagtctcttctacgcgtgagcagaaactgatctcggaagaggatgggagcggcagccagcctcacaccaagcccagcgtgttcgtgatgaagaacggcaccaacgtggcctgcctcgtgaaagagttctaccccaaggacatcaggatcaacctggtgtccagcaagaagatcaccgagttcgaccccgccatcgtgatctcccccagcggcaagtacaacgccgtgaagctggggaagtacgaggacagcaacagcgtgacctgctccgtgcagcacgacaacaagaccgtgcacagcaccgactttgaagtgaaaaccgactccaccgaccacgtgaagcccaaagagacagagaacaccaagcagcccagcaagagctgccacaagcccaaggccatcgtgcacaccgagaaagtgaacatgatgagcctgaccgtgctgggcctgcggatgctgttcgccaaaaccgtggccgtgaacttcctgctgaccgccaagctgttcttcctccgcgccaagagaagcggatctggcgtgaagcagaccctgaatttcgacctgctgaagctggctggcgacgtggaatccaacccaggcccttctagaggccatatgaccgagtacaagcccacggtgcgcctcgccacccgcgacgacgtccccagggccgtacgcaccctcgccgccgcgttcgccgactaccccgccacgcgccacaccgtcgatccggaccgccacatcgagcgggtcaccgagctgcaagaactcttcctcacgcgcgtcgggctcgacatcggcaaggtgtgggtcgcggacgacggcgccgcggtggcggtctggaccacgccggagagcgtcgaagcgggggcggtgttcgccgagatcggcccgcgcatggccgagttgagcggttcccggctggccgcgcagcaacagatggaaggcctcctggcgccgcaccggcccaaggagcccgcgtggttcctggccaccgtcggcgtctcgcccgaccaccagggcaagggtctgggcagcgccgtcgtgctccccggagtggaggcggccgagcgcgccggggtgcccgccttcctggagacctccgcgccccgcaacctccccttctacgagcggctcggcttcaccgtcaccgccgacgtcgaggtgcccgaaggaccgcgcacctggtgcatgacccgcaagcccggtgcctga

SEQ ID NO: 9361 - DNA, 3090 bp, Artificial Sequence
  Synthetic Polynucloetide
atggccttaccagtgaccgccttgctcctgccgctggccttgctgctccacgccgccaggccggacatccagatgacacagagccctagcagcgtgtccgcctctgtgggagacagagtgaccatcacctgtagagccagccagagcatcagcagctacctgaactggtatcagcagaagcccggcaaggcccctaaactgctgatctatgccgccagctctctccagagcggagtgcctagcagattttctggcagcggctccggcaccgatttcaccctgacaatatccagcctccagcctgaggacttcgccacctactactgccagcagagctacagcaccccttggacctttggacagggcaccaaggtggaaatcaagagaggacagcctaaggccaatcctaccgtgacactgttccctccaagcagcgaagaactccaggccaacaaggccacacttgtgtgcctgatctccgacttctaccctggggctgtgacagtggcttggaaggccgatggatctcctgtgaaagccggcgtggaaaccaccaagccatccaagcagagcaacaacaaatacgccgccagctcctacctgagcctgacacctgagcagtggaagtcccacagatcctacagctgccaagtgacccacgaaggcagcaccgtggaaaagacagtggcccctacagagtgcagcggatcccagagcttcggcctgctggaccccaagctgtgctacctgctggatggcatcctgttcatctacggcgtgatcctgaccgccctgttcctgagagtgaagttcagcagaagcgccgacgcccctgcctaccagcagggacagaaccaactgtacaacgagctgaacctgggcagacgggaagagtacgacgtgctggacaagcggagaggcagggaccctgagatgggcggaaagccccagcggagaaagaacccccaggaaggactgtataacgaactccagaaagacaagatggccgaagcctacagcgagatcggcatgaagggcgagcggagaagaggcaagggccacgatggcctgtaccagggcctgagcaccgccaccaaggacacctatgacgccctgcacatgcaggccctgcctccaagaagggccaagcgatctggatctggagcaacaaacttctcactactcaaacaagcaggtgacgtggaggagaatcccgggcctactagtatggactggatttggcgcatccttttccttgtcggcgctgctaccggcgcgcattccttcgaagaagtgcagctggttgaatcaggtggcggcctggttcagcctggcagaagtctgagactgagctgtgccgcctccggcttcaccttcgatgattacgccatgcactgggtccgacaggcccctggaaaaggactggaatgggtgtccggcatcagctggaatagcggctctatcggctacgccgattccgccaagggcagattcaccatcagccgggacaacagcaagaacaccctgtacctccagatgaactccctgagagccgaggacaccgccgtgtactactgtgccaagaggggcaacagcaacagcttcgactattggggccagggcaccctggtcacagtctcttctgcctctacaaagggaccctccgtgtttcctctggctcccagcagcaagtctacaagcggaggaacagccgctctgggctgcctggtcaaggattactttcccgagcctgtgaccgtgtcctggaatagcggagcactgacaagcggcgtgcacacctttccagccgtgctgcaaagcagcggcctgtactctctgagcagcgtggtcacagtgcctagctctagcctgggcacccagacctacatctgcaatgtgaaccacaagcctagcaacaccaaggtggacaagagagtggaacccaagagctgtggtacccagagttttgggttgttggaccctaaattgtgctatctgttggacggaatcctgttcatttacggagtgatcctgaccgcattgttcctgcgggttaagttttccagatccgcagacgcacccgcttaccaacaagggcagaaccaactctacaatgaacttaatttggggcggagggaagagtacgacgttctggacaaaaggaggggacgagatcccgagatgggcggaaagcctcagcgaaggaagaatccgcaagaggggctttataacgaactccagaaagataaaatggcagaagcctatagtgagattgggatgaagggagaaaggaggaggggtaaaggtcacgatgggttgtaccaaggattgagcacagccactaaagatacctatgatgcgctccacatgcaggccctgccgccaagacgcgccaagagaagcggatctggcgtgaagcagaccctgaatttcgacctgctgaagctggctggcgacgtggaatccaacccaggcccttctagaggccatatgaccgagtacaagcccacggtgcgcctcgccacccgcgacgacgtccccagggccgtacgcaccctcgccgccgcgttcgccgactaccccgccacgcgccacaccgtcgatccggaccgccacatcgagcgggtcaccgagctgcaagaactcttcctcacgcgcgtcgggctcgacatcggcaaggtgtgggtcgcggacgacggcgccgcggtggcggtctggaccacgccggagagcgtcgaagcgggggcggtgttcgccgagatcggcccgcgcatggccgagttgagcggttcccggctggccgcgcagcaacagatggaaggcctcctggcgccgcaccggcccaaggagcccgcgtggttcctggccaccgtcggcgtctcgcccgaccaccagggcaagggtctgggcagcgccgtcgtgctccccggagtggaggcggccgagcgcgccggggtgcccgccttcctggagacctccgcgccccgcaacctccccttctacgagcggctcggcttcaccgtcaccgccgacgtcgaggtgcccgaaggaccgcgcacctggtgcatgacccgcaagcccggtgcctga

SEQ ID NO: 9362 - DNA, 2445 bp, Artificial Sequence
  Synthetic Polynucloetide
atggccttaccagtgaccgccttgctcctgccgctggccttgctgctccacgccgccaggccggacatccagatgacacagagccctagcagcgtgtccgcctctgtgggagacagagtgaccatcacctgtagagccagccagagcatcagcagctacctgaactggtatcagcagaagcccggcaaggcccctaaactgctgatctatgccgccagctctctccagagcggagtgcctagcagattttctggcagcggctccggcaccgatttcaccctgacaatatccagcctccagcctgaggacttcgccacctactactgccagcagagctacagcaccccttggacctttggacagggcaccaaggtggaaatcaagagactcgaggacctgaagaacgtgttcccacctgaggtggccgtgttcgagcctagcgaggccgagatcagccacacccagaaagccaccctcgtgtgcctggctaccggcttctaccccgaccatgtggaactgtcttggtgggtcaacggcaaagaggtgcacagcggcgtgtctaccgacccccagccactgaaagaacagcccgccctgaacgacagccggtactgcctgagcagcagactgagagtgtccgccaccttctggcagaacccccggaaccacttcagatgccaggtgcagttctacggcctgagcgagaacgacgagtggacccaggacagagccaagcccgtgacccagatcgtgtctgccgaagcctggggcagagccgattgcggatcccagagcttcggcctgctggaccccaagctgtgctacctgctggatggcatcctgttcatctacggcgtgatcctgaccgccctgttcctgagagtgaagttcagcagaagcgccgacgcccctgcctaccagcagggacagaaccaactgtacaacgagctgaacctgggcagacgggaagagtacgacgtgctggacaagcggagaggcagggaccctgagatgggcggaaagccccagcggagaaagaacccccaggaaggactgtataacgaactccagaaagacaagatggccgaagcctacagcgagatcggcatgaagggcgagcggagaagaggcaagggccacgatggcctgtaccagggcctgagcaccgccaccaaggacacctatgacgccctgcacatgcaggccctgcctccaagaagggccaagcgatctggatctggagcaacaaacttctcactactcaaacaagcaggtgacgtggaggagaatcccgggcctactagtatggactggatttggcgcatccttttccttgtcggcgctgctaccggcgcgcattccttcgaagaagtgcagctggttgaatcaggtggcggcctggttcagcctggcagaagtctgagactgagctgtgccgcctccggcttcaccttcgatgattacgccatgcactgggtccgacaggcccctggaaaaggactggaatgggtgtccggcatcagctggaatagcggctctatcggctacgccgattccgccaagggcagattcaccatcagccgggacaacagcaagaacaccctgtacctccagatgaactccctgagagccgaggacaccgccgtgtactactgtgccaagaggggcaacagcaacagcttcgactattggggccagggcaccctggtcacagtctcttctacgcgtatccagaaccctgatcctgccgtgtaccagctgcgggatagcaagagcagcgacaagagcgtgtgtctgttcaccgacttcgacagccagaccaacgtgtcccagagcaaggactccgacgtgtacatcaccgataagaccgtgctggacatgcggagcatggacttcaagagcaactccgccgtggcctggtccaacaagtccgatttcgcctgcgccaacgccttcaacaacagcattatccccgaggacacattcttcccaagccccgagagcagctgcggtacccagagttttgggttgttggaccctaaattgtgctatctgttggacggaatcctgttcatttacggagtgatcctgaccgcattgttcctgcgggttaagttttccagatccgcagacgcacccgcttaccaacaagggcagaaccaactctacaatgaacttaatttggggcggagggaagagtacgacgttctggacaaaaggaggggacgagatcccgagatgggcggaaagcctcagcgaaggaagaatccgcaagaggggctttataacgaactccagaaagataaaatggcagaagcctatagtgagattgggatgaagggagaaaggaggaggggtaaaggtcacgatgggttgtaccaaggattgagcacagccactaaagatacctatgatgcgctccacatgcaggccctgccgccaaga

SEQ ID NO: 9363 - DNA, 2445 bp, Artificial Sequence
  Synthetic Polynucloetide
atggccttaccagtgaccgccttgctcctgccgctggccttgctgctccacgccgccaggccggacatccagatgacacagagccctagcagcgtgtccgcctctgtgggagacagagtgaccatcacctgtagagccagccagagcatcagcagctacctgaactggtatcagcagaagcccggcaaggcccctaaactgctgatctatgccgccagctctctccagagcggagtgcctagcagattttctggcagcggctccggcaccgatttcaccctgacaatatccagcctccagcctgaggacttcgccacctactactgccagcagagctacagcaccccttggacctttggacagggcaccaaggtggaaatcaagagactcgaggacctgaagaacgtgttcccacctgaggtggccgtgttcgagcctagcaaggccgagatcgcccacacccagaaagccaccctcgtgtgcctggctaccggcttctaccccgaccatgtggaactgtcttggtgggtcaacggcaaagaggtgcacagcggcgtgtgtaccgacccccagccactgaaagaacagcccgccctgaacgacagccggtactgcctgagcagcagactgagagtgtccgccaccttctggcagaacccccggaaccacttcagatgccaggtgcagttctacggcctgagcgagaacgacgagtggacccaggacagagccaagcccgtgacccagatcgtgtctgccgaagcctggggcagagccgattgcggatcccagagcttcggcctgctggaccccaagctgtgctacctgctggatggcatcctgttcatctacggcgtgatcctgaccgccctgttcctgagagtgaagttcagcagaagcgccgacgcccctgcctaccagcagggacagaaccaactgtacaacgagctgaacctgggcagacgggaagagtacgacgtgctggacaagcggagaggcagggaccctgagatgggcggaaagccccagcggagaaagaacccccaggaaggactgtataacgaactccagaaagacaagatggccgaagcctacagcgagatcggcatgaagggcgagcggagaagaggcaagggccacgatggcctgtaccagggcctgagcaccgccaccaaggacacctatgacgccctgcacatgcaggccctgcctccaagaagggccaagcgatctggatctggagcaacaaacttctcactactcaaacaagcaggtgacgtggaggagaatcccgggcctactagtatggactggatttggcgcatccttttccttgtcggcgctgctaccggcgcgcattccttcgaagaagtgcagctggttgaatcaggtggcggcctggttcagcctggcagaagtctgagactgagctgtgccgcctccggcttcaccttcgatgattacgccatgcactgggtccgacaggcccctggaaaaggactggaatgggtgtccggcatcagctggaatagcggctctatcggctacgccgattccgccaagggcagattcaccatcagccgggacaacagcaagaacaccctgtacctccagatgaactccctgagagccgaggacaccgccgtgtactactgtgccaagaggggcaacagcaacagcttcgactattggggccagggcaccctggtcacagtctcttctacgcgtatccagaaccctgatcctgccgtgtaccagctgcgggatagcaagagcagcgacaagagcgtgtgtctgttcaccgacttcgacagccagaccaacgtgtcccagagcaaggactccgacgtgtacatcaccgataagtgcgtgctggacatgcggagcatggacttcaagagcaactccgccgtggcctggtccaacaagtccgatttcgcctgcgccaacgccttcaacaacagcattatccccgaggacacattcttcccaagcagcgacgtgccctgcggtacccagagttttgggttgttggaccctaaattgtgctatctgttggacggaatcctgttcatttacggagtgatcctgaccgcattgttcctgcgggttaagttttccagatccgcagacgcacccgcttaccaacaagggcagaaccaactctacaatgaacttaatttggggcggagggaagagtacgacgttctggacaaaaggaggggacgagatcccgagatgggcggaaagcctcagcgaaggaagaatccgcaagaggggctttataacgaactccagaaagataaaatggcagaagcctatagtgagattgggatgaagggagaaaggaggaggggtaaaggtcacgatgggttgtaccaaggattgagcacagccactaaagatacctatgatgcgctccacatgcaggccctgccgccaaga

SEQ ID NO: 9364 - DNA, 2658 bp, Artificial Sequence
  Synthetic Polynucloetide
atggccttaccagtgaccgccttgctcctgccgctggccttgctgctccacgccgccaggccggacatccagatgacacagagccctagcagcgtgtccgcctctgtgggagacagagtgaccatcacctgtagagccagccagagcatcagcagctacctgaactggtatcagcagaagcccggcaaggcccctaaactgctgatctatgccgccagctctctccagagcggagtgcctagcagattttctggcagcggctccggcaccgatttcaccctgacaatatccagcctccagcctgaggacttcgccacctactactgccagcagagctacagcaccccttggacctttggacagggcaccaaggtggaaatcaagagactcgaggggaaaccaattcccaaccctcttctgggactggattcaaccggcagcggcgaggacctgaagaacgtgttcccacctgaggtggccgtgttcgagcctagcgaggccgagatcagccacacccagaaagccaccctcgtgtgcctggctaccggcttctaccccgaccatgtggaactgtcttggtgggtcaacggcaaagaggtgcacagcggcgtgtctaccgacccccagccactgaaagaacagcccgccctgaacgacagccggtactgcctgagcagcagactgagagtgtccgccaccttctggcagaacccccggaaccacttcagatgccaggtgcagttctacggcctgagcgagaacgacgagtggacccaggacagagccaagcccgtgacccagatcgtgtctgccgaagcctggggcagagccgattgcggatcccagagcttcggcctgctggaccccaagctgtgctacctgctggatggcatcctgttcatctacggcgtgatcctgaccgccctgttcctgagagtgaagttcagcagaagcgccgacgcccctgcctaccagcagggacagaaccaactgtacaacgagctgaacctgggcagacgggaagagtacgacgtgctggacaagcggagaggcagggaccctgagatgggcggaaagccccagcggagaaagaacccccaggaaggactgtataacgaactccagaaagacaagatggccgaagcctacagcgagatcggcatgaagggcgagcggagaagaggcaagggccacgatggcctgtaccagggcctgagcaccgccaccaaggacacctatgacgccctgcacatgcaggccctgcctccaagaagggccaagcgatctggatctggagcaacaaacttctcactactcaaacaagcaggtgacgtggaggagaatcccgggcctactagtatggactggatttggcgcatccttttccttgtcggcgctgctaccggcgcgcattccttcgaagaagtgcagctggttgaatcaggtggcggcctggttcagcctggcagaagtctgagactgagctgtgccgcctccggcttcaccttcgatgattacgccatgcactgggtccgacaggcccctggaaaaggactggaatgggtgtccggcatcagctggaatagcggctctatcggctacgccgattccgccaagggcagattcaccatcagccgggacaacagcaagaacaccctgtacctccagatgaactccctgagagccgaggacaccgccgtgtactactgtgccaagaggggcaacagcaacagcttcgactattggggccagggcaccctggtcacagtctcttctacgcgtgagcagaaactgatctcggaagaggatgggagcggcatccagaaccctgatcctgccgtgtaccagctgcgggatagcaagagcagcgacaagagcgtgtgtctgttcaccgacttcgacagccagaccaacgtgtcccagagcaaggactccgacgtgtacatcaccgataagaccgtgctggacatgcggagcatggacttcaagagcaactccgccgtggcctggtccaacaagtccgatttcgcctgcgccaacgccttcaacaacagcattatccccgaggacacattcttcccaagccccgagagcagctgcggtacccagagttttgggttgttggaccctaaattgtgctatctgttggacggaatcctgttcatttacggagtgatcctgaccgcattgttcctgaggagcaagcggtcacggctgctccacagcgattacatgaatatgacaccacgaagaccgggtcctactcgcaaacactaccaaccctacgcacctccccgcgactttgcagcgtaccgatctcgggttaagttttccagatccgcagacgcacccgcttaccaacaagggcagaaccaactctacaatgaacttaatttggggcggagggaagagtacgacgttctggacaaaaggaggggacgagatcccgagatgggcggaaagcctcagcgaaggaagaatccgcaagaggggctttataacgaactccagaaagataaaatggcagaagcctatagtgagattgggatgaagggagaaaggaggaggggtaaaggtcacgatgggttgtaccaaggattgagcacagccactaaagatacctatgatgcgctccacatgcaggccctgccgccaaga

SEQ ID NO: 9365 - DNA, 2781 bp, Artificial Sequence
  Synthetic Polynucloetide
atggccttaccagtgaccgccttgctcctgccgctggccttgctgctccacgccgccaggccggacatccagatgacacagagccctagcagcgtgtccgcctctgtgggagacagagtgaccatcacctgtagagccagccagagcatcagcagctacctgaactggtatcagcagaagcccggcaaggcccctaaactgctgatctatgccgccagctctctccagagcggagtgcctagcagattttctggcagcggctccggcaccgatttcaccctgacaatatccagcctccagcctgaggacttcgccacctactactgccagcagagctacagcaccccttggacctttggacagggcaccaaggtggaaatcaagagactcgaggggaaaccaattcccaaccctcttctgggactggattcaaccggcagcggcgaggacctgaagaacgtgttcccacctgaggtggccgtgttcgagcctagcgaggccgagatcagccacacccagaaagccaccctcgtgtgcctggctaccggcttctaccccgaccatgtggaactgtcttggtgggtcaacggcaaagaggtgcacagcggcgtgtctaccgacccccagccactgaaagaacagcccgccctgaacgacagccggtactgcctgagcagcagactgagagtgtccgccaccttctggcagaacccccggaaccacttcagatgccaggtgcagttctacggcctgagcgagaacgacgagtggacccaggacagagccaagcccgtgacccagatcgtgtctgccgaagcctggggcagagccgattgcggatcccagagcttcggcctgctggaccccaagctgtgctacctgctggatggcatcctgttcatctacggcgtgatcctgaccgccctgttcctgaggagtaagaggagcaggctcctgcacagtgactacatgaacatgactccacgccgccccggacccacccgcaagcattaccagccctatgccccaccacgcgacttcgcagcctatcgctccagagtgaagttcagcagaagcgccgacgcccctgcctaccagcagggacagaaccaactgtacaacgagctgaacctgggcagacgggaagagtacgacgtgctggacaagcggagaggcagggaccctgagatgggcggaaagccccagcggagaaagaacccccaggaaggactgtataacgaactccagaaagacaagatggccgaagcctacagcgagatcggcatgaagggcgagcggagaagaggcaagggccacgatggcctgtaccagggcctgagcaccgccaccaaggacacctatgacgccctgcacatgcaggccctgcctccaagaagggccaagcgatctggatctggagcaacaaacttctcactactcaaacaagcaggtgacgtggaggagaatcccgggcctactagtatggactggatttggcgcatccttttccttgtcggcgctgctaccggcgcgcattccttcgaagaagtgcagctggttgaatcaggtggcggcctggttcagcctggcagaagtctgagactgagctgtgccgcctccggcttcaccttcgatgattacgccatgcactgggtccgacaggcccctggaaaaggactggaatgggtgtccggcatcagctggaatagcggctctatcggctacgccgattccgccaagggcagattcaccatcagccgggacaacagcaagaacaccctgtacctccagatgaactccctgagagccgaggacaccgccgtgtactactgtgccaagaggggcaacagcaacagcttcgactattggggccagggcaccctggtcacagtctcttctacgcgtgagcagaaactgatctcggaagaggatgggagcggcatccagaaccctgatcctgccgtgtaccagctgcgggatagcaagagcagcgacaagagcgtgtgtctgttcaccgacttcgacagccagaccaacgtgtcccagagcaaggactccgacgtgtacatcaccgataagaccgtgctggacatgcggagcatggacttcaagagcaactccgccgtggcctggtccaacaagtccgatttcgcctgcgccaacgccttcaacaacagcattatccccgaggacacattcttcccaagccccgagagcagctgcggtacccagagttttgggttgttggaccctaaattgtgctatctgttggacggaatcctgttcatttacggagtgatcctgaccgcattgttcctgaggagcaagcggtcacggctgctccacagcgattacatgaatatgacaccacgaagaccgggtcctactcgcaaacactaccaaccctacgcacctccccgcgactttgcagcgtaccgatctcgggttaagttttccagatccgcagacgcacccgcttaccaacaagggcagaaccaactctacaatgaacttaatttggggcggagggaagagtacgacgttctggacaaaaggaggggacgagatcccgagatgggcggaaagcctcagcgaaggaagaatccgcaagaggggctttataacgaactccagaaagataaaatggcagaagcctatagtgagattgggatgaagggagaaaggaggaggggtaaaggtcacgatgggttgtaccaaggattgagcacagccactaaagatacctatgatgcgctccacatgcaggccctgccgccaaga

SEQ ID NO: 9366 - DNA, 2664 bp, Artificial Sequence
  Synthetic Polynucloetide
atggccttaccagtgaccgccttgctcctgccgctggccttgctgctccacgccgccaggccggacatccagatgacacagagccctagcagcgtgtccgcctctgtgggagacagagtgaccatcacctgtagagccagccagagcatcagcagctacctgaactggtatcagcagaagcccggcaaggcccctaaactgctgatctatgccgccagctctctccagagcggagtgcctagcagattttctggcagcggctccggcaccgatttcaccctgacaatatccagcctccagcctgaggacttcgccacctactactgccagcagagctacagcaccccttggacctttggacagggcaccaaggtggaaatcaagagactcgaggggaaaccaattcccaaccctcttctgggactggattcaaccggcagcggcgaggacctgaagaacgtgttcccacctgaggtggccgtgttcgagcctagcgaggccgagatcagccacacccagaaagccaccctcgtgtgcctggctaccggcttctaccccgaccatgtggaactgtcttggtgggtcaacggcaaagaggtgcacagcggcgtgtctaccgacccccagccactgaaagaacagcccgccctgaacgacagccggtactgcctgagcagcagactgagagtgtccgccaccttctggcagaacccccggaaccacttcagatgccaggtgcagttctacggcctgagcgagaacgacgagtggacccaggacagagccaagcccgtgacccagatcgtgtctgccgaagcctggggcagagccgattgcggatcccagagcttcggcctgctggaccccaagctgtgctacctgctggatggcatcctgttcatctacggcgtgatcctgaccgccctgttcctgagagtgaagttcagcagaagcgccgacgcccctgcctaccagcagggacagaaccaactgtacaacgagctgaacctgggcagacgggaagagtacgacgtgctggacaagcggagaggcagggaccctgagatgggcggaaagccccagcggagaaagaacccccaggaaggactgtataacgaactccagaaagacaagatggccgaagcctacagcgagatcggcatgaagggcgagcggagaagaggcaagggccacgatggcctgtaccagggcctgagcaccgccaccaaggacacctatgacgccctgcacatgcaggccctgcctccaagaagggccaagcgatctggatctggagcaacaaacttctcactactcaaacaagcaggtgacgtggaggagaatcccgggcctactagtatggactggatttggcgcatccttttccttgtcggcgctgctaccggcgcgcattccttcgaagaagtgcagctggttgaatcaggtggcggcctggttcagcctggcagaagtctgagactgagctgtgccgcctccggcttcaccttcgatgattacgccatgcactgggtccgacaggcccctggaaaaggactggaatgggtgtccggcatcagctggaatagcggctctatcggctacgccgattccgccaagggcagattcaccatcagccgggacaacagcaagaacaccctgtacctccagatgaactccctgagagccgaggacaccgccgtgtactactgtgccaagaggggcaacagcaacagcttcgactattggggccagggcaccctggtcacagtctcttctacgcgtgagcagaaactgatctcggaagaggatctggggagcggcatccagaaccctgatcctgccgtgtaccagctgcgggatagcaagagcagcgacaagagcgtgtgtctgttcaccgacttcgacagccagaccaacgtgtcccagagcaaggactccgacgtgtacatcaccgataagaccgtgctggacatgcggagcatggacttcaagagcaactccgccgtggcctggtccaacaagtccgatttcgcctgcgccaacgccttcaacaacagcattatccccgaggacacattcttcccaagccccgagagcagctgcggtacccagagttttgggttgttggaccctaaattgtgctatctgttggacggaatcctgttcatttacggagtgatcctgaccgcattgttcctgaagagaggccggaagaagctgctgtacatcttcaagcagcctttcatgcggcccgtgcagaccacccaggaagaggacggctgctcctgccggttccccgaggaagaagaaggcggctgcgagctgcgggttaagttttccagatccgcagacgcacccgcttaccaacaagggcagaaccaactctacaatgaacttaatttggggcggagggaagagtacgacgttctggacaaaaggaggggacgagatcccgagatgggcggaaagcctcagcgaaggaagaatccgcaagaggggctttataacgaactccagaaagataaaatggcagaagcctatagtgagattgggatgaagggagaaaggaggaggggtaaaggtcacgatgggttgtaccaaggattgagcacagccactaaagatacctatgatgcgctccacatgcaggccctgccgccaaga

SEQ ID NO: 9367 - DNA, 2790 bp, Artificial Sequence
  Synthetic Polynucloetide
atggccttaccagtgaccgccttgctcctgccgctggccttgctgctccacgccgccaggccggacatccagatgacacagagccctagcagcgtgtccgcctctgtgggagacagagtgaccatcacctgtagagccagccagagcatcagcagctacctgaactggtatcagcagaagcccggcaaggcccctaaactgctgatctatgccgccagctctctccagagcggagtgcctagcagattttctggcagcggctccggcaccgatttcaccctgacaatatccagcctccagcctgaggacttcgccacctactactgccagcagagctacagcaccccttggacctttggacagggcaccaaggtggaaatcaagagactcgaggggaaaccaattcccaaccctcttctgggactggattcaaccggcagcggcgaggacctgaagaacgtgttcccacctgaggtggccgtgttcgagcctagcgaggccgagatcagccacacccagaaagccaccctcgtgtgcctggctaccggcttctaccccgaccatgtggaactgtcttggtgggtcaacggcaaagaggtgcacagcggcgtgtctaccgacccccagccactgaaagaacagcccgccctgaacgacagccggtactgcctgagcagcagactgagagtgtccgccaccttctggcagaacccccggaaccacttcagatgccaggtgcagttctacggcctgagcgagaacgacgagtggacccaggacagagccaagcccgtgacccagatcgtgtctgccgaagcctggggcagagccgattgcggatcccagagcttcggcctgctggaccccaagctgtgctacctgctggatggcatcctgttcatctacggcgtgatcctgaccgccctgttcctgaaacggggcagaaagaaactcctgtatatattcaaacaaccatttatgagaccagtacaaactactcaagaggaagatggctgtagctgccgatttccagaagaagaagaaggaggatgtgaactgagagtgaagttcagcagaagcgccgacgcccctgcctaccagcagggacagaaccaactgtacaacgagctgaacctgggcagacgggaagagtacgacgtgctggacaagcggagaggcagggaccctgagatgggcggaaagccccagcggagaaagaacccccaggaaggactgtataacgaactccagaaagacaagatggccgaagcctacagcgagatcggcatgaagggcgagcggagaagaggcaagggccacgatggcctgtaccagggcctgagcaccgccaccaaggacacctatgacgccctgcacatgcaggccctgcctccaagaagggccaagcgatctggatctggagcaacaaacttctcactactcaaacaagcaggtgacgtggaggagaatcccgggcctactagtatggactggatttggcgcatccttttccttgtcggcgctgctaccggcgcgcattccttcgaagaagtgcagctggttgaatcaggtggcggcctggttcagcctggcagaagtctgagactgagctgtgccgcctccggcttcaccttcgatgattacgccatgcactgggtccgacaggcccctggaaaaggactggaatgggtgtccggcatcagctggaatagcggctctatcggctacgccgattccgccaagggcagattcaccatcagccgggacaacagcaagaacaccctgtacctccagatgaactccctgagagccgaggacaccgccgtgtactactgtgccaagaggggcaacagcaacagcttcgactattggggccagggcaccctggtcacagtctcttctacgcgtgagcagaaactgatctcggaagaggatctggggagcggcatccagaaccctgatcctgccgtgtaccagctgcgggatagcaagagcagcgacaagagcgtgtgtctgttcaccgacttcgacagccagaccaacgtgtcccagagcaaggactccgacgtgtacatcaccgataagaccgtgctggacatgcggagcatggacttcaagagcaactccgccgtggcctggtccaacaagtccgatttcgcctgcgccaacgccttcaacaacagcattatccccgaggacacattcttcccaagccccgagagcagctgcggtacccagagttttgggttgttggaccctaaattgtgctatctgttggacggaatcctgttcatttacggagtgatcctgaccgcattgttcctgaagagaggccggaagaagctgctgtacatcttcaagcagcctttcatgcggcccgtgcagaccacccaggaagaggacggctgctcctgccggttccccgaggaagaagaaggcggctgcgagctgcgggttaagttttccagatccgcagacgcacccgcttaccaacaagggcagaaccaactctacaatgaacttaatttggggcggagggaagagtacgacgttctggacaaaaggaggggacgagatcccgagatgggcggaaagcctcagcgaaggaagaatccgcaagaggggctttataacgaactccagaaagataaaatggcagaagcctatagtgagattgggatgaagggagaaaggaggaggggtaaaggtcacgatgggttgtaccaaggattgagcacagccactaaagatacctatgatgcgctccacatgcaggccctgccgccaaga

SEQ ID NO: 9368 - DNA, 2463 bp, Artificial Sequence
  Synthetic Polynucloetide
atggccttaccagtgaccgccttgctcctgccgctggccttgctgctccacgccgccaggccggacatccagatgacacagagccctagcagcgtgtccgcctctgtgggagacagagtgaccatcacctgtagagccagccagagcatcagcagctacctgaactggtatcagcagaagcccggcaaggcccctaaactgctgatctatgccgccagctctctccagagcggagtgcctagcagattttctggcagcggctccggcaccgatttcaccctgacaatatccagcctccagcctgaggacttcgccacctactactgccagcagagctacagcaccccttggacctttggacagggcaccaaggtggaaatcaagagactcgagcagagcttcggcctgctggaccccaagctgtgctacctgctggatggcatcctgttcatctacggcgtgatcctgaccgccctgttcctgagagtgaagttcagcagaagcgccgacgcccctgcctaccagcagggacagaaccaactgtacaacgagctgaacctgggcagacgggaagagtacgacgtgctggacaagcggagaggcagggaccctgagatgggcggaaagccccagcggagaaagaacccccaggaaggactgtataacgaactccagaaagacaagatggccgaagcctacagcgagatcggcatgaagggcgagcggagaagaggcaagggccacgatggcctgtaccagggcctgagcaccgccaccaaggacacctatgacgccctgcacatgcaggccctgcctccaagaagggccaagcgatctggatctggagcaacaaacttctcactactcaaacaagcaggtgacgtggaggagaatcccgggcctactagtatggactggatttggcgcatccttttccttgtcggcgctgctaccggcgcgcattccttcgaagaagtgcagctggttgaatcaggtggcggcctggttcagcctggcagaagtctgagactgagctgtgccgcctccggcttcaccttcgatgattacgccatgcactgggtccgacaggcccctggaaaaggactggaatgggtgtccggcatcagctggaatagcggctctatcggctacgccgattccgccaagggcagattcaccatcagccgggacaacagcaagaacaccctgtacctccagatgaactccctgagagccgaggacaccgccgtgtactactgtgccaagaggggcaacagcaacagcttcgactattggggccagggcaccctggtcacagtctcttctacgcgtcagagttttgggttgttggaccctaaattgtgctatctgttggacggaatcctgttcatttacggagtgatcctgaccgcattgttcctgcgggttaagttttccagatccgcagacgcacccgcttaccaacaagggcagaaccaactctacaatgaacttaatttggggcggagggaagagtacgacgttctggacaaaaggaggggacgagatcccgagatgggcggaaagcctcagcgaaggaagaatccgcaagaggggctttataacgaactccagaaagataaaatggcagaagcctatagtgagattgggatgaagggagaaaggaggaggggtaaaggtcacgatgggttgtaccaaggattgagcacagccactaaagatacctatgatgcgctccacatgcaggccctgccgccaagacgcgccaagagaagcggatctggcgtgaagcagaccctgaatttcgacctgctgaagctggctggcgacgtggaatccaacccaggcccttctagaggccatatgaccgagtacaagcccacggtgcgcctcgccacccgcgacgacgtccccagggccgtacgcaccctcgccgccgcgttcgccgactaccccgccacgcgccacaccgtcgatccggaccgccacatcgagcgggtcaccgagctgcaagaactcttcctcacgcgcgtcgggctcgacatcggcaaggtgtgggtcgcggacgacggcgccgcggtggcggtctggaccacgccggagagcgtcgaagcgggggcggtgttcgccgagatcggcccgcgcatggccgagttgagcggttcccggctggccgcgcagcaacagatggaaggcctcctggcgccgcaccggcccaaggagcccgcgtggttcctggccaccgtcggcgtctcgcccgaccaccagggcaagggtctgggcagcgccgtcgtgctccccggagtggaggcggccgagcgcgccggggtgcccgccttcctggagacctccgcgccccgcaacctccccttctacgagcggctcggcttcaccgtcaccgccgacgtcgaggtgcccgaaggaccgcgcacctggtgcatgacccgcaagcccggtgcctga

SEQ ID NO: 9369 - DNA, 1935 bp, Artificial Sequence
  Synthetic Polynucloetide
atggccttaccagtgaccgccttgctcctgccgctggccttgctgctccacgccgccaggccggacatccagatgacacagagccctagcagcgtgtccgcctctgtgggagacagagtgaccatcacctgtagagccagccagagcatcagcagctacctgaactggtatcagcagaagcccggcaaggcccctaaactgctgatctatgccgccagctctctccagagcggagtgcctagcagattttctggcagcggctccggcaccgatttcaccctgacaatatccagcctccagcctgaggacttcgccacctactactgccagcagagctacagcaccccttggacctttggacagggcaccaaggtggaaatcaagagactcgagggacagcctaaggccaatcctaccgtgacactgttccctccaagcagcgaagaactccaggccaacaaggccacacttgtgtgcctgatctccgacttctaccctggggctgtgacagtggcttggaaggccgatggatctcctgtgaaagccggcgtggaaaccaccaagccatccaagcagagcaacaacaaatacgccgccagctcctacctgagcctgacacctgagcagtggaagtcccacagatcctacagctgccaagtgacccacgaaggcagcaccgtggaaaagacagtggcccctacagagtgcagccccatcaagaccgatgtgattacaatggaccccaaggacaactgctccaaggacgccaacgataccctgctgctccagctgaccaacaccagcgcctactacatgtacttgttgctgctgctgaagtccgtggtgtacttcgccatcatcacatgctgcctgctgcggagaaccgccttctgctgcaacggcgagaagtctagggccaagcgatctggatctggagcaacaaacttctcactactcaaacaagcaggtgacgtggaggagaatcccgggcctactagtatggactggatttggcgcatccttttccttgtcggcgctgctaccggcgcgcattccttcgaagaagtgcagctggttgaatcaggtggcggcctggttcagcctggcagaagtctgagactgagctgtgccgcctccggcttcaccttcgatgattacgccatgcactgggtccgacaggcccctggaaaaggactggaatgggtgtccggcatcagctggaatagcggctctatcggctacgccgattccgccaagggcagattcaccatcagccgggacaacagcaagaacaccctgtacctccagatgaactccctgagagccgaggacaccgccgtgtactactgtgccaagaggggcaacagcaacagcttcgactattggggccagggcaccctggtcacagtctcttctacgcgtgcctctacaaagggaccctccgtgtttcctctggctcccagcagcaagtctacaagcggaggaacagccgctctgggctgcctggtcaaggattactttcccgagcctgtgaccgtgtcctggaatagcggagcactgacaagcggcgtgcacacctttccagccgtgctgcaaagcagcggcctgtactctctgagcagcgtggtcacagtgcctagctctagcctgggcacccagacctacatctgcaatgtgaaccacaagcctagcaacaccaaggtggacaagagagtggaacccaagagctgtgaagtgaaaaccgactccaccgaccacgtgaagcccaaagagacagagaacaccaagcagcccagcaagagctgccacaagcccaaggccatcgtgcacaccgagaaagtgaacatgatgagcctgaccgtgctgggcctgcggatgctgttcgccaaaaccgtggccgtgaacttcctgctgaccgccaagctgttcttcctc

SEQ ID NO: 9370 - DNA, 1869 bp, Artificial Sequence
  Synthetic Polynucloetide
atggccttaccagtgaccgccttgctcctgccgctggccttgctgctccacgccgccaggccggacatccagatgacacagagccctagcagcgtgtccgcctctgtgggagacagagtgaccatcacctgtagagccagccagagcatcagcagctacctgaactggtatcagcagaagcccggcaaggcccctaaactgctgatctatgccgccagctctctccagagcggagtgcctagcagattttctggcagcggctccggcaccgatttcaccctgacaatatccagcctccagcctgaggacttcgccacctactactgccagcagagctacagcaccccttggacctttggacagggcaccaaggtggaaatcaagagactcgagggacagcctaaggccaatcctaccgtgacactgttccctccaagcagcgaagaactccaggccaacaaggccacacttgtgtgcctgatctccgacttctaccctggggctgtgacagtggcttggaaggccgatggatctcctgtgaaagccggcgtggaaaccaccaagccatccaagcagagcaacaacaaatacgccgccagctcctacctgagcctgacacctgagcagtggaagtcccacagatcctacagctgccaagtgacccacgaaggcagcaccgtggaaaagacagtggcccctacagagtgcagcggcagagccgattgcggcatcaccagcgccagctaccaccagggcgtgctgagcgccaccatcctgtacgagatcctgctgggcaaggccaccctgtacgccgtgctggtgtctgccctggtgctgatggctatggtcaagcggaaggacagccggggaagggccaagcgatctggatctggagcaacaaacttctcactactcaaacaagcaggtgacgtggaggagaatcccgggcctactagtatggactggatttggcgcatccttttccttgtcggcgctgctaccggcgcgcattccttcgaagaagtgcagctggttgaatcaggtggcggcctggttcagcctggcagaagtctgagactgagctgtgccgcctccggcttcaccttcgatgattacgccatgcactgggtccgacaggcccctggaaaaggactggaatgggtgtccggcatcagctggaatagcggctctatcggctacgccgattccgccaagggcagattcaccatcagccgggacaacagcaagaacaccctgtacctccagatgaactccctgagagccgaggacaccgccgtgtactactgtgccaagaggggcaacagcaacagcttcgactattggggccagggcaccctggtcacagtctcttctacgcgtgcctctacaaagggaccctccgtgtttcctctggctcccagcagcaagtctacaagcggaggaacagccgctctgggctgcctggtcaaggattactttcccgagcctgtgaccgtgtcctggaatagcggagcactgacaagcggcgtgcacacctttccagccgtgctgcaaagcagcggcctgtactctctgagcagcgtggtcacagtgcctagctctagcctgggcacccagacctacatctgcaatgtgaaccacaagcctagcaacaccaaggtggacaagagagtggaacccaagagctgtatccccgaggacacattcttcccaagcagcgacgtgccctgcgacgtgaagctggtggaaaagagcttcgagacagacaccaacctgaacttccagaacctgagcgtgatcggcttcagaatcctgctgctgaaagtggccggctttaacctgctgatgaccctgcggctgtggtccagc

SEQ ID NO: 9371 - DNA, 1869 bp, Artificial Sequence
  Synthetic Polynucloetide
atggccttaccagtgaccgccttgctcctgccgctggccttgctgctccacgccgccaggccggacatccagatgacacagagccctagcagcgtgtccgcctctgtgggagacagagtgaccatcacctgtagagccagccagagcatcagcagctacctgaactggtatcagcagaagcccggcaaggcccctaaactgctgatctatgccgccagctctctccagagcggagtgcctagcagattttctggcagcggctccggcaccgatttcaccctgacaatatccagcctccagcctgaggacttcgccacctactactgccagcagagctacagcaccccttggacctttggacagggcaccaaggtggaaatcaagagactcgagggacagcctaaggccaatcctaccgtgacactgttccctccaagcagcgaagaactccaggccaacaaggccacacttgtgtgcctgatctccgacttctaccctggggctgtgacagtggcttggaaggccgatggatctcctgtgaaagccggcgtggaaaccaccaagccatccaagcagagcaacaacaaatacgccgccagctcctacctgagcctgacacctgagcagtggaagtcccacagatcctacagctgccaagtgacccacgaaggcagcaccgtggaaaagacagtggcccctacagagtgcagcggcagagccgattgcggctttaccagcgagagctaccagcagggcgtgctgagcgccaccatcctgtacgagatcctgctgggcaaggccaccctgtacgccgtgctggtgtctgccctggtgctgatggctatggtcaagcggaaggacagccggggaagggccaagcgatctggatctggagcaacaaacttctcactactcaaacaagcaggtgacgtggaggagaatcccgggcctactagtatggactggatttggcgcatccttttccttgtcggcgctgctaccggcgcgcattccttcgaagaagtgcagctggttgaatcaggtggcggcctggttcagcctggcagaagtctgagactgagctgtgccgcctccggcttcaccttcgatgattacgccatgcactgggtccgacaggcccctggaaaaggactggaatgggtgtccggcatcagctggaatagcggctctatcggctacgccgattccgccaagggcagattcaccatcagccgggacaacagcaagaacaccctgtacctccagatgaactccctgagagccgaggacaccgccgtgtactactgtgccaagaggggcaacagcaacagcttcgactattggggccagggcaccctggtcacagtctcttctacgcgtgcctctacaaagggaccctccgtgtttcctctggctcccagcagcaagtctacaagcggaggaacagccgctctgggctgcctggtcaaggattactttcccgagcctgtgaccgtgtcctggaatagcggagcactgacaagcggcgtgcacacctttccagccgtgctgcaaagcagcggcctgtactctctgagcagcgtggtcacagtgcctagctctagcctgggcacccagacctacatctgcaatgtgaaccacaagcctagcaacaccaaggtggacaagagagtggaacccaagagctgtatccccgaggacacattcttcccaagccccgagagcagctgcgacgtgaagctggtggaaaagagcttcgagacagacaccaacctgaacttccagaacctgagcgtgatcggcttcagaatcctgctgctgaaagtggccggctttaacctgctgatgaccctgcggctgtggtccagc

SEQ ID NO: 9372 - DNA, 1347 bp, Artificial Sequence
  Synthetic Polynucloetide
atggccttaccagtgaccgccttgctcctgccgctggccttgctgctccacgccgccaggccggacatccagatgacacagagccctagcagcgtgtccgcctctgtgggagacagagtgaccatcacctgtagagccagccagagcatcagcagctacctgaactggtatcagcagaagcccggcaaggcccctaaactgctgatctatgccgccagctctctccagagcggagtgcctagcagattttctggcagcggctccggcaccgatttcaccctgacaatatccagcctccagcctgaggacttcgccacctactactgccagcagagctacagcaccccttggacctttggacagggcaccaaggtggaaatcaagagaggcggaggcggaagtggaggcggaggatctggcggcggaggctctgaagtgcagctggttgaatcaggtggcggcctggttcagcctggcagaagtctgagactgagctgtgccgcctccggcttcaccttcgatgattacgccatgcactgggtccgacaggcccctggaaaaggactggaatgggtgtccggcatcagctggaatagcggctctatcggctacgccgattccgccaagggcagattcaccatcagccgggacaacagcaagaacaccctgtacctccagatgaactccctgagagccgaggacaccgccgtgtactactgtgccaagaggggcaacagcaacagcttcgactattggggccagggcaccctggtcacagtctcttctacgcgtgacggtaacgaggagatgggaggaatcactcaaaccccttacaaagtctcaatttcaggaacaactgttatccttacatgtccccagtatcctggcagcgagatcctttggcagcataacgacaagaatatagggggagatgaagacgataagaatatcggatctgacgaggatcacttgagcctgaaagagttctccgagcttgaacaaagcggatattatgtgtgctatccgcgcgggtcaaagccggaagacgctaacttttacctttatctccgagccagagtgtgcgaaaattgcatggaaatggacgttatgtccgttgctacaatagttatcgtagatatatgcatcacgggtggactgcttctgctggtttattattggtccaagaatagaaaggccaaagctaaacccgtgaccagaggcgctggcgcaggcggaaggcaaaggggacaaaacaaagaacggccaccaccagtgccaaatccagattatgagcctattcggaaaggacagagggacctgtactctggcctgaatcagagaagaatc

SEQ ID NO: 9373 - DNA, 1242 bp, Artificial Sequence
  Synthetic Polynucloetide
atggccttaccagtgaccgccttgctcctgccgctggccttgctgctccacgccgccaggccggacatccagatgacacagagccctagcagcgtgtccgcctctgtgggagacagagtgaccatcacctgtagagccagccagagcatcagcagctacctgaactggtatcagcagaagcccggcaaggcccctaaactgctgatctatgccgccagctctctccagagcggagtgcctagcagattttctggcagcggctccggcaccgatttcaccctgacaatatccagcctccagcctgaggacttcgccacctactactgccagcagagctacagcaccccttggacctttggacagggcaccaaggtggaaatcaagagaggcggaggcggaagtggaggcggaggatctggcggcggaggctctgaagtgcagctggttgaatcaggtggcggcctggttcagcctggcagaagtctgagactgagctgtgccgcctccggcttcaccttcgatgattacgccatgcactgggtccgacaggcccctggaaaaggactggaatgggtgtccggcatcagctggaatagcggctctatcggctacgccgattccgccaagggcagattcaccatcagccgggacaacagcaagaacaccctgtacctccagatgaactccctgagagccgaggacaccgccgtgtactactgtgccaagaggggcaacagcaacagcttcgactattggggccagggcaccctggtcacagtctcttctacgcgtttcaagatccccatcgaggaactggaagatcgggtgttcgtgaactgcaacacctctatcacctgggtggaaggcaccgtgggaacactgctgagcgacatcaccagactggacctcggcaagcggattctggaccctcggggcatctacagatgcaacggcaccgacatctacaaggacaaagaaagcaccgtgcaggtccactacagaatgtgccagtcctgcgtggaactggaccctgctacagtggccggcatcatcgtgaccgatgtgatcgctactctgctgctggctctgggagtgttctgcttcgccggacacgaaacaggcagactgtctggcgctgccgatacacaggccctgctgagaaacgaccaagtgtatcagcccctgcgcgacagagatgatgcccagtattctcacctcggcggcaactgggctagaaacaag

SEQ ID NO: 9374 - DNA, 1272 bp, Artificial Sequence
  Synthetic Polynucloetide
atggccttaccagtgaccgccttgctcctgccgctggccttgctgctccacgccgccaggccggacatccagatgacacagagccctagcagcgtgtccgcctctgtgggagacagagtgaccatcacctgtagagccagccagagcatcagcagctacctgaactggtatcagcagaagcccggcaaggcccctaaactgctgatctatgccgccagctctctccagagcggagtgcctagcagattttctggcagcggctccggcaccgatttcaccctgacaatatccagcctccagcctgaggacttcgccacctactactgccagcagagctacagcaccccttggacctttggacagggcaccaaggtggaaatcaagagaggcggaggcggaagtggaggcggaggatctggcggcggaggctctgaagtgcagctggttgaatcaggtggcggcctggttcagcctggcagaagtctgagactgagctgtgccgcctccggcttcaccttcgatgattacgccatgcactgggtccgacaggcccctggaaaaggactggaatgggtgtccggcatcagctggaatagcggctctatcggctacgccgattccgccaagggcagattcaccatcagccgggacaacagcaagaacaccctgtacctccagatgaactccctgagagccgaggacaccgccgtgtactactgtgccaagaggggcaacagcaacagcttcgactattggggccagggcaccctggtcacagtctcttctacgcgtcagagcatcaagggcaaccacctggtcaaggtgtacgactaccaagaggacggcagcgtgctgctgacatgtgatgccgaggccaagaacatcacctggtttaaggacggcaagatgatcggcttcctgaccgaggacaagaagaagtggaacctgggcagcaacgctaaggaccccagaggcatgtatcagtgcaagggcagccagaacaagagcaagcccctccaggtgtactaccggatgtgccagaactgcatcgagctgaacgccgctaccatcagcggctttctgttcgccgagatcgtgtccatcttcgtgctggccgtgggcgtgtactttatcgctggacaggatggcgtgcggcagagcagagcttccgataagcaaaccctgctgcctaacgaccagctgtaccagcctctgaaggacagagaggacgaccagtacagccacctccagggcaatcagctgagaagaaac

SEQ ID NO: 9375 - DNA, 1221 bp, Artificial Sequence
  Synthetic Polynucloetide
atggccttaccagtgaccgccttgctcctgccgctggccttgctgctccacgccgccaggccggacatccagatgacacagagccctagcagcgtgtccgcctctgtgggagacagagtgaccatcacctgtagagccagccagagcatcagcagctacctgaactggtatcagcagaagcccggcaaggcccctaaactgctgatctatgccgccagctctctccagagcggagtgcctagcagattttctggcagcggctccggcaccgatttcaccctgacaatatccagcctccagcctgaggacttcgccacctactactgccagcagagctacagcaccccttggacctttggacagggcaccaaggtggaaatcaagagaggcggaggcggaagtggaggcggaggatctggcggcggaggctctgaagtgcagctggttgaatcaggtggcggcctggttcagcctggcagaagtctgagactgagctgtgccgcctccggcttcaccttcgatgattacgccatgcactgggtccgacaggcccctggaaaaggactggaatgggtgtccggcatcagctggaatagcggctctatcggctacgccgattccgccaagggcagattcaccatcagccgggacaacagcaagaacaccctgtacctccagatgaactccctgagagccgaggacaccgccgtgtactactgtgccaagaggggcaacagcaacagcttcgactattggggccagggcaccctggtcacagtctcttctacgcgtcagagttttgggttgttggaccctaaattgtgctatctgttggacggaatcctgttcatttacggagtgatcctgaccgcattgttcctgcgggttaagttttccagatccgcagacgcacccgcttaccaacaagggcagaaccaactctacaatgaacttaatttggggcggagggaagagtacgacgttctggacaaaaggaggggacgagatcccgagatgggcggaaagcctcagcgaaggaagaatccgcaagaggggctttataacgaactccagaaagataaaatggcagaagcctatagtgagattgggatgaagggagaaaggaggaggggtaaaggtcacgatgggttgtaccaaggattgagcacagccactaaagatacctatgatgcgctccacatgcaggccctgccgccaaga

SEQ ID NO: 9376 - DNA, 1347 bp, Artificial Sequence
  Synthetic Polynucloetide
atggccttaccagtgaccgccttgctcctgccgctggccttgctgctccacgccgccaggccggaagtgcagctggttgaatcaggtggcggcctggttcagcctggcagaagtctgagactgagctgtgccgcctccggcttcaccttcgatgattacgccatgcactgggtccgacaggcccctggaaaaggactggaatgggtgtccggcatcagctggaatagcggctctatcggctacgccgattccgccaagggcagattcaccatcagccgggacaacagcaagaacaccctgtacctccagatgaactccctgagagccgaggacaccgccgtgtactactgtgccaagaggggcaacagcaacagcttcgactattggggccagggcaccctggtcacagtctcttctggcggaggcggaagtggaggcggaggatctggcggcggaggctctgacatccagatgacacagagccctagcagcgtgtccgcctctgtgggagacagagtgaccatcacctgtagagccagccagagcatcagcagctacctgaactggtatcagcagaagcccggcaaggcccctaaactgctgatctatgccgccagctctctccagagcggagtgcctagcagattttctggcagcggctccggcaccgatttcaccctgacaatatccagcctccagcctgaggacttcgccacctactactgccagcagagctacagcaccccttggacctttggacagggcaccaaggtggaaatcaagagaacgcgtgacggtaacgaggagatgggaggaatcactcaaaccccttacaaagtctcaatttcaggaacaactgttatccttacatgtccccagtatcctggcagcgagatcctttggcagcataacgacaagaatatagggggagatgaagacgataagaatatcggatctgacgaggatcacttgagcctgaaagagttctccgagcttgaacaaagcggatattatgtgtgctatccgcgcgggtcaaagccggaagacgctaacttttacctttatctccgagccagagtgtgcgaaaattgcatggaaatggacgttatgtccgttgctacaatagttatcgtagatatatgcatcacgggtggactgcttctgctggtttattattggtccaagaatagaaaggccaaagctaaacccgtgaccagaggcgctggcgcaggcggaaggcaaaggggacaaaacaaagaacggccaccaccagtgccaaatccagattatgagcctattcggaaaggacagagggacctgtactctggcctgaatcagagaagaatc

SEQ ID NO: 9377 - DNA, 1242 bp, Artificial Sequence
  Synthetic Polynucloetide
atggccttaccagtgaccgccttgctcctgccgctggccttgctgctccacgccgccaggccggaagtgcagctggttgaatcaggtggcggcctggttcagcctggcagaagtctgagactgagctgtgccgcctccggcttcaccttcgatgattacgccatgcactgggtccgacaggcccctggaaaaggactggaatgggtgtccggcatcagctggaatagcggctctatcggctacgccgattccgccaagggcagattcaccatcagccgggacaacagcaagaacaccctgtacctccagatgaactccctgagagccgaggacaccgccgtgtactactgtgccaagaggggcaacagcaacagcttcgactattggggccagggcaccctggtcacagtctcttctggcggaggcggaagtggaggcggaggatctggcggcggaggctctgacatccagatgacacagagccctagcagcgtgtccgcctctgtgggagacagagtgaccatcacctgtagagccagccagagcatcagcagctacctgaactggtatcagcagaagcccggcaaggcccctaaactgctgatctatgccgccagctctctccagagcggagtgcctagcagattttctggcagcggctccggcaccgatttcaccctgacaatatccagcctccagcctgaggacttcgccacctactactgccagcagagctacagcaccccttggacctttggacagggcaccaaggtggaaatcaagagaacgcgtttcaagatccccatcgaggaactggaagatcgggtgttcgtgaactgcaacacctctatcacctgggtggaaggcaccgtgggaacactgctgagcgacatcaccagactggacctcggcaagcggattctggaccctcggggcatctacagatgcaacggcaccgacatctacaaggacaaagaaagcaccgtgcaggtccactacagaatgtgccagtcctgcgtggaactggaccctgctacagtggccggcatcatcgtgaccgatgtgatcgctactctgctgctggctctgggagtgttctgcttcgccggacacgaaacaggcagactgtctggcgctgccgatacacaggccctgctgagaaacgaccaagtgtatcagcccctgcgcgacagagatgatgcccagtattctcacctcggcggcaactgggctagaaacaag

SEQ ID NO: 9378 - DNA, 1272 bp, Artificial Sequence
  Synthetic Polynucloetide
atggccttaccagtgaccgccttgctcctgccgctggccttgctgctccacgccgccaggccggaagtgcagctggttgaatcaggtggcggcctggttcagcctggcagaagtctgagactgagctgtgccgcctccggcttcaccttcgatgattacgccatgcactgggtccgacaggcccctggaaaaggactggaatgggtgtccggcatcagctggaatagcggctctatcggctacgccgattccgccaagggcagattcaccatcagccgggacaacagcaagaacaccctgtacctccagatgaactccctgagagccgaggacaccgccgtgtactactgtgccaagaggggcaacagcaacagcttcgactattggggccagggcaccctggtcacagtctcttctggcggaggcggaagtggaggcggaggatctggcggcggaggctctgacatccagatgacacagagccctagcagcgtgtccgcctctgtgggagacagagtgaccatcacctgtagagccagccagagcatcagcagctacctgaactggtatcagcagaagcccggcaaggcccctaaactgctgatctatgccgccagctctctccagagcggagtgcctagcagattttctggcagcggctccggcaccgatttcaccctgacaatatccagcctccagcctgaggacttcgccacctactactgccagcagagctacagcaccccttggacctttggacagggcaccaaggtggaaatcaagagaacgcgtcagagcatcaagggcaaccacctggtcaaggtgtacgactaccaagaggacggcagcgtgctgctgacatgtgatgccgaggccaagaacatcacctggtttaaggacggcaagatgatcggcttcctgaccgaggacaagaagaagtggaacctgggcagcaacgctaaggaccccagaggcatgtatcagtgcaagggcagccagaacaagagcaagcccctccaggtgtactaccggatgtgccagaactgcatcgagctgaacgccgctaccatcagcggctttctgttcgccgagatcgtgtccatcttcgtgctggccgtgggcgtgtactttatcgctggacaggatggcgtgcggcagagcagagcttccgataagcaaaccctgctgcctaacgaccagctgtaccagcctctgaaggacagagaggacgaccagtacagccacctccagggcaatcagctgagaagaaac

SEQ ID NO: 9379 - DNA, 1221 bp, Artificial Sequence
  Synthetic Polynucloetide
atggccttaccagtgaccgccttgctcctgccgctggccttgctgctccacgccgccaggccggaagtgcagctggttgaatcaggtggcggcctggttcagcctggcagaagtctgagactgagctgtgccgcctccggcttcaccttcgatgattacgccatgcactgggtccgacaggcccctggaaaaggactggaatgggtgtccggcatcagctggaatagcggctctatcggctacgccgattccgccaagggcagattcaccatcagccgggacaacagcaagaacaccctgtacctccagatgaactccctgagagccgaggacaccgccgtgtactactgtgccaagaggggcaacagcaacagcttcgactattggggccagggcaccctggtcacagtctcttctggcggaggcggaagtggaggcggaggatctggcggcggaggctctgacatccagatgacacagagccctagcagcgtgtccgcctctgtgggagacagagtgaccatcacctgtagagccagccagagcatcagcagctacctgaactggtatcagcagaagcccggcaaggcccctaaactgctgatctatgccgccagctctctccagagcggagtgcctagcagattttctggcagcggctccggcaccgatttcaccctgacaatatccagcctccagcctgaggacttcgccacctactactgccagcagagctacagcaccccttggacctttggacagggcaccaaggtggaaatcaagagaacgcgtcagagttttgggttgttggaccctaaattgtgctatctgttggacggaatcctgttcatttacggagtgatcctgaccgcattgttcctgcgggttaagttttccagatccgcagacgcacccgcttaccaacaagggcagaaccaactctacaatgaacttaatttggggcggagggaagagtacgacgttctggacaaaaggaggggacgagatcccgagatgggcggaaagcctcagcgaaggaagaatccgcaagaggggctttataacgaactccagaaagataaaatggcagaagcctatagtgagattgggatgaagggagaaaggaggaggggtaaaggtcacgatgggttgtaccaaggattgagcacagccactaaagatacctatgatgcgctccacatgcaggccctgccgccaaga

SEQ ID NO: 9380 - DNA, 1923 bp, Artificial Sequence
  Synthetic Polynucloetide
atggccttaccagtgaccgccttgctcctgccgctggccttgctgctccacgccgccaggccggacatccagatgacacagagccctagcagcgtgtccgcctctgtgggagacagagtgaccatcacctgtagagccagccagagcatcagcagctacctgaactggtatcagcagaagcccggcaaggcccctaaactgctgatctatgccgccagctctctccagagcggagtgcctagcagattttctggcagcggctccggcaccgatttcaccctgacaatatccagcctccagcctgaggacttcgccacctactactgccagcagagctacagcaccccttggacctttggacagggcaccaaggtggaaatcaagagaggcggaggcggaagtggaggcggaggatctggcggcggaggctctgaagtgcagctggttgaatcaggtggcggcctggttcagcctggcagaagtctgagactgagctgtgccgcctccggcttcaccttcgatgattacgccatgcactgggtccgacaggcccctggaaaaggactggaatgggtgtccggcatcagctggaatagcggctctatcggctacgccgattccgccaagggcagattcaccatcagccgggacaacagcaagaacaccctgtacctccagatgaactccctgagagccgaggacaccgccgtgtactactgtgccaagaggggcaacagcaacagcttcgactattggggccagggcaccctggtcacagtctcttctacgcgtgggagcggcatccagaaccctgatcctgccgtgtaccagctgcgggatagcaagagcagcgacaagagcgtgtgtctgttcaccgacttcgacagccagaccaacgtgtcccagagcaaggactccgacgtgtacatcaccgataagaccgtgctggacatgcggagcatggacttcaagagcaactccgccgtggcctggtccaacaagtccgatttcgcctgcgccaacgccttcaacaacagcattatccccgaggacacattcttcccaagccccgagagcagctgcgacgtgaagctggtggaaaagagcttcgagacagacaccaacctgaacttccagaacctgagcgtgatcggcttcagaatcctgctgctgaaagtggccggctttaacctgctgatgaccctgcggctgtggtccagccgcgccaagagaagcggatctggcgtgaagcagaccctgaatttcgacctgctgaagctggctggcgacgtggaatccaacccaggcccttctagaggccatatgaccgagtacaagcccacggtgcgcctcgccacccgcgacgacgtccccagggccgtacgcaccctcgccgccgcgttcgccgactaccccgccacgcgccacaccgtcgatccggaccgccacatcgagcgggtcaccgagctgcaagaactcttcctcacgcgcgtcgggctcgacatcggcaaggtgtgggtcgcggacgacggcgccgcggtggcggtctggaccacgccggagagcgtcgaagcgggggcggtgttcgccgagatcggcccgcgcatggccgagttgagcggttcccggctggccgcgcagcaacagatggaaggcctcctggcgccgcaccggcccaaggagcccgcgtggttcctggccaccgtcggcgtctcgcccgaccaccagggcaagggtctgggcagcgccgtcgtgctccccggagtggaggcggccgagcgcgccggggtgcccgccttcctggagacctccgcgccccgcaacctccccttctacgagcggctcggcttcaccgtcaccgccgacgtcgaggtgcccgaaggaccgcgcacctggtgcatgacccgcaagcccggtgcctga

SEQ ID NO: 9381 - DNA, 2019 bp, Artificial Sequence
  Synthetic Polynucloetide
atggccttaccagtgaccgccttgctcctgccgctggccttgctgctccacgccgccaggccggacatccagatgacacagagccctagcagcgtgtccgcctctgtgggagacagagtgaccatcacctgtagagccagccagagcatcagcagctacctgaactggtatcagcagaagcccggcaaggcccctaaactgctgatctatgccgccagctctctccagagcggagtgcctagcagattttctggcagcggctccggcaccgatttcaccctgacaatatccagcctccagcctgaggacttcgccacctactactgccagcagagctacagcaccccttggacctttggacagggcaccaaggtggaaatcaagagaggcggaggcggaagtggaggcggaggatctggcggcggaggctctgaagtgcagctggttgaatcaggtggcggcctggttcagcctggcagaagtctgagactgagctgtgccgcctccggcttcaccttcgatgattacgccatgcactgggtccgacaggcccctggaaaaggactggaatgggtgtccggcatcagctggaatagcggctctatcggctacgccgattccgccaagggcagattcaccatcagccgggacaacagcaagaacaccctgtacctccagatgaactccctgagagccgaggacaccgccgtgtactactgtgccaagaggggcaacagcaacagcttcgactattggggccagggcaccctggtcacagtctcttctctcgaggacctgaagaacgtgttcccacctgaggtggccgtgttcgagcctagcgaggccgagatcagccacacccagaaagccaccctcgtgtgcctggctaccggcttctaccccgaccatgtggaactgtcttggtgggtcaacggcaaagaggtgcacagcggcgtgtctaccgacccccagccactgaaagaacagcccgccctgaacgacagccggtactgcctgagcagcagactgagagtgtccgccaccttctggcagaacccccggaaccacttcagatgccaggtgcagttctacggcctgagcgagaacgacgagtggacccaggacagagccaagcccgtgacccagatcgtgtctgccgaagcctggggcagagccgattgcggctttaccagcgagagctaccagcagggcgtgctgagcgccaccatcctgtacgagatcctgctgggcaaggccaccctgtacgccgtgctggtgtctgccctggtgctgatggctatggtcaagcggaaggacagccggggaagggccaagcgatctggatctggagcaacaaacttctcactactcaaacaagcaggtgacgtggaggagaatcccgggcctactagaggccatatgaccgagtacaagcccacggtgcgcctcgccacccgcgacgacgtccccagggccgtacgcaccctcgccgccgcgttcgccgactaccccgccacgcgccacaccgtcgatccggaccgccacatcgagcgggtcaccgagctgcaagaactcttcctcacgcgcgtcgggctcgacatcggcaaggtgtgggtcgcggacgacggcgccgcggtggcggtctggaccacgccggagagcgtcgaagcgggggcggtgttcgccgagatcggcccgcgcatggccgagttgagcggttcccggctggccgcgcagcaacagatggaaggcctcctggcgccgcaccggcccaaggagcccgcgtggttcctggccaccgtcggcgtctcgcccgaccaccagggcaagggtctgggcagcgccgtcgtgctccccggagtggaggcggccgagcgcgccggggtgcccgccttcctggagacctccgcgccccgcaacctccccttctacgagcggctcggcttcaccgtcaccgccgacgtcgaggtgcccgaaggaccgcgcacctggtgcatgacccgcaagcccggtgcctga

SEQ ID NO: 9382 - DNA, 2169 bp, Artificial Sequence
  Synthetic Polynucloetide
atggccttaccagtgaccgccttgctcctgccgctggccttgctgctccacgccgccaggccggacatccagatgacacagagccctagcagcgtgtccgcctctgtgggagacagagtgaccatcacctgtagagccagccagagcatcagcagctacctgaactggtatcagcagaagcccggcaaggcccctaaactgctgatctatgccgccagctctctccagagcggagtgcctagcagattttctggcagcggctccggcaccgatttcaccctgacaatatccagcctccagcctgaggacttcgccacctactactgccagcagagctacagcaccccttggacctttggacagggcaccaaggtggaaatcaagagaggcggaggcggaagtggaggcggaggatctggcggcggaggctctgaagtgcagctggttgaatcaggtggcggcctggttcagcctggcagaagtctgagactgagctgtgccgcctccggcttcaccttcgatgattacgccatgcactgggtccgacaggcccctggaaaaggactggaatgggtgtccggcatcagctggaatagcggctctatcggctacgccgattccgccaagggcagattcaccatcagccgggacaacagcaagaacaccctgtacctccagatgaactccctgagagccgaggacaccgccgtgtactactgtgccaagaggggcaacagcaacagcttcgactattggggccagggcaccctggtcacagtctcttctacgcgtgagcagaaactgatctcggaagaggatctggggagcggcaccccattcccttctctggcccctcccatcatgctgctggtggacggcaagcagcagatggtggtcgtgtgcctggtgctggatgtggccccacctggactggacagccccatctggtttagcgccggcaatggctctgccctggacgcctttacctacggcccaagccctgccaccgatggcacctggacaaatctggcccacctgagcctgcccagcgaggaactggcttcttgggagcctctcgtgtgccacacaggacctggcgctgagggacacagcagatccacccagcctatgcacctgtctggcgaggccagcaccgccagaacctgtcctcaggaacctctgagaggcacccctggcggagcactgtggctgggagtgctgagactgctgctgttcaagctgctgctgtttgacctgctgctgacctgctcctgtctgtgcgatcctgccggccctctgccttctcctgccaccaccacaagactgagagccctgggcagccacagactgcaccctgccacagagacaggcggcagagaggccacaagcagccctagaccccagcccagagacagaagatggggcgataccccccctggcagaaagcctggatctccagtccgcgccaagagaagcggatctggcgtgaagcagaccctgaatttcgacctgctgaagctggctggcgacgtggaatccaacccaggcccttctagatctagaggccatatgaccgagtacaagcccacggtgcgcctcgccacccgcgacgacgtccccagggccgtacgcaccctcgccgccgcgttcgccgactaccccgccacgcgccacaccgtcgatccggaccgccacatcgagcgggtcaccgagctgcaagaactcttcctcacgcgcgtcgggctcgacatcggcaaggtgtgggtcgcggacgacggcgccgcggtggcggtctggaccacgccggagagcgtcgaagcgggggcggtgttcgccgagatcggcccgcgcatggccgagttgagcggttcccggctggccgcgcagcaacagatggaaggcctcctggcgccgcaccggcccaaggagcccgcgtggttcctggccaccgtcggcgtctcgcccgaccaccagggcaagggtctgggcagcgccgtcgtgctccccggagtggaggcggccgagcgcgccggggtgcccgccttcctggagacctccgcgccccgcaacctccccttctacgagcggctcggcttcaccgtcaccgccgacgtcgaggtgcccgaaggaccgcgcacctggtgcatgacccgcaagcccggtgcctga

SEQ ID NO: 9383 - DNA, 1620 bp, Artificial Sequence
  Synthetic Polynucloetide
atggccttaccagtgaccgccttgctcctgccgctggccttgctgctccacgccgccaggccggacatccagatgacacagagccctagcagcgtgtccgcctctgtgggagacagagtgaccatcacctgtagagccagccagagcatcagcagctacctgaactggtatcagcagaagcccggcaaggcccctaaactgctgatctatgccgccagctctctccagagcggagtgcctagcagattttctggcagcggctccggcaccgatttcaccctgacaatatccagcctccagcctgaggacttcgccacctactactgccagcagagctacagcaccccttggacctttggacagggcaccaaggtggaaatcaagagactcgaggacctgaagaacgtgttcccacctgaggtggccgtgttcgagcctagcgaggccgagatcagccacacccagaaagccaccctcgtgtgcctggctaccggcttctaccccgaccatgtggaactgtcttggtgggtcaacggcaaagaggtgcacagcggcgtgtctaccgacccccagccactgaaagaacagcccgccctgaacgacagccggtactgcctgagcagcagactgagagtgtccgccaccttctggcagaacccccggaaccacttcagatgccaggtgcagttctacggcctgagcgagaacgacgagtggacccaggacagagccaagcccgtgacccagatcgtgtctgccgaagcctggggcagagccgattgcggctttaccagcgagagctaccagcagggcgtgctgagcgccaccatcctgtacgagatcctgctgggcaaggccaccctgtacgccgtgctggtgtctgccctggtgctgatggctatggtcaagcggaaggacagccggggaagggccaagcgatctggatctggagcaacaaacttctcactactcaaacaagcaggtgacgtggaggagaatcccgggcctactagaggccatatgaccgagtacaagcccacggtgcgcctcgccacccgcgacgacgtccccagggccgtacgcaccctcgccgccgcgttcgccgactaccccgccacgcgccacaccgtcgatccggaccgccacatcgagcgggtcaccgagctgcaagaactcttcctcacgcgcgtcgggctcgacatcggcaaggtgtgggtcgcggacgacggcgccgcggtggcggtctggaccacgccggagagcgtcgaagcgggggcggtgttcgccgagatcggcccgcgcatggccgagttgagcggttcccggctggccgcgcagcaacagatggaaggcctcctggcgccgcaccggcccaaggagcccgcgtggttcctggccaccgtcggcgtctcgcccgaccaccagggcaagggtctgggcagcgccgtcgtgctccccggagtggaggcggccgagcgcgccggggtgcccgccttcctggagacctccgcgccccgcaacctccccttctacgagcggctcggcttcaccgtcaccgccgacgtcgaggtgcccgaaggaccgcgcacctggtgcatgacccgcaagcccggtgcctga

SEQ ID NO: 9384 - DNA, 927 bp, Artificial Sequence
  Synthetic Polynucloetide
atggccttaccagtgaccgccttgctcctgccgctggccttgctgctccacgccgccaggccggacatccagatgacacagagccctagcagcgtgtccgcctctgtgggagacagagtgaccatcacctgtagagccagccagagcatcagcagctacctgaactggtatcagcagaagcccggcaaggcccctaaactgctgatctatgccgccagctctctccagagcggagtgcctagcagattttctggcagcggctccggcaccgatttcaccctgacaatatccagcctccagcctgaggacttcgccacctactactgccagcagagctacagcaccccttggacctttggacagggcaccaaggtggaaatcaagagactcgaggacctgaagaacgtgttcccacctgaggtggccgtgttcgagcctagcgaggccgagatcagccacacccagaaagccaccctcgtgtgcctggctaccggcttctaccccgaccatgtggaactgtcttggtgggtcaacggcaaagaggtgcacagcggcgtgtctaccgacccccagccactgaaagaacagcccgccctgaacgacagccggtactgcctgagcagcagactgagagtgtccgccaccttctggcagaacccccggaaccacttcagatgccaggtgcagttctacggcctgagcgagaacgacgagtggacccaggacagagccaagcccgtgacccagatcgtgtctgccgaagcctggggcagagccgattgcggctttaccagcgagagctaccagcagggcgtgctgagcgccaccatcctgtacgagatcctgctgggcaaggccaccctgtacgccgtgctggtgtctgccctggtgctgatggctatggtcaagcggaaggacagccgggga

SEQ ID NO: 9385 - DNA, 1344 bp, Artificial Sequence
  Synthetic Polynucloetide
atggactggatttggcgcatccttttccttgtcggcgctgctaccggcgcgcattccttcgaagaagtgcagctggttgaatcaggtggcggcctggttcagcctggcagaagtctgagactgagctgtgccgcctccggcttcaccttcgatgattacgccatgcactgggtccgacaggcccctggaaaaggactggaatgggtgtccggcatcagctggaatagcggctctatcggctacgccgattccgccaagggcagattcaccatcagccgggacaacagcaagaacaccctgtacctccagatgaactccctgagagccgaggacaccgccgtgtactactgtgccaagaggggcaacagcaacagcttcgactattggggccagggcaccctggtcacagtctcttctacgcgtatccagaaccctgatcctgccgtgtaccagctgcgggatagcaagagcagcgacaagagcgtgtgtctgttcaccgacttcgacagccagaccaacgtgtcccagagcaaggactccgacgtgtacatcaccgataagaccgtgctggacatgcggagcatggacttcaagagcaactccgccgtggcctggtccaacaagtccgatttcgcctgcgccaacgccttcaacaacagcattatccccgaggacacattcttcccaagccccgagagcagctgcgacgtgaagctggtggaaaagagcttcgagacagacaccaacctgaacttccagaacctgagcgtgatcggcttcagaatcctgctgctgaaagtggccggctttaacctgctgatgaccctgcggctgtggtccagccgcgccaagagaagcggatctggcgtgaagcagaccctgaatttcgacctgctgaagctggctggcgacgtggaatccaacccaggcccttctagaggccatatggccaagcctttgtctcaagaagaatccaccctcattgaaagagcaacggctacaatcaacagcatccccatctctgaagactacagcgtcgccagcgcagctctctctagcgacggccgcatcttcactggtgtcaatgtatatcattttactgggggaccttgtgcagaactcgtggtgctgggcactgctgctgctgcggcagctggcaacctgacttgtatcgtcgcgatcggaaatgagaacaggggcatcttgagcccctgcggacggtgccgacaggtgcttctcgatctgcatcctgggatcaaagccatagtgaaggacagtgatggacagccgacggcagttgggattcgtgaattgctgccctctggttatgtgtgggagggctga

SEQ ID NO: 9386 - DNA, 843 bp, Artificial Sequence
  Synthetic Polynucloetide
atggactggatttggcgcatccttttccttgtcggcgctgctaccggcgcgcattccttcgaagaagtgcagctggttgaatcaggtggcggcctggttcagcctggcagaagtctgagactgagctgtgccgcctccggcttcaccttcgatgattacgccatgcactgggtccgacaggcccctggaaaaggactggaatgggtgtccggcatcagctggaatagcggctctatcggctacgccgattccgccaagggcagattcaccatcagccgggacaacagcaagaacaccctgtacctccagatgaactccctgagagccgaggacaccgccgtgtactactgtgccaagaggggcaacagcaacagcttcgactattggggccagggcaccctggtcacagtctcttctacgcgtatccagaaccctgatcctgccgtgtaccagctgcgggatagcaagagcagcgacaagagcgtgtgtctgttcaccgacttcgacagccagaccaacgtgtcccagagcaaggactccgacgtgtacatcaccgataagaccgtgctggacatgcggagcatggacttcaagagcaactccgccgtggcctggtccaacaagtccgatttcgcctgcgccaacgccttcaacaacagcattatccccgaggacacattcttcccaagccccgagagcagctgcgacgtgaagctggtggaaaagagcttcgagacagacaccaacctgaacttccagaacctgagcgtgatcggcttcagaatcctgctgctgaaagtggccggctttaacctgctgatgaccctgcggctgtggtccagc

SEQ ID NO: 9387 - DNA, 1674 bp, Artificial Sequence
  Synthetic Polynucloetide
atggccttaccagtgaccgccttgctcctgccgctggccttgctgctccacgccgccaggccggacatccagatgacacagagccctagcagcgtgtccgcctctgtgggagacagagtgaccatcacctgtagagccagccagagcatcagcagctacctgaactggtatcagcagaagcccggcaaggcccctaaactgctgatctatgccgccagctctctccagagcggagtgcctagcagattttctggcagcggctccggcaccgatttcaccctgacaatatccagcctccagcctgaggacttcgccacctactactgccagcagagctacagcaccccttggacctttggacagggcaccaaggtggaaatcaagagactcgaggggaaaccaattcccaaccctcttctgggactggattcaaccggcagcggcgaggacctgaagaacgtgttcccacctgaggtggccgtgttcgagcctagcgaggccgagatcagccacacccagaaagccaccctcgtgtgcctggctaccggcttctaccccgaccatgtggaactgtcttggtgggtcaacggcaaagaggtgcacagcggcgtgtgtaccgacccccagccactgaaagaacagcccgccctgaacgacagccggtactgcctgagcagcagactgagagtgtccgccaccttctggcagaacccccggaaccacttcagatgccaggtgcagttctacggcctgagcgagaacgacgagtggacccaggacagagccaagcccgtgacccagatcgtgtctgccgaagcctggggcagagccgattgcggctttaccagcgagagctaccagcagggcgtgctgagcgccaccatcctgtacgagatcctgctgggcaaggccaccctgtacgccgtgctggtgtctgccctggtgctgatggctatggtcaagcggaaggacagccggggaagggccaagcgatctggatctggagcaacaaacttctcactactcaaacaagcaggtgacgtggaggagaatcccgggcctactagaggccatatgaccgagtacaagcccacggtgcgcctcgccacccgcgacgacgtccccagggccgtacgcaccctcgccgccgcgttcgccgactaccccgccacgcgccacaccgtcgatccggaccgccacatcgagcgggtcaccgagctgcaagaactcttcctcacgcgcgtcgggctcgacatcggcaaggtgtgggtcgcggacgacggcgccgcggtggcggtctggaccacgccggagagcgtcgaagcgggggcggtgttcgccgagatcggcccgcgcatggccgagttgagcggttcccggctggccgcgcagcaacagatggaaggcctcctggcgccgcaccggcccaaggagcccgcgtggttcctggccaccgtcggcgtctcgcccgaccaccagggcaagggtctgggcagcgccgtcgtgctccccggagtggaggcggccgagcgcgccggggtgcccgccttcctggagacctccgcgccccgcaacctccccttctacgagcggctcggcttcaccgtcaccgccgacgtcgaggtgcccgaaggaccgcgcacctggtgcatgacccgcaagcccggtgcctga

SEQ ID NO: 9388 - DNA, 984 bp, Artificial Sequence
  Synthetic Polynucloetide
atggccttaccagtgaccgccttgctcctgccgctggccttgctgctccacgccgccaggccggacatccagatgacacagagccctagcagcgtgtccgcctctgtgggagacagagtgaccatcacctgtagagccagccagagcatcagcagctacctgaactggtatcagcagaagcccggcaaggcccctaaactgctgatctatgccgccagctctctccagagcggagtgcctagcagattttctggcagcggctccggcaccgatttcaccctgacaatatccagcctccagcctgaggacttcgccacctactactgccagcagagctacagcaccccttggacctttggacagggcaccaaggtggaaatcaagagactcgaggggaaaccaattcccaaccctcttctgggactggattcaaccggcagcggcgaggacctgaagaacgtgttcccacctgaggtggccgtgttcgagcctagcgaggccgagatcagccacacccagaaagccaccctcgtgtgcctggctaccggcttctaccccgaccatgtggaactgtcttggtgggtcaacggcaaagaggtgcacagcggcgtgtgtaccgacccccagccactgaaagaacagcccgccctgaacgacagccggtactgcctgagcagcagactgagagtgtccgccaccttctggcagaacccccggaaccacttcagatgccaggtgcagttctacggcctgagcgagaacgacgagtggacccaggacagagccaagcccgtgacccagatcgtgtctgccgaagcctggggcagagccgattgcggctttaccagcgagagctaccagcagggcgtgctgagcgccaccatcctgtacgagatcctgctgggcaaggccaccctgtacgccgtgctggtgtctgccctggtgctgatggctatggtcaagcggaaggacagccggggatga

SEQ ID NO: 9389 - DNA, 1380 bp, Artificial Sequence
  Synthetic Polynucloetide
atggactggatttggcgcatccttttccttgtcggcgctgctaccggcgcgcattccttcgaagaagtgcagctggttgaatcaggtggcggcctggttcagcctggcagaagtctgagactgagctgtgccgcctccggcttcaccttcgatgattacgccatgcactgggtccgacaggcccctggaaaaggactggaatgggtgtccggcatcagctggaatagcggctctatcggctacgccgattccgccaagggcagattcaccatcagccgggacaacagcaagaacaccctgtacctccagatgaactccctgagagccgaggacaccgccgtgtactactgtgccaagaggggcaacagcaacagcttcgactattggggccagggcaccctggtcacagtctcttctacgcgtgagcagaaactgatctcggaagaggatgggagcggcatccagaaccctgatcctgccgtgtaccagctgcgggatagcaagagcagcgacaagagcgtgtgtctgttcaccgacttcgacagccagaccaacgtgtcccagagcaaggactccgacgtgtacatcaccgataagtgcgtgctggacatgcggagcatggacttcaagagcaactccgccgtggcctggtccaacaagtccgatttcgcctgcgccaacgccttcaacaacagcattatccccgaggacacattcttcccaagccccgagagcagctgcgacgtgaagctggtggaaaagagcttcgagacagacaccaacctgaacttccagaacctgagcgtgatcggcttcagaatcctgctgctgaaagtggccggctttaacctgctgatgaccctgcggctgtggtccagccgcgccaagagaagcggatctggcgtgaagcagaccctgaatttcgacctgctgaagctggctggcgacgtggaatccaacccaggcccttctagaggccatatggccaagcctttgtctcaagaagaatccaccctcattgaaagagcaacggctacaatcaacagcatccccatctctgaagactacagcgtcgccagcgcagctctctctagcgacggccgcatcttcactggtgtcaatgtatatcattttactgggggaccttgtgcagaactcgtggtgctgggcactgctgctgctgcggcagctggcaacctgacttgtatcgtcgcgatcggaaatgagaacaggggcatcttgagcccctgcggacggtgccgacaggtgcttctcgatctgcatcctgggatcaaagccatagtgaaggacagtgatggacagccgacggcagttgggattcgtgaattgctgccctctggttatgtgtgggagggctga

SEQ ID NO: 9390 - DNA, 882 bp, Artificial Sequence
  Synthetic Polynucloetide
atggactggatttggcgcatccttttccttgtcggcgctgctaccggcgcgcattccttcgaagaagtgcagctggttgaatcaggtggcggcctggttcagcctggcagaagtctgagactgagctgtgccgcctccggcttcaccttcgatgattacgccatgcactgggtccgacaggcccctggaaaaggactggaatgggtgtccggcatcagctggaatagcggctctatcggctacgccgattccgccaagggcagattcaccatcagccgggacaacagcaagaacaccctgtacctccagatgaactccctgagagccgaggacaccgccgtgtactactgtgccaagaggggcaacagcaacagcttcgactattggggccagggcaccctggtcacagtctcttctacgcgtgagcagaaactgatctcggaagaggatgggagcggcatccagaaccctgatcctgccgtgtaccagctgcgggatagcaagagcagcgacaagagcgtgtgtctgttcaccgacttcgacagccagaccaacgtgtcccagagcaaggactccgacgtgtacatcaccgataagtgcgtgctggacatgcggagcatggacttcaagagcaactccgccgtggcctggtccaacaagtccgatttcgcctgcgccaacgccttcaacaacagcattatccccgaggacacattcttcccaagccccgagagcagctgcgacgtgaagctggtggaaaagagcttcgagacagacaccaacctgaacttccagaacctgagcgtgatcggcttcagaatcctgctgctgaaagtggccggctttaacctgctgatgaccctgcggctgtggtccagctga

SEQ ID NO: 9391 - DNA, 1923 bp, Artificial Sequence
  Synthetic Polynucloetide
atggccttaccagtgaccgccttgctcctgccgctggccttgctgctccacgccgccaggccggacatccagatgacacagagccctagcagcgtgtccgcctctgtgggagacagagtgaccatcacctgtagagccagccagagcatcagcagctacctgaactggtatcagcagaagcccggcaaggcccctaaactgctgatctatgccgccagctctctccagagcggagtgcctagcagattttctggcagcggctccggcaccgatttcaccctgacaatatccagcctccagcctgaggacttcgccacctactactgccagcagagctacagcaccccttggacctttggacagggcaccaaggtggaaatcaagagaggcggaggcggaagtggaggcggaggatctggcggcggaggctctgaagtgcagctggttgaatcaggtggcggcctggttcagcctggcagaagtctgagactgagctgtgccgcctccggcttcaccttcgatgattacgccatgcactgggtccgacaggcccctggaaaaggactggaatgggtgtccggcatcagctggaatagcggctctatcggctacgccgattccgccaagggcagattcaccatcagccgggacaacagcaagaacaccctgtacctccagatgaactccctgagagccgaggacaccgccgtgtactactgtgccaagaggggcaacagcaacagcttcgactattggggccagggcaccctggtcacagtctcttctacgcgtgggagcggcatccagaaccctgatcctgccgtgtaccagctgcgggatagcaagagcagcgacaagagcgtgtgtctgttcaccgacttcgacagccagaccaacgtgtcccagagcaaggactccgacgtgtacatcaccgataagaccgtgctggacatgcggagcatggacttcaagagcaactccgccgtggcctggtccaacaagtccgatttcgcctgcgccaacgccttcaacaacagcattatccccgaggacacattcttcccaagcagcgacgtgccctgcgacgtgaagctggtggaaaagagcttcgagacagacaccaacctgaacttccagaacctgagcgtgatcggcttcagaatcctgctgctgaaagtggccggctttaacctgctgatgaccctgcggctgtggtccagccgcgccaagagaagcggatctggcgtgaagcagaccctgaatttcgacctgctgaagctggctggcgacgtggaatccaacccaggcccttctagaggccatatgaccgagtacaagcccacggtgcgcctcgccacccgcgacgacgtccccagggccgtacgcaccctcgccgccgcgttcgccgactaccccgccacgcgccacaccgtcgatccggaccgccacatcgagcgggtcaccgagctgcaagaactcttcctcacgcgcgtcgggctcgacatcggcaaggtgtgggtcgcggacgacggcgccgcggtggcggtctggaccacgccggagagcgtcgaagcgggggcggtgttcgccgagatcggcccgcgcatggccgagttgagcggttcccggctggccgcgcagcaacagatggaaggcctcctggcgccgcaccggcccaaggagcccgcgtggttcctggccaccgtcggcgtctcgcccgaccaccagggcaagggtctgggcagcgccgtcgtgctccccggagtggaggcggccgagcgcgccggggtgcccgccttcctggagacctccgcgccccgcaacctccccttctacgagcggctcggcttcaccgtcaccgccgacgtcgaggtgcccgaaggaccgcgcacctggtgcatgacccgcaagcccggtgcctga

SEQ ID NO: 9392 - DNA, 2019 bp, Artificial Sequence
  Synthetic Polynucloetide
atggccttaccagtgaccgccttgctcctgccgctggccttgctgctccacgccgccaggccggacatccagatgacacagagccctagcagcgtgtccgcctctgtgggagacagagtgaccatcacctgtagagccagccagagcatcagcagctacctgaactggtatcagcagaagcccggcaaggcccctaaactgctgatctatgccgccagctctctccagagcggagtgcctagcagattttctggcagcggctccggcaccgatttcaccctgacaatatccagcctccagcctgaggacttcgccacctactactgccagcagagctacagcaccccttggacctttggacagggcaccaaggtggaaatcaagagaggcggaggcggaagtggaggcggaggatctggcggcggaggctctgaagtgcagctggttgaatcaggtggcggcctggttcagcctggcagaagtctgagactgagctgtgccgcctccggcttcaccttcgatgattacgccatgcactgggtccgacaggcccctggaaaaggactggaatgggtgtccggcatcagctggaatagcggctctatcggctacgccgattccgccaagggcagattcaccatcagccgggacaacagcaagaacaccctgtacctccagatgaactccctgagagccgaggacaccgccgtgtactactgtgccaagaggggcaacagcaacagcttcgactattggggccagggcaccctggtcacagtctcttctctcgaggacctgaagaacgtgttcccacctgaggtggccgtgttcgagcctagcaaggccgagatcgcccacacccagaaagccaccctcgtgtgcctggctaccggcttctaccccgaccatgtggaactgtcttggtgggtcaacggcaaagaggtgcacagcggcgtgtctaccgacccccagccactgaaagaacagcccgccctgaacgacagccggtactgcctgagcagcagactgagagtgtccgccaccttctggcagaacccccggaaccacttcagatgccaggtgcagttctacggcctgagcgagaacgacgagtggacccaggacagagccaagcccgtgacccagatcgtgtctgccgaagcctggggcagagccgattgcggcatcaccagcgccagctaccaccagggcgtgctgagcgccaccatcctgtacgagatcctgctgggcaaggccaccctgtacgccgtgctggtgtctgccctggtgctgatggctatggtcaagcggaaggacagccggggaagggccaagcgatctggatctggagcaacaaacttctcactactcaaacaagcaggtgacgtggaggagaatcccgggcctactagaggccatatgaccgagtacaagcccacggtgcgcctcgccacccgcgacgacgtccccagggccgtacgcaccctcgccgccgcgttcgccgactaccccgccacgcgccacaccgtcgatccggaccgccacatcgagcgggtcaccgagctgcaagaactcttcctcacgcgcgtcgggctcgacatcggcaaggtgtgggtcgcggacgacggcgccgcggtggcggtctggaccacgccggagagcgtcgaagcgggggcggtgttcgccgagatcggcccgcgcatggccgagttgagcggttcccggctggccgcgcagcaacagatggaaggcctcctggcgccgcaccggcccaaggagcccgcgtggttcctggccaccgtcggcgtctcgcccgaccaccagggcaagggtctgggcagcgccgtcgtgctccccggagtggaggcggccgagcgcgccggggtgcccgccttcctggagacctccgcgccccgcaacctccccttctacgagcggctcggcttcaccgtcaccgccgacgtcgaggtgcccgaaggaccgcgcacctggtgcatgacccgcaagcccggtgcctga

SEQ ID NO: 9393 - DNA, 2088 bp, Artificial Sequence
  Synthetic Polynucloetide
atggccttaccagtgaccgccttgctcctgccgctggccttgctgctccacgccgccaggccggacatccagatgacacagagccctagcagcgtgtccgcctctgtgggagacagagtgaccatcacctgtagagccagccagagcatcagcagctacctgaactggtatcagcagaagcccggcaaggcccctaaactgctgatctatgccgccagctctctccagagcggagtgcctagcagattttctggcagcggctccggcaccgatttcaccctgacaatatccagcctccagcctgaggacttcgccacctactactgccagcagagctacagcaccccttggacctttggacagggcaccaaggtggaaatcaagagaggcggaggcggaagtggaggcggaggatctggcggcggaggctctgaagtgcagctggttgaatcaggtggcggcctggttcagcctggcagaagtctgagactgagctgtgccgcctccggcttcaccttcgatgattacgccatgcactgggtccgacaggcccctggaaaaggactggaatgggtgtccggcatcagctggaatagcggctctatcggctacgccgattccgccaagggcagattcaccatcagccgggacaacagcaagaacaccctgtacctccagatgaactccctgagagccgaggacaccgccgtgtactactgtgccaagaggggcaacagcaacagcttcgactattggggccagggcaccctggtcacagtctcttctacgcgtgggtctggaggcggaggcagcggcggaggcgggagcggcgacggtaacgaggagatgggaggaatcactcaaaccccttacaaagtctcaatttcaggaacaactgttatccttacatgtccccagtatcctggcagcgagatcctttggcagcataacgacaagaatatagggggagatgaagacgataagaatatcggatctgacgaggatcacttgagcctgaaagagttctccgagcttgaacaaagcggatattatgtgtgctatccgcgcgggtcaaagccggaagacgctaacttttacctttatctccgagccagagtgtgcgaaaattgcatggaaatggacgttatgtccgttgctacaatagttatcgtagatatatgcatcacgggtggactgcttctgctggtttattattggtccaagaatagaaaggccaaagctaaacccgtgaccagaggcgctggcgcaggcggaaggcaaaggggacaaaacaaagaacggccaccaccagtgccaaatccagattatgagcctattcggaaaggacagagggacctgtactctggcctgaatcagagaagaatccgcgccaagagaagcggatctggcgtgaagcagaccctgaatttcgacctgctgaagctggctggcgacgtggaatccaacccaggcccttctagaggccatatgaccgagtacaagcccacggtgcgcctcgccacccgcgacgacgtccccagggccgtacgcaccctcgccgccgcgttcgccgactaccccgccacgcgccacaccgtcgatccggaccgccacatcgagcgggtcaccgagctgcaagaactcttcctcacgcgcgtcgggctcgacatcggcaaggtgtgggtcgcggacgacggcgccgcggtggcggtctggaccacgccggagagcgtcgaagcgggggcggtgttcgccgagatcggcccgcgcatggccgagttgagcggttcccggctggccgcgcagcaacagatggaaggcctcctggcgccgcaccggcccaaggagcccgcgtggttcctggccaccgtcggcgtctcgcccgaccaccagggcaagggtctgggcagcgccgtcgtgctccccggagtggaggcggccgagcgcgccggggtgcccgccttcctggagacctccgcgccccgcaacctccccttctacgagcggctcggcttcaccgtcaccgccgacgtcgaggtgcccgaaggaccgcgcacctggtgcatgacccgcaagcccggtgcctga

SEQ ID NO: 9394 - DNA, 1983 bp, Artificial Sequence
  Synthetic Polynucloetide
atggccttaccagtgaccgccttgctcctgccgctggccttgctgctccacgccgccaggccggacatccagatgacacagagccctagcagcgtgtccgcctctgtgggagacagagtgaccatcacctgtagagccagccagagcatcagcagctacctgaactggtatcagcagaagcccggcaaggcccctaaactgctgatctatgccgccagctctctccagagcggagtgcctagcagattttctggcagcggctccggcaccgatttcaccctgacaatatccagcctccagcctgaggacttcgccacctactactgccagcagagctacagcaccccttggacctttggacagggcaccaaggtggaaatcaagagaggcggaggcggaagtggaggcggaggatctggcggcggaggctctgaagtgcagctggttgaatcaggtggcggcctggttcagcctggcagaagtctgagactgagctgtgccgcctccggcttcaccttcgatgattacgccatgcactgggtccgacaggcccctggaaaaggactggaatgggtgtccggcatcagctggaatagcggctctatcggctacgccgattccgccaagggcagattcaccatcagccgggacaacagcaagaacaccctgtacctccagatgaactccctgagagccgaggacaccgccgtgtactactgtgccaagaggggcaacagcaacagcttcgactattggggccagggcaccctggtcacagtctcttctacgcgtgggtctggaggcggaggcagcggcggaggcgggagcggcttcaagatccccatcgaggaactggaagatcgggtgttcgtgaactgcaacacctctatcacctgggtggaaggcaccgtgggaacactgctgagcgacatcaccagactggacctcggcaagcggattctggaccctcggggcatctacagatgcaacggcaccgacatctacaaggacaaagaaagcaccgtgcaggtccactacagaatgtgccagtcctgcgtggaactggaccctgctacagtggccggcatcatcgtgaccgatgtgatcgctactctgctgctggctctgggagtgttctgcttcgccggacacgaaacaggcagactgtctggcgctgccgatacacaggccctgctgagaaacgaccaagtgtatcagcccctgcgcgacagagatgatgcccagtattctcacctcggcggcaactgggctagaaacaagcgcgccaagagaagcggatctggcgtgaagcagaccctgaatttcgacctgctgaagctggctggcgacgtggaatccaacccaggcccttctagaggccatatgaccgagtacaagcccacggtgcgcctcgccacccgcgacgacgtccccagggccgtacgcaccctcgccgccgcgttcgccgactaccccgccacgcgccacaccgtcgatccggaccgccacatcgagcgggtcaccgagctgcaagaactcttcctcacgcgcgtcgggctcgacatcggcaaggtgtgggtcgcggacgacggcgccgcggtggcggtctggaccacgccggagagcgtcgaagcgggggcggtgttcgccgagatcggcccgcgcatggccgagttgagcggttcccggctggccgcgcagcaacagatggaaggcctcctggcgccgcaccggcccaaggagcccgcgtggttcctggccaccgtcggcgtctcgcccgaccaccagggcaagggtctgggcagcgccgtcgtgctccccggagtggaggcggccgagcgcgccggggtgcccgccttcctggagacctccgcgccccgcaacctccccttctacgagcggctcggcttcaccgtcaccgccgacgtcgaggtgcccgaaggaccgcgcacctggtgcatgacccgcaagcccggtgcctga

SEQ ID NO: 9395 - DNA, 2013 bp, Artificial Sequence
  Synthetic Polynucloetide
atggccttaccagtgaccgccttgctcctgccgctggccttgctgctccacgccgccaggccggacatccagatgacacagagccctagcagcgtgtccgcctctgtgggagacagagtgaccatcacctgtagagccagccagagcatcagcagctacctgaactggtatcagcagaagcccggcaaggcccctaaactgctgatctatgccgccagctctctccagagcggagtgcctagcagattttctggcagcggctccggcaccgatttcaccctgacaatatccagcctccagcctgaggacttcgccacctactactgccagcagagctacagcaccccttggacctttggacagggcaccaaggtggaaatcaagagaggcggaggcggaagtggaggcggaggatctggcggcggaggctctgaagtgcagctggttgaatcaggtggcggcctggttcagcctggcagaagtctgagactgagctgtgccgcctccggcttcaccttcgatgattacgccatgcactgggtccgacaggcccctggaaaaggactggaatgggtgtccggcatcagctggaatagcggctctatcggctacgccgattccgccaagggcagattcaccatcagccgggacaacagcaagaacaccctgtacctccagatgaactccctgagagccgaggacaccgccgtgtactactgtgccaagaggggcaacagcaacagcttcgactattggggccagggcaccctggtcacagtctcttctacgcgtgggtctggaggcggaggcagcggcggaggcgggagcggccagagcatcaagggcaaccacctggtcaaggtgtacgactaccaagaggacggcagcgtgctgctgacatgtgatgccgaggccaagaacatcacctggtttaaggacggcaagatgatcggcttcctgaccgaggacaagaagaagtggaacctgggcagcaacgctaaggaccccagaggcatgtatcagtgcaagggcagccagaacaagagcaagcccctccaggtgtactaccggatgtgccagaactgcatcgagctgaacgccgctaccatcagcggctttctgttcgccgagatcgtgtccatcttcgtgctggccgtgggcgtgtactttatcgctggacaggatggcgtgcggcagagcagagcttccgataagcaaaccctgctgcctaacgaccagctgtaccagcctctgaaggacagagaggacgaccagtacagccacctccagggcaatcagctgagaagaaaccgcgccaagagaagcggatctggcgtgaagcagaccctgaatttcgacctgctgaagctggctggcgacgtggaatccaacccaggcccttctagaggccatatgaccgagtacaagcccacggtgcgcctcgccacccgcgacgacgtccccagggccgtacgcaccctcgccgccgcgttcgccgactaccccgccacgcgccacaccgtcgatccggaccgccacatcgagcgggtcaccgagctgcaagaactcttcctcacgcgcgtcgggctcgacatcggcaaggtgtgggtcgcggacgacggcgccgcggtggcggtctggaccacgccggagagcgtcgaagcgggggcggtgttcgccgagatcggcccgcgcatggccgagttgagcggttcccggctggccgcgcagcaacagatggaaggcctcctggcgccgcaccggcccaaggagcccgcgtggttcctggccaccgtcggcgtctcgcccgaccaccagggcaagggtctgggcagcgccgtcgtgctccccggagtggaggcggccgagcgcgccggggtgcccgccttcctggagacctccgcgccccgcaacctccccttctacgagcggctcggcttcaccgtcaccgccgacgtcgaggtgcccgaaggaccgcgcacctggtgcatgacccgcaagcccggtgcctga

SEQ ID NO: 9396 - DNA, 1962 bp, Artificial Sequence
  Synthetic Polynucloetide
atggccttaccagtgaccgccttgctcctgccgctggccttgctgctccacgccgccaggccggacatccagatgacacagagccctagcagcgtgtccgcctctgtgggagacagagtgaccatcacctgtagagccagccagagcatcagcagctacctgaactggtatcagcagaagcccggcaaggcccctaaactgctgatctatgccgccagctctctccagagcggagtgcctagcagattttctggcagcggctccggcaccgatttcaccctgacaatatccagcctccagcctgaggacttcgccacctactactgccagcagagctacagcaccccttggacctttggacagggcaccaaggtggaaatcaagagaggcggaggcggaagtggaggcggaggatctggcggcggaggctctgaagtgcagctggttgaatcaggtggcggcctggttcagcctggcagaagtctgagactgagctgtgccgcctccggcttcaccttcgatgattacgccatgcactgggtccgacaggcccctggaaaaggactggaatgggtgtccggcatcagctggaatagcggctctatcggctacgccgattccgccaagggcagattcaccatcagccgggacaacagcaagaacaccctgtacctccagatgaactccctgagagccgaggacaccgccgtgtactactgtgccaagaggggcaacagcaacagcttcgactattggggccagggcaccctggtcacagtctcttctacgcgtgggtctggaggcggaggcagcggcggaggcgggagcggccagagttttgggttgttggaccctaaattgtgctatctgttggacggaatcctgttcatttacggagtgatcctgaccgcattgttcctgcgggttaagttttccagatccgcagacgcacccgcttaccaacaagggcagaaccaactctacaatgaacttaatttggggcggagggaagagtacgacgttctggacaaaaggaggggacgagatcccgagatgggcggaaagcctcagcgaaggaagaatccgcaagaggggctttataacgaactccagaaagataaaatggcagaagcctatagtgagattgggatgaagggagaaaggaggaggggtaaaggtcacgatgggttgtaccaaggattgagcacagccactaaagatacctatgatgcgctccacatgcaggccctgccgccaagacgcgccaagagaagcggatctggcgtgaagcagaccctgaatttcgacctgctgaagctggctggcgacgtggaatccaacccaggcccttctagaggccatatgaccgagtacaagcccacggtgcgcctcgccacccgcgacgacgtccccagggccgtacgcaccctcgccgccgcgttcgccgactaccccgccacgcgccacaccgtcgatccggaccgccacatcgagcgggtcaccgagctgcaagaactcttcctcacgcgcgtcgggctcgacatcggcaaggtgtgggtcgcggacgacggcgccgcggtggcggtctggaccacgccggagagcgtcgaagcgggggcggtgttcgccgagatcggcccgcgcatggccgagttgagcggttcccggctggccgcgcagcaacagatggaaggcctcctggcgccgcaccggcccaaggagcccgcgtggttcctggccaccgtcggcgtctcgcccgaccaccagggcaagggtctgggcagcgccgtcgtgctccccggagtggaggcggccgagcgcgccggggtgcccgccttcctggagacctccgcgccccgcaacctccccttctacgagcggctcggcttcaccgtcaccgccgacgtcgaggtgcccgaaggaccgcgcacctggtgcatgacccgcaagcccggtgcctga

SEQ ID NO: 9397 - DNA, 2262 bp, Artificial Sequence
  Synthetic Polynucloetide
atggccttaccagtgaccgccttgctcctgccgctggccttgctgctccacgccgccaggccggaagtgcagctggttgaatctggcggaggactggttcagcctggcggatctctgagactgtcttgtgccgccagcggcttcagcttcagcgacttttggatgagctgggtccgacaggcccctggcaaaggacttgaatgggtcgccacaatcagccaggccggcagcgagaaggactacgtggactctgtgaagggcagattcaccatcagccgggacaacgccaagaagtccctgtacctccagatgaacagcctgagagccgaggacaccgccgtgtactattgtgcctctggcgtgtacagcttcgactacagaggccagggcaccctggtcacagtctcttctggtaccggcggaggcggatctggcggcggaggtagcggtggcggaggatctgaattcgacatccagatgacacagagccctagcagcgtgtccgcctctgtgggagacagagtgaccatcacctgtagagccagccagagcatcagcagctacctgaactggtatcagcagaagcccggcaaggcccctaaactgctgatctatgccgccagctctctccagagcggagtgcctagcagattttctggcagcggctccggcaccgatttcaccctgacaatatccagcctccagcctgaggacttcgccacctactactgccagcagagctacagcaccccttggacctttggacagggcaccaaggtggaaatcaagagactcgaggacctgaagaacgtgttcccacctgaggtggccgtgttcgagcctagcgaggccgagatcagccacacccagaaagccaccctcgtgtgcctggctaccggcttctaccccgaccatgtggaactgtcttggtgggtcaacggcaaagaggtgcacagcggcgtgtgtaccgacccccagccactgaaagaacagcccgccctgaacgacagccggtactgcctgagcagcagactgagagtgtccgccaccttctggcagaacccccggaaccacttcagatgccaggtgcagttctacggcctgagcgagaacgacgagtggacccaggacagagccaagcccgtgacccagatcgtgtctgccgaagcctggggcagagccgattgcggctttaccagcgagagctaccagcagggcgtgctgagcgccaccatcctgtacgagatcctgctgggcaaggccaccctgtacgccgtgctggtgtctgccctggtgctgatggctatggtcaagcggaaggacagccggggaagggccaagcgatctggatctggagcaacaaacttctcactactcaaacaagcaggtgacgtggaggagaatcccgggcctactagtatggactggatttggcgcatccttttccttgtcggcgctgctaccggcgcgcattccttcgaagaagtgcagctggttgaatcaggtggcggcctggttcagcctggcagaagtctgagactgagctgtgccgcctccggcttcaccttcgatgattacgccatgcactgggtccgacaggcccctggaaaaggactggaatgggtgtccggcatcagctggaatagcggctctatcggctacgccgattccgccaagggcagattcaccatcagccgggacaacagcaagaacaccctgtacctccagatgaactccctgagagccgaggacaccgccgtgtactactgtgccaagaggggcaacagcaacagcttcgactattggggccagggcaccctggtcacagtctcttctacgcgtatccagaaccctgatcctgccgtgtaccagctgcgggatagcaagagcagcgacaagagcgtgtgtctgttcaccgacttcgacagccagaccaacgtgtcccagagcaaggactccgacgtgtacatcaccgataagtgcgtgctggacatgcggagcatggacttcaagagcaactccgccgtggcctggtccaacaagtccgatttcgcctgcgccaacgccttcaacaacagcattatccccgaggacacattcttcccaagccccgagagcagctgcgacgtgaagctggtggaaaagagcttcgagacagacaccaacctgaacttccagaacctgagcgtgatcggcttcagaatcctgctgctgaaagtggccggctttaacctgctgatgaccctgcggctgtggtccagc

SEQ ID NO: 9398 - DNA, 2274 bp, Artificial Sequence
  Synthetic Polynucloetide
atggccttaccagtgaccgccttgctcctgccgctggccttgctgctccacgccgccaggccggaagtgcagctggttgaatctggcggaggactggttcagcctggcggatctctgagactgtcttgtgccgccagcggcttcagcttcagcgacttttggatgagctgggtccgacaggcccctggcaaaggacttgaatgggtcgccacaatcagccaggccggcagcgagaaggactacgtggactctgtgaagggcagattcaccatcagccgggacaacgccaagaagtccctgtacctccagatgaacagcctgagagccgaggacaccgccgtgtactattgtgcctctggcgtgtacagcttcgactacagaggccagggcaccctggtcacagtctcttctggtaccggcggaggcggatctggcggcggaggtagcggtggcggaggatctgaattcgacatccagatgacacagagccctagcagcgtgtccgcctctgtgggagacagagtgaccatcacctgtagagccagccagagcatcagcagctacctgaactggtatcagcagaagcccggcaaggcccctaaactgctgatctatgccgccagctctctccagagcggagtgcctagcagattttctggcagcggctccggcaccgatttcaccctgacaatatccagcctccagcctgaggacttcgccacctactactgccagcagagctacagcaccccttggacctttggacagggcaccaaggtggaaatcaagagactcgagatccagaaccctgatcctgccgtgtaccagctgcgggatagcaagagcagcgacaagagcgtgtgtctgttcaccgacttcgacagccagaccaacgtgtcccagagcaaggactccgacgtgtacatcaccgataagtgcgtgctggacatgcggagcatggacttcaagagcaactccgccgtggcctggtccaacaagtccgatttcgcctgcgccaacgccttcaacaacagcattatccccgaggacacattcttcccaagccccgagagcagctgcgacgtgaagctggtggaaaagagcttcgagacagacaccaacctgaacttccagaacctgagcgtgatcggcttcagaatcctgctgctgaaagtggccggctttaacctgctgatgaccctgcggctgtggtccagccgcgccaagagaagcggatctggcgtgaagcagaccctgaatttcgacctgctgaagctggctggcgacgtggaatccaacccaggccctactagtatggactggatttggcgcatccttttccttgtcggcgctgctaccggcgcgcattccttcgaagaagtgcagctggttgaatcaggtggcggcctggttcagcctggcagaagtctgagactgagctgtgccgcctccggcttcaccttcgatgattacgccatgcactgggtccgacaggcccctggaaaaggactggaatgggtgtccggcatcagctggaatagcggctctatcggctacgccgattccgccaagggcagattcaccatcagccgggacaacagcaagaacaccctgtacctccagatgaactccctgagagccgaggacaccgccgtgtactactgtgccaagaggggcaacagcaacagcttcgactattggggccagggcaccctggtcacagtctcttctacgcgtgaggacctgaagaacgtgttcccacctgaggtggccgtgttcgagcctagcgaggccgagatcagccacacccagaaagccaccctcgtgtgcctggctaccggcttctaccccgaccatgtggaactgtcttggtgggtcaacggcaaagaggtgcacagcggcgtgtgtaccgacccccagccactgaaagaacagcccgccctgaacgacagccggtactgcctgagcagcagactgagagtgtccgccaccttctggcagaacccccggaaccacttcagatgccaggtgcagttctacggcctgagcgagaacgacgagtggacccaggacagagccaagcccgtgacccagatcgtgtctgccgaagcctggggcagagccgattgcggctttaccagcgagagctaccagcagggcgtgctgagcgccaccatcctgtacgagatcctgctgggcaaggccaccctgtacgccgtgctggtgtctgccctggtgctgatggctatggtcaagcggaaggacagccgggga

SEQ ID NO: 9399 - DNA, 2850 bp, Artificial Sequence
  Synthetic Polynucloetide
atggccttaccagtgaccgccttgctcctgccgctggccttgctgctccacgccgccaggccggaagtgcagctggttgaatctggcggaggactggttcagcctggcggatctctgagactgtcttgtgccgccagcggcttcagcttcagcgacttttggatgagctgggtccgacaggcccctggcaaaggacttgaatgggtcgccacaatcagccaggccggcagcgagaaggactacgtggactctgtgaagggcagattcaccatcagccgggacaacgccaagaagtccctgtacctccagatgaacagcctgagagccgaggacaccgccgtgtactattgtgcctctggcgtgtacagcttcgactacagaggccagggcaccctggtcacagtctcttctggtaccggcggaggcggatctggcggcggaggtagcggtggcggaggatctgaattcgacatccagatgacacagagccctagcagcgtgtccgcctctgtgggagacagagtgaccatcacctgtagagccagccagagcatcagcagctacctgaactggtatcagcagaagcccggcaaggcccctaaactgctgatctatgccgccagctctctccagagcggagtgcctagcagattttctggcagcggctccggcaccgatttcaccctgacaatatccagcctccagcctgaggacttcgccacctactactgccagcagagctacagcaccccttggacctttggacagggcaccaaggtggaaatcaagagactcgaggacctgaagaacgtgttcccacctgaggtggccgtgttcgagcctagcgaggccgagatcagccacacccagaaagccaccctcgtgtgcctggctaccggcttctaccccgaccatgtggaactgtcttggtgggtcaacggcaaagaggtgcacagcggcgtgtctaccgacccccagccactgaaagaacagcccgccctgaacgacagccggtactgcctgagcagcagactgagagtgtccgccaccttctggcagaacccccggaaccacttcagatgccaggtgcagttctacggcctgagcgagaacgacgagtggacccaggacagagccaagcccgtgacccagatcgtgtctgccgaagcctggggcagagccgattgcggatcccagagcttcggcctgctggaccccaagctgtgctacctgctggatggcatcctgttcatctacggcgtgatcctgaccgccctgttcctgagagtgaagttcagcagaagcgccgacgcccctgcctaccagcagggacagaaccaactgtacaacgagctgaacctgggcagacgggaagagtacgacgtgctggacaagcggagaggcagggaccctgagatgggcggaaagccccagcggagaaagaacccccaggaaggactgtataacgaactccagaaagacaagatggccgaagcctacagcgagatcggcatgaagggcgagcggagaagaggcaagggccacgatggcctgtaccagggcctgagcaccgccaccaaggacacctatgacgccctgcacatgcaggccctgcctccaagaagggccaagcgatctggatctggagcaacaaacttctcactactcaaacaagcaggtgacgtggaggagaatcccgggcctactagtatggactggatttggcgcatccttttccttgtcggcgctgctaccggcgcgcattccttcgaagaagtgcagctggttgaatcaggtggcggcctggttcagcctggcagaagtctgagactgagctgtgccgcctccggcttcaccttcgatgattacgccatgcactgggtccgacaggcccctggaaaaggactggaatgggtgtccggcatcagctggaatagcggctctatcggctacgccgattccgccaagggcagattcaccatcagccgggacaacagcaagaacaccctgtacctccagatgaactccctgagagccgaggacaccgccgtgtactactgtgccaagaggggcaacagcaacagcttcgactattggggccagggcaccctggtcacagtctcttctacgcgtatccagaaccctgatcctgccgtgtaccagctgcgggatagcaagagcagcgacaagagcgtgtgtctgttcaccgacttcgacagccagaccaacgtgtcccagagcaaggactccgacgtgtacatcaccgataagaccgtgctggacatgcggagcatggacttcaagagcaactccgccgtggcctggtccaacaagtccgatttcgcctgcgccaacgccttcaacaacagcattatccccgaggacacattcttcccaagccccgagagcagctgcggtacccagagttttgggttgttggaccctaaattgtgctatctgttggacggaatcctgttcatttacggagtgatcctgaccgcattgttcctgcgggttaagttttccagatccgcagacgcacccgcttaccaacaagggcagaaccaactctacaatgaacttaatttggggcggagggaagagtacgacgttctggacaaaaggaggggacgagatcccgagatgggcggaaagcctcagcgaaggaagaatccgcaagaggggctttataacgaactccagaaagataaaatggcagaagcctatagtgagattgggatgaagggagaaaggaggaggggtaaaggtcacgatgggttgtaccaaggattgagcacagccactaaagatacctatgatgcgctccacatgcaggccctgccgccaaga

SEQ ID NO: 9400 - DNA, 2340 bp, Artificial Sequence
  Synthetic Polynucloetide
atggccttaccagtgaccgccttgctcctgccgctggccttgctgctccacgccgccaggccggaagtgcagctggttgaatctggcggaggactggttcagcctggcggatctctgagactgtcttgtgccgccagcggcttcagcttcagcgacttttggatgagctgggtccgacaggcccctggcaaaggacttgaatgggtcgccacaatcagccaggccggcagcgagaaggactacgtggactctgtgaagggcagattcaccatcagccgggacaacgccaagaagtccctgtacctccagatgaacagcctgagagccgaggacaccgccgtgtactattgtgcctctggcgtgtacagcttcgactacagaggccagggcaccctggtcacagtctcttctggtaccggcggaggcggatctggcggcggaggtagcggtggcggaggatctgaattcgacatccagatgacacagagccctagcagcgtgtccgcctctgtgggagacagagtgaccatcacctgtagagccagccagagcatcagcagctacctgaactggtatcagcagaagcccggcaaggcccctaaactgctgatctatgccgccagctctctccagagcggagtgcctagcagattttctggcagcggctccggcaccgatttcaccctgacaatatccagcctccagcctgaggacttcgccacctactactgccagcagagctacagcaccccttggacctttggacagggcaccaaggtggaaatcaagagactcgagggacagcctaaggccaatcctaccgtgacactgttccctccaagcagcgaagaactccaggccaacaaggccacacttgtgtgcctgatctccgacttctaccctggggctgtgacagtggcttggaaggccgatggatctcctgtgaaagccggcgtggaaaccaccaagccatccaagcagagcaacaacaaatacgccgccagctcctacctgagcctgacacctgagcagtggaagtcccacagatcctacagctgccaagtgacccacgaaggcagcaccgtggaaaagacagtggcccctacagagtgcagccccatcaagaccgatgtgattacaatggaccccaaggacaactgctccaaggacgccaacgataccctgctgctccagctgaccaacaccagcgcctactacatgtacttgttgctgctgctgaagtccgtggtgtacttcgccatcatcacatgctgcctgctgcggagaaccgccttctgctgcaacggcgagaagtctagggccaagcgatctggatctggagcaacaaacttctcactactcaaacaagcaggtgacgtggaggagaatcccgggcctactagtatggactggatttggcgcatccttttccttgtcggcgctgctaccggcgcgcattccttcgaagaagtgcagctggttgaatcaggtggcggcctggttcagcctggcagaagtctgagactgagctgtgccgcctccggcttcaccttcgatgattacgccatgcactgggtccgacaggcccctggaaaaggactggaatgggtgtccggcatcagctggaatagcggctctatcggctacgccgattccgccaagggcagattcaccatcagccgggacaacagcaagaacaccctgtacctccagatgaactccctgagagccgaggacaccgccgtgtactactgtgccaagaggggcaacagcaacagcttcgactattggggccagggcaccctggtcacagtctcttctacgcgtgcctctacaaagggaccctccgtgtttcctctggctcccagcagcaagtctacaagcggaggaacagccgctctgggctgcctggtcaaggattactttcccgagcctgtgaccgtgtcctggaatagcggagcactgacaagcggcgtgcacacctttccagccgtgctgcaaagcagcggcctgtactctctgagcagcgtggtcacagtgcctagctctagcctgggcacccagacctacatctgcaatgtgaaccacaagcctagcaacaccaaggtggacaagagagtggaacccaagagctgtgaagtgaaaaccgactccaccgaccacgtgaagcccaaagagacagagaacaccaagcagcccagcaagagctgccacaagcccaaggccatcgtgcacaccgagaaagtgaacatgatgagcctgaccgtgctgggcctgcggatgctgttcgccaaaaccgtggccgtgaacttcctgctgaccgccaagctgttcttcctc

SEQ ID NO: 9401 - DNA, 2283 bp, Artificial Sequence
  Synthetic Polynucloetide
atggccttaccagtgaccgccttgctcctgccgctggccttgctgctccacgccgccaggccggaagtgcagctggttgaatctggcggaggactggttcagcctggcggatctctgagactgtcttgtgccgccagcggcttcagcttcagcgacttttggatgagctgggtccgacaggcccctggcaaaggacttgaatgggtcgccacaatcagccaggccggcagcgagaaggactacgtggactctgtgaagggcagattcaccatcagccgggacaacgccaagaagtccctgtacctccagatgaacagcctgagagccgaggacaccgccgtgtactattgtgcctctggcgtgtacagcttcgactacagaggccagggcaccctggtcacagtctcttctggtaccggcggaggcggatctggcggcggaggtagcggtggcggaggatctgaattcgacatccagatgacacagagccctagcagcgtgtccgcctctgtgggagacagagtgaccatcacctgtagagccagccagagcatcagcagctacctgaactggtatcagcagaagcccggcaaggcccctaaactgctgatctatgccgccagctctctccagagcggagtgcctagcagattttctggcagcggctccggcaccgatttcaccctgacaatatccagcctccagcctgaggacttcgccacctactactgccagcagagctacagcaccccttggacctttggacagggcaccaaggtggaaatcaagagactcgagggacagcctaaggccaatcctaccgtgacactgttccctccaagcagcgaagaactccaggccaacaaggccacacttgtgtgcctgatctccgacttctaccctggggctgtgacagtggcttggaaggccgatggatctcctgtgaaagccggcgtggaaaccaccaagccatccaagcagagcaacaacaaatacgccgccagctcctacctgagcctgacacctgagcagtggaagtcccacagatcctacagctgccaagtgacccacgaaggcagcaccgtggaaaagacagtggcccctacagagtgcagcggcagagccgattgcggctttaccagcgagagctaccagcagggcgtgctgagcgccaccatcctgtacgagatcctgctgggcaaggccaccctgtacgccgtgctggtgtctgccctggtgctgatggctatggtcaagcggaaggacagccggggacgcgccaagagaagcggatctggcgtgaagcagaccctgaatttcgacctgctgaagctggctggcgacgtggaatccaacccaggccctactagtatggactggatttggcgcatccttttccttgtcggcgctgctaccggcgcgcattccttcgaagaagtgcagctggttgaatcaggtggcggcctggttcagcctggcagaagtctgagactgagctgtgccgcctccggcttcaccttcgatgattacgccatgcactgggtccgacaggcccctggaaaaggactggaatgggtgtccggcatcagctggaatagcggctctatcggctacgccgattccgccaagggcagattcaccatcagccgggacaacagcaagaacaccctgtacctccagatgaactccctgagagccgaggacaccgccgtgtactactgtgccaagaggggcaacagcaacagcttcgactattggggccagggcaccctggtcacagtctcttctacgcgtgcctctacaaagggaccctccgtgtttcctctggctcccagcagcaagtctacaagcggaggaacagccgctctgggctgcctggtcaaggattactttcccgagcctgtgaccgtgtcctggaatagcggagcactgacaagcggcgtgcacacctttccagccgtgctgcaaagcagcggcctgtactctctgagcagcgtggtcacagtgcctagctctagcctgggcacccagacctacatctgcaatgtgaaccacaagcctagcaacaccaaggtggacaagagagtggaacccaagagctgtatccccgaggacacattcttcccaagccccgagagcagctgcgacgtgaagctggtggaaaagagcttcgagacagacaccaacctgaacttccagaacctgagcgtgatcggcttcagaatcctgctgctgaaagtggccggctttaacctgctgatgaccctgcggctgtggtccagc

SEQ ID NO: 9402 - DNA, 2685 bp, Artificial Sequence
  Synthetic Polynucloetide
atggccttaccagtgaccgccttgctcctgccgctggccttgctgctccacgccgccaggccggaagtgcagctggttgaatctggcggaggactggttcagcctggcggatctctgagactgtcttgtgccgccagcggcttcagcttcagcgacttttggatgagctgggtccgacaggcccctggcaaaggacttgaatgggtcgccacaatcagccaggccggcagcgagaaggactacgtggactctgtgaagggcagattcaccatcagccgggacaacgccaagaagtccctgtacctccagatgaacagcctgagagccgaggacaccgccgtgtactattgtgcctctggcgtgtacagcttcgactacagaggccagggcaccctggtcacagtctcttctggtaccggcggaggcggatctggcggcggaggtagcggtggcggaggatctgaattcgacatccagatgacacagagccctagcagcgtgtccgcctctgtgggagacagagtgaccatcacctgtagagccagccagagcatcagcagctacctgaactggtatcagcagaagcccggcaaggcccctaaactgctgatctatgccgccagctctctccagagcggagtgcctagcagattttctggcagcggctccggcaccgatttcaccctgacaatatccagcctccagcctgaggacttcgccacctactactgccagcagagctacagcaccccttggacctttggacagggcaccaaggtggaaatcaagagactcgagatccagaaccctgatcctgccgtgtaccagctgcgggatagcaagagcagcgacaagagcgtgtgtctgttcaccgacttcgacagccagaccaacgtgtcccagagcaaggactccgacgtgtacatcaccgataagtgcgtgctggacatgcggagcatggacttcaagagcaactccgccgtggcctggtccaacaagtccgatttcgcctgcgccaacgccttcaacaacagcattatccccgaggacacattcttcccaagccccgagagcagctgcgacgtgaagctggtggaaaagagcttcgagacagacaccaacctgaacttccagaacctgagcgtgatcggcttcagaatcctgctgctgaaagtggccggctttaacctgctgatgaccctgcggctgtggtccagccgcgccaagagaagcggatctggcgtgaagcagaccctgaatttcgacctgctgaagctggctggcgacgtggaatccaacccaggccctactagtatggactggatttggcgcatccttttccttgtcggcgctgctaccggcgcgcattccgggccccagctccagctgcaagagtctggacctggcctggtcaagcctagcgagacactgagcctgacctgtaccgtgtccggcgatagcatcagcagcggcgattactactggggctggatcagacagcctcctggcaaaggactggaatggatcggccacatctactacagcggcgtgacctactacaaccccagcctgaagtccagagtgaccatcagcgtggacaccagccggaaccagttctccctgaagctgtctagcgtgacagccgccgataccgccgtgtactactgcaccagagaggacagcagcaactggcggagtagaggccagggaacactggtcacagttagctctggatccggcggaggcggaagtggaggcggaggatctggcggcggaggctctttcgaagaagtgcagctggttgaatcaggtggcggcctggttcagcctggcagaagtctgagactgagctgtgccgcctccggcttcaccttcgatgattacgccatgcactgggtccgacaggcccctggaaaaggactggaatgggtgtccggcatcagctggaatagcggctctatcggctacgccgattccgccaagggcagattcaccatcagccgggacaacagcaagaacaccctgtacctccagatgaactccctgagagccgaggacaccgccgtgtactactgtgccaagaggggcaacagcaacagcttcgactattggggccagggcaccctggtcacagtctcttctacgcgtgaggacctgaagaacgtgttcccacctgaggtggccgtgttcgagcctagcgaggccgagatcagccacacccagaaagccaccctcgtgtgcctggctaccggcttctaccccgaccatgtggaactgtcttggtgggtcaacggcaaagaggtgcacagcggcgtgtgtaccgacccccagccactgaaagaacagcccgccctgaacgacagccggtactgcctgagcagcagactgagagtgtccgccaccttctggcagaacccccggaaccacttcagatgccaggtgcagttctacggcctgagcgagaacgacgagtggacccaggacagagccaagcccgtgacccagatcgtgtctgccgaagcctggggcagagccgattgcggctttaccagcgagagctaccagcagggcgtgctgagcgccaccatcctgtacgagatcctgctgggcaaggccaccctgtacgccgtgctggtgtctgccctggtgctgatggctatggtcaagcggaaggacagccgggga

SEQ ID NO: 9403 - DNA, 3261 bp, Artificial Sequence
  Synthetic Polynucloetide
atggccttaccagtgaccgccttgctcctgccgctggccttgctgctccacgccgccaggccggaagtgcagctggttgaatctggcggaggactggttcagcctggcggatctctgagactgtcttgtgccgccagcggcttcagcttcagcgacttttggatgagctgggtccgacaggcccctggcaaaggacttgaatgggtcgccacaatcagccaggccggcagcgagaaggactacgtggactctgtgaagggcagattcaccatcagccgggacaacgccaagaagtccctgtacctccagatgaacagcctgagagccgaggacaccgccgtgtactattgtgcctctggcgtgtacagcttcgactacagaggccagggcaccctggtcacagtctcttctggtaccggcggaggcggatctggcggcggaggtagcggtggcggaggatctgaattcgacatccagatgacacagagccctagcagcgtgtccgcctctgtgggagacagagtgaccatcacctgtagagccagccagagcatcagcagctacctgaactggtatcagcagaagcccggcaaggcccctaaactgctgatctatgccgccagctctctccagagcggagtgcctagcagattttctggcagcggctccggcaccgatttcaccctgacaatatccagcctccagcctgaggacttcgccacctactactgccagcagagctacagcaccccttggacctttggacagggcaccaaggtggaaatcaagagactcgaggacctgaagaacgtgttcccacctgaggtggccgtgttcgagcctagcgaggccgagatcagccacacccagaaagccaccctcgtgtgcctggctaccggcttctaccccgaccatgtggaactgtcttggtgggtcaacggcaaagaggtgcacagcggcgtgtctaccgacccccagccactgaaagaacagcccgccctgaacgacagccggtactgcctgagcagcagactgagagtgtccgccaccttctggcagaacccccggaaccacttcagatgccaggtgcagttctacggcctgagcgagaacgacgagtggacccaggacagagccaagcccgtgacccagatcgtgtctgccgaagcctggggcagagccgattgcggatcccagagcttcggcctgctggaccccaagctgtgctacctgctggatggcatcctgttcatctacggcgtgatcctgaccgccctgttcctgagagtgaagttcagcagaagcgccgacgcccctgcctaccagcagggacagaaccaactgtacaacgagctgaacctgggcagacgggaagagtacgacgtgctggacaagcggagaggcagggaccctgagatgggcggaaagccccagcggagaaagaacccccaggaaggactgtataacgaactccagaaagacaagatggccgaagcctacagcgagatcggcatgaagggcgagcggagaagaggcaagggccacgatggcctgtaccagggcctgagcaccgccaccaaggacacctatgacgccctgcacatgcaggccctgcctccaagaagggccaagcgatctggatctggagcaacaaacttctcactactcaaacaagcaggtgacgtggaggagaatcccgggcctactagtatggactggatttggcgcatccttttccttgtcggcgctgctaccggcgcgcattccgggccccagctccagctgcaagagtctggacctggcctggtcaagcctagcgagacactgagcctgacctgtaccgtgtccggcgatagcatcagcagcggcgattactactggggctggatcagacagcctcctggcaaaggactggaatggatcggccacatctactacagcggcgtgacctactacaaccccagcctgaagtccagagtgaccatcagcgtggacaccagccggaaccagttctccctgaagctgtctagcgtgacagccgccgataccgccgtgtactactgcaccagagaggacagcagcaactggcggagtagaggccagggaacactggtcacagttagctctggatccggcggaggcggaagtggaggcggaggatctggcggcggaggctctttcgaagaagtgcagctggttgaatcaggtggcggcctggttcagcctggcagaagtctgagactgagctgtgccgcctccggcttcaccttcgatgattacgccatgcactgggtccgacaggcccctggaaaaggactggaatgggtgtccggcatcagctggaatagcggctctatcggctacgccgattccgccaagggcagattcaccatcagccgggacaacagcaagaacaccctgtacctccagatgaactccctgagagccgaggacaccgccgtgtactactgtgccaagaggggcaacagcaacagcttcgactattggggccagggcaccctggtcacagtctcttctacgcgtatccagaaccctgatcctgccgtgtaccagctgcgggatagcaagagcagcgacaagagcgtgtgtctgttcaccgacttcgacagccagaccaacgtgtcccagagcaaggactccgacgtgtacatcaccgataagaccgtgctggacatgcggagcatggacttcaagagcaactccgccgtggcctggtccaacaagtccgatttcgcctgcgccaacgccttcaacaacagcattatccccgaggacacattcttcccaagccccgagagcagctgcggtacccagagttttgggttgttggaccctaaattgtgctatctgttggacggaatcctgttcatttacggagtgatcctgaccgcattgttcctgcgggttaagttttccagatccgcagacgcacccgcttaccaacaagggcagaaccaactctacaatgaacttaatttggggcggagggaagagtacgacgttctggacaaaaggaggggacgagatcccgagatgggcggaaagcctcagcgaaggaagaatccgcaagaggggctttataacgaactccagaaagataaaatggcagaagcctatagtgagattgggatgaagggagaaaggaggaggggtaaaggtcacgatgggttgtaccaaggattgagcacagccactaaagatacctatgatgcgctccacatgcaggccctgccgccaaga

SEQ ID NO: 9404 - DNA, 2751 bp, Artificial Sequence
  Synthetic Polynucloetide
atggccttaccagtgaccgccttgctcctgccgctggccttgctgctccacgccgccaggccggaagtgcagctggttgaatctggcggaggactggttcagcctggcggatctctgagactgtcttgtgccgccagcggcttcagcttcagcgacttttggatgagctgggtccgacaggcccctggcaaaggacttgaatgggtcgccacaatcagccaggccggcagcgagaaggactacgtggactctgtgaagggcagattcaccatcagccgggacaacgccaagaagtccctgtacctccagatgaacagcctgagagccgaggacaccgccgtgtactattgtgcctctggcgtgtacagcttcgactacagaggccagggcaccctggtcacagtctcttctggtaccggcggaggcggatctggcggcggaggtagcggtggcggaggatctgaattcgacatccagatgacacagagccctagcagcgtgtccgcctctgtgggagacagagtgaccatcacctgtagagccagccagagcatcagcagctacctgaactggtatcagcagaagcccggcaaggcccctaaactgctgatctatgccgccagctctctccagagcggagtgcctagcagattttctggcagcggctccggcaccgatttcaccctgacaatatccagcctccagcctgaggacttcgccacctactactgccagcagagctacagcaccccttggacctttggacagggcaccaaggtggaaatcaagagactcgagggacagcctaaggccaatcctaccgtgacactgttccctccaagcagcgaagaactccaggccaacaaggccacacttgtgtgcctgatctccgacttctaccctggggctgtgacagtggcttggaaggccgatggatctcctgtgaaagccggcgtggaaaccaccaagccatccaagcagagcaacaacaaatacgccgccagctcctacctgagcctgacacctgagcagtggaagtcccacagatcctacagctgccaagtgacccacgaaggcagcaccgtggaaaagacagtggcccctacagagtgcagccccatcaagaccgatgtgattacaatggaccccaaggacaactgctccaaggacgccaacgataccctgctgctccagctgaccaacaccagcgcctactacatgtacttgttgctgctgctgaagtccgtggtgtacttcgccatcatcacatgctgcctgctgcggagaaccgccttctgctgcaacggcgagaagtctagggccaagcgatctggatctggagcaacaaacttctcactactcaaacaagcaggtgacgtggaggagaatcccgggcctactagtatggactggatttggcgcatccttttccttgtcggcgctgctaccggcgcgcattccgggccccagctccagctgcaagagtctggacctggcctggtcaagcctagcgagacactgagcctgacctgtaccgtgtccggcgatagcatcagcagcggcgattactactggggctggatcagacagcctcctggcaaaggactggaatggatcggccacatctactacagcggcgtgacctactacaaccccagcctgaagtccagagtgaccatcagcgtggacaccagccggaaccagttctccctgaagctgtctagcgtgacagccgccgataccgccgtgtactactgcaccagagaggacagcagcaactggcggagtagaggccagggaacactggtcacagttagctctggatccggcggaggcggaagtggaggcggaggatctggcggcggaggctctttcgaagaagtgcagctggttgaatcaggtggcggcctggttcagcctggcagaagtctgagactgagctgtgccgcctccggcttcaccttcgatgattacgccatgcactgggtccgacaggcccctggaaaaggactggaatgggtgtccggcatcagctggaatagcggctctatcggctacgccgattccgccaagggcagattcaccatcagccgggacaacagcaagaacaccctgtacctccagatgaactccctgagagccgaggacaccgccgtgtactactgtgccaagaggggcaacagcaacagcttcgactattggggccagggcaccctggtcacagtctcttctacgcgtgcctctacaaagggaccctccgtgtttcctctggctcccagcagcaagtctacaagcggaggaacagccgctctgggctgcctggtcaaggattactttcccgagcctgtgaccgtgtcctggaatagcggagcactgacaagcggcgtgcacacctttccagccgtgctgcaaagcagcggcctgtactctctgagcagcgtggtcacagtgcctagctctagcctgggcacccagacctacatctgcaatgtgaaccacaagcctagcaacaccaaggtggacaagagagtggaacccaagagctgtgaagtgaaaaccgactccaccgaccacgtgaagcccaaagagacagagaacaccaagcagcccagcaagagctgccacaagcccaaggccatcgtgcacaccgagaaagtgaacatgatgagcctgaccgtgctgggcctgcggatgctgttcgccaaaaccgtggccgtgaacttcctgctgaccgccaagctgttcttcctc

SEQ ID NO: 9405 - DNA, 2694 bp, Artificial Sequence
  Synthetic Polynucloetide
atggccttaccagtgaccgccttgctcctgccgctggccttgctgctccacgccgccaggccggaagtgcagctggttgaatctggcggaggactggttcagcctggcggatctctgagactgtcttgtgccgccagcggcttcagcttcagcgacttttggatgagctgggtccgacaggcccctggcaaaggacttgaatgggtcgccacaatcagccaggccggcagcgagaaggactacgtggactctgtgaagggcagattcaccatcagccgggacaacgccaagaagtccctgtacctccagatgaacagcctgagagccgaggacaccgccgtgtactattgtgcctctggcgtgtacagcttcgactacagaggccagggcaccctggtcacagtctcttctggtaccggcggaggcggatctggcggcggaggtagcggtggcggaggatctgaattcgacatccagatgacacagagccctagcagcgtgtccgcctctgtgggagacagagtgaccatcacctgtagagccagccagagcatcagcagctacctgaactggtatcagcagaagcccggcaaggcccctaaactgctgatctatgccgccagctctctccagagcggagtgcctagcagattttctggcagcggctccggcaccgatttcaccctgacaatatccagcctccagcctgaggacttcgccacctactactgccagcagagctacagcaccccttggacctttggacagggcaccaaggtggaaatcaagagactcgagggacagcctaaggccaatcctaccgtgacactgttccctccaagcagcgaagaactccaggccaacaaggccacacttgtgtgcctgatctccgacttctaccctggggctgtgacagtggcttggaaggccgatggatctcctgtgaaagccggcgtggaaaccaccaagccatccaagcagagcaacaacaaatacgccgccagctcctacctgagcctgacacctgagcagtggaagtcccacagatcctacagctgccaagtgacccacgaaggcagcaccgtggaaaagacagtggcccctacagagtgcagcggcagagccgattgcggctttaccagcgagagctaccagcagggcgtgctgagcgccaccatcctgtacgagatcctgctgggcaaggccaccctgtacgccgtgctggtgtctgccctggtgctgatggctatggtcaagcggaaggacagccggggacgcgccaagagaagcggatctggcgtgaagcagaccctgaatttcgacctgctgaagctggctggcgacgtggaatccaacccaggccctactagtatggactggatttggcgcatccttttccttgtcggcgctgctaccggcgcgcattccgggccccagctccagctgcaagagtctggacctggcctggtcaagcctagcgagacactgagcctgacctgtaccgtgtccggcgatagcatcagcagcggcgattactactggggctggatcagacagcctcctggcaaaggactggaatggatcggccacatctactacagcggcgtgacctactacaaccccagcctgaagtccagagtgaccatcagcgtggacaccagccggaaccagttctccctgaagctgtctagcgtgacagccgccgataccgccgtgtactactgcaccagagaggacagcagcaactggcggagtagaggccagggaacactggtcacagttagctctggatccggcggaggcggaagtggaggcggaggatctggcggcggaggctctttcgaagaagtgcagctggttgaatcaggtggcggcctggttcagcctggcagaagtctgagactgagctgtgccgcctccggcttcaccttcgatgattacgccatgcactgggtccgacaggcccctggaaaaggactggaatgggtgtccggcatcagctggaatagcggctctatcggctacgccgattccgccaagggcagattcaccatcagccgggacaacagcaagaacaccctgtacctccagatgaactccctgagagccgaggacaccgccgtgtactactgtgccaagaggggcaacagcaacagcttcgactattggggccagggcaccctggtcacagtctcttctacgcgtgcctctacaaagggaccctccgtgtttcctctggctcccagcagcaagtctacaagcggaggaacagccgctctgggctgcctggtcaaggattactttcccgagcctgtgaccgtgtcctggaatagcggagcactgacaagcggcgtgcacacctttccagccgtgctgcaaagcagcggcctgtactctctgagcagcgtggtcacagtgcctagctctagcctgggcacccagacctacatctgcaatgtgaaccacaagcctagcaacaccaaggtggacaagagagtggaacccaagagctgtatccccgaggacacattcttcccaagccccgagagcagctgcgacgtgaagctggtggaaaagagcttcgagacagacaccaacctgaacttccagaacctgagcgtgatcggcttcagaatcctgctgctgaaagtggccggctttaacctgctgatgaccctgcggctgtggtccagc

SEQ ID NO: 9406 - DNA, 2265 bp, Artificial Sequence
  Synthetic Polynucloetide
atggccttaccagtgaccgccttgctcctgccgctggccttgctgctccacgccgccaggccggaagtgcaggttttggagtctggcggaggactggttcagcctggcggatctctgagactgtcttgtgccgccagcggcttcaccttcagcaactttgccatgagctgggtccgacaggcccctggcaaaggacttgaatgggtgtccacaatcagcggcagcgccggcacaacagattacgccgattctgtgaagggcagattcaccatcagccgggacaacagcaagaaaaccctgtacctccagatgaacagcctgcgcgtggaagataccgccgtgtactactgtgccgatggcagaggccccttcttcgattatcgcggccagggcacactggtcaccgtttcttctggtaccggcggaggcggatctggcggcggaggtagcggtggcggaggatctgaattcgacatccagatgacacagagccctagcagcgtgtccgcctctgtgggagacagagtgaccatcacctgtagagccagccagagcatcagcagctacctgaactggtatcagcagaagcccggcaaggcccctaaactgctgatctatgccgccagctctctccagagcggagtgcctagcagattttctggcagcggctccggcaccgatttcaccctgacaatatccagcctccagcctgaggacttcgccacctactactgccagcagagctacagcaccccttggacctttggacagggcaccaaggtggaaatcaagagactcgaggacctgaagaacgtgttcccacctgaggtggccgtgttcgagcctagcgaggccgagatcagccacacccagaaagccaccctcgtgtgcctggctaccggcttctaccccgaccatgtggaactgtcttggtgggtcaacggcaaagaggtgcacagcggcgtgtgtaccgacccccagccactgaaagaacagcccgccctgaacgacagccggtactgcctgagcagcagactgagagtgtccgccaccttctggcagaacccccggaaccacttcagatgccaggtgcagttctacggcctgagcgagaacgacgagtggacccaggacagagccaagcccgtgacccagatcgtgtctgccgaagcctggggcagagccgattgcggctttaccagcgagagctaccagcagggcgtgctgagcgccaccatcctgtacgagatcctgctgggcaaggccaccctgtacgccgtgctggtgtctgccctggtgctgatggctatggtcaagcggaaggacagccggggaagggccaagcgatctggatctggagcaacaaacttctcactactcaaacaagcaggtgacgtggaggagaatcccgggcctactagtatggactggatttggcgcatccttttccttgtcggcgctgctaccggcgcgcattccttcgaagaagtgcagctggttgaatcaggtggcggcctggttcagcctggcagaagtctgagactgagctgtgccgcctccggcttcaccttcgatgattacgccatgcactgggtccgacaggcccctggaaaaggactggaatgggtgtccggcatcagctggaatagcggctctatcggctacgccgattccgccaagggcagattcaccatcagccgggacaacagcaagaacaccctgtacctccagatgaactccctgagagccgaggacaccgccgtgtactactgtgccaagaggggcaacagcaacagcttcgactattggggccagggcaccctggtcacagtctcttctacgcgtatccagaaccctgatcctgccgtgtaccagctgcgggatagcaagagcagcgacaagagcgtgtgtctgttcaccgacttcgacagccagaccaacgtgtcccagagcaaggactccgacgtgtacatcaccgataagtgcgtgctggacatgcggagcatggacttcaagagcaactccgccgtggcctggtccaacaagtccgatttcgcctgcgccaacgccttcaacaacagcattatccccgaggacacattcttcccaagccccgagagcagctgcgacgtgaagctggtggaaaagagcttcgagacagacaccaacctgaacttccagaacctgagcgtgatcggcttcagaatcctgctgctgaaagtggccggctttaacctgctgatgaccctgcggctgtggtccagc

SEQ ID NO: 9407 - DNA, 2268 bp, Artificial Sequence
  Synthetic Polynucloetide
atggccttaccagtgaccgccttgctcctgccgctggccttgctgctccacgccgccaggccggacatccagatgacacagagccctagcagcgtgtccgcctctgtgggagacagagtgaccatcacctgtagagccagccagagcatcagcagctacctgaactggtatcagcagaagcccggcaaggcccctaaactgctgatctatgccgccagctctctccagagcggagtgcctagcagattttctggcagcggctccggcaccgatttcaccctgacaatatccagcctccagcctgaggacttcgccacctactactgccagcagagctacagcaccccttggacctttggacagggcaccaaggtggaaatcaagagactcgaggacctgaagaacgtgttcccacctgaggtggccgtgttcgagcctagcgaggccgagatcagccacacccagaaagccaccctcgtgtgcctggctaccggcttctaccccgaccatgtggaactgtcttggtgggtcaacggcaaagaggtgcacagcggcgtgtgtaccgacccccagccactgaaagaacagcccgccctgaacgacagccggtactgcctgagcagcagactgagagtgtccgccaccttctggcagaacccccggaaccacttcagatgccaggtgcagttctacggcctgagcgagaacgacgagtggacccaggacagagccaagcccgtgacccagatcgtgtctgccgaagcctggggcagagccgattgcggctttaccagcgagagctaccagcagggcgtgctgagcgccaccatcctgtacgagatcctgctgggcaaggccaccctgtacgccgtgctggtgtctgccctggtgctgatggctatggtcaagcggaaggacagccggggaagggccaagcgatctggatctggagcaacaaacttctcactactcaaacaagcaggtgacgtggaggagaatcccgggcctactagtatggactggatttggcgcatccttttccttgtcggcgctgctaccggcgcccattccgggcccgaagtgcagctggttgaatctggcggaggactggttcaggctggcggatctctgagactgtcttgtgccgccagcggcagaacctttagcatgggctggtttagacaggcccctggcaaagagagagagttcgtcgccgccatcacatactctggcggcagcccttactacgccgactctgtgaagggcagattcaccatcagccgggacaacgccaagaacaccgtgtacctccagatgaacagcctgaagcctgaggacaccgccgtgtactactgcgccgccaatccaacatacggcagcgactggaacgccgagaattggggccagggaacccaagtgacagtgtctagcggatccggcggcggaggatctggcggaggcggatctgggggcggaggctctttcgaagaagtgcagctggttgaatcaggtggcggcctggttcagcctggcagaagtctgagactgagctgtgccgcctccggcttcaccttcgatgattacgccatgcactgggtccgacaggcccctggaaaaggactggaatgggtgtccggcatcagctggaatagcggctctatcggctacgccgattccgccaagggcagattcaccatcagccgggacaacagcaagaacaccctgtacctccagatgaactccctgagagccgaggacaccgccgtgtactactgtgccaagaggggcaacagcaacagcttcgactattggggccagggcaccctggtcacagtctcttctacgcgtatccagaaccctgatcctgccgtgtaccagctgcgggatagcaagagcagcgacaagagcgtgtgtctgttcaccgacttcgacagccagaccaacgtgtcccagagcaaggactccgacgtgtacatcaccgataagtgcgtgctggacatgcggagcatggacttcaagagcaactccgccgtggcctggtccaacaagtccgatttcgcctgcgccaacgccttcaacaacagcattatccccgaggacacattcttcccaagccccgagagcagctgcgacgtgaagctggtggaaaagagcttcgagacagacaccaacctgaacttccagaacctgagcgtgatcggcttcagaatcctgctgctgaaagtggccggctttaacctgctgatgaccctgcggctgtggtccagc

SEQ ID NO: 9408 - DNA, 2649 bp, Artificial Sequence
  Synthetic Polynucloetide
atggccttaccagtgaccgccttgctcctgccgctggccttgctgctccacgccgccaggccggacatccagatgacacagagccctagcagcgtgtccgcctctgtgggagacagagtgaccatcacctgtagagccagccagagcatcagcagctacctgaactggtatcagcagaagcccggcaaggcccctaaactgctgatctatgccgccagctctctccagagcggagtgcctagcagattttctggcagcggctccggcaccgatttcaccctgacaatatccagcctccagcctgaggacttcgccacctactactgccagcagagctacagcaccccttggacctttggacagggcaccaaggtggaaatcaagagactcgaggacctgaagaacgtgttcccacctgaggtggccgtgttcgagcctagcgaggccgagatcagccacacccagaaagccaccctcgtgtgcctggctaccggcttctaccccgaccatgtggaactgtcttggtgggtcaacggcaaagaggtgcacagcggcgtgtgtaccgacccccagccactgaaagaacagcccgccctgaacgacagccggtactgcctgagcagcagactgagagtgtccgccaccttctggcagaacccccggaaccacttcagatgccaggtgcagttctacggcctgagcgagaacgacgagtggacccaggacagagccaagcccgtgacccagatcgtgtctgccgaagcctggggcagagccgattgcggctttaccagcgagagctaccagcagggcgtgctgagcgccaccatcctgtacgagatcctgctgggcaaggccaccctgtacgccgtgctggtgtctgccctggtgctgatggctatggtcaagcggaaggacagccggggaagggccaagcgatctggatctggagcaacaaacttctcactactcaaacaagcaggtgacgtggaggagaatcccgggcctactagtatggactggatttggcgcatccttttccttgtcggcgctgctaccggcgcccattcccaactgcaactgcaagagtctggccctggcctggtcaagccttctgaaaccctgagcctgacctgtaccgtgtccggcggctctatcagcagcggcgattactactggggctggatcagacagcctccaggcaagggactcgaatggatcggcagcatcagctacagcggctccacctactacaacccaagcctgaagtccagagtgaccatcagcgtggacaccagcagaaaccagttctccctgaagctgagcagcgtgacagccgccgatacagccgtgtattattgcaccagagaggacagcagcaactggcggagtagaggacagggcacactggtcacagtgtcctcttctggaggcggtggaagcggtggaggaggatctgaagtgcagctggttgaatctggcggaggactggttcaggctggcggatctctgagactgtcttgtgccgccagcggcagaacctttagcatgggctggtttagacaggcccctggcaaagagagagagttcgtcgccgccatcacatactctggcggcagcccttactacgccgactctgtgaagggcagattcaccatcagccgggacaacgccaagaacaccgtgtacctccagatgaacagcctgaagcctgaggacaccgccgtgtactactgcgccgccaatccaacatacggcagcgactggaacgccgagaattggggccagggaacccaagtgacagtgtctagcggatccggcggcggaggatctggcggaggcggatctgggggcggaggctctttcgaagaagtgcagctggttgaatcaggtggcggcctggttcagcctggcagaagtctgagactgagctgtgccgcctccggcttcaccttcgatgattacgccatgcactgggtccgacaggcccctggaaaaggactggaatgggtgtccggcatcagctggaatagcggctctatcggctacgccgattccgccaagggcagattcaccatcagccgggacaacagcaagaacaccctgtacctccagatgaactccctgagagccgaggacaccgccgtgtactactgtgccaagaggggcaacagcaacagcttcgactattggggccagggcaccctggtcacagtctcttctacgcgtatccagaaccctgatcctgccgtgtaccagctgcgggatagcaagagcagcgacaagagcgtgtgtctgttcaccgacttcgacagccagaccaacgtgtcccagagcaaggactccgacgtgtacatcaccgataagtgcgtgctggacatgcggagcatggacttcaagagcaactccgccgtggcctggtccaacaagtccgatttcgcctgcgccaacgccttcaacaacagcattatccccgaggacacattcttcccaagccccgagagcagctgcgacgtgaagctggtggaaaagagcttcgagacagacaccaacctgaacttccagaacctgagcgtgatcggcttcagaatcctgctgctgaaagtggccggctttaacctgctgatgaccctgcggctgtggtccagc

SEQ ID NO: 9409 - DNA, 2676 bp, Artificial Sequence
  Synthetic Polynucloetide
atggccttaccagtgaccgccttgctcctgccgctggccttgctgctccacgccgccaggccggaagtgcaggttttggagtctggcggaggactggttcagcctggcggatctctgagactgtcttgtgccgccagcggcttcaccttcagcaactttgccatgagctgggtccgacaggcccctggcaaaggacttgaatgggtgtccacaatcagcggcagcgccggcacaacagattacgccgattctgtgaagggcagattcaccatcagccgggacaacagcaagaaaaccctgtacctccagatgaacagcctgcgcgtggaagataccgccgtgtactactgtgccgatggcagaggccccttcttcgattatcgcggccagggcacactggtcaccgtttcttctggtaccggcggaggcggatctggcggcggaggtagcggtggcggaggatctgaattcgacatccagatgacacagagccctagcagcgtgtccgcctctgtgggagacagagtgaccatcacctgtagagccagccagagcatcagcagctacctgaactggtatcagcagaagcccggcaaggcccctaaactgctgatctatgccgccagctctctccagagcggagtgcctagcagattttctggcagcggctccggcaccgatttcaccctgacaatatccagcctccagcctgaggacttcgccacctactactgccagcagagctacagcaccccttggacctttggacagggcaccaaggtggaaatcaagagactcgaggacctgaagaacgtgttcccacctgaggtggccgtgttcgagcctagcgaggccgagatcagccacacccagaaagccaccctcgtgtgcctggctaccggcttctaccccgaccatgtggaactgtcttggtgggtcaacggcaaagaggtgcacagcggcgtgtgtaccgacccccagccactgaaagaacagcccgccctgaacgacagccggtactgcctgagcagcagactgagagtgtccgccaccttctggcagaacccccggaaccacttcagatgccaggtgcagttctacggcctgagcgagaacgacgagtggacccaggacagagccaagcccgtgacccagatcgtgtctgccgaagcctggggcagagccgattgcggctttaccagcgagagctaccagcagggcgtgctgagcgccaccatcctgtacgagatcctgctgggcaaggccaccctgtacgccgtgctggtgtctgccctggtgctgatggctatggtcaagcggaaggacagccggggaagggccaagcgatctggatctggagcaacaaacttctcactactcaaacaagcaggtgacgtggaggagaatcccgggcctactagtatggactggatttggcgcatccttttccttgtcggcgctgctaccggcgcccattccgggcccgaagtgcagctggttgaatctggcggaggactggttcaggctggcggatctctgagactgtcttgtgccgccagcggcagaacctttagcatgggctggtttagacaggcccctggcaaagagagagagttcgtcgccgccatcacatacagcggcggcagcccttactacgcctcttctgtcagaggccggttcaccatcagccgggacaacgccaagaacaccgtgtacctccagatgaacagcctgaagccagaggacaccgccgtgtactactgtgccgccaatccaacctacggcagcgactggaatgccgagaattggggccagggcacccaagtgacagtgtctagtggatccggcggcggaggatctggcggaggcggatctgggggcggaggctctttcgaagaagtgcagctggttgaatcaggtggcggcctggttcagcctggcagaagtctgagactgagctgtgccgcctccggcttcaccttcgatgattacgccatgcactgggtccgacaggcccctggaaaaggactggaatgggtgtccggcatcagctggaatagcggctctatcggctacgccgattccgccaagggcagattcaccatcagccgggacaacagcaagaacaccctgtacctccagatgaactccctgagagccgaggacaccgccgtgtactactgtgccaagaggggcaacagcaacagcttcgactattggggccagggcaccctggtcacagtctcttctacgcgtatccagaaccctgatcctgccgtgtaccagctgcgggatagcaagagcagcgacaagagcgtgtgtctgttcaccgacttcgacagccagaccaacgtgtcccagagcaaggactccgacgtgtacatcaccgataagtgcgtgctggacatgcggagcatggacttcaagagcaactccgccgtggcctggtccaacaagtccgatttcgcctgcgccaacgccttcaacaacagcattatccccgaggacacattcttcccaagccccgagagcagctgcgacgtgaagctggtggaaaagagcttcgagacagacaccaacctgaacttccagaacctgagcgtgatcggcttcagaatcctgctgctgaaagtggccggctttaacctgctgatgaccctgcggctgtggtccagc

SEQ ID NO: 9410 - DNA, 2172 bp, Artificial Sequence
  Synthetic Polynucloetide
atggccttaccagtgaccgccttgctcctgccgctggccttgctgctccacgccgccaggccggacacagtgctgacacagtctccagctctggctgtgtctcctggcgagagagtgaccatctcttgcaaggccagcgagagcgtgtccaccagaatgcactggtacagacagaagcccggccagcagccaaagctgctgatctacaagaccagcaacctggcctctggcgtgccagccagattttctggctctggcagcggcaccgacttcaccctgaccattgatcccgtggaagccgacgacaccgccacctacttttgtcagcagtcctggaacggccctctgacatttggaagcggcaccaagctggaaatcaagagaggcggaggcggaagtggaggcggaggatctggcggcggaggctctcaggtgcagctgaaagagtctggccctggactggtgcagcctagccaaacactgagcctgacctgtaccgtgtctggcctgtctctgaccagcaatggcgtgtcctggatcagacagcctcctggcaaaggactggaatggctgggcgtgatctggtccaatggcggcacagactacaacagcgccatcaagagccggctgagcttcagcagagacaccagcaagagccaggtgttcctgaagatgaacagcctccagaccgaggataccgccatgtacttttgcgccagacctcggtacaactccggctacttcttcgactattggggccagggcgtgatggtcaccgttagctctacgcgtgagcagaaactgatctcggaagaggatctggcgaagcccaccacgacgccagcgccgcgaccaccaacaccggcgcccaccatcgcgtcgcagcccctgtccctgcgcccagaggcgtgccggccagcggcggggggcgcagtgcacacgagggggctggacttcgcctgtgacatctacatctgggcgcccttggccgggacttgtggggtccttctcctgtcactggttatcaccctttactgcaaacggggcagaaagaaactcctgtatatattcaaacaaccatttatgagaccagtacaaactactcaagaggaagatggctgtagctgccgatttccagaagaagaagaaggaggatgtgaactgagagtgaagttcagcaggagcgcagacgcccccgcgtaccagcagggccagaaccagctctataacgagctgaatctaggacgaagagaggagtacgatgttttggacaagagacgtggccgggaccctgagatggggggaaagccgagaaggaagaaccctcaggaaggcctgtacaatgaactgcagaaagataagatggcggaggcctacagtgagattgggatgaaaggcgagcgccggaggggcaaggggcacgatggcctttaccagggtctcagtacagccaccaaggacacctacgacgcccttcacatgcaggccctgccccctcgctctagtggctccggcgagggcagaggaagtctactaacctgcggagatgtggaagaaaatcctggcccacatatgaccgagtacaagcccacggtgcgcctcgccacccgcgacgacgtccccagggccgtacgcaccctcgccgccgcgttcgccgactaccccgccacgcgccacaccgtcgatccggaccgccacatcgagcgggtcaccgagctgcaagaactcttcctcacgcgcgtcgggctcgacatcggcaaggtgtgggtcgcggacgacggcgccgcggtggcggtctggaccacgccggagagcgtcgaagcgggggcggtgttcgccgagatcggcccgcgcatggccgagttgagcggttcccggctggccgcgcagcaacagatggaaggcctcctggcgccgcaccggcccaaggagcccgcgtggttcctggccaccgtcggcgtctcgcccgaccaccagggcaagggtctgggcagcgccgtcgtgctccccggagtggaggcggccgagcgcgccggggtgcccgccttcctggagacctccgcgccccgcaacctccccttctacgagcggctcggcttcaccgtcaccgccgacgtcgaggtgcccgaaggaccgcgcacctggtgcatgacccgcaagcccggtgcctga

SEQ ID NO: 9411 - DNA, 2154 bp, Artificial Sequence
  Synthetic Polynucloetide
atggccttaccagtgaccgccttgctcctgccgctggccttgctgctccacgccgccaggccggacacagtgctgacacagtctccagctctggctgtgtctcctggcgagagagtgaccatctcttgcaaggccagcgagagcgtgtccaccagaatgcactggtacagacagaagcccggccagcagccaaagctgctgatctacaagaccagcaacctggcctctggcgtgccagccagattttctggctctggcagcggcaccgacttcaccctgaccattgatcccgtggaagccgacgacaccgccacctacttttgtcagcagtcctggaacggccctctgacatttggaagcggcaccaagctggaaatcaagagaggcggaggcggaagtggaggcggaggatctggcggcggaggctctcaggtgcagctgaaagagtctggccctggactggtgcagcctagccaaacactgagcctgacctgtaccgtgtctggcctgtctctgaccagcaatggcgtgtcctggatcagacagcctcctggcaaaggactggaatggctgggcgtgatctggtccaatggcggcacagactacaacagcgccatcaagagccggctgagcttcagcagagacaccagcaagagccaggtgttcctgaagatgaacagcctccagaccgaggataccgccatgtacttttgcgccagacctcggtacaactccggctacttcttcgactattggggccagggcgtgatggtcaccgttagctctacgcgtgagcagaaactgatctcggaagaggatctgaaaattgaagttatgtatcctcctccttacctagacaatgagaagagcaatggaaccattatccatgtgaaagggaaacacctttgtccaagtcccctatttcccggaccttctaagcccttttgggtgctggtggtggttgggggagtcctggcttgctatagcttgctagtaacagtggcctttattattttctgggtgaggagtaagaggagcaggctcctgcacagtgactacatgaacatgactccacgccgccccggacccacccgcaagcattaccagccctatgccccaccacgcgacttcgcagcctatcgctccagagtgaagttcagcaggagcgcagacgcccccgcgtaccagcagggccagaaccagctctataacgagctcaatctaggacgaagagaggagtacgatgttttggacaagagacgtggccgggaccctgagatggggggaaagccgagaaggaagaaccctcaggaaggcctgtacaatgaactgcagaaagataagatggcggaggcctacagtgagattgggatgaaaggcgagcgccggaggggcaaggggcacgatggcctttaccagggtctcagtacagccaccaaggacacctacgacgcccttcacatgcaggccctgccccctcgctctagtggctccggcgagggcagaggaagtctactaacctgcggagatgtggaagaaaatcctggcccacatatgaccgagtacaagcccacggtgcgcctcgccacccgcgacgacgtccccagggccgtacgcaccctcgccgccgcgttcgccgactaccccgccacgcgccacaccgtcgatccggaccgccacatcgagcgggtcaccgagctgcaagaactcttcctcacgcgcgtcgggctcgacatcggcaaggtgtgggtcgcggacgacggcgccgcggtggcggtctggaccacgccggagagcgtcgaagcgggggcggtgttcgccgagatcggcccgcgcatggccgagttgagcggttcccggctggccgcgcagcaacagatggaaggcctcctggcgccgcaccggcccaaggagcccgcgtggttcctggccaccgtcggcgtctcgcccgaccaccagggcaagggtctgggcagcgccgtcgtgctccccggagtggaggcggccgagcgcgccggggtgcccgccttcctggagacctccgcgccccgcaacctccccttctacgagcggctcggcttcaccgtcaccgccgacgtcgaggtgcccgaaggaccgcgcacctggtgcatgacccgcaagcccggtgcctga

SEQ ID NO: 9412 - DNA, 1482 bp, Artificial Sequence
  Synthetic Polynucloetide
atggccttaccagtgaccgccttgctcctgccgctggccttgctgctccacgccgccaggccggacacagtgctgacacagtctccagctctggctgtgtctcctggcgagagagtgaccatctcttgcaaggccagcgagagcgtgtccaccagaatgcactggtacagacagaagcccggccagcagccaaagctgctgatctacaagaccagcaacctggcctctggcgtgccagccagattttctggctctggcagcggcaccgacttcaccctgaccattgatcccgtggaagccgacgacaccgccacctacttttgtcagcagtcctggaacggccctctgacatttggaagcggcaccaagctggaaatcaagagaggcggaggcggaagtggaggcggaggatctggcggcggaggctctcaggtgcagctgaaagagtctggccctggactggtgcagcctagccaaacactgagcctgacctgtaccgtgtctggcctgtctctgaccagcaatggcgtgtcctggatcagacagcctcctggcaaaggactggaatggctgggcgtgatctggtccaatggcggcacagactacaacagcgccatcaagagccggctgagcttcagcagagacaccagcaagagccaggtgttcctgaagatgaacagcctccagaccgaggataccgccatgtacttttgcgccagacctcggtacaactccggctacttcttcgactattggggccagggcgtgatggtcaccgttagctctacgcgtgagcagaaactgatctcggaagaggatctgaaaattgaagttatgtatcctcctccttacctagacaatgagaagagcaatggaaccattatccatgtgaaagggaaacacctttgtccaagtcccctatttcccggaccttctaagcccttttgggtgctggtggtggttgggggagtcctggcttgctatagcttgctagtaacagtggcctttattattttctgggtgaggagtaagaggagcaggctcctgcacagtgactacatgaacatgactccacgccgccccggacccacccgcaagcattaccagccctatgccccaccacgcgacttcgcagcctatcgctccagagtgaagttcagcaggagcgcagacgcccccgcgtaccagcagggccagaaccagctctataacgagctcaatctaggacgaagagaggagtacgatgttttggacaagagacgtggccgggaccctgagatggggggaaagccgagaaggaagaaccctcaggaaggcctgtacaatgaactgcagaaagataagatggcggaggcctacagtgagattgggatgaaaggcgagcgccggaggggcaaggggcacgatggcctttaccagggtctcagtacagccaccaaggacacctacgacgcccttcacatgcaggccctgccccctcgc

SEQ ID NO: 9413 - DNA, 1503 bp, Artificial Sequence
  Synthetic Polynucloetide
atggccttaccagtgaccgccttgctcctgccgctggccttgctgctccacgccgccaggccggacacagtgctgacacagtctccagctctggctgtgtctcctggcgagagagtgaccatctcttgcaaggccagcgagagcgtgtccaccagaatgcactggtacagacagaagcccggccagcagccaaagctgctgatctacaagaccagcaacctggcctctggcgtgccagccagattttctggctctggcagcggcaccgacttcaccctgaccattgatcccgtggaagccgacgacaccgccacctacttttgtcagcagtcctggaacggccctctgacatttggaagcggcaccaagctggaaatcaagagaggcggaggcggaagtggaggcggaggatctggcggcggaggctctcaggtgcagctgaaagagtctggccctggactggtgcagcctagccaaacactgagcctgacctgtaccgtgtctggcctgtctctgaccagcaatggcgtgtcctggatcagacagcctcctggcaaaggactggaatggctgggcgtgatctggtccaatggcggcacagactacaacagcgccatcaagagccggctgagcttcagcagagacaccagcaagagccaggtgttcctgaagatgaacagcctccagaccgaggataccgccatgtacttttgcgccagacctcggtacaactccggctacttcttcgactattggggccagggcgtgatggtcaccgttagctctacgcgtgagcagaaactgatctcggaagaggatctggcgaagcccaccacgacgccagcgccgcgaccaccaacaccggcgcccaccatcgcgtcgcagcccctgtccctgcgcccagaggcgtgccggccagcggcggggggcgcagtgcacacgagggggctggacttcgcctgtgacatctacatctgggcgcccttggccgggacttgtggggtccttctcctgtcactggttatcaccctttactgcaaacggggcagaaagaaactcctgtatatattcaaacaaccatttatgagaccagtacaaactactcaagaggaagatggctgtagctgccgatttccagaagaagaagaaggaggatgtgaactgagagtgaagttcagcaggagcgcagacgcccccgcgtaccagcagggccagaaccagctctataacgagctgaatctaggacgaagagaggagtacgatgttttggacaagagacgtggccgggaccctgagatggggggaaagccgagaaggaagaaccctcaggaaggcctgtacaatgaactgcagaaagataagatggcggaggcctacagtgagattgggatgaaaggcgagcgccggaggggcaaggggcacgatggcctttaccagggtctcagtacagccaccaaggacacctacgacgcccttcacatgcaggccctgccccctcgctga

SEQ ID NO: 9414 - DNA, 1503 bp, Artificial Sequence
  Synthetic Polynucloetide
atggccttaccagtgaccgccttgctcctgccgctggccttgctgctccacgccgccaggccgcaggtgcagctgaaagagtctggccctggactggtgcagcctagccaaacactgagcctgacctgtaccgtgtctggcctgtctctgaccagcaatggcgtgtcctggatcagacagcctcctggcaaaggactggaatggctgggcgtgatctggtccaatggcggcacagactacaacagcgccatcaagagccggctgagcttcagcagagacaccagcaagagccaggtgttcctgaagatgaacagcctccagaccgaggataccgccatgtacttttgcgccagacctcggtacaactccggctacttcttcgactattggggccagggcgtgatggtcaccgttagctctggcggaggcggaagtggaggcggaggatctggcggcggaggctctgacacagtgctgacacagtctccagctctggctgtgtctcctggcgagagagtgaccatctcttgcaaggccagcgagagcgtgtccaccagaatgcactggtacagacagaagcccggccagcagccaaagctgctgatctacaagaccagcaacctggcctctggcgtgccagccagattttctggctctggcagcggcaccgacttcaccctgaccattgatcccgtggaagccgacgacaccgccacctacttttgtcagcagtcctggaacggccctctgacatttggaagcggcaccaagctggaaatcaagagaacgcgtgagcagaaactgatctcggaagaggatctggcgaagcccaccacgacgccagcgccgcgaccaccaacaccggcgcccaccatcgcgtcgcagcccctgtccctgcgcccagaggcgtgccggccagcggcggggggcgcagtgcacacgagggggctggacttcgcctgtgacatctacatctgggcgcccttggccgggacttgtggggtccttctcctgtcactggttatcaccctttactgcaaacggggcagaaagaaactcctgtatatattcaaacaaccatttatgagaccagtacaaactactcaagaggaagatggctgtagctgccgatttccagaagaagaagaaggaggatgtgaactgagagtgaagttcagcaggagcgcagacgcccccgcgtaccagcagggccagaaccagctctataacgagctgaatctaggacgaagagaggagtacgatgttttggacaagagacgtggccgggaccctgagatggggggaaagccgagaaggaagaaccctcaggaaggcctgtacaatgaactgcagaaagataagatggcggaggcctacagtgagattgggatgaaaggcgagcgccggaggggcaaggggcacgatggcctttaccagggtctcagtacagccaccaaggacacctacgacgcccttcacatgcaggccctgccccctcgctga

SEQ ID NO: 9415 - DNA, 2742 bp, Artificial Sequence
  Synthetic Polynucloetide
atggccttaccagtgaccgccttgctcctgccgctggccttgctgctccacgccgccaggccggacacagtgctgacacagtctccagctctggctgtgtctcctggcgagagagtgaccatctcttgcaaggccagcgagagcgtgtccaccagaatgcactggtacagacagaagcccggccagcagccaaagctgctgatctacaagaccagcaacctggcctctggcgtgccagccagattttctggctctggcagcggcaccgacttcaccctgaccattgatcccgtggaagccgacgacaccgccacctacttttgtcagcagtcctggaacggccctctgacatttggaagcggcaccaagctggaaatcaagagaggcggaggcggaagtggaggcggaggatctggcggcggaggctctcaggtgcagctgaaagagtctggccctggactggtgcagcctagccaaacactgagcctgacctgtaccgtgtctggcctgtctctgaccagcaatggcgtgtcctggatcagacagcctcctggcaaaggactggaatggctgggcgtgatctggtccaatggcggcacagactacaacagcgccatcaagagccggctgagcttcagcagagacaccagcaagagccaggtgttcctgaagatgaacagcctccagaccgaggataccgccatgtacttttgcgccagacctcggtacaactccggctacttcttcgactattggggccagggcgtgatggtcaccgttagctctacgcgtgagcagaaactgatctcggaagaggatctggcgaagcccaccacgacgccagcgccgcgaccaccaacaccggcgcccaccatcgcgtcgcagcccctgtccctgcgcccagaggcgtgccggccagcggcggggggcgcagtgcacacgagggggctggacttcgcctgtgacatctacatctgggcgcccttggccgggacttgtggggtccttctcctgtcactggttatcaccctttactgcgggcgcgccagagtgaagttcagcaggagcgcagacgcccccgcgtaccagcagggccagaaccagctctataacgagctgaatctaggacgaagagaggagtacgatgttttggacaagagacgtggccgggaccctgagatggggggaaagccgagaaggaagaaccctcaggaaggcctgtacaatgaactgcagaaagataagatggcggaggcctacagtgagattgggatgaaaggcgagcgccggaggggcaaggggcacgatggcctttaccagggtctcagtacagccaccaaggacacctacgacgcccttcacatgcaggccctgccccctcgctctagaggatctggagcaacaaacttctcactactcaaacaagcaggtgacgtggaggagaatcccgggcctgggatccacatggccacttacgaggttctctgtgaggtggcgcggaaactgggcacggatgacagggaagtggtattgttcctcctaaacgtgttcatacctcaacccacactggcccaattaattggagctcttagagctttaaaggaggagggcaggttaacgtttcccctgttagcggaatgtctgtttcgtgcaggtcgcagagacctcttgcgcgacctgcttcacttagacccgcgttttttagagcgccacctagcgggcacaatgagttatttcagcccttatcagctcactgttctccacgtagacggggagctgtgtgcgagggatattaggtctttgatatttttaagcaaggacactatagggtctcgcagcacaccacagacattcttacactgggtgtactgtatggaaaacttagacctactgggtcccactgacgtggatgccctaatgtcaatgcttagatctttgtcaagagtagacctacagcgccaagtgcaaaccctaatgggccttcacctttccggcccatcacactcccaacactatcgccatacaccactcgagaccgatttctacgactacaaggacgacgatgacaagactagtggctccggcgagggcagaggaagtctactaacctgcggagatgtggaagaaaatcctggcccacatatgaccgagtacaagcccacggtgcgcctcgccacccgcgacgacgtccccagggccgtacgcaccctcgccgccgcgttcgccgactaccccgccacgcgccacaccgtcgatccggaccgccacatcgagcgggtcaccgagctgcaagaactcttcctcacgcgcgtcgggctcgacatcggcaaggtgtgggtcgcggacgacggcgccgcggtggcggtctggaccacgccggagagcgtcgaagcgggggcggtgttcgccgagatcggcccgcgcatggccgagttgagcggttcccggctggccgcgcagcaacagatggaaggcctcctggcgccgcaccggcccaaggagcccgcgtggttcctggccaccgtcggcgtctcgcccgaccaccagggcaagggtctgggcagcgccgtcgtgctccccggagtggaggcggccgagcgcgccggggtgcccgccttcctggagacctccgcgccccgcaacctccccttctacgagcggctcggcttcaccgtcaccgccgacgtcgaggtgcccgaaggaccgcgcacctggtgcatgacccgcaagcccggtgcctga

SEQ ID NO: 9416 - DNA, 2562 bp, Artificial Sequence
  Synthetic Polynucloetide
atggccttaccagtgaccgccttgctcctgccgctggccttgctgctccacgccgccaggccggacacagtgctgacacagtctccagctctggctgtgtctcctggcgagagagtgaccatctcttgcaaggccagcgagagcgtgtccaccagaatgcactggtacagacagaagcccggccagcagccaaagctgctgatctacaagaccagcaacctggcctctggcgtgccagccagattttctggctctggcagcggcaccgacttcaccctgaccattgatcccgtggaagccgacgacaccgccacctacttttgtcagcagtcctggaacggccctctgacatttggaagcggcaccaagctggaaatcaagagactcgagatccagaaccctgatcctgccgtgtaccagctgcgggatagcaagagcagcgacaagagcgtgtgtctgttcaccgacttcgacagccagaccaacgtgtcccagagcaaggactccgacgtgtacatcaccgataagtgcgtgctggacatgcggagcatggacttcaagagcaactccgccgtggcctggtccaacaagtccgatttcgcctgcgccaacgccttcaacaacagcattatccccgaggacacattcttcccaagcagcgacgtgccctgcgacgtgaagctggtggaaaagagcttcgagacagacaccaacctgaacttccagaacctgagcgtgatcggcttcagaatcctgctgctgaaagtggccggctttaacctgctgatgaccctgcggctgtggtccagccgcgccaagagaagcggatctggcgtgaagcagaccctgaatttcgacctgctgaagctggctggcgacgtggaatccaacccaggccctactagtatggactggatttggcgcatccttttccttgtcggcgctgctaccggcgcgcattccttcgaacaggtgcagctgaaagagtctggccctggactggtgcagcctagccaaacactgagcctgacctgtaccgtgtctggcctgtctctgaccagcaatggcgtgtcctggatcagacagcctcctggcaaaggactggaatggctgggcgtgatctggtccaatggcggcacagactacaacagcgccatcaagagccggctgagcttcagcagagacaccagcaagagccaggtgttcctgaagatgaacagcctccagaccgaggataccgccatgtacttttgcgccagacctcggtacaactccggctacttcttcgactattggggccagggcgtgatggtcaccgttagctctacgcgtgaggacctgaagaacgtgttcccacctgaggtggccgtgttcgagcctagcaaggccgagatcgcccacacccagaaagccaccctcgtgtgcctggctaccggcttctaccccgaccatgtggaactgtcttggtgggtcaacggcaaagaggtgcacagcggcgtgtgtaccgacccccagccactgaaagaacagcccgccctgaacgacagccggtactgcctgagcagcagactgagagtgtccgccaccttctggcagaacccccggaaccacttcagatgccaggtgcagttctacggcctgagcgagaacgacgagtggacccaggacagagccaagcccgtgacccagatcgtgtctgccgaagcctggggcagagccgattgcggcatcaccagcgccagctaccaccagggcgtgctgagcgccaccatcctgtacgagatcctgctgggcaaggccaccctgtacgccgtgctggtgtctgccctggtgctgatggctatggtcaagcggaaggacagccggggaagggccaagcgatctggatctggagcaacaaacttctcactactcaaacaagcaggtgacgtggaggagaatcccgggccttctagaggccatatgaccgagtacaagcccacggtgcgcctcgccacccgcgacgacgtccccagggccgtacgcaccctcgccgccgcgttcgccgactaccccgccacgcgccacaccgtcgatccggaccgccacatcgagcgggtcaccgagctgcaagaactcttcctcacgcgcgtcgggctcgacatcggcaaggtgtgggtcgcggacgacggcgccgcggtggcggtctggaccacgccggagagcgtcgaagcgggggcggtgttcgccgagatcggcccgcgcatggccgagttgagcggttcccggctggccgcgcagcaacagatggaaggcctcctggcgccgcaccggcccaaggagcccgcgtggttcctggccaccgtcggcgtctcgcccgaccaccagggcaagggtctgggcagcgccgtcgtgctccccggagtggaggcggccgagcgcgccggggtgcccgccttcctggagacctccgcgccccgcaacctccccttctacgagcggctcggcttcaccgtcaccgccgacgtcgaggtgcccgaaggaccgcgcacctggtgcatgacccgcaagcccggtgcctga

SEQ ID NO: 9417 - DNA, 2559 bp, Artificial Sequence
  Synthetic Polynucloetide
atggccttaccagtgaccgccttgctcctgccgctggccttgctgctccacgccgccaggccggacacagtgctgacacagtctccagctctggctgtgtctcctggcgagagagtgaccatctcttgcaaggccagcgagagcgtgtccaccagaatgcactggtacagacagaagcccggccagcagccaaagctgctgatctacaagaccagcaacctggcctctggcgtgccagccagattttctggctctggcagcggcaccgacttcaccctgaccattgatcccgtggaagccgacgacaccgccacctacttttgtcagcagtcctggaacggccctctgacatttggaagcggcaccaagctggaaatcaagagactcgaggacctgaagaacgtgttcccacctgaggtggccgtgttcgagcctagcaaggccgagatcgcccacacccagaaagccaccctcgtgtgcctggctaccggcttctaccccgaccatgtggaactgtcttggtgggtcaacggcaaagaggtgcacagcggcgtgtgtaccgacccccagccactgaaagaacagcccgccctgaacgacagccggtactgcctgagcagcagactgagagtgtccgccaccttctggcagaacccccggaaccacttcagatgccaggtgcagttctacggcctgagcgagaacgacgagtggacccaggacagagccaagcccgtgacccagatcgtgtctgccgaagcctggggcagagccgattgcggcatcaccagcgccagctaccaccagggcgtgctgagcgccaccatcctgtacgagatcctgctgggcaaggccaccctgtacgccgtgctggtgtctgccctggtgctgatggctatggtcaagcggaaggacagccggggaagggccaagcgatctggatctggagcaacaaacttctcactactcaaacaagcaggtgacgtggaggagaatcccgggcctactagtatggactggatttggcgcatccttttccttgtcggcgctgctaccggcgcgcattccttcgaacaggtgcagctgaaagagtctggccctggactggtgcagcctagccaaacactgagcctgacctgtaccgtgtctggcctgtctctgaccagcaatggcgtgtcctggatcagacagcctcctggcaaaggactggaatggctgggcgtgatctggtccaatggcggcacagactacaacagcgccatcaagagccggctgagcttcagcagagacaccagcaagagccaggtgttcctgaagatgaacagcctccagaccgaggataccgccatgtacttttgcgccagacctcggtacaactccggctacttcttcgactattggggccagggcgtgatggtcaccgttagctctacgcgtatccagaaccctgatcctgccgtgtaccagctgcgggatagcaagagcagcgacaagagcgtgtgtctgttcaccgacttcgacagccagaccaacgtgtcccagagcaaggactccgacgtgtacatcaccgataagtgcgtgctggacatgcggagcatggacttcaagagcaactccgccgtggcctggtccaacaagtccgatttcgcctgcgccaacgccttcaacaacagcattatccccgaggacacattcttcccaagcagcgacgtgccctgcgacgtgaagctggtggaaaagagcttcgagacagacaccaacctgaacttccagaacctgagcgtgatcggcttcagaatcctgctgctgaaagtggccggctttaacctgctgatgaccctgcggctgtggtccagccgcgccaagagaagcggatctggcgtgaagcagaccctgaatttcgacctgctgaagctggctggcgacgtggaatccaacccaggcccttctagaggccatatgaccgagtacaagcccacggtgcgcctcgccacccgcgacgacgtccccagggccgtacgcaccctcgccgccgcgttcgccgactaccccgccacgcgccacaccgtcgatccggaccgccacatcgagcgggtcaccgagctgcaagaactcttcctcacgcgcgtcgggctcgacatcggcaaggtgtgggtcgcggacgacggcgccgcggtggcggtctggaccacgccggagagcgtcgaagcgggggcggtgttcgccgagatcggcccgcgcatggccgagttgagcggttcccggctggccgcgcagcaacagatggaaggcctcctggcgccgcaccggcccaaggagcccgcgtggttcctggccaccgtcggcgtctcgcccgaccaccagggcaagggtctgggcagcgccgtcgtgctccccggagtggaggcggccgagcgcgccggggtgcccgccttcctggagacctccgcgccccgcaacctccccttctacgagcggctcggcttcaccgtcaccgccgacgtcgaggtgcccgaaggaccgcgcacctggtgcatgacccgcaagcccggtgcctga

SEQ ID NO: 9418 - DNA, 1857 bp, Artificial Sequence
  Synthetic Polynucloetide
atggccttaccagtgaccgccttgctcctgccgctggccttgctgctccacgccgccaggccggacacagtgctgacacagtctccagctctggctgtgtctcctggcgagagagtgaccatctcttgcaaggccagcgagagcgtgtccaccagaatgcactggtacagacagaagcccggccagcagccaaagctgctgatctacaagaccagcaacctggcctctggcgtgccagccagattttctggctctggcagcggcaccgacttcaccctgaccattgatcccgtggaagccgacgacaccgccacctacttttgtcagcagtcctggaacggccctctgacatttggaagcggcaccaagctggaaatcaagagactcgaggacctgaagaacgtgttcccacctgaggtggccgtgttcgagcctagcgaggccgagatcagccacacccagaaagccaccctcgtgtgcctggctaccggcttctaccccgaccatgtggaactgtcttggtgggtcaacggcaaagaggtgcacagcggcgtgtgtaccgacccccagccactgaaagaacagcccgccctgaacgacagccggtactgcctgagcagcagactgagagtgtccgccaccttctggcagaacccccggaaccacttcagatgccaggtgcagttctacggcctgagcgagaacgacgagtggacccaggacagagccaagcccgtgacccagatcgtgtctgccgaagcctggggcagagccgattgcggctttaccagcgagagctaccagcagggcgtgctgagcgccaccatcctgtacgagatcctgctgggcaaggccaccctgtacgccgtgctggtgtctgccctggtgctgatggctatggtcaagcggaaggacagccggggaagggccaagcgatctggatctggagcaacaaacttctcactactcaaacaagcaggtgacgtggaggagaatcccgggcctactagtatggactggatttggcgcatccttttccttgtcggcgctgctaccggcgcgcattccttcgaacaggtgcagctgaaagagtctggccctggactggtgcagcctagccaaacactgagcctgacctgtaccgtgtctggcctgtctctgaccagcaatggcgtgtcctggatcagacagcctcctggcaaaggactggaatggctgggcgtgatctggtccaatggcggcacagactacaacagcgccatcaagagccggctgagcttcagcagagacaccagcaagagccaggtgttcctgaagatgaacagcctccagaccgaggataccgccatgtacttttgcgccagacctcggtacaactccggctacttcttcgactattggggccagggcgtgatggtcaccgttagctctacgcgtatccagaaccctgatcctgccgtgtaccagctgcgggatagcaagagcagcgacaagagcgtgtgtctgttcaccgacttcgacagccagaccaacgtgtcccagagcaaggactccgacgtgtacatcaccgataagtgcgtgctggacatgcggagcatggacttcaagagcaactccgccgtggcctggtccaacaagtccgatttcgcctgcgccaacgccttcaacaacagcattatccccgaggacacattcttcccaagccccgagagcagctgcgacgtgaagctggtggaaaagagcttcgagacagacaccaacctgaacttccagaacctgagcgtgatcggcttcagaatcctgctgctgaaagtggccggctttaacctgctgatgaccctgcggctgtggtccagc

SEQ ID NO: 9419 - DNA, 2532 bp, Artificial Sequence
  Synthetic Polynucloetide
atggccttaccagtgaccgccttgctcctgccgctggccttgctgctccacgccgccaggccggacacagtgctgacacagtctccagctctggctgtgtctcctggcgagagagtgaccatctcttgcaaggccagcgagagcgtgtccaccagaatgcactggtacagacagaagcccggccagcagccaaagctgctgatctacaagaccagcaacctggcctctggcgtgccagccagattttctggctctggcagcggcaccgacttcaccctgaccattgatcccgtggaagccgacgacaccgccacctacttttgtcagcagtcctggaacggccctctgacatttggaagcggcaccaagctggaaatcaagagactcgaggacctgaagaacgtgttcccacctgaggtggccgtgttcgagcctagcgaggccgagatcagccacacccagaaagccaccctcgtgtgcctggctaccggcttctaccccgaccatgtggaactgtcttggtgggtcaacggcaaagaggtgcacagcggcgtgtgtaccgacccccagccactgaaagaacagcccgccctgaacgacagccggtactgcctgagcagcagactgagagtgtccgccaccttctggcagaacccccggaaccacttcagatgccaggtgcagttctacggcctgagcgagaacgacgagtggacccaggacagagccaagcccgtgacccagatcgtgtctgccgaagcctggggcagagccgattgcggctttaccagcgagagctaccagcagggcgtgctgagcgccaccatcctgtacgagatcctgctgggcaaggccaccctgtacgccgtgctggtgtctgccctggtgctgatggctatggtcaagcggaaggacagccggggaagggccaagcgatctggatctggagcaacaaacttctcactactcaaacaagcaggtgacgtggaggagaatcccgggcctactagtatggactggatttggcgcatccttttccttgtcggcgctgctaccggcgcgcattccttcgaacaggtgcagctgaaagagtctggccctggactggtgcagcctagccaaacactgagcctgacctgtaccgtgtctggcctgtctctgaccagcaatggcgtgtcctggatcagacagcctcctggcaaaggactggaatggctgggcgtgatctggtccaatggcggcacagactacaacagcgccatcaagagccggctgagcttcagcagagacaccagcaagagccaggtgttcctgaagatgaacagcctccagaccgaggataccgccatgtacttttgcgccagacctcggtacaactccggctacttcttcgactattggggccagggcgtgatggtcaccgttagctctacgcgtatccagaaccctgatcctgccgtgtaccagctgcgggatagcaagagcagcgacaagagcgtgtgtctgttcaccgacttcgacagccagaccaacgtgtcccagagcaaggactccgacgtgtacatcaccgataagtgcgtgctggacatgcggagcatggacttcaagagcaactccgccgtggcctggtccaacaagtccgatttcgcctgcgccaacgccttcaacaacagcattatccccgaggacacattcttcccaagccccgagagcagctgcgacgtgaagctggtggaaaagagcttcgagacagacaccaacctgaacttccagaacctgagcgtgatcggcttcagaatcctgctgctgaaagtggccggctttaacctgctgatgaccctgcggctgtggtccagccgcgccaagagaagcggatctggcgtgaagcagaccctgaatttcgacctgctgaagctggctggcgacgtggaatccaacccaggcccttctagaggcgggatccacaccatggctacctacgaggtgctgtgcgaggtggcaagaaagctgggcaccgacgacagagaagtggtgctgttcctgctgaacgtgttcatccctcagcctacactggcccagctgatcggtgcactgagagccctgaaagaggaaggccggctgacctttcctctgctggccgaatgcctgttcagagccggaagaagggatctgctgcgggacctgctgcatctggaccccagatttctggaaagacacctggccggcaccatgagctacttcagcccttaccagctgaccgtgctgcacgttgacggcgaactgtgcgccagagatattcggagcctgatcttcctgagcaaggacaccatcggcagccggtctacccctcagacatttctgcactgggtgtactgcatggaaaacctggacctgctcggccccacagatgtggatgccctgatgtccatgctgagaagcctgagcagagtggacctccagagacaggtgcagacactgatgggactgcacctgagcggacctagccacagccagcactacagacacacccct

SEQ ID NO: 9420 - DNA, 1869 bp, Artificial Sequence
  Synthetic Polynucloetide
atggccttaccagtgaccgccttgctcctgccgctggccttgctgctccacgccgccaggccggacacagtgctgacacagtctccagctctggctgtgtctcctggcgagagagtgaccatctcttgcaaggccagcgagagcgtgtccaccagaatgcactggtacagacagaagcccggccagcagccaaagctgctgatctacaagaccagcaacctggcctctggcgtgccagccagattttctggctctggcagcggcaccgacttcaccctgaccattgatcccgtggaagccgacgacaccgccacctacttttgtcagcagtcctggaacggccctctgacatttggaagcggcaccaagctggaaatcaagagactcgagatccagaaccctgatcctgccgtgtaccagctgcgggatagcaagagcagcgacaagagcgtgtgtctgttcaccgacttcgacagccagaccaacgtgtcccagagcaaggactccgacgtgtacatcaccgataagtgcgtgctggacatgcggagcatggacttcaagagcaactccgccgtggcctggtccaacaagtccgatttcgcctgcgccaacgccttcaacaacagcattatccccgaggacacattcttcccaagccccgagagcagctgcgacgtgaagctggtggaaaagagcttcgagacagacaccaacctgaacttccagaacctgagcgtgatcggcttcagaatcctgctgctgaaagtggccggctttaacctgctgatgaccctgcggctgtggtccagccgcgccaagagaagcggatctggcgtgaagcagaccctgaatttcgacctgctgaagctggctggcgacgtggaatccaacccaggccctactagtatggactggatttggcgcatccttttccttgtcggcgctgctaccggcgcgcattccttcgaacaggtgcagctgaaagagtctggccctggactggtgcagcctagccaaacactgagcctgacctgtaccgtgtctggcctgtctctgaccagcaatggcgtgtcctggatcagacagcctcctggcaaaggactggaatggctgggcgtgatctggtccaatggcggcacagactacaacagcgccatcaagagccggctgagcttcagcagagacaccagcaagagccaggtgttcctgaagatgaacagcctccagaccgaggataccgccatgtacttttgcgccagacctcggtacaactccggctacttcttcgactattggggccagggcgtgatggtcaccgttagctctacgcgtgaggacctgaagaacgtgttcccacctgaggtggccgtgttcgagcctagcgaggccgagatcagccacacccagaaagccaccctcgtgtgcctggctaccggcttctaccccgaccatgtggaactgtcttggtgggtcaacggcaaagaggtgcacagcggcgtgtgtaccgacccccagccactgaaagaacagcccgccctgaacgacagccggtactgcctgagcagcagactgagagtgtccgccaccttctggcagaacccccggaaccacttcagatgccaggtgcagttctacggcctgagcgagaacgacgagtggacccaggacagagccaagcccgtgacccagatcgtgtctgccgaagcctggggcagagccgattgcggctttaccagcgagagctaccagcagggcgtgctgagcgccaccatcctgtacgagatcctgctgggcaaggccaccctgtacgccgtgctggtgtctgccctggtgctgatggctatggtcaagcggaaggacagccgggga

SEQ ID NO: 9421 - DNA, 2535 bp, Artificial Sequence
  Synthetic Polynucloetide
atggccttaccagtgaccgccttgctcctgccgctggccttgctgctccacgccgccaggccggacacagtgctgacacagtctccagctctggctgtgtctcctggcgagagagtgaccatctcttgcaaggccagcgagagcgtgtccaccagaatgcactggtacagacagaagcccggccagcagccaaagctgctgatctacaagaccagcaacctggcctctggcgtgccagccagattttctggctctggcagcggcaccgacttcaccctgaccattgatcccgtggaagccgacgacaccgccacctacttttgtcagcagtcctggaacggccctctgacatttggaagcggcaccaagctggaaatcaagagactcgagatccagaaccctgatcctgccgtgtaccagctgcgggatagcaagagcagcgacaagagcgtgtgtctgttcaccgacttcgacagccagaccaacgtgtcccagagcaaggactccgacgtgtacatcaccgataagtgcgtgctggacatgcggagcatggacttcaagagcaactccgccgtggcctggtccaacaagtccgatttcgcctgcgccaacgccttcaacaacagcattatccccgaggacacattcttcccaagccccgagagcagctgcgacgtgaagctggtggaaaagagcttcgagacagacaccaacctgaacttccagaacctgagcgtgatcggcttcagaatcctgctgctgaaagtggccggctttaacctgctgatgaccctgcggctgtggtccagccgcgccaagagaagcggatctggcgtgaagcagaccctgaatttcgacctgctgaagctggctggcgacgtggaatccaacccaggccctactagtatggactggatttggcgcatccttttccttgtcggcgctgctaccggcgcgcattccttcgaacaggtgcagctgaaagagtctggccctggactggtgcagcctagccaaacactgagcctgacctgtaccgtgtctggcctgtctctgaccagcaatggcgtgtcctggatcagacagcctcctggcaaaggactggaatggctgggcgtgatctggtccaatggcggcacagactacaacagcgccatcaagagccggctgagcttcagcagagacaccagcaagagccaggtgttcctgaagatgaacagcctccagaccgaggataccgccatgtacttttgcgccagacctcggtacaactccggctacttcttcgactattggggccagggcgtgatggtcaccgttagctctacgcgtgaggacctgaagaacgtgttcccacctgaggtggccgtgttcgagcctagcgaggccgagatcagccacacccagaaagccaccctcgtgtgcctggctaccggcttctaccccgaccatgtggaactgtcttggtgggtcaacggcaaagaggtgcacagcggcgtgtgtaccgacccccagccactgaaagaacagcccgccctgaacgacagccggtactgcctgagcagcagactgagagtgtccgccaccttctggcagaacccccggaaccacttcagatgccaggtgcagttctacggcctgagcgagaacgacgagtggacccaggacagagccaagcccgtgacccagatcgtgtctgccgaagcctggggcagagccgattgcggctttaccagcgagagctaccagcagggcgtgctgagcgccaccatcctgtacgagatcctgctgggcaaggccaccctgtacgccgtgctggtgtctgccctggtgctgatggctatggtcaagcggaaggacagccggggaagggccaagcgatctggatctggagcaacaaacttctcactactcaaacaagcaggtgacgtggaggagaatcccgggccttctagaggcgggatccacaccatggctacctacgaggtgctgtgcgaggtggcaagaaagctgggcaccgacgacagagaagtggtgctgttcctgctgaacgtgttcatccctcagcctacactggcccagctgatcggtgcactgagagccctgaaagaggaaggccggctgacctttcctctgctggccgaatgcctgttcagagccggaagaagggatctgctgcgggacctgctgcatctggaccccagatttctggaaagacacctggccggcaccatgagctacttcagcccttaccagctgaccgtgctgcacgttgacggcgaactgtgcgccagagatattcggagcctgatcttcctgagcaaggacaccatcggcagccggtctacccctcagacatttctgcactgggtgtactgcatggaaaacctggacctgctcggccccacagatgtggatgccctgatgtccatgctgagaagcctgagcagagtggacctccagagacaggtgcagacactgatgggactgcacctgagcggacctagccacagccagcactacagacacacccct

SEQ ID NO: 9422 - DNA, 2694 bp, Artificial Sequence
  Synthetic Polynucloetide
atggccttaccagtgaccgccttgctcctgccgctggccttgctgctccacgccgccaggccgctcgaggggaaaccaattcccaaccctcttctgggactggattcaaccggcagcggcgaggacctgaagaacgtgttcccacctgaggtggccgtgttcgagcctagcaaggccgagatcgcccacacccagaaagccaccctcgtgtgcctggctaccggcttctaccccgaccatgtggaactgtcttggtgggtcaacggcaaagaggtgcacagcggcgtgtgtaccgacccccagccactgaaagaacagcccgccctgaacgacagccggtactgcctgagcagcagactgagagtgtccgccaccttctggcagaacccccggaaccacttcagatgccaggtgcagttctacggcctgagcgagaacgacgagtggacccaggacagagccaagcccgtgacccagatcgtgtctgccgaagcctggggcagagccgattgcggcatcaccagcgccagctaccaccagggcgtgctgagcgccaccatcctgtacgagatcctgctgggcaaggccaccctgtacgccgtgctggtgtctgccctggtgctgatggctatggtcaagcggaaggacagccggggaagggccaagcgatctggatctggagcaacaaacttctcactactcaaacaagcaggtgacgtggaggagaatcccgggcctactagcatggccttaccagtgaccgccttgctcctgccgctggccttgctgctccacgccgccaggccggacacagtgctgacacagtctccagctctggctgtgtctcctggcgagagagtgaccatctcttgcaaggccagcgagagcgtgtccaccagaatgcactggtacagacagaagcccggccagcagccaaagctgctgatctacaagaccagcaacctggcctctggcgtgccagccagattttctggctctggcagcggcaccgacttcaccctgaccattgatcccgtggaagccgacgacaccgccacctacttttgtcagcagtcctggaacggccctctgacatttggaagcggcaccaagctggaaatcaagagaggcggaggcggaagtggaggcggaggatctggcggcggaggctctcaggtgcagctgaaagagtctggccctggactggtgcagcctagccaaacactgagcctgacctgtaccgtgtctggcctgtctctgaccagcaatggcgtgtcctggatcagacagcctcctggcaaaggactggaatggctgggcgtgatctggtccaatggcggcacagactacaacagcgccatcaagagccggctgagcttcagcagagacaccagcaagagccaggtgttcctgaagatgaacagcctccagaccgaggataccgccatgtacttttgcgccagacctcggtacaactccggctacttcttcgactattggggccagggcgtgatggtcaccgttagctctacgcgtgagcagaaactgatctcggaagaggatgggagcggcatccagaaccctgatcctgccgtgtaccagctgcgggatagcaagagcagcgacaagagcgtgtgtctgttcaccgacttcgacagccagaccaacgtgtcccagagcaaggactccgacgtgtacatcaccgataagtgcgtgctggacatgcggagcatggacttcaagagcaactccgccgtggcctggtccaacaagtccgatttcgcctgcgccaacgccttcaacaacagcattatccccgaggacacattcttcccaagcagcgacgtgccctgcgacgtgaagctggtggaaaagagcttcgagacagacaccaacctgaacttccagaacctgagcgtgatcggcttcagaatcctgctgctgaaagtggccggctttaacctgctgatgaccctgcggctgtggtccagccgcgccaagagaagcggatctggcgtgaagcagaccctgaatttcgacctgctgaagctggctggcgacgtggaatccaacccaggcccttctagaggccatatgaccgagtacaagcccacggtgcgcctcgccacccgcgacgacgtccccagggccgtacgcaccctcgccgccgcgttcgccgactaccccgccacgcgccacaccgtcgatccggaccgccacatcgagcgggtcaccgagctgcaagaactcttcctcacgcgcgtcgggctcgacatcggcaaggtgtgggtcgcggacgacggcgccgcggtggcggtctggaccacgccggagagcgtcgaagcgggggcggtgttcgccgagatcggcccgcgcatggccgagttgagcggttcccggctggccgcgcagcaacagatggaaggcctcctggcgccgcaccggcccaaggagcccgcgtggttcctggccaccgtcggcgtctcgcccgaccaccagggcaagggtctgggcagcgccgtcgtgctccccggagtggaggcggccgagcgcgccggggtgcccgccttcctggagacctccgcgccccgcaacctccccttctacgagcggctcggcttcaccgtcaccgccgacgtcgaggtgcccgaaggaccgcgcacctggtgcatgacccgcaagcccggtgcctga

SEQ ID NO: 9423 - DNA, 2697 bp, Artificial Sequence
  Synthetic Polynucloetide
atggccttaccagtgaccgccttgctcctgccgctggccttgctgctccacgccgccaggccgctcgagcagaaactgatctcggaagaggatctgggctccggcgatcgccctgatcctgccgtgtaccagctgcgggatagcaagagcagcgacaagagcgtgtgtctgttcaccgacttcgacagccagaccaacgtgtcccagagcaaggactccgacgtgtacatcaccgataagtgcgtgctggacatgcggagcatggacttcaagagcaactccgccgtggcctggtccaacaagtccgatttcgcctgcgccaacgccttcaacaacagcattatccccgaggacacattcttcccaagccccgagagcagctgcgacgtgaagctggtggaaaagagcttcgagacagacaccaacctgaacttccagaacctgagcgtgatcggcttcagaatcctgctgctgaaagtggccggctttaacctgctgatgaccctgcggctgtggtccagctctagtcgcgccaagagaagcggatctggcgtgaagcagaccctgaatttcgacctgctgaagctggctggcgacgtggaatccaacccaggccccactagcatggccttaccagtgaccgccttgctcctgccgctggccttgctgctccacgccgccaggccggacacagtgctgacacagtctccagctctggctgtgtctcctggcgagagagtgaccatctcttgcaaggccagcgagagcgtgtccaccagaatgcactggtacagacagaagcccggccagcagccaaagctgctgatctacaagaccagcaacctggcctctggcgtgccagccagattttctggctctggcagcggcaccgacttcaccctgaccattgatcccgtggaagccgacgacaccgccacctacttttgtcagcagtcctggaacggccctctgacatttggaagcggcaccaagctggaaatcaagagaggcggaggcggaagtggaggcggaggatctggcggcggaggctctcaggtgcagctgaaagagtctggccctggactggtgcagcctagccaaacactgagcctgacctgtaccgtgtctggcctgtctctgaccagcaatggcgtgtcctggatcagacagcctcctggcaaaggactggaatggctgggcgtgatctggtccaatggcggcacagactacaacagcgccatcaagagccggctgagcttcagcagagacaccagcaagagccaggtgttcctgaagatgaacagcctccagaccgaggataccgccatgtacttttgcgccagacctcggtacaactccggctacttcttcgactattggggccagggcgtgatggtcaccgttagctctacgcgtgggaaaccaattcccaaccctcttctgggactggattcaaccggcagcggcgaggacctgaagaacgtgttcccacctgaggtggccgtgttcgagcctagcgaggccgagatcagccacacccagaaagccaccctcgtgtgcctggctaccggcttctaccccgaccatgtggaactgtcttggtgggtcaacggcaaagaggtgcacagcggcgtgtgtaccgacccccagccactgaaagaacagcccgccctgaacgacagccggtactgcctgagcagcagactgagagtgtccgccaccttctggcagaacccccggaaccacttcagatgccaggtgcagttctacggcctgagcgagaacgacgagtggacccaggacagagccaagcccgtgacccagatcgtgtctgccgaagcctggggcagagccgattgcggctttaccagcgagagctaccagcagggcgtgctgagcgccaccatcctgtacgagatcctgctgggcaaggccaccctgtacgccgtgctggtgtctgccctggtgctgatggctatggtcaagcggaaggacagccggggaagggccaagcgatctggatctggagcaacaaacttctcactactcaaacaagcaggtgacgtggaggagaatcccgggccttctagaggccatatgaccgagtacaagcccacggtgcgcctcgccacccgcgacgacgtccccagggccgtacgcaccctcgccgccgcgttcgccgactaccccgccacgcgccacaccgtcgatccggaccgccacatcgagcgggtcaccgagctgcaagaactcttcctcacgcgcgtcgggctcgacatcggcaaggtgtgggtcgcggacgacggcgccgcggtggcggtctggaccacgccggagagcgtcgaagcgggggcggtgttcgccgagatcggcccgcgcatggccgagttgagcggttcccggctggccgcgcagcaacagatggaaggcctcctggcgccgcaccggcccaaggagcccgcgtggttcctggccaccgtcggcgtctcgcccgaccaccagggcaagggtctgggcagcgccgtcgtgctccccggagtggaggcggccgagcgcgccggggtgcccgccttcctggagacctccgcgccccgcaacctccccttctacgagcggctcggcttcaccgtcaccgccgacgtcgaggtgcccgaaggaccgcgcacctggtgcatgacccgcaagcccggtgcctga

SEQ ID NO: 9424 - DNA, 2559 bp, Artificial Sequence
  Synthetic Polynucloetide
atggccttaccagtgaccgccttgctcctgccgctggccttgctgctccacgccgccaggccggacacagtgctgacacagtctccagctctggctgtgtctcctggcgagagagtgaccatctcttgcaaggccagcgagagcgtgtccaccagaatgcactggtacagacagaagcccggccagcagccaaagctgctgatctacaagaccagcaacctggcctctggcgtgccagccagattttctggctctggcagcggcaccgacttcaccctgaccattgatcccgtggaagccgacgacaccgccacctacttttgtcagcagtcctggaacggccctctgacatttggaagcggcaccaagctggaaatcaagagactcgaggacctgaagaacgtgttcccacctgaggtggccgtgttcgagcctagcgaggccgagatcagccacacccagaaagccaccctcgtgtgcctggctaccggcttctaccccgaccatgtggaactgtcttggtgggtcaacggcaaagaggtgcacagcggcgtgtctaccgacccccagccactgaaagaacagcccgccctgaacgacagccggtactgcctgagcagcagactgagagtgtccgccaccttctggcagaacccccggaaccacttcagatgccaggtgcagttctacggcctgagcgagaacgacgagtggacccaggacagagccaagcccgtgacccagatcgtgtctgccgaagcctggggcagagccgattgcggctttaccagcgagagctaccagcagggcgtgctgagcgccaccatcctgtacgagatcctgctgggcaaggccaccctgtacgccgtgctggtgtctgccctggtgctgatggctatggtcaagcggaaggacagccggggaagggccaagcgatctggatctggagcaacaaacttctcactactcaaacaagcaggtgacgtggaggagaatcccgggcctactagtatggactggatttggcgcatccttttccttgtcggcgctgctaccggcgcgcattccttcgaacaggtgcagctgaaagagtctggccctggactggtgcagcctagccaaacactgagcctgacctgtaccgtgtctggcctgtctctgaccagcaatggcgtgtcctggatcagacagcctcctggcaaaggactggaatggctgggcgtgatctggtccaatggcggcacagactacaacagcgccatcaagagccggctgagcttcagcagagacaccagcaagagccaggtgttcctgaagatgaacagcctccagaccgaggataccgccatgtacttttgcgccagacctcggtacaactccggctacttcttcgactattggggccagggcgtgatggtcaccgttagctctacgcgtatccagaaccctgatcctgccgtgtaccagctgcgggatagcaagagcagcgacaagagcgtgtgtctgttcaccgacttcgacagccagaccaacgtgtcccagagcaaggactccgacgtgtacatcaccgataagaccgtgctggacatgcggagcatggacttcaagagcaactccgccgtggcctggtccaacaagtccgatttcgcctgcgccaacgccttcaacaacagcattatccccgaggacacattcttcccaagccccgagagcagctgcgacgtgaagctggtggaaaagagcttcgagacagacaccaacctgaacttccagaacctgagcgtgatcggcttcagaatcctgctgctgaaagtggccggctttaacctgctgatgaccctgcggctgtggtccagccgcgccaagagaagcggatctggcgtgaagcagaccctgaatttcgacctgctgaagctggctggcgacgtggaatccaacccaggcccttctagaggccatatgaccgagtacaagcccacggtgcgcctcgccacccgcgacgacgtccccagggccgtacgcaccctcgccgccgcgttcgccgactaccccgccacgcgccacaccgtcgatccggaccgccacatcgagcgggtcaccgagctgcaagaactcttcctcacgcgcgtcgggctcgacatcggcaaggtgtgggtcgcggacgacggcgccgcggtggcggtctggaccacgccggagagcgtcgaagcgggggcggtgttcgccgagatcggcccgcgcatggccgagttgagcggttcccggctggccgcgcagcaacagatggaaggcctcctggcgccgcaccggcccaaggagcccgcgtggttcctggccaccgtcggcgtctcgcccgaccaccagggcaagggtctgggcagcgccgtcgtgctccccggagtggaggcggccgagcgcgccggggtgcccgccttcctggagacctccgcgccccgcaacctccccttctacgagcggctcggcttcaccgtcaccgccgacgtcgaggtgcccgaaggaccgcgcacctggtgcatgacccgcaagcccggtgcctga

SEQ ID NO: 9425 - DNA, 2805 bp, Artificial Sequence
  Synthetic Polynucloetide
atggccttaccagtgaccgccttgctcctgccgctggccttgctgctccacgccgccaggccggacacagtgctgacacagtctccagctctggctgtgtctcctggcgagagagtgaccatctcttgcaaggccagcgagagcgtgtccaccagaatgcactggtacagacagaagcccggccagcagccaaagctgctgatctacaagaccagcaacctggcctctggcgtgccagccagattttctggctctggcagcggcaccgacttcaccctgaccattgatcccgtggaagccgacgacaccgccacctacttttgtcagcagtcctggaacggccctctgacatttggaagcggcaccaagctggaaatcaagagactcgaggacctgaagaacgtgttcccacctgaggtggccgtgttcgagcctagcgaggccgagatcagccacacccagaaagccaccctcgtgtgcctggctaccggcttctaccccgaccatgtggaactgtcttggtgggtcaacggcaaagaggtgcacagcggcgtgtctaccgacccccagccactgaaagaacagcccgccctgaacgacagccggtactgcctgagcagcagactgagagtgtccgccaccttctggcagaacccccggaaccacttcagatgccaggtgcagttctacggcctgagcgagaacgacgagtggacccaggacagagccaagcccgtgacccagatcgtgtctgccgaagcctggggcagagccgattgcggctttaccagcgagagctaccagcagggcgtgctgagcgccaccatcctgtacgagatcctgctgggcaaggccaccctgtacgccgtgctggtgtctgccctggtgctgatggctatggtcaagcggaaggacagccggggaagggccaagcgatctggatctggagcaacaaacttctcactactcaaacaagcaggtgacgtggaggagaatcccgggcctactagtatggactggatttggcgcatccttttccttgtcggcgctgctaccggcgcgcattccttcgaacaggtgcagctgaaagagtctggccctggactggtgcagcctagccaaacactgagcctgacctgtaccgtgtctggcctgtctctgaccagcaatggcgtgtcctggatcagacagcctcctggcaaaggactggaatggctgggcgtgatctggtccaatggcggcacagactacaacagcgccatcaagagccggctgagcttcagcagagacaccagcaagagccaggtgttcctgaagatgaacagcctccagaccgaggataccgccatgtacttttgcgccagacctcggtacaactccggctacttcttcgactattggggccagggcgtgatggtcaccgttagctctacgcgtgagcagaaactgatctcggaagaggatgggagcggcaccccattcccttctctggcccctcccatcatgctgctggtggacggcaagcagcagatggtggtcgtgtgcctggtgctggatgtggccccacctggactggacagccccatctggtttagcgccggcaatggctctgccctggacgcctttacctacggcccaagccctgccaccgatggcacctggacaaatctggcccacctgagcctgcccagcgaggaactggcttcttgggagcctctcgtgtgccacacaggacctggcgctgagggacacagcagatccacccagcctatgcacctgtctggcgaggccagcaccgccagaacctgtcctcaggaacctctgagaggcacccctggcggagcactgtggctgggagtgctgagactgctgctgttcaagctgctgctgtttgacctgctgctgacctgctcctgtctgtgcgatcctgccggccctctgccttctcctgccaccaccacaagactgagagccctgggcagccacagactgcaccctgccacagagacaggcggcagagaggccacaagcagccctagaccccagcccagagacagaagatggggcgataccccccctggcagaaagcctggatctccagtccgcgccaagagaagcggatctggcgtgaagcagaccctgaatttcgacctgctgaagctggctggcgacgtggaatccaacccaggcccttctagaggccatatgaccgagtacaagcccacggtgcgcctcgccacccgcgacgacgtccccagggccgtacgcaccctcgccgccgcgttcgccgactaccccgccacgcgccacaccgtcgatccggaccgccacatcgagcgggtcaccgagctgcaagaactcttcctcacgcgcgtcgggctcgacatcggcaaggtgtgggtcgcggacgacggcgccgcggtggcggtctggaccacgccggagagcgtcgaagcgggggcggtgttcgccgagatcggcccgcgcatggccgagttgagcggttcccggctggccgcgcagcaacagatggaaggcctcctggcgccgcaccggcccaaggagcccgcgtggttcctggccaccgtcggcgtctcgcccgaccaccagggcaagggtctgggcagcgccgtcgtgctccccggagtggaggcggccgagcgcgccggggtgcccgccttcctggagacctccgcgccccgcaacctccccttctacgagcggctcggcttcaccgtcaccgccgacgtcgaggtgcccgaaggaccgcgcacctggtgcatgacccgcaagcccggtgcctga

SEQ ID NO: 9426 - DNA, 2859 bp, Artificial Sequence
  Synthetic Polynucloetide
atggccttaccagtgaccgccttgctcctgccgctggccttgctgctccacgccgccaggccgctcgaggacctgaagaacgtgttcccacctgaggtggccgtgttcgagcctagcgaggccgagatcagccacacccagaaagccaccctcgtgtgcctggctaccggcttctaccccgaccatgtggaactgtcttggtgggtcaacggcaaagaggtgcacagcggcgtgtctaccgacccccagccactgaaagaacagcccgccctgaacgacagccggtactgcctgagcagcagactgagagtgtccgccaccttctggcagaacccccggaaccacttcagatgccaggtgcagttctacggcctgagcgagaacgacgagtggacccaggacagagccaagcccgtgacccagatcgtgtctgccgaagcctggggcagagccgattgcggctttaccagcgagagctaccagcagggcgtgctgagcgccaccatcctgtacgagatcctgctgggcaaggccaccctgtacgccgtgctggtgtctgccctggtgctgatggctatggtcaagcggaaggacagccggggaagggccaagcgatctggatctggagcaacaaacttctcactactcaaacaagcaggtgacgtggaggagaatcccgggcctactagcatggccttaccagtgaccgccttgctcctgccgctggccttgctgctccacgccgccaggccggacacagtgctgacacagtctccagctctggctgtgtctcctggcgagagagtgaccatctcttgcaaggccagcgagagcgtgtccaccagaatgcactggtacagacagaagcccggccagcagccaaagctgctgatctacaagaccagcaacctggcctctggcgtgccagccagattttctggctctggcagcggcaccgacttcaccctgaccattgatcccgtggaagccgacgacaccgccacctacttttgtcagcagtcctggaacggccctctgacatttggaagcggcaccaagctggaaatcaagagaggcggaggcggaagtggaggcggaggatctggcggcggaggctctcaggtgcagctgaaagagtctggccctggactggtgcagcctagccaaacactgagcctgacctgtaccgtgtctggcctgtctctgaccagcaatggcgtgtcctggatcagacagcctcctggcaaaggactggaatggctgggcgtgatctggtccaatggcggcacagactacaacagcgccatcaagagccggctgagcttcagcagagacaccagcaagagccaggtgttcctgaagatgaacagcctccagaccgaggataccgccatgtacttttgcgccagacctcggtacaactccggctacttcttcgactattggggccagggcgtgatggtcaccgttagctctacgcgtgagcagaaactgatctcggaagaggatctggggagcggcaccccattcccttctctggcccctcccatcatgctgctggtggacggcaagcagcagatggtggtcgtgtgcctggtgctggatgtggccccacctggactggacagccccatctggtttagcgccggcaatggctctgccctggacgcctttacctacggcccaagccctgccaccgatggcacctggacaaatctggcccacctgagcctgcccagcgaggaactggcttcttgggagcctctcgtgtgccacacaggacctggcgctgagggacacagcagatccacccagcctatgcacctgtctggcgaggccagcaccgccagaacctgtcctcaggaacctctgagaggcacccctggcggagcactgtggctgggagtgctgagactgctgctgttcaagctgctgctgtttgacctgctgctgacctgctcctgtctgtgcgatcctgccggccctctgccttctcctgccaccaccacaagactgagagccctgggcagccacagactgcaccctgccacagagacaggcggcagagaggccacaagcagccctagaccccagcccagagacagaagatggggcgataccccccctggcagaaagcctggatctccagtccgcgccaagagaagcggatctggcgtgaagcagaccctgaatttcgacctgctgaagctggctggcgacgtggaatccaacccaggcccttctagatctagaggccatatgaccgagtacaagcccacggtgcgcctcgccacccgcgacgacgtccccagggccgtacgcaccctcgccgccgcgttcgccgactaccccgccacgcgccacaccgtcgatccggaccgccacatcgagcgggtcaccgagctgcaagaactcttcctcacgcgcgtcgggctcgacatcggcaaggtgtgggtcgcggacgacggcgccgcggtggcggtctggaccacgccggagagcgtcgaagcgggggcggtgttcgccgagatcggcccgcgcatggccgagttgagcggttcccggctggccgcgcagcaacagatggaaggcctcctggcgccgcaccggcccaaggagcccgcgtggttcctggccaccgtcggcgtctcgcccgaccaccagggcaagggtctgggcagcgccgtcgtgctccccggagtggaggcggccgagcgcgccggggtgcccgccttcctggagacctccgcgccccgcaacctccccttctacgagcggctcggcttcaccgtcaccgccgacgtcgaggtgcccgaaggaccgcgcacctggtgcatgacccgcaagcccggtgcctga

SEQ ID NO: 9427 - DNA, 2670 bp, Artificial Sequence
  Synthetic Polynucloetide
atggccttaccagtgaccgccttgctcctgccgctggccttgctgctccacgccgccaggccggacacagtgctgacacagtctccagctctggctgtgtctcctggcgagagagtgaccatctcttgcaaggccagcgagagcgtgtccaccagaatgcactggtacagacagaagcccggccagcagccaaagctgctgatctacaagaccagcaacctggcctctggcgtgccagccagattttctggctctggcagcggcaccgacttcaccctgaccattgatcccgtggaagccgacgacaccgccacctacttttgtcagcagtcctggaacggccctctgacatttggaagcggcaccaagctggaaatcaagagactcgaggggaaaccaattcccaaccctcttctgggactggattcaaccggcagcggcgacaagcagctggacgccgacgtgtcccccaagcctaccatcttcctgccctctatcgccgagacaaagctccagaaggccggcacctacctgtgcctgctggaaaagttcttcccagatgtgattaagatccactggcaggaaaagaagtccaacaccatcctgggcagccaggaaggcaacaccatgaagaccaacgacacctacatgaagttcagctggctgaccgtgcccgagaagtccctggacaaagaacacagatgcatcgtgcggcacgaaaacaacaagaacggcgtggaccaggaaatcatcttcccacccatcaagaccgatgtgattacaatggaccccaaggacaactgctccaaggacgccaacgataccctgctgctccagctgaccaacaccagcgcctactacatgtacttgttgctgctgctgaagtccgtggtgtacttcgccatcatcacatgctgcctgctgcggagaaccgccttctgctgcaacggcgagaagtctagggccaagcgatctggatctggagcaacaaacttctcactactcaaacaagcaggtgacgtggaggagaatcccgggcctactagtatggactggatttggcgcatccttttccttgtcggcgctgctaccggcgcgcattccttcgaacaggtgcagctgaaagagtctggccctggactggtgcagcctagccaaacactgagcctgacctgtaccgtgtctggcctgtctctgaccagcaatggcgtgtcctggatcagacagcctcctggcaaaggactggaatggctgggcgtgatctggtccaatggcggcacagactacaacagcgccatcaagagccggctgagcttcagcagagacaccagcaagagccaggtgttcctgaagatgaacagcctccagaccgaggataccgccatgtacttttgcgccagacctcggtacaactccggctacttcttcgactattggggccagggcgtgatggtcaccgttagctctacgcgtgagcagaaactgatctcggaagaggatgggagcggcagccagcctcacaccaagcccagcgtgttcgtgatgaagaacggcaccaacgtggcctgcctcgtgaaagagttctaccccaaggacatcaggatcaacctggtgtccagcaagaagatcaccgagttcgaccccgccatcgtgatctcccccagcggcaagtacaacgccgtgaagctggggaagtacgaggacagcaacagcgtgacctgctccgtgcagcacgacaacaagaccgtgcacagcaccgactttgaagtgaaaaccgactccaccgaccacgtgaagcccaaagagacagagaacaccaagcagcccagcaagagctgccacaagcccaaggccatcgtgcacaccgagaaagtgaacatgatgagcctgaccgtgctgggcctgcggatgctgttcgccaaaaccgtggccgtgaacttcctgctgaccgccaagctgttcttcctccgcgccaagagaagcggatctggcgtgaagcagaccctgaatttcgacctgctgaagctggctggcgacgtggaatccaacccaggcccttctagaggccatatgaccgagtacaagcccacggtgcgcctcgccacccgcgacgacgtccccagggccgtacgcaccctcgccgccgcgttcgccgactaccccgccacgcgccacaccgtcgatccggaccgccacatcgagcgggtcaccgagctgcaagaactcttcctcacgcgcgtcgggctcgacatcggcaaggtgtgggtcgcggacgacggcgccgcggtggcggtctggaccacgccggagagcgtcgaagcgggggcggtgttcgccgagatcggcccgcgcatggccgagttgagcggttcccggctggccgcgcagcaacagatggaaggcctcctggcgccgcaccggcccaaggagcccgcgtggttcctggccaccgtcggcgtctcgcccgaccaccagggcaagggtctgggcagcgccgtcgtgctccccggagtggaggcggccgagcgcgccggggtgcccgccttcctggagacctccgcgccccgcaacctccccttctacgagcggctcggcttcaccgtcaccgccgacgtcgaggtgcccgaaggaccgcgcacctggtgcatgacccgcaagcccggtgcctga

SEQ ID NO: 9428 - DNA, 1881 bp, Artificial Sequence
  Synthetic Polynucloetide
atggccttaccagtgaccgccttgctcctgccgctggccttgctgctccacgccgccaggccggacacagtgctgacacagtctccagctctggctgtgtctcctggcgagagagtgaccatctcttgcaaggccagcgagagcgtgtccaccagaatgcactggtacagacagaagcccggccagcagccaaagctgctgatctacaagaccagcaacctggcctctggcgtgccagccagattttctggctctggcagcggcaccgacttcaccctgaccattgatcccgtggaagccgacgacaccgccacctacttttgtcagcagtcctggaacggccctctgacatttggaagcggcaccaagctggaaatcaagagactcgagagccagcctcacaccaagcccagcgtgttcgtgatgaagaacggcaccaacgtggcctgcctcgtgaaagagttctaccccaaggacatcaggatcaacctggtgtccagcaagaagatcaccgagttcgaccccgccatcgtgatctcccccagcggcaagtacaacgccgtgaagctggggaagtacgaggacagcaacagcgtgacctgctccgtgcagcacgacaacaagaccgtgcacagcaccgactttgaagtgaaaaccgactccaccgaccacgtgaagcccaaagagacagagaacaccaagcagcccagcaagagctgccacaagcccaaggccatcgtgcacaccgagaaagtgaacatgatgagcctgaccgtgctgggcctgcggatgctgttcgccaaaaccgtggccgtgaacttcctgctgaccgccaagctgttcttcctcagggccaagcgatctggatctggagcaacaaacttctcactactcaaacaagcaggtgacgtggaggagaatcccgggcctactagtatggactggatttggcgcatccttttccttgtcggcgctgctaccggcgcgcattccttcgaacaggtgcagctgaaagagtctggccctggactggtgcagcctagccaaacactgagcctgacctgtaccgtgtctggcctgtctctgaccagcaatggcgtgtcctggatcagacagcctcctggcaaaggactggaatggctgggcgtgatctggtccaatggcggcacagactacaacagcgccatcaagagccggctgagcttcagcagagacaccagcaagagccaggtgttcctgaagatgaacagcctccagaccgaggataccgccatgtacttttgcgccagacctcggtacaactccggctacttcttcgactattggggccagggcgtgatggtcaccgttagctctacgcgtgacaagcagctggacgccgacgtgtcccccaagcctaccatcttcctgccctctatcgccgagacaaagctccagaaggccggcacctacctgtgcctgctggaaaagttcttcccagatgtgattaagatccactggcaggaaaagaagtccaacaccatcctgggcagccaggaaggcaacaccatgaagaccaacgacacctacatgaagttcagctggctgaccgtgcccgagaagtccctggacaaagaacacagatgcatcgtgcggcacgaaaacaacaagaacggcgtggaccaggaaatcatcttcccacccatcaagaccgatgtgattacaatggaccccaaggacaactgctccaaggacgccaacgataccctgctgctccagctgaccaacaccagcgcctactacatgtacttgttgctgctgctgaagtccgtggtgtacttcgccatcatcacatgctgcctgctgcggagaaccgccttctgctgcaacggcgagaagtct

SEQ ID NO: 9429 - DNA, 2715 bp, Artificial Sequence
  Synthetic Polynucloetide
atggccttaccagtgaccgccttgctcctgccgctggccttgctgctccacgccgccaggccgctcgaggggaaaccaattcccaaccctcttctgggactggattcaaccggcagcggcgacaagcagctggacgccgacgtgtcccccaagcctaccatcttcctgccctctatcgccgagacaaagctccagaaggccggcacctacctgtgcctgctggaaaagttcttcccagatgtgattaagatccactggcaggaaaagaagtccaacaccatcctgggcagccaggaaggcaacaccatgaagaccaacgacacctacatgaagttcagctggctgaccgtgcccgagaagtccctggacaaagaacacagatgcatcgtgcggcacgaaaacaacaagaacggcgtggaccaggaaatcatcttcccacccatcaagaccgatgtgattacaatggaccccaaggacaactgctccaaggacgccaacgataccctgctgctccagctgaccaacaccagcgcctactacatgtacttgttgctgctgctgaagtccgtggtgtacttcgccatcatcacatgctgcctgctgcggagaaccgccttctgctgcaacggcgagaagtctagggccaagcgatctggatctggagcaacaaacttctcactactcaaacaagcaggtgacgtggaggagaatcccgggcctactagcatggccttaccagtgaccgccttgctcctgccgctggccttgctgctccacgccgccaggccggacacagtgctgacacagtctccagctctggctgtgtctcctggcgagagagtgaccatctcttgcaaggccagcgagagcgtgtccaccagaatgcactggtacagacagaagcccggccagcagccaaagctgctgatctacaagaccagcaacctggcctctggcgtgccagccagattttctggctctggcagcggcaccgacttcaccctgaccattgatcccgtggaagccgacgacaccgccacctacttttgtcagcagtcctggaacggccctctgacatttggaagcggcaccaagctggaaatcaagagaggcggaggcggaagtggaggcggaggatctggcggcggaggctctcaggtgcagctgaaagagtctggccctggactggtgcagcctagccaaacactgagcctgacctgtaccgtgtctggcctgtctctgaccagcaatggcgtgtcctggatcagacagcctcctggcaaaggactggaatggctgggcgtgatctggtccaatggcggcacagactacaacagcgccatcaagagccggctgagcttcagcagagacaccagcaagagccaggtgttcctgaagatgaacagcctccagaccgaggataccgccatgtacttttgcgccagacctcggtacaactccggctacttcttcgactattggggccagggcgtgatggtcaccgttagctctacgcgtgagcagaaactgatctcggaagaggatgggagcggcagccagcctcacaccaagcccagcgtgttcgtgatgaagaacggcaccaacgtggcctgcctcgtgaaagagttctaccccaaggacatcaggatcaacctggtgtccagcaagaagatcaccgagttcgaccccgccatcgtgatctcccccagcggcaagtacaacgccgtgaagctggggaagtacgaggacagcaacagcgtgacctgctccgtgcagcacgacaacaagaccgtgcacagcaccgactttgaagtgaaaaccgactccaccgaccacgtgaagcccaaagagacagagaacaccaagcagcccagcaagagctgccacaagcccaaggccatcgtgcacaccgagaaagtgaacatgatgagcctgaccgtgctgggcctgcggatgctgttcgccaaaaccgtggccgtgaacttcctgctgaccgccaagctgttcttcctccgcgccaagagaagcggatctggcgtgaagcagaccctgaatttcgacctgctgaagctggctggcgacgtggaatccaacccaggcccttctagaggccatatgaccgagtacaagcccacggtgcgcctcgccacccgcgacgacgtccccagggccgtacgcaccctcgccgccgcgttcgccgactaccccgccacgcgccacaccgtcgatccggaccgccacatcgagcgggtcaccgagctgcaagaactcttcctcacgcgcgtcgggctcgacatcggcaaggtgtgggtcgcggacgacggcgccgcggtggcggtctggaccacgccggagagcgtcgaagcgggggcggtgttcgccgagatcggcccgcgcatggccgagttgagcggttcccggctggccgcgcagcaacagatggaaggcctcctggcgccgcaccggcccaaggagcccgcgtggttcctggccaccgtcggcgtctcgcccgaccaccagggcaagggtctgggcagcgccgtcgtgctccccggagtggaggcggccgagcgcgccggggtgcccgccttcctggagacctccgcgccccgcaacctccccttctacgagcggctcggcttcaccgtcaccgccgacgtcgaggtgcccgaaggaccgcgcacctggtgcatgacccgcaagcccggtgcctga

SEQ ID NO: 9430 - DNA, 3090 bp, Artificial Sequence
  Synthetic Polynucloetide
atggccttaccagtgaccgccttgctcctgccgctggccttgctgctccacgccgccaggccggacacagtgctgacacagtctccagctctggctgtgtctcctggcgagagagtgaccatctcttgcaaggccagcgagagcgtgtccaccagaatgcactggtacagacagaagcccggccagcagccaaagctgctgatctacaagaccagcaacctggcctctggcgtgccagccagattttctggctctggcagcggcaccgacttcaccctgaccattgatcccgtggaagccgacgacaccgccacctacttttgtcagcagtcctggaacggccctctgacatttggaagcggcaccaagctggaaatcaagagaggacagcctaaggccaatcctaccgtgacactgttccctccaagcagcgaagaactccaggccaacaaggccacacttgtgtgcctgatctccgacttctaccctggggctgtgacagtggcttggaaggccgatggatctcctgtgaaagccggcgtggaaaccaccaagccatccaagcagagcaacaacaaatacgccgccagctcctacctgagcctgacacctgagcagtggaagtcccacagatcctacagctgccaagtgacccacgaaggcagcaccgtggaaaagacagtggcccctacagagtgcagcggatcccagagcttcggcctgctggaccccaagctgtgctacctgctggatggcatcctgttcatctacggcgtgatcctgaccgccctgttcctgagagtgaagttcagcagaagcgccgacgcccctgcctaccagcagggacagaaccaactgtacaacgagctgaacctgggcagacgggaagagtacgacgtgctggacaagcggagaggcagggaccctgagatgggcggaaagccccagcggagaaagaacccccaggaaggactgtataacgaactccagaaagacaagatggccgaagcctacagcgagatcggcatgaagggcgagcggagaagaggcaagggccacgatggcctgtaccagggcctgagcaccgccaccaaggacacctatgacgccctgcacatgcaggccctgcctccaagaagggccaagcgatctggatctggagcaacaaacttctcactactcaaacaagcaggtgacgtggaggagaatcccgggcctactagtatggactggatttggcgcatccttttccttgtcggcgctgctaccggcgcgcattccttcgaacaggtgcagctgaaagagtctggccctggactggtgcagcctagccaaacactgagcctgacctgtaccgtgtctggcctgtctctgaccagcaatggcgtgtcctggatcagacagcctcctggcaaaggactggaatggctgggcgtgatctggtccaatggcggcacagactacaacagcgccatcaagagccggctgagcttcagcagagacaccagcaagagccaggtgttcctgaagatgaacagcctccagaccgaggataccgccatgtacttttgcgccagacctcggtacaactccggctacttcttcgactattggggccagggcgtgatggtcaccgttagctctgcctctacaaagggaccctccgtgtttcctctggctcccagcagcaagtctacaagcggaggaacagccgctctgggctgcctggtcaaggattactttcccgagcctgtgaccgtgtcctggaatagcggagcactgacaagcggcgtgcacacctttccagccgtgctgcaaagcagcggcctgtactctctgagcagcgtggtcacagtgcctagctctagcctgggcacccagacctacatctgcaatgtgaaccacaagcctagcaacaccaaggtggacaagagagtggaacccaagagctgtggtacccagagttttgggttgttggaccctaaattgtgctatctgttggacggaatcctgttcatttacggagtgatcctgaccgcattgttcctgcgggttaagttttccagatccgcagacgcacccgcttaccaacaagggcagaaccaactctacaatgaacttaatttggggcggagggaagagtacgacgttctggacaaaaggaggggacgagatcccgagatgggcggaaagcctcagcgaaggaagaatccgcaagaggggctttataacgaactccagaaagataaaatggcagaagcctatagtgagattgggatgaagggagaaaggaggaggggtaaaggtcacgatgggttgtaccaaggattgagcacagccactaaagatacctatgatgcgctccacatgcaggccctgccgccaagacgcgccaagagaagcggatctggcgtgaagcagaccctgaatttcgacctgctgaagctggctggcgacgtggaatccaacccaggcccttctagaggccatatgaccgagtacaagcccacggtgcgcctcgccacccgcgacgacgtccccagggccgtacgcaccctcgccgccgcgttcgccgactaccccgccacgcgccacaccgtcgatccggaccgccacatcgagcgggtcaccgagctgcaagaactcttcctcacgcgcgtcgggctcgacatcggcaaggtgtgggtcgcggacgacggcgccgcggtggcggtctggaccacgccggagagcgtcgaagcgggggcggtgttcgccgagatcggcccgcgcatggccgagttgagcggttcccggctggccgcgcagcaacagatggaaggcctcctggcgccgcaccggcccaaggagcccgcgtggttcctggccaccgtcggcgtctcgcccgaccaccagggcaagggtctgggcagcgccgtcgtgctccccggagtggaggcggccgagcgcgccggggtgcccgccttcctggagacctccgcgccccgcaacctccccttctacgagcggctcggcttcaccgtcaccgccgacgtcgaggtgcccgaaggaccgcgcacctggtgcatgacccgcaagcccggtgcctga

SEQ ID NO: 9431 - DNA, 2445 bp, Artificial Sequence
  Synthetic Polynucloetide
atggccttaccagtgaccgccttgctcctgccgctggccttgctgctccacgccgccaggccggacacagtgctgacacagtctccagctctggctgtgtctcctggcgagagagtgaccatctcttgcaaggccagcgagagcgtgtccaccagaatgcactggtacagacagaagcccggccagcagccaaagctgctgatctacaagaccagcaacctggcctctggcgtgccagccagattttctggctctggcagcggcaccgacttcaccctgaccattgatcccgtggaagccgacgacaccgccacctacttttgtcagcagtcctggaacggccctctgacatttggaagcggcaccaagctggaaatcaagagactcgaggacctgaagaacgtgttcccacctgaggtggccgtgttcgagcctagcgaggccgagatcagccacacccagaaagccaccctcgtgtgcctggctaccggcttctaccccgaccatgtggaactgtcttggtgggtcaacggcaaagaggtgcacagcggcgtgtctaccgacccccagccactgaaagaacagcccgccctgaacgacagccggtactgcctgagcagcagactgagagtgtccgccaccttctggcagaacccccggaaccacttcagatgccaggtgcagttctacggcctgagcgagaacgacgagtggacccaggacagagccaagcccgtgacccagatcgtgtctgccgaagcctggggcagagccgattgcggatcccagagcttcggcctgctggaccccaagctgtgctacctgctggatggcatcctgttcatctacggcgtgatcctgaccgccctgttcctgagagtgaagttcagcagaagcgccgacgcccctgcctaccagcagggacagaaccaactgtacaacgagctgaacctgggcagacgggaagagtacgacgtgctggacaagcggagaggcagggaccctgagatgggcggaaagccccagcggagaaagaacccccaggaaggactgtataacgaactccagaaagacaagatggccgaagcctacagcgagatcggcatgaagggcgagcggagaagaggcaagggccacgatggcctgtaccagggcctgagcaccgccaccaaggacacctatgacgccctgcacatgcaggccctgcctccaagaagggccaagcgatctggatctggagcaacaaacttctcactactcaaacaagcaggtgacgtggaggagaatcccgggcctactagtatggactggatttggcgcatccttttccttgtcggcgctgctaccggcgcgcattccttcgaacaggtgcagctgaaagagtctggccctggactggtgcagcctagccaaacactgagcctgacctgtaccgtgtctggcctgtctctgaccagcaatggcgtgtcctggatcagacagcctcctggcaaaggactggaatggctgggcgtgatctggtccaatggcggcacagactacaacagcgccatcaagagccggctgagcttcagcagagacaccagcaagagccaggtgttcctgaagatgaacagcctccagaccgaggataccgccatgtacttttgcgccagacctcggtacaactccggctacttcttcgactattggggccagggcgtgatggtcaccgttagctctacgcgtatccagaaccctgatcctgccgtgtaccagctgcgggatagcaagagcagcgacaagagcgtgtgtctgttcaccgacttcgacagccagaccaacgtgtcccagagcaaggactccgacgtgtacatcaccgataagaccgtgctggacatgcggagcatggacttcaagagcaactccgccgtggcctggtccaacaagtccgatttcgcctgcgccaacgccttcaacaacagcattatccccgaggacacattcttcccaagccccgagagcagctgcggtacccagagttttgggttgttggaccctaaattgtgctatctgttggacggaatcctgttcatttacggagtgatcctgaccgcattgttcctgcgggttaagttttccagatccgcagacgcacccgcttaccaacaagggcagaaccaactctacaatgaacttaatttggggcggagggaagagtacgacgttctggacaaaaggaggggacgagatcccgagatgggcggaaagcctcagcgaaggaagaatccgcaagaggggctttataacgaactccagaaagataaaatggcagaagcctatagtgagattgggatgaagggagaaaggaggaggggtaaaggtcacgatgggttgtaccaaggattgagcacagccactaaagatacctatgatgcgctccacatgcaggccctgccgccaaga

SEQ ID NO: 9432 - DNA, 2445 bp, Artificial Sequence
  Synthetic Polynucloetide
atggccttaccagtgaccgccttgctcctgccgctggccttgctgctccacgccgccaggccggacacagtgctgacacagtctccagctctggctgtgtctcctggcgagagagtgaccatctcttgcaaggccagcgagagcgtgtccaccagaatgcactggtacagacagaagcccggccagcagccaaagctgctgatctacaagaccagcaacctggcctctggcgtgccagccagattttctggctctggcagcggcaccgacttcaccctgaccattgatcccgtggaagccgacgacaccgccacctacttttgtcagcagtcctggaacggccctctgacatttggaagcggcaccaagctggaaatcaagagactcgaggacctgaagaacgtgttcccacctgaggtggccgtgttcgagcctagcaaggccgagatcgcccacacccagaaagccaccctcgtgtgcctggctaccggcttctaccccgaccatgtggaactgtcttggtgggtcaacggcaaagaggtgcacagcggcgtgtgtaccgacccccagccactgaaagaacagcccgccctgaacgacagccggtactgcctgagcagcagactgagagtgtccgccaccttctggcagaacccccggaaccacttcagatgccaggtgcagttctacggcctgagcgagaacgacgagtggacccaggacagagccaagcccgtgacccagatcgtgtctgccgaagcctggggcagagccgattgcggatcccagagcttcggcctgctggaccccaagctgtgctacctgctggatggcatcctgttcatctacggcgtgatcctgaccgccctgttcctgagagtgaagttcagcagaagcgccgacgcccctgcctaccagcagggacagaaccaactgtacaacgagctgaacctgggcagacgggaagagtacgacgtgctggacaagcggagaggcagggaccctgagatgggcggaaagccccagcggagaaagaacccccaggaaggactgtataacgaactccagaaagacaagatggccgaagcctacagcgagatcggcatgaagggcgagcggagaagaggcaagggccacgatggcctgtaccagggcctgagcaccgccaccaaggacacctatgacgccctgcacatgcaggccctgcctccaagaagggccaagcgatctggatctggagcaacaaacttctcactactcaaacaagcaggtgacgtggaggagaatcccgggcctactagtatggactggatttggcgcatccttttccttgtcggcgctgctaccggcgcgcattccttcgaacaggtgcagctgaaagagtctggccctggactggtgcagcctagccaaacactgagcctgacctgtaccgtgtctggcctgtctctgaccagcaatggcgtgtcctggatcagacagcctcctggcaaaggactggaatggctgggcgtgatctggtccaatggcggcacagactacaacagcgccatcaagagccggctgagcttcagcagagacaccagcaagagccaggtgttcctgaagatgaacagcctccagaccgaggataccgccatgtacttttgcgccagacctcggtacaactccggctacttcttcgactattggggccagggcgtgatggtcaccgttagctctacgcgtatccagaaccctgatcctgccgtgtaccagctgcgggatagcaagagcagcgacaagagcgtgtgtctgttcaccgacttcgacagccagaccaacgtgtcccagagcaaggactccgacgtgtacatcaccgataagtgcgtgctggacatgcggagcatggacttcaagagcaactccgccgtggcctggtccaacaagtccgatttcgcctgcgccaacgccttcaacaacagcattatccccgaggacacattcttcccaagcagcgacgtgccctgcggtacccagagttttgggttgttggaccctaaattgtgctatctgttggacggaatcctgttcatttacggagtgatcctgaccgcattgttcctgcgggttaagttttccagatccgcagacgcacccgcttaccaacaagggcagaaccaactctacaatgaacttaatttggggcggagggaagagtacgacgttctggacaaaaggaggggacgagatcccgagatgggcggaaagcctcagcgaaggaagaatccgcaagaggggctttataacgaactccagaaagataaaatggcagaagcctatagtgagattgggatgaagggagaaaggaggaggggtaaaggtcacgatgggttgtaccaaggattgagcacagccactaaagatacctatgatgcgctccacatgcaggccctgccgccaaga

SEQ ID NO: 9433 - DNA, 2658 bp, Artificial Sequence
  Synthetic Polynucloetide
atggccttaccagtgaccgccttgctcctgccgctggccttgctgctccacgccgccaggccggacacagtgctgacacagtctccagctctggctgtgtctcctggcgagagagtgaccatctcttgcaaggccagcgagagcgtgtccaccagaatgcactggtacagacagaagcccggccagcagccaaagctgctgatctacaagaccagcaacctggcctctggcgtgccagccagattttctggctctggcagcggcaccgacttcaccctgaccattgatcccgtggaagccgacgacaccgccacctacttttgtcagcagtcctggaacggccctctgacatttggaagcggcaccaagctggaaatcaagagactcgaggggaaaccaattcccaaccctcttctgggactggattcaaccggcagcggcgaggacctgaagaacgtgttcccacctgaggtggccgtgttcgagcctagcgaggccgagatcagccacacccagaaagccaccctcgtgtgcctggctaccggcttctaccccgaccatgtggaactgtcttggtgggtcaacggcaaagaggtgcacagcggcgtgtctaccgacccccagccactgaaagaacagcccgccctgaacgacagccggtactgcctgagcagcagactgagagtgtccgccaccttctggcagaacccccggaaccacttcagatgccaggtgcagttctacggcctgagcgagaacgacgagtggacccaggacagagccaagcccgtgacccagatcgtgtctgccgaagcctggggcagagccgattgcggatcccagagcttcggcctgctggaccccaagctgtgctacctgctggatggcatcctgttcatctacggcgtgatcctgaccgccctgttcctgagagtgaagttcagcagaagcgccgacgcccctgcctaccagcagggacagaaccaactgtacaacgagctgaacctgggcagacgggaagagtacgacgtgctggacaagcggagaggcagggaccctgagatgggcggaaagccccagcggagaaagaacccccaggaaggactgtataacgaactccagaaagacaagatggccgaagcctacagcgagatcggcatgaagggcgagcggagaagaggcaagggccacgatggcctgtaccagggcctgagcaccgccaccaaggacacctatgacgccctgcacatgcaggccctgcctccaagaagggccaagcgatctggatctggagcaacaaacttctcactactcaaacaagcaggtgacgtggaggagaatcccgggcctactagtatggactggatttggcgcatccttttccttgtcggcgctgctaccggcgcgcattccttcgaacaggtgcagctgaaagagtctggccctggactggtgcagcctagccaaacactgagcctgacctgtaccgtgtctggcctgtctctgaccagcaatggcgtgtcctggatcagacagcctcctggcaaaggactggaatggctgggcgtgatctggtccaatggcggcacagactacaacagcgccatcaagagccggctgagcttcagcagagacaccagcaagagccaggtgttcctgaagatgaacagcctccagaccgaggataccgccatgtacttttgcgccagacctcggtacaactccggctacttcttcgactattggggccagggcgtgatggtcaccgttagctctacgcgtgagcagaaactgatctcggaagaggatgggagcggcatccagaaccctgatcctgccgtgtaccagctgcgggatagcaagagcagcgacaagagcgtgtgtctgttcaccgacttcgacagccagaccaacgtgtcccagagcaaggactccgacgtgtacatcaccgataagaccgtgctggacatgcggagcatggacttcaagagcaactccgccgtggcctggtccaacaagtccgatttcgcctgcgccaacgccttcaacaacagcattatccccgaggacacattcttcccaagccccgagagcagctgcggtacccagagttttgggttgttggaccctaaattgtgctatctgttggacggaatcctgttcatttacggagtgatcctgaccgcattgttcctgaggagcaagcggtcacggctgctccacagcgattacatgaatatgacaccacgaagaccgggtcctactcgcaaacactaccaaccctacgcacctccccgcgactttgcagcgtaccgatctcgggttaagttttccagatccgcagacgcacccgcttaccaacaagggcagaaccaactctacaatgaacttaatttggggcggagggaagagtacgacgttctggacaaaaggaggggacgagatcccgagatgggcggaaagcctcagcgaaggaagaatccgcaagaggggctttataacgaactccagaaagataaaatggcagaagcctatagtgagattgggatgaagggagaaaggaggaggggtaaaggtcacgatgggttgtaccaaggattgagcacagccactaaagatacctatgatgcgctccacatgcaggccctgccgccaaga

SEQ ID NO: 9434 - DNA, 2781 bp, Artificial Sequence
  Synthetic Polynucloetide
atggccttaccagtgaccgccttgctcctgccgctggccttgctgctccacgccgccaggccggacacagtgctgacacagtctccagctctggctgtgtctcctggcgagagagtgaccatctcttgcaaggccagcgagagcgtgtccaccagaatgcactggtacagacagaagcccggccagcagccaaagctgctgatctacaagaccagcaacctggcctctggcgtgccagccagattttctggctctggcagcggcaccgacttcaccctgaccattgatcccgtggaagccgacgacaccgccacctacttttgtcagcagtcctggaacggccctctgacatttggaagcggcaccaagctggaaatcaagagactcgaggggaaaccaattcccaaccctcttctgggactggattcaaccggcagcggcgaggacctgaagaacgtgttcccacctgaggtggccgtgttcgagcctagcgaggccgagatcagccacacccagaaagccaccctcgtgtgcctggctaccggcttctaccccgaccatgtggaactgtcttggtgggtcaacggcaaagaggtgcacagcggcgtgtctaccgacccccagccactgaaagaacagcccgccctgaacgacagccggtactgcctgagcagcagactgagagtgtccgccaccttctggcagaacccccggaaccacttcagatgccaggtgcagttctacggcctgagcgagaacgacgagtggacccaggacagagccaagcccgtgacccagatcgtgtctgccgaagcctggggcagagccgattgcggatcccagagcttcggcctgctggaccccaagctgtgctacctgctggatggcatcctgttcatctacggcgtgatcctgaccgccctgttcctgaggagtaagaggagcaggctcctgcacagtgactacatgaacatgactccacgccgccccggacccacccgcaagcattaccagccctatgccccaccacgcgacttcgcagcctatcgctccagagtgaagttcagcagaagcgccgacgcccctgcctaccagcagggacagaaccaactgtacaacgagctgaacctgggcagacgggaagagtacgacgtgctggacaagcggagaggcagggaccctgagatgggcggaaagccccagcggagaaagaacccccaggaaggactgtataacgaactccagaaagacaagatggccgaagcctacagcgagatcggcatgaagggcgagcggagaagaggcaagggccacgatggcctgtaccagggcctgagcaccgccaccaaggacacctatgacgccctgcacatgcaggccctgcctccaagaagggccaagcgatctggatctggagcaacaaacttctcactactcaaacaagcaggtgacgtggaggagaatcccgggcctactagtatggactggatttggcgcatccttttccttgtcggcgctgctaccggcgcgcattccttcgaacaggtgcagctgaaagagtctggccctggactggtgcagcctagccaaacactgagcctgacctgtaccgtgtctggcctgtctctgaccagcaatggcgtgtcctggatcagacagcctcctggcaaaggactggaatggctgggcgtgatctggtccaatggcggcacagactacaacagcgccatcaagagccggctgagcttcagcagagacaccagcaagagccaggtgttcctgaagatgaacagcctccagaccgaggataccgccatgtacttttgcgccagacctcggtacaactccggctacttcttcgactattggggccagggcgtgatggtcaccgttagctctacgcgtgagcagaaactgatctcggaagaggatgggagcggcatccagaaccctgatcctgccgtgtaccagctgcgggatagcaagagcagcgacaagagcgtgtgtctgttcaccgacttcgacagccagaccaacgtgtcccagagcaaggactccgacgtgtacatcaccgataagaccgtgctggacatgcggagcatggacttcaagagcaactccgccgtggcctggtccaacaagtccgatttcgcctgcgccaacgccttcaacaacagcattatccccgaggacacattcttcccaagccccgagagcagctgcggtacccagagttttgggttgttggaccctaaattgtgctatctgttggacggaatcctgttcatttacggagtgatcctgaccgcattgttcctgaggagcaagcggtcacggctgctccacagcgattacatgaatatgacaccacgaagaccgggtcctactcgcaaacactaccaaccctacgcacctccccgcgactttgcagcgtaccgatctcgggttaagttttccagatccgcagacgcacccgcttaccaacaagggcagaaccaactctacaatgaacttaatttggggcggagggaagagtacgacgttctggacaaaaggaggggacgagatcccgagatgggcggaaagcctcagcgaaggaagaatccgcaagaggggctttataacgaactccagaaagataaaatggcagaagcctatagtgagattgggatgaagggagaaaggaggaggggtaaaggtcacgatgggttgtaccaaggattgagcacagccactaaagatacctatgatgcgctccacatgcaggccctgccgccaaga

SEQ ID NO: 9435 - DNA, 2664 bp, Artificial Sequence
  Synthetic Polynucloetide
atggccttaccagtgaccgccttgctcctgccgctggccttgctgctccacgccgccaggccggacacagtgctgacacagtctccagctctggctgtgtctcctggcgagagagtgaccatctcttgcaaggccagcgagagcgtgtccaccagaatgcactggtacagacagaagcccggccagcagccaaagctgctgatctacaagaccagcaacctggcctctggcgtgccagccagattttctggctctggcagcggcaccgacttcaccctgaccattgatcccgtggaagccgacgacaccgccacctacttttgtcagcagtcctggaacggccctctgacatttggaagcggcaccaagctggaaatcaagagactcgaggggaaaccaattcccaaccctcttctgggactggattcaaccggcagcggcgaggacctgaagaacgtgttcccacctgaggtggccgtgttcgagcctagcgaggccgagatcagccacacccagaaagccaccctcgtgtgcctggctaccggcttctaccccgaccatgtggaactgtcttggtgggtcaacggcaaagaggtgcacagcggcgtgtctaccgacccccagccactgaaagaacagcccgccctgaacgacagccggtactgcctgagcagcagactgagagtgtccgccaccttctggcagaacccccggaaccacttcagatgccaggtgcagttctacggcctgagcgagaacgacgagtggacccaggacagagccaagcccgtgacccagatcgtgtctgccgaagcctggggcagagccgattgcggatcccagagcttcggcctgctggaccccaagctgtgctacctgctggatggcatcctgttcatctacggcgtgatcctgaccgccctgttcctgagagtgaagttcagcagaagcgccgacgcccctgcctaccagcagggacagaaccaactgtacaacgagctgaacctgggcagacgggaagagtacgacgtgctggacaagcggagaggcagggaccctgagatgggcggaaagccccagcggagaaagaacccccaggaaggactgtataacgaactccagaaagacaagatggccgaagcctacagcgagatcggcatgaagggcgagcggagaagaggcaagggccacgatggcctgtaccagggcctgagcaccgccaccaaggacacctatgacgccctgcacatgcaggccctgcctccaagaagggccaagcgatctggatctggagcaacaaacttctcactactcaaacaagcaggtgacgtggaggagaatcccgggcctactagtatggactggatttggcgcatccttttccttgtcggcgctgctaccggcgcgcattccttcgaacaggtgcagctgaaagagtctggccctggactggtgcagcctagccaaacactgagcctgacctgtaccgtgtctggcctgtctctgaccagcaatggcgtgtcctggatcagacagcctcctggcaaaggactggaatggctgggcgtgatctggtccaatggcggcacagactacaacagcgccatcaagagccggctgagcttcagcagagacaccagcaagagccaggtgttcctgaagatgaacagcctccagaccgaggataccgccatgtacttttgcgccagacctcggtacaactccggctacttcttcgactattggggccagggcgtgatggtcaccgttagctctacgcgtgagcagaaactgatctcggaagaggatctggggagcggcatccagaaccctgatcctgccgtgtaccagctgcgggatagcaagagcagcgacaagagcgtgtgtctgttcaccgacttcgacagccagaccaacgtgtcccagagcaaggactccgacgtgtacatcaccgataagaccgtgctggacatgcggagcatggacttcaagagcaactccgccgtggcctggtccaacaagtccgatttcgcctgcgccaacgccttcaacaacagcattatccccgaggacacattcttcccaagccccgagagcagctgcggtacccagagttttgggttgttggaccctaaattgtgctatctgttggacggaatcctgttcatttacggagtgatcctgaccgcattgttcctgaagagaggccggaagaagctgctgtacatcttcaagcagcctttcatgcggcccgtgcagaccacccaggaagaggacggctgctcctgccggttccccgaggaagaagaaggcggctgcgagctgcgggttaagttttccagatccgcagacgcacccgcttaccaacaagggcagaaccaactctacaatgaacttaatttggggcggagggaagagtacgacgttctggacaaaaggaggggacgagatcccgagatgggcggaaagcctcagcgaaggaagaatccgcaagaggggctttataacgaactccagaaagataaaatggcagaagcctatagtgagattgggatgaagggagaaaggaggaggggtaaaggtcacgatgggttgtaccaaggattgagcacagccactaaagatacctatgatgcgctccacatgcaggccctgccgccaaga

SEQ ID NO: 9436 - DNA, 2790 bp, Artificial Sequence
  Synthetic Polynucloetide
atggccttaccagtgaccgccttgctcctgccgctggccttgctgctccacgccgccaggccggacacagtgctgacacagtctccagctctggctgtgtctcctggcgagagagtgaccatctcttgcaaggccagcgagagcgtgtccaccagaatgcactggtacagacagaagcccggccagcagccaaagctgctgatctacaagaccagcaacctggcctctggcgtgccagccagattttctggctctggcagcggcaccgacttcaccctgaccattgatcccgtggaagccgacgacaccgccacctacttttgtcagcagtcctggaacggccctctgacatttggaagcggcaccaagctggaaatcaagagactcgaggggaaaccaattcccaaccctcttctgggactggattcaaccggcagcggcgaggacctgaagaacgtgttcccacctgaggtggccgtgttcgagcctagcgaggccgagatcagccacacccagaaagccaccctcgtgtgcctggctaccggcttctaccccgaccatgtggaactgtcttggtgggtcaacggcaaagaggtgcacagcggcgtgtctaccgacccccagccactgaaagaacagcccgccctgaacgacagccggtactgcctgagcagcagactgagagtgtccgccaccttctggcagaacccccggaaccacttcagatgccaggtgcagttctacggcctgagcgagaacgacgagtggacccaggacagagccaagcccgtgacccagatcgtgtctgccgaagcctggggcagagccgattgcggatcccagagcttcggcctgctggaccccaagctgtgctacctgctggatggcatcctgttcatctacggcgtgatcctgaccgccctgttcctgaaacggggcagaaagaaactcctgtatatattcaaacaaccatttatgagaccagtacaaactactcaagaggaagatggctgtagctgccgatttccagaagaagaagaaggaggatgtgaactgagagtgaagttcagcagaagcgccgacgcccctgcctaccagcagggacagaaccaactgtacaacgagctgaacctgggcagacgggaagagtacgacgtgctggacaagcggagaggcagggaccctgagatgggcggaaagccccagcggagaaagaacccccaggaaggactgtataacgaactccagaaagacaagatggccgaagcctacagcgagatcggcatgaagggcgagcggagaagaggcaagggccacgatggcctgtaccagggcctgagcaccgccaccaaggacacctatgacgccctgcacatgcaggccctgcctccaagaagggccaagcgatctggatctggagcaacaaacttctcactactcaaacaagcaggtgacgtggaggagaatcccgggcctactagtatggactggatttggcgcatccttttccttgtcggcgctgctaccggcgcgcattccttcgaacaggtgcagctgaaagagtctggccctggactggtgcagcctagccaaacactgagcctgacctgtaccgtgtctggcctgtctctgaccagcaatggcgtgtcctggatcagacagcctcctggcaaaggactggaatggctgggcgtgatctggtccaatggcggcacagactacaacagcgccatcaagagccggctgagcttcagcagagacaccagcaagagccaggtgttcctgaagatgaacagcctccagaccgaggataccgccatgtacttttgcgccagacctcggtacaactccggctacttcttcgactattggggccagggcgtgatggtcaccgttagctctacgcgtgagcagaaactgatctcggaagaggatctggggagcggcatccagaaccctgatcctgccgtgtaccagctgcgggatagcaagagcagcgacaagagcgtgtgtctgttcaccgacttcgacagccagaccaacgtgtcccagagcaaggactccgacgtgtacatcaccgataagaccgtgctggacatgcggagcatggacttcaagagcaactccgccgtggcctggtccaacaagtccgatttcgcctgcgccaacgccttcaacaacagcattatccccgaggacacattcttcccaagccccgagagcagctgcggtacccagagttttgggttgttggaccctaaattgtgctatctgttggacggaatcctgttcatttacggagtgatcctgaccgcattgttcctgaagagaggccggaagaagctgctgtacatcttcaagcagcctttcatgcggcccgtgcagaccacccaggaagaggacggctgctcctgccggttccccgaggaagaagaaggcggctgcgagctgcgggttaagttttccagatccgcagacgcacccgcttaccaacaagggcagaaccaactctacaatgaacttaatttggggcggagggaagagtacgacgttctggacaaaaggaggggacgagatcccgagatgggcggaaagcctcagcgaaggaagaatccgcaagaggggctttataacgaactccagaaagataaaatggcagaagcctatagtgagattgggatgaagggagaaaggaggaggggtaaaggtcacgatgggttgtaccaaggattgagcacagccactaaagatacctatgatgcgctccacatgcaggccctgccgccaaga

SEQ ID NO: 9437 - DNA, 2463 bp, Artificial Sequence
  Synthetic Polynucloetide
atggccttaccagtgaccgccttgctcctgccgctggccttgctgctccacgccgccaggccggacacagtgctgacacagtctccagctctggctgtgtctcctggcgagagagtgaccatctcttgcaaggccagcgagagcgtgtccaccagaatgcactggtacagacagaagcccggccagcagccaaagctgctgatctacaagaccagcaacctggcctctggcgtgccagccagattttctggctctggcagcggcaccgacttcaccctgaccattgatcccgtggaagccgacgacaccgccacctacttttgtcagcagtcctggaacggccctctgacatttggaagcggcaccaagctggaaatcaagagactcgagcagagcttcggcctgctggaccccaagctgtgctacctgctggatggcatcctgttcatctacggcgtgatcctgaccgccctgttcctgagagtgaagttcagcagaagcgccgacgcccctgcctaccagcagggacagaaccaactgtacaacgagctgaacctgggcagacgggaagagtacgacgtgctggacaagcggagaggcagggaccctgagatgggcggaaagccccagcggagaaagaacccccaggaaggactgtataacgaactccagaaagacaagatggccgaagcctacagcgagatcggcatgaagggcgagcggagaagaggcaagggccacgatggcctgtaccagggcctgagcaccgccaccaaggacacctatgacgccctgcacatgcaggccctgcctccaagaagggccaagcgatctggatctggagcaacaaacttctcactactcaaacaagcaggtgacgtggaggagaatcccgggcctactagtatggactggatttggcgcatccttttccttgtcggcgctgctaccggcgcgcattccttcgaacaggtgcagctgaaagagtctggccctggactggtgcagcctagccaaacactgagcctgacctgtaccgtgtctggcctgtctctgaccagcaatggcgtgtcctggatcagacagcctcctggcaaaggactggaatggctgggcgtgatctggtccaatggcggcacagactacaacagcgccatcaagagccggctgagcttcagcagagacaccagcaagagccaggtgttcctgaagatgaacagcctccagaccgaggataccgccatgtacttttgcgccagacctcggtacaactccggctacttcttcgactattggggccagggcgtgatggtcaccgttagctctacgcgtcagagttttgggttgttggaccctaaattgtgctatctgttggacggaatcctgttcatttacggagtgatcctgaccgcattgttcctgcgggttaagttttccagatccgcagacgcacccgcttaccaacaagggcagaaccaactctacaatgaacttaatttggggcggagggaagagtacgacgttctggacaaaaggaggggacgagatcccgagatgggcggaaagcctcagcgaaggaagaatccgcaagaggggctttataacgaactccagaaagataaaatggcagaagcctatagtgagattgggatgaagggagaaaggaggaggggtaaaggtcacgatgggttgtaccaaggattgagcacagccactaaagatacctatgatgcgctccacatgcaggccctgccgccaagacgcgccaagagaagcggatctggcgtgaagcagaccctgaatttcgacctgctgaagctggctggcgacgtggaatccaacccaggcccttctagaggccatatgaccgagtacaagcccacggtgcgcctcgccacccgcgacgacgtccccagggccgtacgcaccctcgccgccgcgttcgccgactaccccgccacgcgccacaccgtcgatccggaccgccacatcgagcgggtcaccgagctgcaagaactcttcctcacgcgcgtcgggctcgacatcggcaaggtgtgggtcgcggacgacggcgccgcggtggcggtctggaccacgccggagagcgtcgaagcgggggcggtgttcgccgagatcggcccgcgcatggccgagttgagcggttcccggctggccgcgcagcaacagatggaaggcctcctggcgccgcaccggcccaaggagcccgcgtggttcctggccaccgtcggcgtctcgcccgaccaccagggcaagggtctgggcagcgccgtcgtgctccccggagtggaggcggccgagcgcgccggggtgcccgccttcctggagacctccgcgccccgcaacctccccttctacgagcggctcggcttcaccgtcaccgccgacgtcgaggtgcccgaaggaccgcgcacctggtgcatgacccgcaagcccggtgcctga

SEQ ID NO: 9438 - DNA, 1935 bp, Artificial Sequence
  Synthetic Polynucloetide
atggccttaccagtgaccgccttgctcctgccgctggccttgctgctccacgccgccaggccggacacagtgctgacacagtctccagctctggctgtgtctcctggcgagagagtgaccatctcttgcaaggccagcgagagcgtgtccaccagaatgcactggtacagacagaagcccggccagcagccaaagctgctgatctacaagaccagcaacctggcctctggcgtgccagccagattttctggctctggcagcggcaccgacttcaccctgaccattgatcccgtggaagccgacgacaccgccacctacttttgtcagcagtcctggaacggccctctgacatttggaagcggcaccaagctggaaatcaagagactcgagggacagcctaaggccaatcctaccgtgacactgttccctccaagcagcgaagaactccaggccaacaaggccacacttgtgtgcctgatctccgacttctaccctggggctgtgacagtggcttggaaggccgatggatctcctgtgaaagccggcgtggaaaccaccaagccatccaagcagagcaacaacaaatacgccgccagctcctacctgagcctgacacctgagcagtggaagtcccacagatcctacagctgccaagtgacccacgaaggcagcaccgtggaaaagacagtggcccctacagagtgcagccccatcaagaccgatgtgattacaatggaccccaaggacaactgctccaaggacgccaacgataccctgctgctccagctgaccaacaccagcgcctactacatgtacttgttgctgctgctgaagtccgtggtgtacttcgccatcatcacatgctgcctgctgcggagaaccgccttctgctgcaacggcgagaagtctagggccaagcgatctggatctggagcaacaaacttctcactactcaaacaagcaggtgacgtggaggagaatcccgggcctactagtatggactggatttggcgcatccttttccttgtcggcgctgctaccggcgcgcattccttcgaacaggtgcagctgaaagagtctggccctggactggtgcagcctagccaaacactgagcctgacctgtaccgtgtctggcctgtctctgaccagcaatggcgtgtcctggatcagacagcctcctggcaaaggactggaatggctgggcgtgatctggtccaatggcggcacagactacaacagcgccatcaagagccggctgagcttcagcagagacaccagcaagagccaggtgttcctgaagatgaacagcctccagaccgaggataccgccatgtacttttgcgccagacctcggtacaactccggctacttcttcgactattggggccagggcgtgatggtcaccgttagctctacgcgtgcctctacaaagggaccctccgtgtttcctctggctcccagcagcaagtctacaagcggaggaacagccgctctgggctgcctggtcaaggattactttcccgagcctgtgaccgtgtcctggaatagcggagcactgacaagcggcgtgcacacctttccagccgtgctgcaaagcagcggcctgtactctctgagcagcgtggtcacagtgcctagctctagcctgggcacccagacctacatctgcaatgtgaaccacaagcctagcaacaccaaggtggacaagagagtggaacccaagagctgtgaagtgaaaaccgactccaccgaccacgtgaagcccaaagagacagagaacaccaagcagcccagcaagagctgccacaagcccaaggccatcgtgcacaccgagaaagtgaacatgatgagcctgaccgtgctgggcctgcggatgctgttcgccaaaaccgtggccgtgaacttcctgctgaccgccaagctgttcttcctc

SEQ ID NO: 9439 - DNA, 1869 bp, Artificial Sequence
  Synthetic Polynucloetide
atggccttaccagtgaccgccttgctcctgccgctggccttgctgctccacgccgccaggccggacacagtgctgacacagtctccagctctggctgtgtctcctggcgagagagtgaccatctcttgcaaggccagcgagagcgtgtccaccagaatgcactggtacagacagaagcccggccagcagccaaagctgctgatctacaagaccagcaacctggcctctggcgtgccagccagattttctggctctggcagcggcaccgacttcaccctgaccattgatcccgtggaagccgacgacaccgccacctacttttgtcagcagtcctggaacggccctctgacatttggaagcggcaccaagctggaaatcaagagactcgagggacagcctaaggccaatcctaccgtgacactgttccctccaagcagcgaagaactccaggccaacaaggccacacttgtgtgcctgatctccgacttctaccctggggctgtgacagtggcttggaaggccgatggatctcctgtgaaagccggcgtggaaaccaccaagccatccaagcagagcaacaacaaatacgccgccagctcctacctgagcctgacacctgagcagtggaagtcccacagatcctacagctgccaagtgacccacgaaggcagcaccgtggaaaagacagtggcccctacagagtgcagcggcagagccgattgcggcatcaccagcgccagctaccaccagggcgtgctgagcgccaccatcctgtacgagatcctgctgggcaaggccaccctgtacgccgtgctggtgtctgccctggtgctgatggctatggtcaagcggaaggacagccggggaagggccaagcgatctggatctggagcaacaaacttctcactactcaaacaagcaggtgacgtggaggagaatcccgggcctactagtatggactggatttggcgcatccttttccttgtcggcgctgctaccggcgcgcattccttcgaacaggtgcagctgaaagagtctggccctggactggtgcagcctagccaaacactgagcctgacctgtaccgtgtctggcctgtctctgaccagcaatggcgtgtcctggatcagacagcctcctggcaaaggactggaatggctgggcgtgatctggtccaatggcggcacagactacaacagcgccatcaagagccggctgagcttcagcagagacaccagcaagagccaggtgttcctgaagatgaacagcctccagaccgaggataccgccatgtacttttgcgccagacctcggtacaactccggctacttcttcgactattggggccagggcgtgatggtcaccgttagctctacgcgtgcctctacaaagggaccctccgtgtttcctctggctcccagcagcaagtctacaagcggaggaacagccgctctgggctgcctggtcaaggattactttcccgagcctgtgaccgtgtcctggaatagcggagcactgacaagcggcgtgcacacctttccagccgtgctgcaaagcagcggcctgtactctctgagcagcgtggtcacagtgcctagctctagcctgggcacccagacctacatctgcaatgtgaaccacaagcctagcaacaccaaggtggacaagagagtggaacccaagagctgtatccccgaggacacattcttcccaagcagcgacgtgccctgcgacgtgaagctggtggaaaagagcttcgagacagacaccaacctgaacttccagaacctgagcgtgatcggcttcagaatcctgctgctgaaagtggccggctttaacctgctgatgaccctgcggctgtggtccagc

SEQ ID NO: 9440 - DNA, 1869 bp, Artificial Sequence
  Synthetic Polynucloetide
atggccttaccagtgaccgccttgctcctgccgctggccttgctgctccacgccgccaggccggacacagtgctgacacagtctccagctctggctgtgtctcctggcgagagagtgaccatctcttgcaaggccagcgagagcgtgtccaccagaatgcactggtacagacagaagcccggccagcagccaaagctgctgatctacaagaccagcaacctggcctctggcgtgccagccagattttctggctctggcagcggcaccgacttcaccctgaccattgatcccgtggaagccgacgacaccgccacctacttttgtcagcagtcctggaacggccctctgacatttggaagcggcaccaagctggaaatcaagagactcgagggacagcctaaggccaatcctaccgtgacactgttccctccaagcagcgaagaactccaggccaacaaggccacacttgtgtgcctgatctccgacttctaccctggggctgtgacagtggcttggaaggccgatggatctcctgtgaaagccggcgtggaaaccaccaagccatccaagcagagcaacaacaaatacgccgccagctcctacctgagcctgacacctgagcagtggaagtcccacagatcctacagctgccaagtgacccacgaaggcagcaccgtggaaaagacagtggcccctacagagtgcagcggcagagccgattgcggctttaccagcgagagctaccagcagggcgtgctgagcgccaccatcctgtacgagatcctgctgggcaaggccaccctgtacgccgtgctggtgtctgccctggtgctgatggctatggtcaagcggaaggacagccggggaagggccaagcgatctggatctggagcaacaaacttctcactactcaaacaagcaggtgacgtggaggagaatcccgggcctactagtatggactggatttggcgcatccttttccttgtcggcgctgctaccggcgcgcattccttcgaacaggtgcagctgaaagagtctggccctggactggtgcagcctagccaaacactgagcctgacctgtaccgtgtctggcctgtctctgaccagcaatggcgtgtcctggatcagacagcctcctggcaaaggactggaatggctgggcgtgatctggtccaatggcggcacagactacaacagcgccatcaagagccggctgagcttcagcagagacaccagcaagagccaggtgttcctgaagatgaacagcctccagaccgaggataccgccatgtacttttgcgccagacctcggtacaactccggctacttcttcgactattggggccagggcgtgatggtcaccgttagctctacgcgtgcctctacaaagggaccctccgtgtttcctctggctcccagcagcaagtctacaagcggaggaacagccgctctgggctgcctggtcaaggattactttcccgagcctgtgaccgtgtcctggaatagcggagcactgacaagcggcgtgcacacctttccagccgtgctgcaaagcagcggcctgtactctctgagcagcgtggtcacagtgcctagctctagcctgggcacccagacctacatctgcaatgtgaaccacaagcctagcaacaccaaggtggacaagagagtggaacccaagagctgtatccccgaggacacattcttcccaagccccgagagcagctgcgacgtgaagctggtggaaaagagcttcgagacagacaccaacctgaacttccagaacctgagcgtgatcggcttcagaatcctgctgctgaaagtggccggctttaacctgctgatgaccctgcggctgtggtccagc

SEQ ID NO: 9441 - DNA, 1347 bp, Artificial Sequence
  Synthetic Polynucloetide
atggccttaccagtgaccgccttgctcctgccgctggccttgctgctccacgccgccaggccggacacagtgctgacacagtctccagctctggctgtgtctcctggcgagagagtgaccatctcttgcaaggccagcgagagcgtgtccaccagaatgcactggtacagacagaagcccggccagcagccaaagctgctgatctacaagaccagcaacctggcctctggcgtgccagccagattttctggctctggcagcggcaccgacttcaccctgaccattgatcccgtggaagccgacgacaccgccacctacttttgtcagcagtcctggaacggccctctgacatttggaagcggcaccaagctggaaatcaagagaggcggaggcggaagtggaggcggaggatctggcggcggaggctctcaggtgcagctgaaagagtctggccctggactggtgcagcctagccaaacactgagcctgacctgtaccgtgtctggcctgtctctgaccagcaatggcgtgtcctggatcagacagcctcctggcaaaggactggaatggctgggcgtgatctggtccaatggcggcacagactacaacagcgccatcaagagccggctgagcttcagcagagacaccagcaagagccaggtgttcctgaagatgaacagcctccagaccgaggataccgccatgtacttttgcgccagacctcggtacaactccggctacttcttcgactattggggccagggcgtgatggtcaccgttagctctacgcgtgacggtaacgaggagatgggaggaatcactcaaaccccttacaaagtctcaatttcaggaacaactgttatccttacatgtccccagtatcctggcagcgagatcctttggcagcataacgacaagaatatagggggagatgaagacgataagaatatcggatctgacgaggatcacttgagcctgaaagagttctccgagcttgaacaaagcggatattatgtgtgctatccgcgcgggtcaaagccggaagacgctaacttttacctttatctccgagccagagtgtgcgaaaattgcatggaaatggacgttatgtccgttgctacaatagttatcgtagatatatgcatcacgggtggactgcttctgctggtttattattggtccaagaatagaaaggccaaagctaaacccgtgaccagaggcgctggcgcaggcggaaggcaaaggggacaaaacaaagaacggccaccaccagtgccaaatccagattatgagcctattcggaaaggacagagggacctgtactctggcctgaatcagagaagaatc

SEQ ID NO: 9442 - DNA, 1242 bp, Artificial Sequence
  Synthetic Polynucloetide
atggccttaccagtgaccgccttgctcctgccgctggccttgctgctccacgccgccaggccggacacagtgctgacacagtctccagctctggctgtgtctcctggcgagagagtgaccatctcttgcaaggccagcgagagcgtgtccaccagaatgcactggtacagacagaagcccggccagcagccaaagctgctgatctacaagaccagcaacctggcctctggcgtgccagccagattttctggctctggcagcggcaccgacttcaccctgaccattgatcccgtggaagccgacgacaccgccacctacttttgtcagcagtcctggaacggccctctgacatttggaagcggcaccaagctggaaatcaagagaggcggaggcggaagtggaggcggaggatctggcggcggaggctctcaggtgcagctgaaagagtctggccctggactggtgcagcctagccaaacactgagcctgacctgtaccgtgtctggcctgtctctgaccagcaatggcgtgtcctggatcagacagcctcctggcaaaggactggaatggctgggcgtgatctggtccaatggcggcacagactacaacagcgccatcaagagccggctgagcttcagcagagacaccagcaagagccaggtgttcctgaagatgaacagcctccagaccgaggataccgccatgtacttttgcgccagacctcggtacaactccggctacttcttcgactattggggccagggcgtgatggtcaccgttagctctacgcgtttcaagatccccatcgaggaactggaagatcgggtgttcgtgaactgcaacacctctatcacctgggtggaaggcaccgtgggaacactgctgagcgacatcaccagactggacctcggcaagcggattctggaccctcggggcatctacagatgcaacggcaccgacatctacaaggacaaagaaagcaccgtgcaggtccactacagaatgtgccagtcctgcgtggaactggaccctgctacagtggccggcatcatcgtgaccgatgtgatcgctactctgctgctggctctgggagtgttctgcttcgccggacacgaaacaggcagactgtctggcgctgccgatacacaggccctgctgagaaacgaccaagtgtatcagcccctgcgcgacagagatgatgcccagtattctcacctcggcggcaactgggctagaaacaag

SEQ ID NO: 9443 - DNA, 1272 bp, Artificial Sequence
  Synthetic Polynucloetide
atggccttaccagtgaccgccttgctcctgccgctggccttgctgctccacgccgccaggccggacacagtgctgacacagtctccagctctggctgtgtctcctggcgagagagtgaccatctcttgcaaggccagcgagagcgtgtccaccagaatgcactggtacagacagaagcccggccagcagccaaagctgctgatctacaagaccagcaacctggcctctggcgtgccagccagattttctggctctggcagcggcaccgacttcaccctgaccattgatcccgtggaagccgacgacaccgccacctacttttgtcagcagtcctggaacggccctctgacatttggaagcggcaccaagctggaaatcaagagaggcggaggcggaagtggaggcggaggatctggcggcggaggctctcaggtgcagctgaaagagtctggccctggactggtgcagcctagccaaacactgagcctgacctgtaccgtgtctggcctgtctctgaccagcaatggcgtgtcctggatcagacagcctcctggcaaaggactggaatggctgggcgtgatctggtccaatggcggcacagactacaacagcgccatcaagagccggctgagcttcagcagagacaccagcaagagccaggtgttcctgaagatgaacagcctccagaccgaggataccgccatgtacttttgcgccagacctcggtacaactccggctacttcttcgactattggggccagggcgtgatggtcaccgttagctctacgcgtcagagcatcaagggcaaccacctggtcaaggtgtacgactaccaagaggacggcagcgtgctgctgacatgtgatgccgaggccaagaacatcacctggtttaaggacggcaagatgatcggcttcctgaccgaggacaagaagaagtggaacctgggcagcaacgctaaggaccccagaggcatgtatcagtgcaagggcagccagaacaagagcaagcccctccaggtgtactaccggatgtgccagaactgcatcgagctgaacgccgctaccatcagcggctttctgttcgccgagatcgtgtccatcttcgtgctggccgtgggcgtgtactttatcgctggacaggatggcgtgcggcagagcagagcttccgataagcaaaccctgctgcctaacgaccagctgtaccagcctctgaaggacagagaggacgaccagtacagccacctccagggcaatcagctgagaagaaac

SEQ ID NO: 9444 - DNA, 1221 bp, Artificial Sequence
  Synthetic Polynucloetide
atggccttaccagtgaccgccttgctcctgccgctggccttgctgctccacgccgccaggccggacacagtgctgacacagtctccagctctggctgtgtctcctggcgagagagtgaccatctcttgcaaggccagcgagagcgtgtccaccagaatgcactggtacagacagaagcccggccagcagccaaagctgctgatctacaagaccagcaacctggcctctggcgtgccagccagattttctggctctggcagcggcaccgacttcaccctgaccattgatcccgtggaagccgacgacaccgccacctacttttgtcagcagtcctggaacggccctctgacatttggaagcggcaccaagctggaaatcaagagaggcggaggcggaagtggaggcggaggatctggcggcggaggctctcaggtgcagctgaaagagtctggccctggactggtgcagcctagccaaacactgagcctgacctgtaccgtgtctggcctgtctctgaccagcaatggcgtgtcctggatcagacagcctcctggcaaaggactggaatggctgggcgtgatctggtccaatggcggcacagactacaacagcgccatcaagagccggctgagcttcagcagagacaccagcaagagccaggtgttcctgaagatgaacagcctccagaccgaggataccgccatgtacttttgcgccagacctcggtacaactccggctacttcttcgactattggggccagggcgtgatggtcaccgttagctctacgcgtcagagttttgggttgttggaccctaaattgtgctatctgttggacggaatcctgttcatttacggagtgatcctgaccgcattgttcctgcgggttaagttttccagatccgcagacgcacccgcttaccaacaagggcagaaccaactctacaatgaacttaatttggggcggagggaagagtacgacgttctggacaaaaggaggggacgagatcccgagatgggcggaaagcctcagcgaaggaagaatccgcaagaggggctttataacgaactccagaaagataaaatggcagaagcctatagtgagattgggatgaagggagaaaggaggaggggtaaaggtcacgatgggttgtaccaaggattgagcacagccactaaagatacctatgatgcgctccacatgcaggccctgccgccaaga

SEQ ID NO: 9445 - DNA, 1347 bp, Artificial Sequence
  Synthetic Polynucloetide
atggccttaccagtgaccgccttgctcctgccgctggccttgctgctccacgccgccaggccgcaggtgcagctgaaagagtctggccctggactggtgcagcctagccaaacactgagcctgacctgtaccgtgtctggcctgtctctgaccagcaatggcgtgtcctggatcagacagcctcctggcaaaggactggaatggctgggcgtgatctggtccaatggcggcacagactacaacagcgccatcaagagccggctgagcttcagcagagacaccagcaagagccaggtgttcctgaagatgaacagcctccagaccgaggataccgccatgtacttttgcgccagacctcggtacaactccggctacttcttcgactattggggccagggcgtgatggtcaccgttagctctggcggaggcggaagtggaggcggaggatctggcggcggaggctctgacacagtgctgacacagtctccagctctggctgtgtctcctggcgagagagtgaccatctcttgcaaggccagcgagagcgtgtccaccagaatgcactggtacagacagaagcccggccagcagccaaagctgctgatctacaagaccagcaacctggcctctggcgtgccagccagattttctggctctggcagcggcaccgacttcaccctgaccattgatcccgtggaagccgacgacaccgccacctacttttgtcagcagtcctggaacggccctctgacatttggaagcggcaccaagctggaaatcaagagaacgcgtgacggtaacgaggagatgggaggaatcactcaaaccccttacaaagtctcaatttcaggaacaactgttatccttacatgtccccagtatcctggcagcgagatcctttggcagcataacgacaagaatatagggggagatgaagacgataagaatatcggatctgacgaggatcacttgagcctgaaagagttctccgagcttgaacaaagcggatattatgtgtgctatccgcgcgggtcaaagccggaagacgctaacttttacctttatctccgagccagagtgtgcgaaaattgcatggaaatggacgttatgtccgttgctacaatagttatcgtagatatatgcatcacgggtggactgcttctgctggtttattattggtccaagaatagaaaggccaaagctaaacccgtgaccagaggcgctggcgcaggcggaaggcaaaggggacaaaacaaagaacggccaccaccagtgccaaatccagattatgagcctattcggaaaggacagagggacctgtactctggcctgaatcagagaagaatc

SEQ ID NO: 9446 - DNA, 1242 bp, Artificial Sequence
  Synthetic Polynucloetide
atggccttaccagtgaccgccttgctcctgccgctggccttgctgctccacgccgccaggccgcaggtgcagctgaaagagtctggccctggactggtgcagcctagccaaacactgagcctgacctgtaccgtgtctggcctgtctctgaccagcaatggcgtgtcctggatcagacagcctcctggcaaaggactggaatggctgggcgtgatctggtccaatggcggcacagactacaacagcgccatcaagagccggctgagcttcagcagagacaccagcaagagccaggtgttcctgaagatgaacagcctccagaccgaggataccgccatgtacttttgcgccagacctcggtacaactccggctacttcttcgactattggggccagggcgtgatggtcaccgttagctctggcggaggcggaagtggaggcggaggatctggcggcggaggctctgacacagtgctgacacagtctccagctctggctgtgtctcctggcgagagagtgaccatctcttgcaaggccagcgagagcgtgtccaccagaatgcactggtacagacagaagcccggccagcagccaaagctgctgatctacaagaccagcaacctggcctctggcgtgccagccagattttctggctctggcagcggcaccgacttcaccctgaccattgatcccgtggaagccgacgacaccgccacctacttttgtcagcagtcctggaacggccctctgacatttggaagcggcaccaagctggaaatcaagagaacgcgtttcaagatccccatcgaggaactggaagatcgggtgttcgtgaactgcaacacctctatcacctgggtggaaggcaccgtgggaacactgctgagcgacatcaccagactggacctcggcaagcggattctggaccctcggggcatctacagatgcaacggcaccgacatctacaaggacaaagaaagcaccgtgcaggtccactacagaatgtgccagtcctgcgtggaactggaccctgctacagtggccggcatcatcgtgaccgatgtgatcgctactctgctgctggctctgggagtgttctgcttcgccggacacgaaacaggcagactgtctggcgctgccgatacacaggccctgctgagaaacgaccaagtgtatcagcccctgcgcgacagagatgatgcccagtattctcacctcggcggcaactgggctagaaacaag

SEQ ID NO: 9447 - DNA, 1272 bp, Artificial Sequence
  Synthetic Polynucloetide
atggccttaccagtgaccgccttgctcctgccgctggccttgctgctccacgccgccaggccgcaggtgcagctgaaagagtctggccctggactggtgcagcctagccaaacactgagcctgacctgtaccgtgtctggcctgtctctgaccagcaatggcgtgtcctggatcagacagcctcctggcaaaggactggaatggctgggcgtgatctggtccaatggcggcacagactacaacagcgccatcaagagccggctgagcttcagcagagacaccagcaagagccaggtgttcctgaagatgaacagcctccagaccgaggataccgccatgtacttttgcgccagacctcggtacaactccggctacttcttcgactattggggccagggcgtgatggtcaccgttagctctggcggaggcggaagtggaggcggaggatctggcggcggaggctctgacacagtgctgacacagtctccagctctggctgtgtctcctggcgagagagtgaccatctcttgcaaggccagcgagagcgtgtccaccagaatgcactggtacagacagaagcccggccagcagccaaagctgctgatctacaagaccagcaacctggcctctggcgtgccagccagattttctggctctggcagcggcaccgacttcaccctgaccattgatcccgtggaagccgacgacaccgccacctacttttgtcagcagtcctggaacggccctctgacatttggaagcggcaccaagctggaaatcaagagaacgcgtcagagcatcaagggcaaccacctggtcaaggtgtacgactaccaagaggacggcagcgtgctgctgacatgtgatgccgaggccaagaacatcacctggtttaaggacggcaagatgatcggcttcctgaccgaggacaagaagaagtggaacctgggcagcaacgctaaggaccccagaggcatgtatcagtgcaagggcagccagaacaagagcaagcccctccaggtgtactaccggatgtgccagaactgcatcgagctgaacgccgctaccatcagcggctttctgttcgccgagatcgtgtccatcttcgtgctggccgtgggcgtgtactttatcgctggacaggatggcgtgcggcagagcagagcttccgataagcaaaccctgctgcctaacgaccagctgtaccagcctctgaaggacagagaggacgaccagtacagccacctccagggcaatcagctgagaagaaac

SEQ ID NO: 9448 - DNA, 1221 bp, Artificial Sequence
  Synthetic Polynucloetide
atggccttaccagtgaccgccttgctcctgccgctggccttgctgctccacgccgccaggccgcaggtgcagctgaaagagtctggccctggactggtgcagcctagccaaacactgagcctgacctgtaccgtgtctggcctgtctctgaccagcaatggcgtgtcctggatcagacagcctcctggcaaaggactggaatggctgggcgtgatctggtccaatggcggcacagactacaacagcgccatcaagagccggctgagcttcagcagagacaccagcaagagccaggtgttcctgaagatgaacagcctccagaccgaggataccgccatgtacttttgcgccagacctcggtacaactccggctacttcttcgactattggggccagggcgtgatggtcaccgttagctctggcggaggcggaagtggaggcggaggatctggcggcggaggctctgacacagtgctgacacagtctccagctctggctgtgtctcctggcgagagagtgaccatctcttgcaaggccagcgagagcgtgtccaccagaatgcactggtacagacagaagcccggccagcagccaaagctgctgatctacaagaccagcaacctggcctctggcgtgccagccagattttctggctctggcagcggcaccgacttcaccctgaccattgatcccgtggaagccgacgacaccgccacctacttttgtcagcagtcctggaacggccctctgacatttggaagcggcaccaagctggaaatcaagagaacgcgtcagagttttgggttgttggaccctaaattgtgctatctgttggacggaatcctgttcatttacggagtgatcctgaccgcattgttcctgcgggttaagttttccagatccgcagacgcacccgcttaccaacaagggcagaaccaactctacaatgaacttaatttggggcggagggaagagtacgacgttctggacaaaaggaggggacgagatcccgagatgggcggaaagcctcagcgaaggaagaatccgcaagaggggctttataacgaactccagaaagataaaatggcagaagcctatagtgagattgggatgaagggagaaaggaggaggggtaaaggtcacgatgggttgtaccaaggattgagcacagccactaaagatacctatgatgcgctccacatgcaggccctgccgccaaga

SEQ ID NO: 9449 - DNA, 1923 bp, Artificial Sequence
  Synthetic Polynucloetide
atggccttaccagtgaccgccttgctcctgccgctggccttgctgctccacgccgccaggccggacacagtgctgacacagtctccagctctggctgtgtctcctggcgagagagtgaccatctcttgcaaggccagcgagagcgtgtccaccagaatgcactggtacagacagaagcccggccagcagccaaagctgctgatctacaagaccagcaacctggcctctggcgtgccagccagattttctggctctggcagcggcaccgacttcaccctgaccattgatcccgtggaagccgacgacaccgccacctacttttgtcagcagtcctggaacggccctctgacatttggaagcggcaccaagctggaaatcaagagaggcggaggcggaagtggaggcggaggatctggcggcggaggctctcaggtgcagctgaaagagtctggccctggactggtgcagcctagccaaacactgagcctgacctgtaccgtgtctggcctgtctctgaccagcaatggcgtgtcctggatcagacagcctcctggcaaaggactggaatggctgggcgtgatctggtccaatggcggcacagactacaacagcgccatcaagagccggctgagcttcagcagagacaccagcaagagccaggtgttcctgaagatgaacagcctccagaccgaggataccgccatgtacttttgcgccagacctcggtacaactccggctacttcttcgactattggggccagggcgtgatggtcaccgttagctctacgcgtgggagcggcatccagaaccctgatcctgccgtgtaccagctgcgggatagcaagagcagcgacaagagcgtgtgtctgttcaccgacttcgacagccagaccaacgtgtcccagagcaaggactccgacgtgtacatcaccgataagaccgtgctggacatgcggagcatggacttcaagagcaactccgccgtggcctggtccaacaagtccgatttcgcctgcgccaacgccttcaacaacagcattatccccgaggacacattcttcccaagccccgagagcagctgcgacgtgaagctggtggaaaagagcttcgagacagacaccaacctgaacttccagaacctgagcgtgatcggcttcagaatcctgctgctgaaagtggccggctttaacctgctgatgaccctgcggctgtggtccagccgcgccaagagaagcggatctggcgtgaagcagaccctgaatttcgacctgctgaagctggctggcgacgtggaatccaacccaggcccttctagaggccatatgaccgagtacaagcccacggtgcgcctcgccacccgcgacgacgtccccagggccgtacgcaccctcgccgccgcgttcgccgactaccccgccacgcgccacaccgtcgatccggaccgccacatcgagcgggtcaccgagctgcaagaactcttcctcacgcgcgtcgggctcgacatcggcaaggtgtgggtcgcggacgacggcgccgcggtggcggtctggaccacgccggagagcgtcgaagcgggggcggtgttcgccgagatcggcccgcgcatggccgagttgagcggttcccggctggccgcgcagcaacagatggaaggcctcctggcgccgcaccggcccaaggagcccgcgtggttcctggccaccgtcggcgtctcgcccgaccaccagggcaagggtctgggcagcgccgtcgtgctccccggagtggaggcggccgagcgcgccggggtgcccgccttcctggagacctccgcgccccgcaacctccccttctacgagcggctcggcttcaccgtcaccgccgacgtcgaggtgcccgaaggaccgcgcacctggtgcatgacccgcaagcccggtgcctga

SEQ ID NO: 9450 - DNA, 2019 bp, Artificial Sequence
  Synthetic Polynucloetide
atggccttaccagtgaccgccttgctcctgccgctggccttgctgctccacgccgccaggccggacacagtgctgacacagtctccagctctggctgtgtctcctggcgagagagtgaccatctcttgcaaggccagcgagagcgtgtccaccagaatgcactggtacagacagaagcccggccagcagccaaagctgctgatctacaagaccagcaacctggcctctggcgtgccagccagattttctggctctggcagcggcaccgacttcaccctgaccattgatcccgtggaagccgacgacaccgccacctacttttgtcagcagtcctggaacggccctctgacatttggaagcggcaccaagctggaaatcaagagaggcggaggcggaagtggaggcggaggatctggcggcggaggctctcaggtgcagctgaaagagtctggccctggactggtgcagcctagccaaacactgagcctgacctgtaccgtgtctggcctgtctctgaccagcaatggcgtgtcctggatcagacagcctcctggcaaaggactggaatggctgggcgtgatctggtccaatggcggcacagactacaacagcgccatcaagagccggctgagcttcagcagagacaccagcaagagccaggtgttcctgaagatgaacagcctccagaccgaggataccgccatgtacttttgcgccagacctcggtacaactccggctacttcttcgactattggggccagggcgtgatggtcaccgttagctctctcgaggacctgaagaacgtgttcccacctgaggtggccgtgttcgagcctagcgaggccgagatcagccacacccagaaagccaccctcgtgtgcctggctaccggcttctaccccgaccatgtggaactgtcttggtgggtcaacggcaaagaggtgcacagcggcgtgtctaccgacccccagccactgaaagaacagcccgccctgaacgacagccggtactgcctgagcagcagactgagagtgtccgccaccttctggcagaacccccggaaccacttcagatgccaggtgcagttctacggcctgagcgagaacgacgagtggacccaggacagagccaagcccgtgacccagatcgtgtctgccgaagcctggggcagagccgattgcggctttaccagcgagagctaccagcagggcgtgctgagcgccaccatcctgtacgagatcctgctgggcaaggccaccctgtacgccgtgctggtgtctgccctggtgctgatggctatggtcaagcggaaggacagccggggaagggccaagcgatctggatctggagcaacaaacttctcactactcaaacaagcaggtgacgtggaggagaatcccgggcctactagaggccatatgaccgagtacaagcccacggtgcgcctcgccacccgcgacgacgtccccagggccgtacgcaccctcgccgccgcgttcgccgactaccccgccacgcgccacaccgtcgatccggaccgccacatcgagcgggtcaccgagctgcaagaactcttcctcacgcgcgtcgggctcgacatcggcaaggtgtgggtcgcggacgacggcgccgcggtggcggtctggaccacgccggagagcgtcgaagcgggggcggtgttcgccgagatcggcccgcgcatggccgagttgagcggttcccggctggccgcgcagcaacagatggaaggcctcctggcgccgcaccggcccaaggagcccgcgtggttcctggccaccgtcggcgtctcgcccgaccaccagggcaagggtctgggcagcgccgtcgtgctccccggagtggaggcggccgagcgcgccggggtgcccgccttcctggagacctccgcgccccgcaacctccccttctacgagcggctcggcttcaccgtcaccgccgacgtcgaggtgcccgaaggaccgcgcacctggtgcatgacccgcaagcccggtgcctga

SEQ ID NO: 9451 - DNA, 2169 bp, Artificial Sequence
  Synthetic Polynucloetide
atggccttaccagtgaccgccttgctcctgccgctggccttgctgctccacgccgccaggccggacacagtgctgacacagtctccagctctggctgtgtctcctggcgagagagtgaccatctcttgcaaggccagcgagagcgtgtccaccagaatgcactggtacagacagaagcccggccagcagccaaagctgctgatctacaagaccagcaacctggcctctggcgtgccagccagattttctggctctggcagcggcaccgacttcaccctgaccattgatcccgtggaagccgacgacaccgccacctacttttgtcagcagtcctggaacggccctctgacatttggaagcggcaccaagctggaaatcaagagaggcggaggcggaagtggaggcggaggatctggcggcggaggctctcaggtgcagctgaaagagtctggccctggactggtgcagcctagccaaacactgagcctgacctgtaccgtgtctggcctgtctctgaccagcaatggcgtgtcctggatcagacagcctcctggcaaaggactggaatggctgggcgtgatctggtccaatggcggcacagactacaacagcgccatcaagagccggctgagcttcagcagagacaccagcaagagccaggtgttcctgaagatgaacagcctccagaccgaggataccgccatgtacttttgcgccagacctcggtacaactccggctacttcttcgactattggggccagggcgtgatggtcaccgttagctctacgcgtgagcagaaactgatctcggaagaggatctggggagcggcaccccattcccttctctggcccctcccatcatgctgctggtggacggcaagcagcagatggtggtcgtgtgcctggtgctggatgtggccccacctggactggacagccccatctggtttagcgccggcaatggctctgccctggacgcctttacctacggcccaagccctgccaccgatggcacctggacaaatctggcccacctgagcctgcccagcgaggaactggcttcttgggagcctctcgtgtgccacacaggacctggcgctgagggacacagcagatccacccagcctatgcacctgtctggcgaggccagcaccgccagaacctgtcctcaggaacctctgagaggcacccctggcggagcactgtggctgggagtgctgagactgctgctgttcaagctgctgctgtttgacctgctgctgacctgctcctgtctgtgcgatcctgccggccctctgccttctcctgccaccaccacaagactgagagccctgggcagccacagactgcaccctgccacagagacaggcggcagagaggccacaagcagccctagaccccagcccagagacagaagatggggcgataccccccctggcagaaagcctggatctccagtccgcgccaagagaagcggatctggcgtgaagcagaccctgaatttcgacctgctgaagctggctggcgacgtggaatccaacccaggcccttctagatctagaggccatatgaccgagtacaagcccacggtgcgcctcgccacccgcgacgacgtccccagggccgtacgcaccctcgccgccgcgttcgccgactaccccgccacgcgccacaccgtcgatccggaccgccacatcgagcgggtcaccgagctgcaagaactcttcctcacgcgcgtcgggctcgacatcggcaaggtgtgggtcgcggacgacggcgccgcggtggcggtctggaccacgccggagagcgtcgaagcgggggcggtgttcgccgagatcggcccgcgcatggccgagttgagcggttcccggctggccgcgcagcaacagatggaaggcctcctggcgccgcaccggcccaaggagcccgcgtggttcctggccaccgtcggcgtctcgcccgaccaccagggcaagggtctgggcagcgccgtcgtgctccccggagtggaggcggccgagcgcgccggggtgcccgccttcctggagacctccgcgccccgcaacctccccttctacgagcggctcggcttcaccgtcaccgccgacgtcgaggtgcccgaaggaccgcgcacctggtgcatgacccgcaagcccggtgcctga

SEQ ID NO: 9452 - DNA, 1617 bp, Artificial Sequence
  Synthetic Polynucloetide
atggccttaccagtgaccgccttgctcctgccgctggccttgctgctccacgccgccaggccggacacagtgctgacacagtctccagctctggctgtgtctcctggcgagagagtgaccatctcttgcaaggccagcgagagcgtgtccaccagaatgcactggtacagacagaagcccggccagcagccaaagctgctgatctacaagaccagcaacctggcctctggcgtgccagccagattttctggctctggcagcggcaccgacttcaccctgaccattgatcccgtggaagccgacgacaccgccacctacttttgtcagcagtcctggaacggccctctgacatttggaagcggcaccaagctggaaatcaagagactcgaggacctgaagaacgtgttcccacctgaggtggccgtgttcgagcctagcgaggccgagatcagccacacccagaaagccaccctcgtgtgcctggctaccggcttctaccccgaccatgtggaactgtcttggtgggtcaacggcaaagaggtgcacagcggcgtgtctaccgacccccagccactgaaagaacagcccgccctgaacgacagccggtactgcctgagcagcagactgagagtgtccgccaccttctggcagaacccccggaaccacttcagatgccaggtgcagttctacggcctgagcgagaacgacgagtggacccaggacagagccaagcccgtgacccagatcgtgtctgccgaagcctggggcagagccgattgcggctttaccagcgagagctaccagcagggcgtgctgagcgccaccatcctgtacgagatcctgctgggcaaggccaccctgtacgccgtgctggtgtctgccctggtgctgatggctatggtcaagcggaaggacagccggggaagggccaagcgatctggatctggagcaacaaacttctcactactcaaacaagcaggtgacgtggaggagaatcccgggcctactagaggccatatgaccgagtacaagcccacggtgcgcctcgccacccgcgacgacgtccccagggccgtacgcaccctcgccgccgcgttcgccgactaccccgccacgcgccacaccgtcgatccggaccgccacatcgagcgggtcaccgagctgcaagaactcttcctcacgcgcgtcgggctcgacatcggcaaggtgtgggtcgcggacgacggcgccgcggtggcggtctggaccacgccggagagcgtcgaagcgggggcggtgttcgccgagatcggcccgcgcatggccgagttgagcggttcccggctggccgcgcagcaacagatggaaggcctcctggcgccgcaccggcccaaggagcccgcgtggttcctggccaccgtcggcgtctcgcccgaccaccagggcaagggtctgggcagcgccgtcgtgctccccggagtggaggcggccgagcgcgccggggtgcccgccttcctggagacctccgcgccccgcaacctccccttctacgagcggctcggcttcaccgtcaccgccgacgtcgaggtgcccgaaggaccgcgcacctggtgcatgacccgcaagcccggtgcctga

SEQ ID NO: 9453 - DNA, 924 bp, Artificial Sequence
  Synthetic Polynucloetide
atggccttaccagtgaccgccttgctcctgccgctggccttgctgctccacgccgccaggccggacacagtgctgacacagtctccagctctggctgtgtctcctggcgagagagtgaccatctcttgcaaggccagcgagagcgtgtccaccagaatgcactggtacagacagaagcccggccagcagccaaagctgctgatctacaagaccagcaacctggcctctggcgtgccagccagattttctggctctggcagcggcaccgacttcaccctgaccattgatcccgtggaagccgacgacaccgccacctacttttgtcagcagtcctggaacggccctctgacatttggaagcggcaccaagctggaaatcaagagactcgaggacctgaagaacgtgttcccacctgaggtggccgtgttcgagcctagcgaggccgagatcagccacacccagaaagccaccctcgtgtgcctggctaccggcttctaccccgaccatgtggaactgtcttggtgggtcaacggcaaagaggtgcacagcggcgtgtctaccgacccccagccactgaaagaacagcccgccctgaacgacagccggtactgcctgagcagcagactgagagtgtccgccaccttctggcagaacccccggaaccacttcagatgccaggtgcagttctacggcctgagcgagaacgacgagtggacccaggacagagccaagcccgtgacccagatcgtgtctgccgaagcctggggcagagccgattgcggctttaccagcgagagctaccagcagggcgtgctgagcgccaccatcctgtacgagatcctgctgggcaaggccaccctgtacgccgtgctggtgtctgccctggtgctgatggctatggtcaagcggaaggacagccgggga

SEQ ID NO: 9454 - DNA, 1347 bp, Artificial Sequence
  Synthetic Polynucloetide
atggactggatttggcgcatccttttccttgtcggcgctgctaccggcgcgcattccttcgaacaggtgcagctgaaagagtctggccctggactggtgcagcctagccaaacactgagcctgacctgtaccgtgtctggcctgtctctgaccagcaatggcgtgtcctggatcagacagcctcctggcaaaggactggaatggctgggcgtgatctggtccaatggcggcacagactacaacagcgccatcaagagccggctgagcttcagcagagacaccagcaagagccaggtgttcctgaagatgaacagcctccagaccgaggataccgccatgtacttttgcgccagacctcggtacaactccggctacttcttcgactattggggccagggcgtgatggtcaccgttagctctacgcgtatccagaaccctgatcctgccgtgtaccagctgcgggatagcaagagcagcgacaagagcgtgtgtctgttcaccgacttcgacagccagaccaacgtgtcccagagcaaggactccgacgtgtacatcaccgataagaccgtgctggacatgcggagcatggacttcaagagcaactccgccgtggcctggtccaacaagtccgatttcgcctgcgccaacgccttcaacaacagcattatccccgaggacacattcttcccaagccccgagagcagctgcgacgtgaagctggtggaaaagagcttcgagacagacaccaacctgaacttccagaacctgagcgtgatcggcttcagaatcctgctgctgaaagtggccggctttaacctgctgatgaccctgcggctgtggtccagccgcgccaagagaagcggatctggcgtgaagcagaccctgaatttcgacctgctgaagctggctggcgacgtggaatccaacccaggcccttctagaggccatatggccaagcctttgtctcaagaagaatccaccctcattgaaagagcaacggctacaatcaacagcatccccatctctgaagactacagcgtcgccagcgcagctctctctagcgacggccgcatcttcactggtgtcaatgtatatcattttactgggggaccttgtgcagaactcgtggtgctgggcactgctgctgctgcggcagctggcaacctgacttgtatcgtcgcgatcggaaatgagaacaggggcatcttgagcccctgcggacggtgccgacaggtgcttctcgatctgcatcctgggatcaaagccatagtgaaggacagtgatggacagccgacggcagttgggattcgtgaattgctgccctctggttatgtgtgggagggctga

SEQ ID NO: 9455 - DNA, 846 bp, Artificial Sequence
  Synthetic Polynucloetide
atggactggatttggcgcatccttttccttgtcggcgctgctaccggcgcgcattccttcgaacaggtgcagctgaaagagtctggccctggactggtgcagcctagccaaacactgagcctgacctgtaccgtgtctggcctgtctctgaccagcaatggcgtgtcctggatcagacagcctcctggcaaaggactggaatggctgggcgtgatctggtccaatggcggcacagactacaacagcgccatcaagagccggctgagcttcagcagagacaccagcaagagccaggtgttcctgaagatgaacagcctccagaccgaggataccgccatgtacttttgcgccagacctcggtacaactccggctacttcttcgactattggggccagggcgtgatggtcaccgttagctctacgcgtatccagaaccctgatcctgccgtgtaccagctgcgggatagcaagagcagcgacaagagcgtgtgtctgttcaccgacttcgacagccagaccaacgtgtcccagagcaaggactccgacgtgtacatcaccgataagaccgtgctggacatgcggagcatggacttcaagagcaactccgccgtggcctggtccaacaagtccgatttcgcctgcgccaacgccttcaacaacagcattatccccgaggacacattcttcccaagccccgagagcagctgcgacgtgaagctggtggaaaagagcttcgagacagacaccaacctgaacttccagaacctgagcgtgatcggcttcagaatcctgctgctgaaagtggccggctttaacctgctgatgaccctgcggctgtggtccagc

SEQ ID NO: 9456 - DNA, 1671 bp, Artificial Sequence
  Synthetic Polynucloetide
atggccttaccagtgaccgccttgctcctgccgctggccttgctgctccacgccgccaggccggacacagtgctgacacagtctccagctctggctgtgtctcctggcgagagagtgaccatctcttgcaaggccagcgagagcgtgtccaccagaatgcactggtacagacagaagcccggccagcagccaaagctgctgatctacaagaccagcaacctggcctctggcgtgccagccagattttctggctctggcagcggcaccgacttcaccctgaccattgatcccgtggaagccgacgacaccgccacctacttttgtcagcagtcctggaacggccctctgacatttggaagcggcaccaagctggaaatcaagagactcgaggggaaaccaattcccaaccctcttctgggactggattcaaccggcagcggcgaggacctgaagaacgtgttcccacctgaggtggccgtgttcgagcctagcgaggccgagatcagccacacccagaaagccaccctcgtgtgcctggctaccggcttctaccccgaccatgtggaactgtcttggtgggtcaacggcaaagaggtgcacagcggcgtgtgtaccgacccccagccactgaaagaacagcccgccctgaacgacagccggtactgcctgagcagcagactgagagtgtccgccaccttctggcagaacccccggaaccacttcagatgccaggtgcagttctacggcctgagcgagaacgacgagtggacccaggacagagccaagcccgtgacccagatcgtgtctgccgaagcctggggcagagccgattgcggctttaccagcgagagctaccagcagggcgtgctgagcgccaccatcctgtacgagatcctgctgggcaaggccaccctgtacgccgtgctggtgtctgccctggtgctgatggctatggtcaagcggaaggacagccggggaagggccaagcgatctggatctggagcaacaaacttctcactactcaaacaagcaggtgacgtggaggagaatcccgggcctactagaggccatatgaccgagtacaagcccacggtgcgcctcgccacccgcgacgacgtccccagggccgtacgcaccctcgccgccgcgttcgccgactaccccgccacgcgccacaccgtcgatccggaccgccacatcgagcgggtcaccgagctgcaagaactcttcctcacgcgcgtcgggctcgacatcggcaaggtgtgggtcgcggacgacggcgccgcggtggcggtctggaccacgccggagagcgtcgaagcgggggcggtgttcgccgagatcggcccgcgcatggccgagttgagcggttcccggctggccgcgcagcaacagatggaaggcctcctggcgccgcaccggcccaaggagcccgcgtggttcctggccaccgtcggcgtctcgcccgaccaccagggcaagggtctgggcagcgccgtcgtgctccccggagtggaggcggccgagcgcgccggggtgcccgccttcctggagacctccgcgccccgcaacctccccttctacgagcggctcggcttcaccgtcaccgccgacgtcgaggtgcccgaaggaccgcgcacctggtgcatgacccgcaagcccggtgcctga

SEQ ID NO: 9457 - DNA, 981 bp, Artificial Sequence
  Synthetic Polynucloetide
atggccttaccagtgaccgccttgctcctgccgctggccttgctgctccacgccgccaggccggacacagtgctgacacagtctccagctctggctgtgtctcctggcgagagagtgaccatctcttgcaaggccagcgagagcgtgtccaccagaatgcactggtacagacagaagcccggccagcagccaaagctgctgatctacaagaccagcaacctggcctctggcgtgccagccagattttctggctctggcagcggcaccgacttcaccctgaccattgatcccgtggaagccgacgacaccgccacctacttttgtcagcagtcctggaacggccctctgacatttggaagcggcaccaagctggaaatcaagagactcgaggggaaaccaattcccaaccctcttctgggactggattcaaccggcagcggcgaggacctgaagaacgtgttcccacctgaggtggccgtgttcgagcctagcgaggccgagatcagccacacccagaaagccaccctcgtgtgcctggctaccggcttctaccccgaccatgtggaactgtcttggtgggtcaacggcaaagaggtgcacagcggcgtgtgtaccgacccccagccactgaaagaacagcccgccctgaacgacagccggtactgcctgagcagcagactgagagtgtccgccaccttctggcagaacccccggaaccacttcagatgccaggtgcagttctacggcctgagcgagaacgacgagtggacccaggacagagccaagcccgtgacccagatcgtgtctgccgaagcctggggcagagccgattgcggctttaccagcgagagctaccagcagggcgtgctgagcgccaccatcctgtacgagatcctgctgggcaaggccaccctgtacgccgtgctggtgtctgccctggtgctgatggctatggtcaagcggaaggacagccggggatga

SEQ ID NO: 9458 - DNA, 1383 bp, Artificial Sequence
  Synthetic Polynucloetide
atggactggatttggcgcatccttttccttgtcggcgctgctaccggcgcgcattccttcgaacaggtgcagctgaaagagtctggccctggactggtgcagcctagccaaacactgagcctgacctgtaccgtgtctggcctgtctctgaccagcaatggcgtgtcctggatcagacagcctcctggcaaaggactggaatggctgggcgtgatctggtccaatggcggcacagactacaacagcgccatcaagagccggctgagcttcagcagagacaccagcaagagccaggtgttcctgaagatgaacagcctccagaccgaggataccgccatgtacttttgcgccagacctcggtacaactccggctacttcttcgactattggggccagggcgtgatggtcaccgttagctctacgcgtgagcagaaactgatctcggaagaggatgggagcggcatccagaaccctgatcctgccgtgtaccagctgcgggatagcaagagcagcgacaagagcgtgtgtctgttcaccgacttcgacagccagaccaacgtgtcccagagcaaggactccgacgtgtacatcaccgataagtgcgtgctggacatgcggagcatggacttcaagagcaactccgccgtggcctggtccaacaagtccgatttcgcctgcgccaacgccttcaacaacagcattatccccgaggacacattcttcccaagccccgagagcagctgcgacgtgaagctggtggaaaagagcttcgagacagacaccaacctgaacttccagaacctgagcgtgatcggcttcagaatcctgctgctgaaagtggccggctttaacctgctgatgaccctgcggctgtggtccagccgcgccaagagaagcggatctggcgtgaagcagaccctgaatttcgacctgctgaagctggctggcgacgtggaatccaacccaggcccttctagaggccatatggccaagcctttgtctcaagaagaatccaccctcattgaaagagcaacggctacaatcaacagcatccccatctctgaagactacagcgtcgccagcgcagctctctctagcgacggccgcatcttcactggtgtcaatgtatatcattttactgggggaccttgtgcagaactcgtggtgctgggcactgctgctgctgcggcagctggcaacctgacttgtatcgtcgcgatcggaaatgagaacaggggcatcttgagcccctgcggacggtgccgacaggtgcttctcgatctgcatcctgggatcaaagccatagtgaaggacagtgatggacagccgacggcagttgggattcgtgaattgctgccctctggttatgtgtgggagggctga

SEQ ID NO: 9459 - DNA, 885 bp, Artificial Sequence
  Synthetic Polynucloetide
atggactggatttggcgcatccttttccttgtcggcgctgctaccggcgcgcattccttcgaacaggtgcagctgaaagagtctggccctggactggtgcagcctagccaaacactgagcctgacctgtaccgtgtctggcctgtctctgaccagcaatggcgtgtcctggatcagacagcctcctggcaaaggactggaatggctgggcgtgatctggtccaatggcggcacagactacaacagcgccatcaagagccggctgagcttcagcagagacaccagcaagagccaggtgttcctgaagatgaacagcctccagaccgaggataccgccatgtacttttgcgccagacctcggtacaactccggctacttcttcgactattggggccagggcgtgatggtcaccgttagctctacgcgtgagcagaaactgatctcggaagaggatgggagcggcatccagaaccctgatcctgccgtgtaccagctgcgggatagcaagagcagcgacaagagcgtgtgtctgttcaccgacttcgacagccagaccaacgtgtcccagagcaaggactccgacgtgtacatcaccgataagtgcgtgctggacatgcggagcatggacttcaagagcaactccgccgtggcctggtccaacaagtccgatttcgcctgcgccaacgccttcaacaacagcattatccccgaggacacattcttcccaagccccgagagcagctgcgacgtgaagctggtggaaaagagcttcgagacagacaccaacctgaacttccagaacctgagcgtgatcggcttcagaatcctgctgctgaaagtggccggctttaacctgctgatgaccctgcggctgtggtccagctga

SEQ ID NO: 9460 - DNA, 1923 bp, Artificial Sequence
  Synthetic Polynucloetide
atggccttaccagtgaccgccttgctcctgccgctggccttgctgctccacgccgccaggccggacacagtgctgacacagtctccagctctggctgtgtctcctggcgagagagtgaccatctcttgcaaggccagcgagagcgtgtccaccagaatgcactggtacagacagaagcccggccagcagccaaagctgctgatctacaagaccagcaacctggcctctggcgtgccagccagattttctggctctggcagcggcaccgacttcaccctgaccattgatcccgtggaagccgacgacaccgccacctacttttgtcagcagtcctggaacggccctctgacatttggaagcggcaccaagctggaaatcaagagaggcggaggcggaagtggaggcggaggatctggcggcggaggctctcaggtgcagctgaaagagtctggccctggactggtgcagcctagccaaacactgagcctgacctgtaccgtgtctggcctgtctctgaccagcaatggcgtgtcctggatcagacagcctcctggcaaaggactggaatggctgggcgtgatctggtccaatggcggcacagactacaacagcgccatcaagagccggctgagcttcagcagagacaccagcaagagccaggtgttcctgaagatgaacagcctccagaccgaggataccgccatgtacttttgcgccagacctcggtacaactccggctacttcttcgactattggggccagggcgtgatggtcaccgttagctctacgcgtgggagcggcatccagaaccctgatcctgccgtgtaccagctgcgggatagcaagagcagcgacaagagcgtgtgtctgttcaccgacttcgacagccagaccaacgtgtcccagagcaaggactccgacgtgtacatcaccgataagaccgtgctggacatgcggagcatggacttcaagagcaactccgccgtggcctggtccaacaagtccgatttcgcctgcgccaacgccttcaacaacagcattatccccgaggacacattcttcccaagcagcgacgtgccctgcgacgtgaagctggtggaaaagagcttcgagacagacaccaacctgaacttccagaacctgagcgtgatcggcttcagaatcctgctgctgaaagtggccggctttaacctgctgatgaccctgcggctgtggtccagccgcgccaagagaagcggatctggcgtgaagcagaccctgaatttcgacctgctgaagctggctggcgacgtggaatccaacccaggcccttctagaggccatatgaccgagtacaagcccacggtgcgcctcgccacccgcgacgacgtccccagggccgtacgcaccctcgccgccgcgttcgccgactaccccgccacgcgccacaccgtcgatccggaccgccacatcgagcgggtcaccgagctgcaagaactcttcctcacgcgcgtcgggctcgacatcggcaaggtgtgggtcgcggacgacggcgccgcggtggcggtctggaccacgccggagagcgtcgaagcgggggcggtgttcgccgagatcggcccgcgcatggccgagttgagcggttcccggctggccgcgcagcaacagatggaaggcctcctggcgccgcaccggcccaaggagcccgcgtggttcctggccaccgtcggcgtctcgcccgaccaccagggcaagggtctgggcagcgccgtcgtgctccccggagtggaggcggccgagcgcgccggggtgcccgccttcctggagacctccgcgccccgcaacctccccttctacgagcggctcggcttcaccgtcaccgccgacgtcgaggtgcccgaaggaccgcgcacctggtgcatgacccgcaagcccggtgcctga

SEQ ID NO: 9461 - DNA, 2019 bp, Artificial Sequence
  Synthetic Polynucloetide
atggccttaccagtgaccgccttgctcctgccgctggccttgctgctccacgccgccaggccggacacagtgctgacacagtctccagctctggctgtgtctcctggcgagagagtgaccatctcttgcaaggccagcgagagcgtgtccaccagaatgcactggtacagacagaagcccggccagcagccaaagctgctgatctacaagaccagcaacctggcctctggcgtgccagccagattttctggctctggcagcggcaccgacttcaccctgaccattgatcccgtggaagccgacgacaccgccacctacttttgtcagcagtcctggaacggccctctgacatttggaagcggcaccaagctggaaatcaagagaggcggaggcggaagtggaggcggaggatctggcggcggaggctctcaggtgcagctgaaagagtctggccctggactggtgcagcctagccaaacactgagcctgacctgtaccgtgtctggcctgtctctgaccagcaatggcgtgtcctggatcagacagcctcctggcaaaggactggaatggctgggcgtgatctggtccaatggcggcacagactacaacagcgccatcaagagccggctgagcttcagcagagacaccagcaagagccaggtgttcctgaagatgaacagcctccagaccgaggataccgccatgtacttttgcgccagacctcggtacaactccggctacttcttcgactattggggccagggcgtgatggtcaccgttagctctctcgaggacctgaagaacgtgttcccacctgaggtggccgtgttcgagcctagcaaggccgagatcgcccacacccagaaagccaccctcgtgtgcctggctaccggcttctaccccgaccatgtggaactgtcttggtgggtcaacggcaaagaggtgcacagcggcgtgtctaccgacccccagccactgaaagaacagcccgccctgaacgacagccggtactgcctgagcagcagactgagagtgtccgccaccttctggcagaacccccggaaccacttcagatgccaggtgcagttctacggcctgagcgagaacgacgagtggacccaggacagagccaagcccgtgacccagatcgtgtctgccgaagcctggggcagagccgattgcggcatcaccagcgccagctaccaccagggcgtgctgagcgccaccatcctgtacgagatcctgctgggcaaggccaccctgtacgccgtgctggtgtctgccctggtgctgatggctatggtcaagcggaaggacagccggggaagggccaagcgatctggatctggagcaacaaacttctcactactcaaacaagcaggtgacgtggaggagaatcccgggcctactagaggccatatgaccgagtacaagcccacggtgcgcctcgccacccgcgacgacgtccccagggccgtacgcaccctcgccgccgcgttcgccgactaccccgccacgcgccacaccgtcgatccggaccgccacatcgagcgggtcaccgagctgcaagaactcttcctcacgcgcgtcgggctcgacatcggcaaggtgtgggtcgcggacgacggcgccgcggtggcggtctggaccacgccggagagcgtcgaagcgggggcggtgttcgccgagatcggcccgcgcatggccgagttgagcggttcccggctggccgcgcagcaacagatggaaggcctcctggcgccgcaccggcccaaggagcccgcgtggttcctggccaccgtcggcgtctcgcccgaccaccagggcaagggtctgggcagcgccgtcgtgctccccggagtggaggcggccgagcgcgccggggtgcccgccttcctggagacctccgcgccccgcaacctccccttctacgagcggctcggcttcaccgtcaccgccgacgtcgaggtgcccgaaggaccgcgcacctggtgcatgacccgcaagcccggtgcctga

SEQ ID NO: 9462 - DNA, 2088 bp, Artificial Sequence
  Synthetic Polynucloetide
atggccttaccagtgaccgccttgctcctgccgctggccttgctgctccacgccgccaggccggacacagtgctgacacagtctccagctctggctgtgtctcctggcgagagagtgaccatctcttgcaaggccagcgagagcgtgtccaccagaatgcactggtacagacagaagcccggccagcagccaaagctgctgatctacaagaccagcaacctggcctctggcgtgccagccagattttctggctctggcagcggcaccgacttcaccctgaccattgatcccgtggaagccgacgacaccgccacctacttttgtcagcagtcctggaacggccctctgacatttggaagcggcaccaagctggaaatcaagagaggcggaggcggaagtggaggcggaggatctggcggcggaggctctcaggtgcagctgaaagagtctggccctggactggtgcagcctagccaaacactgagcctgacctgtaccgtgtctggcctgtctctgaccagcaatggcgtgtcctggatcagacagcctcctggcaaaggactggaatggctgggcgtgatctggtccaatggcggcacagactacaacagcgccatcaagagccggctgagcttcagcagagacaccagcaagagccaggtgttcctgaagatgaacagcctccagaccgaggataccgccatgtacttttgcgccagacctcggtacaactccggctacttcttcgactattggggccagggcgtgatggtcaccgttagctctacgcgtgggtctggaggcggaggcagcggcggaggcgggagcggcgacggtaacgaggagatgggaggaatcactcaaaccccttacaaagtctcaatttcaggaacaactgttatccttacatgtccccagtatcctggcagcgagatcctttggcagcataacgacaagaatatagggggagatgaagacgataagaatatcggatctgacgaggatcacttgagcctgaaagagttctccgagcttgaacaaagcggatattatgtgtgctatccgcgcgggtcaaagccggaagacgctaacttttacctttatctccgagccagagtgtgcgaaaattgcatggaaatggacgttatgtccgttgctacaatagttatcgtagatatatgcatcacgggtggactgcttctgctggtttattattggtccaagaatagaaaggccaaagctaaacccgtgaccagaggcgctggcgcaggcggaaggcaaaggggacaaaacaaagaacggccaccaccagtgccaaatccagattatgagcctattcggaaaggacagagggacctgtactctggcctgaatcagagaagaatccgcgccaagagaagcggatctggcgtgaagcagaccctgaatttcgacctgctgaagctggctggcgacgtggaatccaacccaggcccttctagaggccatatgaccgagtacaagcccacggtgcgcctcgccacccgcgacgacgtccccagggccgtacgcaccctcgccgccgcgttcgccgactaccccgccacgcgccacaccgtcgatccggaccgccacatcgagcgggtcaccgagctgcaagaactcttcctcacgcgcgtcgggctcgacatcggcaaggtgtgggtcgcggacgacggcgccgcggtggcggtctggaccacgccggagagcgtcgaagcgggggcggtgttcgccgagatcggcccgcgcatggccgagttgagcggttcccggctggccgcgcagcaacagatggaaggcctcctggcgccgcaccggcccaaggagcccgcgtggttcctggccaccgtcggcgtctcgcccgaccaccagggcaagggtctgggcagcgccgtcgtgctccccggagtggaggcggccgagcgcgccggggtgcccgccttcctggagacctccgcgccccgcaacctccccttctacgagcggctcggcttcaccgtcaccgccgacgtcgaggtgcccgaaggaccgcgcacctggtgcatgacccgcaagcccggtgcctga

SEQ ID NO: 9463 - DNA, 1983 bp, Artificial Sequence
  Synthetic Polynucloetide
atggccttaccagtgaccgccttgctcctgccgctggccttgctgctccacgccgccaggccggacacagtgctgacacagtctccagctctggctgtgtctcctggcgagagagtgaccatctcttgcaaggccagcgagagcgtgtccaccagaatgcactggtacagacagaagcccggccagcagccaaagctgctgatctacaagaccagcaacctggcctctggcgtgccagccagattttctggctctggcagcggcaccgacttcaccctgaccattgatcccgtggaagccgacgacaccgccacctacttttgtcagcagtcctggaacggccctctgacatttggaagcggcaccaagctggaaatcaagagaggcggaggcggaagtggaggcggaggatctggcggcggaggctctcaggtgcagctgaaagagtctggccctggactggtgcagcctagccaaacactgagcctgacctgtaccgtgtctggcctgtctctgaccagcaatggcgtgtcctggatcagacagcctcctggcaaaggactggaatggctgggcgtgatctggtccaatggcggcacagactacaacagcgccatcaagagccggctgagcttcagcagagacaccagcaagagccaggtgttcctgaagatgaacagcctccagaccgaggataccgccatgtacttttgcgccagacctcggtacaactccggctacttcttcgactattggggccagggcgtgatggtcaccgttagctctacgcgtgggtctggaggcggaggcagcggcggaggcgggagcggcttcaagatccccatcgaggaactggaagatcgggtgttcgtgaactgcaacacctctatcacctgggtggaaggcaccgtgggaacactgctgagcgacatcaccagactggacctcggcaagcggattctggaccctcggggcatctacagatgcaacggcaccgacatctacaaggacaaagaaagcaccgtgcaggtccactacagaatgtgccagtcctgcgtggaactggaccctgctacagtggccggcatcatcgtgaccgatgtgatcgctactctgctgctggctctgggagtgttctgcttcgccggacacgaaacaggcagactgtctggcgctgccgatacacaggccctgctgagaaacgaccaagtgtatcagcccctgcgcgacagagatgatgcccagtattctcacctcggcggcaactgggctagaaacaagcgcgccaagagaagcggatctggcgtgaagcagaccctgaatttcgacctgctgaagctggctggcgacgtggaatccaacccaggcccttctagaggccatatgaccgagtacaagcccacggtgcgcctcgccacccgcgacgacgtccccagggccgtacgcaccctcgccgccgcgttcgccgactaccccgccacgcgccacaccgtcgatccggaccgccacatcgagcgggtcaccgagctgcaagaactcttcctcacgcgcgtcgggctcgacatcggcaaggtgtgggtcgcggacgacggcgccgcggtggcggtctggaccacgccggagagcgtcgaagcgggggcggtgttcgccgagatcggcccgcgcatggccgagttgagcggttcccggctggccgcgcagcaacagatggaaggcctcctggcgccgcaccggcccaaggagcccgcgtggttcctggccaccgtcggcgtctcgcccgaccaccagggcaagggtctgggcagcgccgtcgtgctccccggagtggaggcggccgagcgcgccggggtgcccgccttcctggagacctccgcgccccgcaacctccccttctacgagcggctcggcttcaccgtcaccgccgacgtcgaggtgcccgaaggaccgcgcacctggtgcatgacccgcaagcccggtgcctga

SEQ ID NO: 9464 - DNA, 2013 bp, Artificial Sequence
  Synthetic Polynucloetide
atggccttaccagtgaccgccttgctcctgccgctggccttgctgctccacgccgccaggccggacacagtgctgacacagtctccagctctggctgtgtctcctggcgagagagtgaccatctcttgcaaggccagcgagagcgtgtccaccagaatgcactggtacagacagaagcccggccagcagccaaagctgctgatctacaagaccagcaacctggcctctggcgtgccagccagattttctggctctggcagcggcaccgacttcaccctgaccattgatcccgtggaagccgacgacaccgccacctacttttgtcagcagtcctggaacggccctctgacatttggaagcggcaccaagctggaaatcaagagaggcggaggcggaagtggaggcggaggatctggcggcggaggctctcaggtgcagctgaaagagtctggccctggactggtgcagcctagccaaacactgagcctgacctgtaccgtgtctggcctgtctctgaccagcaatggcgtgtcctggatcagacagcctcctggcaaaggactggaatggctgggcgtgatctggtccaatggcggcacagactacaacagcgccatcaagagccggctgagcttcagcagagacaccagcaagagccaggtgttcctgaagatgaacagcctccagaccgaggataccgccatgtacttttgcgccagacctcggtacaactccggctacttcttcgactattggggccagggcgtgatggtcaccgttagctctacgcgtgggtctggaggcggaggcagcggcggaggcgggagcggccagagcatcaagggcaaccacctggtcaaggtgtacgactaccaagaggacggcagcgtgctgctgacatgtgatgccgaggccaagaacatcacctggtttaaggacggcaagatgatcggcttcctgaccgaggacaagaagaagtggaacctgggcagcaacgctaaggaccccagaggcatgtatcagtgcaagggcagccagaacaagagcaagcccctccaggtgtactaccggatgtgccagaactgcatcgagctgaacgccgctaccatcagcggctttctgttcgccgagatcgtgtccatcttcgtgctggccgtgggcgtgtactttatcgctggacaggatggcgtgcggcagagcagagcttccgataagcaaaccctgctgcctaacgaccagctgtaccagcctctgaaggacagagaggacgaccagtacagccacctccagggcaatcagctgagaagaaaccgcgccaagagaagcggatctggcgtgaagcagaccctgaatttcgacctgctgaagctggctggcgacgtggaatccaacccaggcccttctagaggccatatgaccgagtacaagcccacggtgcgcctcgccacccgcgacgacgtccccagggccgtacgcaccctcgccgccgcgttcgccgactaccccgccacgcgccacaccgtcgatccggaccgccacatcgagcgggtcaccgagctgcaagaactcttcctcacgcgcgtcgggctcgacatcggcaaggtgtgggtcgcggacgacggcgccgcggtggcggtctggaccacgccggagagcgtcgaagcgggggcggtgttcgccgagatcggcccgcgcatggccgagttgagcggttcccggctggccgcgcagcaacagatggaaggcctcctggcgccgcaccggcccaaggagcccgcgtggttcctggccaccgtcggcgtctcgcccgaccaccagggcaagggtctgggcagcgccgtcgtgctccccggagtggaggcggccgagcgcgccggggtgcccgccttcctggagacctccgcgccccgcaacctccccttctacgagcggctcggcttcaccgtcaccgccgacgtcgaggtgcccgaaggaccgcgcacctggtgcatgacccgcaagcccggtgcctga

SEQ ID NO: 9465 - DNA, 1962 bp, Artificial Sequence
  Synthetic Polynucloetide
atggccttaccagtgaccgccttgctcctgccgctggccttgctgctccacgccgccaggccggacacagtgctgacacagtctccagctctggctgtgtctcctggcgagagagtgaccatctcttgcaaggccagcgagagcgtgtccaccagaatgcactggtacagacagaagcccggccagcagccaaagctgctgatctacaagaccagcaacctggcctctggcgtgccagccagattttctggctctggcagcggcaccgacttcaccctgaccattgatcccgtggaagccgacgacaccgccacctacttttgtcagcagtcctggaacggccctctgacatttggaagcggcaccaagctggaaatcaagagaggcggaggcggaagtggaggcggaggatctggcggcggaggctctcaggtgcagctgaaagagtctggccctggactggtgcagcctagccaaacactgagcctgacctgtaccgtgtctggcctgtctctgaccagcaatggcgtgtcctggatcagacagcctcctggcaaaggactggaatggctgggcgtgatctggtccaatggcggcacagactacaacagcgccatcaagagccggctgagcttcagcagagacaccagcaagagccaggtgttcctgaagatgaacagcctccagaccgaggataccgccatgtacttttgcgccagacctcggtacaactccggctacttcttcgactattggggccagggcgtgatggtcaccgttagctctacgcgtgggtctggaggcggaggcagcggcggaggcgggagcggccagagttttgggttgttggaccctaaattgtgctatctgttggacggaatcctgttcatttacggagtgatcctgaccgcattgttcctgcgggttaagttttccagatccgcagacgcacccgcttaccaacaagggcagaaccaactctacaatgaacttaatttggggcggagggaagagtacgacgttctggacaaaaggaggggacgagatcccgagatgggcggaaagcctcagcgaaggaagaatccgcaagaggggctttataacgaactccagaaagataaaatggcagaagcctatagtgagattgggatgaagggagaaaggaggaggggtaaaggtcacgatgggttgtaccaaggattgagcacagccactaaagatacctatgatgcgctccacatgcaggccctgccgccaagacgcgccaagagaagcggatctggcgtgaagcagaccctgaatttcgacctgctgaagctggctggcgacgtggaatccaacccaggcccttctagaggccatatgaccgagtacaagcccacggtgcgcctcgccacccgcgacgacgtccccagggccgtacgcaccctcgccgccgcgttcgccgactaccccgccacgcgccacaccgtcgatccggaccgccacatcgagcgggtcaccgagctgcaagaactcttcctcacgcgcgtcgggctcgacatcggcaaggtgtgggtcgcggacgacggcgccgcggtggcggtctggaccacgccggagagcgtcgaagcgggggcggtgttcgccgagatcggcccgcgcatggccgagttgagcggttcccggctggccgcgcagcaacagatggaaggcctcctggcgccgcaccggcccaaggagcccgcgtggttcctggccaccgtcggcgtctcgcccgaccaccagggcaagggtctgggcagcgccgtcgtgctccccggagtggaggcggccgagcgcgccggggtgcccgccttcctggagacctccgcgccccgcaacctccccttctacgagcggctcggcttcaccgtcaccgccgacgtcgaggtgcccgaaggaccgcgcacctggtgcatgacccgcaagcccggtgcctga

SEQ ID NO: 9466 - DNA, 2262 bp, Artificial Sequence
  Synthetic Polynucloetide
atggccttaccagtgaccgccttgctcctgccgctggccttgctgctccacgccgccaggccggaagtgcagctggttgaatctggcggaggactggttcagcctggcggatctctgagactgtcttgtgccgccagcggcttcagcttcagcgacttttggatgagctgggtccgacaggcccctggcaaaggacttgaatgggtcgccacaatcagccaggccggcagcgagaaggactacgtggactctgtgaagggcagattcaccatcagccgggacaacgccaagaagtccctgtacctccagatgaacagcctgagagccgaggacaccgccgtgtactattgtgcctctggcgtgtacagcttcgactacagaggccagggcaccctggtcacagtctcttctggtaccggcggaggcggatctggcggcggaggtagcggtggcggaggatctgaattcgacacagtgctgacacagtctccagctctggctgtgtctcctggcgagagagtgaccatctcttgcaaggccagcgagagcgtgtccaccagaatgcactggtacagacagaagcccggccagcagccaaagctgctgatctacaagaccagcaacctggcctctggcgtgccagccagattttctggctctggcagcggcaccgacttcaccctgaccattgatcccgtggaagccgacgacaccgccacctacttttgtcagcagtcctggaacggccctctgacatttggaagcggcaccaagctggaaatcaagagactcgaggacctgaagaacgtgttcccacctgaggtggccgtgttcgagcctagcgaggccgagatcagccacacccagaaagccaccctcgtgtgcctggctaccggcttctaccccgaccatgtggaactgtcttggtgggtcaacggcaaagaggtgcacagcggcgtgtgtaccgacccccagccactgaaagaacagcccgccctgaacgacagccggtactgcctgagcagcagactgagagtgtccgccaccttctggcagaacccccggaaccacttcagatgccaggtgcagttctacggcctgagcgagaacgacgagtggacccaggacagagccaagcccgtgacccagatcgtgtctgccgaagcctggggcagagccgattgcggctttaccagcgagagctaccagcagggcgtgctgagcgccaccatcctgtacgagatcctgctgggcaaggccaccctgtacgccgtgctggtgtctgccctggtgctgatggctatggtcaagcggaaggacagccggggaagggccaagcgatctggatctggagcaacaaacttctcactactcaaacaagcaggtgacgtggaggagaatcccgggcctactagtatggactggatttggcgcatccttttccttgtcggcgctgctaccggcgcgcattccttcgaacaggtgcagctgaaagagtctggccctggactggtgcagcctagccaaacactgagcctgacctgtaccgtgtctggcctgtctctgaccagcaatggcgtgtcctggatcagacagcctcctggcaaaggactggaatggctgggcgtgatctggtccaatggcggcacagactacaacagcgccatcaagagccggctgagcttcagcagagacaccagcaagagccaggtgttcctgaagatgaacagcctccagaccgaggataccgccatgtacttttgcgccagacctcggtacaactccggctacttcttcgactattggggccagggcgtgatggtcaccgttagctctacgcgtatccagaaccctgatcctgccgtgtaccagctgcgggatagcaagagcagcgacaagagcgtgtgtctgttcaccgacttcgacagccagaccaacgtgtcccagagcaaggactccgacgtgtacatcaccgataagtgcgtgctggacatgcggagcatggacttcaagagcaactccgccgtggcctggtccaacaagtccgatttcgcctgcgccaacgccttcaacaacagcattatccccgaggacacattcttcccaagccccgagagcagctgcgacgtgaagctggtggaaaagagcttcgagacagacaccaacctgaacttccagaacctgagcgtgatcggcttcagaatcctgctgctgaaagtggccggctttaacctgctgatgaccctgcggctgtggtccagc

SEQ ID NO: 9467 - DNA, 2274 bp, Artificial Sequence
  Synthetic Polynucloetide
atggccttaccagtgaccgccttgctcctgccgctggccttgctgctccacgccgccaggccggaagtgcagctggttgaatctggcggaggactggttcagcctggcggatctctgagactgtcttgtgccgccagcggcttcagcttcagcgacttttggatgagctgggtccgacaggcccctggcaaaggacttgaatgggtcgccacaatcagccaggccggcagcgagaaggactacgtggactctgtgaagggcagattcaccatcagccgggacaacgccaagaagtccctgtacctccagatgaacagcctgagagccgaggacaccgccgtgtactattgtgcctctggcgtgtacagcttcgactacagaggccagggcaccctggtcacagtctcttctggtaccggcggaggcggatctggcggcggaggtagcggtggcggaggatctgaattcgacacagtgctgacacagtctccagctctggctgtgtctcctggcgagagagtgaccatctcttgcaaggccagcgagagcgtgtccaccagaatgcactggtacagacagaagcccggccagcagccaaagctgctgatctacaagaccagcaacctggcctctggcgtgccagccagattttctggctctggcagcggcaccgacttcaccctgaccattgatcccgtggaagccgacgacaccgccacctacttttgtcagcagtcctggaacggccctctgacatttggaagcggcaccaagctggaaatcaagagactcgagatccagaaccctgatcctgccgtgtaccagctgcgggatagcaagagcagcgacaagagcgtgtgtctgttcaccgacttcgacagccagaccaacgtgtcccagagcaaggactccgacgtgtacatcaccgataagtgcgtgctggacatgcggagcatggacttcaagagcaactccgccgtggcctggtccaacaagtccgatttcgcctgcgccaacgccttcaacaacagcattatccccgaggacacattcttcccaagccccgagagcagctgcgacgtgaagctggtggaaaagagcttcgagacagacaccaacctgaacttccagaacctgagcgtgatcggcttcagaatcctgctgctgaaagtggccggctttaacctgctgatgaccctgcggctgtggtccagccgcgccaagagaagcggatctggcgtgaagcagaccctgaatttcgacctgctgaagctggctggcgacgtggaatccaacccaggccctactagtatggactggatttggcgcatccttttccttgtcggcgctgctaccggcgcgcattccttcgaacaggtgcagctgaaagagtctggccctggactggtgcagcctagccaaacactgagcctgacctgtaccgtgtctggcctgtctctgaccagcaatggcgtgtcctggatcagacagcctcctggcaaaggactggaatggctgggcgtgatctggtccaatggcggcacagactacaacagcgccatcaagagccggctgagcttcagcagagacaccagcaagagccaggtgttcctgaagatgaacagcctccagaccgaggataccgccatgtacttttgcgccagacctcggtacaactccggctacttcttcgactattggggccagggcgtgatggtcaccgttagctctacgcgtgaggacctgaagaacgtgttcccacctgaggtggccgtgttcgagcctagcgaggccgagatcagccacacccagaaagccaccctcgtgtgcctggctaccggcttctaccccgaccatgtggaactgtcttggtgggtcaacggcaaagaggtgcacagcggcgtgtgtaccgacccccagccactgaaagaacagcccgccctgaacgacagccggtactgcctgagcagcagactgagagtgtccgccaccttctggcagaacccccggaaccacttcagatgccaggtgcagttctacggcctgagcgagaacgacgagtggacccaggacagagccaagcccgtgacccagatcgtgtctgccgaagcctggggcagagccgattgcggctttaccagcgagagctaccagcagggcgtgctgagcgccaccatcctgtacgagatcctgctgggcaaggccaccctgtacgccgtgctggtgtctgccctggtgctgatggctatggtcaagcggaaggacagccgggga

SEQ ID NO: 9468 - DNA, 2850 bp, Artificial Sequence
  Synthetic Polynucloetide
atggccttaccagtgaccgccttgctcctgccgctggccttgctgctccacgccgccaggccggaagtgcagctggttgaatctggcggaggactggttcagcctggcggatctctgagactgtcttgtgccgccagcggcttcagcttcagcgacttttggatgagctgggtccgacaggcccctggcaaaggacttgaatgggtcgccacaatcagccaggccggcagcgagaaggactacgtggactctgtgaagggcagattcaccatcagccgggacaacgccaagaagtccctgtacctccagatgaacagcctgagagccgaggacaccgccgtgtactattgtgcctctggcgtgtacagcttcgactacagaggccagggcaccctggtcacagtctcttctggtaccggcggaggcggatctggcggcggaggtagcggtggcggaggatctgaattcgacacagtgctgacacagtctccagctctggctgtgtctcctggcgagagagtgaccatctcttgcaaggccagcgagagcgtgtccaccagaatgcactggtacagacagaagcccggccagcagccaaagctgctgatctacaagaccagcaacctggcctctggcgtgccagccagattttctggctctggcagcggcaccgacttcaccctgaccattgatcccgtggaagccgacgacaccgccacctacttttgtcagcagtcctggaacggccctctgacatttggaagcggcaccaagctggaaatcaagagactcgaggacctgaagaacgtgttcccacctgaggtggccgtgttcgagcctagcgaggccgagatcagccacacccagaaagccaccctcgtgtgcctggctaccggcttctaccccgaccatgtggaactgtcttggtgggtcaacggcaaagaggtgcacagcggcgtgtctaccgacccccagccactgaaagaacagcccgccctgaacgacagccggtactgcctgagcagcagactgagagtgtccgccaccttctggcagaacccccggaaccacttcagatgccaggtgcagttctacggcctgagcgagaacgacgagtggacccaggacagagccaagcccgtgacccagatcgtgtctgccgaagcctggggcagagccgattgcggatcccagagcttcggcctgctggaccccaagctgtgctacctgctggatggcatcctgttcatctacggcgtgatcctgaccgccctgttcctgagagtgaagttcagcagaagcgccgacgcccctgcctaccagcagggacagaaccaactgtacaacgagctgaacctgggcagacgggaagagtacgacgtgctggacaagcggagaggcagggaccctgagatgggcggaaagccccagcggagaaagaacccccaggaaggactgtataacgaactccagaaagacaagatggccgaagcctacagcgagatcggcatgaagggcgagcggagaagaggcaagggccacgatggcctgtaccagggcctgagcaccgccaccaaggacacctatgacgccctgcacatgcaggccctgcctccaagaagggccaagcgatctggatctggagcaacaaacttctcactactcaaacaagcaggtgacgtggaggagaatcccgggcctactagtatggactggatttggcgcatccttttccttgtcggcgctgctaccggcgcgcattccttcgaacaggtgcagctgaaagagtctggccctggactggtgcagcctagccaaacactgagcctgacctgtaccgtgtctggcctgtctctgaccagcaatggcgtgtcctggatcagacagcctcctggcaaaggactggaatggctgggcgtgatctggtccaatggcggcacagactacaacagcgccatcaagagccggctgagcttcagcagagacaccagcaagagccaggtgttcctgaagatgaacagcctccagaccgaggataccgccatgtacttttgcgccagacctcggtacaactccggctacttcttcgactattggggccagggcgtgatggtcaccgttagctctacgcgtatccagaaccctgatcctgccgtgtaccagctgcgggatagcaagagcagcgacaagagcgtgtgtctgttcaccgacttcgacagccagaccaacgtgtcccagagcaaggactccgacgtgtacatcaccgataagaccgtgctggacatgcggagcatggacttcaagagcaactccgccgtggcctggtccaacaagtccgatttcgcctgcgccaacgccttcaacaacagcattatccccgaggacacattcttcccaagccccgagagcagctgcggtacccagagttttgggttgttggaccctaaattgtgctatctgttggacggaatcctgttcatttacggagtgatcctgaccgcattgttcctgcgggttaagttttccagatccgcagacgcacccgcttaccaacaagggcagaaccaactctacaatgaacttaatttggggcggagggaagagtacgacgttctggacaaaaggaggggacgagatcccgagatgggcggaaagcctcagcgaaggaagaatccgcaagaggggctttataacgaactccagaaagataaaatggcagaagcctatagtgagattgggatgaagggagaaaggaggaggggtaaaggtcacgatgggttgtaccaaggattgagcacagccactaaagatacctatgatgcgctccacatgcaggccctgccgccaaga

SEQ ID NO: 9469 - DNA, 2340 bp, Artificial Sequence
  Synthetic Polynucloetide
atggccttaccagtgaccgccttgctcctgccgctggccttgctgctccacgccgccaggccggaagtgcagctggttgaatctggcggaggactggttcagcctggcggatctctgagactgtcttgtgccgccagcggcttcagcttcagcgacttttggatgagctgggtccgacaggcccctggcaaaggacttgaatgggtcgccacaatcagccaggccggcagcgagaaggactacgtggactctgtgaagggcagattcaccatcagccgggacaacgccaagaagtccctgtacctccagatgaacagcctgagagccgaggacaccgccgtgtactattgtgcctctggcgtgtacagcttcgactacagaggccagggcaccctggtcacagtctcttctggtaccggcggaggcggatctggcggcggaggtagcggtggcggaggatctgaattcgacacagtgctgacacagtctccagctctggctgtgtctcctggcgagagagtgaccatctcttgcaaggccagcgagagcgtgtccaccagaatgcactggtacagacagaagcccggccagcagccaaagctgctgatctacaagaccagcaacctggcctctggcgtgccagccagattttctggctctggcagcggcaccgacttcaccctgaccattgatcccgtggaagccgacgacaccgccacctacttttgtcagcagtcctggaacggccctctgacatttggaagcggcaccaagctggaaatcaagagactcgagggacagcctaaggccaatcctaccgtgacactgttccctccaagcagcgaagaactccaggccaacaaggccacacttgtgtgcctgatctccgacttctaccctggggctgtgacagtggcttggaaggccgatggatctcctgtgaaagccggcgtggaaaccaccaagccatccaagcagagcaacaacaaatacgccgccagctcctacctgagcctgacacctgagcagtggaagtcccacagatcctacagctgccaagtgacccacgaaggcagcaccgtggaaaagacagtggcccctacagagtgcagccccatcaagaccgatgtgattacaatggaccccaaggacaactgctccaaggacgccaacgataccctgctgctccagctgaccaacaccagcgcctactacatgtacttgttgctgctgctgaagtccgtggtgtacttcgccatcatcacatgctgcctgctgcggagaaccgccttctgctgcaacggcgagaagtctagggccaagcgatctggatctggagcaacaaacttctcactactcaaacaagcaggtgacgtggaggagaatcccgggcctactagtatggactggatttggcgcatccttttccttgtcggcgctgctaccggcgcgcattccttcgaacaggtgcagctgaaagagtctggccctggactggtgcagcctagccaaacactgagcctgacctgtaccgtgtctggcctgtctctgaccagcaatggcgtgtcctggatcagacagcctcctggcaaaggactggaatggctgggcgtgatctggtccaatggcggcacagactacaacagcgccatcaagagccggctgagcttcagcagagacaccagcaagagccaggtgttcctgaagatgaacagcctccagaccgaggataccgccatgtacttttgcgccagacctcggtacaactccggctacttcttcgactattggggccagggcgtgatggtcaccgttagctctacgcgtgcctctacaaagggaccctccgtgtttcctctggctcccagcagcaagtctacaagcggaggaacagccgctctgggctgcctggtcaaggattactttcccgagcctgtgaccgtgtcctggaatagcggagcactgacaagcggcgtgcacacctttccagccgtgctgcaaagcagcggcctgtactctctgagcagcgtggtcacagtgcctagctctagcctgggcacccagacctacatctgcaatgtgaaccacaagcctagcaacaccaaggtggacaagagagtggaacccaagagctgtgaagtgaaaaccgactccaccgaccacgtgaagcccaaagagacagagaacaccaagcagcccagcaagagctgccacaagcccaaggccatcgtgcacaccgagaaagtgaacatgatgagcctgaccgtgctgggcctgcggatgctgttcgccaaaaccgtggccgtgaacttcctgctgaccgccaagctgttcttcctc

SEQ ID NO: 9470 - DNA, 2283 bp, Artificial Sequence
  Synthetic Polynucloetide
atggccttaccagtgaccgccttgctcctgccgctggccttgctgctccacgccgccaggccggaagtgcagctggttgaatctggcggaggactggttcagcctggcggatctctgagactgtcttgtgccgccagcggcttcagcttcagcgacttttggatgagctgggtccgacaggcccctggcaaaggacttgaatgggtcgccacaatcagccaggccggcagcgagaaggactacgtggactctgtgaagggcagattcaccatcagccgggacaacgccaagaagtccctgtacctccagatgaacagcctgagagccgaggacaccgccgtgtactattgtgcctctggcgtgtacagcttcgactacagaggccagggcaccctggtcacagtctcttctggtaccggcggaggcggatctggcggcggaggtagcggtggcggaggatctgaattcgacacagtgctgacacagtctccagctctggctgtgtctcctggcgagagagtgaccatctcttgcaaggccagcgagagcgtgtccaccagaatgcactggtacagacagaagcccggccagcagccaaagctgctgatctacaagaccagcaacctggcctctggcgtgccagccagattttctggctctggcagcggcaccgacttcaccctgaccattgatcccgtggaagccgacgacaccgccacctacttttgtcagcagtcctggaacggccctctgacatttggaagcggcaccaagctggaaatcaagagactcgagggacagcctaaggccaatcctaccgtgacactgttccctccaagcagcgaagaactccaggccaacaaggccacacttgtgtgcctgatctccgacttctaccctggggctgtgacagtggcttggaaggccgatggatctcctgtgaaagccggcgtggaaaccaccaagccatccaagcagagcaacaacaaatacgccgccagctcctacctgagcctgacacctgagcagtggaagtcccacagatcctacagctgccaagtgacccacgaaggcagcaccgtggaaaagacagtggcccctacagagtgcagcggcagagccgattgcggctttaccagcgagagctaccagcagggcgtgctgagcgccaccatcctgtacgagatcctgctgggcaaggccaccctgtacgccgtgctggtgtctgccctggtgctgatggctatggtcaagcggaaggacagccggggacgcgccaagagaagcggatctggcgtgaagcagaccctgaatttcgacctgctgaagctggctggcgacgtggaatccaacccaggccctactagtatggactggatttggcgcatccttttccttgtcggcgctgctaccggcgcgcattccttcgaacaggtgcagctgaaagagtctggccctggactggtgcagcctagccaaacactgagcctgacctgtaccgtgtctggcctgtctctgaccagcaatggcgtgtcctggatcagacagcctcctggcaaaggactggaatggctgggcgtgatctggtccaatggcggcacagactacaacagcgccatcaagagccggctgagcttcagcagagacaccagcaagagccaggtgttcctgaagatgaacagcctccagaccgaggataccgccatgtacttttgcgccagacctcggtacaactccggctacttcttcgactattggggccagggcgtgatggtcaccgttagctctacgcgtgcctctacaaagggaccctccgtgtttcctctggctcccagcagcaagtctacaagcggaggaacagccgctctgggctgcctggtcaaggattactttcccgagcctgtgaccgtgtcctggaatagcggagcactgacaagcggcgtgcacacctttccagccgtgctgcaaagcagcggcctgtactctctgagcagcgtggtcacagtgcctagctctagcctgggcacccagacctacatctgcaatgtgaaccacaagcctagcaacaccaaggtggacaagagagtggaacccaagagctgtatccccgaggacacattcttcccaagccccgagagcagctgcgacgtgaagctggtggaaaagagcttcgagacagacaccaacctgaacttccagaacctgagcgtgatcggcttcagaatcctgctgctgaaagtggccggctttaacctgctgatgaccctgcggctgtggtccagc

SEQ ID NO: 9471 - DNA, 2685 bp, Artificial Sequence
  Synthetic Polynucloetide
atggccttaccagtgaccgccttgctcctgccgctggccttgctgctccacgccgccaggccggaagtgcagctggttgaatctggcggaggactggttcagcctggcggatctctgagactgtcttgtgccgccagcggcttcagcttcagcgacttttggatgagctgggtccgacaggcccctggcaaaggacttgaatgggtcgccacaatcagccaggccggcagcgagaaggactacgtggactctgtgaagggcagattcaccatcagccgggacaacgccaagaagtccctgtacctccagatgaacagcctgagagccgaggacaccgccgtgtactattgtgcctctggcgtgtacagcttcgactacagaggccagggcaccctggtcacagtctcttctggtaccggcggaggcggatctggcggcggaggtagcggtggcggaggatctgaattcgacacagtgctgacacagtctccagctctggctgtgtctcctggcgagagagtgaccatctcttgcaaggccagcgagagcgtgtccaccagaatgcactggtacagacagaagcccggccagcagccaaagctgctgatctacaagaccagcaacctggcctctggcgtgccagccagattttctggctctggcagcggcaccgacttcaccctgaccattgatcccgtggaagccgacgacaccgccacctacttttgtcagcagtcctggaacggccctctgacatttggaagcggcaccaagctggaaatcaagagactcgagatccagaaccctgatcctgccgtgtaccagctgcgggatagcaagagcagcgacaagagcgtgtgtctgttcaccgacttcgacagccagaccaacgtgtcccagagcaaggactccgacgtgtacatcaccgataagtgcgtgctggacatgcggagcatggacttcaagagcaactccgccgtggcctggtccaacaagtccgatttcgcctgcgccaacgccttcaacaacagcattatccccgaggacacattcttcccaagccccgagagcagctgcgacgtgaagctggtggaaaagagcttcgagacagacaccaacctgaacttccagaacctgagcgtgatcggcttcagaatcctgctgctgaaagtggccggctttaacctgctgatgaccctgcggctgtggtccagccgcgccaagagaagcggatctggcgtgaagcagaccctgaatttcgacctgctgaagctggctggcgacgtggaatccaacccaggccctactagtatggactggatttggcgcatccttttccttgtcggcgctgctaccggcgcgcattccgggccccagctccagctgcaagagtctggacctggcctggtcaagcctagcgagacactgagcctgacctgtaccgtgtccggcgatagcatcagcagcggcgattactactggggctggatcagacagcctcctggcaaaggactggaatggatcggccacatctactacagcggcgtgacctactacaaccccagcctgaagtccagagtgaccatcagcgtggacaccagccggaaccagttctccctgaagctgtctagcgtgacagccgccgataccgccgtgtactactgcaccagagaggacagcagcaactggcggagtagaggccagggaacactggtcacagttagctctggatccggcggaggcggaagtggaggcggaggatctggcggcggaggctctttcgaacaggtgcagctgaaagagtctggccctggactggtgcagcctagccaaacactgagcctgacctgtaccgtgtctggcctgtctctgaccagcaatggcgtgtcctggatcagacagcctcctggcaaaggactggaatggctgggcgtgatctggtccaatggcggcacagactacaacagcgccatcaagagccggctgagcttcagcagagacaccagcaagagccaggtgttcctgaagatgaacagcctccagaccgaggataccgccatgtacttttgcgccagacctcggtacaactccggctacttcttcgactattggggccagggcgtgatggtcaccgttagctctacgcgtgaggacctgaagaacgtgttcccacctgaggtggccgtgttcgagcctagcgaggccgagatcagccacacccagaaagccaccctcgtgtgcctggctaccggcttctaccccgaccatgtggaactgtcttggtgggtcaacggcaaagaggtgcacagcggcgtgtgtaccgacccccagccactgaaagaacagcccgccctgaacgacagccggtactgcctgagcagcagactgagagtgtccgccaccttctggcagaacccccggaaccacttcagatgccaggtgcagttctacggcctgagcgagaacgacgagtggacccaggacagagccaagcccgtgacccagatcgtgtctgccgaagcctggggcagagccgattgcggctttaccagcgagagctaccagcagggcgtgctgagcgccaccatcctgtacgagatcctgctgggcaaggccaccctgtacgccgtgctggtgtctgccctggtgctgatggctatggtcaagcggaaggacagccgggga

SEQ ID NO: 9472 - DNA, 3261 bp, Artificial Sequence
  Synthetic Polynucloetide
atggccttaccagtgaccgccttgctcctgccgctggccttgctgctccacgccgccaggccggaagtgcagctggttgaatctggcggaggactggttcagcctggcggatctctgagactgtcttgtgccgccagcggcttcagcttcagcgacttttggatgagctgggtccgacaggcccctggcaaaggacttgaatgggtcgccacaatcagccaggccggcagcgagaaggactacgtggactctgtgaagggcagattcaccatcagccgggacaacgccaagaagtccctgtacctccagatgaacagcctgagagccgaggacaccgccgtgtactattgtgcctctggcgtgtacagcttcgactacagaggccagggcaccctggtcacagtctcttctggtaccggcggaggcggatctggcggcggaggtagcggtggcggaggatctgaattcgacacagtgctgacacagtctccagctctggctgtgtctcctggcgagagagtgaccatctcttgcaaggccagcgagagcgtgtccaccagaatgcactggtacagacagaagcccggccagcagccaaagctgctgatctacaagaccagcaacctggcctctggcgtgccagccagattttctggctctggcagcggcaccgacttcaccctgaccattgatcccgtggaagccgacgacaccgccacctacttttgtcagcagtcctggaacggccctctgacatttggaagcggcaccaagctggaaatcaagagactcgaggacctgaagaacgtgttcccacctgaggtggccgtgttcgagcctagcgaggccgagatcagccacacccagaaagccaccctcgtgtgcctggctaccggcttctaccccgaccatgtggaactgtcttggtgggtcaacggcaaagaggtgcacagcggcgtgtctaccgacccccagccactgaaagaacagcccgccctgaacgacagccggtactgcctgagcagcagactgagagtgtccgccaccttctggcagaacccccggaaccacttcagatgccaggtgcagttctacggcctgagcgagaacgacgagtggacccaggacagagccaagcccgtgacccagatcgtgtctgccgaagcctggggcagagccgattgcggatcccagagcttcggcctgctggaccccaagctgtgctacctgctggatggcatcctgttcatctacggcgtgatcctgaccgccctgttcctgagagtgaagttcagcagaagcgccgacgcccctgcctaccagcagggacagaaccaactgtacaacgagctgaacctgggcagacgggaagagtacgacgtgctggacaagcggagaggcagggaccctgagatgggcggaaagccccagcggagaaagaacccccaggaaggactgtataacgaactccagaaagacaagatggccgaagcctacagcgagatcggcatgaagggcgagcggagaagaggcaagggccacgatggcctgtaccagggcctgagcaccgccaccaaggacacctatgacgccctgcacatgcaggccctgcctccaagaagggccaagcgatctggatctggagcaacaaacttctcactactcaaacaagcaggtgacgtggaggagaatcccgggcctactagtatggactggatttggcgcatccttttccttgtcggcgctgctaccggcgcgcattccgggccccagctccagctgcaagagtctggacctggcctggtcaagcctagcgagacactgagcctgacctgtaccgtgtccggcgatagcatcagcagcggcgattactactggggctggatcagacagcctcctggcaaaggactggaatggatcggccacatctactacagcggcgtgacctactacaaccccagcctgaagtccagagtgaccatcagcgtggacaccagccggaaccagttctccctgaagctgtctagcgtgacagccgccgataccgccgtgtactactgcaccagagaggacagcagcaactggcggagtagaggccagggaacactggtcacagttagctctggatccggcggaggcggaagtggaggcggaggatctggcggcggaggctctttcgaacaggtgcagctgaaagagtctggccctggactggtgcagcctagccaaacactgagcctgacctgtaccgtgtctggcctgtctctgaccagcaatggcgtgtcctggatcagacagcctcctggcaaaggactggaatggctgggcgtgatctggtccaatggcggcacagactacaacagcgccatcaagagccggctgagcttcagcagagacaccagcaagagccaggtgttcctgaagatgaacagcctccagaccgaggataccgccatgtacttttgcgccagacctcggtacaactccggctacttcttcgactattggggccagggcgtgatggtcaccgttagctctacgcgtatccagaaccctgatcctgccgtgtaccagctgcgggatagcaagagcagcgacaagagcgtgtgtctgttcaccgacttcgacagccagaccaacgtgtcccagagcaaggactccgacgtgtacatcaccgataagaccgtgctggacatgcggagcatggacttcaagagcaactccgccgtggcctggtccaacaagtccgatttcgcctgcgccaacgccttcaacaacagcattatccccgaggacacattcttcccaagccccgagagcagctgcggtacccagagttttgggttgttggaccctaaattgtgctatctgttggacggaatcctgttcatttacggagtgatcctgaccgcattgttcctgcgggttaagttttccagatccgcagacgcacccgcttaccaacaagggcagaaccaactctacaatgaacttaatttggggcggagggaagagtacgacgttctggacaaaaggaggggacgagatcccgagatgggcggaaagcctcagcgaaggaagaatccgcaagaggggctttataacgaactccagaaagataaaatggcagaagcctatagtgagattgggatgaagggagaaaggaggaggggtaaaggtcacgatgggttgtaccaaggattgagcacagccactaaagatacctatgatgcgctccacatgcaggccctgccgccaaga

SEQ ID NO: 9473 - DNA, 2751 bp, Artificial Sequence
  Synthetic Polynucloetide
atggccttaccagtgaccgccttgctcctgccgctggccttgctgctccacgccgccaggccggaagtgcagctggttgaatctggcggaggactggttcagcctggcggatctctgagactgtcttgtgccgccagcggcttcagcttcagcgacttttggatgagctgggtccgacaggcccctggcaaaggacttgaatgggtcgccacaatcagccaggccggcagcgagaaggactacgtggactctgtgaagggcagattcaccatcagccgggacaacgccaagaagtccctgtacctccagatgaacagcctgagagccgaggacaccgccgtgtactattgtgcctctggcgtgtacagcttcgactacagaggccagggcaccctggtcacagtctcttctggtaccggcggaggcggatctggcggcggaggtagcggtggcggaggatctgaattcgacacagtgctgacacagtctccagctctggctgtgtctcctggcgagagagtgaccatctcttgcaaggccagcgagagcgtgtccaccagaatgcactggtacagacagaagcccggccagcagccaaagctgctgatctacaagaccagcaacctggcctctggcgtgccagccagattttctggctctggcagcggcaccgacttcaccctgaccattgatcccgtggaagccgacgacaccgccacctacttttgtcagcagtcctggaacggccctctgacatttggaagcggcaccaagctggaaatcaagagactcgagggacagcctaaggccaatcctaccgtgacactgttccctccaagcagcgaagaactccaggccaacaaggccacacttgtgtgcctgatctccgacttctaccctggggctgtgacagtggcttggaaggccgatggatctcctgtgaaagccggcgtggaaaccaccaagccatccaagcagagcaacaacaaatacgccgccagctcctacctgagcctgacacctgagcagtggaagtcccacagatcctacagctgccaagtgacccacgaaggcagcaccgtggaaaagacagtggcccctacagagtgcagccccatcaagaccgatgtgattacaatggaccccaaggacaactgctccaaggacgccaacgataccctgctgctccagctgaccaacaccagcgcctactacatgtacttgttgctgctgctgaagtccgtggtgtacttcgccatcatcacatgctgcctgctgcggagaaccgccttctgctgcaacggcgagaagtctagggccaagcgatctggatctggagcaacaaacttctcactactcaaacaagcaggtgacgtggaggagaatcccgggcctactagtatggactggatttggcgcatccttttccttgtcggcgctgctaccggcgcgcattccgggccccagctccagctgcaagagtctggacctggcctggtcaagcctagcgagacactgagcctgacctgtaccgtgtccggcgatagcatcagcagcggcgattactactggggctggatcagacagcctcctggcaaaggactggaatggatcggccacatctactacagcggcgtgacctactacaaccccagcctgaagtccagagtgaccatcagcgtggacaccagccggaaccagttctccctgaagctgtctagcgtgacagccgccgataccgccgtgtactactgcaccagagaggacagcagcaactggcggagtagaggccagggaacactggtcacagttagctctggatccggcggaggcggaagtggaggcggaggatctggcggcggaggctctttcgaacaggtgcagctgaaagagtctggccctggactggtgcagcctagccaaacactgagcctgacctgtaccgtgtctggcctgtctctgaccagcaatggcgtgtcctggatcagacagcctcctggcaaaggactggaatggctgggcgtgatctggtccaatggcggcacagactacaacagcgccatcaagagccggctgagcttcagcagagacaccagcaagagccaggtgttcctgaagatgaacagcctccagaccgaggataccgccatgtacttttgcgccagacctcggtacaactccggctacttcttcgactattggggccagggcgtgatggtcaccgttagctctacgcgtgcctctacaaagggaccctccgtgtttcctctggctcccagcagcaagtctacaagcggaggaacagccgctctgggctgcctggtcaaggattactttcccgagcctgtgaccgtgtcctggaatagcggagcactgacaagcggcgtgcacacctttccagccgtgctgcaaagcagcggcctgtactctctgagcagcgtggtcacagtgcctagctctagcctgggcacccagacctacatctgcaatgtgaaccacaagcctagcaacaccaaggtggacaagagagtggaacccaagagctgtgaagtgaaaaccgactccaccgaccacgtgaagcccaaagagacagagaacaccaagcagcccagcaagagctgccacaagcccaaggccatcgtgcacaccgagaaagtgaacatgatgagcctgaccgtgctgggcctgcggatgctgttcgccaaaaccgtggccgtgaacttcctgctgaccgccaagctgttcttcctc

SEQ ID NO: 9474 - DNA, 2694 bp, Artificial Sequence
  Synthetic Polynucloetide
atggccttaccagtgaccgccttgctcctgccgctggccttgctgctccacgccgccaggccggaagtgcagctggttgaatctggcggaggactggttcagcctggcggatctctgagactgtcttgtgccgccagcggcttcagcttcagcgacttttggatgagctgggtccgacaggcccctggcaaaggacttgaatgggtcgccacaatcagccaggccggcagcgagaaggactacgtggactctgtgaagggcagattcaccatcagccgggacaacgccaagaagtccctgtacctccagatgaacagcctgagagccgaggacaccgccgtgtactattgtgcctctggcgtgtacagcttcgactacagaggccagggcaccctggtcacagtctcttctggtaccggcggaggcggatctggcggcggaggtagcggtggcggaggatctgaattcgacacagtgctgacacagtctccagctctggctgtgtctcctggcgagagagtgaccatctcttgcaaggccagcgagagcgtgtccaccagaatgcactggtacagacagaagcccggccagcagccaaagctgctgatctacaagaccagcaacctggcctctggcgtgccagccagattttctggctctggcagcggcaccgacttcaccctgaccattgatcccgtggaagccgacgacaccgccacctacttttgtcagcagtcctggaacggccctctgacatttggaagcggcaccaagctggaaatcaagagactcgagggacagcctaaggccaatcctaccgtgacactgttccctccaagcagcgaagaactccaggccaacaaggccacacttgtgtgcctgatctccgacttctaccctggggctgtgacagtggcttggaaggccgatggatctcctgtgaaagccggcgtggaaaccaccaagccatccaagcagagcaacaacaaatacgccgccagctcctacctgagcctgacacctgagcagtggaagtcccacagatcctacagctgccaagtgacccacgaaggcagcaccgtggaaaagacagtggcccctacagagtgcagcggcagagccgattgcggctttaccagcgagagctaccagcagggcgtgctgagcgccaccatcctgtacgagatcctgctgggcaaggccaccctgtacgccgtgctggtgtctgccctggtgctgatggctatggtcaagcggaaggacagccggggacgcgccaagagaagcggatctggcgtgaagcagaccctgaatttcgacctgctgaagctggctggcgacgtggaatccaacccaggccctactagtatggactggatttggcgcatccttttccttgtcggcgctgctaccggcgcgcattccgggccccagctccagctgcaagagtctggacctggcctggtcaagcctagcgagacactgagcctgacctgtaccgtgtccggcgatagcatcagcagcggcgattactactggggctggatcagacagcctcctggcaaaggactggaatggatcggccacatctactacagcggcgtgacctactacaaccccagcctgaagtccagagtgaccatcagcgtggacaccagccggaaccagttctccctgaagctgtctagcgtgacagccgccgataccgccgtgtactactgcaccagagaggacagcagcaactggcggagtagaggccagggaacactggtcacagttagctctggatccggcggaggcggaagtggaggcggaggatctggcggcggaggctctttcgaacaggtgcagctgaaagagtctggccctggactggtgcagcctagccaaacactgagcctgacctgtaccgtgtctggcctgtctctgaccagcaatggcgtgtcctggatcagacagcctcctggcaaaggactggaatggctgggcgtgatctggtccaatggcggcacagactacaacagcgccatcaagagccggctgagcttcagcagagacaccagcaagagccaggtgttcctgaagatgaacagcctccagaccgaggataccgccatgtacttttgcgccagacctcggtacaactccggctacttcttcgactattggggccagggcgtgatggtcaccgttagctctacgcgtgcctctacaaagggaccctccgtgtttcctctggctcccagcagcaagtctacaagcggaggaacagccgctctgggctgcctggtcaaggattactttcccgagcctgtgaccgtgtcctggaatagcggagcactgacaagcggcgtgcacacctttccagccgtgctgcaaagcagcggcctgtactctctgagcagcgtggtcacagtgcctagctctagcctgggcacccagacctacatctgcaatgtgaaccacaagcctagcaacaccaaggtggacaagagagtggaacccaagagctgtatccccgaggacacattcttcccaagccccgagagcagctgcgacgtgaagctggtggaaaagagcttcgagacagacaccaacctgaacttccagaacctgagcgtgatcggcttcagaatcctgctgctgaaagtggccggctttaacctgctgatgaccctgcggctgtggtccagc

SEQ ID NO: 9475 - DNA, 2265 bp, Artificial Sequence
  Synthetic Polynucloetide
atggccttaccagtgaccgccttgctcctgccgctggccttgctgctccacgccgccaggccggaagtgcaggttttggagtctggcggaggactggttcagcctggcggatctctgagactgtcttgtgccgccagcggcttcaccttcagcaactttgccatgagctgggtccgacaggcccctggcaaaggacttgaatgggtgtccacaatcagcggcagcgccggcacaacagattacgccgattctgtgaagggcagattcaccatcagccgggacaacagcaagaaaaccctgtacctccagatgaacagcctgcgcgtggaagataccgccgtgtactactgtgccgatggcagaggccccttcttcgattatcgcggccagggcacactggtcaccgtttcttctggtaccggcggaggcggatctggcggcggaggtagcggtggcggaggatctgaattcgacacagtgctgacacagtctccagctctggctgtgtctcctggcgagagagtgaccatctcttgcaaggccagcgagagcgtgtccaccagaatgcactggtacagacagaagcccggccagcagccaaagctgctgatctacaagaccagcaacctggcctctggcgtgccagccagattttctggctctggcagcggcaccgacttcaccctgaccattgatcccgtggaagccgacgacaccgccacctacttttgtcagcagtcctggaacggccctctgacatttggaagcggcaccaagctggaaatcaagagactcgaggacctgaagaacgtgttcccacctgaggtggccgtgttcgagcctagcgaggccgagatcagccacacccagaaagccaccctcgtgtgcctggctaccggcttctaccccgaccatgtggaactgtcttggtgggtcaacggcaaagaggtgcacagcggcgtgtgtaccgacccccagccactgaaagaacagcccgccctgaacgacagccggtactgcctgagcagcagactgagagtgtccgccaccttctggcagaacccccggaaccacttcagatgccaggtgcagttctacggcctgagcgagaacgacgagtggacccaggacagagccaagcccgtgacccagatcgtgtctgccgaagcctggggcagagccgattgcggctttaccagcgagagctaccagcagggcgtgctgagcgccaccatcctgtacgagatcctgctgggcaaggccaccctgtacgccgtgctggtgtctgccctggtgctgatggctatggtcaagcggaaggacagccggggaagggccaagcgatctggatctggagcaacaaacttctcactactcaaacaagcaggtgacgtggaggagaatcccgggcctactagtatggactggatttggcgcatccttttccttgtcggcgctgctaccggcgcgcattccttcgaacaggtgcagctgaaagagtctggccctggactggtgcagcctagccaaacactgagcctgacctgtaccgtgtctggcctgtctctgaccagcaatggcgtgtcctggatcagacagcctcctggcaaaggactggaatggctgggcgtgatctggtccaatggcggcacagactacaacagcgccatcaagagccggctgagcttcagcagagacaccagcaagagccaggtgttcctgaagatgaacagcctccagaccgaggataccgccatgtacttttgcgccagacctcggtacaactccggctacttcttcgactattggggccagggcgtgatggtcaccgttagctctacgcgtatccagaaccctgatcctgccgtgtaccagctgcgggatagcaagagcagcgacaagagcgtgtgtctgttcaccgacttcgacagccagaccaacgtgtcccagagcaaggactccgacgtgtacatcaccgataagtgcgtgctggacatgcggagcatggacttcaagagcaactccgccgtggcctggtccaacaagtccgatttcgcctgcgccaacgccttcaacaacagcattatccccgaggacacattcttcccaagccccgagagcagctgcgacgtgaagctggtggaaaagagcttcgagacagacaccaacctgaacttccagaacctgagcgtgatcggcttcagaatcctgctgctgaaagtggccggctttaacctgctgatgaccctgcggctgtggtccagc

SEQ ID NO: 9476 - DNA, 2268 bp, Artificial Sequence
  Synthetic Polynucloetide
atggccttaccagtgaccgccttgctcctgccgctggccttgctgctccacgccgccaggccggacacagtgctgacacagtctccagctctggctgtgtctcctggcgagagagtgaccatctcttgcaaggccagcgagagcgtgtccaccagaatgcactggtacagacagaagcccggccagcagccaaagctgctgatctacaagaccagcaacctggcctctggcgtgccagccagattttctggctctggcagcggcaccgacttcaccctgaccattgatcccgtggaagccgacgacaccgccacctacttttgtcagcagtcctggaacggccctctgacatttggaagcggcaccaagctggaaatcaagagactcgaggacctgaagaacgtgttcccacctgaggtggccgtgttcgagcctagcgaggccgagatcagccacacccagaaagccaccctcgtgtgcctggctaccggcttctaccccgaccatgtggaactgtcttggtgggtcaacggcaaagaggtgcacagcggcgtgtgtaccgacccccagccactgaaagaacagcccgccctgaacgacagccggtactgcctgagcagcagactgagagtgtccgccaccttctggcagaacccccggaaccacttcagatgccaggtgcagttctacggcctgagcgagaacgacgagtggacccaggacagagccaagcccgtgacccagatcgtgtctgccgaagcctggggcagagccgattgcggctttaccagcgagagctaccagcagggcgtgctgagcgccaccatcctgtacgagatcctgctgggcaaggccaccctgtacgccgtgctggtgtctgccctggtgctgatggctatggtcaagcggaaggacagccggggaagggccaagcgatctggatctggagcaacaaacttctcactactcaaacaagcaggtgacgtggaggagaatcccgggcctactagtatggactggatttggcgcatccttttccttgtcggcgctgctaccggcgcccattccgggcccgaagtgcagctggttgaatctggcggaggactggttcaggctggcggatctctgagactgtcttgtgccgccagcggcagaacctttagcatgggctggtttagacaggcccctggcaaagagagagagttcgtcgccgccatcacatactctggcggcagcccttactacgccgactctgtgaagggcagattcaccatcagccgggacaacgccaagaacaccgtgtacctccagatgaacagcctgaagcctgaggacaccgccgtgtactactgcgccgccaatccaacatacggcagcgactggaacgccgagaattggggccagggaacccaagtgacagtgtctagcggatccggcggcggaggatctggcggaggcggatctgggggcggaggctctttcgaacaggtgcagctgaaagagtctggccctggactggtgcagcctagccaaacactgagcctgacctgtaccgtgtctggcctgtctctgaccagcaatggcgtgtcctggatcagacagcctcctggcaaaggactggaatggctgggcgtgatctggtccaatggcggcacagactacaacagcgccatcaagagccggctgagcttcagcagagacaccagcaagagccaggtgttcctgaagatgaacagcctccagaccgaggataccgccatgtacttttgcgccagacctcggtacaactccggctacttcttcgactattggggccagggcgtgatggtcaccgttagctctacgcgtatccagaaccctgatcctgccgtgtaccagctgcgggatagcaagagcagcgacaagagcgtgtgtctgttcaccgacttcgacagccagaccaacgtgtcccagagcaaggactccgacgtgtacatcaccgataagtgcgtgctggacatgcggagcatggacttcaagagcaactccgccgtggcctggtccaacaagtccgatttcgcctgcgccaacgccttcaacaacagcattatccccgaggacacattcttcccaagccccgagagcagctgcgacgtgaagctggtggaaaagagcttcgagacagacaccaacctgaacttccagaacctgagcgtgatcggcttcagaatcctgctgctgaaagtggccggctttaacctgctgatgaccctgcggctgtggtccagc

SEQ ID NO: 9477 - DNA, 2649 bp, Artificial Sequence
  Synthetic Polynucloetide
atggccttaccagtgaccgccttgctcctgccgctggccttgctgctccacgccgccaggccggacacagtgctgacacagtctccagctctggctgtgtctcctggcgagagagtgaccatctcttgcaaggccagcgagagcgtgtccaccagaatgcactggtacagacagaagcccggccagcagccaaagctgctgatctacaagaccagcaacctggcctctggcgtgccagccagattttctggctctggcagcggcaccgacttcaccctgaccattgatcccgtggaagccgacgacaccgccacctacttttgtcagcagtcctggaacggccctctgacatttggaagcggcaccaagctggaaatcaagagactcgaggacctgaagaacgtgttcccacctgaggtggccgtgttcgagcctagcgaggccgagatcagccacacccagaaagccaccctcgtgtgcctggctaccggcttctaccccgaccatgtggaactgtcttggtgggtcaacggcaaagaggtgcacagcggcgtgtgtaccgacccccagccactgaaagaacagcccgccctgaacgacagccggtactgcctgagcagcagactgagagtgtccgccaccttctggcagaacccccggaaccacttcagatgccaggtgcagttctacggcctgagcgagaacgacgagtggacccaggacagagccaagcccgtgacccagatcgtgtctgccgaagcctggggcagagccgattgcggctttaccagcgagagctaccagcagggcgtgctgagcgccaccatcctgtacgagatcctgctgggcaaggccaccctgtacgccgtgctggtgtctgccctggtgctgatggctatggtcaagcggaaggacagccggggaagggccaagcgatctggatctggagcaacaaacttctcactactcaaacaagcaggtgacgtggaggagaatcccgggcctactagtatggactggatttggcgcatccttttccttgtcggcgctgctaccggcgcccattcccaactgcaactgcaagagtctggccctggcctggtcaagccttctgaaaccctgagcctgacctgtaccgtgtccggcggctctatcagcagcggcgattactactggggctggatcagacagcctccaggcaagggactcgaatggatcggcagcatcagctacagcggctccacctactacaacccaagcctgaagtccagagtgaccatcagcgtggacaccagcagaaaccagttctccctgaagctgagcagcgtgacagccgccgatacagccgtgtattattgcaccagagaggacagcagcaactggcggagtagaggacagggcacactggtcacagtgtcctcttctggaggcggtggaagcggtggaggaggatctgaagtgcagctggttgaatctggcggaggactggttcaggctggcggatctctgagactgtcttgtgccgccagcggcagaacctttagcatgggctggtttagacaggcccctggcaaagagagagagttcgtcgccgccatcacatactctggcggcagcccttactacgccgactctgtgaagggcagattcaccatcagccgggacaacgccaagaacaccgtgtacctccagatgaacagcctgaagcctgaggacaccgccgtgtactactgcgccgccaatccaacatacggcagcgactggaacgccgagaattggggccagggaacccaagtgacagtgtctagcggatccggcggcggaggatctggcggaggcggatctgggggcggaggctctttcgaacaggtgcagctgaaagagtctggccctggactggtgcagcctagccaaacactgagcctgacctgtaccgtgtctggcctgtctctgaccagcaatggcgtgtcctggatcagacagcctcctggcaaaggactggaatggctgggcgtgatctggtccaatggcggcacagactacaacagcgccatcaagagccggctgagcttcagcagagacaccagcaagagccaggtgttcctgaagatgaacagcctccagaccgaggataccgccatgtacttttgcgccagacctcggtacaactccggctacttcttcgactattggggccagggcgtgatggtcaccgttagctctacgcgtatccagaaccctgatcctgccgtgtaccagctgcgggatagcaagagcagcgacaagagcgtgtgtctgttcaccgacttcgacagccagaccaacgtgtcccagagcaaggactccgacgtgtacatcaccgataagtgcgtgctggacatgcggagcatggacttcaagagcaactccgccgtggcctggtccaacaagtccgatttcgcctgcgccaacgccttcaacaacagcattatccccgaggacacattcttcccaagccccgagagcagctgcgacgtgaagctggtggaaaagagcttcgagacagacaccaacctgaacttccagaacctgagcgtgatcggcttcagaatcctgctgctgaaagtggccggctttaacctgctgatgaccctgcggctgtggtccagc

SEQ ID NO: 9478 - DNA, 2676 bp, Artificial Sequence
  Synthetic Polynucloetide
atggccttaccagtgaccgccttgctcctgccgctggccttgctgctccacgccgccaggccggaagtgcaggttttggagtctggcggaggactggttcagcctggcggatctctgagactgtcttgtgccgccagcggcttcaccttcagcaactttgccatgagctgggtccgacaggcccctggcaaaggacttgaatgggtgtccacaatcagcggcagcgccggcacaacagattacgccgattctgtgaagggcagattcaccatcagccgggacaacagcaagaaaaccctgtacctccagatgaacagcctgcgcgtggaagataccgccgtgtactactgtgccgatggcagaggccccttcttcgattatcgcggccagggcacactggtcaccgtttcttctggtaccggcggaggcggatctggcggcggaggtagcggtggcggaggatctgaattcgacacagtgctgacacagtctccagctctggctgtgtctcctggcgagagagtgaccatctcttgcaaggccagcgagagcgtgtccaccagaatgcactggtacagacagaagcccggccagcagccaaagctgctgatctacaagaccagcaacctggcctctggcgtgccagccagattttctggctctggcagcggcaccgacttcaccctgaccattgatcccgtggaagccgacgacaccgccacctacttttgtcagcagtcctggaacggccctctgacatttggaagcggcaccaagctggaaatcaagagactcgaggacctgaagaacgtgttcccacctgaggtggccgtgttcgagcctagcgaggccgagatcagccacacccagaaagccaccctcgtgtgcctggctaccggcttctaccccgaccatgtggaactgtcttggtgggtcaacggcaaagaggtgcacagcggcgtgtgtaccgacccccagccactgaaagaacagcccgccctgaacgacagccggtactgcctgagcagcagactgagagtgtccgccaccttctggcagaacccccggaaccacttcagatgccaggtgcagttctacggcctgagcgagaacgacgagtggacccaggacagagccaagcccgtgacccagatcgtgtctgccgaagcctggggcagagccgattgcggctttaccagcgagagctaccagcagggcgtgctgagcgccaccatcctgtacgagatcctgctgggcaaggccaccctgtacgccgtgctggtgtctgccctggtgctgatggctatggtcaagcggaaggacagccggggaagggccaagcgatctggatctggagcaacaaacttctcactactcaaacaagcaggtgacgtggaggagaatcccgggcctactagtatggactggatttggcgcatccttttccttgtcggcgctgctaccggcgcccattccgggcccgaagtgcagctggttgaatctggcggaggactggttcaggctggcggatctctgagactgtcttgtgccgccagcggcagaacctttagcatgggctggtttagacaggcccctggcaaagagagagagttcgtcgccgccatcacatacagcggcggcagcccttactacgcctcttctgtcagaggccggttcaccatcagccgggacaacgccaagaacaccgtgtacctccagatgaacagcctgaagccagaggacaccgccgtgtactactgtgccgccaatccaacctacggcagcgactggaatgccgagaattggggccagggcacccaagtgacagtgtctagtggatccggcggcggaggatctggcggaggcggatctgggggcggaggctctttcgaacaggtgcagctgaaagagtctggccctggactggtgcagcctagccaaacactgagcctgacctgtaccgtgtctggcctgtctctgaccagcaatggcgtgtcctggatcagacagcctcctggcaaaggactggaatggctgggcgtgatctggtccaatggcggcacagactacaacagcgccatcaagagccggctgagcttcagcagagacaccagcaagagccaggtgttcctgaagatgaacagcctccagaccgaggataccgccatgtacttttgcgccagacctcggtacaactccggctacttcttcgactattggggccagggcgtgatggtcaccgttagctctacgcgtatccagaaccctgatcctgccgtgtaccagctgcgggatagcaagagcagcgacaagagcgtgtgtctgttcaccgacttcgacagccagaccaacgtgtcccagagcaaggactccgacgtgtacatcaccgataagtgcgtgctggacatgcggagcatggacttcaagagcaactccgccgtggcctggtccaacaagtccgatttcgcctgcgccaacgccttcaacaacagcattatccccgaggacacattcttcccaagccccgagagcagctgcgacgtgaagctggtggaaaagagcttcgagacagacaccaacctgaacttccagaacctgagcgtgatcggcttcagaatcctgctgctgaaagtggccggctttaacctgctgatgaccctgcggctgtggtccagc

SEQ ID NO: 9479 - DNA, 2208 bp, Artificial Sequence
  Synthetic Polynucloetide
atggccttaccagtgaccgccttgctcctgccgctggccttgctgctccacgccgccaggccggacctggtcatgacacagagcccttttagcctggccgtgtccgagggcgagatggtcacaatcaagtgcaagagcagccagagcctgctgagcagcagacaccagaagaactttctggcctggtacagacagaagcccggacagtctcccaagctgctgatctaccacgccagcacaagacagagcggcgtgcccgatagattcatcggctctggcagcggcaccgacttcaccctgacaatctctgatgtgcaggccgaggacctggccgactactattgtctccagcactacacaagcccctacacctttggagccggcaccaagctggaactgaaaagaggcggaggcggaagtggaggcggaggatctggcggcggaggctctcaagtgcagctgaaagagtctggccccggactggttcagcctagccaaacactgagcctgacctgtaccgtgtccggctttagcctgaccagctaccacgtgcactgggtccgacaacctccaggcaaaggactggaatggatgggcgtgatgtggagcgacggcgacaccctgtataacagcgccctgaagtcccggctgagcatcagcagagataccagcaagagccaggtgctgctccagatggatagcctccagagcgaggataccgccacctactactgtgccagactccaggtgttcggctaccccggcatcagagactacgtgatggatgcctggggacagggcgcttctgtgacagtctcttctacgcgtgagcagaaactgatctcggaagaggatctggcgaagcccaccacgacgccagcgccgcgaccaccaacaccggcgcccaccatcgcgtcgcagcccctgtccctgcgcccagaggcgtgccggccagcggcggggggcgcagtgcacacgagggggctggacttcgcctgtgacatctacatctgggcgcccttggccgggacttgtggggtccttctcctgtcactggttatcaccctttactgcaaacggggcagaaagaaactcctgtatatattcaaacaaccatttatgagaccagtacaaactactcaagaggaagatggctgtagctgccgatttccagaagaagaagaaggaggatgtgaactgagagtgaagttcagcaggagcgcagacgcccccgcgtaccagcagggccagaaccagctctataacgagctgaatctaggacgaagagaggagtacgatgttttggacaagagacgtggccgggaccctgagatggggggaaagccgagaaggaagaaccctcaggaaggcctgtacaatgaactgcagaaagataagatggcggaggcctacagtgagattgggatgaaaggcgagcgccggaggggcaaggggcacgatggcctttaccagggtctcagtacagccaccaaggacacctacgacgcccttcacatgcaggccctgccccctcgctctagtggctccggcgagggcagaggaagtctactaacctgcggagatgtggaagaaaatcctggcccacatatgaccgagtacaagcccacggtgcgcctcgccacccgcgacgacgtccccagggccgtacgcaccctcgccgccgcgttcgccgactaccccgccacgcgccacaccgtcgatccggaccgccacatcgagcgggtcaccgagctgcaagaactcttcctcacgcgcgtcgggctcgacatcggcaaggtgtgggtcgcggacgacggcgccgcggtggcggtctggaccacgccggagagcgtcgaagcgggggcggtgttcgccgagatcggcccgcgcatggccgagttgagcggttcccggctggccgcgcagcaacagatggaaggcctcctggcgccgcaccggcccaaggagcccgcgtggttcctggccaccgtcggcgtctcgcccgaccaccagggcaagggtctgggcagcgccgtcgtgctccccggagtggaggcggccgagcgcgccggggtgcccgccttcctggagacctccgcgccccgcaacctccccttctacgagcggctcggcttcaccgtcaccgccgacgtcgaggtgcccgaaggaccgcgcacctggtgcatgacccgcaagcccggtgcctga

SEQ ID NO: 9480 - DNA, 2190 bp, Artificial Sequence
  Synthetic Polynucloetide
atggccttaccagtgaccgccttgctcctgccgctggccttgctgctccacgccgccaggccggacctggtcatgacacagagcccttttagcctggccgtgtccgagggcgagatggtcacaatcaagtgcaagagcagccagagcctgctgagcagcagacaccagaagaactttctggcctggtacagacagaagcccggacagtctcccaagctgctgatctaccacgccagcacaagacagagcggcgtgcccgatagattcatcggctctggcagcggcaccgacttcaccctgacaatctctgatgtgcaggccgaggacctggccgactactattgtctccagcactacacaagcccctacacctttggagccggcaccaagctggaactgaaaagaggcggaggcggaagtggaggcggaggatctggcggcggaggctctcaagtgcagctgaaagagtctggccccggactggttcagcctagccaaacactgagcctgacctgtaccgtgtccggctttagcctgaccagctaccacgtgcactgggtccgacaacctccaggcaaaggactggaatggatgggcgtgatgtggagcgacggcgacaccctgtataacagcgccctgaagtcccggctgagcatcagcagagataccagcaagagccaggtgctgctccagatggatagcctccagagcgaggataccgccacctactactgtgccagactccaggtgttcggctaccccggcatcagagactacgtgatggatgcctggggacagggcgcttctgtgacagtctcttctacgcgtgagcagaaactgatctcggaagaggatctgaaaattgaagttatgtatcctcctccttacctagacaatgagaagagcaatggaaccattatccatgtgaaagggaaacacctttgtccaagtcccctatttcccggaccttctaagcccttttgggtgctggtggtggttgggggagtcctggcttgctatagcttgctagtaacagtggcctttattattttctgggtgaggagtaagaggagcaggctcctgcacagtgactacatgaacatgactccacgccgccccggacccacccgcaagcattaccagccctatgccccaccacgcgacttcgcagcctatcgctccagagtgaagttcagcaggagcgcagacgcccccgcgtaccagcagggccagaaccagctctataacgagctcaatctaggacgaagagaggagtacgatgttttggacaagagacgtggccgggaccctgagatggggggaaagccgagaaggaagaaccctcaggaaggcctgtacaatgaactgcagaaagataagatggcggaggcctacagtgagattgggatgaaaggcgagcgccggaggggcaaggggcacgatggcctttaccagggtctcagtacagccaccaaggacacctacgacgcccttcacatgcaggccctgccccctcgctctagtggctccggcgagggcagaggaagtctactaacctgcggagatgtggaagaaaatcctggcccacatatgaccgagtacaagcccacggtgcgcctcgccacccgcgacgacgtccccagggccgtacgcaccctcgccgccgcgttcgccgactaccccgccacgcgccacaccgtcgatccggaccgccacatcgagcgggtcaccgagctgcaagaactcttcctcacgcgcgtcgggctcgacatcggcaaggtgtgggtcgcggacgacggcgccgcggtggcggtctggaccacgccggagagcgtcgaagcgggggcggtgttcgccgagatcggcccgcgcatggccgagttgagcggttcccggctggccgcgcagcaacagatggaaggcctcctggcgccgcaccggcccaaggagcccgcgtggttcctggccaccgtcggcgtctcgcccgaccaccagggcaagggtctgggcagcgccgtcgtgctccccggagtggaggcggccgagcgcgccggggtgcccgccttcctggagacctccgcgccccgcaacctccccttctacgagcggctcggcttcaccgtcaccgccgacgtcgaggtgcccgaaggaccgcgcacctggtgcatgacccgcaagcccggtgcctga

SEQ ID NO: 9481 - DNA, 1518 bp, Artificial Sequence
  Synthetic Polynucloetide
atggccttaccagtgaccgccttgctcctgccgctggccttgctgctccacgccgccaggccggacctggtcatgacacagagcccttttagcctggccgtgtccgagggcgagatggtcacaatcaagtgcaagagcagccagagcctgctgagcagcagacaccagaagaactttctggcctggtacagacagaagcccggacagtctcccaagctgctgatctaccacgccagcacaagacagagcggcgtgcccgatagattcatcggctctggcagcggcaccgacttcaccctgacaatctctgatgtgcaggccgaggacctggccgactactattgtctccagcactacacaagcccctacacctttggagccggcaccaagctggaactgaaaagaggcggaggcggaagtggaggcggaggatctggcggcggaggctctcaagtgcagctgaaagagtctggccccggactggttcagcctagccaaacactgagcctgacctgtaccgtgtccggctttagcctgaccagctaccacgtgcactgggtccgacaacctccaggcaaaggactggaatggatgggcgtgatgtggagcgacggcgacaccctgtataacagcgccctgaagtcccggctgagcatcagcagagataccagcaagagccaggtgctgctccagatggatagcctccagagcgaggataccgccacctactactgtgccagactccaggtgttcggctaccccggcatcagagactacgtgatggatgcctggggacagggcgcttctgtgacagtctcttctacgcgtgagcagaaactgatctcggaagaggatctgaaaattgaagttatgtatcctcctccttacctagacaatgagaagagcaatggaaccattatccatgtgaaagggaaacacctttgtccaagtcccctatttcccggaccttctaagcccttttgggtgctggtggtggttgggggagtcctggcttgctatagcttgctagtaacagtggcctttattattttctgggtgaggagtaagaggagcaggctcctgcacagtgactacatgaacatgactccacgccgccccggacccacccgcaagcattaccagccctatgccccaccacgcgacttcgcagcctatcgctccagagtgaagttcagcaggagcgcagacgcccccgcgtaccagcagggccagaaccagctctataacgagctcaatctaggacgaagagaggagtacgatgttttggacaagagacgtggccgggaccctgagatggggggaaagccgagaaggaagaaccctcaggaaggcctgtacaatgaactgcagaaagataagatggcggaggcctacagtgagattgggatgaaaggcgagcgccggaggggcaaggggcacgatggcctttaccagggtctcagtacagccaccaaggacacctacgacgcccttcacatgcaggccctgccccctcgc

SEQ ID NO: 9482 - DNA, 1539 bp, Artificial Sequence
  Synthetic Polynucloetide
atggccttaccagtgaccgccttgctcctgccgctggccttgctgctccacgccgccaggccggacctggtcatgacacagagcccttttagcctggccgtgtccgagggcgagatggtcacaatcaagtgcaagagcagccagagcctgctgagcagcagacaccagaagaactttctggcctggtacagacagaagcccggacagtctcccaagctgctgatctaccacgccagcacaagacagagcggcgtgcccgatagattcatcggctctggcagcggcaccgacttcaccctgacaatctctgatgtgcaggccgaggacctggccgactactattgtctccagcactacacaagcccctacacctttggagccggcaccaagctggaactgaaaagaggcggaggcggaagtggaggcggaggatctggcggcggaggctctcaagtgcagctgaaagagtctggccccggactggttcagcctagccaaacactgagcctgacctgtaccgtgtccggctttagcctgaccagctaccacgtgcactgggtccgacaacctccaggcaaaggactggaatggatgggcgtgatgtggagcgacggcgacaccctgtataacagcgccctgaagtcccggctgagcatcagcagagataccagcaagagccaggtgctgctccagatggatagcctccagagcgaggataccgccacctactactgtgccagactccaggtgttcggctaccccggcatcagagactacgtgatggatgcctggggacagggcgcttctgtgacagtctcttctacgcgtgagcagaaactgatctcggaagaggatctggcgaagcccaccacgacgccagcgccgcgaccaccaacaccggcgcccaccatcgcgtcgcagcccctgtccctgcgcccagaggcgtgccggccagcggcggggggcgcagtgcacacgagggggctggacttcgcctgtgacatctacatctgggcgcccttggccgggacttgtggggtccttctcctgtcactggttatcaccctttactgcaaacggggcagaaagaaactcctgtatatattcaaacaaccatttatgagaccagtacaaactactcaagaggaagatggctgtagctgccgatttccagaagaagaagaaggaggatgtgaactgagagtgaagttcagcaggagcgcagacgcccccgcgtaccagcagggccagaaccagctctataacgagctgaatctaggacgaagagaggagtacgatgttttggacaagagacgtggccgggaccctgagatggggggaaagccgagaaggaagaaccctcaggaaggcctgtacaatgaactgcagaaagataagatggcggaggcctacagtgagattgggatgaaaggcgagcgccggaggggcaaggggcacgatggcctttaccagggtctcagtacagccaccaaggacacctacgacgcccttcacatgcaggccctgccccctcgctga

SEQ ID NO: 9483 - DNA, 1539 bp, Artificial Sequence
  Synthetic Polynucloetide
atggccttaccagtgaccgccttgctcctgccgctggccttgctgctccacgccgccaggccgcaagtgcagctgaaagagtctggccccggactggttcagcctagccaaacactgagcctgacctgtaccgtgtccggctttagcctgaccagctaccacgtgcactgggtccgacaacctccaggcaaaggactggaatggatgggcgtgatgtggagcgacggcgacaccctgtataacagcgccctgaagtcccggctgagcatcagcagagataccagcaagagccaggtgctgctccagatggatagcctccagagcgaggataccgccacctactactgtgccagactccaggtgttcggctaccccggcatcagagactacgtgatggatgcctggggacagggcgcttctgtgacagtctcttctggcggaggcggaagtggaggcggaggatctggcggcggaggctctgacctggtcatgacacagagcccttttagcctggccgtgtccgagggcgagatggtcacaatcaagtgcaagagcagccagagcctgctgagcagcagacaccagaagaactttctggcctggtacagacagaagcccggacagtctcccaagctgctgatctaccacgccagcacaagacagagcggcgtgcccgatagattcatcggctctggcagcggcaccgacttcaccctgacaatctctgatgtgcaggccgaggacctggccgactactattgtctccagcactacacaagcccctacacctttggagccggcaccaagctggaactgaaaagaacgcgtgagcagaaactgatctcggaagaggatctggcgaagcccaccacgacgccagcgccgcgaccaccaacaccggcgcccaccatcgcgtcgcagcccctgtccctgcgcccagaggcgtgccggccagcggcggggggcgcagtgcacacgagggggctggacttcgcctgtgacatctacatctgggcgcccttggccgggacttgtggggtccttctcctgtcactggttatcaccctttactgcaaacggggcagaaagaaactcctgtatatattcaaacaaccatttatgagaccagtacaaactactcaagaggaagatggctgtagctgccgatttccagaagaagaagaaggaggatgtgaactgagagtgaagttcagcaggagcgcagacgcccccgcgtaccagcagggccagaaccagctctataacgagctgaatctaggacgaagagaggagtacgatgttttggacaagagacgtggccgggaccctgagatggggggaaagccgagaaggaagaaccctcaggaaggcctgtacaatgaactgcagaaagataagatggcggaggcctacagtgagattgggatgaaaggcgagcgccggaggggcaaggggcacgatggcctttaccagggtctcagtacagccaccaaggacacctacgacgcccttcacatgcaggccctgccccctcgctga

SEQ ID NO: 9484 - DNA, 2778 bp, Artificial Sequence
  Synthetic Polynucloetide
atggccttaccagtgaccgccttgctcctgccgctggccttgctgctccacgccgccaggccggacctggtcatgacacagagcccttttagcctggccgtgtccgagggcgagatggtcacaatcaagtgcaagagcagccagagcctgctgagcagcagacaccagaagaactttctggcctggtacagacagaagcccggacagtctcccaagctgctgatctaccacgccagcacaagacagagcggcgtgcccgatagattcatcggctctggcagcggcaccgacttcaccctgacaatctctgatgtgcaggccgaggacctggccgactactattgtctccagcactacacaagcccctacacctttggagccggcaccaagctggaactgaaaagaggcggaggcggaagtggaggcggaggatctggcggcggaggctctcaagtgcagctgaaagagtctggccccggactggttcagcctagccaaacactgagcctgacctgtaccgtgtccggctttagcctgaccagctaccacgtgcactgggtccgacaacctccaggcaaaggactggaatggatgggcgtgatgtggagcgacggcgacaccctgtataacagcgccctgaagtcccggctgagcatcagcagagataccagcaagagccaggtgctgctccagatggatagcctccagagcgaggataccgccacctactactgtgccagactccaggtgttcggctaccccggcatcagagactacgtgatggatgcctggggacagggcgcttctgtgacagtctcttctacgcgtgagcagaaactgatctcggaagaggatctggcgaagcccaccacgacgccagcgccgcgaccaccaacaccggcgcccaccatcgcgtcgcagcccctgtccctgcgcccagaggcgtgccggccagcggcggggggcgcagtgcacacgagggggctggacttcgcctgtgacatctacatctgggcgcccttggccgggacttgtggggtccttctcctgtcactggttatcaccctttactgcgggcgcgccagagtgaagttcagcaggagcgcagacgcccccgcgtaccagcagggccagaaccagctctataacgagctgaatctaggacgaagagaggagtacgatgttttggacaagagacgtggccgggaccctgagatggggggaaagccgagaaggaagaaccctcaggaaggcctgtacaatgaactgcagaaagataagatggcggaggcctacagtgagattgggatgaaaggcgagcgccggaggggcaaggggcacgatggcctttaccagggtctcagtacagccaccaaggacacctacgacgcccttcacatgcaggccctgccccctcgctctagaggatctggagcaacaaacttctcactactcaaacaagcaggtgacgtggaggagaatcccgggcctgggatccacatggccacttacgaggttctctgtgaggtggcgcggaaactgggcacggatgacagggaagtggtattgttcctcctaaacgtgttcatacctcaacccacactggcccaattaattggagctcttagagctttaaaggaggagggcaggttaacgtttcccctgttagcggaatgtctgtttcgtgcaggtcgcagagacctcttgcgcgacctgcttcacttagacccgcgttttttagagcgccacctagcgggcacaatgagttatttcagcccttatcagctcactgttctccacgtagacggggagctgtgtgcgagggatattaggtctttgatatttttaagcaaggacactatagggtctcgcagcacaccacagacattcttacactgggtgtactgtatggaaaacttagacctactgggtcccactgacgtggatgccctaatgtcaatgcttagatctttgtcaagagtagacctacagcgccaagtgcaaaccctaatgggccttcacctttccggcccatcacactcccaacactatcgccatacaccactcgagaccgatttctacgactacaaggacgacgatgacaagactagtggctccggcgagggcagaggaagtctactaacctgcggagatgtggaagaaaatcctggcccacatatgaccgagtacaagcccacggtgcgcctcgccacccgcgacgacgtccccagggccgtacgcaccctcgccgccgcgttcgccgactaccccgccacgcgccacaccgtcgatccggaccgccacatcgagcgggtcaccgagctgcaagaactcttcctcacgcgcgtcgggctcgacatcggcaaggtgtgggtcgcggacgacggcgccgcggtggcggtctggaccacgccggagagcgtcgaagcgggggcggtgttcgccgagatcggcccgcgcatggccgagttgagcggttcccggctggccgcgcagcaacagatggaaggcctcctggcgccgcaccggcccaaggagcccgcgtggttcctggccaccgtcggcgtctcgcccgaccaccagggcaagggtctgggcagcgccgtcgtgctccccggagtggaggcggccgagcgcgccggggtgcccgccttcctggagacctccgcgccccgcaacctccccttctacgagcggctcggcttcaccgtcaccgccgacgtcgaggtgcccgaaggaccgcgcacctggtgcatgacccgcaagcccggtgcctga

SEQ ID NO: 9485 - DNA, 2598 bp, Artificial Sequence
  Synthetic Polynucloetide
atggccttaccagtgaccgccttgctcctgccgctggccttgctgctccacgccgccaggccggacctggtcatgacacagagcccttttagcctggccgtgtccgagggcgagatggtcacaatcaagtgcaagagcagccagagcctgctgagcagcagacaccagaagaactttctggcctggtacagacagaagcccggacagtctcccaagctgctgatctaccacgccagcacaagacagagcggcgtgcccgatagattcatcggctctggcagcggcaccgacttcaccctgacaatctctgatgtgcaggccgaggacctggccgactactattgtctccagcactacacaagcccctacacctttggagccggcaccaagctggaactgaaaagactcgagatccagaaccctgatcctgccgtgtaccagctgcgggatagcaagagcagcgacaagagcgtgtgtctgttcaccgacttcgacagccagaccaacgtgtcccagagcaaggactccgacgtgtacatcaccgataagtgcgtgctggacatgcggagcatggacttcaagagcaactccgccgtggcctggtccaacaagtccgatttcgcctgcgccaacgccttcaacaacagcattatccccgaggacacattcttcccaagcagcgacgtgccctgcgacgtgaagctggtggaaaagagcttcgagacagacaccaacctgaacttccagaacctgagcgtgatcggcttcagaatcctgctgctgaaagtggccggctttaacctgctgatgaccctgcggctgtggtccagccgcgccaagagaagcggatctggcgtgaagcagaccctgaatttcgacctgctgaagctggctggcgacgtggaatccaacccaggccctactagtatggactggatttggcgcatccttttccttgtcggcgctgctaccggcgcgcattccttcgaacaagtgcagctgaaagagtctggccccggactggttcagcctagccaaacactgagcctgacctgtaccgtgtccggctttagcctgaccagctaccacgtgcactgggtccgacaacctccaggcaaaggactggaatggatgggcgtgatgtggagcgacggcgacaccctgtataacagcgccctgaagtcccggctgagcatcagcagagataccagcaagagccaggtgctgctccagatggatagcctccagagcgaggataccgccacctactactgtgccagactccaggtgttcggctaccccggcatcagagactacgtgatggatgcctggggacagggcgcttctgtgacagtctcttctacgcgtgaggacctgaagaacgtgttcccacctgaggtggccgtgttcgagcctagcaaggccgagatcgcccacacccagaaagccaccctcgtgtgcctggctaccggcttctaccccgaccatgtggaactgtcttggtgggtcaacggcaaagaggtgcacagcggcgtgtgtaccgacccccagccactgaaagaacagcccgccctgaacgacagccggtactgcctgagcagcagactgagagtgtccgccaccttctggcagaacccccggaaccacttcagatgccaggtgcagttctacggcctgagcgagaacgacgagtggacccaggacagagccaagcccgtgacccagatcgtgtctgccgaagcctggggcagagccgattgcggcatcaccagcgccagctaccaccagggcgtgctgagcgccaccatcctgtacgagatcctgctgggcaaggccaccctgtacgccgtgctggtgtctgccctggtgctgatggctatggtcaagcggaaggacagccggggaagggccaagcgatctggatctggagcaacaaacttctcactactcaaacaagcaggtgacgtggaggagaatcccgggccttctagaggccatatgaccgagtacaagcccacggtgcgcctcgccacccgcgacgacgtccccagggccgtacgcaccctcgccgccgcgttcgccgactaccccgccacgcgccacaccgtcgatccggaccgccacatcgagcgggtcaccgagctgcaagaactcttcctcacgcgcgtcgggctcgacatcggcaaggtgtgggtcgcggacgacggcgccgcggtggcggtctggaccacgccggagagcgtcgaagcgggggcggtgttcgccgagatcggcccgcgcatggccgagttgagcggttcccggctggccgcgcagcaacagatggaaggcctcctggcgccgcaccggcccaaggagcccgcgtggttcctggccaccgtcggcgtctcgcccgaccaccagggcaagggtctgggcagcgccgtcgtgctccccggagtggaggcggccgagcgcgccggggtgcccgccttcctggagacctccgcgccccgcaacctccccttctacgagcggctcggcttcaccgtcaccgccgacgtcgaggtgcccgaaggaccgcgcacctggtgcatgacccgcaagcccggtgcctga

SEQ ID NO: 9486 - DNA, 2595 bp, Artificial Sequence
  Synthetic Polynucloetide
atggccttaccagtgaccgccttgctcctgccgctggccttgctgctccacgccgccaggccggacctggtcatgacacagagcccttttagcctggccgtgtccgagggcgagatggtcacaatcaagtgcaagagcagccagagcctgctgagcagcagacaccagaagaactttctggcctggtacagacagaagcccggacagtctcccaagctgctgatctaccacgccagcacaagacagagcggcgtgcccgatagattcatcggctctggcagcggcaccgacttcaccctgacaatctctgatgtgcaggccgaggacctggccgactactattgtctccagcactacacaagcccctacacctttggagccggcaccaagctggaactgaaaagactcgaggacctgaagaacgtgttcccacctgaggtggccgtgttcgagcctagcaaggccgagatcgcccacacccagaaagccaccctcgtgtgcctggctaccggcttctaccccgaccatgtggaactgtcttggtgggtcaacggcaaagaggtgcacagcggcgtgtgtaccgacccccagccactgaaagaacagcccgccctgaacgacagccggtactgcctgagcagcagactgagagtgtccgccaccttctggcagaacccccggaaccacttcagatgccaggtgcagttctacggcctgagcgagaacgacgagtggacccaggacagagccaagcccgtgacccagatcgtgtctgccgaagcctggggcagagccgattgcggcatcaccagcgccagctaccaccagggcgtgctgagcgccaccatcctgtacgagatcctgctgggcaaggccaccctgtacgccgtgctggtgtctgccctggtgctgatggctatggtcaagcggaaggacagccggggaagggccaagcgatctggatctggagcaacaaacttctcactactcaaacaagcaggtgacgtggaggagaatcccgggcctactagtatggactggatttggcgcatccttttccttgtcggcgctgctaccggcgcgcattccttcgaacaagtgcagctgaaagagtctggccccggactggttcagcctagccaaacactgagcctgacctgtaccgtgtccggctttagcctgaccagctaccacgtgcactgggtccgacaacctccaggcaaaggactggaatggatgggcgtgatgtggagcgacggcgacaccctgtataacagcgccctgaagtcccggctgagcatcagcagagataccagcaagagccaggtgctgctccagatggatagcctccagagcgaggataccgccacctactactgtgccagactccaggtgttcggctaccccggcatcagagactacgtgatggatgcctggggacagggcgcttctgtgacagtctcttctacgcgtatccagaaccctgatcctgccgtgtaccagctgcgggatagcaagagcagcgacaagagcgtgtgtctgttcaccgacttcgacagccagaccaacgtgtcccagagcaaggactccgacgtgtacatcaccgataagtgcgtgctggacatgcggagcatggacttcaagagcaactccgccgtggcctggtccaacaagtccgatttcgcctgcgccaacgccttcaacaacagcattatccccgaggacacattcttcccaagcagcgacgtgccctgcgacgtgaagctggtggaaaagagcttcgagacagacaccaacctgaacttccagaacctgagcgtgatcggcttcagaatcctgctgctgaaagtggccggctttaacctgctgatgaccctgcggctgtggtccagccgcgccaagagaagcggatctggcgtgaagcagaccctgaatttcgacctgctgaagctggctggcgacgtggaatccaacccaggcccttctagaggccatatgaccgagtacaagcccacggtgcgcctcgccacccgcgacgacgtccccagggccgtacgcaccctcgccgccgcgttcgccgactaccccgccacgcgccacaccgtcgatccggaccgccacatcgagcgggtcaccgagctgcaagaactcttcctcacgcgcgtcgggctcgacatcggcaaggtgtgggtcgcggacgacggcgccgcggtggcggtctggaccacgccggagagcgtcgaagcgggggcggtgttcgccgagatcggcccgcgcatggccgagttgagcggttcccggctggccgcgcagcaacagatggaaggcctcctggcgccgcaccggcccaaggagcccgcgtggttcctggccaccgtcggcgtctcgcccgaccaccagggcaagggtctgggcagcgccgtcgtgctccccggagtggaggcggccgagcgcgccggggtgcccgccttcctggagacctccgcgccccgcaacctccccttctacgagcggctcggcttcaccgtcaccgccgacgtcgaggtgcccgaaggaccgcgcacctggtgcatgacccgcaagcccggtgcctga

SEQ ID NO: 9487 - DNA, 1893 bp, Artificial Sequence
  Synthetic Polynucloetide
atggccttaccagtgaccgccttgctcctgccgctggccttgctgctccacgccgccaggccggacctggtcatgacacagagcccttttagcctggccgtgtccgagggcgagatggtcacaatcaagtgcaagagcagccagagcctgctgagcagcagacaccagaagaactttctggcctggtacagacagaagcccggacagtctcccaagctgctgatctaccacgccagcacaagacagagcggcgtgcccgatagattcatcggctctggcagcggcaccgacttcaccctgacaatctctgatgtgcaggccgaggacctggccgactactattgtctccagcactacacaagcccctacacctttggagccggcaccaagctggaactgaaaagactcgaggacctgaagaacgtgttcccacctgaggtggccgtgttcgagcctagcgaggccgagatcagccacacccagaaagccaccctcgtgtgcctggctaccggcttctaccccgaccatgtggaactgtcttggtgggtcaacggcaaagaggtgcacagcggcgtgtgtaccgacccccagccactgaaagaacagcccgccctgaacgacagccggtactgcctgagcagcagactgagagtgtccgccaccttctggcagaacccccggaaccacttcagatgccaggtgcagttctacggcctgagcgagaacgacgagtggacccaggacagagccaagcccgtgacccagatcgtgtctgccgaagcctggggcagagccgattgcggctttaccagcgagagctaccagcagggcgtgctgagcgccaccatcctgtacgagatcctgctgggcaaggccaccctgtacgccgtgctggtgtctgccctggtgctgatggctatggtcaagcggaaggacagccggggaagggccaagcgatctggatctggagcaacaaacttctcactactcaaacaagcaggtgacgtggaggagaatcccgggcctactagtatggactggatttggcgcatccttttccttgtcggcgctgctaccggcgcgcattccttcgaacaagtgcagctgaaagagtctggccccggactggttcagcctagccaaacactgagcctgacctgtaccgtgtccggctttagcctgaccagctaccacgtgcactgggtccgacaacctccaggcaaaggactggaatggatgggcgtgatgtggagcgacggcgacaccctgtataacagcgccctgaagtcccggctgagcatcagcagagataccagcaagagccaggtgctgctccagatggatagcctccagagcgaggataccgccacctactactgtgccagactccaggtgttcggctaccccggcatcagagactacgtgatggatgcctggggacagggcgcttctgtgacagtctcttctacgcgtatccagaaccctgatcctgccgtgtaccagctgcgggatagcaagagcagcgacaagagcgtgtgtctgttcaccgacttcgacagccagaccaacgtgtcccagagcaaggactccgacgtgtacatcaccgataagtgcgtgctggacatgcggagcatggacttcaagagcaactccgccgtggcctggtccaacaagtccgatttcgcctgcgccaacgccttcaacaacagcattatccccgaggacacattcttcccaagccccgagagcagctgcgacgtgaagctggtggaaaagagcttcgagacagacaccaacctgaacttccagaacctgagcgtgatcggcttcagaatcctgctgctgaaagtggccggctttaacctgctgatgaccctgcggctgtggtccagc

SEQ ID NO: 9488 - DNA, 2568 bp, Artificial Sequence
  Synthetic Polynucloetide
atggccttaccagtgaccgccttgctcctgccgctggccttgctgctccacgccgccaggccggacctggtcatgacacagagcccttttagcctggccgtgtccgagggcgagatggtcacaatcaagtgcaagagcagccagagcctgctgagcagcagacaccagaagaactttctggcctggtacagacagaagcccggacagtctcccaagctgctgatctaccacgccagcacaagacagagcggcgtgcccgatagattcatcggctctggcagcggcaccgacttcaccctgacaatctctgatgtgcaggccgaggacctggccgactactattgtctccagcactacacaagcccctacacctttggagccggcaccaagctggaactgaaaagactcgaggacctgaagaacgtgttcccacctgaggtggccgtgttcgagcctagcgaggccgagatcagccacacccagaaagccaccctcgtgtgcctggctaccggcttctaccccgaccatgtggaactgtcttggtgggtcaacggcaaagaggtgcacagcggcgtgtgtaccgacccccagccactgaaagaacagcccgccctgaacgacagccggtactgcctgagcagcagactgagagtgtccgccaccttctggcagaacccccggaaccacttcagatgccaggtgcagttctacggcctgagcgagaacgacgagtggacccaggacagagccaagcccgtgacccagatcgtgtctgccgaagcctggggcagagccgattgcggctttaccagcgagagctaccagcagggcgtgctgagcgccaccatcctgtacgagatcctgctgggcaaggccaccctgtacgccgtgctggtgtctgccctggtgctgatggctatggtcaagcggaaggacagccggggaagggccaagcgatctggatctggagcaacaaacttctcactactcaaacaagcaggtgacgtggaggagaatcccgggcctactagtatggactggatttggcgcatccttttccttgtcggcgctgctaccggcgcgcattccttcgaacaagtgcagctgaaagagtctggccccggactggttcagcctagccaaacactgagcctgacctgtaccgtgtccggctttagcctgaccagctaccacgtgcactgggtccgacaacctccaggcaaaggactggaatggatgggcgtgatgtggagcgacggcgacaccctgtataacagcgccctgaagtcccggctgagcatcagcagagataccagcaagagccaggtgctgctccagatggatagcctccagagcgaggataccgccacctactactgtgccagactccaggtgttcggctaccccggcatcagagactacgtgatggatgcctggggacagggcgcttctgtgacagtctcttctacgcgtatccagaaccctgatcctgccgtgtaccagctgcgggatagcaagagcagcgacaagagcgtgtgtctgttcaccgacttcgacagccagaccaacgtgtcccagagcaaggactccgacgtgtacatcaccgataagtgcgtgctggacatgcggagcatggacttcaagagcaactccgccgtggcctggtccaacaagtccgatttcgcctgcgccaacgccttcaacaacagcattatccccgaggacacattcttcccaagccccgagagcagctgcgacgtgaagctggtggaaaagagcttcgagacagacaccaacctgaacttccagaacctgagcgtgatcggcttcagaatcctgctgctgaaagtggccggctttaacctgctgatgaccctgcggctgtggtccagccgcgccaagagaagcggatctggcgtgaagcagaccctgaatttcgacctgctgaagctggctggcgacgtggaatccaacccaggcccttctagaggcgggatccacaccatggctacctacgaggtgctgtgcgaggtggcaagaaagctgggcaccgacgacagagaagtggtgctgttcctgctgaacgtgttcatccctcagcctacactggcccagctgatcggtgcactgagagccctgaaagaggaaggccggctgacctttcctctgctggccgaatgcctgttcagagccggaagaagggatctgctgcgggacctgctgcatctggaccccagatttctggaaagacacctggccggcaccatgagctacttcagcccttaccagctgaccgtgctgcacgttgacggcgaactgtgcgccagagatattcggagcctgatcttcctgagcaaggacaccatcggcagccggtctacccctcagacatttctgcactgggtgtactgcatggaaaacctggacctgctcggccccacagatgtggatgccctgatgtccatgctgagaagcctgagcagagtggacctccagagacaggtgcagacactgatgggactgcacctgagcggacctagccacagccagcactacagacacacccct

SEQ ID NO: 9489 - DNA, 1905 bp, Artificial Sequence
  Synthetic Polynucloetide
atggccttaccagtgaccgccttgctcctgccgctggccttgctgctccacgccgccaggccggacctggtcatgacacagagcccttttagcctggccgtgtccgagggcgagatggtcacaatcaagtgcaagagcagccagagcctgctgagcagcagacaccagaagaactttctggcctggtacagacagaagcccggacagtctcccaagctgctgatctaccacgccagcacaagacagagcggcgtgcccgatagattcatcggctctggcagcggcaccgacttcaccctgacaatctctgatgtgcaggccgaggacctggccgactactattgtctccagcactacacaagcccctacacctttggagccggcaccaagctggaactgaaaagactcgagatccagaaccctgatcctgccgtgtaccagctgcgggatagcaagagcagcgacaagagcgtgtgtctgttcaccgacttcgacagccagaccaacgtgtcccagagcaaggactccgacgtgtacatcaccgataagtgcgtgctggacatgcggagcatggacttcaagagcaactccgccgtggcctggtccaacaagtccgatttcgcctgcgccaacgccttcaacaacagcattatccccgaggacacattcttcccaagccccgagagcagctgcgacgtgaagctggtggaaaagagcttcgagacagacaccaacctgaacttccagaacctgagcgtgatcggcttcagaatcctgctgctgaaagtggccggctttaacctgctgatgaccctgcggctgtggtccagccgcgccaagagaagcggatctggcgtgaagcagaccctgaatttcgacctgctgaagctggctggcgacgtggaatccaacccaggccctactagtatggactggatttggcgcatccttttccttgtcggcgctgctaccggcgcgcattccttcgaacaagtgcagctgaaagagtctggccccggactggttcagcctagccaaacactgagcctgacctgtaccgtgtccggctttagcctgaccagctaccacgtgcactgggtccgacaacctccaggcaaaggactggaatggatgggcgtgatgtggagcgacggcgacaccctgtataacagcgccctgaagtcccggctgagcatcagcagagataccagcaagagccaggtgctgctccagatggatagcctccagagcgaggataccgccacctactactgtgccagactccaggtgttcggctaccccggcatcagagactacgtgatggatgcctggggacagggcgcttctgtgacagtctcttctacgcgtgaggacctgaagaacgtgttcccacctgaggtggccgtgttcgagcctagcgaggccgagatcagccacacccagaaagccaccctcgtgtgcctggctaccggcttctaccccgaccatgtggaactgtcttggtgggtcaacggcaaagaggtgcacagcggcgtgtgtaccgacccccagccactgaaagaacagcccgccctgaacgacagccggtactgcctgagcagcagactgagagtgtccgccaccttctggcagaacccccggaaccacttcagatgccaggtgcagttctacggcctgagcgagaacgacgagtggacccaggacagagccaagcccgtgacccagatcgtgtctgccgaagcctggggcagagccgattgcggctttaccagcgagagctaccagcagggcgtgctgagcgccaccatcctgtacgagatcctgctgggcaaggccaccctgtacgccgtgctggtgtctgccctggtgctgatggctatggtcaagcggaaggacagccgggga

SEQ ID NO: 9490 - DNA, 2571 bp, Artificial Sequence
  Synthetic Polynucloetide
atggccttaccagtgaccgccttgctcctgccgctggccttgctgctccacgccgccaggccggacctggtcatgacacagagcccttttagcctggccgtgtccgagggcgagatggtcacaatcaagtgcaagagcagccagagcctgctgagcagcagacaccagaagaactttctggcctggtacagacagaagcccggacagtctcccaagctgctgatctaccacgccagcacaagacagagcggcgtgcccgatagattcatcggctctggcagcggcaccgacttcaccctgacaatctctgatgtgcaggccgaggacctggccgactactattgtctccagcactacacaagcccctacacctttggagccggcaccaagctggaactgaaaagactcgagatccagaaccctgatcctgccgtgtaccagctgcgggatagcaagagcagcgacaagagcgtgtgtctgttcaccgacttcgacagccagaccaacgtgtcccagagcaaggactccgacgtgtacatcaccgataagtgcgtgctggacatgcggagcatggacttcaagagcaactccgccgtggcctggtccaacaagtccgatttcgcctgcgccaacgccttcaacaacagcattatccccgaggacacattcttcccaagccccgagagcagctgcgacgtgaagctggtggaaaagagcttcgagacagacaccaacctgaacttccagaacctgagcgtgatcggcttcagaatcctgctgctgaaagtggccggctttaacctgctgatgaccctgcggctgtggtccagccgcgccaagagaagcggatctggcgtgaagcagaccctgaatttcgacctgctgaagctggctggcgacgtggaatccaacccaggccctactagtatggactggatttggcgcatccttttccttgtcggcgctgctaccggcgcgcattccttcgaacaagtgcagctgaaagagtctggccccggactggttcagcctagccaaacactgagcctgacctgtaccgtgtccggctttagcctgaccagctaccacgtgcactgggtccgacaacctccaggcaaaggactggaatggatgggcgtgatgtggagcgacggcgacaccctgtataacagcgccctgaagtcccggctgagcatcagcagagataccagcaagagccaggtgctgctccagatggatagcctccagagcgaggataccgccacctactactgtgccagactccaggtgttcggctaccccggcatcagagactacgtgatggatgcctggggacagggcgcttctgtgacagtctcttctacgcgtgaggacctgaagaacgtgttcccacctgaggtggccgtgttcgagcctagcgaggccgagatcagccacacccagaaagccaccctcgtgtgcctggctaccggcttctaccccgaccatgtggaactgtcttggtgggtcaacggcaaagaggtgcacagcggcgtgtgtaccgacccccagccactgaaagaacagcccgccctgaacgacagccggtactgcctgagcagcagactgagagtgtccgccaccttctggcagaacccccggaaccacttcagatgccaggtgcagttctacggcctgagcgagaacgacgagtggacccaggacagagccaagcccgtgacccagatcgtgtctgccgaagcctggggcagagccgattgcggctttaccagcgagagctaccagcagggcgtgctgagcgccaccatcctgtacgagatcctgctgggcaaggccaccctgtacgccgtgctggtgtctgccctggtgctgatggctatggtcaagcggaaggacagccggggaagggccaagcgatctggatctggagcaacaaacttctcactactcaaacaagcaggtgacgtggaggagaatcccgggccttctagaggcgggatccacaccatggctacctacgaggtgctgtgcgaggtggcaagaaagctgggcaccgacgacagagaagtggtgctgttcctgctgaacgtgttcatccctcagcctacactggcccagctgatcggtgcactgagagccctgaaagaggaaggccggctgacctttcctctgctggccgaatgcctgttcagagccggaagaagggatctgctgcgggacctgctgcatctggaccccagatttctggaaagacacctggccggcaccatgagctacttcagcccttaccagctgaccgtgctgcacgttgacggcgaactgtgcgccagagatattcggagcctgatcttcctgagcaaggacaccatcggcagccggtctacccctcagacatttctgcactgggtgtactgcatggaaaacctggacctgctcggccccacagatgtggatgccctgatgtccatgctgagaagcctgagcagagtggacctccagagacaggtgcagacactgatgggactgcacctgagcggacctagccacagccagcactacagacacacccct

SEQ ID NO: 9491 - DNA, 2730 bp, Artificial Sequence
  Synthetic Polynucloetide
atggccttaccagtgaccgccttgctcctgccgctggccttgctgctccacgccgccaggccgctcgaggggaaaccaattcccaaccctcttctgggactggattcaaccggcagcggcgaggacctgaagaacgtgttcccacctgaggtggccgtgttcgagcctagcaaggccgagatcgcccacacccagaaagccaccctcgtgtgcctggctaccggcttctaccccgaccatgtggaactgtcttggtgggtcaacggcaaagaggtgcacagcggcgtgtgtaccgacccccagccactgaaagaacagcccgccctgaacgacagccggtactgcctgagcagcagactgagagtgtccgccaccttctggcagaacccccggaaccacttcagatgccaggtgcagttctacggcctgagcgagaacgacgagtggacccaggacagagccaagcccgtgacccagatcgtgtctgccgaagcctggggcagagccgattgcggcatcaccagcgccagctaccaccagggcgtgctgagcgccaccatcctgtacgagatcctgctgggcaaggccaccctgtacgccgtgctggtgtctgccctggtgctgatggctatggtcaagcggaaggacagccggggaagggccaagcgatctggatctggagcaacaaacttctcactactcaaacaagcaggtgacgtggaggagaatcccgggcctactagcatggccttaccagtgaccgccttgctcctgccgctggccttgctgctccacgccgccaggccggacctggtcatgacacagagcccttttagcctggccgtgtccgagggcgagatggtcacaatcaagtgcaagagcagccagagcctgctgagcagcagacaccagaagaactttctggcctggtacagacagaagcccggacagtctcccaagctgctgatctaccacgccagcacaagacagagcggcgtgcccgatagattcatcggctctggcagcggcaccgacttcaccctgacaatctctgatgtgcaggccgaggacctggccgactactattgtctccagcactacacaagcccctacacctttggagccggcaccaagctggaactgaaaagaggcggaggcggaagtggaggcggaggatctggcggcggaggctctcaagtgcagctgaaagagtctggccccggactggttcagcctagccaaacactgagcctgacctgtaccgtgtccggctttagcctgaccagctaccacgtgcactgggtccgacaacctccaggcaaaggactggaatggatgggcgtgatgtggagcgacggcgacaccctgtataacagcgccctgaagtcccggctgagcatcagcagagataccagcaagagccaggtgctgctccagatggatagcctccagagcgaggataccgccacctactactgtgccagactccaggtgttcggctaccccggcatcagagactacgtgatggatgcctggggacagggcgcttctgtgacagtctcttctacgcgtgagcagaaactgatctcggaagaggatgggagcggcatccagaaccctgatcctgccgtgtaccagctgcgggatagcaagagcagcgacaagagcgtgtgtctgttcaccgacttcgacagccagaccaacgtgtcccagagcaaggactccgacgtgtacatcaccgataagtgcgtgctggacatgcggagcatggacttcaagagcaactccgccgtggcctggtccaacaagtccgatttcgcctgcgccaacgccttcaacaacagcattatccccgaggacacattcttcccaagcagcgacgtgccctgcgacgtgaagctggtggaaaagagcttcgagacagacaccaacctgaacttccagaacctgagcgtgatcggcttcagaatcctgctgctgaaagtggccggctttaacctgctgatgaccctgcggctgtggtccagccgcgccaagagaagcggatctggcgtgaagcagaccctgaatttcgacctgctgaagctggctggcgacgtggaatccaacccaggcccttctagaggccatatgaccgagtacaagcccacggtgcgcctcgccacccgcgacgacgtccccagggccgtacgcaccctcgccgccgcgttcgccgactaccccgccacgcgccacaccgtcgatccggaccgccacatcgagcgggtcaccgagctgcaagaactcttcctcacgcgcgtcgggctcgacatcggcaaggtgtgggtcgcggacgacggcgccgcggtggcggtctggaccacgccggagagcgtcgaagcgggggcggtgttcgccgagatcggcccgcgcatggccgagttgagcggttcccggctggccgcgcagcaacagatggaaggcctcctggcgccgcaccggcccaaggagcccgcgtggttcctggccaccgtcggcgtctcgcccgaccaccagggcaagggtctgggcagcgccgtcgtgctccccggagtggaggcggccgagcgcgccggggtgcccgccttcctggagacctccgcgccccgcaacctccccttctacgagcggctcggcttcaccgtcaccgccgacgtcgaggtgcccgaaggaccgcgcacctggtgcatgacccgcaagcccggtgcctga

SEQ ID NO: 9492 - DNA, 2733 bp, Artificial Sequence
  Synthetic Polynucloetide
atggccttaccagtgaccgccttgctcctgccgctggccttgctgctccacgccgccaggccgctcgagcagaaactgatctcggaagaggatctgggctccggcgatcgccctgatcctgccgtgtaccagctgcgggatagcaagagcagcgacaagagcgtgtgtctgttcaccgacttcgacagccagaccaacgtgtcccagagcaaggactccgacgtgtacatcaccgataagtgcgtgctggacatgcggagcatggacttcaagagcaactccgccgtggcctggtccaacaagtccgatttcgcctgcgccaacgccttcaacaacagcattatccccgaggacacattcttcccaagccccgagagcagctgcgacgtgaagctggtggaaaagagcttcgagacagacaccaacctgaacttccagaacctgagcgtgatcggcttcagaatcctgctgctgaaagtggccggctttaacctgctgatgaccctgcggctgtggtccagctctagtcgcgccaagagaagcggatctggcgtgaagcagaccctgaatttcgacctgctgaagctggctggcgacgtggaatccaacccaggccccactagcatggccttaccagtgaccgccttgctcctgccgctggccttgctgctccacgccgccaggccggacctggtcatgacacagagcccttttagcctggccgtgtccgagggcgagatggtcacaatcaagtgcaagagcagccagagcctgctgagcagcagacaccagaagaactttctggcctggtacagacagaagcccggacagtctcccaagctgctgatctaccacgccagcacaagacagagcggcgtgcccgatagattcatcggctctggcagcggcaccgacttcaccctgacaatctctgatgtgcaggccgaggacctggccgactactattgtctccagcactacacaagcccctacacctttggagccggcaccaagctggaactgaaaagaggcggaggcggaagtggaggcggaggatctggcggcggaggctctcaagtgcagctgaaagagtctggccccggactggttcagcctagccaaacactgagcctgacctgtaccgtgtccggctttagcctgaccagctaccacgtgcactgggtccgacaacctccaggcaaaggactggaatggatgggcgtgatgtggagcgacggcgacaccctgtataacagcgccctgaagtcccggctgagcatcagcagagataccagcaagagccaggtgctgctccagatggatagcctccagagcgaggataccgccacctactactgtgccagactccaggtgttcggctaccccggcatcagagactacgtgatggatgcctggggacagggcgcttctgtgacagtctcttctacgcgtgggaaaccaattcccaaccctcttctgggactggattcaaccggcagcggcgaggacctgaagaacgtgttcccacctgaggtggccgtgttcgagcctagcgaggccgagatcagccacacccagaaagccaccctcgtgtgcctggctaccggcttctaccccgaccatgtggaactgtcttggtgggtcaacggcaaagaggtgcacagcggcgtgtgtaccgacccccagccactgaaagaacagcccgccctgaacgacagccggtactgcctgagcagcagactgagagtgtccgccaccttctggcagaacccccggaaccacttcagatgccaggtgcagttctacggcctgagcgagaacgacgagtggacccaggacagagccaagcccgtgacccagatcgtgtctgccgaagcctggggcagagccgattgcggctttaccagcgagagctaccagcagggcgtgctgagcgccaccatcctgtacgagatcctgctgggcaaggccaccctgtacgccgtgctggtgtctgccctggtgctgatggctatggtcaagcggaaggacagccggggaagggccaagcgatctggatctggagcaacaaacttctcactactcaaacaagcaggtgacgtggaggagaatcccgggccttctagaggccatatgaccgagtacaagcccacggtgcgcctcgccacccgcgacgacgtccccagggccgtacgcaccctcgccgccgcgttcgccgactaccccgccacgcgccacaccgtcgatccggaccgccacatcgagcgggtcaccgagctgcaagaactcttcctcacgcgcgtcgggctcgacatcggcaaggtgtgggtcgcggacgacggcgccgcggtggcggtctggaccacgccggagagcgtcgaagcgggggcggtgttcgccgagatcggcccgcgcatggccgagttgagcggttcccggctggccgcgcagcaacagatggaaggcctcctggcgccgcaccggcccaaggagcccgcgtggttcctggccaccgtcggcgtctcgcccgaccaccagggcaagggtctgggcagcgccgtcgtgctccccggagtggaggcggccgagcgcgccggggtgcccgccttcctggagacctccgcgccccgcaacctccccttctacgagcggctcggcttcaccgtcaccgccgacgtcgaggtgcccgaaggaccgcgcacctggtgcatgacccgcaagcccggtgcctga

SEQ ID NO: 9493 - DNA, 2595 bp, Artificial Sequence
  Synthetic Polynucloetide
atggccttaccagtgaccgccttgctcctgccgctggccttgctgctccacgccgccaggccggacctggtcatgacacagagcccttttagcctggccgtgtccgagggcgagatggtcacaatcaagtgcaagagcagccagagcctgctgagcagcagacaccagaagaactttctggcctggtacagacagaagcccggacagtctcccaagctgctgatctaccacgccagcacaagacagagcggcgtgcccgatagattcatcggctctggcagcggcaccgacttcaccctgacaatctctgatgtgcaggccgaggacctggccgactactattgtctccagcactacacaagcccctacacctttggagccggcaccaagctggaactgaaaagactcgaggacctgaagaacgtgttcccacctgaggtggccgtgttcgagcctagcgaggccgagatcagccacacccagaaagccaccctcgtgtgcctggctaccggcttctaccccgaccatgtggaactgtcttggtgggtcaacggcaaagaggtgcacagcggcgtgtctaccgacccccagccactgaaagaacagcccgccctgaacgacagccggtactgcctgagcagcagactgagagtgtccgccaccttctggcagaacccccggaaccacttcagatgccaggtgcagttctacggcctgagcgagaacgacgagtggacccaggacagagccaagcccgtgacccagatcgtgtctgccgaagcctggggcagagccgattgcggctttaccagcgagagctaccagcagggcgtgctgagcgccaccatcctgtacgagatcctgctgggcaaggccaccctgtacgccgtgctggtgtctgccctggtgctgatggctatggtcaagcggaaggacagccggggaagggccaagcgatctggatctggagcaacaaacttctcactactcaaacaagcaggtgacgtggaggagaatcccgggcctactagtatggactggatttggcgcatccttttccttgtcggcgctgctaccggcgcgcattccttcgaacaagtgcagctgaaagagtctggccccggactggttcagcctagccaaacactgagcctgacctgtaccgtgtccggctttagcctgaccagctaccacgtgcactgggtccgacaacctccaggcaaaggactggaatggatgggcgtgatgtggagcgacggcgacaccctgtataacagcgccctgaagtcccggctgagcatcagcagagataccagcaagagccaggtgctgctccagatggatagcctccagagcgaggataccgccacctactactgtgccagactccaggtgttcggctaccccggcatcagagactacgtgatggatgcctggggacagggcgcttctgtgacagtctcttctacgcgtatccagaaccctgatcctgccgtgtaccagctgcgggatagcaagagcagcgacaagagcgtgtgtctgttcaccgacttcgacagccagaccaacgtgtcccagagcaaggactccgacgtgtacatcaccgataagaccgtgctggacatgcggagcatggacttcaagagcaactccgccgtggcctggtccaacaagtccgatttcgcctgcgccaacgccttcaacaacagcattatccccgaggacacattcttcccaagccccgagagcagctgcgacgtgaagctggtggaaaagagcttcgagacagacaccaacctgaacttccagaacctgagcgtgatcggcttcagaatcctgctgctgaaagtggccggctttaacctgctgatgaccctgcggctgtggtccagccgcgccaagagaagcggatctggcgtgaagcagaccctgaatttcgacctgctgaagctggctggcgacgtggaatccaacccaggcccttctagaggccatatgaccgagtacaagcccacggtgcgcctcgccacccgcgacgacgtccccagggccgtacgcaccctcgccgccgcgttcgccgactaccccgccacgcgccacaccgtcgatccggaccgccacatcgagcgggtcaccgagctgcaagaactcttcctcacgcgcgtcgggctcgacatcggcaaggtgtgggtcgcggacgacggcgccgcggtggcggtctggaccacgccggagagcgtcgaagcgggggcggtgttcgccgagatcggcccgcgcatggccgagttgagcggttcccggctggccgcgcagcaacagatggaaggcctcctggcgccgcaccggcccaaggagcccgcgtggttcctggccaccgtcggcgtctcgcccgaccaccagggcaagggtctgggcagcgccgtcgtgctccccggagtggaggcggccgagcgcgccggggtgcccgccttcctggagacctccgcgccccgcaacctccccttctacgagcggctcggcttcaccgtcaccgccgacgtcgaggtgcccgaaggaccgcgcacctggtgcatgacccgcaagcccggtgcctga

SEQ ID NO: 9494 - DNA, 2841 bp, Artificial Sequence
  Synthetic Polynucloetide
atggccttaccagtgaccgccttgctcctgccgctggccttgctgctccacgccgccaggccggacctggtcatgacacagagcccttttagcctggccgtgtccgagggcgagatggtcacaatcaagtgcaagagcagccagagcctgctgagcagcagacaccagaagaactttctggcctggtacagacagaagcccggacagtctcccaagctgctgatctaccacgccagcacaagacagagcggcgtgcccgatagattcatcggctctggcagcggcaccgacttcaccctgacaatctctgatgtgcaggccgaggacctggccgactactattgtctccagcactacacaagcccctacacctttggagccggcaccaagctggaactgaaaagactcgaggacctgaagaacgtgttcccacctgaggtggccgtgttcgagcctagcgaggccgagatcagccacacccagaaagccaccctcgtgtgcctggctaccggcttctaccccgaccatgtggaactgtcttggtgggtcaacggcaaagaggtgcacagcggcgtgtctaccgacccccagccactgaaagaacagcccgccctgaacgacagccggtactgcctgagcagcagactgagagtgtccgccaccttctggcagaacccccggaaccacttcagatgccaggtgcagttctacggcctgagcgagaacgacgagtggacccaggacagagccaagcccgtgacccagatcgtgtctgccgaagcctggggcagagccgattgcggctttaccagcgagagctaccagcagggcgtgctgagcgccaccatcctgtacgagatcctgctgggcaaggccaccctgtacgccgtgctggtgtctgccctggtgctgatggctatggtcaagcggaaggacagccggggaagggccaagcgatctggatctggagcaacaaacttctcactactcaaacaagcaggtgacgtggaggagaatcccgggcctactagtatggactggatttggcgcatccttttccttgtcggcgctgctaccggcgcgcattccttcgaacaagtgcagctgaaagagtctggccccggactggttcagcctagccaaacactgagcctgacctgtaccgtgtccggctttagcctgaccagctaccacgtgcactgggtccgacaacctccaggcaaaggactggaatggatgggcgtgatgtggagcgacggcgacaccctgtataacagcgccctgaagtcccggctgagcatcagcagagataccagcaagagccaggtgctgctccagatggatagcctccagagcgaggataccgccacctactactgtgccagactccaggtgttcggctaccccggcatcagagactacgtgatggatgcctggggacagggcgcttctgtgacagtctcttctacgcgtgagcagaaactgatctcggaagaggatgggagcggcaccccattcccttctctggcccctcccatcatgctgctggtggacggcaagcagcagatggtggtcgtgtgcctggtgctggatgtggccccacctggactggacagccccatctggtttagcgccggcaatggctctgccctggacgcctttacctacggcccaagccctgccaccgatggcacctggacaaatctggcccacctgagcctgcccagcgaggaactggcttcttgggagcctctcgtgtgccacacaggacctggcgctgagggacacagcagatccacccagcctatgcacctgtctggcgaggccagcaccgccagaacctgtcctcaggaacctctgagaggcacccctggcggagcactgtggctgggagtgctgagactgctgctgttcaagctgctgctgtttgacctgctgctgacctgctcctgtctgtgcgatcctgccggccctctgccttctcctgccaccaccacaagactgagagccctgggcagccacagactgcaccctgccacagagacaggcggcagagaggccacaagcagccctagaccccagcccagagacagaagatggggcgataccccccctggcagaaagcctggatctccagtccgcgccaagagaagcggatctggcgtgaagcagaccctgaatttcgacctgctgaagctggctggcgacgtggaatccaacccaggcccttctagaggccatatgaccgagtacaagcccacggtgcgcctcgccacccgcgacgacgtccccagggccgtacgcaccctcgccgccgcgttcgccgactaccccgccacgcgccacaccgtcgatccggaccgccacatcgagcgggtcaccgagctgcaagaactcttcctcacgcgcgtcgggctcgacatcggcaaggtgtgggtcgcggacgacggcgccgcggtggcggtctggaccacgccggagagcgtcgaagcgggggcggtgttcgccgagatcggcccgcgcatggccgagttgagcggttcccggctggccgcgcagcaacagatggaaggcctcctggcgccgcaccggcccaaggagcccgcgtggttcctggccaccgtcggcgtctcgcccgaccaccagggcaagggtctgggcagcgccgtcgtgctccccggagtggaggcggccgagcgcgccggggtgcccgccttcctggagacctccgcgccccgcaacctccccttctacgagcggctcggcttcaccgtcaccgccgacgtcgaggtgcccgaaggaccgcgcacctggtgcatgacccgcaagcccggtgcctga

SEQ ID NO: 9495 - DNA, 2895 bp, Artificial Sequence
  Synthetic Polynucloetide
atggccttaccagtgaccgccttgctcctgccgctggccttgctgctccacgccgccaggccgctcgaggacctgaagaacgtgttcccacctgaggtggccgtgttcgagcctagcgaggccgagatcagccacacccagaaagccaccctcgtgtgcctggctaccggcttctaccccgaccatgtggaactgtcttggtgggtcaacggcaaagaggtgcacagcggcgtgtctaccgacccccagccactgaaagaacagcccgccctgaacgacagccggtactgcctgagcagcagactgagagtgtccgccaccttctggcagaacccccggaaccacttcagatgccaggtgcagttctacggcctgagcgagaacgacgagtggacccaggacagagccaagcccgtgacccagatcgtgtctgccgaagcctggggcagagccgattgcggctttaccagcgagagctaccagcagggcgtgctgagcgccaccatcctgtacgagatcctgctgggcaaggccaccctgtacgccgtgctggtgtctgccctggtgctgatggctatggtcaagcggaaggacagccggggaagggccaagcgatctggatctggagcaacaaacttctcactactcaaacaagcaggtgacgtggaggagaatcccgggcctactagcatggccttaccagtgaccgccttgctcctgccgctggccttgctgctccacgccgccaggccggacctggtcatgacacagagcccttttagcctggccgtgtccgagggcgagatggtcacaatcaagtgcaagagcagccagagcctgctgagcagcagacaccagaagaactttctggcctggtacagacagaagcccggacagtctcccaagctgctgatctaccacgccagcacaagacagagcggcgtgcccgatagattcatcggctctggcagcggcaccgacttcaccctgacaatctctgatgtgcaggccgaggacctggccgactactattgtctccagcactacacaagcccctacacctttggagccggcaccaagctggaactgaaaagaggcggaggcggaagtggaggcggaggatctggcggcggaggctctcaagtgcagctgaaagagtctggccccggactggttcagcctagccaaacactgagcctgacctgtaccgtgtccggctttagcctgaccagctaccacgtgcactgggtccgacaacctccaggcaaaggactggaatggatgggcgtgatgtggagcgacggcgacaccctgtataacagcgccctgaagtcccggctgagcatcagcagagataccagcaagagccaggtgctgctccagatggatagcctccagagcgaggataccgccacctactactgtgccagactccaggtgttcggctaccccggcatcagagactacgtgatggatgcctggggacagggcgcttctgtgacagtctcttctacgcgtgagcagaaactgatctcggaagaggatctggggagcggcaccccattcccttctctggcccctcccatcatgctgctggtggacggcaagcagcagatggtggtcgtgtgcctggtgctggatgtggccccacctggactggacagccccatctggtttagcgccggcaatggctctgccctggacgcctttacctacggcccaagccctgccaccgatggcacctggacaaatctggcccacctgagcctgcccagcgaggaactggcttcttgggagcctctcgtgtgccacacaggacctggcgctgagggacacagcagatccacccagcctatgcacctgtctggcgaggccagcaccgccagaacctgtcctcaggaacctctgagaggcacccctggcggagcactgtggctgggagtgctgagactgctgctgttcaagctgctgctgtttgacctgctgctgacctgctcctgtctgtgcgatcctgccggccctctgccttctcctgccaccaccacaagactgagagccctgggcagccacagactgcaccctgccacagagacaggcggcagagaggccacaagcagccctagaccccagcccagagacagaagatggggcgataccccccctggcagaaagcctggatctccagtccgcgccaagagaagcggatctggcgtgaagcagaccctgaatttcgacctgctgaagctggctggcgacgtggaatccaacccaggcccttctagatctagaggccatatgaccgagtacaagcccacggtgcgcctcgccacccgcgacgacgtccccagggccgtacgcaccctcgccgccgcgttcgccgactaccccgccacgcgccacaccgtcgatccggaccgccacatcgagcgggtcaccgagctgcaagaactcttcctcacgcgcgtcgggctcgacatcggcaaggtgtgggtcgcggacgacggcgccgcggtggcggtctggaccacgccggagagcgtcgaagcgggggcggtgttcgccgagatcggcccgcgcatggccgagttgagcggttcccggctggccgcgcagcaacagatggaaggcctcctggcgccgcaccggcccaaggagcccgcgtggttcctggccaccgtcggcgtctcgcccgaccaccagggcaagggtctgggcagcgccgtcgtgctccccggagtggaggcggccgagcgcgccggggtgcccgccttcctggagacctccgcgccccgcaacctccccttctacgagcggctcggcttcaccgtcaccgccgacgtcgaggtgcccgaaggaccgcgcacctggtgcatgacccgcaagcccggtgcctga

SEQ ID NO: 9496 - DNA, 2706 bp, Artificial Sequence
  Synthetic Polynucloetide
atggccttaccagtgaccgccttgctcctgccgctggccttgctgctccacgccgccaggccggacctggtcatgacacagagcccttttagcctggccgtgtccgagggcgagatggtcacaatcaagtgcaagagcagccagagcctgctgagcagcagacaccagaagaactttctggcctggtacagacagaagcccggacagtctcccaagctgctgatctaccacgccagcacaagacagagcggcgtgcccgatagattcatcggctctggcagcggcaccgacttcaccctgacaatctctgatgtgcaggccgaggacctggccgactactattgtctccagcactacacaagcccctacacctttggagccggcaccaagctggaactgaaaagactcgaggggaaaccaattcccaaccctcttctgggactggattcaaccggcagcggcgacaagcagctggacgccgacgtgtcccccaagcctaccatcttcctgccctctatcgccgagacaaagctccagaaggccggcacctacctgtgcctgctggaaaagttcttcccagatgtgattaagatccactggcaggaaaagaagtccaacaccatcctgggcagccaggaaggcaacaccatgaagaccaacgacacctacatgaagttcagctggctgaccgtgcccgagaagtccctggacaaagaacacagatgcatcgtgcggcacgaaaacaacaagaacggcgtggaccaggaaatcatcttcccacccatcaagaccgatgtgattacaatggaccccaaggacaactgctccaaggacgccaacgataccctgctgctccagctgaccaacaccagcgcctactacatgtacttgttgctgctgctgaagtccgtggtgtacttcgccatcatcacatgctgcctgctgcggagaaccgccttctgctgcaacggcgagaagtctagggccaagcgatctggatctggagcaacaaacttctcactactcaaacaagcaggtgacgtggaggagaatcccgggcctactagtatggactggatttggcgcatccttttccttgtcggcgctgctaccggcgcgcattccttcgaacaagtgcagctgaaagagtctggccccggactggttcagcctagccaaacactgagcctgacctgtaccgtgtccggctttagcctgaccagctaccacgtgcactgggtccgacaacctccaggcaaaggactggaatggatgggcgtgatgtggagcgacggcgacaccctgtataacagcgccctgaagtcccggctgagcatcagcagagataccagcaagagccaggtgctgctccagatggatagcctccagagcgaggataccgccacctactactgtgccagactccaggtgttcggctaccccggcatcagagactacgtgatggatgcctggggacagggcgcttctgtgacagtctcttctacgcgtgagcagaaactgatctcggaagaggatgggagcggcagccagcctcacaccaagcccagcgtgttcgtgatgaagaacggcaccaacgtggcctgcctcgtgaaagagttctaccccaaggacatcaggatcaacctggtgtccagcaagaagatcaccgagttcgaccccgccatcgtgatctcccccagcggcaagtacaacgccgtgaagctggggaagtacgaggacagcaacagcgtgacctgctccgtgcagcacgacaacaagaccgtgcacagcaccgactttgaagtgaaaaccgactccaccgaccacgtgaagcccaaagagacagagaacaccaagcagcccagcaagagctgccacaagcccaaggccatcgtgcacaccgagaaagtgaacatgatgagcctgaccgtgctgggcctgcggatgctgttcgccaaaaccgtggccgtgaacttcctgctgaccgccaagctgttcttcctccgcgccaagagaagcggatctggcgtgaagcagaccctgaatttcgacctgctgaagctggctggcgacgtggaatccaacccaggcccttctagaggccatatgaccgagtacaagcccacggtgcgcctcgccacccgcgacgacgtccccagggccgtacgcaccctcgccgccgcgttcgccgactaccccgccacgcgccacaccgtcgatccggaccgccacatcgagcgggtcaccgagctgcaagaactcttcctcacgcgcgtcgggctcgacatcggcaaggtgtgggtcgcggacgacggcgccgcggtggcggtctggaccacgccggagagcgtcgaagcgggggcggtgttcgccgagatcggcccgcgcatggccgagttgagcggttcccggctggccgcgcagcaacagatggaaggcctcctggcgccgcaccggcccaaggagcccgcgtggttcctggccaccgtcggcgtctcgcccgaccaccagggcaagggtctgggcagcgccgtcgtgctccccggagtggaggcggccgagcgcgccggggtgcccgccttcctggagacctccgcgccccgcaacctccccttctacgagcggctcggcttcaccgtcaccgccgacgtcgaggtgcccgaaggaccgcgcacctggtgcatgacccgcaagcccggtgcctga

SEQ ID NO: 9497 - DNA, 1917 bp, Artificial Sequence
  Synthetic Polynucloetide
atggccttaccagtgaccgccttgctcctgccgctggccttgctgctccacgccgccaggccggacctggtcatgacacagagcccttttagcctggccgtgtccgagggcgagatggtcacaatcaagtgcaagagcagccagagcctgctgagcagcagacaccagaagaactttctggcctggtacagacagaagcccggacagtctcccaagctgctgatctaccacgccagcacaagacagagcggcgtgcccgatagattcatcggctctggcagcggcaccgacttcaccctgacaatctctgatgtgcaggccgaggacctggccgactactattgtctccagcactacacaagcccctacacctttggagccggcaccaagctggaactgaaaagactcgagagccagcctcacaccaagcccagcgtgttcgtgatgaagaacggcaccaacgtggcctgcctcgtgaaagagttctaccccaaggacatcaggatcaacctggtgtccagcaagaagatcaccgagttcgaccccgccatcgtgatctcccccagcggcaagtacaacgccgtgaagctggggaagtacgaggacagcaacagcgtgacctgctccgtgcagcacgacaacaagaccgtgcacagcaccgactttgaagtgaaaaccgactccaccgaccacgtgaagcccaaagagacagagaacaccaagcagcccagcaagagctgccacaagcccaaggccatcgtgcacaccgagaaagtgaacatgatgagcctgaccgtgctgggcctgcggatgctgttcgccaaaaccgtggccgtgaacttcctgctgaccgccaagctgttcttcctcagggccaagcgatctggatctggagcaacaaacttctcactactcaaacaagcaggtgacgtggaggagaatcccgggcctactagtatggactggatttggcgcatccttttccttgtcggcgctgctaccggcgcgcattccttcgaacaagtgcagctgaaagagtctggccccggactggttcagcctagccaaacactgagcctgacctgtaccgtgtccggctttagcctgaccagctaccacgtgcactgggtccgacaacctccaggcaaaggactggaatggatgggcgtgatgtggagcgacggcgacaccctgtataacagcgccctgaagtcccggctgagcatcagcagagataccagcaagagccaggtgctgctccagatggatagcctccagagcgaggataccgccacctactactgtgccagactccaggtgttcggctaccccggcatcagagactacgtgatggatgcctggggacagggcgcttctgtgacagtctcttctacgcgtgacaagcagctggacgccgacgtgtcccccaagcctaccatcttcctgccctctatcgccgagacaaagctccagaaggccggcacctacctgtgcctgctggaaaagttcttcccagatgtgattaagatccactggcaggaaaagaagtccaacaccatcctgggcagccaggaaggcaacaccatgaagaccaacgacacctacatgaagttcagctggctgaccgtgcccgagaagtccctggacaaagaacacagatgcatcgtgcggcacgaaaacaacaagaacggcgtggaccaggaaatcatcttcccacccatcaagaccgatgtgattacaatggaccccaaggacaactgctccaaggacgccaacgataccctgctgctccagctgaccaacaccagcgcctactacatgtacttgttgctgctgctgaagtccgtggtgtacttcgccatcatcacatgctgcctgctgcggagaaccgccttctgctgcaacggcgagaagtct

SEQ ID NO: 9498 - DNA, 2751 bp, Artificial Sequence
  Synthetic Polynucloetide
atggccttaccagtgaccgccttgctcctgccgctggccttgctgctccacgccgccaggccgctcgaggggaaaccaattcccaaccctcttctgggactggattcaaccggcagcggcgacaagcagctggacgccgacgtgtcccccaagcctaccatcttcctgccctctatcgccgagacaaagctccagaaggccggcacctacctgtgcctgctggaaaagttcttcccagatgtgattaagatccactggcaggaaaagaagtccaacaccatcctgggcagccaggaaggcaacaccatgaagaccaacgacacctacatgaagttcagctggctgaccgtgcccgagaagtccctggacaaagaacacagatgcatcgtgcggcacgaaaacaacaagaacggcgtggaccaggaaatcatcttcccacccatcaagaccgatgtgattacaatggaccccaaggacaactgctccaaggacgccaacgataccctgctgctccagctgaccaacaccagcgcctactacatgtacttgttgctgctgctgaagtccgtggtgtacttcgccatcatcacatgctgcctgctgcggagaaccgccttctgctgcaacggcgagaagtctagggccaagcgatctggatctggagcaacaaacttctcactactcaaacaagcaggtgacgtggaggagaatcccgggcctactagcatggccttaccagtgaccgccttgctcctgccgctggccttgctgctccacgccgccaggccggacctggtcatgacacagagcccttttagcctggccgtgtccgagggcgagatggtcacaatcaagtgcaagagcagccagagcctgctgagcagcagacaccagaagaactttctggcctggtacagacagaagcccggacagtctcccaagctgctgatctaccacgccagcacaagacagagcggcgtgcccgatagattcatcggctctggcagcggcaccgacttcaccctgacaatctctgatgtgcaggccgaggacctggccgactactattgtctccagcactacacaagcccctacacctttggagccggcaccaagctggaactgaaaagaggcggaggcggaagtggaggcggaggatctggcggcggaggctctcaagtgcagctgaaagagtctggccccggactggttcagcctagccaaacactgagcctgacctgtaccgtgtccggctttagcctgaccagctaccacgtgcactgggtccgacaacctccaggcaaaggactggaatggatgggcgtgatgtggagcgacggcgacaccctgtataacagcgccctgaagtcccggctgagcatcagcagagataccagcaagagccaggtgctgctccagatggatagcctccagagcgaggataccgccacctactactgtgccagactccaggtgttcggctaccccggcatcagagactacgtgatggatgcctggggacagggcgcttctgtgacagtctcttctacgcgtgagcagaaactgatctcggaagaggatgggagcggcagccagcctcacaccaagcccagcgtgttcgtgatgaagaacggcaccaacgtggcctgcctcgtgaaagagttctaccccaaggacatcaggatcaacctggtgtccagcaagaagatcaccgagttcgaccccgccatcgtgatctcccccagcggcaagtacaacgccgtgaagctggggaagtacgaggacagcaacagcgtgacctgctccgtgcagcacgacaacaagaccgtgcacagcaccgactttgaagtgaaaaccgactccaccgaccacgtgaagcccaaagagacagagaacaccaagcagcccagcaagagctgccacaagcccaaggccatcgtgcacaccgagaaagtgaacatgatgagcctgaccgtgctgggcctgcggatgctgttcgccaaaaccgtggccgtgaacttcctgctgaccgccaagctgttcttcctccgcgccaagagaagcggatctggcgtgaagcagaccctgaatttcgacctgctgaagctggctggcgacgtggaatccaacccaggcccttctagaggccatatgaccgagtacaagcccacggtgcgcctcgccacccgcgacgacgtccccagggccgtacgcaccctcgccgccgcgttcgccgactaccccgccacgcgccacaccgtcgatccggaccgccacatcgagcgggtcaccgagctgcaagaactcttcctcacgcgcgtcgggctcgacatcggcaaggtgtgggtcgcggacgacggcgccgcggtggcggtctggaccacgccggagagcgtcgaagcgggggcggtgttcgccgagatcggcccgcgcatggccgagttgagcggttcccggctggccgcgcagcaacagatggaaggcctcctggcgccgcaccggcccaaggagcccgcgtggttcctggccaccgtcggcgtctcgcccgaccaccagggcaagggtctgggcagcgccgtcgtgctccccggagtggaggcggccgagcgcgccggggtgcccgccttcctggagacctccgcgccccgcaacctccccttctacgagcggctcggcttcaccgtcaccgccgacgtcgaggtgcccgaaggaccgcgcacctggtgcatgacccgcaagcccggtgcctga

SEQ ID NO: 9499 - DNA, 3126 bp, Artificial Sequence
  Synthetic Polynucloetide
atggccttaccagtgaccgccttgctcctgccgctggccttgctgctccacgccgccaggccggacctggtcatgacacagagcccttttagcctggccgtgtccgagggcgagatggtcacaatcaagtgcaagagcagccagagcctgctgagcagcagacaccagaagaactttctggcctggtacagacagaagcccggacagtctcccaagctgctgatctaccacgccagcacaagacagagcggcgtgcccgatagattcatcggctctggcagcggcaccgacttcaccctgacaatctctgatgtgcaggccgaggacctggccgactactattgtctccagcactacacaagcccctacacctttggagccggcaccaagctggaactgaaaagaggacagcctaaggccaatcctaccgtgacactgttccctccaagcagcgaagaactccaggccaacaaggccacacttgtgtgcctgatctccgacttctaccctggggctgtgacagtggcttggaaggccgatggatctcctgtgaaagccggcgtggaaaccaccaagccatccaagcagagcaacaacaaatacgccgccagctcctacctgagcctgacacctgagcagtggaagtcccacagatcctacagctgccaagtgacccacgaaggcagcaccgtggaaaagacagtggcccctacagagtgcagcggatcccagagcttcggcctgctggaccccaagctgtgctacctgctggatggcatcctgttcatctacggcgtgatcctgaccgccctgttcctgagagtgaagttcagcagaagcgccgacgcccctgcctaccagcagggacagaaccaactgtacaacgagctgaacctgggcagacgggaagagtacgacgtgctggacaagcggagaggcagggaccctgagatgggcggaaagccccagcggagaaagaacccccaggaaggactgtataacgaactccagaaagacaagatggccgaagcctacagcgagatcggcatgaagggcgagcggagaagaggcaagggccacgatggcctgtaccagggcctgagcaccgccaccaaggacacctatgacgccctgcacatgcaggccctgcctccaagaagggccaagcgatctggatctggagcaacaaacttctcactactcaaacaagcaggtgacgtggaggagaatcccgggcctactagtatggactggatttggcgcatccttttccttgtcggcgctgctaccggcgcgcattccttcgaacaagtgcagctgaaagagtctggccccggactggttcagcctagccaaacactgagcctgacctgtaccgtgtccggctttagcctgaccagctaccacgtgcactgggtccgacaacctccaggcaaaggactggaatggatgggcgtgatgtggagcgacggcgacaccctgtataacagcgccctgaagtcccggctgagcatcagcagagataccagcaagagccaggtgctgctccagatggatagcctccagagcgaggataccgccacctactactgtgccagactccaggtgttcggctaccccggcatcagagactacgtgatggatgcctggggacagggcgcttctgtgacagtctcttctgcctctacaaagggaccctccgtgtttcctctggctcccagcagcaagtctacaagcggaggaacagccgctctgggctgcctggtcaaggattactttcccgagcctgtgaccgtgtcctggaatagcggagcactgacaagcggcgtgcacacctttccagccgtgctgcaaagcagcggcctgtactctctgagcagcgtggtcacagtgcctagctctagcctgggcacccagacctacatctgcaatgtgaaccacaagcctagcaacaccaaggtggacaagagagtggaacccaagagctgtggtacccagagttttgggttgttggaccctaaattgtgctatctgttggacggaatcctgttcatttacggagtgatcctgaccgcattgttcctgcgggttaagttttccagatccgcagacgcacccgcttaccaacaagggcagaaccaactctacaatgaacttaatttggggcggagggaagagtacgacgttctggacaaaaggaggggacgagatcccgagatgggcggaaagcctcagcgaaggaagaatccgcaagaggggctttataacgaactccagaaagataaaatggcagaagcctatagtgagattgggatgaagggagaaaggaggaggggtaaaggtcacgatgggttgtaccaaggattgagcacagccactaaagatacctatgatgcgctccacatgcaggccctgccgccaagacgcgccaagagaagcggatctggcgtgaagcagaccctgaatttcgacctgctgaagctggctggcgacgtggaatccaacccaggcccttctagaggccatatgaccgagtacaagcccacggtgcgcctcgccacccgcgacgacgtccccagggccgtacgcaccctcgccgccgcgttcgccgactaccccgccacgcgccacaccgtcgatccggaccgccacatcgagcgggtcaccgagctgcaagaactcttcctcacgcgcgtcgggctcgacatcggcaaggtgtgggtcgcggacgacggcgccgcggtggcggtctggaccacgccggagagcgtcgaagcgggggcggtgttcgccgagatcggcccgcgcatggccgagttgagcggttcccggctggccgcgcagcaacagatggaaggcctcctggcgccgcaccggcccaaggagcccgcgtggttcctggccaccgtcggcgtctcgcccgaccaccagggcaagggtctgggcagcgccgtcgtgctccccggagtggaggcggccgagcgcgccggggtgcccgccttcctggagacctccgcgccccgcaacctccccttctacgagcggctcggcttcaccgtcaccgccgacgtcgaggtgcccgaaggaccgcgcacctggtgcatgacccgcaagcccggtgcctga

SEQ ID NO: 9500 - DNA, 2481 bp, Artificial Sequence
  Synthetic Polynucloetide
atggccttaccagtgaccgccttgctcctgccgctggccttgctgctccacgccgccaggccggacctggtcatgacacagagcccttttagcctggccgtgtccgagggcgagatggtcacaatcaagtgcaagagcagccagagcctgctgagcagcagacaccagaagaactttctggcctggtacagacagaagcccggacagtctcccaagctgctgatctaccacgccagcacaagacagagcggcgtgcccgatagattcatcggctctggcagcggcaccgacttcaccctgacaatctctgatgtgcaggccgaggacctggccgactactattgtctccagcactacacaagcccctacacctttggagccggcaccaagctggaactgaaaagactcgaggacctgaagaacgtgttcccacctgaggtggccgtgttcgagcctagcgaggccgagatcagccacacccagaaagccaccctcgtgtgcctggctaccggcttctaccccgaccatgtggaactgtcttggtgggtcaacggcaaagaggtgcacagcggcgtgtctaccgacccccagccactgaaagaacagcccgccctgaacgacagccggtactgcctgagcagcagactgagagtgtccgccaccttctggcagaacccccggaaccacttcagatgccaggtgcagttctacggcctgagcgagaacgacgagtggacccaggacagagccaagcccgtgacccagatcgtgtctgccgaagcctggggcagagccgattgcggatcccagagcttcggcctgctggaccccaagctgtgctacctgctggatggcatcctgttcatctacggcgtgatcctgaccgccctgttcctgagagtgaagttcagcagaagcgccgacgcccctgcctaccagcagggacagaaccaactgtacaacgagctgaacctgggcagacgggaagagtacgacgtgctggacaagcggagaggcagggaccctgagatgggcggaaagccccagcggagaaagaacccccaggaaggactgtataacgaactccagaaagacaagatggccgaagcctacagcgagatcggcatgaagggcgagcggagaagaggcaagggccacgatggcctgtaccagggcctgagcaccgccaccaaggacacctatgacgccctgcacatgcaggccctgcctccaagaagggccaagcgatctggatctggagcaacaaacttctcactactcaaacaagcaggtgacgtggaggagaatcccgggcctactagtatggactggatttggcgcatccttttccttgtcggcgctgctaccggcgcgcattccttcgaacaagtgcagctgaaagagtctggccccggactggttcagcctagccaaacactgagcctgacctgtaccgtgtccggctttagcctgaccagctaccacgtgcactgggtccgacaacctccaggcaaaggactggaatggatgggcgtgatgtggagcgacggcgacaccctgtataacagcgccctgaagtcccggctgagcatcagcagagataccagcaagagccaggtgctgctccagatggatagcctccagagcgaggataccgccacctactactgtgccagactccaggtgttcggctaccccggcatcagagactacgtgatggatgcctggggacagggcgcttctgtgacagtctcttctacgcgtatccagaaccctgatcctgccgtgtaccagctgcgggatagcaagagcagcgacaagagcgtgtgtctgttcaccgacttcgacagccagaccaacgtgtcccagagcaaggactccgacgtgtacatcaccgataagaccgtgctggacatgcggagcatggacttcaagagcaactccgccgtggcctggtccaacaagtccgatttcgcctgcgccaacgccttcaacaacagcattatccccgaggacacattcttcccaagccccgagagcagctgcggtacccagagttttgggttgttggaccctaaattgtgctatctgttggacggaatcctgttcatttacggagtgatcctgaccgcattgttcctgcgggttaagttttccagatccgcagacgcacccgcttaccaacaagggcagaaccaactctacaatgaacttaatttggggcggagggaagagtacgacgttctggacaaaaggaggggacgagatcccgagatgggcggaaagcctcagcgaaggaagaatccgcaagaggggctttataacgaactccagaaagataaaatggcagaagcctatagtgagattgggatgaagggagaaaggaggaggggtaaaggtcacgatgggttgtaccaaggattgagcacagccactaaagatacctatgatgcgctccacatgcaggccctgccgccaaga

SEQ ID NO: 9501 - DNA, 2481 bp, Artificial Sequence
  Synthetic Polynucloetide
atggccttaccagtgaccgccttgctcctgccgctggccttgctgctccacgccgccaggccggacctggtcatgacacagagcccttttagcctggccgtgtccgagggcgagatggtcacaatcaagtgcaagagcagccagagcctgctgagcagcagacaccagaagaactttctggcctggtacagacagaagcccggacagtctcccaagctgctgatctaccacgccagcacaagacagagcggcgtgcccgatagattcatcggctctggcagcggcaccgacttcaccctgacaatctctgatgtgcaggccgaggacctggccgactactattgtctccagcactacacaagcccctacacctttggagccggcaccaagctggaactgaaaagactcgaggacctgaagaacgtgttcccacctgaggtggccgtgttcgagcctagcaaggccgagatcgcccacacccagaaagccaccctcgtgtgcctggctaccggcttctaccccgaccatgtggaactgtcttggtgggtcaacggcaaagaggtgcacagcggcgtgtgtaccgacccccagccactgaaagaacagcccgccctgaacgacagccggtactgcctgagcagcagactgagagtgtccgccaccttctggcagaacccccggaaccacttcagatgccaggtgcagttctacggcctgagcgagaacgacgagtggacccaggacagagccaagcccgtgacccagatcgtgtctgccgaagcctggggcagagccgattgcggatcccagagcttcggcctgctggaccccaagctgtgctacctgctggatggcatcctgttcatctacggcgtgatcctgaccgccctgttcctgagagtgaagttcagcagaagcgccgacgcccctgcctaccagcagggacagaaccaactgtacaacgagctgaacctgggcagacgggaagagtacgacgtgctggacaagcggagaggcagggaccctgagatgggcggaaagccccagcggagaaagaacccccaggaaggactgtataacgaactccagaaagacaagatggccgaagcctacagcgagatcggcatgaagggcgagcggagaagaggcaagggccacgatggcctgtaccagggcctgagcaccgccaccaaggacacctatgacgccctgcacatgcaggccctgcctccaagaagggccaagcgatctggatctggagcaacaaacttctcactactcaaacaagcaggtgacgtggaggagaatcccgggcctactagtatggactggatttggcgcatccttttccttgtcggcgctgctaccggcgcgcattccttcgaacaagtgcagctgaaagagtctggccccggactggttcagcctagccaaacactgagcctgacctgtaccgtgtccggctttagcctgaccagctaccacgtgcactgggtccgacaacctccaggcaaaggactggaatggatgggcgtgatgtggagcgacggcgacaccctgtataacagcgccctgaagtcccggctgagcatcagcagagataccagcaagagccaggtgctgctccagatggatagcctccagagcgaggataccgccacctactactgtgccagactccaggtgttcggctaccccggcatcagagactacgtgatggatgcctggggacagggcgcttctgtgacagtctcttctacgcgtatccagaaccctgatcctgccgtgtaccagctgcgggatagcaagagcagcgacaagagcgtgtgtctgttcaccgacttcgacagccagaccaacgtgtcccagagcaaggactccgacgtgtacatcaccgataagtgcgtgctggacatgcggagcatggacttcaagagcaactccgccgtggcctggtccaacaagtccgatttcgcctgcgccaacgccttcaacaacagcattatccccgaggacacattcttcccaagcagcgacgtgccctgcggtacccagagttttgggttgttggaccctaaattgtgctatctgttggacggaatcctgttcatttacggagtgatcctgaccgcattgttcctgcgggttaagttttccagatccgcagacgcacccgcttaccaacaagggcagaaccaactctacaatgaacttaatttggggcggagggaagagtacgacgttctggacaaaaggaggggacgagatcccgagatgggcggaaagcctcagcgaaggaagaatccgcaagaggggctttataacgaactccagaaagataaaatggcagaagcctatagtgagattgggatgaagggagaaaggaggaggggtaaaggtcacgatgggttgtaccaaggattgagcacagccactaaagatacctatgatgcgctccacatgcaggccctgccgccaaga

SEQ ID NO: 9502 - DNA, 2694 bp, Artificial Sequence
  Synthetic Polynucloetide
atggccttaccagtgaccgccttgctcctgccgctggccttgctgctccacgccgccaggccggacctggtcatgacacagagcccttttagcctggccgtgtccgagggcgagatggtcacaatcaagtgcaagagcagccagagcctgctgagcagcagacaccagaagaactttctggcctggtacagacagaagcccggacagtctcccaagctgctgatctaccacgccagcacaagacagagcggcgtgcccgatagattcatcggctctggcagcggcaccgacttcaccctgacaatctctgatgtgcaggccgaggacctggccgactactattgtctccagcactacacaagcccctacacctttggagccggcaccaagctggaactgaaaagactcgaggggaaaccaattcccaaccctcttctgggactggattcaaccggcagcggcgaggacctgaagaacgtgttcccacctgaggtggccgtgttcgagcctagcgaggccgagatcagccacacccagaaagccaccctcgtgtgcctggctaccggcttctaccccgaccatgtggaactgtcttggtgggtcaacggcaaagaggtgcacagcggcgtgtctaccgacccccagccactgaaagaacagcccgccctgaacgacagccggtactgcctgagcagcagactgagagtgtccgccaccttctggcagaacccccggaaccacttcagatgccaggtgcagttctacggcctgagcgagaacgacgagtggacccaggacagagccaagcccgtgacccagatcgtgtctgccgaagcctggggcagagccgattgcggatcccagagcttcggcctgctggaccccaagctgtgctacctgctggatggcatcctgttcatctacggcgtgatcctgaccgccctgttcctgagagtgaagttcagcagaagcgccgacgcccctgcctaccagcagggacagaaccaactgtacaacgagctgaacctgggcagacgggaagagtacgacgtgctggacaagcggagaggcagggaccctgagatgggcggaaagccccagcggagaaagaacccccaggaaggactgtataacgaactccagaaagacaagatggccgaagcctacagcgagatcggcatgaagggcgagcggagaagaggcaagggccacgatggcctgtaccagggcctgagcaccgccaccaaggacacctatgacgccctgcacatgcaggccctgcctccaagaagggccaagcgatctggatctggagcaacaaacttctcactactcaaacaagcaggtgacgtggaggagaatcccgggcctactagtatggactggatttggcgcatccttttccttgtcggcgctgctaccggcgcgcattccttcgaacaagtgcagctgaaagagtctggccccggactggttcagcctagccaaacactgagcctgacctgtaccgtgtccggctttagcctgaccagctaccacgtgcactgggtccgacaacctccaggcaaaggactggaatggatgggcgtgatgtggagcgacggcgacaccctgtataacagcgccctgaagtcccggctgagcatcagcagagataccagcaagagccaggtgctgctccagatggatagcctccagagcgaggataccgccacctactactgtgccagactccaggtgttcggctaccccggcatcagagactacgtgatggatgcctggggacagggcgcttctgtgacagtctcttctacgcgtgagcagaaactgatctcggaagaggatgggagcggcatccagaaccctgatcctgccgtgtaccagctgcgggatagcaagagcagcgacaagagcgtgtgtctgttcaccgacttcgacagccagaccaacgtgtcccagagcaaggactccgacgtgtacatcaccgataagaccgtgctggacatgcggagcatggacttcaagagcaactccgccgtggcctggtccaacaagtccgatttcgcctgcgccaacgccttcaacaacagcattatccccgaggacacattcttcccaagccccgagagcagctgcggtacccagagttttgggttgttggaccctaaattgtgctatctgttggacggaatcctgttcatttacggagtgatcctgaccgcattgttcctgaggagcaagcggtcacggctgctccacagcgattacatgaatatgacaccacgaagaccgggtcctactcgcaaacactaccaaccctacgcacctccccgcgactttgcagcgtaccgatctcgggttaagttttccagatccgcagacgcacccgcttaccaacaagggcagaaccaactctacaatgaacttaatttggggcggagggaagagtacgacgttctggacaaaaggaggggacgagatcccgagatgggcggaaagcctcagcgaaggaagaatccgcaagaggggctttataacgaactccagaaagataaaatggcagaagcctatagtgagattgggatgaagggagaaaggaggaggggtaaaggtcacgatgggttgtaccaaggattgagcacagccactaaagatacctatgatgcgctccacatgcaggccctgccgccaaga

SEQ ID NO: 9503 - DNA, 2817 bp, Artificial Sequence
  Synthetic Polynucloetide
atggccttaccagtgaccgccttgctcctgccgctggccttgctgctccacgccgccaggccggacctggtcatgacacagagcccttttagcctggccgtgtccgagggcgagatggtcacaatcaagtgcaagagcagccagagcctgctgagcagcagacaccagaagaactttctggcctggtacagacagaagcccggacagtctcccaagctgctgatctaccacgccagcacaagacagagcggcgtgcccgatagattcatcggctctggcagcggcaccgacttcaccctgacaatctctgatgtgcaggccgaggacctggccgactactattgtctccagcactacacaagcccctacacctttggagccggcaccaagctggaactgaaaagactcgaggggaaaccaattcccaaccctcttctgggactggattcaaccggcagcggcgaggacctgaagaacgtgttcccacctgaggtggccgtgttcgagcctagcgaggccgagatcagccacacccagaaagccaccctcgtgtgcctggctaccggcttctaccccgaccatgtggaactgtcttggtgggtcaacggcaaagaggtgcacagcggcgtgtctaccgacccccagccactgaaagaacagcccgccctgaacgacagccggtactgcctgagcagcagactgagagtgtccgccaccttctggcagaacccccggaaccacttcagatgccaggtgcagttctacggcctgagcgagaacgacgagtggacccaggacagagccaagcccgtgacccagatcgtgtctgccgaagcctggggcagagccgattgcggatcccagagcttcggcctgctggaccccaagctgtgctacctgctggatggcatcctgttcatctacggcgtgatcctgaccgccctgttcctgaggagtaagaggagcaggctcctgcacagtgactacatgaacatgactccacgccgccccggacccacccgcaagcattaccagccctatgccccaccacgcgacttcgcagcctatcgctccagagtgaagttcagcagaagcgccgacgcccctgcctaccagcagggacagaaccaactgtacaacgagctgaacctgggcagacgggaagagtacgacgtgctggacaagcggagaggcagggaccctgagatgggcggaaagccccagcggagaaagaacccccaggaaggactgtataacgaactccagaaagacaagatggccgaagcctacagcgagatcggcatgaagggcgagcggagaagaggcaagggccacgatggcctgtaccagggcctgagcaccgccaccaaggacacctatgacgccctgcacatgcaggccctgcctccaagaagggccaagcgatctggatctggagcaacaaacttctcactactcaaacaagcaggtgacgtggaggagaatcccgggcctactagtatggactggatttggcgcatccttttccttgtcggcgctgctaccggcgcgcattccttcgaacaagtgcagctgaaagagtctggccccggactggttcagcctagccaaacactgagcctgacctgtaccgtgtccggctttagcctgaccagctaccacgtgcactgggtccgacaacctccaggcaaaggactggaatggatgggcgtgatgtggagcgacggcgacaccctgtataacagcgccctgaagtcccggctgagcatcagcagagataccagcaagagccaggtgctgctccagatggatagcctccagagcgaggataccgccacctactactgtgccagactccaggtgttcggctaccccggcatcagagactacgtgatggatgcctggggacagggcgcttctgtgacagtctcttctacgcgtgagcagaaactgatctcggaagaggatgggagcggcatccagaaccctgatcctgccgtgtaccagctgcgggatagcaagagcagcgacaagagcgtgtgtctgttcaccgacttcgacagccagaccaacgtgtcccagagcaaggactccgacgtgtacatcaccgataagaccgtgctggacatgcggagcatggacttcaagagcaactccgccgtggcctggtccaacaagtccgatttcgcctgcgccaacgccttcaacaacagcattatccccgaggacacattcttcccaagccccgagagcagctgcggtacccagagttttgggttgttggaccctaaattgtgctatctgttggacggaatcctgttcatttacggagtgatcctgaccgcattgttcctgaggagcaagcggtcacggctgctccacagcgattacatgaatatgacaccacgaagaccgggtcctactcgcaaacactaccaaccctacgcacctccccgcgactttgcagcgtaccgatctcgggttaagttttccagatccgcagacgcacccgcttaccaacaagggcagaaccaactctacaatgaacttaatttggggcggagggaagagtacgacgttctggacaaaaggaggggacgagatcccgagatgggcggaaagcctcagcgaaggaagaatccgcaagaggggctttataacgaactccagaaagataaaatggcagaagcctatagtgagattgggatgaagggagaaaggaggaggggtaaaggtcacgatgggttgtaccaaggattgagcacagccactaaagatacctatgatgcgctccacatgcaggccctgccgccaaga

SEQ ID NO: 9504 - DNA, 2700 bp, Artificial Sequence
  Synthetic Polynucloetide
atggccttaccagtgaccgccttgctcctgccgctggccttgctgctccacgccgccaggccggacctggtcatgacacagagcccttttagcctggccgtgtccgagggcgagatggtcacaatcaagtgcaagagcagccagagcctgctgagcagcagacaccagaagaactttctggcctggtacagacagaagcccggacagtctcccaagctgctgatctaccacgccagcacaagacagagcggcgtgcccgatagattcatcggctctggcagcggcaccgacttcaccctgacaatctctgatgtgcaggccgaggacctggccgactactattgtctccagcactacacaagcccctacacctttggagccggcaccaagctggaactgaaaagactcgaggggaaaccaattcccaaccctcttctgggactggattcaaccggcagcggcgaggacctgaagaacgtgttcccacctgaggtggccgtgttcgagcctagcgaggccgagatcagccacacccagaaagccaccctcgtgtgcctggctaccggcttctaccccgaccatgtggaactgtcttggtgggtcaacggcaaagaggtgcacagcggcgtgtctaccgacccccagccactgaaagaacagcccgccctgaacgacagccggtactgcctgagcagcagactgagagtgtccgccaccttctggcagaacccccggaaccacttcagatgccaggtgcagttctacggcctgagcgagaacgacgagtggacccaggacagagccaagcccgtgacccagatcgtgtctgccgaagcctggggcagagccgattgcggatcccagagcttcggcctgctggaccccaagctgtgctacctgctggatggcatcctgttcatctacggcgtgatcctgaccgccctgttcctgagagtgaagttcagcagaagcgccgacgcccctgcctaccagcagggacagaaccaactgtacaacgagctgaacctgggcagacgggaagagtacgacgtgctggacaagcggagaggcagggaccctgagatgggcggaaagccccagcggagaaagaacccccaggaaggactgtataacgaactccagaaagacaagatggccgaagcctacagcgagatcggcatgaagggcgagcggagaagaggcaagggccacgatggcctgtaccagggcctgagcaccgccaccaaggacacctatgacgccctgcacatgcaggccctgcctccaagaagggccaagcgatctggatctggagcaacaaacttctcactactcaaacaagcaggtgacgtggaggagaatcccgggcctactagtatggactggatttggcgcatccttttccttgtcggcgctgctaccggcgcgcattccttcgaacaagtgcagctgaaagagtctggccccggactggttcagcctagccaaacactgagcctgacctgtaccgtgtccggctttagcctgaccagctaccacgtgcactgggtccgacaacctccaggcaaaggactggaatggatgggcgtgatgtggagcgacggcgacaccctgtataacagcgccctgaagtcccggctgagcatcagcagagataccagcaagagccaggtgctgctccagatggatagcctccagagcgaggataccgccacctactactgtgccagactccaggtgttcggctaccccggcatcagagactacgtgatggatgcctggggacagggcgcttctgtgacagtctcttctacgcgtgagcagaaactgatctcggaagaggatctggggagcggcatccagaaccctgatcctgccgtgtaccagctgcgggatagcaagagcagcgacaagagcgtgtgtctgttcaccgacttcgacagccagaccaacgtgtcccagagcaaggactccgacgtgtacatcaccgataagaccgtgctggacatgcggagcatggacttcaagagcaactccgccgtggcctggtccaacaagtccgatttcgcctgcgccaacgccttcaacaacagcattatccccgaggacacattcttcccaagccccgagagcagctgcggtacccagagttttgggttgttggaccctaaattgtgctatctgttggacggaatcctgttcatttacggagtgatcctgaccgcattgttcctgaagagaggccggaagaagctgctgtacatcttcaagcagcctttcatgcggcccgtgcagaccacccaggaagaggacggctgctcctgccggttccccgaggaagaagaaggcggctgcgagctgcgggttaagttttccagatccgcagacgcacccgcttaccaacaagggcagaaccaactctacaatgaacttaatttggggcggagggaagagtacgacgttctggacaaaaggaggggacgagatcccgagatgggcggaaagcctcagcgaaggaagaatccgcaagaggggctttataacgaactccagaaagataaaatggcagaagcctatagtgagattgggatgaagggagaaaggaggaggggtaaaggtcacgatgggttgtaccaaggattgagcacagccactaaagatacctatgatgcgctccacatgcaggccctgccgccaaga

SEQ ID NO: 9505 - DNA, 2826 bp, Artificial Sequence
  Synthetic Polynucloetide
atggccttaccagtgaccgccttgctcctgccgctggccttgctgctccacgccgccaggccggacctggtcatgacacagagcccttttagcctggccgtgtccgagggcgagatggtcacaatcaagtgcaagagcagccagagcctgctgagcagcagacaccagaagaactttctggcctggtacagacagaagcccggacagtctcccaagctgctgatctaccacgccagcacaagacagagcggcgtgcccgatagattcatcggctctggcagcggcaccgacttcaccctgacaatctctgatgtgcaggccgaggacctggccgactactattgtctccagcactacacaagcccctacacctttggagccggcaccaagctggaactgaaaagactcgaggggaaaccaattcccaaccctcttctgggactggattcaaccggcagcggcgaggacctgaagaacgtgttcccacctgaggtggccgtgttcgagcctagcgaggccgagatcagccacacccagaaagccaccctcgtgtgcctggctaccggcttctaccccgaccatgtggaactgtcttggtgggtcaacggcaaagaggtgcacagcggcgtgtctaccgacccccagccactgaaagaacagcccgccctgaacgacagccggtactgcctgagcagcagactgagagtgtccgccaccttctggcagaacccccggaaccacttcagatgccaggtgcagttctacggcctgagcgagaacgacgagtggacccaggacagagccaagcccgtgacccagatcgtgtctgccgaagcctggggcagagccgattgcggatcccagagcttcggcctgctggaccccaagctgtgctacctgctggatggcatcctgttcatctacggcgtgatcctgaccgccctgttcctgaaacggggcagaaagaaactcctgtatatattcaaacaaccatttatgagaccagtacaaactactcaagaggaagatggctgtagctgccgatttccagaagaagaagaaggaggatgtgaactgagagtgaagttcagcagaagcgccgacgcccctgcctaccagcagggacagaaccaactgtacaacgagctgaacctgggcagacgggaagagtacgacgtgctggacaagcggagaggcagggaccctgagatgggcggaaagccccagcggagaaagaacccccaggaaggactgtataacgaactccagaaagacaagatggccgaagcctacagcgagatcggcatgaagggcgagcggagaagaggcaagggccacgatggcctgtaccagggcctgagcaccgccaccaaggacacctatgacgccctgcacatgcaggccctgcctccaagaagggccaagcgatctggatctggagcaacaaacttctcactactcaaacaagcaggtgacgtggaggagaatcccgggcctactagtatggactggatttggcgcatccttttccttgtcggcgctgctaccggcgcgcattccttcgaacaagtgcagctgaaagagtctggccccggactggttcagcctagccaaacactgagcctgacctgtaccgtgtccggctttagcctgaccagctaccacgtgcactgggtccgacaacctccaggcaaaggactggaatggatgggcgtgatgtggagcgacggcgacaccctgtataacagcgccctgaagtcccggctgagcatcagcagagataccagcaagagccaggtgctgctccagatggatagcctccagagcgaggataccgccacctactactgtgccagactccaggtgttcggctaccccggcatcagagactacgtgatggatgcctggggacagggcgcttctgtgacagtctcttctacgcgtgagcagaaactgatctcggaagaggatctggggagcggcatccagaaccctgatcctgccgtgtaccagctgcgggatagcaagagcagcgacaagagcgtgtgtctgttcaccgacttcgacagccagaccaacgtgtcccagagcaaggactccgacgtgtacatcaccgataagaccgtgctggacatgcggagcatggacttcaagagcaactccgccgtggcctggtccaacaagtccgatttcgcctgcgccaacgccttcaacaacagcattatccccgaggacacattcttcccaagccccgagagcagctgcggtacccagagttttgggttgttggaccctaaattgtgctatctgttggacggaatcctgttcatttacggagtgatcctgaccgcattgttcctgaagagaggccggaagaagctgctgtacatcttcaagcagcctttcatgcggcccgtgcagaccacccaggaagaggacggctgctcctgccggttccccgaggaagaagaaggcggctgcgagctgcgggttaagttttccagatccgcagacgcacccgcttaccaacaagggcagaaccaactctacaatgaacttaatttggggcggagggaagagtacgacgttctggacaaaaggaggggacgagatcccgagatgggcggaaagcctcagcgaaggaagaatccgcaagaggggctttataacgaactccagaaagataaaatggcagaagcctatagtgagattgggatgaagggagaaaggaggaggggtaaaggtcacgatgggttgtaccaaggattgagcacagccactaaagatacctatgatgcgctccacatgcaggccctgccgccaaga

SEQ ID NO: 9506 - DNA, 2499 bp, Artificial Sequence
  Synthetic Polynucloetide
atggccttaccagtgaccgccttgctcctgccgctggccttgctgctccacgccgccaggccggacctggtcatgacacagagcccttttagcctggccgtgtccgagggcgagatggtcacaatcaagtgcaagagcagccagagcctgctgagcagcagacaccagaagaactttctggcctggtacagacagaagcccggacagtctcccaagctgctgatctaccacgccagcacaagacagagcggcgtgcccgatagattcatcggctctggcagcggcaccgacttcaccctgacaatctctgatgtgcaggccgaggacctggccgactactattgtctccagcactacacaagcccctacacctttggagccggcaccaagctggaactgaaaagactcgagcagagcttcggcctgctggaccccaagctgtgctacctgctggatggcatcctgttcatctacggcgtgatcctgaccgccctgttcctgagagtgaagttcagcagaagcgccgacgcccctgcctaccagcagggacagaaccaactgtacaacgagctgaacctgggcagacgggaagagtacgacgtgctggacaagcggagaggcagggaccctgagatgggcggaaagccccagcggagaaagaacccccaggaaggactgtataacgaactccagaaagacaagatggccgaagcctacagcgagatcggcatgaagggcgagcggagaagaggcaagggccacgatggcctgtaccagggcctgagcaccgccaccaaggacacctatgacgccctgcacatgcaggccctgcctccaagaagggccaagcgatctggatctggagcaacaaacttctcactactcaaacaagcaggtgacgtggaggagaatcccgggcctactagtatggactggatttggcgcatccttttccttgtcggcgctgctaccggcgcgcattccttcgaacaagtgcagctgaaagagtctggccccggactggttcagcctagccaaacactgagcctgacctgtaccgtgtccggctttagcctgaccagctaccacgtgcactgggtccgacaacctccaggcaaaggactggaatggatgggcgtgatgtggagcgacggcgacaccctgtataacagcgccctgaagtcccggctgagcatcagcagagataccagcaagagccaggtgctgctccagatggatagcctccagagcgaggataccgccacctactactgtgccagactccaggtgttcggctaccccggcatcagagactacgtgatggatgcctggggacagggcgcttctgtgacagtctcttctacgcgtcagagttttgggttgttggaccctaaattgtgctatctgttggacggaatcctgttcatttacggagtgatcctgaccgcattgttcctgcgggttaagttttccagatccgcagacgcacccgcttaccaacaagggcagaaccaactctacaatgaacttaatttggggcggagggaagagtacgacgttctggacaaaaggaggggacgagatcccgagatgggcggaaagcctcagcgaaggaagaatccgcaagaggggctttataacgaactccagaaagataaaatggcagaagcctatagtgagattgggatgaagggagaaaggaggaggggtaaaggtcacgatgggttgtaccaaggattgagcacagccactaaagatacctatgatgcgctccacatgcaggccctgccgccaagacgcgccaagagaagcggatctggcgtgaagcagaccctgaatttcgacctgctgaagctggctggcgacgtggaatccaacccaggcccttctagaggccatatgaccgagtacaagcccacggtgcgcctcgccacccgcgacgacgtccccagggccgtacgcaccctcgccgccgcgttcgccgactaccccgccacgcgccacaccgtcgatccggaccgccacatcgagcgggtcaccgagctgcaagaactcttcctcacgcgcgtcgggctcgacatcggcaaggtgtgggtcgcggacgacggcgccgcggtggcggtctggaccacgccggagagcgtcgaagcgggggcggtgttcgccgagatcggcccgcgcatggccgagttgagcggttcccggctggccgcgcagcaacagatggaaggcctcctggcgccgcaccggcccaaggagcccgcgtggttcctggccaccgtcggcgtctcgcccgaccaccagggcaagggtctgggcagcgccgtcgtgctccccggagtggaggcggccgagcgcgccggggtgcccgccttcctggagacctccgcgccccgcaacctccccttctacgagcggctcggcttcaccgtcaccgccgacgtcgaggtgcccgaaggaccgcgcacctggtgcatgacccgcaagcccggtgcctga

SEQ ID NO: 9507 - DNA, 1971 bp, Artificial Sequence
  Synthetic Polynucloetide
atggccttaccagtgaccgccttgctcctgccgctggccttgctgctccacgccgccaggccggacctggtcatgacacagagcccttttagcctggccgtgtccgagggcgagatggtcacaatcaagtgcaagagcagccagagcctgctgagcagcagacaccagaagaactttctggcctggtacagacagaagcccggacagtctcccaagctgctgatctaccacgccagcacaagacagagcggcgtgcccgatagattcatcggctctggcagcggcaccgacttcaccctgacaatctctgatgtgcaggccgaggacctggccgactactattgtctccagcactacacaagcccctacacctttggagccggcaccaagctggaactgaaaagactcgagggacagcctaaggccaatcctaccgtgacactgttccctccaagcagcgaagaactccaggccaacaaggccacacttgtgtgcctgatctccgacttctaccctggggctgtgacagtggcttggaaggccgatggatctcctgtgaaagccggcgtggaaaccaccaagccatccaagcagagcaacaacaaatacgccgccagctcctacctgagcctgacacctgagcagtggaagtcccacagatcctacagctgccaagtgacccacgaaggcagcaccgtggaaaagacagtggcccctacagagtgcagccccatcaagaccgatgtgattacaatggaccccaaggacaactgctccaaggacgccaacgataccctgctgctccagctgaccaacaccagcgcctactacatgtacttgttgctgctgctgaagtccgtggtgtacttcgccatcatcacatgctgcctgctgcggagaaccgccttctgctgcaacggcgagaagtctagggccaagcgatctggatctggagcaacaaacttctcactactcaaacaagcaggtgacgtggaggagaatcccgggcctactagtatggactggatttggcgcatccttttccttgtcggcgctgctaccggcgcgcattccttcgaacaagtgcagctgaaagagtctggccccggactggttcagcctagccaaacactgagcctgacctgtaccgtgtccggctttagcctgaccagctaccacgtgcactgggtccgacaacctccaggcaaaggactggaatggatgggcgtgatgtggagcgacggcgacaccctgtataacagcgccctgaagtcccggctgagcatcagcagagataccagcaagagccaggtgctgctccagatggatagcctccagagcgaggataccgccacctactactgtgccagactccaggtgttcggctaccccggcatcagagactacgtgatggatgcctggggacagggcgcttctgtgacagtctcttctacgcgtgcctctacaaagggaccctccgtgtttcctctggctcccagcagcaagtctacaagcggaggaacagccgctctgggctgcctggtcaaggattactttcccgagcctgtgaccgtgtcctggaatagcggagcactgacaagcggcgtgcacacctttccagccgtgctgcaaagcagcggcctgtactctctgagcagcgtggtcacagtgcctagctctagcctgggcacccagacctacatctgcaatgtgaaccacaagcctagcaacaccaaggtggacaagagagtggaacccaagagctgtgaagtgaaaaccgactccaccgaccacgtgaagcccaaagagacagagaacaccaagcagcccagcaagagctgccacaagcccaaggccatcgtgcacaccgagaaagtgaacatgatgagcctgaccgtgctgggcctgcggatgctgttcgccaaaaccgtggccgtgaacttcctgctgaccgccaagctgttcttcctc

SEQ ID NO: 9508 - DNA, 1905 bp, Artificial Sequence
  Synthetic Polynucloetide
atggccttaccagtgaccgccttgctcctgccgctggccttgctgctccacgccgccaggccggacctggtcatgacacagagcccttttagcctggccgtgtccgagggcgagatggtcacaatcaagtgcaagagcagccagagcctgctgagcagcagacaccagaagaactttctggcctggtacagacagaagcccggacagtctcccaagctgctgatctaccacgccagcacaagacagagcggcgtgcccgatagattcatcggctctggcagcggcaccgacttcaccctgacaatctctgatgtgcaggccgaggacctggccgactactattgtctccagcactacacaagcccctacacctttggagccggcaccaagctggaactgaaaagactcgagggacagcctaaggccaatcctaccgtgacactgttccctccaagcagcgaagaactccaggccaacaaggccacacttgtgtgcctgatctccgacttctaccctggggctgtgacagtggcttggaaggccgatggatctcctgtgaaagccggcgtggaaaccaccaagccatccaagcagagcaacaacaaatacgccgccagctcctacctgagcctgacacctgagcagtggaagtcccacagatcctacagctgccaagtgacccacgaaggcagcaccgtggaaaagacagtggcccctacagagtgcagcggcagagccgattgcggcatcaccagcgccagctaccaccagggcgtgctgagcgccaccatcctgtacgagatcctgctgggcaaggccaccctgtacgccgtgctggtgtctgccctggtgctgatggctatggtcaagcggaaggacagccggggaagggccaagcgatctggatctggagcaacaaacttctcactactcaaacaagcaggtgacgtggaggagaatcccgggcctactagtatggactggatttggcgcatccttttccttgtcggcgctgctaccggcgcgcattccttcgaacaagtgcagctgaaagagtctggccccggactggttcagcctagccaaacactgagcctgacctgtaccgtgtccggctttagcctgaccagctaccacgtgcactgggtccgacaacctccaggcaaaggactggaatggatgggcgtgatgtggagcgacggcgacaccctgtataacagcgccctgaagtcccggctgagcatcagcagagataccagcaagagccaggtgctgctccagatggatagcctccagagcgaggataccgccacctactactgtgccagactccaggtgttcggctaccccggcatcagagactacgtgatggatgcctggggacagggcgcttctgtgacagtctcttctacgcgtgcctctacaaagggaccctccgtgtttcctctggctcccagcagcaagtctacaagcggaggaacagccgctctgggctgcctggtcaaggattactttcccgagcctgtgaccgtgtcctggaatagcggagcactgacaagcggcgtgcacacctttccagccgtgctgcaaagcagcggcctgtactctctgagcagcgtggtcacagtgcctagctctagcctgggcacccagacctacatctgcaatgtgaaccacaagcctagcaacaccaaggtggacaagagagtggaacccaagagctgtatccccgaggacacattcttcccaagcagcgacgtgccctgcgacgtgaagctggtggaaaagagcttcgagacagacaccaacctgaacttccagaacctgagcgtgatcggcttcagaatcctgctgctgaaagtggccggctttaacctgctgatgaccctgcggctgtggtccagc

SEQ ID NO: 9509 - DNA, 1905 bp, Artificial Sequence
  Synthetic Polynucloetide
atggccttaccagtgaccgccttgctcctgccgctggccttgctgctccacgccgccaggccggacctggtcatgacacagagcccttttagcctggccgtgtccgagggcgagatggtcacaatcaagtgcaagagcagccagagcctgctgagcagcagacaccagaagaactttctggcctggtacagacagaagcccggacagtctcccaagctgctgatctaccacgccagcacaagacagagcggcgtgcccgatagattcatcggctctggcagcggcaccgacttcaccctgacaatctctgatgtgcaggccgaggacctggccgactactattgtctccagcactacacaagcccctacacctttggagccggcaccaagctggaactgaaaagactcgagggacagcctaaggccaatcctaccgtgacactgttccctccaagcagcgaagaactccaggccaacaaggccacacttgtgtgcctgatctccgacttctaccctggggctgtgacagtggcttggaaggccgatggatctcctgtgaaagccggcgtggaaaccaccaagccatccaagcagagcaacaacaaatacgccgccagctcctacctgagcctgacacctgagcagtggaagtcccacagatcctacagctgccaagtgacccacgaaggcagcaccgtggaaaagacagtggcccctacagagtgcagcggcagagccgattgcggctttaccagcgagagctaccagcagggcgtgctgagcgccaccatcctgtacgagatcctgctgggcaaggccaccctgtacgccgtgctggtgtctgccctggtgctgatggctatggtcaagcggaaggacagccggggaagggccaagcgatctggatctggagcaacaaacttctcactactcaaacaagcaggtgacgtggaggagaatcccgggcctactagtatggactggatttggcgcatccttttccttgtcggcgctgctaccggcgcgcattccttcgaacaagtgcagctgaaagagtctggccccggactggttcagcctagccaaacactgagcctgacctgtaccgtgtccggctttagcctgaccagctaccacgtgcactgggtccgacaacctccaggcaaaggactggaatggatgggcgtgatgtggagcgacggcgacaccctgtataacagcgccctgaagtcccggctgagcatcagcagagataccagcaagagccaggtgctgctccagatggatagcctccagagcgaggataccgccacctactactgtgccagactccaggtgttcggctaccccggcatcagagactacgtgatggatgcctggggacagggcgcttctgtgacagtctcttctacgcgtgcctctacaaagggaccctccgtgtttcctctggctcccagcagcaagtctacaagcggaggaacagccgctctgggctgcctggtcaaggattactttcccgagcctgtgaccgtgtcctggaatagcggagcactgacaagcggcgtgcacacctttccagccgtgctgcaaagcagcggcctgtactctctgagcagcgtggtcacagtgcctagctctagcctgggcacccagacctacatctgcaatgtgaaccacaagcctagcaacaccaaggtggacaagagagtggaacccaagagctgtatccccgaggacacattcttcccaagccccgagagcagctgcgacgtgaagctggtggaaaagagcttcgagacagacaccaacctgaacttccagaacctgagcgtgatcggcttcagaatcctgctgctgaaagtggccggctttaacctgctgatgaccctgcggctgtggtccagc

SEQ ID NO: 9510 - DNA, 1383 bp, Artificial Sequence
  Synthetic Polynucloetide
atggccttaccagtgaccgccttgctcctgccgctggccttgctgctccacgccgccaggccggacctggtcatgacacagagcccttttagcctggccgtgtccgagggcgagatggtcacaatcaagtgcaagagcagccagagcctgctgagcagcagacaccagaagaactttctggcctggtacagacagaagcccggacagtctcccaagctgctgatctaccacgccagcacaagacagagcggcgtgcccgatagattcatcggctctggcagcggcaccgacttcaccctgacaatctctgatgtgcaggccgaggacctggccgactactattgtctccagcactacacaagcccctacacctttggagccggcaccaagctggaactgaaaagaggcggaggcggaagtggaggcggaggatctggcggcggaggctctcaagtgcagctgaaagagtctggccccggactggttcagcctagccaaacactgagcctgacctgtaccgtgtccggctttagcctgaccagctaccacgtgcactgggtccgacaacctccaggcaaaggactggaatggatgggcgtgatgtggagcgacggcgacaccctgtataacagcgccctgaagtcccggctgagcatcagcagagataccagcaagagccaggtgctgctccagatggatagcctccagagcgaggataccgccacctactactgtgccagactccaggtgttcggctaccccggcatcagagactacgtgatggatgcctggggacagggcgcttctgtgacagtctcttctacgcgtgacggtaacgaggagatgggaggaatcactcaaaccccttacaaagtctcaatttcaggaacaactgttatccttacatgtccccagtatcctggcagcgagatcctttggcagcataacgacaagaatatagggggagatgaagacgataagaatatcggatctgacgaggatcacttgagcctgaaagagttctccgagcttgaacaaagcggatattatgtgtgctatccgcgcgggtcaaagccggaagacgctaacttttacctttatctccgagccagagtgtgcgaaaattgcatggaaatggacgttatgtccgttgctacaatagttatcgtagatatatgcatcacgggtggactgcttctgctggtttattattggtccaagaatagaaaggccaaagctaaacccgtgaccagaggcgctggcgcaggcggaaggcaaaggggacaaaacaaagaacggccaccaccagtgccaaatccagattatgagcctattcggaaaggacagagggacctgtactctggcctgaatcagagaagaatc

SEQ ID NO: 9511 - DNA, 1278 bp, Artificial Sequence
  Synthetic Polynucloetide
atggccttaccagtgaccgccttgctcctgccgctggccttgctgctccacgccgccaggccggacctggtcatgacacagagcccttttagcctggccgtgtccgagggcgagatggtcacaatcaagtgcaagagcagccagagcctgctgagcagcagacaccagaagaactttctggcctggtacagacagaagcccggacagtctcccaagctgctgatctaccacgccagcacaagacagagcggcgtgcccgatagattcatcggctctggcagcggcaccgacttcaccctgacaatctctgatgtgcaggccgaggacctggccgactactattgtctccagcactacacaagcccctacacctttggagccggcaccaagctggaactgaaaagaggcggaggcggaagtggaggcggaggatctggcggcggaggctctcaagtgcagctgaaagagtctggccccggactggttcagcctagccaaacactgagcctgacctgtaccgtgtccggctttagcctgaccagctaccacgtgcactgggtccgacaacctccaggcaaaggactggaatggatgggcgtgatgtggagcgacggcgacaccctgtataacagcgccctgaagtcccggctgagcatcagcagagataccagcaagagccaggtgctgctccagatggatagcctccagagcgaggataccgccacctactactgtgccagactccaggtgttcggctaccccggcatcagagactacgtgatggatgcctggggacagggcgcttctgtgacagtctcttctacgcgtttcaagatccccatcgaggaactggaagatcgggtgttcgtgaactgcaacacctctatcacctgggtggaaggcaccgtgggaacactgctgagcgacatcaccagactggacctcggcaagcggattctggaccctcggggcatctacagatgcaacggcaccgacatctacaaggacaaagaaagcaccgtgcaggtccactacagaatgtgccagtcctgcgtggaactggaccctgctacagtggccggcatcatcgtgaccgatgtgatcgctactctgctgctggctctgggagtgttctgcttcgccggacacgaaacaggcagactgtctggcgctgccgatacacaggccctgctgagaaacgaccaagtgtatcagcccctgcgcgacagagatgatgcccagtattctcacctcggcggcaactgggctagaaacaag

SEQ ID NO: 9512 - DNA, 1308 bp, Artificial Sequence
  Synthetic Polynucloetide
atggccttaccagtgaccgccttgctcctgccgctggccttgctgctccacgccgccaggccggacctggtcatgacacagagcccttttagcctggccgtgtccgagggcgagatggtcacaatcaagtgcaagagcagccagagcctgctgagcagcagacaccagaagaactttctggcctggtacagacagaagcccggacagtctcccaagctgctgatctaccacgccagcacaagacagagcggcgtgcccgatagattcatcggctctggcagcggcaccgacttcaccctgacaatctctgatgtgcaggccgaggacctggccgactactattgtctccagcactacacaagcccctacacctttggagccggcaccaagctggaactgaaaagaggcggaggcggaagtggaggcggaggatctggcggcggaggctctcaagtgcagctgaaagagtctggccccggactggttcagcctagccaaacactgagcctgacctgtaccgtgtccggctttagcctgaccagctaccacgtgcactgggtccgacaacctccaggcaaaggactggaatggatgggcgtgatgtggagcgacggcgacaccctgtataacagcgccctgaagtcccggctgagcatcagcagagataccagcaagagccaggtgctgctccagatggatagcctccagagcgaggataccgccacctactactgtgccagactccaggtgttcggctaccccggcatcagagactacgtgatggatgcctggggacagggcgcttctgtgacagtctcttctacgcgtcagagcatcaagggcaaccacctggtcaaggtgtacgactaccaagaggacggcagcgtgctgctgacatgtgatgccgaggccaagaacatcacctggtttaaggacggcaagatgatcggcttcctgaccgaggacaagaagaagtggaacctgggcagcaacgctaaggaccccagaggcatgtatcagtgcaagggcagccagaacaagagcaagcccctccaggtgtactaccggatgtgccagaactgcatcgagctgaacgccgctaccatcagcggctttctgttcgccgagatcgtgtccatcttcgtgctggccgtgggcgtgtactttatcgctggacaggatggcgtgcggcagagcagagcttccgataagcaaaccctgctgcctaacgaccagctgtaccagcctctgaaggacagagaggacgaccagtacagccacctccagggcaatcagctgagaagaaac

SEQ ID NO: 9513 - DNA, 1257 bp, Artificial Sequence
  Synthetic Polynucloetide
atggccttaccagtgaccgccttgctcctgccgctggccttgctgctccacgccgccaggccggacctggtcatgacacagagcccttttagcctggccgtgtccgagggcgagatggtcacaatcaagtgcaagagcagccagagcctgctgagcagcagacaccagaagaactttctggcctggtacagacagaagcccggacagtctcccaagctgctgatctaccacgccagcacaagacagagcggcgtgcccgatagattcatcggctctggcagcggcaccgacttcaccctgacaatctctgatgtgcaggccgaggacctggccgactactattgtctccagcactacacaagcccctacacctttggagccggcaccaagctggaactgaaaagaggcggaggcggaagtggaggcggaggatctggcggcggaggctctcaagtgcagctgaaagagtctggccccggactggttcagcctagccaaacactgagcctgacctgtaccgtgtccggctttagcctgaccagctaccacgtgcactgggtccgacaacctccaggcaaaggactggaatggatgggcgtgatgtggagcgacggcgacaccctgtataacagcgccctgaagtcccggctgagcatcagcagagataccagcaagagccaggtgctgctccagatggatagcctccagagcgaggataccgccacctactactgtgccagactccaggtgttcggctaccccggcatcagagactacgtgatggatgcctggggacagggcgcttctgtgacagtctcttctacgcgtcagagttttgggttgttggaccctaaattgtgctatctgttggacggaatcctgttcatttacggagtgatcctgaccgcattgttcctgcgggttaagttttccagatccgcagacgcacccgcttaccaacaagggcagaaccaactctacaatgaacttaatttggggcggagggaagagtacgacgttctggacaaaaggaggggacgagatcccgagatgggcggaaagcctcagcgaaggaagaatccgcaagaggggctttataacgaactccagaaagataaaatggcagaagcctatagtgagattgggatgaagggagaaaggaggaggggtaaaggtcacgatgggttgtaccaaggattgagcacagccactaaagatacctatgatgcgctccacatgcaggccctgccgccaaga

SEQ ID NO: 9514 - DNA, 1383 bp, Artificial Sequence
  Synthetic Polynucloetide
atggccttaccagtgaccgccttgctcctgccgctggccttgctgctccacgccgccaggccgcaagtgcagctgaaagagtctggccccggactggttcagcctagccaaacactgagcctgacctgtaccgtgtccggctttagcctgaccagctaccacgtgcactgggtccgacaacctccaggcaaaggactggaatggatgggcgtgatgtggagcgacggcgacaccctgtataacagcgccctgaagtcccggctgagcatcagcagagataccagcaagagccaggtgctgctccagatggatagcctccagagcgaggataccgccacctactactgtgccagactccaggtgttcggctaccccggcatcagagactacgtgatggatgcctggggacagggcgcttctgtgacagtctcttctggcggaggcggaagtggaggcggaggatctggcggcggaggctctgacctggtcatgacacagagcccttttagcctggccgtgtccgagggcgagatggtcacaatcaagtgcaagagcagccagagcctgctgagcagcagacaccagaagaactttctggcctggtacagacagaagcccggacagtctcccaagctgctgatctaccacgccagcacaagacagagcggcgtgcccgatagattcatcggctctggcagcggcaccgacttcaccctgacaatctctgatgtgcaggccgaggacctggccgactactattgtctccagcactacacaagcccctacacctttggagccggcaccaagctggaactgaaaagaacgcgtgacggtaacgaggagatgggaggaatcactcaaaccccttacaaagtctcaatttcaggaacaactgttatccttacatgtccccagtatcctggcagcgagatcctttggcagcataacgacaagaatatagggggagatgaagacgataagaatatcggatctgacgaggatcacttgagcctgaaagagttctccgagcttgaacaaagcggatattatgtgtgctatccgcgcgggtcaaagccggaagacgctaacttttacctttatctccgagccagagtgtgcgaaaattgcatggaaatggacgttatgtccgttgctacaatagttatcgtagatatatgcatcacgggtggactgcttctgctggtttattattggtccaagaatagaaaggccaaagctaaacccgtgaccagaggcgctggcgcaggcggaaggcaaaggggacaaaacaaagaacggccaccaccagtgccaaatccagattatgagcctattcggaaaggacagagggacctgtactctggcctgaatcagagaagaatc

SEQ ID NO: 9515 - DNA, 1278 bp, Artificial Sequence
  Synthetic Polynucloetide
atggccttaccagtgaccgccttgctcctgccgctggccttgctgctccacgccgccaggccgcaagtgcagctgaaagagtctggccccggactggttcagcctagccaaacactgagcctgacctgtaccgtgtccggctttagcctgaccagctaccacgtgcactgggtccgacaacctccaggcaaaggactggaatggatgggcgtgatgtggagcgacggcgacaccctgtataacagcgccctgaagtcccggctgagcatcagcagagataccagcaagagccaggtgctgctccagatggatagcctccagagcgaggataccgccacctactactgtgccagactccaggtgttcggctaccccggcatcagagactacgtgatggatgcctggggacagggcgcttctgtgacagtctcttctggcggaggcggaagtggaggcggaggatctggcggcggaggctctgacctggtcatgacacagagcccttttagcctggccgtgtccgagggcgagatggtcacaatcaagtgcaagagcagccagagcctgctgagcagcagacaccagaagaactttctggcctggtacagacagaagcccggacagtctcccaagctgctgatctaccacgccagcacaagacagagcggcgtgcccgatagattcatcggctctggcagcggcaccgacttcaccctgacaatctctgatgtgcaggccgaggacctggccgactactattgtctccagcactacacaagcccctacacctttggagccggcaccaagctggaactgaaaagaacgcgtttcaagatccccatcgaggaactggaagatcgggtgttcgtgaactgcaacacctctatcacctgggtggaaggcaccgtgggaacactgctgagcgacatcaccagactggacctcggcaagcggattctggaccctcggggcatctacagatgcaacggcaccgacatctacaaggacaaagaaagcaccgtgcaggtccactacagaatgtgccagtcctgcgtggaactggaccctgctacagtggccggcatcatcgtgaccgatgtgatcgctactctgctgctggctctgggagtgttctgcttcgccggacacgaaacaggcagactgtctggcgctgccgatacacaggccctgctgagaaacgaccaagtgtatcagcccctgcgcgacagagatgatgcccagtattctcacctcggcggcaactgggctagaaacaag

SEQ ID NO: 9516 - DNA, 1308 bp, Artificial Sequence
  Synthetic Polynucloetide
atggccttaccagtgaccgccttgctcctgccgctggccttgctgctccacgccgccaggccgcaagtgcagctgaaagagtctggccccggactggttcagcctagccaaacactgagcctgacctgtaccgtgtccggctttagcctgaccagctaccacgtgcactgggtccgacaacctccaggcaaaggactggaatggatgggcgtgatgtggagcgacggcgacaccctgtataacagcgccctgaagtcccggctgagcatcagcagagataccagcaagagccaggtgctgctccagatggatagcctccagagcgaggataccgccacctactactgtgccagactccaggtgttcggctaccccggcatcagagactacgtgatggatgcctggggacagggcgcttctgtgacagtctcttctggcggaggcggaagtggaggcggaggatctggcggcggaggctctgacctggtcatgacacagagcccttttagcctggccgtgtccgagggcgagatggtcacaatcaagtgcaagagcagccagagcctgctgagcagcagacaccagaagaactttctggcctggtacagacagaagcccggacagtctcccaagctgctgatctaccacgccagcacaagacagagcggcgtgcccgatagattcatcggctctggcagcggcaccgacttcaccctgacaatctctgatgtgcaggccgaggacctggccgactactattgtctccagcactacacaagcccctacacctttggagccggcaccaagctggaactgaaaagaacgcgtcagagcatcaagggcaaccacctggtcaaggtgtacgactaccaagaggacggcagcgtgctgctgacatgtgatgccgaggccaagaacatcacctggtttaaggacggcaagatgatcggcttcctgaccgaggacaagaagaagtggaacctgggcagcaacgctaaggaccccagaggcatgtatcagtgcaagggcagccagaacaagagcaagcccctccaggtgtactaccggatgtgccagaactgcatcgagctgaacgccgctaccatcagcggctttctgttcgccgagatcgtgtccatcttcgtgctggccgtgggcgtgtactttatcgctggacaggatggcgtgcggcagagcagagcttccgataagcaaaccctgctgcctaacgaccagctgtaccagcctctgaaggacagagaggacgaccagtacagccacctccagggcaatcagctgagaagaaac

SEQ ID NO: 9517 - DNA, 1257 bp, Artificial Sequence
  Synthetic Polynucloetide
atggccttaccagtgaccgccttgctcctgccgctggccttgctgctccacgccgccaggccgcaagtgcagctgaaagagtctggccccggactggttcagcctagccaaacactgagcctgacctgtaccgtgtccggctttagcctgaccagctaccacgtgcactgggtccgacaacctccaggcaaaggactggaatggatgggcgtgatgtggagcgacggcgacaccctgtataacagcgccctgaagtcccggctgagcatcagcagagataccagcaagagccaggtgctgctccagatggatagcctccagagcgaggataccgccacctactactgtgccagactccaggtgttcggctaccccggcatcagagactacgtgatggatgcctggggacagggcgcttctgtgacagtctcttctggcggaggcggaagtggaggcggaggatctggcggcggaggctctgacctggtcatgacacagagcccttttagcctggccgtgtccgagggcgagatggtcacaatcaagtgcaagagcagccagagcctgctgagcagcagacaccagaagaactttctggcctggtacagacagaagcccggacagtctcccaagctgctgatctaccacgccagcacaagacagagcggcgtgcccgatagattcatcggctctggcagcggcaccgacttcaccctgacaatctctgatgtgcaggccgaggacctggccgactactattgtctccagcactacacaagcccctacacctttggagccggcaccaagctggaactgaaaagaacgcgtcagagttttgggttgttggaccctaaattgtgctatctgttggacggaatcctgttcatttacggagtgatcctgaccgcattgttcctgcgggttaagttttccagatccgcagacgcacccgcttaccaacaagggcagaaccaactctacaatgaacttaatttggggcggagggaagagtacgacgttctggacaaaaggaggggacgagatcccgagatgggcggaaagcctcagcgaaggaagaatccgcaagaggggctttataacgaactccagaaagataaaatggcagaagcctatagtgagattgggatgaagggagaaaggaggaggggtaaaggtcacgatgggttgtaccaaggattgagcacagccactaaagatacctatgatgcgctccacatgcaggccctgccgccaaga

SEQ ID NO: 9518 - DNA, 1959 bp, Artificial Sequence
  Synthetic Polynucloetide
atggccttaccagtgaccgccttgctcctgccgctggccttgctgctccacgccgccaggccggacctggtcatgacacagagcccttttagcctggccgtgtccgagggcgagatggtcacaatcaagtgcaagagcagccagagcctgctgagcagcagacaccagaagaactttctggcctggtacagacagaagcccggacagtctcccaagctgctgatctaccacgccagcacaagacagagcggcgtgcccgatagattcatcggctctggcagcggcaccgacttcaccctgacaatctctgatgtgcaggccgaggacctggccgactactattgtctccagcactacacaagcccctacacctttggagccggcaccaagctggaactgaaaagaggcggaggcggaagtggaggcggaggatctggcggcggaggctctcaagtgcagctgaaagagtctggccccggactggttcagcctagccaaacactgagcctgacctgtaccgtgtccggctttagcctgaccagctaccacgtgcactgggtccgacaacctccaggcaaaggactggaatggatgggcgtgatgtggagcgacggcgacaccctgtataacagcgccctgaagtcccggctgagcatcagcagagataccagcaagagccaggtgctgctccagatggatagcctccagagcgaggataccgccacctactactgtgccagactccaggtgttcggctaccccggcatcagagactacgtgatggatgcctggggacagggcgcttctgtgacagtctcttctacgcgtgggagcggcatccagaaccctgatcctgccgtgtaccagctgcgggatagcaagagcagcgacaagagcgtgtgtctgttcaccgacttcgacagccagaccaacgtgtcccagagcaaggactccgacgtgtacatcaccgataagaccgtgctggacatgcggagcatggacttcaagagcaactccgccgtggcctggtccaacaagtccgatttcgcctgcgccaacgccttcaacaacagcattatccccgaggacacattcttcccaagccccgagagcagctgcgacgtgaagctggtggaaaagagcttcgagacagacaccaacctgaacttccagaacctgagcgtgatcggcttcagaatcctgctgctgaaagtggccggctttaacctgctgatgaccctgcggctgtggtccagccgcgccaagagaagcggatctggcgtgaagcagaccctgaatttcgacctgctgaagctggctggcgacgtggaatccaacccaggcccttctagaggccatatgaccgagtacaagcccacggtgcgcctcgccacccgcgacgacgtccccagggccgtacgcaccctcgccgccgcgttcgccgactaccccgccacgcgccacaccgtcgatccggaccgccacatcgagcgggtcaccgagctgcaagaactcttcctcacgcgcgtcgggctcgacatcggcaaggtgtgggtcgcggacgacggcgccgcggtggcggtctggaccacgccggagagcgtcgaagcgggggcggtgttcgccgagatcggcccgcgcatggccgagttgagcggttcccggctggccgcgcagcaacagatggaaggcctcctggcgccgcaccggcccaaggagcccgcgtggttcctggccaccgtcggcgtctcgcccgaccaccagggcaagggtctgggcagcgccgtcgtgctccccggagtggaggcggccgagcgcgccggggtgcccgccttcctggagacctccgcgccccgcaacctccccttctacgagcggctcggcttcaccgtcaccgccgacgtcgaggtgcccgaaggaccgcgcacctggtgcatgacccgcaagcccggtgcctga

SEQ ID NO: 9519 - DNA, 2055 bp, Artificial Sequence
  Synthetic Polynucloetide
atggccttaccagtgaccgccttgctcctgccgctggccttgctgctccacgccgccaggccggacctggtcatgacacagagcccttttagcctggccgtgtccgagggcgagatggtcacaatcaagtgcaagagcagccagagcctgctgagcagcagacaccagaagaactttctggcctggtacagacagaagcccggacagtctcccaagctgctgatctaccacgccagcacaagacagagcggcgtgcccgatagattcatcggctctggcagcggcaccgacttcaccctgacaatctctgatgtgcaggccgaggacctggccgactactattgtctccagcactacacaagcccctacacctttggagccggcaccaagctggaactgaaaagaggcggaggcggaagtggaggcggaggatctggcggcggaggctctcaagtgcagctgaaagagtctggccccggactggttcagcctagccaaacactgagcctgacctgtaccgtgtccggctttagcctgaccagctaccacgtgcactgggtccgacaacctccaggcaaaggactggaatggatgggcgtgatgtggagcgacggcgacaccctgtataacagcgccctgaagtcccggctgagcatcagcagagataccagcaagagccaggtgctgctccagatggatagcctccagagcgaggataccgccacctactactgtgccagactccaggtgttcggctaccccggcatcagagactacgtgatggatgcctggggacagggcgcttctgtgacagtctcttctctcgaggacctgaagaacgtgttcccacctgaggtggccgtgttcgagcctagcgaggccgagatcagccacacccagaaagccaccctcgtgtgcctggctaccggcttctaccccgaccatgtggaactgtcttggtgggtcaacggcaaagaggtgcacagcggcgtgtctaccgacccccagccactgaaagaacagcccgccctgaacgacagccggtactgcctgagcagcagactgagagtgtccgccaccttctggcagaacccccggaaccacttcagatgccaggtgcagttctacggcctgagcgagaacgacgagtggacccaggacagagccaagcccgtgacccagatcgtgtctgccgaagcctggggcagagccgattgcggctttaccagcgagagctaccagcagggcgtgctgagcgccaccatcctgtacgagatcctgctgggcaaggccaccctgtacgccgtgctggtgtctgccctggtgctgatggctatggtcaagcggaaggacagccggggaagggccaagcgatctggatctggagcaacaaacttctcactactcaaacaagcaggtgacgtggaggagaatcccgggcctactagaggccatatgaccgagtacaagcccacggtgcgcctcgccacccgcgacgacgtccccagggccgtacgcaccctcgccgccgcgttcgccgactaccccgccacgcgccacaccgtcgatccggaccgccacatcgagcgggtcaccgagctgcaagaactcttcctcacgcgcgtcgggctcgacatcggcaaggtgtgggtcgcggacgacggcgccgcggtggcggtctggaccacgccggagagcgtcgaagcgggggcggtgttcgccgagatcggcccgcgcatggccgagttgagcggttcccggctggccgcgcagcaacagatggaaggcctcctggcgccgcaccggcccaaggagcccgcgtggttcctggccaccgtcggcgtctcgcccgaccaccagggcaagggtctgggcagcgccgtcgtgctccccggagtggaggcggccgagcgcgccggggtgcccgccttcctggagacctccgcgccccgcaacctccccttctacgagcggctcggcttcaccgtcaccgccgacgtcgaggtgcccgaaggaccgcgcacctggtgcatgacccgcaagcccggtgcctga

SEQ ID NO: 9520 - DNA, 2205 bp, Artificial Sequence
  Synthetic Polynucloetide
atggccttaccagtgaccgccttgctcctgccgctggccttgctgctccacgccgccaggccggacctggtcatgacacagagcccttttagcctggccgtgtccgagggcgagatggtcacaatcaagtgcaagagcagccagagcctgctgagcagcagacaccagaagaactttctggcctggtacagacagaagcccggacagtctcccaagctgctgatctaccacgccagcacaagacagagcggcgtgcccgatagattcatcggctctggcagcggcaccgacttcaccctgacaatctctgatgtgcaggccgaggacctggccgactactattgtctccagcactacacaagcccctacacctttggagccggcaccaagctggaactgaaaagaggcggaggcggaagtggaggcggaggatctggcggcggaggctctcaagtgcagctgaaagagtctggccccggactggttcagcctagccaaacactgagcctgacctgtaccgtgtccggctttagcctgaccagctaccacgtgcactgggtccgacaacctccaggcaaaggactggaatggatgggcgtgatgtggagcgacggcgacaccctgtataacagcgccctgaagtcccggctgagcatcagcagagataccagcaagagccaggtgctgctccagatggatagcctccagagcgaggataccgccacctactactgtgccagactccaggtgttcggctaccccggcatcagagactacgtgatggatgcctggggacagggcgcttctgtgacagtctcttctacgcgtgagcagaaactgatctcggaagaggatctggggagcggcaccccattcccttctctggcccctcccatcatgctgctggtggacggcaagcagcagatggtggtcgtgtgcctggtgctggatgtggccccacctggactggacagccccatctggtttagcgccggcaatggctctgccctggacgcctttacctacggcccaagccctgccaccgatggcacctggacaaatctggcccacctgagcctgcccagcgaggaactggcttcttgggagcctctcgtgtgccacacaggacctggcgctgagggacacagcagatccacccagcctatgcacctgtctggcgaggccagcaccgccagaacctgtcctcaggaacctctgagaggcacccctggcggagcactgtggctgggagtgctgagactgctgctgttcaagctgctgctgtttgacctgctgctgacctgctcctgtctgtgcgatcctgccggccctctgccttctcctgccaccaccacaagactgagagccctgggcagccacagactgcaccctgccacagagacaggcggcagagaggccacaagcagccctagaccccagcccagagacagaagatggggcgataccccccctggcagaaagcctggatctccagtccgcgccaagagaagcggatctggcgtgaagcagaccctgaatttcgacctgctgaagctggctggcgacgtggaatccaacccaggcccttctagatctagaggccatatgaccgagtacaagcccacggtgcgcctcgccacccgcgacgacgtccccagggccgtacgcaccctcgccgccgcgttcgccgactaccccgccacgcgccacaccgtcgatccggaccgccacatcgagcgggtcaccgagctgcaagaactcttcctcacgcgcgtcgggctcgacatcggcaaggtgtgggtcgcggacgacggcgccgcggtggcggtctggaccacgccggagagcgtcgaagcgggggcggtgttcgccgagatcggcccgcgcatggccgagttgagcggttcccggctggccgcgcagcaacagatggaaggcctcctggcgccgcaccggcccaaggagcccgcgtggttcctggccaccgtcggcgtctcgcccgaccaccagggcaagggtctgggcagcgccgtcgtgctccccggagtggaggcggccgagcgcgccggggtgcccgccttcctggagacctccgcgccccgcaacctccccttctacgagcggctcggcttcaccgtcaccgccgacgtcgaggtgcccgaaggaccgcgcacctggtgcatgacccgcaagcccggtgcctga

SEQ ID NO: 9521 - DNA, 1638 bp, Artificial Sequence
  Synthetic Polynucloetide
atggccttaccagtgaccgccttgctcctgccgctggccttgctgctccacgccgccaggccggacctggtcatgacacagagcccttttagcctggccgtgtccgagggcgagatggtcacaatcaagtgcaagagcagccagagcctgctgagcagcagacaccagaagaactttctggcctggtacagacagaagcccggacagtctcccaagctgctgatctaccacgccagcacaagacagagcggcgtgcccgatagattcatcggctctggcagcggcaccgacttcaccctgacaatctctgatgtgcaggccgaggacctggccgactactattgtctccagcactacacaagcccctacacctttggagccggcaccaagctggaactgaaaagactcgaggacctgaagaacgtgttcccacctgaggtggccgtgttcgagcctagcgaggccgagatcagccacacccagaaagccaccctcgtgtgcctggctaccggcttctaccccgaccatgtggaactgtcttggtgggtcaacggcaaagaggtgcacagcggcgtgtctaccgacccccagccactgaaagaacagcccgccctgaacgacagccggtactgcctgagcagcagactgagagtgtccgccaccttctggcagaacccccggaaccacttcagatgccaggtgcagttctacggcctgagcgagaacgacgagtggacccaggacagagccaagcccgtgacccagatcgtgtctgccgaagcctggggcagagccgattgcggctttaccagcgagagctaccagcagggcgtgctgagcgccaccatcctgtacgagatcctgctgggcaaggccaccctgtacgccgtgctggtgtctgccctggtgctgatggctatggtcaagcggaaggacagccggggaagggccaagcgatctggatctggagcaacaaacttctcactactcaaacaagcaggtgacgtggaggagaatcccgggcctactagaggccatatgaccgagtacaagcccacggtgcgcctcgccacccgcgacgacgtccccagggccgtacgcaccctcgccgccgcgttcgccgactaccccgccacgcgccacaccgtcgatccggaccgccacatcgagcgggtcaccgagctgcaagaactcttcctcacgcgcgtcgggctcgacatcggcaaggtgtgggtcgcggacgacggcgccgcggtggcggtctggaccacgccggagagcgtcgaagcgggggcggtgttcgccgagatcggcccgcgcatggccgagttgagcggttcccggctggccgcgcagcaacagatggaaggcctcctggcgccgcaccggcccaaggagcccgcgtggttcctggccaccgtcggcgtctcgcccgaccaccagggcaagggtctgggcagcgccgtcgtgctccccggagtggaggcggccgagcgcgccggggtgcccgccttcctggagacctccgcgccccgcaacctccccttctacgagcggctcggcttcaccgtcaccgccgacgtcgaggtgcccgaaggaccgcgcacctggtgcatgacccgcaagcccggtgcctga

SEQ ID NO: 9522 - DNA, 945 bp, Artificial Sequence
  Synthetic Polynucloetide
atggccttaccagtgaccgccttgctcctgccgctggccttgctgctccacgccgccaggccggacctggtcatgacacagagcccttttagcctggccgtgtccgagggcgagatggtcacaatcaagtgcaagagcagccagagcctgctgagcagcagacaccagaagaactttctggcctggtacagacagaagcccggacagtctcccaagctgctgatctaccacgccagcacaagacagagcggcgtgcccgatagattcatcggctctggcagcggcaccgacttcaccctgacaatctctgatgtgcaggccgaggacctggccgactactattgtctccagcactacacaagcccctacacctttggagccggcaccaagctggaactgaaaagactcgaggacctgaagaacgtgttcccacctgaggtggccgtgttcgagcctagcgaggccgagatcagccacacccagaaagccaccctcgtgtgcctggctaccggcttctaccccgaccatgtggaactgtcttggtgggtcaacggcaaagaggtgcacagcggcgtgtctaccgacccccagccactgaaagaacagcccgccctgaacgacagccggtactgcctgagcagcagactgagagtgtccgccaccttctggcagaacccccggaaccacttcagatgccaggtgcagttctacggcctgagcgagaacgacgagtggacccaggacagagccaagcccgtgacccagatcgtgtctgccgaagcctggggcagagccgattgcggctttaccagcgagagctaccagcagggcgtgctgagcgccaccatcctgtacgagatcctgctgggcaaggccaccctgtacgccgtgctggtgtctgccctggtgctgatggctatggtcaagcggaaggacagccgggga

SEQ ID NO: 9523 - DNA, 1362 bp, Artificial Sequence
  Synthetic Polynucloetide
atggactggatttggcgcatccttttccttgtcggcgctgctaccggcgcgcattccttcgaacaagtgcagctgaaagagtctggccccggactggttcagcctagccaaacactgagcctgacctgtaccgtgtccggctttagcctgaccagctaccacgtgcactgggtccgacaacctccaggcaaaggactggaatggatgggcgtgatgtggagcgacggcgacaccctgtataacagcgccctgaagtcccggctgagcatcagcagagataccagcaagagccaggtgctgctccagatggatagcctccagagcgaggataccgccacctactactgtgccagactccaggtgttcggctaccccggcatcagagactacgtgatggatgcctggggacagggcgcttctgtgacagtctcttctacgcgtatccagaaccctgatcctgccgtgtaccagctgcgggatagcaagagcagcgacaagagcgtgtgtctgttcaccgacttcgacagccagaccaacgtgtcccagagcaaggactccgacgtgtacatcaccgataagaccgtgctggacatgcggagcatggacttcaagagcaactccgccgtggcctggtccaacaagtccgatttcgcctgcgccaacgccttcaacaacagcattatccccgaggacacattcttcccaagccccgagagcagctgcgacgtgaagctggtggaaaagagcttcgagacagacaccaacctgaacttccagaacctgagcgtgatcggcttcagaatcctgctgctgaaagtggccggctttaacctgctgatgaccctgcggctgtggtccagccgcgccaagagaagcggatctggcgtgaagcagaccctgaatttcgacctgctgaagctggctggcgacgtggaatccaacccaggcccttctagaggccatatggccaagcctttgtctcaagaagaatccaccctcattgaaagagcaacggctacaatcaacagcatccccatctctgaagactacagcgtcgccagcgcagctctctctagcgacggccgcatcttcactggtgtcaatgtatatcattttactgggggaccttgtgcagaactcgtggtgctgggcactgctgctgctgcggcagctggcaacctgacttgtatcgtcgcgatcggaaatgagaacaggggcatcttgagcccctgcggacggtgccgacaggtgcttctcgatctgcatcctgggatcaaagccatagtgaaggacagtgatggacagccgacggcagttgggattcgtgaattgctgccctctggttatgtgtgggagggctga

SEQ ID NO: 9524 - DNA, 861 bp, Artificial Sequence
  Synthetic Polynucloetide
atggactggatttggcgcatccttttccttgtcggcgctgctaccggcgcgcattccttcgaacaagtgcagctgaaagagtctggccccggactggttcagcctagccaaacactgagcctgacctgtaccgtgtccggctttagcctgaccagctaccacgtgcactgggtccgacaacctccaggcaaaggactggaatggatgggcgtgatgtggagcgacggcgacaccctgtataacagcgccctgaagtcccggctgagcatcagcagagataccagcaagagccaggtgctgctccagatggatagcctccagagcgaggataccgccacctactactgtgccagactccaggtgttcggctaccccggcatcagagactacgtgatggatgcctggggacagggcgcttctgtgacagtctcttctacgcgtatccagaaccctgatcctgccgtgtaccagctgcgggatagcaagagcagcgacaagagcgtgtgtctgttcaccgacttcgacagccagaccaacgtgtcccagagcaaggactccgacgtgtacatcaccgataagaccgtgctggacatgcggagcatggacttcaagagcaactccgccgtggcctggtccaacaagtccgatttcgcctgcgccaacgccttcaacaacagcattatccccgaggacacattcttcccaagccccgagagcagctgcgacgtgaagctggtggaaaagagcttcgagacagacaccaacctgaacttccagaacctgagcgtgatcggcttcagaatcctgctgctgaaagtggccggctttaacctgctgatgaccctgcggctgtggtccagc

SEQ ID NO: 9525 - DNA, 1692 bp, Artificial Sequence
  Synthetic Polynucloetide
atggccttaccagtgaccgccttgctcctgccgctggccttgctgctccacgccgccaggccggacctggtcatgacacagagcccttttagcctggccgtgtccgagggcgagatggtcacaatcaagtgcaagagcagccagagcctgctgagcagcagacaccagaagaactttctggcctggtacagacagaagcccggacagtctcccaagctgctgatctaccacgccagcacaagacagagcggcgtgcccgatagattcatcggctctggcagcggcaccgacttcaccctgacaatctctgatgtgcaggccgaggacctggccgactactattgtctccagcactacacaagcccctacacctttggagccggcaccaagctggaactgaaaagactcgaggggaaaccaattcccaaccctcttctgggactggattcaaccggcagcggcgaggacctgaagaacgtgttcccacctgaggtggccgtgttcgagcctagcgaggccgagatcagccacacccagaaagccaccctcgtgtgcctggctaccggcttctaccccgaccatgtggaactgtcttggtgggtcaacggcaaagaggtgcacagcggcgtgtgtaccgacccccagccactgaaagaacagcccgccctgaacgacagccggtactgcctgagcagcagactgagagtgtccgccaccttctggcagaacccccggaaccacttcagatgccaggtgcagttctacggcctgagcgagaacgacgagtggacccaggacagagccaagcccgtgacccagatcgtgtctgccgaagcctggggcagagccgattgcggctttaccagcgagagctaccagcagggcgtgctgagcgccaccatcctgtacgagatcctgctgggcaaggccaccctgtacgccgtgctggtgtctgccctggtgctgatggctatggtcaagcggaaggacagccggggaagggccaagcgatctggatctggagcaacaaacttctcactactcaaacaagcaggtgacgtggaggagaatcccgggcctactagaggccatatgaccgagtacaagcccacggtgcgcctcgccacccgcgacgacgtccccagggccgtacgcaccctcgccgccgcgttcgccgactaccccgccacgcgccacaccgtcgatccggaccgccacatcgagcgggtcaccgagctgcaagaactcttcctcacgcgcgtcgggctcgacatcggcaaggtgtgggtcgcggacgacggcgccgcggtggcggtctggaccacgccggagagcgtcgaagcgggggcggtgttcgccgagatcggcccgcgcatggccgagttgagcggttcccggctggccgcgcagcaacagatggaaggcctcctggcgccgcaccggcccaaggagcccgcgtggttcctggccaccgtcggcgtctcgcccgaccaccagggcaagggtctgggcagcgccgtcgtgctccccggagtggaggcggccgagcgcgccggggtgcccgccttcctggagacctccgcgccccgcaacctccccttctacgagcggctcggcttcaccgtcaccgccgacgtcgaggtgcccgaaggaccgcgcacctggtgcatgacccgcaagcccggtgcctga

SEQ ID NO: 9526 - DNA, 1002 bp, Artificial Sequence
  Synthetic Polynucloetide
atggccttaccagtgaccgccttgctcctgccgctggccttgctgctccacgccgccaggccggacctggtcatgacacagagcccttttagcctggccgtgtccgagggcgagatggtcacaatcaagtgcaagagcagccagagcctgctgagcagcagacaccagaagaactttctggcctggtacagacagaagcccggacagtctcccaagctgctgatctaccacgccagcacaagacagagcggcgtgcccgatagattcatcggctctggcagcggcaccgacttcaccctgacaatctctgatgtgcaggccgaggacctggccgactactattgtctccagcactacacaagcccctacacctttggagccggcaccaagctggaactgaaaagactcgaggggaaaccaattcccaaccctcttctgggactggattcaaccggcagcggcgaggacctgaagaacgtgttcccacctgaggtggccgtgttcgagcctagcgaggccgagatcagccacacccagaaagccaccctcgtgtgcctggctaccggcttctaccccgaccatgtggaactgtcttggtgggtcaacggcaaagaggtgcacagcggcgtgtgtaccgacccccagccactgaaagaacagcccgccctgaacgacagccggtactgcctgagcagcagactgagagtgtccgccaccttctggcagaacccccggaaccacttcagatgccaggtgcagttctacggcctgagcgagaacgacgagtggacccaggacagagccaagcccgtgacccagatcgtgtctgccgaagcctggggcagagccgattgcggctttaccagcgagagctaccagcagggcgtgctgagcgccaccatcctgtacgagatcctgctgggcaaggccaccctgtacgccgtgctggtgtctgccctggtgctgatggctatggtcaagcggaaggacagccggggatga

SEQ ID NO: 9527 - DNA, 1398 bp, Artificial Sequence
  Synthetic Polynucloetide
atggactggatttggcgcatccttttccttgtcggcgctgctaccggcgcgcattccttcgaacaagtgcagctgaaagagtctggccccggactggttcagcctagccaaacactgagcctgacctgtaccgtgtccggctttagcctgaccagctaccacgtgcactgggtccgacaacctccaggcaaaggactggaatggatgggcgtgatgtggagcgacggcgacaccctgtataacagcgccctgaagtcccggctgagcatcagcagagataccagcaagagccaggtgctgctccagatggatagcctccagagcgaggataccgccacctactactgtgccagactccaggtgttcggctaccccggcatcagagactacgtgatggatgcctggggacagggcgcttctgtgacagtctcttctacgcgtgagcagaaactgatctcggaagaggatgggagcggcatccagaaccctgatcctgccgtgtaccagctgcgggatagcaagagcagcgacaagagcgtgtgtctgttcaccgacttcgacagccagaccaacgtgtcccagagcaaggactccgacgtgtacatcaccgataagtgcgtgctggacatgcggagcatggacttcaagagcaactccgccgtggcctggtccaacaagtccgatttcgcctgcgccaacgccttcaacaacagcattatccccgaggacacattcttcccaagccccgagagcagctgcgacgtgaagctggtggaaaagagcttcgagacagacaccaacctgaacttccagaacctgagcgtgatcggcttcagaatcctgctgctgaaagtggccggctttaacctgctgatgaccctgcggctgtggtccagccgcgccaagagaagcggatctggcgtgaagcagaccctgaatttcgacctgctgaagctggctggcgacgtggaatccaacccaggcccttctagaggccatatggccaagcctttgtctcaagaagaatccaccctcattgaaagagcaacggctacaatcaacagcatccccatctctgaagactacagcgtcgccagcgcagctctctctagcgacggccgcatcttcactggtgtcaatgtatatcattttactgggggaccttgtgcagaactcgtggtgctgggcactgctgctgctgcggcagctggcaacctgacttgtatcgtcgcgatcggaaatgagaacaggggcatcttgagcccctgcggacggtgccgacaggtgcttctcgatctgcatcctgggatcaaagccatagtgaaggacagtgatggacagccgacggcagttgggattcgtgaattgctgccctctggttatgtgtgggagggctga

SEQ ID NO: 9528 - DNA, 900 bp, Artificial Sequence
  Synthetic Polynucloetide
atggactggatttggcgcatccttttccttgtcggcgctgctaccggcgcgcattccttcgaacaagtgcagctgaaagagtctggccccggactggttcagcctagccaaacactgagcctgacctgtaccgtgtccggctttagcctgaccagctaccacgtgcactgggtccgacaacctccaggcaaaggactggaatggatgggcgtgatgtggagcgacggcgacaccctgtataacagcgccctgaagtcccggctgagcatcagcagagataccagcaagagccaggtgctgctccagatggatagcctccagagcgaggataccgccacctactactgtgccagactccaggtgttcggctaccccggcatcagagactacgtgatggatgcctggggacagggcgcttctgtgacagtctcttctacgcgtgagcagaaactgatctcggaagaggatgggagcggcatccagaaccctgatcctgccgtgtaccagctgcgggatagcaagagcagcgacaagagcgtgtgtctgttcaccgacttcgacagccagaccaacgtgtcccagagcaaggactccgacgtgtacatcaccgataagtgcgtgctggacatgcggagcatggacttcaagagcaactccgccgtggcctggtccaacaagtccgatttcgcctgcgccaacgccttcaacaacagcattatccccgaggacacattcttcccaagccccgagagcagctgcgacgtgaagctggtggaaaagagcttcgagacagacaccaacctgaacttccagaacctgagcgtgatcggcttcagaatcctgctgctgaaagtggccggctttaacctgctgatgaccctgcggctgtggtccagctga

SEQ ID NO: 9529 - DNA, 1959 bp, Artificial Sequence
  Synthetic Polynucloetide
atggccttaccagtgaccgccttgctcctgccgctggccttgctgctccacgccgccaggccggacctggtcatgacacagagcccttttagcctggccgtgtccgagggcgagatggtcacaatcaagtgcaagagcagccagagcctgctgagcagcagacaccagaagaactttctggcctggtacagacagaagcccggacagtctcccaagctgctgatctaccacgccagcacaagacagagcggcgtgcccgatagattcatcggctctggcagcggcaccgacttcaccctgacaatctctgatgtgcaggccgaggacctggccgactactattgtctccagcactacacaagcccctacacctttggagccggcaccaagctggaactgaaaagaggcggaggcggaagtggaggcggaggatctggcggcggaggctctcaagtgcagctgaaagagtctggccccggactggttcagcctagccaaacactgagcctgacctgtaccgtgtccggctttagcctgaccagctaccacgtgcactgggtccgacaacctccaggcaaaggactggaatggatgggcgtgatgtggagcgacggcgacaccctgtataacagcgccctgaagtcccggctgagcatcagcagagataccagcaagagccaggtgctgctccagatggatagcctccagagcgaggataccgccacctactactgtgccagactccaggtgttcggctaccccggcatcagagactacgtgatggatgcctggggacagggcgcttctgtgacagtctcttctacgcgtgggagcggcatccagaaccctgatcctgccgtgtaccagctgcgggatagcaagagcagcgacaagagcgtgtgtctgttcaccgacttcgacagccagaccaacgtgtcccagagcaaggactccgacgtgtacatcaccgataagaccgtgctggacatgcggagcatggacttcaagagcaactccgccgtggcctggtccaacaagtccgatttcgcctgcgccaacgccttcaacaacagcattatccccgaggacacattcttcccaagcagcgacgtgccctgcgacgtgaagctggtggaaaagagcttcgagacagacaccaacctgaacttccagaacctgagcgtgatcggcttcagaatcctgctgctgaaagtggccggctttaacctgctgatgaccctgcggctgtggtccagccgcgccaagagaagcggatctggcgtgaagcagaccctgaatttcgacctgctgaagctggctggcgacgtggaatccaacccaggcccttctagaggccatatgaccgagtacaagcccacggtgcgcctcgccacccgcgacgacgtccccagggccgtacgcaccctcgccgccgcgttcgccgactaccccgccacgcgccacaccgtcgatccggaccgccacatcgagcgggtcaccgagctgcaagaactcttcctcacgcgcgtcgggctcgacatcggcaaggtgtgggtcgcggacgacggcgccgcggtggcggtctggaccacgccggagagcgtcgaagcgggggcggtgttcgccgagatcggcccgcgcatggccgagttgagcggttcccggctggccgcgcagcaacagatggaaggcctcctggcgccgcaccggcccaaggagcccgcgtggttcctggccaccgtcggcgtctcgcccgaccaccagggcaagggtctgggcagcgccgtcgtgctccccggagtggaggcggccgagcgcgccggggtgcccgccttcctggagacctccgcgccccgcaacctccccttctacgagcggctcggcttcaccgtcaccgccgacgtcgaggtgcccgaaggaccgcgcacctggtgcatgacccgcaagcccggtgcctga

SEQ ID NO: 9530 - DNA, 2055 bp, Artificial Sequence
  Synthetic Polynucloetide
atggccttaccagtgaccgccttgctcctgccgctggccttgctgctccacgccgccaggccggacctggtcatgacacagagcccttttagcctggccgtgtccgagggcgagatggtcacaatcaagtgcaagagcagccagagcctgctgagcagcagacaccagaagaactttctggcctggtacagacagaagcccggacagtctcccaagctgctgatctaccacgccagcacaagacagagcggcgtgcccgatagattcatcggctctggcagcggcaccgacttcaccctgacaatctctgatgtgcaggccgaggacctggccgactactattgtctccagcactacacaagcccctacacctttggagccggcaccaagctggaactgaaaagaggcggaggcggaagtggaggcggaggatctggcggcggaggctctcaagtgcagctgaaagagtctggccccggactggttcagcctagccaaacactgagcctgacctgtaccgtgtccggctttagcctgaccagctaccacgtgcactgggtccgacaacctccaggcaaaggactggaatggatgggcgtgatgtggagcgacggcgacaccctgtataacagcgccctgaagtcccggctgagcatcagcagagataccagcaagagccaggtgctgctccagatggatagcctccagagcgaggataccgccacctactactgtgccagactccaggtgttcggctaccccggcatcagagactacgtgatggatgcctggggacagggcgcttctgtgacagtctcttctctcgaggacctgaagaacgtgttcccacctgaggtggccgtgttcgagcctagcaaggccgagatcgcccacacccagaaagccaccctcgtgtgcctggctaccggcttctaccccgaccatgtggaactgtcttggtgggtcaacggcaaagaggtgcacagcggcgtgtctaccgacccccagccactgaaagaacagcccgccctgaacgacagccggtactgcctgagcagcagactgagagtgtccgccaccttctggcagaacccccggaaccacttcagatgccaggtgcagttctacggcctgagcgagaacgacgagtggacccaggacagagccaagcccgtgacccagatcgtgtctgccgaagcctggggcagagccgattgcggcatcaccagcgccagctaccaccagggcgtgctgagcgccaccatcctgtacgagatcctgctgggcaaggccaccctgtacgccgtgctggtgtctgccctggtgctgatggctatggtcaagcggaaggacagccggggaagggccaagcgatctggatctggagcaacaaacttctcactactcaaacaagcaggtgacgtggaggagaatcccgggcctactagaggccatatgaccgagtacaagcccacggtgcgcctcgccacccgcgacgacgtccccagggccgtacgcaccctcgccgccgcgttcgccgactaccccgccacgcgccacaccgtcgatccggaccgccacatcgagcgggtcaccgagctgcaagaactcttcctcacgcgcgtcgggctcgacatcggcaaggtgtgggtcgcggacgacggcgccgcggtggcggtctggaccacgccggagagcgtcgaagcgggggcggtgttcgccgagatcggcccgcgcatggccgagttgagcggttcccggctggccgcgcagcaacagatggaaggcctcctggcgccgcaccggcccaaggagcccgcgtggttcctggccaccgtcggcgtctcgcccgaccaccagggcaagggtctgggcagcgccgtcgtgctccccggagtggaggcggccgagcgcgccggggtgcccgccttcctggagacctccgcgccccgcaacctccccttctacgagcggctcggcttcaccgtcaccgccgacgtcgaggtgcccgaaggaccgcgcacctggtgcatgacccgcaagcccggtgcctga

SEQ ID NO: 9531 - DNA, 2124 bp, Artificial Sequence
  Synthetic Polynucloetide
atggccttaccagtgaccgccttgctcctgccgctggccttgctgctccacgccgccaggccggacctggtcatgacacagagcccttttagcctggccgtgtccgagggcgagatggtcacaatcaagtgcaagagcagccagagcctgctgagcagcagacaccagaagaactttctggcctggtacagacagaagcccggacagtctcccaagctgctgatctaccacgccagcacaagacagagcggcgtgcccgatagattcatcggctctggcagcggcaccgacttcaccctgacaatctctgatgtgcaggccgaggacctggccgactactattgtctccagcactacacaagcccctacacctttggagccggcaccaagctggaactgaaaagaggcggaggcggaagtggaggcggaggatctggcggcggaggctctcaagtgcagctgaaagagtctggccccggactggttcagcctagccaaacactgagcctgacctgtaccgtgtccggctttagcctgaccagctaccacgtgcactgggtccgacaacctccaggcaaaggactggaatggatgggcgtgatgtggagcgacggcgacaccctgtataacagcgccctgaagtcccggctgagcatcagcagagataccagcaagagccaggtgctgctccagatggatagcctccagagcgaggataccgccacctactactgtgccagactccaggtgttcggctaccccggcatcagagactacgtgatggatgcctggggacagggcgcttctgtgacagtctcttctacgcgtgggtctggaggcggaggcagcggcggaggcgggagcggcgacggtaacgaggagatgggaggaatcactcaaaccccttacaaagtctcaatttcaggaacaactgttatccttacatgtccccagtatcctggcagcgagatcctttggcagcataacgacaagaatatagggggagatgaagacgataagaatatcggatctgacgaggatcacttgagcctgaaagagttctccgagcttgaacaaagcggatattatgtgtgctatccgcgcgggtcaaagccggaagacgctaacttttacctttatctccgagccagagtgtgcgaaaattgcatggaaatggacgttatgtccgttgctacaatagttatcgtagatatatgcatcacgggtggactgcttctgctggtttattattggtccaagaatagaaaggccaaagctaaacccgtgaccagaggcgctggcgcaggcggaaggcaaaggggacaaaacaaagaacggccaccaccagtgccaaatccagattatgagcctattcggaaaggacagagggacctgtactctggcctgaatcagagaagaatccgcgccaagagaagcggatctggcgtgaagcagaccctgaatttcgacctgctgaagctggctggcgacgtggaatccaacccaggcccttctagaggccatatgaccgagtacaagcccacggtgcgcctcgccacccgcgacgacgtccccagggccgtacgcaccctcgccgccgcgttcgccgactaccccgccacgcgccacaccgtcgatccggaccgccacatcgagcgggtcaccgagctgcaagaactcttcctcacgcgcgtcgggctcgacatcggcaaggtgtgggtcgcggacgacggcgccgcggtggcggtctggaccacgccggagagcgtcgaagcgggggcggtgttcgccgagatcggcccgcgcatggccgagttgagcggttcccggctggccgcgcagcaacagatggaaggcctcctggcgccgcaccggcccaaggagcccgcgtggttcctggccaccgtcggcgtctcgcccgaccaccagggcaagggtctgggcagcgccgtcgtgctccccggagtggaggcggccgagcgcgccggggtgcccgccttcctggagacctccgcgccccgcaacctccccttctacgagcggctcggcttcaccgtcaccgccgacgtcgaggtgcccgaaggaccgcgcacctggtgcatgacccgcaagcccggtgcctga

SEQ ID NO: 9532 - DNA, 2019 bp, Artificial Sequence
  Synthetic Polynucloetide
atggccttaccagtgaccgccttgctcctgccgctggccttgctgctccacgccgccaggccggacctggtcatgacacagagcccttttagcctggccgtgtccgagggcgagatggtcacaatcaagtgcaagagcagccagagcctgctgagcagcagacaccagaagaactttctggcctggtacagacagaagcccggacagtctcccaagctgctgatctaccacgccagcacaagacagagcggcgtgcccgatagattcatcggctctggcagcggcaccgacttcaccctgacaatctctgatgtgcaggccgaggacctggccgactactattgtctccagcactacacaagcccctacacctttggagccggcaccaagctggaactgaaaagaggcggaggcggaagtggaggcggaggatctggcggcggaggctctcaagtgcagctgaaagagtctggccccggactggttcagcctagccaaacactgagcctgacctgtaccgtgtccggctttagcctgaccagctaccacgtgcactgggtccgacaacctccaggcaaaggactggaatggatgggcgtgatgtggagcgacggcgacaccctgtataacagcgccctgaagtcccggctgagcatcagcagagataccagcaagagccaggtgctgctccagatggatagcctccagagcgaggataccgccacctactactgtgccagactccaggtgttcggctaccccggcatcagagactacgtgatggatgcctggggacagggcgcttctgtgacagtctcttctacgcgtgggtctggaggcggaggcagcggcggaggcgggagcggcttcaagatccccatcgaggaactggaagatcgggtgttcgtgaactgcaacacctctatcacctgggtggaaggcaccgtgggaacactgctgagcgacatcaccagactggacctcggcaagcggattctggaccctcggggcatctacagatgcaacggcaccgacatctacaaggacaaagaaagcaccgtgcaggtccactacagaatgtgccagtcctgcgtggaactggaccctgctacagtggccggcatcatcgtgaccgatgtgatcgctactctgctgctggctctgggagtgttctgcttcgccggacacgaaacaggcagactgtctggcgctgccgatacacaggccctgctgagaaacgaccaagtgtatcagcccctgcgcgacagagatgatgcccagtattctcacctcggcggcaactgggctagaaacaagcgcgccaagagaagcggatctggcgtgaagcagaccctgaatttcgacctgctgaagctggctggcgacgtggaatccaacccaggcccttctagaggccatatgaccgagtacaagcccacggtgcgcctcgccacccgcgacgacgtccccagggccgtacgcaccctcgccgccgcgttcgccgactaccccgccacgcgccacaccgtcgatccggaccgccacatcgagcgggtcaccgagctgcaagaactcttcctcacgcgcgtcgggctcgacatcggcaaggtgtgggtcgcggacgacggcgccgcggtggcggtctggaccacgccggagagcgtcgaagcgggggcggtgttcgccgagatcggcccgcgcatggccgagttgagcggttcccggctggccgcgcagcaacagatggaaggcctcctggcgccgcaccggcccaaggagcccgcgtggttcctggccaccgtcggcgtctcgcccgaccaccagggcaagggtctgggcagcgccgtcgtgctccccggagtggaggcggccgagcgcgccggggtgcccgccttcctggagacctccgcgccccgcaacctccccttctacgagcggctcggcttcaccgtcaccgccgacgtcgaggtgcccgaaggaccgcgcacctggtgcatgacccgcaagcccggtgcctga

SEQ ID NO: 9533 - DNA, 2049 bp, Artificial Sequence
  Synthetic Polynucloetide
atggccttaccagtgaccgccttgctcctgccgctggccttgctgctccacgccgccaggccggacctggtcatgacacagagcccttttagcctggccgtgtccgagggcgagatggtcacaatcaagtgcaagagcagccagagcctgctgagcagcagacaccagaagaactttctggcctggtacagacagaagcccggacagtctcccaagctgctgatctaccacgccagcacaagacagagcggcgtgcccgatagattcatcggctctggcagcggcaccgacttcaccctgacaatctctgatgtgcaggccgaggacctggccgactactattgtctccagcactacacaagcccctacacctttggagccggcaccaagctggaactgaaaagaggcggaggcggaagtggaggcggaggatctggcggcggaggctctcaagtgcagctgaaagagtctggccccggactggttcagcctagccaaacactgagcctgacctgtaccgtgtccggctttagcctgaccagctaccacgtgcactgggtccgacaacctccaggcaaaggactggaatggatgggcgtgatgtggagcgacggcgacaccctgtataacagcgccctgaagtcccggctgagcatcagcagagataccagcaagagccaggtgctgctccagatggatagcctccagagcgaggataccgccacctactactgtgccagactccaggtgttcggctaccccggcatcagagactacgtgatggatgcctggggacagggcgcttctgtgacagtctcttctacgcgtgggtctggaggcggaggcagcggcggaggcgggagcggccagagcatcaagggcaaccacctggtcaaggtgtacgactaccaagaggacggcagcgtgctgctgacatgtgatgccgaggccaagaacatcacctggtttaaggacggcaagatgatcggcttcctgaccgaggacaagaagaagtggaacctgggcagcaacgctaaggaccccagaggcatgtatcagtgcaagggcagccagaacaagagcaagcccctccaggtgtactaccggatgtgccagaactgcatcgagctgaacgccgctaccatcagcggctttctgttcgccgagatcgtgtccatcttcgtgctggccgtgggcgtgtactttatcgctggacaggatggcgtgcggcagagcagagcttccgataagcaaaccctgctgcctaacgaccagctgtaccagcctctgaaggacagagaggacgaccagtacagccacctccagggcaatcagctgagaagaaaccgcgccaagagaagcggatctggcgtgaagcagaccctgaatttcgacctgctgaagctggctggcgacgtggaatccaacccaggcccttctagaggccatatgaccgagtacaagcccacggtgcgcctcgccacccgcgacgacgtccccagggccgtacgcaccctcgccgccgcgttcgccgactaccccgccacgcgccacaccgtcgatccggaccgccacatcgagcgggtcaccgagctgcaagaactcttcctcacgcgcgtcgggctcgacatcggcaaggtgtgggtcgcggacgacggcgccgcggtggcggtctggaccacgccggagagcgtcgaagcgggggcggtgttcgccgagatcggcccgcgcatggccgagttgagcggttcccggctggccgcgcagcaacagatggaaggcctcctggcgccgcaccggcccaaggagcccgcgtggttcctggccaccgtcggcgtctcgcccgaccaccagggcaagggtctgggcagcgccgtcgtgctccccggagtggaggcggccgagcgcgccggggtgcccgccttcctggagacctccgcgccccgcaacctccccttctacgagcggctcggcttcaccgtcaccgccgacgtcgaggtgcccgaaggaccgcgcacctggtgcatgacccgcaagcccggtgcctga

SEQ ID NO: 9534 - DNA, 1998 bp, Artificial Sequence
  Synthetic Polynucloetide
atggccttaccagtgaccgccttgctcctgccgctggccttgctgctccacgccgccaggccggacctggtcatgacacagagcccttttagcctggccgtgtccgagggcgagatggtcacaatcaagtgcaagagcagccagagcctgctgagcagcagacaccagaagaactttctggcctggtacagacagaagcccggacagtctcccaagctgctgatctaccacgccagcacaagacagagcggcgtgcccgatagattcatcggctctggcagcggcaccgacttcaccctgacaatctctgatgtgcaggccgaggacctggccgactactattgtctccagcactacacaagcccctacacctttggagccggcaccaagctggaactgaaaagaggcggaggcggaagtggaggcggaggatctggcggcggaggctctcaagtgcagctgaaagagtctggccccggactggttcagcctagccaaacactgagcctgacctgtaccgtgtccggctttagcctgaccagctaccacgtgcactgggtccgacaacctccaggcaaaggactggaatggatgggcgtgatgtggagcgacggcgacaccctgtataacagcgccctgaagtcccggctgagcatcagcagagataccagcaagagccaggtgctgctccagatggatagcctccagagcgaggataccgccacctactactgtgccagactccaggtgttcggctaccccggcatcagagactacgtgatggatgcctggggacagggcgcttctgtgacagtctcttctacgcgtgggtctggaggcggaggcagcggcggaggcgggagcggccagagttttgggttgttggaccctaaattgtgctatctgttggacggaatcctgttcatttacggagtgatcctgaccgcattgttcctgcgggttaagttttccagatccgcagacgcacccgcttaccaacaagggcagaaccaactctacaatgaacttaatttggggcggagggaagagtacgacgttctggacaaaaggaggggacgagatcccgagatgggcggaaagcctcagcgaaggaagaatccgcaagaggggctttataacgaactccagaaagataaaatggcagaagcctatagtgagattgggatgaagggagaaaggaggaggggtaaaggtcacgatgggttgtaccaaggattgagcacagccactaaagatacctatgatgcgctccacatgcaggccctgccgccaagacgcgccaagagaagcggatctggcgtgaagcagaccctgaatttcgacctgctgaagctggctggcgacgtggaatccaacccaggcccttctagaggccatatgaccgagtacaagcccacggtgcgcctcgccacccgcgacgacgtccccagggccgtacgcaccctcgccgccgcgttcgccgactaccccgccacgcgccacaccgtcgatccggaccgccacatcgagcgggtcaccgagctgcaagaactcttcctcacgcgcgtcgggctcgacatcggcaaggtgtgggtcgcggacgacggcgccgcggtggcggtctggaccacgccggagagcgtcgaagcgggggcggtgttcgccgagatcggcccgcgcatggccgagttgagcggttcccggctggccgcgcagcaacagatggaaggcctcctggcgccgcaccggcccaaggagcccgcgtggttcctggccaccgtcggcgtctcgcccgaccaccagggcaagggtctgggcagcgccgtcgtgctccccggagtggaggcggccgagcgcgccggggtgcccgccttcctggagacctccgcgccccgcaacctccccttctacgagcggctcggcttcaccgtcaccgccgacgtcgaggtgcccgaaggaccgcgcacctggtgcatgacccgcaagcccggtgcctga

SEQ ID NO: 9535 - DNA, 2298 bp, Artificial Sequence
  Synthetic Polynucloetide
atggccttaccagtgaccgccttgctcctgccgctggccttgctgctccacgccgccaggccggaagtgcagctggttgaatctggcggaggactggttcagcctggcggatctctgagactgtcttgtgccgccagcggcttcagcttcagcgacttttggatgagctgggtccgacaggcccctggcaaaggacttgaatgggtcgccacaatcagccaggccggcagcgagaaggactacgtggactctgtgaagggcagattcaccatcagccgggacaacgccaagaagtccctgtacctccagatgaacagcctgagagccgaggacaccgccgtgtactattgtgcctctggcgtgtacagcttcgactacagaggccagggcaccctggtcacagtctcttctggtaccggcggaggcggatctggcggcggaggtagcggtggcggaggatctgaattcgacctggtcatgacacagagcccttttagcctggccgtgtccgagggcgagatggtcacaatcaagtgcaagagcagccagagcctgctgagcagcagacaccagaagaactttctggcctggtacagacagaagcccggacagtctcccaagctgctgatctaccacgccagcacaagacagagcggcgtgcccgatagattcatcggctctggcagcggcaccgacttcaccctgacaatctctgatgtgcaggccgaggacctggccgactactattgtctccagcactacacaagcccctacacctttggagccggcaccaagctggaactgaaaagactcgaggacctgaagaacgtgttcccacctgaggtggccgtgttcgagcctagcgaggccgagatcagccacacccagaaagccaccctcgtgtgcctggctaccggcttctaccccgaccatgtggaactgtcttggtgggtcaacggcaaagaggtgcacagcggcgtgtgtaccgacccccagccactgaaagaacagcccgccctgaacgacagccggtactgcctgagcagcagactgagagtgtccgccaccttctggcagaacccccggaaccacttcagatgccaggtgcagttctacggcctgagcgagaacgacgagtggacccaggacagagccaagcccgtgacccagatcgtgtctgccgaagcctggggcagagccgattgcggctttaccagcgagagctaccagcagggcgtgctgagcgccaccatcctgtacgagatcctgctgggcaaggccaccctgtacgccgtgctggtgtctgccctggtgctgatggctatggtcaagcggaaggacagccggggaagggccaagcgatctggatctggagcaacaaacttctcactactcaaacaagcaggtgacgtggaggagaatcccgggcctactagtatggactggatttggcgcatccttttccttgtcggcgctgctaccggcgcgcattccttcgaacaagtgcagctgaaagagtctggccccggactggttcagcctagccaaacactgagcctgacctgtaccgtgtccggctttagcctgaccagctaccacgtgcactgggtccgacaacctccaggcaaaggactggaatggatgggcgtgatgtggagcgacggcgacaccctgtataacagcgccctgaagtcccggctgagcatcagcagagataccagcaagagccaggtgctgctccagatggatagcctccagagcgaggataccgccacctactactgtgccagactccaggtgttcggctaccccggcatcagagactacgtgatggatgcctggggacagggcgcttctgtgacagtctcttctacgcgtatccagaaccctgatcctgccgtgtaccagctgcgggatagcaagagcagcgacaagagcgtgtgtctgttcaccgacttcgacagccagaccaacgtgtcccagagcaaggactccgacgtgtacatcaccgataagtgcgtgctggacatgcggagcatggacttcaagagcaactccgccgtggcctggtccaacaagtccgatttcgcctgcgccaacgccttcaacaacagcattatccccgaggacacattcttcccaagccccgagagcagctgcgacgtgaagctggtggaaaagagcttcgagacagacaccaacctgaacttccagaacctgagcgtgatcggcttcagaatcctgctgctgaaagtggccggctttaacctgctgatgaccctgcggctgtggtccagc

SEQ ID NO: 9536 - DNA, 2310 bp, Artificial Sequence
  Synthetic Polynucloetide
atggccttaccagtgaccgccttgctcctgccgctggccttgctgctccacgccgccaggccggaagtgcagctggttgaatctggcggaggactggttcagcctggcggatctctgagactgtcttgtgccgccagcggcttcagcttcagcgacttttggatgagctgggtccgacaggcccctggcaaaggacttgaatgggtcgccacaatcagccaggccggcagcgagaaggactacgtggactctgtgaagggcagattcaccatcagccgggacaacgccaagaagtccctgtacctccagatgaacagcctgagagccgaggacaccgccgtgtactattgtgcctctggcgtgtacagcttcgactacagaggccagggcaccctggtcacagtctcttctggtaccggcggaggcggatctggcggcggaggtagcggtggcggaggatctgaattcgacctggtcatgacacagagcccttttagcctggccgtgtccgagggcgagatggtcacaatcaagtgcaagagcagccagagcctgctgagcagcagacaccagaagaactttctggcctggtacagacagaagcccggacagtctcccaagctgctgatctaccacgccagcacaagacagagcggcgtgcccgatagattcatcggctctggcagcggcaccgacttcaccctgacaatctctgatgtgcaggccgaggacctggccgactactattgtctccagcactacacaagcccctacacctttggagccggcaccaagctggaactgaaaagactcgagatccagaaccctgatcctgccgtgtaccagctgcgggatagcaagagcagcgacaagagcgtgtgtctgttcaccgacttcgacagccagaccaacgtgtcccagagcaaggactccgacgtgtacatcaccgataagtgcgtgctggacatgcggagcatggacttcaagagcaactccgccgtggcctggtccaacaagtccgatttcgcctgcgccaacgccttcaacaacagcattatccccgaggacacattcttcccaagccccgagagcagctgcgacgtgaagctggtggaaaagagcttcgagacagacaccaacctgaacttccagaacctgagcgtgatcggcttcagaatcctgctgctgaaagtggccggctttaacctgctgatgaccctgcggctgtggtccagccgcgccaagagaagcggatctggcgtgaagcagaccctgaatttcgacctgctgaagctggctggcgacgtggaatccaacccaggccctactagtatggactggatttggcgcatccttttccttgtcggcgctgctaccggcgcgcattccttcgaacaagtgcagctgaaagagtctggccccggactggttcagcctagccaaacactgagcctgacctgtaccgtgtccggctttagcctgaccagctaccacgtgcactgggtccgacaacctccaggcaaaggactggaatggatgggcgtgatgtggagcgacggcgacaccctgtataacagcgccctgaagtcccggctgagcatcagcagagataccagcaagagccaggtgctgctccagatggatagcctccagagcgaggataccgccacctactactgtgccagactccaggtgttcggctaccccggcatcagagactacgtgatggatgcctggggacagggcgcttctgtgacagtctcttctacgcgtgaggacctgaagaacgtgttcccacctgaggtggccgtgttcgagcctagcgaggccgagatcagccacacccagaaagccaccctcgtgtgcctggctaccggcttctaccccgaccatgtggaactgtcttggtgggtcaacggcaaagaggtgcacagcggcgtgtgtaccgacccccagccactgaaagaacagcccgccctgaacgacagccggtactgcctgagcagcagactgagagtgtccgccaccttctggcagaacccccggaaccacttcagatgccaggtgcagttctacggcctgagcgagaacgacgagtggacccaggacagagccaagcccgtgacccagatcgtgtctgccgaagcctggggcagagccgattgcggctttaccagcgagagctaccagcagggcgtgctgagcgccaccatcctgtacgagatcctgctgggcaaggccaccctgtacgccgtgctggtgtctgccctggtgctgatggctatggtcaagcggaaggacagccgggga

SEQ ID NO: 9537 - DNA, 2886 bp, Artificial Sequence
  Synthetic Polynucloetide
atggccttaccagtgaccgccttgctcctgccgctggccttgctgctccacgccgccaggccggaagtgcagctggttgaatctggcggaggactggttcagcctggcggatctctgagactgtcttgtgccgccagcggcttcagcttcagcgacttttggatgagctgggtccgacaggcccctggcaaaggacttgaatgggtcgccacaatcagccaggccggcagcgagaaggactacgtggactctgtgaagggcagattcaccatcagccgggacaacgccaagaagtccctgtacctccagatgaacagcctgagagccgaggacaccgccgtgtactattgtgcctctggcgtgtacagcttcgactacagaggccagggcaccctggtcacagtctcttctggtaccggcggaggcggatctggcggcggaggtagcggtggcggaggatctgaattcgacctggtcatgacacagagcccttttagcctggccgtgtccgagggcgagatggtcacaatcaagtgcaagagcagccagagcctgctgagcagcagacaccagaagaactttctggcctggtacagacagaagcccggacagtctcccaagctgctgatctaccacgccagcacaagacagagcggcgtgcccgatagattcatcggctctggcagcggcaccgacttcaccctgacaatctctgatgtgcaggccgaggacctggccgactactattgtctccagcactacacaagcccctacacctttggagccggcaccaagctggaactgaaaagactcgaggacctgaagaacgtgttcccacctgaggtggccgtgttcgagcctagcgaggccgagatcagccacacccagaaagccaccctcgtgtgcctggctaccggcttctaccccgaccatgtggaactgtcttggtgggtcaacggcaaagaggtgcacagcggcgtgtctaccgacccccagccactgaaagaacagcccgccctgaacgacagccggtactgcctgagcagcagactgagagtgtccgccaccttctggcagaacccccggaaccacttcagatgccaggtgcagttctacggcctgagcgagaacgacgagtggacccaggacagagccaagcccgtgacccagatcgtgtctgccgaagcctggggcagagccgattgcggatcccagagcttcggcctgctggaccccaagctgtgctacctgctggatggcatcctgttcatctacggcgtgatcctgaccgccctgttcctgagagtgaagttcagcagaagcgccgacgcccctgcctaccagcagggacagaaccaactgtacaacgagctgaacctgggcagacgggaagagtacgacgtgctggacaagcggagaggcagggaccctgagatgggcggaaagccccagcggagaaagaacccccaggaaggactgtataacgaactccagaaagacaagatggccgaagcctacagcgagatcggcatgaagggcgagcggagaagaggcaagggccacgatggcctgtaccagggcctgagcaccgccaccaaggacacctatgacgccctgcacatgcaggccctgcctccaagaagggccaagcgatctggatctggagcaacaaacttctcactactcaaacaagcaggtgacgtggaggagaatcccgggcctactagtatggactggatttggcgcatccttttccttgtcggcgctgctaccggcgcgcattccttcgaacaagtgcagctgaaagagtctggccccggactggttcagcctagccaaacactgagcctgacctgtaccgtgtccggctttagcctgaccagctaccacgtgcactgggtccgacaacctccaggcaaaggactggaatggatgggcgtgatgtggagcgacggcgacaccctgtataacagcgccctgaagtcccggctgagcatcagcagagataccagcaagagccaggtgctgctccagatggatagcctccagagcgaggataccgccacctactactgtgccagactccaggtgttcggctaccccggcatcagagactacgtgatggatgcctggggacagggcgcttctgtgacagtctcttctacgcgtatccagaaccctgatcctgccgtgtaccagctgcgggatagcaagagcagcgacaagagcgtgtgtctgttcaccgacttcgacagccagaccaacgtgtcccagagcaaggactccgacgtgtacatcaccgataagaccgtgctggacatgcggagcatggacttcaagagcaactccgccgtggcctggtccaacaagtccgatttcgcctgcgccaacgccttcaacaacagcattatccccgaggacacattcttcccaagccccgagagcagctgcggtacccagagttttgggttgttggaccctaaattgtgctatctgttggacggaatcctgttcatttacggagtgatcctgaccgcattgttcctgcgggttaagttttccagatccgcagacgcacccgcttaccaacaagggcagaaccaactctacaatgaacttaatttggggcggagggaagagtacgacgttctggacaaaaggaggggacgagatcccgagatgggcggaaagcctcagcgaaggaagaatccgcaagaggggctttataacgaactccagaaagataaaatggcagaagcctatagtgagattgggatgaagggagaaaggaggaggggtaaaggtcacgatgggttgtaccaaggattgagcacagccactaaagatacctatgatgcgctccacatgcaggccctgccgccaaga

SEQ ID NO: 9538 - DNA, 2376 bp, Artificial Sequence
  Synthetic Polynucloetide
atggccttaccagtgaccgccttgctcctgccgctggccttgctgctccacgccgccaggccggaagtgcagctggttgaatctggcggaggactggttcagcctggcggatctctgagactgtcttgtgccgccagcggcttcagcttcagcgacttttggatgagctgggtccgacaggcccctggcaaaggacttgaatgggtcgccacaatcagccaggccggcagcgagaaggactacgtggactctgtgaagggcagattcaccatcagccgggacaacgccaagaagtccctgtacctccagatgaacagcctgagagccgaggacaccgccgtgtactattgtgcctctggcgtgtacagcttcgactacagaggccagggcaccctggtcacagtctcttctggtaccggcggaggcggatctggcggcggaggtagcggtggcggaggatctgaattcgacctggtcatgacacagagcccttttagcctggccgtgtccgagggcgagatggtcacaatcaagtgcaagagcagccagagcctgctgagcagcagacaccagaagaactttctggcctggtacagacagaagcccggacagtctcccaagctgctgatctaccacgccagcacaagacagagcggcgtgcccgatagattcatcggctctggcagcggcaccgacttcaccctgacaatctctgatgtgcaggccgaggacctggccgactactattgtctccagcactacacaagcccctacacctttggagccggcaccaagctggaactgaaaagactcgagggacagcctaaggccaatcctaccgtgacactgttccctccaagcagcgaagaactccaggccaacaaggccacacttgtgtgcctgatctccgacttctaccctggggctgtgacagtggcttggaaggccgatggatctcctgtgaaagccggcgtggaaaccaccaagccatccaagcagagcaacaacaaatacgccgccagctcctacctgagcctgacacctgagcagtggaagtcccacagatcctacagctgccaagtgacccacgaaggcagcaccgtggaaaagacagtggcccctacagagtgcagccccatcaagaccgatgtgattacaatggaccccaaggacaactgctccaaggacgccaacgataccctgctgctccagctgaccaacaccagcgcctactacatgtacttgttgctgctgctgaagtccgtggtgtacttcgccatcatcacatgctgcctgctgcggagaaccgccttctgctgcaacggcgagaagtctagggccaagcgatctggatctggagcaacaaacttctcactactcaaacaagcaggtgacgtggaggagaatcccgggcctactagtatggactggatttggcgcatccttttccttgtcggcgctgctaccggcgcgcattccttcgaacaagtgcagctgaaagagtctggccccggactggttcagcctagccaaacactgagcctgacctgtaccgtgtccggctttagcctgaccagctaccacgtgcactgggtccgacaacctccaggcaaaggactggaatggatgggcgtgatgtggagcgacggcgacaccctgtataacagcgccctgaagtcccggctgagcatcagcagagataccagcaagagccaggtgctgctccagatggatagcctccagagcgaggataccgccacctactactgtgccagactccaggtgttcggctaccccggcatcagagactacgtgatggatgcctggggacagggcgcttctgtgacagtctcttctacgcgtgcctctacaaagggaccctccgtgtttcctctggctcccagcagcaagtctacaagcggaggaacagccgctctgggctgcctggtcaaggattactttcccgagcctgtgaccgtgtcctggaatagcggagcactgacaagcggcgtgcacacctttccagccgtgctgcaaagcagcggcctgtactctctgagcagcgtggtcacagtgcctagctctagcctgggcacccagacctacatctgcaatgtgaaccacaagcctagcaacaccaaggtggacaagagagtggaacccaagagctgtgaagtgaaaaccgactccaccgaccacgtgaagcccaaagagacagagaacaccaagcagcccagcaagagctgccacaagcccaaggccatcgtgcacaccgagaaagtgaacatgatgagcctgaccgtgctgggcctgcggatgctgttcgccaaaaccgtggccgtgaacttcctgctgaccgccaagctgttcttcctc

SEQ ID NO: 9539 - DNA, 2319 bp, Artificial Sequence
  Synthetic Polynucloetide
atggccttaccagtgaccgccttgctcctgccgctggccttgctgctccacgccgccaggccggaagtgcagctggttgaatctggcggaggactggttcagcctggcggatctctgagactgtcttgtgccgccagcggcttcagcttcagcgacttttggatgagctgggtccgacaggcccctggcaaaggacttgaatgggtcgccacaatcagccaggccggcagcgagaaggactacgtggactctgtgaagggcagattcaccatcagccgggacaacgccaagaagtccctgtacctccagatgaacagcctgagagccgaggacaccgccgtgtactattgtgcctctggcgtgtacagcttcgactacagaggccagggcaccctggtcacagtctcttctggtaccggcggaggcggatctggcggcggaggtagcggtggcggaggatctgaattcgacctggtcatgacacagagcccttttagcctggccgtgtccgagggcgagatggtcacaatcaagtgcaagagcagccagagcctgctgagcagcagacaccagaagaactttctggcctggtacagacagaagcccggacagtctcccaagctgctgatctaccacgccagcacaagacagagcggcgtgcccgatagattcatcggctctggcagcggcaccgacttcaccctgacaatctctgatgtgcaggccgaggacctggccgactactattgtctccagcactacacaagcccctacacctttggagccggcaccaagctggaactgaaaagactcgagggacagcctaaggccaatcctaccgtgacactgttccctccaagcagcgaagaactccaggccaacaaggccacacttgtgtgcctgatctccgacttctaccctggggctgtgacagtggcttggaaggccgatggatctcctgtgaaagccggcgtggaaaccaccaagccatccaagcagagcaacaacaaatacgccgccagctcctacctgagcctgacacctgagcagtggaagtcccacagatcctacagctgccaagtgacccacgaaggcagcaccgtggaaaagacagtggcccctacagagtgcagcggcagagccgattgcggctttaccagcgagagctaccagcagggcgtgctgagcgccaccatcctgtacgagatcctgctgggcaaggccaccctgtacgccgtgctggtgtctgccctggtgctgatggctatggtcaagcggaaggacagccggggacgcgccaagagaagcggatctggcgtgaagcagaccctgaatttcgacctgctgaagctggctggcgacgtggaatccaacccaggccctactagtatggactggatttggcgcatccttttccttgtcggcgctgctaccggcgcgcattccttcgaacaagtgcagctgaaagagtctggccccggactggttcagcctagccaaacactgagcctgacctgtaccgtgtccggctttagcctgaccagctaccacgtgcactgggtccgacaacctccaggcaaaggactggaatggatgggcgtgatgtggagcgacggcgacaccctgtataacagcgccctgaagtcccggctgagcatcagcagagataccagcaagagccaggtgctgctccagatggatagcctccagagcgaggataccgccacctactactgtgccagactccaggtgttcggctaccccggcatcagagactacgtgatggatgcctggggacagggcgcttctgtgacagtctcttctacgcgtgcctctacaaagggaccctccgtgtttcctctggctcccagcagcaagtctacaagcggaggaacagccgctctgggctgcctggtcaaggattactttcccgagcctgtgaccgtgtcctggaatagcggagcactgacaagcggcgtgcacacctttccagccgtgctgcaaagcagcggcctgtactctctgagcagcgtggtcacagtgcctagctctagcctgggcacccagacctacatctgcaatgtgaaccacaagcctagcaacaccaaggtggacaagagagtggaacccaagagctgtatccccgaggacacattcttcccaagccccgagagcagctgcgacgtgaagctggtggaaaagagcttcgagacagacaccaacctgaacttccagaacctgagcgtgatcggcttcagaatcctgctgctgaaagtggccggctttaacctgctgatgaccctgcggctgtggtccagc

SEQ ID NO: 9540 - DNA, 2721 bp, Artificial Sequence
  Synthetic Polynucloetide
atggccttaccagtgaccgccttgctcctgccgctggccttgctgctccacgccgccaggccggaagtgcagctggttgaatctggcggaggactggttcagcctggcggatctctgagactgtcttgtgccgccagcggcttcagcttcagcgacttttggatgagctgggtccgacaggcccctggcaaaggacttgaatgggtcgccacaatcagccaggccggcagcgagaaggactacgtggactctgtgaagggcagattcaccatcagccgggacaacgccaagaagtccctgtacctccagatgaacagcctgagagccgaggacaccgccgtgtactattgtgcctctggcgtgtacagcttcgactacagaggccagggcaccctggtcacagtctcttctggtaccggcggaggcggatctggcggcggaggtagcggtggcggaggatctgaattcgacctggtcatgacacagagcccttttagcctggccgtgtccgagggcgagatggtcacaatcaagtgcaagagcagccagagcctgctgagcagcagacaccagaagaactttctggcctggtacagacagaagcccggacagtctcccaagctgctgatctaccacgccagcacaagacagagcggcgtgcccgatagattcatcggctctggcagcggcaccgacttcaccctgacaatctctgatgtgcaggccgaggacctggccgactactattgtctccagcactacacaagcccctacacctttggagccggcaccaagctggaactgaaaagactcgagatccagaaccctgatcctgccgtgtaccagctgcgggatagcaagagcagcgacaagagcgtgtgtctgttcaccgacttcgacagccagaccaacgtgtcccagagcaaggactccgacgtgtacatcaccgataagtgcgtgctggacatgcggagcatggacttcaagagcaactccgccgtggcctggtccaacaagtccgatttcgcctgcgccaacgccttcaacaacagcattatccccgaggacacattcttcccaagccccgagagcagctgcgacgtgaagctggtggaaaagagcttcgagacagacaccaacctgaacttccagaacctgagcgtgatcggcttcagaatcctgctgctgaaagtggccggctttaacctgctgatgaccctgcggctgtggtccagccgcgccaagagaagcggatctggcgtgaagcagaccctgaatttcgacctgctgaagctggctggcgacgtggaatccaacccaggccctactagtatggactggatttggcgcatccttttccttgtcggcgctgctaccggcgcgcattccgggccccagctccagctgcaagagtctggacctggcctggtcaagcctagcgagacactgagcctgacctgtaccgtgtccggcgatagcatcagcagcggcgattactactggggctggatcagacagcctcctggcaaaggactggaatggatcggccacatctactacagcggcgtgacctactacaaccccagcctgaagtccagagtgaccatcagcgtggacaccagccggaaccagttctccctgaagctgtctagcgtgacagccgccgataccgccgtgtactactgcaccagagaggacagcagcaactggcggagtagaggccagggaacactggtcacagttagctctggatccggcggaggcggaagtggaggcggaggatctggcggcggaggctctttcgaacaagtgcagctgaaagagtctggccccggactggttcagcctagccaaacactgagcctgacctgtaccgtgtccggctttagcctgaccagctaccacgtgcactgggtccgacaacctccaggcaaaggactggaatggatgggcgtgatgtggagcgacggcgacaccctgtataacagcgccctgaagtcccggctgagcatcagcagagataccagcaagagccaggtgctgctccagatggatagcctccagagcgaggataccgccacctactactgtgccagactccaggtgttcggctaccccggcatcagagactacgtgatggatgcctggggacagggcgcttctgtgacagtctcttctacgcgtgaggacctgaagaacgtgttcccacctgaggtggccgtgttcgagcctagcgaggccgagatcagccacacccagaaagccaccctcgtgtgcctggctaccggcttctaccccgaccatgtggaactgtcttggtgggtcaacggcaaagaggtgcacagcggcgtgtgtaccgacccccagccactgaaagaacagcccgccctgaacgacagccggtactgcctgagcagcagactgagagtgtccgccaccttctggcagaacccccggaaccacttcagatgccaggtgcagttctacggcctgagcgagaacgacgagtggacccaggacagagccaagcccgtgacccagatcgtgtctgccgaagcctggggcagagccgattgcggctttaccagcgagagctaccagcagggcgtgctgagcgccaccatcctgtacgagatcctgctgggcaaggccaccctgtacgccgtgctggtgtctgccctggtgctgatggctatggtcaagcggaaggacagccgggga

SEQ ID NO: 9541 - DNA, 3297 bp, Artificial Sequence
  Synthetic Polynucloetide
atggccttaccagtgaccgccttgctcctgccgctggccttgctgctccacgccgccaggccggaagtgcagctggttgaatctggcggaggactggttcagcctggcggatctctgagactgtcttgtgccgccagcggcttcagcttcagcgacttttggatgagctgggtccgacaggcccctggcaaaggacttgaatgggtcgccacaatcagccaggccggcagcgagaaggactacgtggactctgtgaagggcagattcaccatcagccgggacaacgccaagaagtccctgtacctccagatgaacagcctgagagccgaggacaccgccgtgtactattgtgcctctggcgtgtacagcttcgactacagaggccagggcaccctggtcacagtctcttctggtaccggcggaggcggatctggcggcggaggtagcggtggcggaggatctgaattcgacctggtcatgacacagagcccttttagcctggccgtgtccgagggcgagatggtcacaatcaagtgcaagagcagccagagcctgctgagcagcagacaccagaagaactttctggcctggtacagacagaagcccggacagtctcccaagctgctgatctaccacgccagcacaagacagagcggcgtgcccgatagattcatcggctctggcagcggcaccgacttcaccctgacaatctctgatgtgcaggccgaggacctggccgactactattgtctccagcactacacaagcccctacacctttggagccggcaccaagctggaactgaaaagactcgaggacctgaagaacgtgttcccacctgaggtggccgtgttcgagcctagcgaggccgagatcagccacacccagaaagccaccctcgtgtgcctggctaccggcttctaccccgaccatgtggaactgtcttggtgggtcaacggcaaagaggtgcacagcggcgtgtctaccgacccccagccactgaaagaacagcccgccctgaacgacagccggtactgcctgagcagcagactgagagtgtccgccaccttctggcagaacccccggaaccacttcagatgccaggtgcagttctacggcctgagcgagaacgacgagtggacccaggacagagccaagcccgtgacccagatcgtgtctgccgaagcctggggcagagccgattgcggatcccagagcttcggcctgctggaccccaagctgtgctacctgctggatggcatcctgttcatctacggcgtgatcctgaccgccctgttcctgagagtgaagttcagcagaagcgccgacgcccctgcctaccagcagggacagaaccaactgtacaacgagctgaacctgggcagacgggaagagtacgacgtgctggacaagcggagaggcagggaccctgagatgggcggaaagccccagcggagaaagaacccccaggaaggactgtataacgaactccagaaagacaagatggccgaagcctacagcgagatcggcatgaagggcgagcggagaagaggcaagggccacgatggcctgtaccagggcctgagcaccgccaccaaggacacctatgacgccctgcacatgcaggccctgcctccaagaagggccaagcgatctggatctggagcaacaaacttctcactactcaaacaagcaggtgacgtggaggagaatcccgggcctactagtatggactggatttggcgcatccttttccttgtcggcgctgctaccggcgcgcattccgggccccagctccagctgcaagagtctggacctggcctggtcaagcctagcgagacactgagcctgacctgtaccgtgtccggcgatagcatcagcagcggcgattactactggggctggatcagacagcctcctggcaaaggactggaatggatcggccacatctactacagcggcgtgacctactacaaccccagcctgaagtccagagtgaccatcagcgtggacaccagccggaaccagttctccctgaagctgtctagcgtgacagccgccgataccgccgtgtactactgcaccagagaggacagcagcaactggcggagtagaggccagggaacactggtcacagttagctctggatccggcggaggcggaagtggaggcggaggatctggcggcggaggctctttcgaacaagtgcagctgaaagagtctggccccggactggttcagcctagccaaacactgagcctgacctgtaccgtgtccggctttagcctgaccagctaccacgtgcactgggtccgacaacctccaggcaaaggactggaatggatgggcgtgatgtggagcgacggcgacaccctgtataacagcgccctgaagtcccggctgagcatcagcagagataccagcaagagccaggtgctgctccagatggatagcctccagagcgaggataccgccacctactactgtgccagactccaggtgttcggctaccccggcatcagagactacgtgatggatgcctggggacagggcgcttctgtgacagtctcttctacgcgtatccagaaccctgatcctgccgtgtaccagctgcgggatagcaagagcagcgacaagagcgtgtgtctgttcaccgacttcgacagccagaccaacgtgtcccagagcaaggactccgacgtgtacatcaccgataagaccgtgctggacatgcggagcatggacttcaagagcaactccgccgtggcctggtccaacaagtccgatttcgcctgcgccaacgccttcaacaacagcattatccccgaggacacattcttcccaagccccgagagcagctgcggtacccagagttttgggttgttggaccctaaattgtgctatctgttggacggaatcctgttcatttacggagtgatcctgaccgcattgttcctgcgggttaagttttccagatccgcagacgcacccgcttaccaacaagggcagaaccaactctacaatgaacttaatttggggcggagggaagagtacgacgttctggacaaaaggaggggacgagatcccgagatgggcggaaagcctcagcgaaggaagaatccgcaagaggggctttataacgaactccagaaagataaaatggcagaagcctatagtgagattgggatgaagggagaaaggaggaggggtaaaggtcacgatgggttgtaccaaggattgagcacagccactaaagatacctatgatgcgctccacatgcaggccctgccgccaaga

SEQ ID NO: 9542 - DNA, 2787 bp, Artificial Sequence
  Synthetic Polynucloetide
atggccttaccagtgaccgccttgctcctgccgctggccttgctgctccacgccgccaggccggaagtgcagctggttgaatctggcggaggactggttcagcctggcggatctctgagactgtcttgtgccgccagcggcttcagcttcagcgacttttggatgagctgggtccgacaggcccctggcaaaggacttgaatgggtcgccacaatcagccaggccggcagcgagaaggactacgtggactctgtgaagggcagattcaccatcagccgggacaacgccaagaagtccctgtacctccagatgaacagcctgagagccgaggacaccgccgtgtactattgtgcctctggcgtgtacagcttcgactacagaggccagggcaccctggtcacagtctcttctggtaccggcggaggcggatctggcggcggaggtagcggtggcggaggatctgaattcgacctggtcatgacacagagcccttttagcctggccgtgtccgagggcgagatggtcacaatcaagtgcaagagcagccagagcctgctgagcagcagacaccagaagaactttctggcctggtacagacagaagcccggacagtctcccaagctgctgatctaccacgccagcacaagacagagcggcgtgcccgatagattcatcggctctggcagcggcaccgacttcaccctgacaatctctgatgtgcaggccgaggacctggccgactactattgtctccagcactacacaagcccctacacctttggagccggcaccaagctggaactgaaaagactcgagggacagcctaaggccaatcctaccgtgacactgttccctccaagcagcgaagaactccaggccaacaaggccacacttgtgtgcctgatctccgacttctaccctggggctgtgacagtggcttggaaggccgatggatctcctgtgaaagccggcgtggaaaccaccaagccatccaagcagagcaacaacaaatacgccgccagctcctacctgagcctgacacctgagcagtggaagtcccacagatcctacagctgccaagtgacccacgaaggcagcaccgtggaaaagacagtggcccctacagagtgcagccccatcaagaccgatgtgattacaatggaccccaaggacaactgctccaaggacgccaacgataccctgctgctccagctgaccaacaccagcgcctactacatgtacttgttgctgctgctgaagtccgtggtgtacttcgccatcatcacatgctgcctgctgcggagaaccgccttctgctgcaacggcgagaagtctagggccaagcgatctggatctggagcaacaaacttctcactactcaaacaagcaggtgacgtggaggagaatcccgggcctactagtatggactggatttggcgcatccttttccttgtcggcgctgctaccggcgcgcattccgggccccagctccagctgcaagagtctggacctggcctggtcaagcctagcgagacactgagcctgacctgtaccgtgtccggcgatagcatcagcagcggcgattactactggggctggatcagacagcctcctggcaaaggactggaatggatcggccacatctactacagcggcgtgacctactacaaccccagcctgaagtccagagtgaccatcagcgtggacaccagccggaaccagttctccctgaagctgtctagcgtgacagccgccgataccgccgtgtactactgcaccagagaggacagcagcaactggcggagtagaggccagggaacactggtcacagttagctctggatccggcggaggcggaagtggaggcggaggatctggcggcggaggctctttcgaacaagtgcagctgaaagagtctggccccggactggttcagcctagccaaacactgagcctgacctgtaccgtgtccggctttagcctgaccagctaccacgtgcactgggtccgacaacctccaggcaaaggactggaatggatgggcgtgatgtggagcgacggcgacaccctgtataacagcgccctgaagtcccggctgagcatcagcagagataccagcaagagccaggtgctgctccagatggatagcctccagagcgaggataccgccacctactactgtgccagactccaggtgttcggctaccccggcatcagagactacgtgatggatgcctggggacagggcgcttctgtgacagtctcttctacgcgtgcctctacaaagggaccctccgtgtttcctctggctcccagcagcaagtctacaagcggaggaacagccgctctgggctgcctggtcaaggattactttcccgagcctgtgaccgtgtcctggaatagcggagcactgacaagcggcgtgcacacctttccagccgtgctgcaaagcagcggcctgtactctctgagcagcgtggtcacagtgcctagctctagcctgggcacccagacctacatctgcaatgtgaaccacaagcctagcaacaccaaggtggacaagagagtggaacccaagagctgtgaagtgaaaaccgactccaccgaccacgtgaagcccaaagagacagagaacaccaagcagcccagcaagagctgccacaagcccaaggccatcgtgcacaccgagaaagtgaacatgatgagcctgaccgtgctgggcctgcggatgctgttcgccaaaaccgtggccgtgaacttcctgctgaccgccaagctgttcttcctc

SEQ ID NO: 9543 - DNA, 2730 bp, Artificial Sequence
  Synthetic Polynucloetide
atggccttaccagtgaccgccttgctcctgccgctggccttgctgctccacgccgccaggccggaagtgcagctggttgaatctggcggaggactggttcagcctggcggatctctgagactgtcttgtgccgccagcggcttcagcttcagcgacttttggatgagctgggtccgacaggcccctggcaaaggacttgaatgggtcgccacaatcagccaggccggcagcgagaaggactacgtggactctgtgaagggcagattcaccatcagccgggacaacgccaagaagtccctgtacctccagatgaacagcctgagagccgaggacaccgccgtgtactattgtgcctctggcgtgtacagcttcgactacagaggccagggcaccctggtcacagtctcttctggtaccggcggaggcggatctggcggcggaggtagcggtggcggaggatctgaattcgacctggtcatgacacagagcccttttagcctggccgtgtccgagggcgagatggtcacaatcaagtgcaagagcagccagagcctgctgagcagcagacaccagaagaactttctggcctggtacagacagaagcccggacagtctcccaagctgctgatctaccacgccagcacaagacagagcggcgtgcccgatagattcatcggctctggcagcggcaccgacttcaccctgacaatctctgatgtgcaggccgaggacctggccgactactattgtctccagcactacacaagcccctacacctttggagccggcaccaagctggaactgaaaagactcgagggacagcctaaggccaatcctaccgtgacactgttccctccaagcagcgaagaactccaggccaacaaggccacacttgtgtgcctgatctccgacttctaccctggggctgtgacagtggcttggaaggccgatggatctcctgtgaaagccggcgtggaaaccaccaagccatccaagcagagcaacaacaaatacgccgccagctcctacctgagcctgacacctgagcagtggaagtcccacagatcctacagctgccaagtgacccacgaaggcagcaccgtggaaaagacagtggcccctacagagtgcagcggcagagccgattgcggctttaccagcgagagctaccagcagggcgtgctgagcgccaccatcctgtacgagatcctgctgggcaaggccaccctgtacgccgtgctggtgtctgccctggtgctgatggctatggtcaagcggaaggacagccggggacgcgccaagagaagcggatctggcgtgaagcagaccctgaatttcgacctgctgaagctggctggcgacgtggaatccaacccaggccctactagtatggactggatttggcgcatccttttccttgtcggcgctgctaccggcgcgcattccgggccccagctccagctgcaagagtctggacctggcctggtcaagcctagcgagacactgagcctgacctgtaccgtgtccggcgatagcatcagcagcggcgattactactggggctggatcagacagcctcctggcaaaggactggaatggatcggccacatctactacagcggcgtgacctactacaaccccagcctgaagtccagagtgaccatcagcgtggacaccagccggaaccagttctccctgaagctgtctagcgtgacagccgccgataccgccgtgtactactgcaccagagaggacagcagcaactggcggagtagaggccagggaacactggtcacagttagctctggatccggcggaggcggaagtggaggcggaggatctggcggcggaggctctttcgaacaagtgcagctgaaagagtctggccccggactggttcagcctagccaaacactgagcctgacctgtaccgtgtccggctttagcctgaccagctaccacgtgcactgggtccgacaacctccaggcaaaggactggaatggatgggcgtgatgtggagcgacggcgacaccctgtataacagcgccctgaagtcccggctgagcatcagcagagataccagcaagagccaggtgctgctccagatggatagcctccagagcgaggataccgccacctactactgtgccagactccaggtgttcggctaccccggcatcagagactacgtgatggatgcctggggacagggcgcttctgtgacagtctcttctacgcgtgcctctacaaagggaccctccgtgtttcctctggctcccagcagcaagtctacaagcggaggaacagccgctctgggctgcctggtcaaggattactttcccgagcctgtgaccgtgtcctggaatagcggagcactgacaagcggcgtgcacacctttccagccgtgctgcaaagcagcggcctgtactctctgagcagcgtggtcacagtgcctagctctagcctgggcacccagacctacatctgcaatgtgaaccacaagcctagcaacaccaaggtggacaagagagtggaacccaagagctgtatccccgaggacacattcttcccaagccccgagagcagctgcgacgtgaagctggtggaaaagagcttcgagacagacaccaacctgaacttccagaacctgagcgtgatcggcttcagaatcctgctgctgaaagtggccggctttaacctgctgatgaccctgcggctgtggtccagc

SEQ ID NO: 9544 - DNA, 2301 bp, Artificial Sequence
  Synthetic Polynucloetide
atggccttaccagtgaccgccttgctcctgccgctggccttgctgctccacgccgccaggccggaagtgcaggttttggagtctggcggaggactggttcagcctggcggatctctgagactgtcttgtgccgccagcggcttcaccttcagcaactttgccatgagctgggtccgacaggcccctggcaaaggacttgaatgggtgtccacaatcagcggcagcgccggcacaacagattacgccgattctgtgaagggcagattcaccatcagccgggacaacagcaagaaaaccctgtacctccagatgaacagcctgcgcgtggaagataccgccgtgtactactgtgccgatggcagaggccccttcttcgattatcgcggccagggcacactggtcaccgtttcttctggtaccggcggaggcggatctggcggcggaggtagcggtggcggaggatctgaattcgacctggtcatgacacagagcccttttagcctggccgtgtccgagggcgagatggtcacaatcaagtgcaagagcagccagagcctgctgagcagcagacaccagaagaactttctggcctggtacagacagaagcccggacagtctcccaagctgctgatctaccacgccagcacaagacagagcggcgtgcccgatagattcatcggctctggcagcggcaccgacttcaccctgacaatctctgatgtgcaggccgaggacctggccgactactattgtctccagcactacacaagcccctacacctttggagccggcaccaagctggaactgaaaagactcgaggacctgaagaacgtgttcccacctgaggtggccgtgttcgagcctagcgaggccgagatcagccacacccagaaagccaccctcgtgtgcctggctaccggcttctaccccgaccatgtggaactgtcttggtgggtcaacggcaaagaggtgcacagcggcgtgtgtaccgacccccagccactgaaagaacagcccgccctgaacgacagccggtactgcctgagcagcagactgagagtgtccgccaccttctggcagaacccccggaaccacttcagatgccaggtgcagttctacggcctgagcgagaacgacgagtggacccaggacagagccaagcccgtgacccagatcgtgtctgccgaagcctggggcagagccgattgcggctttaccagcgagagctaccagcagggcgtgctgagcgccaccatcctgtacgagatcctgctgggcaaggccaccctgtacgccgtgctggtgtctgccctggtgctgatggctatggtcaagcggaaggacagccggggaagggccaagcgatctggatctggagcaacaaacttctcactactcaaacaagcaggtgacgtggaggagaatcccgggcctactagtatggactggatttggcgcatccttttccttgtcggcgctgctaccggcgcgcattccttcgaacaagtgcagctgaaagagtctggccccggactggttcagcctagccaaacactgagcctgacctgtaccgtgtccggctttagcctgaccagctaccacgtgcactgggtccgacaacctccaggcaaaggactggaatggatgggcgtgatgtggagcgacggcgacaccctgtataacagcgccctgaagtcccggctgagcatcagcagagataccagcaagagccaggtgctgctccagatggatagcctccagagcgaggataccgccacctactactgtgccagactccaggtgttcggctaccccggcatcagagactacgtgatggatgcctggggacagggcgcttctgtgacagtctcttctacgcgtatccagaaccctgatcctgccgtgtaccagctgcgggatagcaagagcagcgacaagagcgtgtgtctgttcaccgacttcgacagccagaccaacgtgtcccagagcaaggactccgacgtgtacatcaccgataagtgcgtgctggacatgcggagcatggacttcaagagcaactccgccgtggcctggtccaacaagtccgatttcgcctgcgccaacgccttcaacaacagcattatccccgaggacacattcttcccaagccccgagagcagctgcgacgtgaagctggtggaaaagagcttcgagacagacaccaacctgaacttccagaacctgagcgtgatcggcttcagaatcctgctgctgaaagtggccggctttaacctgctgatgaccctgcggctgtggtccagc

SEQ ID NO: 9545 - DNA, 2304 bp, Artificial Sequence
  Synthetic Polynucloetide
atggccttaccagtgaccgccttgctcctgccgctggccttgctgctccacgccgccaggccggacctggtcatgacacagagcccttttagcctggccgtgtccgagggcgagatggtcacaatcaagtgcaagagcagccagagcctgctgagcagcagacaccagaagaactttctggcctggtacagacagaagcccggacagtctcccaagctgctgatctaccacgccagcacaagacagagcggcgtgcccgatagattcatcggctctggcagcggcaccgacttcaccctgacaatctctgatgtgcaggccgaggacctggccgactactattgtctccagcactacacaagcccctacacctttggagccggcaccaagctggaactgaaaagactcgaggacctgaagaacgtgttcccacctgaggtggccgtgttcgagcctagcgaggccgagatcagccacacccagaaagccaccctcgtgtgcctggctaccggcttctaccccgaccatgtggaactgtcttggtgggtcaacggcaaagaggtgcacagcggcgtgtgtaccgacccccagccactgaaagaacagcccgccctgaacgacagccggtactgcctgagcagcagactgagagtgtccgccaccttctggcagaacccccggaaccacttcagatgccaggtgcagttctacggcctgagcgagaacgacgagtggacccaggacagagccaagcccgtgacccagatcgtgtctgccgaagcctggggcagagccgattgcggctttaccagcgagagctaccagcagggcgtgctgagcgccaccatcctgtacgagatcctgctgggcaaggccaccctgtacgccgtgctggtgtctgccctggtgctgatggctatggtcaagcggaaggacagccggggaagggccaagcgatctggatctggagcaacaaacttctcactactcaaacaagcaggtgacgtggaggagaatcccgggcctactagtatggactggatttggcgcatccttttccttgtcggcgctgctaccggcgcccattccgggcccgaagtgcagctggttgaatctggcggaggactggttcaggctggcggatctctgagactgtcttgtgccgccagcggcagaacctttagcatgggctggtttagacaggcccctggcaaagagagagagttcgtcgccgccatcacatactctggcggcagcccttactacgccgactctgtgaagggcagattcaccatcagccgggacaacgccaagaacaccgtgtacctccagatgaacagcctgaagcctgaggacaccgccgtgtactactgcgccgccaatccaacatacggcagcgactggaacgccgagaattggggccagggaacccaagtgacagtgtctagcggatccggcggcggaggatctggcggaggcggatctgggggcggaggctctttcgaacaagtgcagctgaaagagtctggccccggactggttcagcctagccaaacactgagcctgacctgtaccgtgtccggctttagcctgaccagctaccacgtgcactgggtccgacaacctccaggcaaaggactggaatggatgggcgtgatgtggagcgacggcgacaccctgtataacagcgccctgaagtcccggctgagcatcagcagagataccagcaagagccaggtgctgctccagatggatagcctccagagcgaggataccgccacctactactgtgccagactccaggtgttcggctaccccggcatcagagactacgtgatggatgcctggggacagggcgcttctgtgacagtctcttctacgcgtatccagaaccctgatcctgccgtgtaccagctgcgggatagcaagagcagcgacaagagcgtgtgtctgttcaccgacttcgacagccagaccaacgtgtcccagagcaaggactccgacgtgtacatcaccgataagtgcgtgctggacatgcggagcatggacttcaagagcaactccgccgtggcctggtccaacaagtccgatttcgcctgcgccaacgccttcaacaacagcattatccccgaggacacattcttcccaagccccgagagcagctgcgacgtgaagctggtggaaaagagcttcgagacagacaccaacctgaacttccagaacctgagcgtgatcggcttcagaatcctgctgctgaaagtggccggctttaacctgctgatgaccctgcggctgtggtccagc

SEQ ID NO: 9546 - DNA, 2685 bp, Artificial Sequence
  Synthetic Polynucloetide
atggccttaccagtgaccgccttgctcctgccgctggccttgctgctccacgccgccaggccggacctggtcatgacacagagcccttttagcctggccgtgtccgagggcgagatggtcacaatcaagtgcaagagcagccagagcctgctgagcagcagacaccagaagaactttctggcctggtacagacagaagcccggacagtctcccaagctgctgatctaccacgccagcacaagacagagcggcgtgcccgatagattcatcggctctggcagcggcaccgacttcaccctgacaatctctgatgtgcaggccgaggacctggccgactactattgtctccagcactacacaagcccctacacctttggagccggcaccaagctggaactgaaaagactcgaggacctgaagaacgtgttcccacctgaggtggccgtgttcgagcctagcgaggccgagatcagccacacccagaaagccaccctcgtgtgcctggctaccggcttctaccccgaccatgtggaactgtcttggtgggtcaacggcaaagaggtgcacagcggcgtgtgtaccgacccccagccactgaaagaacagcccgccctgaacgacagccggtactgcctgagcagcagactgagagtgtccgccaccttctggcagaacccccggaaccacttcagatgccaggtgcagttctacggcctgagcgagaacgacgagtggacccaggacagagccaagcccgtgacccagatcgtgtctgccgaagcctggggcagagccgattgcggctttaccagcgagagctaccagcagggcgtgctgagcgccaccatcctgtacgagatcctgctgggcaaggccaccctgtacgccgtgctggtgtctgccctggtgctgatggctatggtcaagcggaaggacagccggggaagggccaagcgatctggatctggagcaacaaacttctcactactcaaacaagcaggtgacgtggaggagaatcccgggcctactagtatggactggatttggcgcatccttttccttgtcggcgctgctaccggcgcccattcccaactgcaactgcaagagtctggccctggcctggtcaagccttctgaaaccctgagcctgacctgtaccgtgtccggcggctctatcagcagcggcgattactactggggctggatcagacagcctccaggcaagggactcgaatggatcggcagcatcagctacagcggctccacctactacaacccaagcctgaagtccagagtgaccatcagcgtggacaccagcagaaaccagttctccctgaagctgagcagcgtgacagccgccgatacagccgtgtattattgcaccagagaggacagcagcaactggcggagtagaggacagggcacactggtcacagtgtcctcttctggaggcggtggaagcggtggaggaggatctgaagtgcagctggttgaatctggcggaggactggttcaggctggcggatctctgagactgtcttgtgccgccagcggcagaacctttagcatgggctggtttagacaggcccctggcaaagagagagagttcgtcgccgccatcacatactctggcggcagcccttactacgccgactctgtgaagggcagattcaccatcagccgggacaacgccaagaacaccgtgtacctccagatgaacagcctgaagcctgaggacaccgccgtgtactactgcgccgccaatccaacatacggcagcgactggaacgccgagaattggggccagggaacccaagtgacagtgtctagcggatccggcggcggaggatctggcggaggcggatctgggggcggaggctctttcgaacaagtgcagctgaaagagtctggccccggactggttcagcctagccaaacactgagcctgacctgtaccgtgtccggctttagcctgaccagctaccacgtgcactgggtccgacaacctccaggcaaaggactggaatggatgggcgtgatgtggagcgacggcgacaccctgtataacagcgccctgaagtcccggctgagcatcagcagagataccagcaagagccaggtgctgctccagatggatagcctccagagcgaggataccgccacctactactgtgccagactccaggtgttcggctaccccggcatcagagactacgtgatggatgcctggggacagggcgcttctgtgacagtctcttctacgcgtatccagaaccctgatcctgccgtgtaccagctgcgggatagcaagagcagcgacaagagcgtgtgtctgttcaccgacttcgacagccagaccaacgtgtcccagagcaaggactccgacgtgtacatcaccgataagtgcgtgctggacatgcggagcatggacttcaagagcaactccgccgtggcctggtccaacaagtccgatttcgcctgcgccaacgccttcaacaacagcattatccccgaggacacattcttcccaagccccgagagcagctgcgacgtgaagctggtggaaaagagcttcgagacagacaccaacctgaacttccagaacctgagcgtgatcggcttcagaatcctgctgctgaaagtggccggctttaacctgctgatgaccctgcggctgtggtccagc

SEQ ID NO: 9547 - DNA, 2712 bp, Artificial Sequence
  Synthetic Polynucloetide
atggccttaccagtgaccgccttgctcctgccgctggccttgctgctccacgccgccaggccggaagtgcaggttttggagtctggcggaggactggttcagcctggcggatctctgagactgtcttgtgccgccagcggcttcaccttcagcaactttgccatgagctgggtccgacaggcccctggcaaaggacttgaatgggtgtccacaatcagcggcagcgccggcacaacagattacgccgattctgtgaagggcagattcaccatcagccgggacaacagcaagaaaaccctgtacctccagatgaacagcctgcgcgtggaagataccgccgtgtactactgtgccgatggcagaggccccttcttcgattatcgcggccagggcacactggtcaccgtttcttctggtaccggcggaggcggatctggcggcggaggtagcggtggcggaggatctgaattcgacctggtcatgacacagagcccttttagcctggccgtgtccgagggcgagatggtcacaatcaagtgcaagagcagccagagcctgctgagcagcagacaccagaagaactttctggcctggtacagacagaagcccggacagtctcccaagctgctgatctaccacgccagcacaagacagagcggcgtgcccgatagattcatcggctctggcagcggcaccgacttcaccctgacaatctctgatgtgcaggccgaggacctggccgactactattgtctccagcactacacaagcccctacacctttggagccggcaccaagctggaactgaaaagactcgaggacctgaagaacgtgttcccacctgaggtggccgtgttcgagcctagcgaggccgagatcagccacacccagaaagccaccctcgtgtgcctggctaccggcttctaccccgaccatgtggaactgtcttggtgggtcaacggcaaagaggtgcacagcggcgtgtgtaccgacccccagccactgaaagaacagcccgccctgaacgacagccggtactgcctgagcagcagactgagagtgtccgccaccttctggcagaacccccggaaccacttcagatgccaggtgcagttctacggcctgagcgagaacgacgagtggacccaggacagagccaagcccgtgacccagatcgtgtctgccgaagcctggggcagagccgattgcggctttaccagcgagagctaccagcagggcgtgctgagcgccaccatcctgtacgagatcctgctgggcaaggccaccctgtacgccgtgctggtgtctgccctggtgctgatggctatggtcaagcggaaggacagccggggaagggccaagcgatctggatctggagcaacaaacttctcactactcaaacaagcaggtgacgtggaggagaatcccgggcctactagtatggactggatttggcgcatccttttccttgtcggcgctgctaccggcgcccattccgggcccgaagtgcagctggttgaatctggcggaggactggttcaggctggcggatctctgagactgtcttgtgccgccagcggcagaacctttagcatgggctggtttagacaggcccctggcaaagagagagagttcgtcgccgccatcacatacagcggcggcagcccttactacgcctcttctgtcagaggccggttcaccatcagccgggacaacgccaagaacaccgtgtacctccagatgaacagcctgaagccagaggacaccgccgtgtactactgtgccgccaatccaacctacggcagcgactggaatgccgagaattggggccagggcacccaagtgacagtgtctagtggatccggcggcggaggatctggcggaggcggatctgggggcggaggctctttcgaacaagtgcagctgaaagagtctggccccggactggttcagcctagccaaacactgagcctgacctgtaccgtgtccggctttagcctgaccagctaccacgtgcactgggtccgacaacctccaggcaaaggactggaatggatgggcgtgatgtggagcgacggcgacaccctgtataacagcgccctgaagtcccggctgagcatcagcagagataccagcaagagccaggtgctgctccagatggatagcctccagagcgaggataccgccacctactactgtgccagactccaggtgttcggctaccccggcatcagagactacgtgatggatgcctggggacagggcgcttctgtgacagtctcttctacgcgtatccagaaccctgatcctgccgtgtaccagctgcgggatagcaagagcagcgacaagagcgtgtgtctgttcaccgacttcgacagccagaccaacgtgtcccagagcaaggactccgacgtgtacatcaccgataagtgcgtgctggacatgcggagcatggacttcaagagcaactccgccgtggcctggtccaacaagtccgatttcgcctgcgccaacgccttcaacaacagcattatccccgaggacacattcttcccaagccccgagagcagctgcgacgtgaagctggtggaaaagagcttcgagacagacaccaacctgaacttccagaacctgagcgtgatcggcttcagaatcctgctgctgaaagtggccggctttaacctgctgatgaccctgcggctgtggtccagc

SEQ ID NO: 9548 - DNA, 2211 bp, Artificial Sequence
  Synthetic Polynucloetide
atggccttaccagtgaccgccttgctcctgccgctggccttgctgctccacgccgccaggccggacatccagctgactcagagccctagctttctgagcgccagcgtgggcgacagagtgaccattacatgtagagccagccaggacatcagcagctacctggcctggtatcagcagaagcctggcaacgcccctaaactgctgatctacgccgccagcctgctgcaatctggcgtgccaagcagattcagcgcctttggcagcggcaccgagttcaccctgacaatatctagcctccagccagaggacttcgccacctactactgccagcacctgaagtcttaccctctgttcaccttcggacccggcaccaaggtggacatcaaaagaggcggaggcggaagtggaggcggaggatctggcggcggaggctctgaagttcagctggttgagtctggcggcagagtcgttagacctggcggaagcctgagactgtcttgtgccgccagcggcttcacctttgacgactacggcatgagctgggtccgacagcctcctggaaagggcctcgaatttgtgtccggcctgaactggaacggcgacatcaccgcctttaccgacagcgtgaagggcagattcaccatcagccgggacaacgtgaagtccagcctgtacctccagatgaacagcctgagagccgacgacaccgccttctactactgtgccagagtgcggacctggggcgattacacaacaggcgaggaaatcatcaacagctggtacttcgacctgtggggcagaggcacactggtcacagtctcttctacgcgtgagcagaaactgatctcggaagaggatctggcgaagcccaccacgacgccagcgccgcgaccaccaacaccggcgcccaccatcgcgtcgcagcccctgtccctgcgcccagaggcgtgccggccagcggcggggggcgcagtgcacacgagggggctggacttcgcctgtgacatctacatctgggcgcccttggccgggacttgtggggtccttctcctgtcactggttatcaccctttactgcaaacggggcagaaagaaactcctgtatatattcaaacaaccatttatgagaccagtacaaactactcaagaggaagatggctgtagctgccgatttccagaagaagaagaaggaggatgtgaactgagagtgaagttcagcaggagcgcagacgcccccgcgtaccagcagggccagaaccagctctataacgagctgaatctaggacgaagagaggagtacgatgttttggacaagagacgtggccgggaccctgagatggggggaaagccgagaaggaagaaccctcaggaaggcctgtacaatgaactgcagaaagataagatggcggaggcctacagtgagattgggatgaaaggcgagcgccggaggggcaaggggcacgatggcctttaccagggtctcagtacagccaccaaggacacctacgacgcccttcacatgcaggccctgccccctcgctctagtggctccggcgagggcagaggaagtctactaacctgcggagatgtggaagaaaatcctggcccacatatgaccgagtacaagcccacggtgcgcctcgccacccgcgacgacgtccccagggccgtacgcaccctcgccgccgcgttcgccgactaccccgccacgcgccacaccgtcgatccggaccgccacatcgagcgggtcaccgagctgcaagaactcttcctcacgcgcgtcgggctcgacatcggcaaggtgtgggtcgcggacgacggcgccgcggtggcggtctggaccacgccggagagcgtcgaagcgggggcggtgttcgccgagatcggcccgcgcatggccgagttgagcggttcccggctggccgcgcagcaacagatggaaggcctcctggcgccgcaccggcccaaggagcccgcgtggttcctggccaccgtcggcgtctcgcccgaccaccagggcaagggtctgggcagcgccgtcgtgctccccggagtggaggcggccgagcgcgccggggtgcccgccttcctggagacctccgcgccccgcaacctccccttctacgagcggctcggcttcaccgtcaccgccgacgtcgaggtgcccgaaggaccgcgcacctggtgcatgacccgcaagcccggtgcctga

SEQ ID NO: 9549 - DNA, 2193 bp, Artificial Sequence
  Synthetic Polynucloetide
atggccttaccagtgaccgccttgctcctgccgctggccttgctgctccacgccgccaggccggacatccagctgactcagagccctagctttctgagcgccagcgtgggcgacagagtgaccattacatgtagagccagccaggacatcagcagctacctggcctggtatcagcagaagcctggcaacgcccctaaactgctgatctacgccgccagcctgctgcaatctggcgtgccaagcagattcagcgcctttggcagcggcaccgagttcaccctgacaatatctagcctccagccagaggacttcgccacctactactgccagcacctgaagtcttaccctctgttcaccttcggacccggcaccaaggtggacatcaaaagaggcggaggcggaagtggaggcggaggatctggcggcggaggctctgaagttcagctggttgagtctggcggcagagtcgttagacctggcggaagcctgagactgtcttgtgccgccagcggcttcacctttgacgactacggcatgagctgggtccgacagcctcctggaaagggcctcgaatttgtgtccggcctgaactggaacggcgacatcaccgcctttaccgacagcgtgaagggcagattcaccatcagccgggacaacgtgaagtccagcctgtacctccagatgaacagcctgagagccgacgacaccgccttctactactgtgccagagtgcggacctggggcgattacacaacaggcgaggaaatcatcaacagctggtacttcgacctgtggggcagaggcacactggtcacagtctcttctacgcgtgagcagaaactgatctcggaagaggatctgaaaattgaagttatgtatcctcctccttacctagacaatgagaagagcaatggaaccattatccatgtgaaagggaaacacctttgtccaagtcccctatttcccggaccttctaagcccttttgggtgctggtggtggttgggggagtcctggcttgctatagcttgctagtaacagtggcctttattattttctgggtgaggagtaagaggagcaggctcctgcacagtgactacatgaacatgactccacgccgccccggacccacccgcaagcattaccagccctatgccccaccacgcgacttcgcagcctatcgctccagagtgaagttcagcaggagcgcagacgcccccgcgtaccagcagggccagaaccagctctataacgagctcaatctaggacgaagagaggagtacgatgttttggacaagagacgtggccgggaccctgagatggggggaaagccgagaaggaagaaccctcaggaaggcctgtacaatgaactgcagaaagataagatggcggaggcctacagtgagattgggatgaaaggcgagcgccggaggggcaaggggcacgatggcctttaccagggtctcagtacagccaccaaggacacctacgacgcccttcacatgcaggccctgccccctcgctctagtggctccggcgagggcagaggaagtctactaacctgcggagatgtggaagaaaatcctggcccacatatgaccgagtacaagcccacggtgcgcctcgccacccgcgacgacgtccccagggccgtacgcaccctcgccgccgcgttcgccgactaccccgccacgcgccacaccgtcgatccggaccgccacatcgagcgggtcaccgagctgcaagaactcttcctcacgcgcgtcgggctcgacatcggcaaggtgtgggtcgcggacgacggcgccgcggtggcggtctggaccacgccggagagcgtcgaagcgggggcggtgttcgccgagatcggcccgcgcatggccgagttgagcggttcccggctggccgcgcagcaacagatggaaggcctcctggcgccgcaccggcccaaggagcccgcgtggttcctggccaccgtcggcgtctcgcccgaccaccagggcaagggtctgggcagcgccgtcgtgctccccggagtggaggcggccgagcgcgccggggtgcccgccttcctggagacctccgcgccccgcaacctccccttctacgagcggctcggcttcaccgtcaccgccgacgtcgaggtgcccgaaggaccgcgcacctggtgcatgacccgcaagcccggtgcctga

SEQ ID NO: 9550 - DNA, 1521 bp, Artificial Sequence
  Synthetic Polynucloetide
atggccttaccagtgaccgccttgctcctgccgctggccttgctgctccacgccgccaggccggacatccagctgactcagagccctagctttctgagcgccagcgtgggcgacagagtgaccattacatgtagagccagccaggacatcagcagctacctggcctggtatcagcagaagcctggcaacgcccctaaactgctgatctacgccgccagcctgctgcaatctggcgtgccaagcagattcagcgcctttggcagcggcaccgagttcaccctgacaatatctagcctccagccagaggacttcgccacctactactgccagcacctgaagtcttaccctctgttcaccttcggacccggcaccaaggtggacatcaaaagaggcggaggcggaagtggaggcggaggatctggcggcggaggctctgaagttcagctggttgagtctggcggcagagtcgttagacctggcggaagcctgagactgtcttgtgccgccagcggcttcacctttgacgactacggcatgagctgggtccgacagcctcctggaaagggcctcgaatttgtgtccggcctgaactggaacggcgacatcaccgcctttaccgacagcgtgaagggcagattcaccatcagccgggacaacgtgaagtccagcctgtacctccagatgaacagcctgagagccgacgacaccgccttctactactgtgccagagtgcggacctggggcgattacacaacaggcgaggaaatcatcaacagctggtacttcgacctgtggggcagaggcacactggtcacagtctcttctacgcgtgagcagaaactgatctcggaagaggatctgaaaattgaagttatgtatcctcctccttacctagacaatgagaagagcaatggaaccattatccatgtgaaagggaaacacctttgtccaagtcccctatttcccggaccttctaagcccttttgggtgctggtggtggttgggggagtcctggcttgctatagcttgctagtaacagtggcctttattattttctgggtgaggagtaagaggagcaggctcctgcacagtgactacatgaacatgactccacgccgccccggacccacccgcaagcattaccagccctatgccccaccacgcgacttcgcagcctatcgctccagagtgaagttcagcaggagcgcagacgcccccgcgtaccagcagggccagaaccagctctataacgagctcaatctaggacgaagagaggagtacgatgttttggacaagagacgtggccgggaccctgagatggggggaaagccgagaaggaagaaccctcaggaaggcctgtacaatgaactgcagaaagataagatggcggaggcctacagtgagattgggatgaaaggcgagcgccggaggggcaaggggcacgatggcctttaccagggtctcagtacagccaccaaggacacctacgacgcccttcacatgcaggccctgccccctcgc

SEQ ID NO: 9551 - DNA, 1542 bp, Artificial Sequence
  Synthetic Polynucloetide
atggccttaccagtgaccgccttgctcctgccgctggccttgctgctccacgccgccaggccggacatccagctgactcagagccctagctttctgagcgccagcgtgggcgacagagtgaccattacatgtagagccagccaggacatcagcagctacctggcctggtatcagcagaagcctggcaacgcccctaaactgctgatctacgccgccagcctgctgcaatctggcgtgccaagcagattcagcgcctttggcagcggcaccgagttcaccctgacaatatctagcctccagccagaggacttcgccacctactactgccagcacctgaagtcttaccctctgttcaccttcggacccggcaccaaggtggacatcaaaagaggcggaggcggaagtggaggcggaggatctggcggcggaggctctgaagttcagctggttgagtctggcggcagagtcgttagacctggcggaagcctgagactgtcttgtgccgccagcggcttcacctttgacgactacggcatgagctgggtccgacagcctcctggaaagggcctcgaatttgtgtccggcctgaactggaacggcgacatcaccgcctttaccgacagcgtgaagggcagattcaccatcagccgggacaacgtgaagtccagcctgtacctccagatgaacagcctgagagccgacgacaccgccttctactactgtgccagagtgcggacctggggcgattacacaacaggcgaggaaatcatcaacagctggtacttcgacctgtggggcagaggcacactggtcacagtctcttctacgcgtgagcagaaactgatctcggaagaggatctggcgaagcccaccacgacgccagcgccgcgaccaccaacaccggcgcccaccatcgcgtcgcagcccctgtccctgcgcccagaggcgtgccggccagcggcggggggcgcagtgcacacgagggggctggacttcgcctgtgacatctacatctgggcgcccttggccgggacttgtggggtccttctcctgtcactggttatcaccctttactgcaaacggggcagaaagaaactcctgtatatattcaaacaaccatttatgagaccagtacaaactactcaagaggaagatggctgtagctgccgatttccagaagaagaagaaggaggatgtgaactgagagtgaagttcagcaggagcgcagacgcccccgcgtaccagcagggccagaaccagctctataacgagctgaatctaggacgaagagaggagtacgatgttttggacaagagacgtggccgggaccctgagatggggggaaagccgagaaggaagaaccctcaggaaggcctgtacaatgaactgcagaaagataagatggcggaggcctacagtgagattgggatgaaaggcgagcgccggaggggcaaggggcacgatggcctttaccagggtctcagtacagccaccaaggacacctacgacgcccttcacatgcaggccctgccccctcgctga

SEQ ID NO: 9552 - DNA, 1542 bp, Artificial Sequence
  Synthetic Polynucloetide
atggccttaccagtgaccgccttgctcctgccgctggccttgctgctccacgccgccaggccggaagttcagctggttgagtctggcggcagagtcgttagacctggcggaagcctgagactgtcttgtgccgccagcggcttcacctttgacgactacggcatgagctgggtccgacagcctcctggaaagggcctcgaatttgtgtccggcctgaactggaacggcgacatcaccgcctttaccgacagcgtgaagggcagattcaccatcagccgggacaacgtgaagtccagcctgtacctccagatgaacagcctgagagccgacgacaccgccttctactactgtgccagagtgcggacctggggcgattacacaacaggcgaggaaatcatcaacagctggtacttcgacctgtggggcagaggcacactggtcacagtctcttctggcggaggcggaagtggaggcggaggatctggcggcggaggctctgacatccagctgactcagagccctagctttctgagcgccagcgtgggcgacagagtgaccattacatgtagagccagccaggacatcagcagctacctggcctggtatcagcagaagcctggcaacgcccctaaactgctgatctacgccgccagcctgctgcaatctggcgtgccaagcagattcagcgcctttggcagcggcaccgagttcaccctgacaatatctagcctccagccagaggacttcgccacctactactgccagcacctgaagtcttaccctctgttcaccttcggacccggcaccaaggtggacatcaaaagaacgcgtgagcagaaactgatctcggaagaggatctggcgaagcccaccacgacgccagcgccgcgaccaccaacaccggcgcccaccatcgcgtcgcagcccctgtccctgcgcccagaggcgtgccggccagcggcggggggcgcagtgcacacgagggggctggacttcgcctgtgacatctacatctgggcgcccttggccgggacttgtggggtccttctcctgtcactggttatcaccctttactgcaaacggggcagaaagaaactcctgtatatattcaaacaaccatttatgagaccagtacaaactactcaagaggaagatggctgtagctgccgatttccagaagaagaagaaggaggatgtgaactgagagtgaagttcagcaggagcgcagacgcccccgcgtaccagcagggccagaaccagctctataacgagctgaatctaggacgaagagaggagtacgatgttttggacaagagacgtggccgggaccctgagatggggggaaagccgagaaggaagaaccctcaggaaggcctgtacaatgaactgcagaaagataagatggcggaggcctacagtgagattgggatgaaaggcgagcgccggaggggcaaggggcacgatggcctttaccagggtctcagtacagccaccaaggacacctacgacgcccttcacatgcaggccctgccccctcgctga

SEQ ID NO: 9553 - DNA, 2781 bp, Artificial Sequence
  Synthetic Polynucloetide
atggccttaccagtgaccgccttgctcctgccgctggccttgctgctccacgccgccaggccggacatccagctgactcagagccctagctttctgagcgccagcgtgggcgacagagtgaccattacatgtagagccagccaggacatcagcagctacctggcctggtatcagcagaagcctggcaacgcccctaaactgctgatctacgccgccagcctgctgcaatctggcgtgccaagcagattcagcgcctttggcagcggcaccgagttcaccctgacaatatctagcctccagccagaggacttcgccacctactactgccagcacctgaagtcttaccctctgttcaccttcggacccggcaccaaggtggacatcaaaagaggcggaggcggaagtggaggcggaggatctggcggcggaggctctgaagttcagctggttgagtctggcggcagagtcgttagacctggcggaagcctgagactgtcttgtgccgccagcggcttcacctttgacgactacggcatgagctgggtccgacagcctcctggaaagggcctcgaatttgtgtccggcctgaactggaacggcgacatcaccgcctttaccgacagcgtgaagggcagattcaccatcagccgggacaacgtgaagtccagcctgtacctccagatgaacagcctgagagccgacgacaccgccttctactactgtgccagagtgcggacctggggcgattacacaacaggcgaggaaatcatcaacagctggtacttcgacctgtggggcagaggcacactggtcacagtctcttctacgcgtgagcagaaactgatctcggaagaggatctggcgaagcccaccacgacgccagcgccgcgaccaccaacaccggcgcccaccatcgcgtcgcagcccctgtccctgcgcccagaggcgtgccggccagcggcggggggcgcagtgcacacgagggggctggacttcgcctgtgacatctacatctgggcgcccttggccgggacttgtggggtccttctcctgtcactggttatcaccctttactgcgggcgcgccagagtgaagttcagcaggagcgcagacgcccccgcgtaccagcagggccagaaccagctctataacgagctgaatctaggacgaagagaggagtacgatgttttggacaagagacgtggccgggaccctgagatggggggaaagccgagaaggaagaaccctcaggaaggcctgtacaatgaactgcagaaagataagatggcggaggcctacagtgagattgggatgaaaggcgagcgccggaggggcaaggggcacgatggcctttaccagggtctcagtacagccaccaaggacacctacgacgcccttcacatgcaggccctgccccctcgctctagaggatctggagcaacaaacttctcactactcaaacaagcaggtgacgtggaggagaatcccgggcctgggatccacatggccacttacgaggttctctgtgaggtggcgcggaaactgggcacggatgacagggaagtggtattgttcctcctaaacgtgttcatacctcaacccacactggcccaattaattggagctcttagagctttaaaggaggagggcaggttaacgtttcccctgttagcggaatgtctgtttcgtgcaggtcgcagagacctcttgcgcgacctgcttcacttagacccgcgttttttagagcgccacctagcgggcacaatgagttatttcagcccttatcagctcactgttctccacgtagacggggagctgtgtgcgagggatattaggtctttgatatttttaagcaaggacactatagggtctcgcagcacaccacagacattcttacactgggtgtactgtatggaaaacttagacctactgggtcccactgacgtggatgccctaatgtcaatgcttagatctttgtcaagagtagacctacagcgccaagtgcaaaccctaatgggccttcacctttccggcccatcacactcccaacactatcgccatacaccactcgagaccgatttctacgactacaaggacgacgatgacaagactagtggctccggcgagggcagaggaagtctactaacctgcggagatgtggaagaaaatcctggcccacatatgaccgagtacaagcccacggtgcgcctcgccacccgcgacgacgtccccagggccgtacgcaccctcgccgccgcgttcgccgactaccccgccacgcgccacaccgtcgatccggaccgccacatcgagcgggtcaccgagctgcaagaactcttcctcacgcgcgtcgggctcgacatcggcaaggtgtgggtcgcggacgacggcgccgcggtggcggtctggaccacgccggagagcgtcgaagcgggggcggtgttcgccgagatcggcccgcgcatggccgagttgagcggttcccggctggccgcgcagcaacagatggaaggcctcctggcgccgcaccggcccaaggagcccgcgtggttcctggccaccgtcggcgtctcgcccgaccaccagggcaagggtctgggcagcgccgtcgtgctccccggagtggaggcggccgagcgcgccggggtgcccgccttcctggagacctccgcgccccgcaacctccccttctacgagcggctcggcttcaccgtcaccgccgacgtcgaggtgcccgaaggaccgcgcacctggtgcatgacccgcaagcccggtgcctga

SEQ ID NO: 9554 - DNA, 2601 bp, Artificial Sequence
  Synthetic Polynucloetide
atggccttaccagtgaccgccttgctcctgccgctggccttgctgctccacgccgccaggccggacatccagctgactcagagccctagctttctgagcgccagcgtgggcgacagagtgaccattacatgtagagccagccaggacatcagcagctacctggcctggtatcagcagaagcctggcaacgcccctaaactgctgatctacgccgccagcctgctgcaatctggcgtgccaagcagattcagcgcctttggcagcggcaccgagttcaccctgacaatatctagcctccagccagaggacttcgccacctactactgccagcacctgaagtcttaccctctgttcaccttcggacccggcaccaaggtggacatcaaaagactcgagatccagaaccctgatcctgccgtgtaccagctgcgggatagcaagagcagcgacaagagcgtgtgtctgttcaccgacttcgacagccagaccaacgtgtcccagagcaaggactccgacgtgtacatcaccgataagtgcgtgctggacatgcggagcatggacttcaagagcaactccgccgtggcctggtccaacaagtccgatttcgcctgcgccaacgccttcaacaacagcattatccccgaggacacattcttcccaagcagcgacgtgccctgcgacgtgaagctggtggaaaagagcttcgagacagacaccaacctgaacttccagaacctgagcgtgatcggcttcagaatcctgctgctgaaagtggccggctttaacctgctgatgaccctgcggctgtggtccagccgcgccaagagaagcggatctggcgtgaagcagaccctgaatttcgacctgctgaagctggctggcgacgtggaatccaacccaggccctactagtatggactggatttggcgcatccttttccttgtcggcgctgctaccggcgcgcattccttcgaagaagttcagctggttgagtctggcggcagagtcgttagacctggcggaagcctgagactgtcttgtgccgccagcggcttcacctttgacgactacggcatgagctgggtccgacagcctcctggaaagggcctcgaatttgtgtccggcctgaactggaacggcgacatcaccgcctttaccgacagcgtgaagggcagattcaccatcagccgggacaacgtgaagtccagcctgtacctccagatgaacagcctgagagccgacgacaccgccttctactactgtgccagagtgcggacctggggcgattacacaacaggcgaggaaatcatcaacagctggtacttcgacctgtggggcagaggcacactggtcacagtctcttctacgcgtgaggacctgaagaacgtgttcccacctgaggtggccgtgttcgagcctagcaaggccgagatcgcccacacccagaaagccaccctcgtgtgcctggctaccggcttctaccccgaccatgtggaactgtcttggtgggtcaacggcaaagaggtgcacagcggcgtgtgtaccgacccccagccactgaaagaacagcccgccctgaacgacagccggtactgcctgagcagcagactgagagtgtccgccaccttctggcagaacccccggaaccacttcagatgccaggtgcagttctacggcctgagcgagaacgacgagtggacccaggacagagccaagcccgtgacccagatcgtgtctgccgaagcctggggcagagccgattgcggcatcaccagcgccagctaccaccagggcgtgctgagcgccaccatcctgtacgagatcctgctgggcaaggccaccctgtacgccgtgctggtgtctgccctggtgctgatggctatggtcaagcggaaggacagccggggaagggccaagcgatctggatctggagcaacaaacttctcactactcaaacaagcaggtgacgtggaggagaatcccgggccttctagaggccatatgaccgagtacaagcccacggtgcgcctcgccacccgcgacgacgtccccagggccgtacgcaccctcgccgccgcgttcgccgactaccccgccacgcgccacaccgtcgatccggaccgccacatcgagcgggtcaccgagctgcaagaactcttcctcacgcgcgtcgggctcgacatcggcaaggtgtgggtcgcggacgacggcgccgcggtggcggtctggaccacgccggagagcgtcgaagcgggggcggtgttcgccgagatcggcccgcgcatggccgagttgagcggttcccggctggccgcgcagcaacagatggaaggcctcctggcgccgcaccggcccaaggagcccgcgtggttcctggccaccgtcggcgtctcgcccgaccaccagggcaagggtctgggcagcgccgtcgtgctccccggagtggaggcggccgagcgcgccggggtgcccgccttcctggagacctccgcgccccgcaacctccccttctacgagcggctcggcttcaccgtcaccgccgacgtcgaggtgcccgaaggaccgcgcacctggtgcatgacccgcaagcccggtgcctga

SEQ ID NO: 9555 - DNA, 2598 bp, Artificial Sequence
  Synthetic Polynucloetide
atggccttaccagtgaccgccttgctcctgccgctggccttgctgctccacgccgccaggccggacatccagctgactcagagccctagctttctgagcgccagcgtgggcgacagagtgaccattacatgtagagccagccaggacatcagcagctacctggcctggtatcagcagaagcctggcaacgcccctaaactgctgatctacgccgccagcctgctgcaatctggcgtgccaagcagattcagcgcctttggcagcggcaccgagttcaccctgacaatatctagcctccagccagaggacttcgccacctactactgccagcacctgaagtcttaccctctgttcaccttcggacccggcaccaaggtggacatcaaaagactcgaggacctgaagaacgtgttcccacctgaggtggccgtgttcgagcctagcaaggccgagatcgcccacacccagaaagccaccctcgtgtgcctggctaccggcttctaccccgaccatgtggaactgtcttggtgggtcaacggcaaagaggtgcacagcggcgtgtgtaccgacccccagccactgaaagaacagcccgccctgaacgacagccggtactgcctgagcagcagactgagagtgtccgccaccttctggcagaacccccggaaccacttcagatgccaggtgcagttctacggcctgagcgagaacgacgagtggacccaggacagagccaagcccgtgacccagatcgtgtctgccgaagcctggggcagagccgattgcggcatcaccagcgccagctaccaccagggcgtgctgagcgccaccatcctgtacgagatcctgctgggcaaggccaccctgtacgccgtgctggtgtctgccctggtgctgatggctatggtcaagcggaaggacagccggggaagggccaagcgatctggatctggagcaacaaacttctcactactcaaacaagcaggtgacgtggaggagaatcccgggcctactagtatggactggatttggcgcatccttttccttgtcggcgctgctaccggcgcgcattccttcgaagaagttcagctggttgagtctggcggcagagtcgttagacctggcggaagcctgagactgtcttgtgccgccagcggcttcacctttgacgactacggcatgagctgggtccgacagcctcctggaaagggcctcgaatttgtgtccggcctgaactggaacggcgacatcaccgcctttaccgacagcgtgaagggcagattcaccatcagccgggacaacgtgaagtccagcctgtacctccagatgaacagcctgagagccgacgacaccgccttctactactgtgccagagtgcggacctggggcgattacacaacaggcgaggaaatcatcaacagctggtacttcgacctgtggggcagaggcacactggtcacagtctcttctacgcgtatccagaaccctgatcctgccgtgtaccagctgcgggatagcaagagcagcgacaagagcgtgtgtctgttcaccgacttcgacagccagaccaacgtgtcccagagcaaggactccgacgtgtacatcaccgataagtgcgtgctggacatgcggagcatggacttcaagagcaactccgccgtggcctggtccaacaagtccgatttcgcctgcgccaacgccttcaacaacagcattatccccgaggacacattcttcccaagcagcgacgtgccctgcgacgtgaagctggtggaaaagagcttcgagacagacaccaacctgaacttccagaacctgagcgtgatcggcttcagaatcctgctgctgaaagtggccggctttaacctgctgatgaccctgcggctgtggtccagccgcgccaagagaagcggatctggcgtgaagcagaccctgaatttcgacctgctgaagctggctggcgacgtggaatccaacccaggcccttctagaggccatatgaccgagtacaagcccacggtgcgcctcgccacccgcgacgacgtccccagggccgtacgcaccctcgccgccgcgttcgccgactaccccgccacgcgccacaccgtcgatccggaccgccacatcgagcgggtcaccgagctgcaagaactcttcctcacgcgcgtcgggctcgacatcggcaaggtgtgggtcgcggacgacggcgccgcggtggcggtctggaccacgccggagagcgtcgaagcgggggcggtgttcgccgagatcggcccgcgcatggccgagttgagcggttcccggctggccgcgcagcaacagatggaaggcctcctggcgccgcaccggcccaaggagcccgcgtggttcctggccaccgtcggcgtctcgcccgaccaccagggcaagggtctgggcagcgccgtcgtgctccccggagtggaggcggccgagcgcgccggggtgcccgccttcctggagacctccgcgccccgcaacctccccttctacgagcggctcggcttcaccgtcaccgccgacgtcgaggtgcccgaaggaccgcgcacctggtgcatgacccgcaagcccggtgcctga

SEQ ID NO: 9556 - DNA, 1896 bp, Artificial Sequence
  Synthetic Polynucloetide
atggccttaccagtgaccgccttgctcctgccgctggccttgctgctccacgccgccaggccggacatccagctgactcagagccctagctttctgagcgccagcgtgggcgacagagtgaccattacatgtagagccagccaggacatcagcagctacctggcctggtatcagcagaagcctggcaacgcccctaaactgctgatctacgccgccagcctgctgcaatctggcgtgccaagcagattcagcgcctttggcagcggcaccgagttcaccctgacaatatctagcctccagccagaggacttcgccacctactactgccagcacctgaagtcttaccctctgttcaccttcggacccggcaccaaggtggacatcaaaagactcgaggacctgaagaacgtgttcccacctgaggtggccgtgttcgagcctagcgaggccgagatcagccacacccagaaagccaccctcgtgtgcctggctaccggcttctaccccgaccatgtggaactgtcttggtgggtcaacggcaaagaggtgcacagcggcgtgtgtaccgacccccagccactgaaagaacagcccgccctgaacgacagccggtactgcctgagcagcagactgagagtgtccgccaccttctggcagaacccccggaaccacttcagatgccaggtgcagttctacggcctgagcgagaacgacgagtggacccaggacagagccaagcccgtgacccagatcgtgtctgccgaagcctggggcagagccgattgcggctttaccagcgagagctaccagcagggcgtgctgagcgccaccatcctgtacgagatcctgctgggcaaggccaccctgtacgccgtgctggtgtctgccctggtgctgatggctatggtcaagcggaaggacagccggggaagggccaagcgatctggatctggagcaacaaacttctcactactcaaacaagcaggtgacgtggaggagaatcccgggcctactagtatggactggatttggcgcatccttttccttgtcggcgctgctaccggcgcgcattccttcgaagaagttcagctggttgagtctggcggcagagtcgttagacctggcggaagcctgagactgtcttgtgccgccagcggcttcacctttgacgactacggcatgagctgggtccgacagcctcctggaaagggcctcgaatttgtgtccggcctgaactggaacggcgacatcaccgcctttaccgacagcgtgaagggcagattcaccatcagccgggacaacgtgaagtccagcctgtacctccagatgaacagcctgagagccgacgacaccgccttctactactgtgccagagtgcggacctggggcgattacacaacaggcgaggaaatcatcaacagctggtacttcgacctgtggggcagaggcacactggtcacagtctcttctacgcgtatccagaaccctgatcctgccgtgtaccagctgcgggatagcaagagcagcgacaagagcgtgtgtctgttcaccgacttcgacagccagaccaacgtgtcccagagcaaggactccgacgtgtacatcaccgataagtgcgtgctggacatgcggagcatggacttcaagagcaactccgccgtggcctggtccaacaagtccgatttcgcctgcgccaacgccttcaacaacagcattatccccgaggacacattcttcccaagccccgagagcagctgcgacgtgaagctggtggaaaagagcttcgagacagacaccaacctgaacttccagaacctgagcgtgatcggcttcagaatcctgctgctgaaagtggccggctttaacctgctgatgaccctgcggctgtggtccagc

SEQ ID NO: 9557 - DNA, 2571 bp, Artificial Sequence
  Synthetic Polynucloetide
atggccttaccagtgaccgccttgctcctgccgctggccttgctgctccacgccgccaggccggacatccagctgactcagagccctagctttctgagcgccagcgtgggcgacagagtgaccattacatgtagagccagccaggacatcagcagctacctggcctggtatcagcagaagcctggcaacgcccctaaactgctgatctacgccgccagcctgctgcaatctggcgtgccaagcagattcagcgcctttggcagcggcaccgagttcaccctgacaatatctagcctccagccagaggacttcgccacctactactgccagcacctgaagtcttaccctctgttcaccttcggacccggcaccaaggtggacatcaaaagactcgaggacctgaagaacgtgttcccacctgaggtggccgtgttcgagcctagcgaggccgagatcagccacacccagaaagccaccctcgtgtgcctggctaccggcttctaccccgaccatgtggaactgtcttggtgggtcaacggcaaagaggtgcacagcggcgtgtgtaccgacccccagccactgaaagaacagcccgccctgaacgacagccggtactgcctgagcagcagactgagagtgtccgccaccttctggcagaacccccggaaccacttcagatgccaggtgcagttctacggcctgagcgagaacgacgagtggacccaggacagagccaagcccgtgacccagatcgtgtctgccgaagcctggggcagagccgattgcggctttaccagcgagagctaccagcagggcgtgctgagcgccaccatcctgtacgagatcctgctgggcaaggccaccctgtacgccgtgctggtgtctgccctggtgctgatggctatggtcaagcggaaggacagccggggaagggccaagcgatctggatctggagcaacaaacttctcactactcaaacaagcaggtgacgtggaggagaatcccgggcctactagtatggactggatttggcgcatccttttccttgtcggcgctgctaccggcgcgcattccttcgaagaagttcagctggttgagtctggcggcagagtcgttagacctggcggaagcctgagactgtcttgtgccgccagcggcttcacctttgacgactacggcatgagctgggtccgacagcctcctggaaagggcctcgaatttgtgtccggcctgaactggaacggcgacatcaccgcctttaccgacagcgtgaagggcagattcaccatcagccgggacaacgtgaagtccagcctgtacctccagatgaacagcctgagagccgacgacaccgccttctactactgtgccagagtgcggacctggggcgattacacaacaggcgaggaaatcatcaacagctggtacttcgacctgtggggcagaggcacactggtcacagtctcttctacgcgtatccagaaccctgatcctgccgtgtaccagctgcgggatagcaagagcagcgacaagagcgtgtgtctgttcaccgacttcgacagccagaccaacgtgtcccagagcaaggactccgacgtgtacatcaccgataagtgcgtgctggacatgcggagcatggacttcaagagcaactccgccgtggcctggtccaacaagtccgatttcgcctgcgccaacgccttcaacaacagcattatccccgaggacacattcttcccaagccccgagagcagctgcgacgtgaagctggtggaaaagagcttcgagacagacaccaacctgaacttccagaacctgagcgtgatcggcttcagaatcctgctgctgaaagtggccggctttaacctgctgatgaccctgcggctgtggtccagccgcgccaagagaagcggatctggcgtgaagcagaccctgaatttcgacctgctgaagctggctggcgacgtggaatccaacccaggcccttctagaggcgggatccacaccatggctacctacgaggtgctgtgcgaggtggcaagaaagctgggcaccgacgacagagaagtggtgctgttcctgctgaacgtgttcatccctcagcctacactggcccagctgatcggtgcactgagagccctgaaagaggaaggccggctgacctttcctctgctggccgaatgcctgttcagagccggaagaagggatctgctgcgggacctgctgcatctggaccccagatttctggaaagacacctggccggcaccatgagctacttcagcccttaccagctgaccgtgctgcacgttgacggcgaactgtgcgccagagatattcggagcctgatcttcctgagcaaggacaccatcggcagccggtctacccctcagacatttctgcactgggtgtactgcatggaaaacctggacctgctcggccccacagatgtggatgccctgatgtccatgctgagaagcctgagcagagtggacctccagagacaggtgcagacactgatgggactgcacctgagcggacctagccacagccagcactacagacacacccct

SEQ ID NO: 9558 - DNA, 1908 bp, Artificial Sequence
  Synthetic Polynucloetide
atggccttaccagtgaccgccttgctcctgccgctggccttgctgctccacgccgccaggccggacatccagctgactcagagccctagctttctgagcgccagcgtgggcgacagagtgaccattacatgtagagccagccaggacatcagcagctacctggcctggtatcagcagaagcctggcaacgcccctaaactgctgatctacgccgccagcctgctgcaatctggcgtgccaagcagattcagcgcctttggcagcggcaccgagttcaccctgacaatatctagcctccagccagaggacttcgccacctactactgccagcacctgaagtcttaccctctgttcaccttcggacccggcaccaaggtggacatcaaaagactcgagatccagaaccctgatcctgccgtgtaccagctgcgggatagcaagagcagcgacaagagcgtgtgtctgttcaccgacttcgacagccagaccaacgtgtcccagagcaaggactccgacgtgtacatcaccgataagtgcgtgctggacatgcggagcatggacttcaagagcaactccgccgtggcctggtccaacaagtccgatttcgcctgcgccaacgccttcaacaacagcattatccccgaggacacattcttcccaagccccgagagcagctgcgacgtgaagctggtggaaaagagcttcgagacagacaccaacctgaacttccagaacctgagcgtgatcggcttcagaatcctgctgctgaaagtggccggctttaacctgctgatgaccctgcggctgtggtccagccgcgccaagagaagcggatctggcgtgaagcagaccctgaatttcgacctgctgaagctggctggcgacgtggaatccaacccaggccctactagtatggactggatttggcgcatccttttccttgtcggcgctgctaccggcgcgcattccttcgaagaagttcagctggttgagtctggcggcagagtcgttagacctggcggaagcctgagactgtcttgtgccgccagcggcttcacctttgacgactacggcatgagctgggtccgacagcctcctggaaagggcctcgaatttgtgtccggcctgaactggaacggcgacatcaccgcctttaccgacagcgtgaagggcagattcaccatcagccgggacaacgtgaagtccagcctgtacctccagatgaacagcctgagagccgacgacaccgccttctactactgtgccagagtgcggacctggggcgattacacaacaggcgaggaaatcatcaacagctggtacttcgacctgtggggcagaggcacactggtcacagtctcttctacgcgtgaggacctgaagaacgtgttcccacctgaggtggccgtgttcgagcctagcgaggccgagatcagccacacccagaaagccaccctcgtgtgcctggctaccggcttctaccccgaccatgtggaactgtcttggtgggtcaacggcaaagaggtgcacagcggcgtgtgtaccgacccccagccactgaaagaacagcccgccctgaacgacagccggtactgcctgagcagcagactgagagtgtccgccaccttctggcagaacccccggaaccacttcagatgccaggtgcagttctacggcctgagcgagaacgacgagtggacccaggacagagccaagcccgtgacccagatcgtgtctgccgaagcctggggcagagccgattgcggctttaccagcgagagctaccagcagggcgtgctgagcgccaccatcctgtacgagatcctgctgggcaaggccaccctgtacgccgtgctggtgtctgccctggtgctgatggctatggtcaagcggaaggacagccgggga

SEQ ID NO: 9559 - DNA, 2574 bp, Artificial Sequence
  Synthetic Polynucloetide
atggccttaccagtgaccgccttgctcctgccgctggccttgctgctccacgccgccaggccggacatccagctgactcagagccctagctttctgagcgccagcgtgggcgacagagtgaccattacatgtagagccagccaggacatcagcagctacctggcctggtatcagcagaagcctggcaacgcccctaaactgctgatctacgccgccagcctgctgcaatctggcgtgccaagcagattcagcgcctttggcagcggcaccgagttcaccctgacaatatctagcctccagccagaggacttcgccacctactactgccagcacctgaagtcttaccctctgttcaccttcggacccggcaccaaggtggacatcaaaagactcgagatccagaaccctgatcctgccgtgtaccagctgcgggatagcaagagcagcgacaagagcgtgtgtctgttcaccgacttcgacagccagaccaacgtgtcccagagcaaggactccgacgtgtacatcaccgataagtgcgtgctggacatgcggagcatggacttcaagagcaactccgccgtggcctggtccaacaagtccgatttcgcctgcgccaacgccttcaacaacagcattatccccgaggacacattcttcccaagccccgagagcagctgcgacgtgaagctggtggaaaagagcttcgagacagacaccaacctgaacttccagaacctgagcgtgatcggcttcagaatcctgctgctgaaagtggccggctttaacctgctgatgaccctgcggctgtggtccagccgcgccaagagaagcggatctggcgtgaagcagaccctgaatttcgacctgctgaagctggctggcgacgtggaatccaacccaggccctactagtatggactggatttggcgcatccttttccttgtcggcgctgctaccggcgcgcattccttcgaagaagttcagctggttgagtctggcggcagagtcgttagacctggcggaagcctgagactgtcttgtgccgccagcggcttcacctttgacgactacggcatgagctgggtccgacagcctcctggaaagggcctcgaatttgtgtccggcctgaactggaacggcgacatcaccgcctttaccgacagcgtgaagggcagattcaccatcagccgggacaacgtgaagtccagcctgtacctccagatgaacagcctgagagccgacgacaccgccttctactactgtgccagagtgcggacctggggcgattacacaacaggcgaggaaatcatcaacagctggtacttcgacctgtggggcagaggcacactggtcacagtctcttctacgcgtgaggacctgaagaacgtgttcccacctgaggtggccgtgttcgagcctagcgaggccgagatcagccacacccagaaagccaccctcgtgtgcctggctaccggcttctaccccgaccatgtggaactgtcttggtgggtcaacggcaaagaggtgcacagcggcgtgtgtaccgacccccagccactgaaagaacagcccgccctgaacgacagccggtactgcctgagcagcagactgagagtgtccgccaccttctggcagaacccccggaaccacttcagatgccaggtgcagttctacggcctgagcgagaacgacgagtggacccaggacagagccaagcccgtgacccagatcgtgtctgccgaagcctggggcagagccgattgcggctttaccagcgagagctaccagcagggcgtgctgagcgccaccatcctgtacgagatcctgctgggcaaggccaccctgtacgccgtgctggtgtctgccctggtgctgatggctatggtcaagcggaaggacagccggggaagggccaagcgatctggatctggagcaacaaacttctcactactcaaacaagcaggtgacgtggaggagaatcccgggccttctagaggcgggatccacaccatggctacctacgaggtgctgtgcgaggtggcaagaaagctgggcaccgacgacagagaagtggtgctgttcctgctgaacgtgttcatccctcagcctacactggcccagctgatcggtgcactgagagccctgaaagaggaaggccggctgacctttcctctgctggccgaatgcctgttcagagccggaagaagggatctgctgcgggacctgctgcatctggaccccagatttctggaaagacacctggccggcaccatgagctacttcagcccttaccagctgaccgtgctgcacgttgacggcgaactgtgcgccagagatattcggagcctgatcttcctgagcaaggacaccatcggcagccggtctacccctcagacatttctgcactgggtgtactgcatggaaaacctggacctgctcggccccacagatgtggatgccctgatgtccatgctgagaagcctgagcagagtggacctccagagacaggtgcagacactgatgggactgcacctgagcggacctagccacagccagcactacagacacacccct

SEQ ID NO: 9560 - DNA, 2733 bp, Artificial Sequence
  Synthetic Polynucloetide
atggccttaccagtgaccgccttgctcctgccgctggccttgctgctccacgccgccaggccgctcgaggggaaaccaattcccaaccctcttctgggactggattcaaccggcagcggcgaggacctgaagaacgtgttcccacctgaggtggccgtgttcgagcctagcaaggccgagatcgcccacacccagaaagccaccctcgtgtgcctggctaccggcttctaccccgaccatgtggaactgtcttggtgggtcaacggcaaagaggtgcacagcggcgtgtgtaccgacccccagccactgaaagaacagcccgccctgaacgacagccggtactgcctgagcagcagactgagagtgtccgccaccttctggcagaacccccggaaccacttcagatgccaggtgcagttctacggcctgagcgagaacgacgagtggacccaggacagagccaagcccgtgacccagatcgtgtctgccgaagcctggggcagagccgattgcggcatcaccagcgccagctaccaccagggcgtgctgagcgccaccatcctgtacgagatcctgctgggcaaggccaccctgtacgccgtgctggtgtctgccctggtgctgatggctatggtcaagcggaaggacagccggggaagggccaagcgatctggatctggagcaacaaacttctcactactcaaacaagcaggtgacgtggaggagaatcccgggcctactagcatggccttaccagtgaccgccttgctcctgccgctggccttgctgctccacgccgccaggccggacatccagctgactcagagccctagctttctgagcgccagcgtgggcgacagagtgaccattacatgtagagccagccaggacatcagcagctacctggcctggtatcagcagaagcctggcaacgcccctaaactgctgatctacgccgccagcctgctgcaatctggcgtgccaagcagattcagcgcctttggcagcggcaccgagttcaccctgacaatatctagcctccagccagaggacttcgccacctactactgccagcacctgaagtcttaccctctgttcaccttcggacccggcaccaaggtggacatcaaaagaggcggaggcggaagtggaggcggaggatctggcggcggaggctctgaagttcagctggttgagtctggcggcagagtcgttagacctggcggaagcctgagactgtcttgtgccgccagcggcttcacctttgacgactacggcatgagctgggtccgacagcctcctggaaagggcctcgaatttgtgtccggcctgaactggaacggcgacatcaccgcctttaccgacagcgtgaagggcagattcaccatcagccgggacaacgtgaagtccagcctgtacctccagatgaacagcctgagagccgacgacaccgccttctactactgtgccagagtgcggacctggggcgattacacaacaggcgaggaaatcatcaacagctggtacttcgacctgtggggcagaggcacactggtcacagtctcttctacgcgtgagcagaaactgatctcggaagaggatgggagcggcatccagaaccctgatcctgccgtgtaccagctgcgggatagcaagagcagcgacaagagcgtgtgtctgttcaccgacttcgacagccagaccaacgtgtcccagagcaaggactccgacgtgtacatcaccgataagtgcgtgctggacatgcggagcatggacttcaagagcaactccgccgtggcctggtccaacaagtccgatttcgcctgcgccaacgccttcaacaacagcattatccccgaggacacattcttcccaagcagcgacgtgccctgcgacgtgaagctggtggaaaagagcttcgagacagacaccaacctgaacttccagaacctgagcgtgatcggcttcagaatcctgctgctgaaagtggccggctttaacctgctgatgaccctgcggctgtggtccagccgcgccaagagaagcggatctggcgtgaagcagaccctgaatttcgacctgctgaagctggctggcgacgtggaatccaacccaggcccttctagaggccatatgaccgagtacaagcccacggtgcgcctcgccacccgcgacgacgtccccagggccgtacgcaccctcgccgccgcgttcgccgactaccccgccacgcgccacaccgtcgatccggaccgccacatcgagcgggtcaccgagctgcaagaactcttcctcacgcgcgtcgggctcgacatcggcaaggtgtgggtcgcggacgacggcgccgcggtggcggtctggaccacgccggagagcgtcgaagcgggggcggtgttcgccgagatcggcccgcgcatggccgagttgagcggttcccggctggccgcgcagcaacagatggaaggcctcctggcgccgcaccggcccaaggagcccgcgtggttcctggccaccgtcggcgtctcgcccgaccaccagggcaagggtctgggcagcgccgtcgtgctccccggagtggaggcggccgagcgcgccggggtgcccgccttcctggagacctccgcgccccgcaacctccccttctacgagcggctcggcttcaccgtcaccgccgacgtcgaggtgcccgaaggaccgcgcacctggtgcatgacccgcaagcccggtgcctga

SEQ ID NO: 9561 - DNA, 2736 bp, Artificial Sequence
  Synthetic Polynucloetide
atggccttaccagtgaccgccttgctcctgccgctggccttgctgctccacgccgccaggccgctcgagcagaaactgatctcggaagaggatctgggctccggcgatcgccctgatcctgccgtgtaccagctgcgggatagcaagagcagcgacaagagcgtgtgtctgttcaccgacttcgacagccagaccaacgtgtcccagagcaaggactccgacgtgtacatcaccgataagtgcgtgctggacatgcggagcatggacttcaagagcaactccgccgtggcctggtccaacaagtccgatttcgcctgcgccaacgccttcaacaacagcattatccccgaggacacattcttcccaagccccgagagcagctgcgacgtgaagctggtggaaaagagcttcgagacagacaccaacctgaacttccagaacctgagcgtgatcggcttcagaatcctgctgctgaaagtggccggctttaacctgctgatgaccctgcggctgtggtccagctctagtcgcgccaagagaagcggatctggcgtgaagcagaccctgaatttcgacctgctgaagctggctggcgacgtggaatccaacccaggccccactagcatggccttaccagtgaccgccttgctcctgccgctggccttgctgctccacgccgccaggccggacatccagctgactcagagccctagctttctgagcgccagcgtgggcgacagagtgaccattacatgtagagccagccaggacatcagcagctacctggcctggtatcagcagaagcctggcaacgcccctaaactgctgatctacgccgccagcctgctgcaatctggcgtgccaagcagattcagcgcctttggcagcggcaccgagttcaccctgacaatatctagcctccagccagaggacttcgccacctactactgccagcacctgaagtcttaccctctgttcaccttcggacccggcaccaaggtggacatcaaaagaggcggaggcggaagtggaggcggaggatctggcggcggaggctctgaagttcagctggttgagtctggcggcagagtcgttagacctggcggaagcctgagactgtcttgtgccgccagcggcttcacctttgacgactacggcatgagctgggtccgacagcctcctggaaagggcctcgaatttgtgtccggcctgaactggaacggcgacatcaccgcctttaccgacagcgtgaagggcagattcaccatcagccgggacaacgtgaagtccagcctgtacctccagatgaacagcctgagagccgacgacaccgccttctactactgtgccagagtgcggacctggggcgattacacaacaggcgaggaaatcatcaacagctggtacttcgacctgtggggcagaggcacactggtcacagtctcttctacgcgtgggaaaccaattcccaaccctcttctgggactggattcaaccggcagcggcgaggacctgaagaacgtgttcccacctgaggtggccgtgttcgagcctagcgaggccgagatcagccacacccagaaagccaccctcgtgtgcctggctaccggcttctaccccgaccatgtggaactgtcttggtgggtcaacggcaaagaggtgcacagcggcgtgtgtaccgacccccagccactgaaagaacagcccgccctgaacgacagccggtactgcctgagcagcagactgagagtgtccgccaccttctggcagaacccccggaaccacttcagatgccaggtgcagttctacggcctgagcgagaacgacgagtggacccaggacagagccaagcccgtgacccagatcgtgtctgccgaagcctggggcagagccgattgcggctttaccagcgagagctaccagcagggcgtgctgagcgccaccatcctgtacgagatcctgctgggcaaggccaccctgtacgccgtgctggtgtctgccctggtgctgatggctatggtcaagcggaaggacagccggggaagggccaagcgatctggatctggagcaacaaacttctcactactcaaacaagcaggtgacgtggaggagaatcccgggccttctagaggccatatgaccgagtacaagcccacggtgcgcctcgccacccgcgacgacgtccccagggccgtacgcaccctcgccgccgcgttcgccgactaccccgccacgcgccacaccgtcgatccggaccgccacatcgagcgggtcaccgagctgcaagaactcttcctcacgcgcgtcgggctcgacatcggcaaggtgtgggtcgcggacgacggcgccgcggtggcggtctggaccacgccggagagcgtcgaagcgggggcggtgttcgccgagatcggcccgcgcatggccgagttgagcggttcccggctggccgcgcagcaacagatggaaggcctcctggcgccgcaccggcccaaggagcccgcgtggttcctggccaccgtcggcgtctcgcccgaccaccagggcaagggtctgggcagcgccgtcgtgctccccggagtggaggcggccgagcgcgccggggtgcccgccttcctggagacctccgcgccccgcaacctccccttctacgagcggctcggcttcaccgtcaccgccgacgtcgaggtgcccgaaggaccgcgcacctggtgcatgacccgcaagcccggtgcctga

SEQ ID NO: 9562 - DNA, 2598 bp, Artificial Sequence
  Synthetic Polynucloetide
atggccttaccagtgaccgccttgctcctgccgctggccttgctgctccacgccgccaggccggacatccagctgactcagagccctagctttctgagcgccagcgtgggcgacagagtgaccattacatgtagagccagccaggacatcagcagctacctggcctggtatcagcagaagcctggcaacgcccctaaactgctgatctacgccgccagcctgctgcaatctggcgtgccaagcagattcagcgcctttggcagcggcaccgagttcaccctgacaatatctagcctccagccagaggacttcgccacctactactgccagcacctgaagtcttaccctctgttcaccttcggacccggcaccaaggtggacatcaaaagactcgaggacctgaagaacgtgttcccacctgaggtggccgtgttcgagcctagcgaggccgagatcagccacacccagaaagccaccctcgtgtgcctggctaccggcttctaccccgaccatgtggaactgtcttggtgggtcaacggcaaagaggtgcacagcggcgtgtctaccgacccccagccactgaaagaacagcccgccctgaacgacagccggtactgcctgagcagcagactgagagtgtccgccaccttctggcagaacccccggaaccacttcagatgccaggtgcagttctacggcctgagcgagaacgacgagtggacccaggacagagccaagcccgtgacccagatcgtgtctgccgaagcctggggcagagccgattgcggctttaccagcgagagctaccagcagggcgtgctgagcgccaccatcctgtacgagatcctgctgggcaaggccaccctgtacgccgtgctggtgtctgccctggtgctgatggctatggtcaagcggaaggacagccggggaagggccaagcgatctggatctggagcaacaaacttctcactactcaaacaagcaggtgacgtggaggagaatcccgggcctactagtatggactggatttggcgcatccttttccttgtcggcgctgctaccggcgcgcattccttcgaagaagttcagctggttgagtctggcggcagagtcgttagacctggcggaagcctgagactgtcttgtgccgccagcggcttcacctttgacgactacggcatgagctgggtccgacagcctcctggaaagggcctcgaatttgtgtccggcctgaactggaacggcgacatcaccgcctttaccgacagcgtgaagggcagattcaccatcagccgggacaacgtgaagtccagcctgtacctccagatgaacagcctgagagccgacgacaccgccttctactactgtgccagagtgcggacctggggcgattacacaacaggcgaggaaatcatcaacagctggtacttcgacctgtggggcagaggcacactggtcacagtctcttctacgcgtatccagaaccctgatcctgccgtgtaccagctgcgggatagcaagagcagcgacaagagcgtgtgtctgttcaccgacttcgacagccagaccaacgtgtcccagagcaaggactccgacgtgtacatcaccgataagaccgtgctggacatgcggagcatggacttcaagagcaactccgccgtggcctggtccaacaagtccgatttcgcctgcgccaacgccttcaacaacagcattatccccgaggacacattcttcccaagccccgagagcagctgcgacgtgaagctggtggaaaagagcttcgagacagacaccaacctgaacttccagaacctgagcgtgatcggcttcagaatcctgctgctgaaagtggccggctttaacctgctgatgaccctgcggctgtggtccagccgcgccaagagaagcggatctggcgtgaagcagaccctgaatttcgacctgctgaagctggctggcgacgtggaatccaacccaggcccttctagaggccatatgaccgagtacaagcccacggtgcgcctcgccacccgcgacgacgtccccagggccgtacgcaccctcgccgccgcgttcgccgactaccccgccacgcgccacaccgtcgatccggaccgccacatcgagcgggtcaccgagctgcaagaactcttcctcacgcgcgtcgggctcgacatcggcaaggtgtgggtcgcggacgacggcgccgcggtggcggtctggaccacgccggagagcgtcgaagcgggggcggtgttcgccgagatcggcccgcgcatggccgagttgagcggttcccggctggccgcgcagcaacagatggaaggcctcctggcgccgcaccggcccaaggagcccgcgtggttcctggccaccgtcggcgtctcgcccgaccaccagggcaagggtctgggcagcgccgtcgtgctccccggagtggaggcggccgagcgcgccggggtgcccgccttcctggagacctccgcgccccgcaacctccccttctacgagcggctcggcttcaccgtcaccgccgacgtcgaggtgcccgaaggaccgcgcacctggtgcatgacccgcaagcccggtgcctga

SEQ ID NO: 9563 - DNA, 2844 bp, Artificial Sequence
  Synthetic Polynucloetide
atggccttaccagtgaccgccttgctcctgccgctggccttgctgctccacgccgccaggccggacatccagctgactcagagccctagctttctgagcgccagcgtgggcgacagagtgaccattacatgtagagccagccaggacatcagcagctacctggcctggtatcagcagaagcctggcaacgcccctaaactgctgatctacgccgccagcctgctgcaatctggcgtgccaagcagattcagcgcctttggcagcggcaccgagttcaccctgacaatatctagcctccagccagaggacttcgccacctactactgccagcacctgaagtcttaccctctgttcaccttcggacccggcaccaaggtggacatcaaaagactcgaggacctgaagaacgtgttcccacctgaggtggccgtgttcgagcctagcgaggccgagatcagccacacccagaaagccaccctcgtgtgcctggctaccggcttctaccccgaccatgtggaactgtcttggtgggtcaacggcaaagaggtgcacagcggcgtgtctaccgacccccagccactgaaagaacagcccgccctgaacgacagccggtactgcctgagcagcagactgagagtgtccgccaccttctggcagaacccccggaaccacttcagatgccaggtgcagttctacggcctgagcgagaacgacgagtggacccaggacagagccaagcccgtgacccagatcgtgtctgccgaagcctggggcagagccgattgcggctttaccagcgagagctaccagcagggcgtgctgagcgccaccatcctgtacgagatcctgctgggcaaggccaccctgtacgccgtgctggtgtctgccctggtgctgatggctatggtcaagcggaaggacagccggggaagggccaagcgatctggatctggagcaacaaacttctcactactcaaacaagcaggtgacgtggaggagaatcccgggcctactagtatggactggatttggcgcatccttttccttgtcggcgctgctaccggcgcgcattccttcgaagaagttcagctggttgagtctggcggcagagtcgttagacctggcggaagcctgagactgtcttgtgccgccagcggcttcacctttgacgactacggcatgagctgggtccgacagcctcctggaaagggcctcgaatttgtgtccggcctgaactggaacggcgacatcaccgcctttaccgacagcgtgaagggcagattcaccatcagccgggacaacgtgaagtccagcctgtacctccagatgaacagcctgagagccgacgacaccgccttctactactgtgccagagtgcggacctggggcgattacacaacaggcgaggaaatcatcaacagctggtacttcgacctgtggggcagaggcacactggtcacagtctcttctacgcgtgagcagaaactgatctcggaagaggatgggagcggcaccccattcccttctctggcccctcccatcatgctgctggtggacggcaagcagcagatggtggtcgtgtgcctggtgctggatgtggccccacctggactggacagccccatctggtttagcgccggcaatggctctgccctggacgcctttacctacggcccaagccctgccaccgatggcacctggacaaatctggcccacctgagcctgcccagcgaggaactggcttcttgggagcctctcgtgtgccacacaggacctggcgctgagggacacagcagatccacccagcctatgcacctgtctggcgaggccagcaccgccagaacctgtcctcaggaacctctgagaggcacccctggcggagcactgtggctgggagtgctgagactgctgctgttcaagctgctgctgtttgacctgctgctgacctgctcctgtctgtgcgatcctgccggccctctgccttctcctgccaccaccacaagactgagagccctgggcagccacagactgcaccctgccacagagacaggcggcagagaggccacaagcagccctagaccccagcccagagacagaagatggggcgataccccccctggcagaaagcctggatctccagtccgcgccaagagaagcggatctggcgtgaagcagaccctgaatttcgacctgctgaagctggctggcgacgtggaatccaacccaggcccttctagaggccatatgaccgagtacaagcccacggtgcgcctcgccacccgcgacgacgtccccagggccgtacgcaccctcgccgccgcgttcgccgactaccccgccacgcgccacaccgtcgatccggaccgccacatcgagcgggtcaccgagctgcaagaactcttcctcacgcgcgtcgggctcgacatcggcaaggtgtgggtcgcggacgacggcgccgcggtggcggtctggaccacgccggagagcgtcgaagcgggggcggtgttcgccgagatcggcccgcgcatggccgagttgagcggttcccggctggccgcgcagcaacagatggaaggcctcctggcgccgcaccggcccaaggagcccgcgtggttcctggccaccgtcggcgtctcgcccgaccaccagggcaagggtctgggcagcgccgtcgtgctccccggagtggaggcggccgagcgcgccggggtgcccgccttcctggagacctccgcgccccgcaacctccccttctacgagcggctcggcttcaccgtcaccgccgacgtcgaggtgcccgaaggaccgcgcacctggtgcatgacccgcaagcccggtgcctga

SEQ ID NO: 9564 - DNA, 2898 bp, Artificial Sequence
  Synthetic Polynucloetide
atggccttaccagtgaccgccttgctcctgccgctggccttgctgctccacgccgccaggccgctcgaggacctgaagaacgtgttcccacctgaggtggccgtgttcgagcctagcgaggccgagatcagccacacccagaaagccaccctcgtgtgcctggctaccggcttctaccccgaccatgtggaactgtcttggtgggtcaacggcaaagaggtgcacagcggcgtgtctaccgacccccagccactgaaagaacagcccgccctgaacgacagccggtactgcctgagcagcagactgagagtgtccgccaccttctggcagaacccccggaaccacttcagatgccaggtgcagttctacggcctgagcgagaacgacgagtggacccaggacagagccaagcccgtgacccagatcgtgtctgccgaagcctggggcagagccgattgcggctttaccagcgagagctaccagcagggcgtgctgagcgccaccatcctgtacgagatcctgctgggcaaggccaccctgtacgccgtgctggtgtctgccctggtgctgatggctatggtcaagcggaaggacagccggggaagggccaagcgatctggatctggagcaacaaacttctcactactcaaacaagcaggtgacgtggaggagaatcccgggcctactagcatggccttaccagtgaccgccttgctcctgccgctggccttgctgctccacgccgccaggccggacatccagctgactcagagccctagctttctgagcgccagcgtgggcgacagagtgaccattacatgtagagccagccaggacatcagcagctacctggcctggtatcagcagaagcctggcaacgcccctaaactgctgatctacgccgccagcctgctgcaatctggcgtgccaagcagattcagcgcctttggcagcggcaccgagttcaccctgacaatatctagcctccagccagaggacttcgccacctactactgccagcacctgaagtcttaccctctgttcaccttcggacccggcaccaaggtggacatcaaaagaggcggaggcggaagtggaggcggaggatctggcggcggaggctctgaagttcagctggttgagtctggcggcagagtcgttagacctggcggaagcctgagactgtcttgtgccgccagcggcttcacctttgacgactacggcatgagctgggtccgacagcctcctggaaagggcctcgaatttgtgtccggcctgaactggaacggcgacatcaccgcctttaccgacagcgtgaagggcagattcaccatcagccgggacaacgtgaagtccagcctgtacctccagatgaacagcctgagagccgacgacaccgccttctactactgtgccagagtgcggacctggggcgattacacaacaggcgaggaaatcatcaacagctggtacttcgacctgtggggcagaggcacactggtcacagtctcttctacgcgtgagcagaaactgatctcggaagaggatctggggagcggcaccccattcccttctctggcccctcccatcatgctgctggtggacggcaagcagcagatggtggtcgtgtgcctggtgctggatgtggccccacctggactggacagccccatctggtttagcgccggcaatggctctgccctggacgcctttacctacggcccaagccctgccaccgatggcacctggacaaatctggcccacctgagcctgcccagcgaggaactggcttcttgggagcctctcgtgtgccacacaggacctggcgctgagggacacagcagatccacccagcctatgcacctgtctggcgaggccagcaccgccagaacctgtcctcaggaacctctgagaggcacccctggcggagcactgtggctgggagtgctgagactgctgctgttcaagctgctgctgtttgacctgctgctgacctgctcctgtctgtgcgatcctgccggccctctgccttctcctgccaccaccacaagactgagagccctgggcagccacagactgcaccctgccacagagacaggcggcagagaggccacaagcagccctagaccccagcccagagacagaagatggggcgataccccccctggcagaaagcctggatctccagtccgcgccaagagaagcggatctggcgtgaagcagaccctgaatttcgacctgctgaagctggctggcgacgtggaatccaacccaggcccttctagatctagaggccatatgaccgagtacaagcccacggtgcgcctcgccacccgcgacgacgtccccagggccgtacgcaccctcgccgccgcgttcgccgactaccccgccacgcgccacaccgtcgatccggaccgccacatcgagcgggtcaccgagctgcaagaactcttcctcacgcgcgtcgggctcgacatcggcaaggtgtgggtcgcggacgacggcgccgcggtggcggtctggaccacgccggagagcgtcgaagcgggggcggtgttcgccgagatcggcccgcgcatggccgagttgagcggttcccggctggccgcgcagcaacagatggaaggcctcctggcgccgcaccggcccaaggagcccgcgtggttcctggccaccgtcggcgtctcgcccgaccaccagggcaagggtctgggcagcgccgtcgtgctccccggagtggaggcggccgagcgcgccggggtgcccgccttcctggagacctccgcgccccgcaacctccccttctacgagcggctcggcttcaccgtcaccgccgacgtcgaggtgcccgaaggaccgcgcacctggtgcatgacccgcaagcccggtgcctga

SEQ ID NO: 9565 - DNA, 2709 bp, Artificial Sequence
  Synthetic Polynucloetide
atggccttaccagtgaccgccttgctcctgccgctggccttgctgctccacgccgccaggccggacatccagctgactcagagccctagctttctgagcgccagcgtgggcgacagagtgaccattacatgtagagccagccaggacatcagcagctacctggcctggtatcagcagaagcctggcaacgcccctaaactgctgatctacgccgccagcctgctgcaatctggcgtgccaagcagattcagcgcctttggcagcggcaccgagttcaccctgacaatatctagcctccagccagaggacttcgccacctactactgccagcacctgaagtcttaccctctgttcaccttcggacccggcaccaaggtggacatcaaaagactcgaggggaaaccaattcccaaccctcttctgggactggattcaaccggcagcggcgacaagcagctggacgccgacgtgtcccccaagcctaccatcttcctgccctctatcgccgagacaaagctccagaaggccggcacctacctgtgcctgctggaaaagttcttcccagatgtgattaagatccactggcaggaaaagaagtccaacaccatcctgggcagccaggaaggcaacaccatgaagaccaacgacacctacatgaagttcagctggctgaccgtgcccgagaagtccctggacaaagaacacagatgcatcgtgcggcacgaaaacaacaagaacggcgtggaccaggaaatcatcttcccacccatcaagaccgatgtgattacaatggaccccaaggacaactgctccaaggacgccaacgataccctgctgctccagctgaccaacaccagcgcctactacatgtacttgttgctgctgctgaagtccgtggtgtacttcgccatcatcacatgctgcctgctgcggagaaccgccttctgctgcaacggcgagaagtctagggccaagcgatctggatctggagcaacaaacttctcactactcaaacaagcaggtgacgtggaggagaatcccgggcctactagtatggactggatttggcgcatccttttccttgtcggcgctgctaccggcgcgcattccttcgaagaagttcagctggttgagtctggcggcagagtcgttagacctggcggaagcctgagactgtcttgtgccgccagcggcttcacctttgacgactacggcatgagctgggtccgacagcctcctggaaagggcctcgaatttgtgtccggcctgaactggaacggcgacatcaccgcctttaccgacagcgtgaagggcagattcaccatcagccgggacaacgtgaagtccagcctgtacctccagatgaacagcctgagagccgacgacaccgccttctactactgtgccagagtgcggacctggggcgattacacaacaggcgaggaaatcatcaacagctggtacttcgacctgtggggcagaggcacactggtcacagtctcttctacgcgtgagcagaaactgatctcggaagaggatgggagcggcagccagcctcacaccaagcccagcgtgttcgtgatgaagaacggcaccaacgtggcctgcctcgtgaaagagttctaccccaaggacatcaggatcaacctggtgtccagcaagaagatcaccgagttcgaccccgccatcgtgatctcccccagcggcaagtacaacgccgtgaagctggggaagtacgaggacagcaacagcgtgacctgctccgtgcagcacgacaacaagaccgtgcacagcaccgactttgaagtgaaaaccgactccaccgaccacgtgaagcccaaagagacagagaacaccaagcagcccagcaagagctgccacaagcccaaggccatcgtgcacaccgagaaagtgaacatgatgagcctgaccgtgctgggcctgcggatgctgttcgccaaaaccgtggccgtgaacttcctgctgaccgccaagctgttcttcctccgcgccaagagaagcggatctggcgtgaagcagaccctgaatttcgacctgctgaagctggctggcgacgtggaatccaacccaggcccttctagaggccatatgaccgagtacaagcccacggtgcgcctcgccacccgcgacgacgtccccagggccgtacgcaccctcgccgccgcgttcgccgactaccccgccacgcgccacaccgtcgatccggaccgccacatcgagcgggtcaccgagctgcaagaactcttcctcacgcgcgtcgggctcgacatcggcaaggtgtgggtcgcggacgacggcgccgcggtggcggtctggaccacgccggagagcgtcgaagcgggggcggtgttcgccgagatcggcccgcgcatggccgagttgagcggttcccggctggccgcgcagcaacagatggaaggcctcctggcgccgcaccggcccaaggagcccgcgtggttcctggccaccgtcggcgtctcgcccgaccaccagggcaagggtctgggcagcgccgtcgtgctccccggagtggaggcggccgagcgcgccggggtgcccgccttcctggagacctccgcgccccgcaacctccccttctacgagcggctcggcttcaccgtcaccgccgacgtcgaggtgcccgaaggaccgcgcacctggtgcatgacccgcaagcccggtgcctga

SEQ ID NO: 9566 - DNA, 1920 bp, Artificial Sequence
  Synthetic Polynucloetide
atggccttaccagtgaccgccttgctcctgccgctggccttgctgctccacgccgccaggccggacatccagctgactcagagccctagctttctgagcgccagcgtgggcgacagagtgaccattacatgtagagccagccaggacatcagcagctacctggcctggtatcagcagaagcctggcaacgcccctaaactgctgatctacgccgccagcctgctgcaatctggcgtgccaagcagattcagcgcctttggcagcggcaccgagttcaccctgacaatatctagcctccagccagaggacttcgccacctactactgccagcacctgaagtcttaccctctgttcaccttcggacccggcaccaaggtggacatcaaaagactcgagagccagcctcacaccaagcccagcgtgttcgtgatgaagaacggcaccaacgtggcctgcctcgtgaaagagttctaccccaaggacatcaggatcaacctggtgtccagcaagaagatcaccgagttcgaccccgccatcgtgatctcccccagcggcaagtacaacgccgtgaagctggggaagtacgaggacagcaacagcgtgacctgctccgtgcagcacgacaacaagaccgtgcacagcaccgactttgaagtgaaaaccgactccaccgaccacgtgaagcccaaagagacagagaacaccaagcagcccagcaagagctgccacaagcccaaggccatcgtgcacaccgagaaagtgaacatgatgagcctgaccgtgctgggcctgcggatgctgttcgccaaaaccgtggccgtgaacttcctgctgaccgccaagctgttcttcctcagggccaagcgatctggatctggagcaacaaacttctcactactcaaacaagcaggtgacgtggaggagaatcccgggcctactagtatggactggatttggcgcatccttttccttgtcggcgctgctaccggcgcgcattccttcgaagaagttcagctggttgagtctggcggcagagtcgttagacctggcggaagcctgagactgtcttgtgccgccagcggcttcacctttgacgactacggcatgagctgggtccgacagcctcctggaaagggcctcgaatttgtgtccggcctgaactggaacggcgacatcaccgcctttaccgacagcgtgaagggcagattcaccatcagccgggacaacgtgaagtccagcctgtacctccagatgaacagcctgagagccgacgacaccgccttctactactgtgccagagtgcggacctggggcgattacacaacaggcgaggaaatcatcaacagctggtacttcgacctgtggggcagaggcacactggtcacagtctcttctacgcgtgacaagcagctggacgccgacgtgtcccccaagcctaccatcttcctgccctctatcgccgagacaaagctccagaaggccggcacctacctgtgcctgctggaaaagttcttcccagatgtgattaagatccactggcaggaaaagaagtccaacaccatcctgggcagccaggaaggcaacaccatgaagaccaacgacacctacatgaagttcagctggctgaccgtgcccgagaagtccctggacaaagaacacagatgcatcgtgcggcacgaaaacaacaagaacggcgtggaccaggaaatcatcttcccacccatcaagaccgatgtgattacaatggaccccaaggacaactgctccaaggacgccaacgataccctgctgctccagctgaccaacaccagcgcctactacatgtacttgttgctgctgctgaagtccgtggtgtacttcgccatcatcacatgctgcctgctgcggagaaccgccttctgctgcaacggcgagaagtct

SEQ ID NO: 9567 - DNA, 2754 bp, Artificial Sequence
  Synthetic Polynucloetide
atggccttaccagtgaccgccttgctcctgccgctggccttgctgctccacgccgccaggccgctcgaggggaaaccaattcccaaccctcttctgggactggattcaaccggcagcggcgacaagcagctggacgccgacgtgtcccccaagcctaccatcttcctgccctctatcgccgagacaaagctccagaaggccggcacctacctgtgcctgctggaaaagttcttcccagatgtgattaagatccactggcaggaaaagaagtccaacaccatcctgggcagccaggaaggcaacaccatgaagaccaacgacacctacatgaagttcagctggctgaccgtgcccgagaagtccctggacaaagaacacagatgcatcgtgcggcacgaaaacaacaagaacggcgtggaccaggaaatcatcttcccacccatcaagaccgatgtgattacaatggaccccaaggacaactgctccaaggacgccaacgataccctgctgctccagctgaccaacaccagcgcctactacatgtacttgttgctgctgctgaagtccgtggtgtacttcgccatcatcacatgctgcctgctgcggagaaccgccttctgctgcaacggcgagaagtctagggccaagcgatctggatctggagcaacaaacttctcactactcaaacaagcaggtgacgtggaggagaatcccgggcctactagcatggccttaccagtgaccgccttgctcctgccgctggccttgctgctccacgccgccaggccggacatccagctgactcagagccctagctttctgagcgccagcgtgggcgacagagtgaccattacatgtagagccagccaggacatcagcagctacctggcctggtatcagcagaagcctggcaacgcccctaaactgctgatctacgccgccagcctgctgcaatctggcgtgccaagcagattcagcgcctttggcagcggcaccgagttcaccctgacaatatctagcctccagccagaggacttcgccacctactactgccagcacctgaagtcttaccctctgttcaccttcggacccggcaccaaggtggacatcaaaagaggcggaggcggaagtggaggcggaggatctggcggcggaggctctgaagttcagctggttgagtctggcggcagagtcgttagacctggcggaagcctgagactgtcttgtgccgccagcggcttcacctttgacgactacggcatgagctgggtccgacagcctcctggaaagggcctcgaatttgtgtccggcctgaactggaacggcgacatcaccgcctttaccgacagcgtgaagggcagattcaccatcagccgggacaacgtgaagtccagcctgtacctccagatgaacagcctgagagccgacgacaccgccttctactactgtgccagagtgcggacctggggcgattacacaacaggcgaggaaatcatcaacagctggtacttcgacctgtggggcagaggcacactggtcacagtctcttctacgcgtgagcagaaactgatctcggaagaggatgggagcggcagccagcctcacaccaagcccagcgtgttcgtgatgaagaacggcaccaacgtggcctgcctcgtgaaagagttctaccccaaggacatcaggatcaacctggtgtccagcaagaagatcaccgagttcgaccccgccatcgtgatctcccccagcggcaagtacaacgccgtgaagctggggaagtacgaggacagcaacagcgtgacctgctccgtgcagcacgacaacaagaccgtgcacagcaccgactttgaagtgaaaaccgactccaccgaccacgtgaagcccaaagagacagagaacaccaagcagcccagcaagagctgccacaagcccaaggccatcgtgcacaccgagaaagtgaacatgatgagcctgaccgtgctgggcctgcggatgctgttcgccaaaaccgtggccgtgaacttcctgctgaccgccaagctgttcttcctccgcgccaagagaagcggatctggcgtgaagcagaccctgaatttcgacctgctgaagctggctggcgacgtggaatccaacccaggcccttctagaggccatatgaccgagtacaagcccacggtgcgcctcgccacccgcgacgacgtccccagggccgtacgcaccctcgccgccgcgttcgccgactaccccgccacgcgccacaccgtcgatccggaccgccacatcgagcgggtcaccgagctgcaagaactcttcctcacgcgcgtcgggctcgacatcggcaaggtgtgggtcgcggacgacggcgccgcggtggcggtctggaccacgccggagagcgtcgaagcgggggcggtgttcgccgagatcggcccgcgcatggccgagttgagcggttcccggctggccgcgcagcaacagatggaaggcctcctggcgccgcaccggcccaaggagcccgcgtggttcctggccaccgtcggcgtctcgcccgaccaccagggcaagggtctgggcagcgccgtcgtgctccccggagtggaggcggccgagcgcgccggggtgcccgccttcctggagacctccgcgccccgcaacctccccttctacgagcggctcggcttcaccgtcaccgccgacgtcgaggtgcccgaaggaccgcgcacctggtgcatgacccgcaagcccggtgcctga

SEQ ID NO: 9568 - DNA, 3129 bp, Artificial Sequence
  Synthetic Polynucloetide
atggccttaccagtgaccgccttgctcctgccgctggccttgctgctccacgccgccaggccggacatccagctgactcagagccctagctttctgagcgccagcgtgggcgacagagtgaccattacatgtagagccagccaggacatcagcagctacctggcctggtatcagcagaagcctggcaacgcccctaaactgctgatctacgccgccagcctgctgcaatctggcgtgccaagcagattcagcgcctttggcagcggcaccgagttcaccctgacaatatctagcctccagccagaggacttcgccacctactactgccagcacctgaagtcttaccctctgttcaccttcggacccggcaccaaggtggacatcaaaagaggacagcctaaggccaatcctaccgtgacactgttccctccaagcagcgaagaactccaggccaacaaggccacacttgtgtgcctgatctccgacttctaccctggggctgtgacagtggcttggaaggccgatggatctcctgtgaaagccggcgtggaaaccaccaagccatccaagcagagcaacaacaaatacgccgccagctcctacctgagcctgacacctgagcagtggaagtcccacagatcctacagctgccaagtgacccacgaaggcagcaccgtggaaaagacagtggcccctacagagtgcagcggatcccagagcttcggcctgctggaccccaagctgtgctacctgctggatggcatcctgttcatctacggcgtgatcctgaccgccctgttcctgagagtgaagttcagcagaagcgccgacgcccctgcctaccagcagggacagaaccaactgtacaacgagctgaacctgggcagacgggaagagtacgacgtgctggacaagcggagaggcagggaccctgagatgggcggaaagccccagcggagaaagaacccccaggaaggactgtataacgaactccagaaagacaagatggccgaagcctacagcgagatcggcatgaagggcgagcggagaagaggcaagggccacgatggcctgtaccagggcctgagcaccgccaccaaggacacctatgacgccctgcacatgcaggccctgcctccaagaagggccaagcgatctggatctggagcaacaaacttctcactactcaaacaagcaggtgacgtggaggagaatcccgggcctactagtatggactggatttggcgcatccttttccttgtcggcgctgctaccggcgcgcattccttcgaagaagttcagctggttgagtctggcggcagagtcgttagacctggcggaagcctgagactgtcttgtgccgccagcggcttcacctttgacgactacggcatgagctgggtccgacagcctcctggaaagggcctcgaatttgtgtccggcctgaactggaacggcgacatcaccgcctttaccgacagcgtgaagggcagattcaccatcagccgggacaacgtgaagtccagcctgtacctccagatgaacagcctgagagccgacgacaccgccttctactactgtgccagagtgcggacctggggcgattacacaacaggcgaggaaatcatcaacagctggtacttcgacctgtggggcagaggcacactggtcacagtctcttctgcctctacaaagggaccctccgtgtttcctctggctcccagcagcaagtctacaagcggaggaacagccgctctgggctgcctggtcaaggattactttcccgagcctgtgaccgtgtcctggaatagcggagcactgacaagcggcgtgcacacctttccagccgtgctgcaaagcagcggcctgtactctctgagcagcgtggtcacagtgcctagctctagcctgggcacccagacctacatctgcaatgtgaaccacaagcctagcaacaccaaggtggacaagagagtggaacccaagagctgtggtacccagagttttgggttgttggaccctaaattgtgctatctgttggacggaatcctgttcatttacggagtgatcctgaccgcattgttcctgcgggttaagttttccagatccgcagacgcacccgcttaccaacaagggcagaaccaactctacaatgaacttaatttggggcggagggaagagtacgacgttctggacaaaaggaggggacgagatcccgagatgggcggaaagcctcagcgaaggaagaatccgcaagaggggctttataacgaactccagaaagataaaatggcagaagcctatagtgagattgggatgaagggagaaaggaggaggggtaaaggtcacgatgggttgtaccaaggattgagcacagccactaaagatacctatgatgcgctccacatgcaggccctgccgccaagacgcgccaagagaagcggatctggcgtgaagcagaccctgaatttcgacctgctgaagctggctggcgacgtggaatccaacccaggcccttctagaggccatatgaccgagtacaagcccacggtgcgcctcgccacccgcgacgacgtccccagggccgtacgcaccctcgccgccgcgttcgccgactaccccgccacgcgccacaccgtcgatccggaccgccacatcgagcgggtcaccgagctgcaagaactcttcctcacgcgcgtcgggctcgacatcggcaaggtgtgggtcgcggacgacggcgccgcggtggcggtctggaccacgccggagagcgtcgaagcgggggcggtgttcgccgagatcggcccgcgcatggccgagttgagcggttcccggctggccgcgcagcaacagatggaaggcctcctggcgccgcaccggcccaaggagcccgcgtggttcctggccaccgtcggcgtctcgcccgaccaccagggcaagggtctgggcagcgccgtcgtgctccccggagtggaggcggccgagcgcgccggggtgcccgccttcctggagacctccgcgccccgcaacctccccttctacgagcggctcggcttcaccgtcaccgccgacgtcgaggtgcccgaaggaccgcgcacctggtgcatgacccgcaagcccggtgcctga

SEQ ID NO: 9569 - DNA, 2484 bp, Artificial Sequence
  Synthetic Polynucloetide
atggccttaccagtgaccgccttgctcctgccgctggccttgctgctccacgccgccaggccggacatccagctgactcagagccctagctttctgagcgccagcgtgggcgacagagtgaccattacatgtagagccagccaggacatcagcagctacctggcctggtatcagcagaagcctggcaacgcccctaaactgctgatctacgccgccagcctgctgcaatctggcgtgccaagcagattcagcgcctttggcagcggcaccgagttcaccctgacaatatctagcctccagccagaggacttcgccacctactactgccagcacctgaagtcttaccctctgttcaccttcggacccggcaccaaggtggacatcaaaagactcgaggacctgaagaacgtgttcccacctgaggtggccgtgttcgagcctagcgaggccgagatcagccacacccagaaagccaccctcgtgtgcctggctaccggcttctaccccgaccatgtggaactgtcttggtgggtcaacggcaaagaggtgcacagcggcgtgtctaccgacccccagccactgaaagaacagcccgccctgaacgacagccggtactgcctgagcagcagactgagagtgtccgccaccttctggcagaacccccggaaccacttcagatgccaggtgcagttctacggcctgagcgagaacgacgagtggacccaggacagagccaagcccgtgacccagatcgtgtctgccgaagcctggggcagagccgattgcggatcccagagcttcggcctgctggaccccaagctgtgctacctgctggatggcatcctgttcatctacggcgtgatcctgaccgccctgttcctgagagtgaagttcagcagaagcgccgacgcccctgcctaccagcagggacagaaccaactgtacaacgagctgaacctgggcagacgggaagagtacgacgtgctggacaagcggagaggcagggaccctgagatgggcggaaagccccagcggagaaagaacccccaggaaggactgtataacgaactccagaaagacaagatggccgaagcctacagcgagatcggcatgaagggcgagcggagaagaggcaagggccacgatggcctgtaccagggcctgagcaccgccaccaaggacacctatgacgccctgcacatgcaggccctgcctccaagaagggccaagcgatctggatctggagcaacaaacttctcactactcaaacaagcaggtgacgtggaggagaatcccgggcctactagtatggactggatttggcgcatccttttccttgtcggcgctgctaccggcgcgcattccttcgaagaagttcagctggttgagtctggcggcagagtcgttagacctggcggaagcctgagactgtcttgtgccgccagcggcttcacctttgacgactacggcatgagctgggtccgacagcctcctggaaagggcctcgaatttgtgtccggcctgaactggaacggcgacatcaccgcctttaccgacagcgtgaagggcagattcaccatcagccgggacaacgtgaagtccagcctgtacctccagatgaacagcctgagagccgacgacaccgccttctactactgtgccagagtgcggacctggggcgattacacaacaggcgaggaaatcatcaacagctggtacttcgacctgtggggcagaggcacactggtcacagtctcttctacgcgtatccagaaccctgatcctgccgtgtaccagctgcgggatagcaagagcagcgacaagagcgtgtgtctgttcaccgacttcgacagccagaccaacgtgtcccagagcaaggactccgacgtgtacatcaccgataagaccgtgctggacatgcggagcatggacttcaagagcaactccgccgtggcctggtccaacaagtccgatttcgcctgcgccaacgccttcaacaacagcattatccccgaggacacattcttcccaagccccgagagcagctgcggtacccagagttttgggttgttggaccctaaattgtgctatctgttggacggaatcctgttcatttacggagtgatcctgaccgcattgttcctgcgggttaagttttccagatccgcagacgcacccgcttaccaacaagggcagaaccaactctacaatgaacttaatttggggcggagggaagagtacgacgttctggacaaaaggaggggacgagatcccgagatgggcggaaagcctcagcgaaggaagaatccgcaagaggggctttataacgaactccagaaagataaaatggcagaagcctatagtgagattgggatgaagggagaaaggaggaggggtaaaggtcacgatgggttgtaccaaggattgagcacagccactaaagatacctatgatgcgctccacatgcaggccctgccgccaaga

SEQ ID NO: 9570 - DNA, 2484 bp, Artificial Sequence
  Synthetic Polynucloetide
atggccttaccagtgaccgccttgctcctgccgctggccttgctgctccacgccgccaggccggacatccagctgactcagagccctagctttctgagcgccagcgtgggcgacagagtgaccattacatgtagagccagccaggacatcagcagctacctggcctggtatcagcagaagcctggcaacgcccctaaactgctgatctacgccgccagcctgctgcaatctggcgtgccaagcagattcagcgcctttggcagcggcaccgagttcaccctgacaatatctagcctccagccagaggacttcgccacctactactgccagcacctgaagtcttaccctctgttcaccttcggacccggcaccaaggtggacatcaaaagactcgaggacctgaagaacgtgttcccacctgaggtggccgtgttcgagcctagcaaggccgagatcgcccacacccagaaagccaccctcgtgtgcctggctaccggcttctaccccgaccatgtggaactgtcttggtgggtcaacggcaaagaggtgcacagcggcgtgtgtaccgacccccagccactgaaagaacagcccgccctgaacgacagccggtactgcctgagcagcagactgagagtgtccgccaccttctggcagaacccccggaaccacttcagatgccaggtgcagttctacggcctgagcgagaacgacgagtggacccaggacagagccaagcccgtgacccagatcgtgtctgccgaagcctggggcagagccgattgcggatcccagagcttcggcctgctggaccccaagctgtgctacctgctggatggcatcctgttcatctacggcgtgatcctgaccgccctgttcctgagagtgaagttcagcagaagcgccgacgcccctgcctaccagcagggacagaaccaactgtacaacgagctgaacctgggcagacgggaagagtacgacgtgctggacaagcggagaggcagggaccctgagatgggcggaaagccccagcggagaaagaacccccaggaaggactgtataacgaactccagaaagacaagatggccgaagcctacagcgagatcggcatgaagggcgagcggagaagaggcaagggccacgatggcctgtaccagggcctgagcaccgccaccaaggacacctatgacgccctgcacatgcaggccctgcctccaagaagggccaagcgatctggatctggagcaacaaacttctcactactcaaacaagcaggtgacgtggaggagaatcccgggcctactagtatggactggatttggcgcatccttttccttgtcggcgctgctaccggcgcgcattccttcgaagaagttcagctggttgagtctggcggcagagtcgttagacctggcggaagcctgagactgtcttgtgccgccagcggcttcacctttgacgactacggcatgagctgggtccgacagcctcctggaaagggcctcgaatttgtgtccggcctgaactggaacggcgacatcaccgcctttaccgacagcgtgaagggcagattcaccatcagccgggacaacgtgaagtccagcctgtacctccagatgaacagcctgagagccgacgacaccgccttctactactgtgccagagtgcggacctggggcgattacacaacaggcgaggaaatcatcaacagctggtacttcgacctgtggggcagaggcacactggtcacagtctcttctacgcgtatccagaaccctgatcctgccgtgtaccagctgcgggatagcaagagcagcgacaagagcgtgtgtctgttcaccgacttcgacagccagaccaacgtgtcccagagcaaggactccgacgtgtacatcaccgataagtgcgtgctggacatgcggagcatggacttcaagagcaactccgccgtggcctggtccaacaagtccgatttcgcctgcgccaacgccttcaacaacagcattatccccgaggacacattcttcccaagcagcgacgtgccctgcggtacccagagttttgggttgttggaccctaaattgtgctatctgttggacggaatcctgttcatttacggagtgatcctgaccgcattgttcctgcgggttaagttttccagatccgcagacgcacccgcttaccaacaagggcagaaccaactctacaatgaacttaatttggggcggagggaagagtacgacgttctggacaaaaggaggggacgagatcccgagatgggcggaaagcctcagcgaaggaagaatccgcaagaggggctttataacgaactccagaaagataaaatggcagaagcctatagtgagattgggatgaagggagaaaggaggaggggtaaaggtcacgatgggttgtaccaaggattgagcacagccactaaagatacctatgatgcgctccacatgcaggccctgccgccaaga

SEQ ID NO: 9571 - DNA, 2697 bp, Artificial Sequence
  Synthetic Polynucloetide
atggccttaccagtgaccgccttgctcctgccgctggccttgctgctccacgccgccaggccggacatccagctgactcagagccctagctttctgagcgccagcgtgggcgacagagtgaccattacatgtagagccagccaggacatcagcagctacctggcctggtatcagcagaagcctggcaacgcccctaaactgctgatctacgccgccagcctgctgcaatctggcgtgccaagcagattcagcgcctttggcagcggcaccgagttcaccctgacaatatctagcctccagccagaggacttcgccacctactactgccagcacctgaagtcttaccctctgttcaccttcggacccggcaccaaggtggacatcaaaagactcgaggggaaaccaattcccaaccctcttctgggactggattcaaccggcagcggcgaggacctgaagaacgtgttcccacctgaggtggccgtgttcgagcctagcgaggccgagatcagccacacccagaaagccaccctcgtgtgcctggctaccggcttctaccccgaccatgtggaactgtcttggtgggtcaacggcaaagaggtgcacagcggcgtgtctaccgacccccagccactgaaagaacagcccgccctgaacgacagccggtactgcctgagcagcagactgagagtgtccgccaccttctggcagaacccccggaaccacttcagatgccaggtgcagttctacggcctgagcgagaacgacgagtggacccaggacagagccaagcccgtgacccagatcgtgtctgccgaagcctggggcagagccgattgcggatcccagagcttcggcctgctggaccccaagctgtgctacctgctggatggcatcctgttcatctacggcgtgatcctgaccgccctgttcctgagagtgaagttcagcagaagcgccgacgcccctgcctaccagcagggacagaaccaactgtacaacgagctgaacctgggcagacgggaagagtacgacgtgctggacaagcggagaggcagggaccctgagatgggcggaaagccccagcggagaaagaacccccaggaaggactgtataacgaactccagaaagacaagatggccgaagcctacagcgagatcggcatgaagggcgagcggagaagaggcaagggccacgatggcctgtaccagggcctgagcaccgccaccaaggacacctatgacgccctgcacatgcaggccctgcctccaagaagggccaagcgatctggatctggagcaacaaacttctcactactcaaacaagcaggtgacgtggaggagaatcccgggcctactagtatggactggatttggcgcatccttttccttgtcggcgctgctaccggcgcgcattccttcgaagaagttcagctggttgagtctggcggcagagtcgttagacctggcggaagcctgagactgtcttgtgccgccagcggcttcacctttgacgactacggcatgagctgggtccgacagcctcctggaaagggcctcgaatttgtgtccggcctgaactggaacggcgacatcaccgcctttaccgacagcgtgaagggcagattcaccatcagccgggacaacgtgaagtccagcctgtacctccagatgaacagcctgagagccgacgacaccgccttctactactgtgccagagtgcggacctggggcgattacacaacaggcgaggaaatcatcaacagctggtacttcgacctgtggggcagaggcacactggtcacagtctcttctacgcgtgagcagaaactgatctcggaagaggatgggagcggcatccagaaccctgatcctgccgtgtaccagctgcgggatagcaagagcagcgacaagagcgtgtgtctgttcaccgacttcgacagccagaccaacgtgtcccagagcaaggactccgacgtgtacatcaccgataagaccgtgctggacatgcggagcatggacttcaagagcaactccgccgtggcctggtccaacaagtccgatttcgcctgcgccaacgccttcaacaacagcattatccccgaggacacattcttcccaagccccgagagcagctgcggtacccagagttttgggttgttggaccctaaattgtgctatctgttggacggaatcctgttcatttacggagtgatcctgaccgcattgttcctgaggagcaagcggtcacggctgctccacagcgattacatgaatatgacaccacgaagaccgggtcctactcgcaaacactaccaaccctacgcacctccccgcgactttgcagcgtaccgatctcgggttaagttttccagatccgcagacgcacccgcttaccaacaagggcagaaccaactctacaatgaacttaatttggggcggagggaagagtacgacgttctggacaaaaggaggggacgagatcccgagatgggcggaaagcctcagcgaaggaagaatccgcaagaggggctttataacgaactccagaaagataaaatggcagaagcctatagtgagattgggatgaagggagaaaggaggaggggtaaaggtcacgatgggttgtaccaaggattgagcacagccactaaagatacctatgatgcgctccacatgcaggccctgccgccaaga

SEQ ID NO: 9572 - DNA, 2820 bp, Artificial Sequence
  Synthetic Polynucloetide
atggccttaccagtgaccgccttgctcctgccgctggccttgctgctccacgccgccaggccggacatccagctgactcagagccctagctttctgagcgccagcgtgggcgacagagtgaccattacatgtagagccagccaggacatcagcagctacctggcctggtatcagcagaagcctggcaacgcccctaaactgctgatctacgccgccagcctgctgcaatctggcgtgccaagcagattcagcgcctttggcagcggcaccgagttcaccctgacaatatctagcctccagccagaggacttcgccacctactactgccagcacctgaagtcttaccctctgttcaccttcggacccggcaccaaggtggacatcaaaagactcgaggggaaaccaattcccaaccctcttctgggactggattcaaccggcagcggcgaggacctgaagaacgtgttcccacctgaggtggccgtgttcgagcctagcgaggccgagatcagccacacccagaaagccaccctcgtgtgcctggctaccggcttctaccccgaccatgtggaactgtcttggtgggtcaacggcaaagaggtgcacagcggcgtgtctaccgacccccagccactgaaagaacagcccgccctgaacgacagccggtactgcctgagcagcagactgagagtgtccgccaccttctggcagaacccccggaaccacttcagatgccaggtgcagttctacggcctgagcgagaacgacgagtggacccaggacagagccaagcccgtgacccagatcgtgtctgccgaagcctggggcagagccgattgcggatcccagagcttcggcctgctggaccccaagctgtgctacctgctggatggcatcctgttcatctacggcgtgatcctgaccgccctgttcctgaggagtaagaggagcaggctcctgcacagtgactacatgaacatgactccacgccgccccggacccacccgcaagcattaccagccctatgccccaccacgcgacttcgcagcctatcgctccagagtgaagttcagcagaagcgccgacgcccctgcctaccagcagggacagaaccaactgtacaacgagctgaacctgggcagacgggaagagtacgacgtgctggacaagcggagaggcagggaccctgagatgggcggaaagccccagcggagaaagaacccccaggaaggactgtataacgaactccagaaagacaagatggccgaagcctacagcgagatcggcatgaagggcgagcggagaagaggcaagggccacgatggcctgtaccagggcctgagcaccgccaccaaggacacctatgacgccctgcacatgcaggccctgcctccaagaagggccaagcgatctggatctggagcaacaaacttctcactactcaaacaagcaggtgacgtggaggagaatcccgggcctactagtatggactggatttggcgcatccttttccttgtcggcgctgctaccggcgcgcattccttcgaagaagttcagctggttgagtctggcggcagagtcgttagacctggcggaagcctgagactgtcttgtgccgccagcggcttcacctttgacgactacggcatgagctgggtccgacagcctcctggaaagggcctcgaatttgtgtccggcctgaactggaacggcgacatcaccgcctttaccgacagcgtgaagggcagattcaccatcagccgggacaacgtgaagtccagcctgtacctccagatgaacagcctgagagccgacgacaccgccttctactactgtgccagagtgcggacctggggcgattacacaacaggcgaggaaatcatcaacagctggtacttcgacctgtggggcagaggcacactggtcacagtctcttctacgcgtgagcagaaactgatctcggaagaggatgggagcggcatccagaaccctgatcctgccgtgtaccagctgcgggatagcaagagcagcgacaagagcgtgtgtctgttcaccgacttcgacagccagaccaacgtgtcccagagcaaggactccgacgtgtacatcaccgataagaccgtgctggacatgcggagcatggacttcaagagcaactccgccgtggcctggtccaacaagtccgatttcgcctgcgccaacgccttcaacaacagcattatccccgaggacacattcttcccaagccccgagagcagctgcggtacccagagttttgggttgttggaccctaaattgtgctatctgttggacggaatcctgttcatttacggagtgatcctgaccgcattgttcctgaggagcaagcggtcacggctgctccacagcgattacatgaatatgacaccacgaagaccgggtcctactcgcaaacactaccaaccctacgcacctccccgcgactttgcagcgtaccgatctcgggttaagttttccagatccgcagacgcacccgcttaccaacaagggcagaaccaactctacaatgaacttaatttggggcggagggaagagtacgacgttctggacaaaaggaggggacgagatcccgagatgggcggaaagcctcagcgaaggaagaatccgcaagaggggctttataacgaactccagaaagataaaatggcagaagcctatagtgagattgggatgaagggagaaaggaggaggggtaaaggtcacgatgggttgtaccaaggattgagcacagccactaaagatacctatgatgcgctccacatgcaggccctgccgccaaga

SEQ ID NO: 9573 - DNA, 2703 bp, Artificial Sequence
  Synthetic Polynucloetide
atggccttaccagtgaccgccttgctcctgccgctggccttgctgctccacgccgccaggccggacatccagctgactcagagccctagctttctgagcgccagcgtgggcgacagagtgaccattacatgtagagccagccaggacatcagcagctacctggcctggtatcagcagaagcctggcaacgcccctaaactgctgatctacgccgccagcctgctgcaatctggcgtgccaagcagattcagcgcctttggcagcggcaccgagttcaccctgacaatatctagcctccagccagaggacttcgccacctactactgccagcacctgaagtcttaccctctgttcaccttcggacccggcaccaaggtggacatcaaaagactcgaggggaaaccaattcccaaccctcttctgggactggattcaaccggcagcggcgaggacctgaagaacgtgttcccacctgaggtggccgtgttcgagcctagcgaggccgagatcagccacacccagaaagccaccctcgtgtgcctggctaccggcttctaccccgaccatgtggaactgtcttggtgggtcaacggcaaagaggtgcacagcggcgtgtctaccgacccccagccactgaaagaacagcccgccctgaacgacagccggtactgcctgagcagcagactgagagtgtccgccaccttctggcagaacccccggaaccacttcagatgccaggtgcagttctacggcctgagcgagaacgacgagtggacccaggacagagccaagcccgtgacccagatcgtgtctgccgaagcctggggcagagccgattgcggatcccagagcttcggcctgctggaccccaagctgtgctacctgctggatggcatcctgttcatctacggcgtgatcctgaccgccctgttcctgagagtgaagttcagcagaagcgccgacgcccctgcctaccagcagggacagaaccaactgtacaacgagctgaacctgggcagacgggaagagtacgacgtgctggacaagcggagaggcagggaccctgagatgggcggaaagccccagcggagaaagaacccccaggaaggactgtataacgaactccagaaagacaagatggccgaagcctacagcgagatcggcatgaagggcgagcggagaagaggcaagggccacgatggcctgtaccagggcctgagcaccgccaccaaggacacctatgacgccctgcacatgcaggccctgcctccaagaagggccaagcgatctggatctggagcaacaaacttctcactactcaaacaagcaggtgacgtggaggagaatcccgggcctactagtatggactggatttggcgcatccttttccttgtcggcgctgctaccggcgcgcattccttcgaagaagttcagctggttgagtctggcggcagagtcgttagacctggcggaagcctgagactgtcttgtgccgccagcggcttcacctttgacgactacggcatgagctgggtccgacagcctcctggaaagggcctcgaatttgtgtccggcctgaactggaacggcgacatcaccgcctttaccgacagcgtgaagggcagattcaccatcagccgggacaacgtgaagtccagcctgtacctccagatgaacagcctgagagccgacgacaccgccttctactactgtgccagagtgcggacctggggcgattacacaacaggcgaggaaatcatcaacagctggtacttcgacctgtggggcagaggcacactggtcacagtctcttctacgcgtgagcagaaactgatctcggaagaggatctggggagcggcatccagaaccctgatcctgccgtgtaccagctgcgggatagcaagagcagcgacaagagcgtgtgtctgttcaccgacttcgacagccagaccaacgtgtcccagagcaaggactccgacgtgtacatcaccgataagaccgtgctggacatgcggagcatggacttcaagagcaactccgccgtggcctggtccaacaagtccgatttcgcctgcgccaacgccttcaacaacagcattatccccgaggacacattcttcccaagccccgagagcagctgcggtacccagagttttgggttgttggaccctaaattgtgctatctgttggacggaatcctgttcatttacggagtgatcctgaccgcattgttcctgaagagaggccggaagaagctgctgtacatcttcaagcagcctttcatgcggcccgtgcagaccacccaggaagaggacggctgctcctgccggttccccgaggaagaagaaggcggctgcgagctgcgggttaagttttccagatccgcagacgcacccgcttaccaacaagggcagaaccaactctacaatgaacttaatttggggcggagggaagagtacgacgttctggacaaaaggaggggacgagatcccgagatgggcggaaagcctcagcgaaggaagaatccgcaagaggggctttataacgaactccagaaagataaaatggcagaagcctatagtgagattgggatgaagggagaaaggaggaggggtaaaggtcacgatgggttgtaccaaggattgagcacagccactaaagatacctatgatgcgctccacatgcaggccctgccgccaaga

SEQ ID NO: 9574 - DNA, 2829 bp, Artificial Sequence
  Synthetic Polynucloetide
atggccttaccagtgaccgccttgctcctgccgctggccttgctgctccacgccgccaggccggacatccagctgactcagagccctagctttctgagcgccagcgtgggcgacagagtgaccattacatgtagagccagccaggacatcagcagctacctggcctggtatcagcagaagcctggcaacgcccctaaactgctgatctacgccgccagcctgctgcaatctggcgtgccaagcagattcagcgcctttggcagcggcaccgagttcaccctgacaatatctagcctccagccagaggacttcgccacctactactgccagcacctgaagtcttaccctctgttcaccttcggacccggcaccaaggtggacatcaaaagactcgaggggaaaccaattcccaaccctcttctgggactggattcaaccggcagcggcgaggacctgaagaacgtgttcccacctgaggtggccgtgttcgagcctagcgaggccgagatcagccacacccagaaagccaccctcgtgtgcctggctaccggcttctaccccgaccatgtggaactgtcttggtgggtcaacggcaaagaggtgcacagcggcgtgtctaccgacccccagccactgaaagaacagcccgccctgaacgacagccggtactgcctgagcagcagactgagagtgtccgccaccttctggcagaacccccggaaccacttcagatgccaggtgcagttctacggcctgagcgagaacgacgagtggacccaggacagagccaagcccgtgacccagatcgtgtctgccgaagcctggggcagagccgattgcggatcccagagcttcggcctgctggaccccaagctgtgctacctgctggatggcatcctgttcatctacggcgtgatcctgaccgccctgttcctgaaacggggcagaaagaaactcctgtatatattcaaacaaccatttatgagaccagtacaaactactcaagaggaagatggctgtagctgccgatttccagaagaagaagaaggaggatgtgaactgagagtgaagttcagcagaagcgccgacgcccctgcctaccagcagggacagaaccaactgtacaacgagctgaacctgggcagacgggaagagtacgacgtgctggacaagcggagaggcagggaccctgagatgggcggaaagccccagcggagaaagaacccccaggaaggactgtataacgaactccagaaagacaagatggccgaagcctacagcgagatcggcatgaagggcgagcggagaagaggcaagggccacgatggcctgtaccagggcctgagcaccgccaccaaggacacctatgacgccctgcacatgcaggccctgcctccaagaagggccaagcgatctggatctggagcaacaaacttctcactactcaaacaagcaggtgacgtggaggagaatcccgggcctactagtatggactggatttggcgcatccttttccttgtcggcgctgctaccggcgcgcattccttcgaagaagttcagctggttgagtctggcggcagagtcgttagacctggcggaagcctgagactgtcttgtgccgccagcggcttcacctttgacgactacggcatgagctgggtccgacagcctcctggaaagggcctcgaatttgtgtccggcctgaactggaacggcgacatcaccgcctttaccgacagcgtgaagggcagattcaccatcagccgggacaacgtgaagtccagcctgtacctccagatgaacagcctgagagccgacgacaccgccttctactactgtgccagagtgcggacctggggcgattacacaacaggcgaggaaatcatcaacagctggtacttcgacctgtggggcagaggcacactggtcacagtctcttctacgcgtgagcagaaactgatctcggaagaggatctggggagcggcatccagaaccctgatcctgccgtgtaccagctgcgggatagcaagagcagcgacaagagcgtgtgtctgttcaccgacttcgacagccagaccaacgtgtcccagagcaaggactccgacgtgtacatcaccgataagaccgtgctggacatgcggagcatggacttcaagagcaactccgccgtggcctggtccaacaagtccgatttcgcctgcgccaacgccttcaacaacagcattatccccgaggacacattcttcccaagccccgagagcagctgcggtacccagagttttgggttgttggaccctaaattgtgctatctgttggacggaatcctgttcatttacggagtgatcctgaccgcattgttcctgaagagaggccggaagaagctgctgtacatcttcaagcagcctttcatgcggcccgtgcagaccacccaggaagaggacggctgctcctgccggttccccgaggaagaagaaggcggctgcgagctgcgggttaagttttccagatccgcagacgcacccgcttaccaacaagggcagaaccaactctacaatgaacttaatttggggcggagggaagagtacgacgttctggacaaaaggaggggacgagatcccgagatgggcggaaagcctcagcgaaggaagaatccgcaagaggggctttataacgaactccagaaagataaaatggcagaagcctatagtgagattgggatgaagggagaaaggaggaggggtaaaggtcacgatgggttgtaccaaggattgagcacagccactaaagatacctatgatgcgctccacatgcaggccctgccgccaaga

SEQ ID NO: 9575 - DNA, 2502 bp, Artificial Sequence
  Synthetic Polynucloetide
atggccttaccagtgaccgccttgctcctgccgctggccttgctgctccacgccgccaggccggacatccagctgactcagagccctagctttctgagcgccagcgtgggcgacagagtgaccattacatgtagagccagccaggacatcagcagctacctggcctggtatcagcagaagcctggcaacgcccctaaactgctgatctacgccgccagcctgctgcaatctggcgtgccaagcagattcagcgcctttggcagcggcaccgagttcaccctgacaatatctagcctccagccagaggacttcgccacctactactgccagcacctgaagtcttaccctctgttcaccttcggacccggcaccaaggtggacatcaaaagactcgagcagagcttcggcctgctggaccccaagctgtgctacctgctggatggcatcctgttcatctacggcgtgatcctgaccgccctgttcctgagagtgaagttcagcagaagcgccgacgcccctgcctaccagcagggacagaaccaactgtacaacgagctgaacctgggcagacgggaagagtacgacgtgctggacaagcggagaggcagggaccctgagatgggcggaaagccccagcggagaaagaacccccaggaaggactgtataacgaactccagaaagacaagatggccgaagcctacagcgagatcggcatgaagggcgagcggagaagaggcaagggccacgatggcctgtaccagggcctgagcaccgccaccaaggacacctatgacgccctgcacatgcaggccctgcctccaagaagggccaagcgatctggatctggagcaacaaacttctcactactcaaacaagcaggtgacgtggaggagaatcccgggcctactagtatggactggatttggcgcatccttttccttgtcggcgctgctaccggcgcgcattccttcgaagaagttcagctggttgagtctggcggcagagtcgttagacctggcggaagcctgagactgtcttgtgccgccagcggcttcacctttgacgactacggcatgagctgggtccgacagcctcctggaaagggcctcgaatttgtgtccggcctgaactggaacggcgacatcaccgcctttaccgacagcgtgaagggcagattcaccatcagccgggacaacgtgaagtccagcctgtacctccagatgaacagcctgagagccgacgacaccgccttctactactgtgccagagtgcggacctggggcgattacacaacaggcgaggaaatcatcaacagctggtacttcgacctgtggggcagaggcacactggtcacagtctcttctacgcgtcagagttttgggttgttggaccctaaattgtgctatctgttggacggaatcctgttcatttacggagtgatcctgaccgcattgttcctgcgggttaagttttccagatccgcagacgcacccgcttaccaacaagggcagaaccaactctacaatgaacttaatttggggcggagggaagagtacgacgttctggacaaaaggaggggacgagatcccgagatgggcggaaagcctcagcgaaggaagaatccgcaagaggggctttataacgaactccagaaagataaaatggcagaagcctatagtgagattgggatgaagggagaaaggaggaggggtaaaggtcacgatgggttgtaccaaggattgagcacagccactaaagatacctatgatgcgctccacatgcaggccctgccgccaagacgcgccaagagaagcggatctggcgtgaagcagaccctgaatttcgacctgctgaagctggctggcgacgtggaatccaacccaggcccttctagaggccatatgaccgagtacaagcccacggtgcgcctcgccacccgcgacgacgtccccagggccgtacgcaccctcgccgccgcgttcgccgactaccccgccacgcgccacaccgtcgatccggaccgccacatcgagcgggtcaccgagctgcaagaactcttcctcacgcgcgtcgggctcgacatcggcaaggtgtgggtcgcggacgacggcgccgcggtggcggtctggaccacgccggagagcgtcgaagcgggggcggtgttcgccgagatcggcccgcgcatggccgagttgagcggttcccggctggccgcgcagcaacagatggaaggcctcctggcgccgcaccggcccaaggagcccgcgtggttcctggccaccgtcggcgtctcgcccgaccaccagggcaagggtctgggcagcgccgtcgtgctccccggagtggaggcggccgagcgcgccggggtgcccgccttcctggagacctccgcgccccgcaacctccccttctacgagcggctcggcttcaccgtcaccgccgacgtcgaggtgcccgaaggaccgcgcacctggtgcatgacccgcaagcccggtgcctga

SEQ ID NO: 9576 - DNA, 1974 bp, Artificial Sequence
  Synthetic Polynucloetide
atggccttaccagtgaccgccttgctcctgccgctggccttgctgctccacgccgccaggccggacatccagctgactcagagccctagctttctgagcgccagcgtgggcgacagagtgaccattacatgtagagccagccaggacatcagcagctacctggcctggtatcagcagaagcctggcaacgcccctaaactgctgatctacgccgccagcctgctgcaatctggcgtgccaagcagattcagcgcctttggcagcggcaccgagttcaccctgacaatatctagcctccagccagaggacttcgccacctactactgccagcacctgaagtcttaccctctgttcaccttcggacccggcaccaaggtggacatcaaaagactcgagggacagcctaaggccaatcctaccgtgacactgttccctccaagcagcgaagaactccaggccaacaaggccacacttgtgtgcctgatctccgacttctaccctggggctgtgacagtggcttggaaggccgatggatctcctgtgaaagccggcgtggaaaccaccaagccatccaagcagagcaacaacaaatacgccgccagctcctacctgagcctgacacctgagcagtggaagtcccacagatcctacagctgccaagtgacccacgaaggcagcaccgtggaaaagacagtggcccctacagagtgcagccccatcaagaccgatgtgattacaatggaccccaaggacaactgctccaaggacgccaacgataccctgctgctccagctgaccaacaccagcgcctactacatgtacttgttgctgctgctgaagtccgtggtgtacttcgccatcatcacatgctgcctgctgcggagaaccgccttctgctgcaacggcgagaagtctagggccaagcgatctggatctggagcaacaaacttctcactactcaaacaagcaggtgacgtggaggagaatcccgggcctactagtatggactggatttggcgcatccttttccttgtcggcgctgctaccggcgcgcattccttcgaagaagttcagctggttgagtctggcggcagagtcgttagacctggcggaagcctgagactgtcttgtgccgccagcggcttcacctttgacgactacggcatgagctgggtccgacagcctcctggaaagggcctcgaatttgtgtccggcctgaactggaacggcgacatcaccgcctttaccgacagcgtgaagggcagattcaccatcagccgggacaacgtgaagtccagcctgtacctccagatgaacagcctgagagccgacgacaccgccttctactactgtgccagagtgcggacctggggcgattacacaacaggcgaggaaatcatcaacagctggtacttcgacctgtggggcagaggcacactggtcacagtctcttctacgcgtgcctctacaaagggaccctccgtgtttcctctggctcccagcagcaagtctacaagcggaggaacagccgctctgggctgcctggtcaaggattactttcccgagcctgtgaccgtgtcctggaatagcggagcactgacaagcggcgtgcacacctttccagccgtgctgcaaagcagcggcctgtactctctgagcagcgtggtcacagtgcctagctctagcctgggcacccagacctacatctgcaatgtgaaccacaagcctagcaacaccaaggtggacaagagagtggaacccaagagctgtgaagtgaaaaccgactccaccgaccacgtgaagcccaaagagacagagaacaccaagcagcccagcaagagctgccacaagcccaaggccatcgtgcacaccgagaaagtgaacatgatgagcctgaccgtgctgggcctgcggatgctgttcgccaaaaccgtggccgtgaacttcctgctgaccgccaagctgttcttcctc

SEQ ID NO: 9577 - DNA, 1908 bp, Artificial Sequence
  Synthetic Polynucloetide
atggccttaccagtgaccgccttgctcctgccgctggccttgctgctccacgccgccaggccggacatccagctgactcagagccctagctttctgagcgccagcgtgggcgacagagtgaccattacatgtagagccagccaggacatcagcagctacctggcctggtatcagcagaagcctggcaacgcccctaaactgctgatctacgccgccagcctgctgcaatctggcgtgccaagcagattcagcgcctttggcagcggcaccgagttcaccctgacaatatctagcctccagccagaggacttcgccacctactactgccagcacctgaagtcttaccctctgttcaccttcggacccggcaccaaggtggacatcaaaagactcgagggacagcctaaggccaatcctaccgtgacactgttccctccaagcagcgaagaactccaggccaacaaggccacacttgtgtgcctgatctccgacttctaccctggggctgtgacagtggcttggaaggccgatggatctcctgtgaaagccggcgtggaaaccaccaagccatccaagcagagcaacaacaaatacgccgccagctcctacctgagcctgacacctgagcagtggaagtcccacagatcctacagctgccaagtgacccacgaaggcagcaccgtggaaaagacagtggcccctacagagtgcagcggcagagccgattgcggcatcaccagcgccagctaccaccagggcgtgctgagcgccaccatcctgtacgagatcctgctgggcaaggccaccctgtacgccgtgctggtgtctgccctggtgctgatggctatggtcaagcggaaggacagccggggaagggccaagcgatctggatctggagcaacaaacttctcactactcaaacaagcaggtgacgtggaggagaatcccgggcctactagtatggactggatttggcgcatccttttccttgtcggcgctgctaccggcgcgcattccttcgaagaagttcagctggttgagtctggcggcagagtcgttagacctggcggaagcctgagactgtcttgtgccgccagcggcttcacctttgacgactacggcatgagctgggtccgacagcctcctggaaagggcctcgaatttgtgtccggcctgaactggaacggcgacatcaccgcctttaccgacagcgtgaagggcagattcaccatcagccgggacaacgtgaagtccagcctgtacctccagatgaacagcctgagagccgacgacaccgccttctactactgtgccagagtgcggacctggggcgattacacaacaggcgaggaaatcatcaacagctggtacttcgacctgtggggcagaggcacactggtcacagtctcttctacgcgtgcctctacaaagggaccctccgtgtttcctctggctcccagcagcaagtctacaagcggaggaacagccgctctgggctgcctggtcaaggattactttcccgagcctgtgaccgtgtcctggaatagcggagcactgacaagcggcgtgcacacctttccagccgtgctgcaaagcagcggcctgtactctctgagcagcgtggtcacagtgcctagctctagcctgggcacccagacctacatctgcaatgtgaaccacaagcctagcaacaccaaggtggacaagagagtggaacccaagagctgtatccccgaggacacattcttcccaagcagcgacgtgccctgcgacgtgaagctggtggaaaagagcttcgagacagacaccaacctgaacttccagaacctgagcgtgatcggcttcagaatcctgctgctgaaagtggccggctttaacctgctgatgaccctgcggctgtggtccagc

SEQ ID NO: 9578 - DNA, 1908 bp, Artificial Sequence
  Synthetic Polynucloetide
atggccttaccagtgaccgccttgctcctgccgctggccttgctgctccacgccgccaggccggacatccagctgactcagagccctagctttctgagcgccagcgtgggcgacagagtgaccattacatgtagagccagccaggacatcagcagctacctggcctggtatcagcagaagcctggcaacgcccctaaactgctgatctacgccgccagcctgctgcaatctggcgtgccaagcagattcagcgcctttggcagcggcaccgagttcaccctgacaatatctagcctccagccagaggacttcgccacctactactgccagcacctgaagtcttaccctctgttcaccttcggacccggcaccaaggtggacatcaaaagactcgagggacagcctaaggccaatcctaccgtgacactgttccctccaagcagcgaagaactccaggccaacaaggccacacttgtgtgcctgatctccgacttctaccctggggctgtgacagtggcttggaaggccgatggatctcctgtgaaagccggcgtggaaaccaccaagccatccaagcagagcaacaacaaatacgccgccagctcctacctgagcctgacacctgagcagtggaagtcccacagatcctacagctgccaagtgacccacgaaggcagcaccgtggaaaagacagtggcccctacagagtgcagcggcagagccgattgcggctttaccagcgagagctaccagcagggcgtgctgagcgccaccatcctgtacgagatcctgctgggcaaggccaccctgtacgccgtgctggtgtctgccctggtgctgatggctatggtcaagcggaaggacagccggggaagggccaagcgatctggatctggagcaacaaacttctcactactcaaacaagcaggtgacgtggaggagaatcccgggcctactagtatggactggatttggcgcatccttttccttgtcggcgctgctaccggcgcgcattccttcgaagaagttcagctggttgagtctggcggcagagtcgttagacctggcggaagcctgagactgtcttgtgccgccagcggcttcacctttgacgactacggcatgagctgggtccgacagcctcctggaaagggcctcgaatttgtgtccggcctgaactggaacggcgacatcaccgcctttaccgacagcgtgaagggcagattcaccatcagccgggacaacgtgaagtccagcctgtacctccagatgaacagcctgagagccgacgacaccgccttctactactgtgccagagtgcggacctggggcgattacacaacaggcgaggaaatcatcaacagctggtacttcgacctgtggggcagaggcacactggtcacagtctcttctacgcgtgcctctacaaagggaccctccgtgtttcctctggctcccagcagcaagtctacaagcggaggaacagccgctctgggctgcctggtcaaggattactttcccgagcctgtgaccgtgtcctggaatagcggagcactgacaagcggcgtgcacacctttccagccgtgctgcaaagcagcggcctgtactctctgagcagcgtggtcacagtgcctagctctagcctgggcacccagacctacatctgcaatgtgaaccacaagcctagcaacaccaaggtggacaagagagtggaacccaagagctgtatccccgaggacacattcttcccaagccccgagagcagctgcgacgtgaagctggtggaaaagagcttcgagacagacaccaacctgaacttccagaacctgagcgtgatcggcttcagaatcctgctgctgaaagtggccggctttaacctgctgatgaccctgcggctgtggtccagc

SEQ ID NO: 9579 - DNA, 1386 bp, Artificial Sequence
  Synthetic Polynucloetide
atggccttaccagtgaccgccttgctcctgccgctggccttgctgctccacgccgccaggccggacatccagctgactcagagccctagctttctgagcgccagcgtgggcgacagagtgaccattacatgtagagccagccaggacatcagcagctacctggcctggtatcagcagaagcctggcaacgcccctaaactgctgatctacgccgccagcctgctgcaatctggcgtgccaagcagattcagcgcctttggcagcggcaccgagttcaccctgacaatatctagcctccagccagaggacttcgccacctactactgccagcacctgaagtcttaccctctgttcaccttcggacccggcaccaaggtggacatcaaaagaggcggaggcggaagtggaggcggaggatctggcggcggaggctctgaagttcagctggttgagtctggcggcagagtcgttagacctggcggaagcctgagactgtcttgtgccgccagcggcttcacctttgacgactacggcatgagctgggtccgacagcctcctggaaagggcctcgaatttgtgtccggcctgaactggaacggcgacatcaccgcctttaccgacagcgtgaagggcagattcaccatcagccgggacaacgtgaagtccagcctgtacctccagatgaacagcctgagagccgacgacaccgccttctactactgtgccagagtgcggacctggggcgattacacaacaggcgaggaaatcatcaacagctggtacttcgacctgtggggcagaggcacactggtcacagtctcttctacgcgtgacggtaacgaggagatgggaggaatcactcaaaccccttacaaagtctcaatttcaggaacaactgttatccttacatgtccccagtatcctggcagcgagatcctttggcagcataacgacaagaatatagggggagatgaagacgataagaatatcggatctgacgaggatcacttgagcctgaaagagttctccgagcttgaacaaagcggatattatgtgtgctatccgcgcgggtcaaagccggaagacgctaacttttacctttatctccgagccagagtgtgcgaaaattgcatggaaatggacgttatgtccgttgctacaatagttatcgtagatatatgcatcacgggtggactgcttctgctggtttattattggtccaagaatagaaaggccaaagctaaacccgtgaccagaggcgctggcgcaggcggaaggcaaaggggacaaaacaaagaacggccaccaccagtgccaaatccagattatgagcctattcggaaaggacagagggacctgtactctggcctgaatcagagaagaatc

SEQ ID NO: 9580 - DNA, 1281 bp, Artificial Sequence
  Synthetic Polynucloetide
atggccttaccagtgaccgccttgctcctgccgctggccttgctgctccacgccgccaggccggacatccagctgactcagagccctagctttctgagcgccagcgtgggcgacagagtgaccattacatgtagagccagccaggacatcagcagctacctggcctggtatcagcagaagcctggcaacgcccctaaactgctgatctacgccgccagcctgctgcaatctggcgtgccaagcagattcagcgcctttggcagcggcaccgagttcaccctgacaatatctagcctccagccagaggacttcgccacctactactgccagcacctgaagtcttaccctctgttcaccttcggacccggcaccaaggtggacatcaaaagaggcggaggcggaagtggaggcggaggatctggcggcggaggctctgaagttcagctggttgagtctggcggcagagtcgttagacctggcggaagcctgagactgtcttgtgccgccagcggcttcacctttgacgactacggcatgagctgggtccgacagcctcctggaaagggcctcgaatttgtgtccggcctgaactggaacggcgacatcaccgcctttaccgacagcgtgaagggcagattcaccatcagccgggacaacgtgaagtccagcctgtacctccagatgaacagcctgagagccgacgacaccgccttctactactgtgccagagtgcggacctggggcgattacacaacaggcgaggaaatcatcaacagctggtacttcgacctgtggggcagaggcacactggtcacagtctcttctacgcgtttcaagatccccatcgaggaactggaagatcgggtgttcgtgaactgcaacacctctatcacctgggtggaaggcaccgtgggaacactgctgagcgacatcaccagactggacctcggcaagcggattctggaccctcggggcatctacagatgcaacggcaccgacatctacaaggacaaagaaagcaccgtgcaggtccactacagaatgtgccagtcctgcgtggaactggaccctgctacagtggccggcatcatcgtgaccgatgtgatcgctactctgctgctggctctgggagtgttctgcttcgccggacacgaaacaggcagactgtctggcgctgccgatacacaggccctgctgagaaacgaccaagtgtatcagcccctgcgcgacagagatgatgcccagtattctcacctcggcggcaactgggctagaaacaag

SEQ ID NO: 9581 - DNA, 1311 bp, Artificial Sequence
  Synthetic Polynucloetide
atggccttaccagtgaccgccttgctcctgccgctggccttgctgctccacgccgccaggccggacatccagctgactcagagccctagctttctgagcgccagcgtgggcgacagagtgaccattacatgtagagccagccaggacatcagcagctacctggcctggtatcagcagaagcctggcaacgcccctaaactgctgatctacgccgccagcctgctgcaatctggcgtgccaagcagattcagcgcctttggcagcggcaccgagttcaccctgacaatatctagcctccagccagaggacttcgccacctactactgccagcacctgaagtcttaccctctgttcaccttcggacccggcaccaaggtggacatcaaaagaggcggaggcggaagtggaggcggaggatctggcggcggaggctctgaagttcagctggttgagtctggcggcagagtcgttagacctggcggaagcctgagactgtcttgtgccgccagcggcttcacctttgacgactacggcatgagctgggtccgacagcctcctggaaagggcctcgaatttgtgtccggcctgaactggaacggcgacatcaccgcctttaccgacagcgtgaagggcagattcaccatcagccgggacaacgtgaagtccagcctgtacctccagatgaacagcctgagagccgacgacaccgccttctactactgtgccagagtgcggacctggggcgattacacaacaggcgaggaaatcatcaacagctggtacttcgacctgtggggcagaggcacactggtcacagtctcttctacgcgtcagagcatcaagggcaaccacctggtcaaggtgtacgactaccaagaggacggcagcgtgctgctgacatgtgatgccgaggccaagaacatcacctggtttaaggacggcaagatgatcggcttcctgaccgaggacaagaagaagtggaacctgggcagcaacgctaaggaccccagaggcatgtatcagtgcaagggcagccagaacaagagcaagcccctccaggtgtactaccggatgtgccagaactgcatcgagctgaacgccgctaccatcagcggctttctgttcgccgagatcgtgtccatcttcgtgctggccgtgggcgtgtactttatcgctggacaggatggcgtgcggcagagcagagcttccgataagcaaaccctgctgcctaacgaccagctgtaccagcctctgaaggacagagaggacgaccagtacagccacctccagggcaatcagctgagaagaaac

SEQ ID NO: 9582 - DNA, 1260 bp, Artificial Sequence
  Synthetic Polynucloetide
atggccttaccagtgaccgccttgctcctgccgctggccttgctgctccacgccgccaggccggacatccagctgactcagagccctagctttctgagcgccagcgtgggcgacagagtgaccattacatgtagagccagccaggacatcagcagctacctggcctggtatcagcagaagcctggcaacgcccctaaactgctgatctacgccgccagcctgctgcaatctggcgtgccaagcagattcagcgcctttggcagcggcaccgagttcaccctgacaatatctagcctccagccagaggacttcgccacctactactgccagcacctgaagtcttaccctctgttcaccttcggacccggcaccaaggtggacatcaaaagaggcggaggcggaagtggaggcggaggatctggcggcggaggctctgaagttcagctggttgagtctggcggcagagtcgttagacctggcggaagcctgagactgtcttgtgccgccagcggcttcacctttgacgactacggcatgagctgggtccgacagcctcctggaaagggcctcgaatttgtgtccggcctgaactggaacggcgacatcaccgcctttaccgacagcgtgaagggcagattcaccatcagccgggacaacgtgaagtccagcctgtacctccagatgaacagcctgagagccgacgacaccgccttctactactgtgccagagtgcggacctggggcgattacacaacaggcgaggaaatcatcaacagctggtacttcgacctgtggggcagaggcacactggtcacagtctcttctacgcgtcagagttttgggttgttggaccctaaattgtgctatctgttggacggaatcctgttcatttacggagtgatcctgaccgcattgttcctgcgggttaagttttccagatccgcagacgcacccgcttaccaacaagggcagaaccaactctacaatgaacttaatttggggcggagggaagagtacgacgttctggacaaaaggaggggacgagatcccgagatgggcggaaagcctcagcgaaggaagaatccgcaagaggggctttataacgaactccagaaagataaaatggcagaagcctatagtgagattgggatgaagggagaaaggaggaggggtaaaggtcacgatgggttgtaccaaggattgagcacagccactaaagatacctatgatgcgctccacatgcaggccctgccgccaaga

SEQ ID NO: 9583 - DNA, 1386 bp, Artificial Sequence
  Synthetic Polynucloetide
atggccttaccagtgaccgccttgctcctgccgctggccttgctgctccacgccgccaggccggaagttcagctggttgagtctggcggcagagtcgttagacctggcggaagcctgagactgtcttgtgccgccagcggcttcacctttgacgactacggcatgagctgggtccgacagcctcctggaaagggcctcgaatttgtgtccggcctgaactggaacggcgacatcaccgcctttaccgacagcgtgaagggcagattcaccatcagccgggacaacgtgaagtccagcctgtacctccagatgaacagcctgagagccgacgacaccgccttctactactgtgccagagtgcggacctggggcgattacacaacaggcgaggaaatcatcaacagctggtacttcgacctgtggggcagaggcacactggtcacagtctcttctggcggaggcggaagtggaggcggaggatctggcggcggaggctctgacatccagctgactcagagccctagctttctgagcgccagcgtgggcgacagagtgaccattacatgtagagccagccaggacatcagcagctacctggcctggtatcagcagaagcctggcaacgcccctaaactgctgatctacgccgccagcctgctgcaatctggcgtgccaagcagattcagcgcctttggcagcggcaccgagttcaccctgacaatatctagcctccagccagaggacttcgccacctactactgccagcacctgaagtcttaccctctgttcaccttcggacccggcaccaaggtggacatcaaaagaacgcgtgacggtaacgaggagatgggaggaatcactcaaaccccttacaaagtctcaatttcaggaacaactgttatccttacatgtccccagtatcctggcagcgagatcctttggcagcataacgacaagaatatagggggagatgaagacgataagaatatcggatctgacgaggatcacttgagcctgaaagagttctccgagcttgaacaaagcggatattatgtgtgctatccgcgcgggtcaaagccggaagacgctaacttttacctttatctccgagccagagtgtgcgaaaattgcatggaaatggacgttatgtccgttgctacaatagttatcgtagatatatgcatcacgggtggactgcttctgctggtttattattggtccaagaatagaaaggccaaagctaaacccgtgaccagaggcgctggcgcaggcggaaggcaaaggggacaaaacaaagaacggccaccaccagtgccaaatccagattatgagcctattcggaaaggacagagggacctgtactctggcctgaatcagagaagaatc

SEQ ID NO: 9584 - DNA, 1281 bp, Artificial Sequence
  Synthetic Polynucloetide
atggccttaccagtgaccgccttgctcctgccgctggccttgctgctccacgccgccaggccggaagttcagctggttgagtctggcggcagagtcgttagacctggcggaagcctgagactgtcttgtgccgccagcggcttcacctttgacgactacggcatgagctgggtccgacagcctcctggaaagggcctcgaatttgtgtccggcctgaactggaacggcgacatcaccgcctttaccgacagcgtgaagggcagattcaccatcagccgggacaacgtgaagtccagcctgtacctccagatgaacagcctgagagccgacgacaccgccttctactactgtgccagagtgcggacctggggcgattacacaacaggcgaggaaatcatcaacagctggtacttcgacctgtggggcagaggcacactggtcacagtctcttctggcggaggcggaagtggaggcggaggatctggcggcggaggctctgacatccagctgactcagagccctagctttctgagcgccagcgtgggcgacagagtgaccattacatgtagagccagccaggacatcagcagctacctggcctggtatcagcagaagcctggcaacgcccctaaactgctgatctacgccgccagcctgctgcaatctggcgtgccaagcagattcagcgcctttggcagcggcaccgagttcaccctgacaatatctagcctccagccagaggacttcgccacctactactgccagcacctgaagtcttaccctctgttcaccttcggacccggcaccaaggtggacatcaaaagaacgcgtttcaagatccccatcgaggaactggaagatcgggtgttcgtgaactgcaacacctctatcacctgggtggaaggcaccgtgggaacactgctgagcgacatcaccagactggacctcggcaagcggattctggaccctcggggcatctacagatgcaacggcaccgacatctacaaggacaaagaaagcaccgtgcaggtccactacagaatgtgccagtcctgcgtggaactggaccctgctacagtggccggcatcatcgtgaccgatgtgatcgctactctgctgctggctctgggagtgttctgcttcgccggacacgaaacaggcagactgtctggcgctgccgatacacaggccctgctgagaaacgaccaagtgtatcagcccctgcgcgacagagatgatgcccagtattctcacctcggcggcaactgggctagaaacaag

SEQ ID NO: 9585 - DNA, 1311 bp, Artificial Sequence
  Synthetic Polynucloetide
atggccttaccagtgaccgccttgctcctgccgctggccttgctgctccacgccgccaggccggaagttcagctggttgagtctggcggcagagtcgttagacctggcggaagcctgagactgtcttgtgccgccagcggcttcacctttgacgactacggcatgagctgggtccgacagcctcctggaaagggcctcgaatttgtgtccggcctgaactggaacggcgacatcaccgcctttaccgacagcgtgaagggcagattcaccatcagccgggacaacgtgaagtccagcctgtacctccagatgaacagcctgagagccgacgacaccgccttctactactgtgccagagtgcggacctggggcgattacacaacaggcgaggaaatcatcaacagctggtacttcgacctgtggggcagaggcacactggtcacagtctcttctggcggaggcggaagtggaggcggaggatctggcggcggaggctctgacatccagctgactcagagccctagctttctgagcgccagcgtgggcgacagagtgaccattacatgtagagccagccaggacatcagcagctacctggcctggtatcagcagaagcctggcaacgcccctaaactgctgatctacgccgccagcctgctgcaatctggcgtgccaagcagattcagcgcctttggcagcggcaccgagttcaccctgacaatatctagcctccagccagaggacttcgccacctactactgccagcacctgaagtcttaccctctgttcaccttcggacccggcaccaaggtggacatcaaaagaacgcgtcagagcatcaagggcaaccacctggtcaaggtgtacgactaccaagaggacggcagcgtgctgctgacatgtgatgccgaggccaagaacatcacctggtttaaggacggcaagatgatcggcttcctgaccgaggacaagaagaagtggaacctgggcagcaacgctaaggaccccagaggcatgtatcagtgcaagggcagccagaacaagagcaagcccctccaggtgtactaccggatgtgccagaactgcatcgagctgaacgccgctaccatcagcggctttctgttcgccgagatcgtgtccatcttcgtgctggccgtgggcgtgtactttatcgctggacaggatggcgtgcggcagagcagagcttccgataagcaaaccctgctgcctaacgaccagctgtaccagcctctgaaggacagagaggacgaccagtacagccacctccagggcaatcagctgagaagaaac

SEQ ID NO: 9586 - DNA, 1260 bp, Artificial Sequence
  Synthetic Polynucloetide
atggccttaccagtgaccgccttgctcctgccgctggccttgctgctccacgccgccaggccggaagttcagctggttgagtctggcggcagagtcgttagacctggcggaagcctgagactgtcttgtgccgccagcggcttcacctttgacgactacggcatgagctgggtccgacagcctcctggaaagggcctcgaatttgtgtccggcctgaactggaacggcgacatcaccgcctttaccgacagcgtgaagggcagattcaccatcagccgggacaacgtgaagtccagcctgtacctccagatgaacagcctgagagccgacgacaccgccttctactactgtgccagagtgcggacctggggcgattacacaacaggcgaggaaatcatcaacagctggtacttcgacctgtggggcagaggcacactggtcacagtctcttctggcggaggcggaagtggaggcggaggatctggcggcggaggctctgacatccagctgactcagagccctagctttctgagcgccagcgtgggcgacagagtgaccattacatgtagagccagccaggacatcagcagctacctggcctggtatcagcagaagcctggcaacgcccctaaactgctgatctacgccgccagcctgctgcaatctggcgtgccaagcagattcagcgcctttggcagcggcaccgagttcaccctgacaatatctagcctccagccagaggacttcgccacctactactgccagcacctgaagtcttaccctctgttcaccttcggacccggcaccaaggtggacatcaaaagaacgcgtcagagttttgggttgttggaccctaaattgtgctatctgttggacggaatcctgttcatttacggagtgatcctgaccgcattgttcctgcgggttaagttttccagatccgcagacgcacccgcttaccaacaagggcagaaccaactctacaatgaacttaatttggggcggagggaagagtacgacgttctggacaaaaggaggggacgagatcccgagatgggcggaaagcctcagcgaaggaagaatccgcaagaggggctttataacgaactccagaaagataaaatggcagaagcctatagtgagattgggatgaagggagaaaggaggaggggtaaaggtcacgatgggttgtaccaaggattgagcacagccactaaagatacctatgatgcgctccacatgcaggccctgccgccaaga

SEQ ID NO: 9587 - DNA, 1962 bp, Artificial Sequence
  Synthetic Polynucloetide
atggccttaccagtgaccgccttgctcctgccgctggccttgctgctccacgccgccaggccggacatccagctgactcagagccctagctttctgagcgccagcgtgggcgacagagtgaccattacatgtagagccagccaggacatcagcagctacctggcctggtatcagcagaagcctggcaacgcccctaaactgctgatctacgccgccagcctgctgcaatctggcgtgccaagcagattcagcgcctttggcagcggcaccgagttcaccctgacaatatctagcctccagccagaggacttcgccacctactactgccagcacctgaagtcttaccctctgttcaccttcggacccggcaccaaggtggacatcaaaagaggcggaggcggaagtggaggcggaggatctggcggcggaggctctgaagttcagctggttgagtctggcggcagagtcgttagacctggcggaagcctgagactgtcttgtgccgccagcggcttcacctttgacgactacggcatgagctgggtccgacagcctcctggaaagggcctcgaatttgtgtccggcctgaactggaacggcgacatcaccgcctttaccgacagcgtgaagggcagattcaccatcagccgggacaacgtgaagtccagcctgtacctccagatgaacagcctgagagccgacgacaccgccttctactactgtgccagagtgcggacctggggcgattacacaacaggcgaggaaatcatcaacagctggtacttcgacctgtggggcagaggcacactggtcacagtctcttctacgcgtgggagcggcatccagaaccctgatcctgccgtgtaccagctgcgggatagcaagagcagcgacaagagcgtgtgtctgttcaccgacttcgacagccagaccaacgtgtcccagagcaaggactccgacgtgtacatcaccgataagaccgtgctggacatgcggagcatggacttcaagagcaactccgccgtggcctggtccaacaagtccgatttcgcctgcgccaacgccttcaacaacagcattatccccgaggacacattcttcccaagccccgagagcagctgcgacgtgaagctggtggaaaagagcttcgagacagacaccaacctgaacttccagaacctgagcgtgatcggcttcagaatcctgctgctgaaagtggccggctttaacctgctgatgaccctgcggctgtggtccagccgcgccaagagaagcggatctggcgtgaagcagaccctgaatttcgacctgctgaagctggctggcgacgtggaatccaacccaggcccttctagaggccatatgaccgagtacaagcccacggtgcgcctcgccacccgcgacgacgtccccagggccgtacgcaccctcgccgccgcgttcgccgactaccccgccacgcgccacaccgtcgatccggaccgccacatcgagcgggtcaccgagctgcaagaactcttcctcacgcgcgtcgggctcgacatcggcaaggtgtgggtcgcggacgacggcgccgcggtggcggtctggaccacgccggagagcgtcgaagcgggggcggtgttcgccgagatcggcccgcgcatggccgagttgagcggttcccggctggccgcgcagcaacagatggaaggcctcctggcgccgcaccggcccaaggagcccgcgtggttcctggccaccgtcggcgtctcgcccgaccaccagggcaagggtctgggcagcgccgtcgtgctccccggagtggaggcggccgagcgcgccggggtgcccgccttcctggagacctccgcgccccgcaacctccccttctacgagcggctcggcttcaccgtcaccgccgacgtcgaggtgcccgaaggaccgcgcacctggtgcatgacccgcaagcccggtgcctga

SEQ ID NO: 9588 - DNA, 2058 bp, Artificial Sequence
  Synthetic Polynucloetide
atggccttaccagtgaccgccttgctcctgccgctggccttgctgctccacgccgccaggccggacatccagctgactcagagccctagctttctgagcgccagcgtgggcgacagagtgaccattacatgtagagccagccaggacatcagcagctacctggcctggtatcagcagaagcctggcaacgcccctaaactgctgatctacgccgccagcctgctgcaatctggcgtgccaagcagattcagcgcctttggcagcggcaccgagttcaccctgacaatatctagcctccagccagaggacttcgccacctactactgccagcacctgaagtcttaccctctgttcaccttcggacccggcaccaaggtggacatcaaaagaggcggaggcggaagtggaggcggaggatctggcggcggaggctctgaagttcagctggttgagtctggcggcagagtcgttagacctggcggaagcctgagactgtcttgtgccgccagcggcttcacctttgacgactacggcatgagctgggtccgacagcctcctggaaagggcctcgaatttgtgtccggcctgaactggaacggcgacatcaccgcctttaccgacagcgtgaagggcagattcaccatcagccgggacaacgtgaagtccagcctgtacctccagatgaacagcctgagagccgacgacaccgccttctactactgtgccagagtgcggacctggggcgattacacaacaggcgaggaaatcatcaacagctggtacttcgacctgtggggcagaggcacactggtcacagtctcttctctcgaggacctgaagaacgtgttcccacctgaggtggccgtgttcgagcctagcgaggccgagatcagccacacccagaaagccaccctcgtgtgcctggctaccggcttctaccccgaccatgtggaactgtcttggtgggtcaacggcaaagaggtgcacagcggcgtgtctaccgacccccagccactgaaagaacagcccgccctgaacgacagccggtactgcctgagcagcagactgagagtgtccgccaccttctggcagaacccccggaaccacttcagatgccaggtgcagttctacggcctgagcgagaacgacgagtggacccaggacagagccaagcccgtgacccagatcgtgtctgccgaagcctggggcagagccgattgcggctttaccagcgagagctaccagcagggcgtgctgagcgccaccatcctgtacgagatcctgctgggcaaggccaccctgtacgccgtgctggtgtctgccctggtgctgatggctatggtcaagcggaaggacagccggggaagggccaagcgatctggatctggagcaacaaacttctcactactcaaacaagcaggtgacgtggaggagaatcccgggcctactagaggccatatgaccgagtacaagcccacggtgcgcctcgccacccgcgacgacgtccccagggccgtacgcaccctcgccgccgcgttcgccgactaccccgccacgcgccacaccgtcgatccggaccgccacatcgagcgggtcaccgagctgcaagaactcttcctcacgcgcgtcgggctcgacatcggcaaggtgtgggtcgcggacgacggcgccgcggtggcggtctggaccacgccggagagcgtcgaagcgggggcggtgttcgccgagatcggcccgcgcatggccgagttgagcggttcccggctggccgcgcagcaacagatggaaggcctcctggcgccgcaccggcccaaggagcccgcgtggttcctggccaccgtcggcgtctcgcccgaccaccagggcaagggtctgggcagcgccgtcgtgctccccggagtggaggcggccgagcgcgccggggtgcccgccttcctggagacctccgcgccccgcaacctccccttctacgagcggctcggcttcaccgtcaccgccgacgtcgaggtgcccgaaggaccgcgcacctggtgcatgacccgcaagcccggtgcctga

SEQ ID NO: 9589 - DNA, 2208 bp, Artificial Sequence
  Synthetic Polynucloetide
atggccttaccagtgaccgccttgctcctgccgctggccttgctgctccacgccgccaggccggacatccagctgactcagagccctagctttctgagcgccagcgtgggcgacagagtgaccattacatgtagagccagccaggacatcagcagctacctggcctggtatcagcagaagcctggcaacgcccctaaactgctgatctacgccgccagcctgctgcaatctggcgtgccaagcagattcagcgcctttggcagcggcaccgagttcaccctgacaatatctagcctccagccagaggacttcgccacctactactgccagcacctgaagtcttaccctctgttcaccttcggacccggcaccaaggtggacatcaaaagaggcggaggcggaagtggaggcggaggatctggcggcggaggctctgaagttcagctggttgagtctggcggcagagtcgttagacctggcggaagcctgagactgtcttgtgccgccagcggcttcacctttgacgactacggcatgagctgggtccgacagcctcctggaaagggcctcgaatttgtgtccggcctgaactggaacggcgacatcaccgcctttaccgacagcgtgaagggcagattcaccatcagccgggacaacgtgaagtccagcctgtacctccagatgaacagcctgagagccgacgacaccgccttctactactgtgccagagtgcggacctggggcgattacacaacaggcgaggaaatcatcaacagctggtacttcgacctgtggggcagaggcacactggtcacagtctcttctacgcgtgagcagaaactgatctcggaagaggatctggggagcggcaccccattcccttctctggcccctcccatcatgctgctggtggacggcaagcagcagatggtggtcgtgtgcctggtgctggatgtggccccacctggactggacagccccatctggtttagcgccggcaatggctctgccctggacgcctttacctacggcccaagccctgccaccgatggcacctggacaaatctggcccacctgagcctgcccagcgaggaactggcttcttgggagcctctcgtgtgccacacaggacctggcgctgagggacacagcagatccacccagcctatgcacctgtctggcgaggccagcaccgccagaacctgtcctcaggaacctctgagaggcacccctggcggagcactgtggctgggagtgctgagactgctgctgttcaagctgctgctgtttgacctgctgctgacctgctcctgtctgtgcgatcctgccggccctctgccttctcctgccaccaccacaagactgagagccctgggcagccacagactgcaccctgccacagagacaggcggcagagaggccacaagcagccctagaccccagcccagagacagaagatggggcgataccccccctggcagaaagcctggatctccagtccgcgccaagagaagcggatctggcgtgaagcagaccctgaatttcgacctgctgaagctggctggcgacgtggaatccaacccaggcccttctagatctagaggccatatgaccgagtacaagcccacggtgcgcctcgccacccgcgacgacgtccccagggccgtacgcaccctcgccgccgcgttcgccgactaccccgccacgcgccacaccgtcgatccggaccgccacatcgagcgggtcaccgagctgcaagaactcttcctcacgcgcgtcgggctcgacatcggcaaggtgtgggtcgcggacgacggcgccgcggtggcggtctggaccacgccggagagcgtcgaagcgggggcggtgttcgccgagatcggcccgcgcatggccgagttgagcggttcccggctggccgcgcagcaacagatggaaggcctcctggcgccgcaccggcccaaggagcccgcgtggttcctggccaccgtcggcgtctcgcccgaccaccagggcaagggtctgggcagcgccgtcgtgctccccggagtggaggcggccgagcgcgccggggtgcccgccttcctggagacctccgcgccccgcaacctccccttctacgagcggctcggcttcaccgtcaccgccgacgtcgaggtgcccgaaggaccgcgcacctggtgcatgacccgcaagcccggtgcctga

SEQ ID NO: 9590 - DNA, 1623 bp, Artificial Sequence
  Synthetic Polynucloetide
atggccttaccagtgaccgccttgctcctgccgctggccttgctgctccacgccgccaggccggacatccagctgactcagagccctagctttctgagcgccagcgtgggcgacagagtgaccattacatgtagagccagccaggacatcagcagctacctggcctggtatcagcagaagcctggcaacgcccctaaactgctgatctacgccgccagcctgctgcaatctggcgtgccaagcagattcagcgcctttggcagcggcaccgagttcaccctgacaatatctagcctccagccagaggacttcgccacctactactgccagcacctgaagtcttaccctctgttcaccttcggacccggcaccaaggtggacatcaaaagactcgaggacctgaagaacgtgttcccacctgaggtggccgtgttcgagcctagcgaggccgagatcagccacacccagaaagccaccctcgtgtgcctggctaccggcttctaccccgaccatgtggaactgtcttggtgggtcaacggcaaagaggtgcacagcggcgtgtctaccgacccccagccactgaaagaacagcccgccctgaacgacagccggtactgcctgagcagcagactgagagtgtccgccaccttctggcagaacccccggaaccacttcagatgccaggtgcagttctacggcctgagcgagaacgacgagtggacccaggacagagccaagcccgtgacccagatcgtgtctgccgaagcctggggcagagccgattgcggctttaccagcgagagctaccagcagggcgtgctgagcgccaccatcctgtacgagatcctgctgggcaaggccaccctgtacgccgtgctggtgtctgccctggtgctgatggctatggtcaagcggaaggacagccggggaagggccaagcgatctggatctggagcaacaaacttctcactactcaaacaagcaggtgacgtggaggagaatcccgggcctactagaggccatatgaccgagtacaagcccacggtgcgcctcgccacccgcgacgacgtccccagggccgtacgcaccctcgccgccgcgttcgccgactaccccgccacgcgccacaccgtcgatccggaccgccacatcgagcgggtcaccgagctgcaagaactcttcctcacgcgcgtcgggctcgacatcggcaaggtgtgggtcgcggacgacggcgccgcggtggcggtctggaccacgccggagagcgtcgaagcgggggcggtgttcgccgagatcggcccgcgcatggccgagttgagcggttcccggctggccgcgcagcaacagatggaaggcctcctggcgccgcaccggcccaaggagcccgcgtggttcctggccaccgtcggcgtctcgcccgaccaccagggcaagggtctgggcagcgccgtcgtgctccccggagtggaggcggccgagcgcgccggggtgcccgccttcctggagacctccgcgccccgcaacctccccttctacgagcggctcggcttcaccgtcaccgccgacgtcgaggtgcccgaaggaccgcgcacctggtgcatgacccgcaagcccggtgcctga

SEQ ID NO: 9591 - DNA, 930 bp, Artificial Sequence
  Synthetic Polynucloetide
atggccttaccagtgaccgccttgctcctgccgctggccttgctgctccacgccgccaggccggacatccagctgactcagagccctagctttctgagcgccagcgtgggcgacagagtgaccattacatgtagagccagccaggacatcagcagctacctggcctggtatcagcagaagcctggcaacgcccctaaactgctgatctacgccgccagcctgctgcaatctggcgtgccaagcagattcagcgcctttggcagcggcaccgagttcaccctgacaatatctagcctccagccagaggacttcgccacctactactgccagcacctgaagtcttaccctctgttcaccttcggacccggcaccaaggtggacatcaaaagactcgaggacctgaagaacgtgttcccacctgaggtggccgtgttcgagcctagcgaggccgagatcagccacacccagaaagccaccctcgtgtgcctggctaccggcttctaccccgaccatgtggaactgtcttggtgggtcaacggcaaagaggtgcacagcggcgtgtctaccgacccccagccactgaaagaacagcccgccctgaacgacagccggtactgcctgagcagcagactgagagtgtccgccaccttctggcagaacccccggaaccacttcagatgccaggtgcagttctacggcctgagcgagaacgacgagtggacccaggacagagccaagcccgtgacccagatcgtgtctgccgaagcctggggcagagccgattgcggctttaccagcgagagctaccagcagggcgtgctgagcgccaccatcctgtacgagatcctgctgggcaaggccaccctgtacgccgtgctggtgtctgccctggtgctgatggctatggtcaagcggaaggacagccgggga

SEQ ID NO: 9592 - DNA, 1380 bp, Artificial Sequence
  Synthetic Polynucloetide
atggactggatttggcgcatccttttccttgtcggcgctgctaccggcgcgcattccttcgaagaagttcagctggttgagtctggcggcagagtcgttagacctggcggaagcctgagactgtcttgtgccgccagcggcttcacctttgacgactacggcatgagctgggtccgacagcctcctggaaagggcctcgaatttgtgtccggcctgaactggaacggcgacatcaccgcctttaccgacagcgtgaagggcagattcaccatcagccgggacaacgtgaagtccagcctgtacctccagatgaacagcctgagagccgacgacaccgccttctactactgtgccagagtgcggacctggggcgattacacaacaggcgaggaaatcatcaacagctggtacttcgacctgtggggcagaggcacactggtcacagtctcttctacgcgtatccagaaccctgatcctgccgtgtaccagctgcgggatagcaagagcagcgacaagagcgtgtgtctgttcaccgacttcgacagccagaccaacgtgtcccagagcaaggactccgacgtgtacatcaccgataagaccgtgctggacatgcggagcatggacttcaagagcaactccgccgtggcctggtccaacaagtccgatttcgcctgcgccaacgccttcaacaacagcattatccccgaggacacattcttcccaagccccgagagcagctgcgacgtgaagctggtggaaaagagcttcgagacagacaccaacctgaacttccagaacctgagcgtgatcggcttcagaatcctgctgctgaaagtggccggctttaacctgctgatgaccctgcggctgtggtccagccgcgccaagagaagcggatctggcgtgaagcagaccctgaatttcgacctgctgaagctggctggcgacgtggaatccaacccaggcccttctagaggccatatggccaagcctttgtctcaagaagaatccaccctcattgaaagagcaacggctacaatcaacagcatccccatctctgaagactacagcgtcgccagcgcagctctctctagcgacggccgcatcttcactggtgtcaatgtatatcattttactgggggaccttgtgcagaactcgtggtgctgggcactgctgctgctgcggcagctggcaacctgacttgtatcgtcgcgatcggaaatgagaacaggggcatcttgagcccctgcggacggtgccgacaggtgcttctcgatctgcatcctgggatcaaagccatagtgaaggacagtgatggacagccgacggcagttgggattcgtgaattgctgccctctggttatgtgtgggagggctga

SEQ ID NO: 9593 - DNA, 879 bp, Artificial Sequence
  Synthetic Polynucloetide
atggactggatttggcgcatccttttccttgtcggcgctgctaccggcgcgcattccttcgaagaagttcagctggttgagtctggcggcagagtcgttagacctggcggaagcctgagactgtcttgtgccgccagcggcttcacctttgacgactacggcatgagctgggtccgacagcctcctggaaagggcctcgaatttgtgtccggcctgaactggaacggcgacatcaccgcctttaccgacagcgtgaagggcagattcaccatcagccgggacaacgtgaagtccagcctgtacctccagatgaacagcctgagagccgacgacaccgccttctactactgtgccagagtgcggacctggggcgattacacaacaggcgaggaaatcatcaacagctggtacttcgacctgtggggcagaggcacactggtcacagtctcttctacgcgtatccagaaccctgatcctgccgtgtaccagctgcgggatagcaagagcagcgacaagagcgtgtgtctgttcaccgacttcgacagccagaccaacgtgtcccagagcaaggactccgacgtgtacatcaccgataagaccgtgctggacatgcggagcatggacttcaagagcaactccgccgtggcctggtccaacaagtccgatttcgcctgcgccaacgccttcaacaacagcattatccccgaggacacattcttcccaagccccgagagcagctgcgacgtgaagctggtggaaaagagcttcgagacagacaccaacctgaacttccagaacctgagcgtgatcggcttcagaatcctgctgctgaaagtggccggctttaacctgctgatgaccctgcggctgtggtccagc

SEQ ID NO: 9594 - DNA, 1677 bp, Artificial Sequence
  Synthetic Polynucloetide
atggccttaccagtgaccgccttgctcctgccgctggccttgctgctccacgccgccaggccggacatccagctgactcagagccctagctttctgagcgccagcgtgggcgacagagtgaccattacatgtagagccagccaggacatcagcagctacctggcctggtatcagcagaagcctggcaacgcccctaaactgctgatctacgccgccagcctgctgcaatctggcgtgccaagcagattcagcgcctttggcagcggcaccgagttcaccctgacaatatctagcctccagccagaggacttcgccacctactactgccagcacctgaagtcttaccctctgttcaccttcggacccggcaccaaggtggacatcaaaagactcgaggggaaaccaattcccaaccctcttctgggactggattcaaccggcagcggcgaggacctgaagaacgtgttcccacctgaggtggccgtgttcgagcctagcgaggccgagatcagccacacccagaaagccaccctcgtgtgcctggctaccggcttctaccccgaccatgtggaactgtcttggtgggtcaacggcaaagaggtgcacagcggcgtgtgtaccgacccccagccactgaaagaacagcccgccctgaacgacagccggtactgcctgagcagcagactgagagtgtccgccaccttctggcagaacccccggaaccacttcagatgccaggtgcagttctacggcctgagcgagaacgacgagtggacccaggacagagccaagcccgtgacccagatcgtgtctgccgaagcctggggcagagccgattgcggctttaccagcgagagctaccagcagggcgtgctgagcgccaccatcctgtacgagatcctgctgggcaaggccaccctgtacgccgtgctggtgtctgccctggtgctgatggctatggtcaagcggaaggacagccggggaagggccaagcgatctggatctggagcaacaaacttctcactactcaaacaagcaggtgacgtggaggagaatcccgggcctactagaggccatatgaccgagtacaagcccacggtgcgcctcgccacccgcgacgacgtccccagggccgtacgcaccctcgccgccgcgttcgccgactaccccgccacgcgccacaccgtcgatccggaccgccacatcgagcgggtcaccgagctgcaagaactcttcctcacgcgcgtcgggctcgacatcggcaaggtgtgggtcgcggacgacggcgccgcggtggcggtctggaccacgccggagagcgtcgaagcgggggcggtgttcgccgagatcggcccgcgcatggccgagttgagcggttcccggctggccgcgcagcaacagatggaaggcctcctggcgccgcaccggcccaaggagcccgcgtggttcctggccaccgtcggcgtctcgcccgaccaccagggcaagggtctgggcagcgccgtcgtgctccccggagtggaggcggccgagcgcgccggggtgcccgccttcctggagacctccgcgccccgcaacctccccttctacgagcggctcggcttcaccgtcaccgccgacgtcgaggtgcccgaaggaccgcgcacctggtgcatgacccgcaagcccggtgcctga

SEQ ID NO: 9595 - DNA, 987 bp, Artificial Sequence
  Synthetic Polynucloetide
atggccttaccagtgaccgccttgctcctgccgctggccttgctgctccacgccgccaggccggacatccagctgactcagagccctagctttctgagcgccagcgtgggcgacagagtgaccattacatgtagagccagccaggacatcagcagctacctggcctggtatcagcagaagcctggcaacgcccctaaactgctgatctacgccgccagcctgctgcaatctggcgtgccaagcagattcagcgcctttggcagcggcaccgagttcaccctgacaatatctagcctccagccagaggacttcgccacctactactgccagcacctgaagtcttaccctctgttcaccttcggacccggcaccaaggtggacatcaaaagactcgaggggaaaccaattcccaaccctcttctgggactggattcaaccggcagcggcgaggacctgaagaacgtgttcccacctgaggtggccgtgttcgagcctagcgaggccgagatcagccacacccagaaagccaccctcgtgtgcctggctaccggcttctaccccgaccatgtggaactgtcttggtgggtcaacggcaaagaggtgcacagcggcgtgtgtaccgacccccagccactgaaagaacagcccgccctgaacgacagccggtactgcctgagcagcagactgagagtgtccgccaccttctggcagaacccccggaaccacttcagatgccaggtgcagttctacggcctgagcgagaacgacgagtggacccaggacagagccaagcccgtgacccagatcgtgtctgccgaagcctggggcagagccgattgcggctttaccagcgagagctaccagcagggcgtgctgagcgccaccatcctgtacgagatcctgctgggcaaggccaccctgtacgccgtgctggtgtctgccctggtgctgatggctatggtcaagcggaaggacagccggggatga

SEQ ID NO: 9596 - DNA, 1416 bp, Artificial Sequence
  Synthetic Polynucloetide
atggactggatttggcgcatccttttccttgtcggcgctgctaccggcgcgcattccttcgaagaagttcagctggttgagtctggcggcagagtcgttagacctggcggaagcctgagactgtcttgtgccgccagcggcttcacctttgacgactacggcatgagctgggtccgacagcctcctggaaagggcctcgaatttgtgtccggcctgaactggaacggcgacatcaccgcctttaccgacagcgtgaagggcagattcaccatcagccgggacaacgtgaagtccagcctgtacctccagatgaacagcctgagagccgacgacaccgccttctactactgtgccagagtgcggacctggggcgattacacaacaggcgaggaaatcatcaacagctggtacttcgacctgtggggcagaggcacactggtcacagtctcttctacgcgtgagcagaaactgatctcggaagaggatgggagcggcatccagaaccctgatcctgccgtgtaccagctgcgggatagcaagagcagcgacaagagcgtgtgtctgttcaccgacttcgacagccagaccaacgtgtcccagagcaaggactccgacgtgtacatcaccgataagtgcgtgctggacatgcggagcatggacttcaagagcaactccgccgtggcctggtccaacaagtccgatttcgcctgcgccaacgccttcaacaacagcattatccccgaggacacattcttcccaagccccgagagcagctgcgacgtgaagctggtggaaaagagcttcgagacagacaccaacctgaacttccagaacctgagcgtgatcggcttcagaatcctgctgctgaaagtggccggctttaacctgctgatgaccctgcggctgtggtccagccgcgccaagagaagcggatctggcgtgaagcagaccctgaatttcgacctgctgaagctggctggcgacgtggaatccaacccaggcccttctagaggccatatggccaagcctttgtctcaagaagaatccaccctcattgaaagagcaacggctacaatcaacagcatccccatctctgaagactacagcgtcgccagcgcagctctctctagcgacggccgcatcttcactggtgtcaatgtatatcattttactgggggaccttgtgcagaactcgtggtgctgggcactgctgctgctgcggcagctggcaacctgacttgtatcgtcgcgatcggaaatgagaacaggggcatcttgagcccctgcggacggtgccgacaggtgcttctcgatctgcatcctgggatcaaagccatagtgaaggacagtgatggacagccgacggcagttgggattcgtgaattgctgccctctggttatgtgtgggagggctga

SEQ ID NO: 9597 - DNA, 918 bp, Artificial Sequence
  Synthetic Polynucloetide
atggactggatttggcgcatccttttccttgtcggcgctgctaccggcgcgcattccttcgaagaagttcagctggttgagtctggcggcagagtcgttagacctggcggaagcctgagactgtcttgtgccgccagcggcttcacctttgacgactacggcatgagctgggtccgacagcctcctggaaagggcctcgaatttgtgtccggcctgaactggaacggcgacatcaccgcctttaccgacagcgtgaagggcagattcaccatcagccgggacaacgtgaagtccagcctgtacctccagatgaacagcctgagagccgacgacaccgccttctactactgtgccagagtgcggacctggggcgattacacaacaggcgaggaaatcatcaacagctggtacttcgacctgtggggcagaggcacactggtcacagtctcttctacgcgtgagcagaaactgatctcggaagaggatgggagcggcatccagaaccctgatcctgccgtgtaccagctgcgggatagcaagagcagcgacaagagcgtgtgtctgttcaccgacttcgacagccagaccaacgtgtcccagagcaaggactccgacgtgtacatcaccgataagtgcgtgctggacatgcggagcatggacttcaagagcaactccgccgtggcctggtccaacaagtccgatttcgcctgcgccaacgccttcaacaacagcattatccccgaggacacattcttcccaagccccgagagcagctgcgacgtgaagctggtggaaaagagcttcgagacagacaccaacctgaacttccagaacctgagcgtgatcggcttcagaatcctgctgctgaaagtggccggctttaacctgctgatgaccctgcggctgtggtccagctga

SEQ ID NO: 9598 - DNA, 1962 bp, Artificial Sequence
  Synthetic Polynucloetide
atggccttaccagtgaccgccttgctcctgccgctggccttgctgctccacgccgccaggccggacatccagctgactcagagccctagctttctgagcgccagcgtgggcgacagagtgaccattacatgtagagccagccaggacatcagcagctacctggcctggtatcagcagaagcctggcaacgcccctaaactgctgatctacgccgccagcctgctgcaatctggcgtgccaagcagattcagcgcctttggcagcggcaccgagttcaccctgacaatatctagcctccagccagaggacttcgccacctactactgccagcacctgaagtcttaccctctgttcaccttcggacccggcaccaaggtggacatcaaaagaggcggaggcggaagtggaggcggaggatctggcggcggaggctctgaagttcagctggttgagtctggcggcagagtcgttagacctggcggaagcctgagactgtcttgtgccgccagcggcttcacctttgacgactacggcatgagctgggtccgacagcctcctggaaagggcctcgaatttgtgtccggcctgaactggaacggcgacatcaccgcctttaccgacagcgtgaagggcagattcaccatcagccgggacaacgtgaagtccagcctgtacctccagatgaacagcctgagagccgacgacaccgccttctactactgtgccagagtgcggacctggggcgattacacaacaggcgaggaaatcatcaacagctggtacttcgacctgtggggcagaggcacactggtcacagtctcttctacgcgtgggagcggcatccagaaccctgatcctgccgtgtaccagctgcgggatagcaagagcagcgacaagagcgtgtgtctgttcaccgacttcgacagccagaccaacgtgtcccagagcaaggactccgacgtgtacatcaccgataagaccgtgctggacatgcggagcatggacttcaagagcaactccgccgtggcctggtccaacaagtccgatttcgcctgcgccaacgccttcaacaacagcattatccccgaggacacattcttcccaagcagcgacgtgccctgcgacgtgaagctggtggaaaagagcttcgagacagacaccaacctgaacttccagaacctgagcgtgatcggcttcagaatcctgctgctgaaagtggccggctttaacctgctgatgaccctgcggctgtggtccagccgcgccaagagaagcggatctggcgtgaagcagaccctgaatttcgacctgctgaagctggctggcgacgtggaatccaacccaggcccttctagaggccatatgaccgagtacaagcccacggtgcgcctcgccacccgcgacgacgtccccagggccgtacgcaccctcgccgccgcgttcgccgactaccccgccacgcgccacaccgtcgatccggaccgccacatcgagcgggtcaccgagctgcaagaactcttcctcacgcgcgtcgggctcgacatcggcaaggtgtgggtcgcggacgacggcgccgcggtggcggtctggaccacgccggagagcgtcgaagcgggggcggtgttcgccgagatcggcccgcgcatggccgagttgagcggttcccggctggccgcgcagcaacagatggaaggcctcctggcgccgcaccggcccaaggagcccgcgtggttcctggccaccgtcggcgtctcgcccgaccaccagggcaagggtctgggcagcgccgtcgtgctccccggagtggaggcggccgagcgcgccggggtgcccgccttcctggagacctccgcgccccgcaacctccccttctacgagcggctcggcttcaccgtcaccgccgacgtcgaggtgcccgaaggaccgcgcacctggtgcatgacccgcaagcccggtgcctga

SEQ ID NO: 9599 - DNA, 2058 bp, Artificial Sequence
  Synthetic Polynucloetide
atggccttaccagtgaccgccttgctcctgccgctggccttgctgctccacgccgccaggccggacatccagctgactcagagccctagctttctgagcgccagcgtgggcgacagagtgaccattacatgtagagccagccaggacatcagcagctacctggcctggtatcagcagaagcctggcaacgcccctaaactgctgatctacgccgccagcctgctgcaatctggcgtgccaagcagattcagcgcctttggcagcggcaccgagttcaccctgacaatatctagcctccagccagaggacttcgccacctactactgccagcacctgaagtcttaccctctgttcaccttcggacccggcaccaaggtggacatcaaaagaggcggaggcggaagtggaggcggaggatctggcggcggaggctctgaagttcagctggttgagtctggcggcagagtcgttagacctggcggaagcctgagactgtcttgtgccgccagcggcttcacctttgacgactacggcatgagctgggtccgacagcctcctggaaagggcctcgaatttgtgtccggcctgaactggaacggcgacatcaccgcctttaccgacagcgtgaagggcagattcaccatcagccgggacaacgtgaagtccagcctgtacctccagatgaacagcctgagagccgacgacaccgccttctactactgtgccagagtgcggacctggggcgattacacaacaggcgaggaaatcatcaacagctggtacttcgacctgtggggcagaggcacactggtcacagtctcttctctcgaggacctgaagaacgtgttcccacctgaggtggccgtgttcgagcctagcaaggccgagatcgcccacacccagaaagccaccctcgtgtgcctggctaccggcttctaccccgaccatgtggaactgtcttggtgggtcaacggcaaagaggtgcacagcggcgtgtctaccgacccccagccactgaaagaacagcccgccctgaacgacagccggtactgcctgagcagcagactgagagtgtccgccaccttctggcagaacccccggaaccacttcagatgccaggtgcagttctacggcctgagcgagaacgacgagtggacccaggacagagccaagcccgtgacccagatcgtgtctgccgaagcctggggcagagccgattgcggcatcaccagcgccagctaccaccagggcgtgctgagcgccaccatcctgtacgagatcctgctgggcaaggccaccctgtacgccgtgctggtgtctgccctggtgctgatggctatggtcaagcggaaggacagccggggaagggccaagcgatctggatctggagcaacaaacttctcactactcaaacaagcaggtgacgtggaggagaatcccgggcctactagaggccatatgaccgagtacaagcccacggtgcgcctcgccacccgcgacgacgtccccagggccgtacgcaccctcgccgccgcgttcgccgactaccccgccacgcgccacaccgtcgatccggaccgccacatcgagcgggtcaccgagctgcaagaactcttcctcacgcgcgtcgggctcgacatcggcaaggtgtgggtcgcggacgacggcgccgcggtggcggtctggaccacgccggagagcgtcgaagcgggggcggtgttcgccgagatcggcccgcgcatggccgagttgagcggttcccggctggccgcgcagcaacagatggaaggcctcctggcgccgcaccggcccaaggagcccgcgtggttcctggccaccgtcggcgtctcgcccgaccaccagggcaagggtctgggcagcgccgtcgtgctccccggagtggaggcggccgagcgcgccggggtgcccgccttcctggagacctccgcgccccgcaacctccccttctacgagcggctcggcttcaccgtcaccgccgacgtcgaggtgcccgaaggaccgcgcacctggtgcatgacccgcaagcccggtgcctga

SEQ ID NO: 9600 - DNA, 2127 bp, Artificial Sequence
  Synthetic Polynucloetide
atggccttaccagtgaccgccttgctcctgccgctggccttgctgctccacgccgccaggccggacatccagctgactcagagccctagctttctgagcgccagcgtgggcgacagagtgaccattacatgtagagccagccaggacatcagcagctacctggcctggtatcagcagaagcctggcaacgcccctaaactgctgatctacgccgccagcctgctgcaatctggcgtgccaagcagattcagcgcctttggcagcggcaccgagttcaccctgacaatatctagcctccagccagaggacttcgccacctactactgccagcacctgaagtcttaccctctgttcaccttcggacccggcaccaaggtggacatcaaaagaggcggaggcggaagtggaggcggaggatctggcggcggaggctctgaagttcagctggttgagtctggcggcagagtcgttagacctggcggaagcctgagactgtcttgtgccgccagcggcttcacctttgacgactacggcatgagctgggtccgacagcctcctggaaagggcctcgaatttgtgtccggcctgaactggaacggcgacatcaccgcctttaccgacagcgtgaagggcagattcaccatcagccgggacaacgtgaagtccagcctgtacctccagatgaacagcctgagagccgacgacaccgccttctactactgtgccagagtgcggacctggggcgattacacaacaggcgaggaaatcatcaacagctggtacttcgacctgtggggcagaggcacactggtcacagtctcttctacgcgtgggtctggaggcggaggcagcggcggaggcgggagcggcgacggtaacgaggagatgggaggaatcactcaaaccccttacaaagtctcaatttcaggaacaactgttatccttacatgtccccagtatcctggcagcgagatcctttggcagcataacgacaagaatatagggggagatgaagacgataagaatatcggatctgacgaggatcacttgagcctgaaagagttctccgagcttgaacaaagcggatattatgtgtgctatccgcgcgggtcaaagccggaagacgctaacttttacctttatctccgagccagagtgtgcgaaaattgcatggaaatggacgttatgtccgttgctacaatagttatcgtagatatatgcatcacgggtggactgcttctgctggtttattattggtccaagaatagaaaggccaaagctaaacccgtgaccagaggcgctggcgcaggcggaaggcaaaggggacaaaacaaagaacggccaccaccagtgccaaatccagattatgagcctattcggaaaggacagagggacctgtactctggcctgaatcagagaagaatccgcgccaagagaagcggatctggcgtgaagcagaccctgaatttcgacctgctgaagctggctggcgacgtggaatccaacccaggcccttctagaggccatatgaccgagtacaagcccacggtgcgcctcgccacccgcgacgacgtccccagggccgtacgcaccctcgccgccgcgttcgccgactaccccgccacgcgccacaccgtcgatccggaccgccacatcgagcgggtcaccgagctgcaagaactcttcctcacgcgcgtcgggctcgacatcggcaaggtgtgggtcgcggacgacggcgccgcggtggcggtctggaccacgccggagagcgtcgaagcgggggcggtgttcgccgagatcggcccgcgcatggccgagttgagcggttcccggctggccgcgcagcaacagatggaaggcctcctggcgccgcaccggcccaaggagcccgcgtggttcctggccaccgtcggcgtctcgcccgaccaccagggcaagggtctgggcagcgccgtcgtgctccccggagtggaggcggccgagcgcgccggggtgcccgccttcctggagacctccgcgccccgcaacctccccttctacgagcggctcggcttcaccgtcaccgccgacgtcgaggtgcccgaaggaccgcgcacctggtgcatgacccgcaagcccggtgcctga

SEQ ID NO: 9601 - DNA, 2022 bp, Artificial Sequence
  Synthetic Polynucloetide
atggccttaccagtgaccgccttgctcctgccgctggccttgctgctccacgccgccaggccggacatccagctgactcagagccctagctttctgagcgccagcgtgggcgacagagtgaccattacatgtagagccagccaggacatcagcagctacctggcctggtatcagcagaagcctggcaacgcccctaaactgctgatctacgccgccagcctgctgcaatctggcgtgccaagcagattcagcgcctttggcagcggcaccgagttcaccctgacaatatctagcctccagccagaggacttcgccacctactactgccagcacctgaagtcttaccctctgttcaccttcggacccggcaccaaggtggacatcaaaagaggcggaggcggaagtggaggcggaggatctggcggcggaggctctgaagttcagctggttgagtctggcggcagagtcgttagacctggcggaagcctgagactgtcttgtgccgccagcggcttcacctttgacgactacggcatgagctgggtccgacagcctcctggaaagggcctcgaatttgtgtccggcctgaactggaacggcgacatcaccgcctttaccgacagcgtgaagggcagattcaccatcagccgggacaacgtgaagtccagcctgtacctccagatgaacagcctgagagccgacgacaccgccttctactactgtgccagagtgcggacctggggcgattacacaacaggcgaggaaatcatcaacagctggtacttcgacctgtggggcagaggcacactggtcacagtctcttctacgcgtgggtctggaggcggaggcagcggcggaggcgggagcggcttcaagatccccatcgaggaactggaagatcgggtgttcgtgaactgcaacacctctatcacctgggtggaaggcaccgtgggaacactgctgagcgacatcaccagactggacctcggcaagcggattctggaccctcggggcatctacagatgcaacggcaccgacatctacaaggacaaagaaagcaccgtgcaggtccactacagaatgtgccagtcctgcgtggaactggaccctgctacagtggccggcatcatcgtgaccgatgtgatcgctactctgctgctggctctgggagtgttctgcttcgccggacacgaaacaggcagactgtctggcgctgccgatacacaggccctgctgagaaacgaccaagtgtatcagcccctgcgcgacagagatgatgcccagtattctcacctcggcggcaactgggctagaaacaagcgcgccaagagaagcggatctggcgtgaagcagaccctgaatttcgacctgctgaagctggctggcgacgtggaatccaacccaggcccttctagaggccatatgaccgagtacaagcccacggtgcgcctcgccacccgcgacgacgtccccagggccgtacgcaccctcgccgccgcgttcgccgactaccccgccacgcgccacaccgtcgatccggaccgccacatcgagcgggtcaccgagctgcaagaactcttcctcacgcgcgtcgggctcgacatcggcaaggtgtgggtcgcggacgacggcgccgcggtggcggtctggaccacgccggagagcgtcgaagcgggggcggtgttcgccgagatcggcccgcgcatggccgagttgagcggttcccggctggccgcgcagcaacagatggaaggcctcctggcgccgcaccggcccaaggagcccgcgtggttcctggccaccgtcggcgtctcgcccgaccaccagggcaagggtctgggcagcgccgtcgtgctccccggagtggaggcggccgagcgcgccggggtgcccgccttcctggagacctccgcgccccgcaacctccccttctacgagcggctcggcttcaccgtcaccgccgacgtcgaggtgcccgaaggaccgcgcacctggtgcatgacccgcaagcccggtgcctga

SEQ ID NO: 9602 - DNA, 2052 bp, Artificial Sequence
  Synthetic Polynucloetide
atggccttaccagtgaccgccttgctcctgccgctggccttgctgctccacgccgccaggccggacatccagctgactcagagccctagctttctgagcgccagcgtgggcgacagagtgaccattacatgtagagccagccaggacatcagcagctacctggcctggtatcagcagaagcctggcaacgcccctaaactgctgatctacgccgccagcctgctgcaatctggcgtgccaagcagattcagcgcctttggcagcggcaccgagttcaccctgacaatatctagcctccagccagaggacttcgccacctactactgccagcacctgaagtcttaccctctgttcaccttcggacccggcaccaaggtggacatcaaaagaggcggaggcggaagtggaggcggaggatctggcggcggaggctctgaagttcagctggttgagtctggcggcagagtcgttagacctggcggaagcctgagactgtcttgtgccgccagcggcttcacctttgacgactacggcatgagctgggtccgacagcctcctggaaagggcctcgaatttgtgtccggcctgaactggaacggcgacatcaccgcctttaccgacagcgtgaagggcagattcaccatcagccgggacaacgtgaagtccagcctgtacctccagatgaacagcctgagagccgacgacaccgccttctactactgtgccagagtgcggacctggggcgattacacaacaggcgaggaaatcatcaacagctggtacttcgacctgtggggcagaggcacactggtcacagtctcttctacgcgtgggtctggaggcggaggcagcggcggaggcgggagcggccagagcatcaagggcaaccacctggtcaaggtgtacgactaccaagaggacggcagcgtgctgctgacatgtgatgccgaggccaagaacatcacctggtttaaggacggcaagatgatcggcttcctgaccgaggacaagaagaagtggaacctgggcagcaacgctaaggaccccagaggcatgtatcagtgcaagggcagccagaacaagagcaagcccctccaggtgtactaccggatgtgccagaactgcatcgagctgaacgccgctaccatcagcggctttctgttcgccgagatcgtgtccatcttcgtgctggccgtgggcgtgtactttatcgctggacaggatggcgtgcggcagagcagagcttccgataagcaaaccctgctgcctaacgaccagctgtaccagcctctgaaggacagagaggacgaccagtacagccacctccagggcaatcagctgagaagaaaccgcgccaagagaagcggatctggcgtgaagcagaccctgaatttcgacctgctgaagctggctggcgacgtggaatccaacccaggcccttctagaggccatatgaccgagtacaagcccacggtgcgcctcgccacccgcgacgacgtccccagggccgtacgcaccctcgccgccgcgttcgccgactaccccgccacgcgccacaccgtcgatccggaccgccacatcgagcgggtcaccgagctgcaagaactcttcctcacgcgcgtcgggctcgacatcggcaaggtgtgggtcgcggacgacggcgccgcggtggcggtctggaccacgccggagagcgtcgaagcgggggcggtgttcgccgagatcggcccgcgcatggccgagttgagcggttcccggctggccgcgcagcaacagatggaaggcctcctggcgccgcaccggcccaaggagcccgcgtggttcctggccaccgtcggcgtctcgcccgaccaccagggcaagggtctgggcagcgccgtcgtgctccccggagtggaggcggccgagcgcgccggggtgcccgccttcctggagacctccgcgccccgcaacctccccttctacgagcggctcggcttcaccgtcaccgccgacgtcgaggtgcccgaaggaccgcgcacctggtgcatgacccgcaagcccggtgcctga

SEQ ID NO: 9603 - DNA, 2001 bp, Artificial Sequence
  Synthetic Polynucloetide
atggccttaccagtgaccgccttgctcctgccgctggccttgctgctccacgccgccaggccggacatccagctgactcagagccctagctttctgagcgccagcgtgggcgacagagtgaccattacatgtagagccagccaggacatcagcagctacctggcctggtatcagcagaagcctggcaacgcccctaaactgctgatctacgccgccagcctgctgcaatctggcgtgccaagcagattcagcgcctttggcagcggcaccgagttcaccctgacaatatctagcctccagccagaggacttcgccacctactactgccagcacctgaagtcttaccctctgttcaccttcggacccggcaccaaggtggacatcaaaagaggcggaggcggaagtggaggcggaggatctggcggcggaggctctgaagttcagctggttgagtctggcggcagagtcgttagacctggcggaagcctgagactgtcttgtgccgccagcggcttcacctttgacgactacggcatgagctgggtccgacagcctcctggaaagggcctcgaatttgtgtccggcctgaactggaacggcgacatcaccgcctttaccgacagcgtgaagggcagattcaccatcagccgggacaacgtgaagtccagcctgtacctccagatgaacagcctgagagccgacgacaccgccttctactactgtgccagagtgcggacctggggcgattacacaacaggcgaggaaatcatcaacagctggtacttcgacctgtggggcagaggcacactggtcacagtctcttctacgcgtgggtctggaggcggaggcagcggcggaggcgggagcggccagagttttgggttgttggaccctaaattgtgctatctgttggacggaatcctgttcatttacggagtgatcctgaccgcattgttcctgcgggttaagttttccagatccgcagacgcacccgcttaccaacaagggcagaaccaactctacaatgaacttaatttggggcggagggaagagtacgacgttctggacaaaaggaggggacgagatcccgagatgggcggaaagcctcagcgaaggaagaatccgcaagaggggctttataacgaactccagaaagataaaatggcagaagcctatagtgagattgggatgaagggagaaaggaggaggggtaaaggtcacgatgggttgtaccaaggattgagcacagccactaaagatacctatgatgcgctccacatgcaggccctgccgccaagacgcgccaagagaagcggatctggcgtgaagcagaccctgaatttcgacctgctgaagctggctggcgacgtggaatccaacccaggcccttctagaggccatatgaccgagtacaagcccacggtgcgcctcgccacccgcgacgacgtccccagggccgtacgcaccctcgccgccgcgttcgccgactaccccgccacgcgccacaccgtcgatccggaccgccacatcgagcgggtcaccgagctgcaagaactcttcctcacgcgcgtcgggctcgacatcggcaaggtgtgggtcgcggacgacggcgccgcggtggcggtctggaccacgccggagagcgtcgaagcgggggcggtgttcgccgagatcggcccgcgcatggccgagttgagcggttcccggctggccgcgcagcaacagatggaaggcctcctggcgccgcaccggcccaaggagcccgcgtggttcctggccaccgtcggcgtctcgcccgaccaccagggcaagggtctgggcagcgccgtcgtgctccccggagtggaggcggccgagcgcgccggggtgcccgccttcctggagacctccgcgccccgcaacctccccttctacgagcggctcggcttcaccgtcaccgccgacgtcgaggtgcccgaaggaccgcgcacctggtgcatgacccgcaagcccggtgcctga

SEQ ID NO: 9604 - DNA, 2301 bp, Artificial Sequence
  Synthetic Polynucloetide
atggccttaccagtgaccgccttgctcctgccgctggccttgctgctccacgccgccaggccggaagtgcagctggttgaatctggcggaggactggttcagcctggcggatctctgagactgtcttgtgccgccagcggcttcagcttcagcgacttttggatgagctgggtccgacaggcccctggcaaaggacttgaatgggtcgccacaatcagccaggccggcagcgagaaggactacgtggactctgtgaagggcagattcaccatcagccgggacaacgccaagaagtccctgtacctccagatgaacagcctgagagccgaggacaccgccgtgtactattgtgcctctggcgtgtacagcttcgactacagaggccagggcaccctggtcacagtctcttctggtaccggcggaggcggatctggcggcggaggtagcggtggcggaggatctgaattcgacatccagctgactcagagccctagctttctgagcgccagcgtgggcgacagagtgaccattacatgtagagccagccaggacatcagcagctacctggcctggtatcagcagaagcctggcaacgcccctaaactgctgatctacgccgccagcctgctgcaatctggcgtgccaagcagattcagcgcctttggcagcggcaccgagttcaccctgacaatatctagcctccagccagaggacttcgccacctactactgccagcacctgaagtcttaccctctgttcaccttcggacccggcaccaaggtggacatcaaaagactcgaggacctgaagaacgtgttcccacctgaggtggccgtgttcgagcctagcgaggccgagatcagccacacccagaaagccaccctcgtgtgcctggctaccggcttctaccccgaccatgtggaactgtcttggtgggtcaacggcaaagaggtgcacagcggcgtgtgtaccgacccccagccactgaaagaacagcccgccctgaacgacagccggtactgcctgagcagcagactgagagtgtccgccaccttctggcagaacccccggaaccacttcagatgccaggtgcagttctacggcctgagcgagaacgacgagtggacccaggacagagccaagcccgtgacccagatcgtgtctgccgaagcctggggcagagccgattgcggctttaccagcgagagctaccagcagggcgtgctgagcgccaccatcctgtacgagatcctgctgggcaaggccaccctgtacgccgtgctggtgtctgccctggtgctgatggctatggtcaagcggaaggacagccggggaagggccaagcgatctggatctggagcaacaaacttctcactactcaaacaagcaggtgacgtggaggagaatcccgggcctactagtatggactggatttggcgcatccttttccttgtcggcgctgctaccggcgcgcattccttcgaagaagttcagctggttgagtctggcggcagagtcgttagacctggcggaagcctgagactgtcttgtgccgccagcggcttcacctttgacgactacggcatgagctgggtccgacagcctcctggaaagggcctcgaatttgtgtccggcctgaactggaacggcgacatcaccgcctttaccgacagcgtgaagggcagattcaccatcagccgggacaacgtgaagtccagcctgtacctccagatgaacagcctgagagccgacgacaccgccttctactactgtgccagagtgcggacctggggcgattacacaacaggcgaggaaatcatcaacagctggtacttcgacctgtggggcagaggcacactggtcacagtctcttctacgcgtatccagaaccctgatcctgccgtgtaccagctgcgggatagcaagagcagcgacaagagcgtgtgtctgttcaccgacttcgacagccagaccaacgtgtcccagagcaaggactccgacgtgtacatcaccgataagtgcgtgctggacatgcggagcatggacttcaagagcaactccgccgtggcctggtccaacaagtccgatttcgcctgcgccaacgccttcaacaacagcattatccccgaggacacattcttcccaagccccgagagcagctgcgacgtgaagctggtggaaaagagcttcgagacagacaccaacctgaacttccagaacctgagcgtgatcggcttcagaatcctgctgctgaaagtggccggctttaacctgctgatgaccctgcggctgtggtccagc

SEQ ID NO: 9605 - DNA, 2313 bp, Artificial Sequence
  Synthetic Polynucloetide
atggccttaccagtgaccgccttgctcctgccgctggccttgctgctccacgccgccaggccggaagtgcagctggttgaatctggcggaggactggttcagcctggcggatctctgagactgtcttgtgccgccagcggcttcagcttcagcgacttttggatgagctgggtccgacaggcccctggcaaaggacttgaatgggtcgccacaatcagccaggccggcagcgagaaggactacgtggactctgtgaagggcagattcaccatcagccgggacaacgccaagaagtccctgtacctccagatgaacagcctgagagccgaggacaccgccgtgtactattgtgcctctggcgtgtacagcttcgactacagaggccagggcaccctggtcacagtctcttctggtaccggcggaggcggatctggcggcggaggtagcggtggcggaggatctgaattcgacatccagctgactcagagccctagctttctgagcgccagcgtgggcgacagagtgaccattacatgtagagccagccaggacatcagcagctacctggcctggtatcagcagaagcctggcaacgcccctaaactgctgatctacgccgccagcctgctgcaatctggcgtgccaagcagattcagcgcctttggcagcggcaccgagttcaccctgacaatatctagcctccagccagaggacttcgccacctactactgccagcacctgaagtcttaccctctgttcaccttcggacccggcaccaaggtggacatcaaaagactcgagatccagaaccctgatcctgccgtgtaccagctgcgggatagcaagagcagcgacaagagcgtgtgtctgttcaccgacttcgacagccagaccaacgtgtcccagagcaaggactccgacgtgtacatcaccgataagtgcgtgctggacatgcggagcatggacttcaagagcaactccgccgtggcctggtccaacaagtccgatttcgcctgcgccaacgccttcaacaacagcattatccccgaggacacattcttcccaagccccgagagcagctgcgacgtgaagctggtggaaaagagcttcgagacagacaccaacctgaacttccagaacctgagcgtgatcggcttcagaatcctgctgctgaaagtggccggctttaacctgctgatgaccctgcggctgtggtccagccgcgccaagagaagcggatctggcgtgaagcagaccctgaatttcgacctgctgaagctggctggcgacgtggaatccaacccaggccctactagtatggactggatttggcgcatccttttccttgtcggcgctgctaccggcgcgcattccttcgaagaagttcagctggttgagtctggcggcagagtcgttagacctggcggaagcctgagactgtcttgtgccgccagcggcttcacctttgacgactacggcatgagctgggtccgacagcctcctggaaagggcctcgaatttgtgtccggcctgaactggaacggcgacatcaccgcctttaccgacagcgtgaagggcagattcaccatcagccgggacaacgtgaagtccagcctgtacctccagatgaacagcctgagagccgacgacaccgccttctactactgtgccagagtgcggacctggggcgattacacaacaggcgaggaaatcatcaacagctggtacttcgacctgtggggcagaggcacactggtcacagtctcttctacgcgtgaggacctgaagaacgtgttcccacctgaggtggccgtgttcgagcctagcgaggccgagatcagccacacccagaaagccaccctcgtgtgcctggctaccggcttctaccccgaccatgtggaactgtcttggtgggtcaacggcaaagaggtgcacagcggcgtgtgtaccgacccccagccactgaaagaacagcccgccctgaacgacagccggtactgcctgagcagcagactgagagtgtccgccaccttctggcagaacccccggaaccacttcagatgccaggtgcagttctacggcctgagcgagaacgacgagtggacccaggacagagccaagcccgtgacccagatcgtgtctgccgaagcctggggcagagccgattgcggctttaccagcgagagctaccagcagggcgtgctgagcgccaccatcctgtacgagatcctgctgggcaaggccaccctgtacgccgtgctggtgtctgccctggtgctgatggctatggtcaagcggaaggacagccgggga

SEQ ID NO: 9606 - DNA, 2889 bp, Artificial Sequence
  Synthetic Polynucloetide
atggccttaccagtgaccgccttgctcctgccgctggccttgctgctccacgccgccaggccggaagtgcagctggttgaatctggcggaggactggttcagcctggcggatctctgagactgtcttgtgccgccagcggcttcagcttcagcgacttttggatgagctgggtccgacaggcccctggcaaaggacttgaatgggtcgccacaatcagccaggccggcagcgagaaggactacgtggactctgtgaagggcagattcaccatcagccgggacaacgccaagaagtccctgtacctccagatgaacagcctgagagccgaggacaccgccgtgtactattgtgcctctggcgtgtacagcttcgactacagaggccagggcaccctggtcacagtctcttctggtaccggcggaggcggatctggcggcggaggtagcggtggcggaggatctgaattcgacatccagctgactcagagccctagctttctgagcgccagcgtgggcgacagagtgaccattacatgtagagccagccaggacatcagcagctacctggcctggtatcagcagaagcctggcaacgcccctaaactgctgatctacgccgccagcctgctgcaatctggcgtgccaagcagattcagcgcctttggcagcggcaccgagttcaccctgacaatatctagcctccagccagaggacttcgccacctactactgccagcacctgaagtcttaccctctgttcaccttcggacccggcaccaaggtggacatcaaaagactcgaggacctgaagaacgtgttcccacctgaggtggccgtgttcgagcctagcgaggccgagatcagccacacccagaaagccaccctcgtgtgcctggctaccggcttctaccccgaccatgtggaactgtcttggtgggtcaacggcaaagaggtgcacagcggcgtgtctaccgacccccagccactgaaagaacagcccgccctgaacgacagccggtactgcctgagcagcagactgagagtgtccgccaccttctggcagaacccccggaaccacttcagatgccaggtgcagttctacggcctgagcgagaacgacgagtggacccaggacagagccaagcccgtgacccagatcgtgtctgccgaagcctggggcagagccgattgcggatcccagagcttcggcctgctggaccccaagctgtgctacctgctggatggcatcctgttcatctacggcgtgatcctgaccgccctgttcctgagagtgaagttcagcagaagcgccgacgcccctgcctaccagcagggacagaaccaactgtacaacgagctgaacctgggcagacgggaagagtacgacgtgctggacaagcggagaggcagggaccctgagatgggcggaaagccccagcggagaaagaacccccaggaaggactgtataacgaactccagaaagacaagatggccgaagcctacagcgagatcggcatgaagggcgagcggagaagaggcaagggccacgatggcctgtaccagggcctgagcaccgccaccaaggacacctatgacgccctgcacatgcaggccctgcctccaagaagggccaagcgatctggatctggagcaacaaacttctcactactcaaacaagcaggtgacgtggaggagaatcccgggcctactagtatggactggatttggcgcatccttttccttgtcggcgctgctaccggcgcgcattccttcgaagaagttcagctggttgagtctggcggcagagtcgttagacctggcggaagcctgagactgtcttgtgccgccagcggcttcacctttgacgactacggcatgagctgggtccgacagcctcctggaaagggcctcgaatttgtgtccggcctgaactggaacggcgacatcaccgcctttaccgacagcgtgaagggcagattcaccatcagccgggacaacgtgaagtccagcctgtacctccagatgaacagcctgagagccgacgacaccgccttctactactgtgccagagtgcggacctggggcgattacacaacaggcgaggaaatcatcaacagctggtacttcgacctgtggggcagaggcacactggtcacagtctcttctacgcgtatccagaaccctgatcctgccgtgtaccagctgcgggatagcaagagcagcgacaagagcgtgtgtctgttcaccgacttcgacagccagaccaacgtgtcccagagcaaggactccgacgtgtacatcaccgataagaccgtgctggacatgcggagcatggacttcaagagcaactccgccgtggcctggtccaacaagtccgatttcgcctgcgccaacgccttcaacaacagcattatccccgaggacacattcttcccaagccccgagagcagctgcggtacccagagttttgggttgttggaccctaaattgtgctatctgttggacggaatcctgttcatttacggagtgatcctgaccgcattgttcctgcgggttaagttttccagatccgcagacgcacccgcttaccaacaagggcagaaccaactctacaatgaacttaatttggggcggagggaagagtacgacgttctggacaaaaggaggggacgagatcccgagatgggcggaaagcctcagcgaaggaagaatccgcaagaggggctttataacgaactccagaaagataaaatggcagaagcctatagtgagattgggatgaagggagaaaggaggaggggtaaaggtcacgatgggttgtaccaaggattgagcacagccactaaagatacctatgatgcgctccacatgcaggccctgccgccaaga

SEQ ID NO: 9607 - DNA, 2379 bp, Artificial Sequence
  Synthetic Polynucloetide
atggccttaccagtgaccgccttgctcctgccgctggccttgctgctccacgccgccaggccggaagtgcagctggttgaatctggcggaggactggttcagcctggcggatctctgagactgtcttgtgccgccagcggcttcagcttcagcgacttttggatgagctgggtccgacaggcccctggcaaaggacttgaatgggtcgccacaatcagccaggccggcagcgagaaggactacgtggactctgtgaagggcagattcaccatcagccgggacaacgccaagaagtccctgtacctccagatgaacagcctgagagccgaggacaccgccgtgtactattgtgcctctggcgtgtacagcttcgactacagaggccagggcaccctggtcacagtctcttctggtaccggcggaggcggatctggcggcggaggtagcggtggcggaggatctgaattcgacatccagctgactcagagccctagctttctgagcgccagcgtgggcgacagagtgaccattacatgtagagccagccaggacatcagcagctacctggcctggtatcagcagaagcctggcaacgcccctaaactgctgatctacgccgccagcctgctgcaatctggcgtgccaagcagattcagcgcctttggcagcggcaccgagttcaccctgacaatatctagcctccagccagaggacttcgccacctactactgccagcacctgaagtcttaccctctgttcaccttcggacccggcaccaaggtggacatcaaaagactcgagggacagcctaaggccaatcctaccgtgacactgttccctccaagcagcgaagaactccaggccaacaaggccacacttgtgtgcctgatctccgacttctaccctggggctgtgacagtggcttggaaggccgatggatctcctgtgaaagccggcgtggaaaccaccaagccatccaagcagagcaacaacaaatacgccgccagctcctacctgagcctgacacctgagcagtggaagtcccacagatcctacagctgccaagtgacccacgaaggcagcaccgtggaaaagacagtggcccctacagagtgcagccccatcaagaccgatgtgattacaatggaccccaaggacaactgctccaaggacgccaacgataccctgctgctccagctgaccaacaccagcgcctactacatgtacttgttgctgctgctgaagtccgtggtgtacttcgccatcatcacatgctgcctgctgcggagaaccgccttctgctgcaacggcgagaagtctagggccaagcgatctggatctggagcaacaaacttctcactactcaaacaagcaggtgacgtggaggagaatcccgggcctactagtatggactggatttggcgcatccttttccttgtcggcgctgctaccggcgcgcattccttcgaagaagttcagctggttgagtctggcggcagagtcgttagacctggcggaagcctgagactgtcttgtgccgccagcggcttcacctttgacgactacggcatgagctgggtccgacagcctcctggaaagggcctcgaatttgtgtccggcctgaactggaacggcgacatcaccgcctttaccgacagcgtgaagggcagattcaccatcagccgggacaacgtgaagtccagcctgtacctccagatgaacagcctgagagccgacgacaccgccttctactactgtgccagagtgcggacctggggcgattacacaacaggcgaggaaatcatcaacagctggtacttcgacctgtggggcagaggcacactggtcacagtctcttctacgcgtgcctctacaaagggaccctccgtgtttcctctggctcccagcagcaagtctacaagcggaggaacagccgctctgggctgcctggtcaaggattactttcccgagcctgtgaccgtgtcctggaatagcggagcactgacaagcggcgtgcacacctttccagccgtgctgcaaagcagcggcctgtactctctgagcagcgtggtcacagtgcctagctctagcctgggcacccagacctacatctgcaatgtgaaccacaagcctagcaacaccaaggtggacaagagagtggaacccaagagctgtgaagtgaaaaccgactccaccgaccacgtgaagcccaaagagacagagaacaccaagcagcccagcaagagctgccacaagcccaaggccatcgtgcacaccgagaaagtgaacatgatgagcctgaccgtgctgggcctgcggatgctgttcgccaaaaccgtggccgtgaacttcctgctgaccgccaagctgttcttcctc

SEQ ID NO: 9608 - DNA, 2322 bp, Artificial Sequence
  Synthetic Polynucloetide
atggccttaccagtgaccgccttgctcctgccgctggccttgctgctccacgccgccaggccggaagtgcagctggttgaatctggcggaggactggttcagcctggcggatctctgagactgtcttgtgccgccagcggcttcagcttcagcgacttttggatgagctgggtccgacaggcccctggcaaaggacttgaatgggtcgccacaatcagccaggccggcagcgagaaggactacgtggactctgtgaagggcagattcaccatcagccgggacaacgccaagaagtccctgtacctccagatgaacagcctgagagccgaggacaccgccgtgtactattgtgcctctggcgtgtacagcttcgactacagaggccagggcaccctggtcacagtctcttctggtaccggcggaggcggatctggcggcggaggtagcggtggcggaggatctgaattcgacatccagctgactcagagccctagctttctgagcgccagcgtgggcgacagagtgaccattacatgtagagccagccaggacatcagcagctacctggcctggtatcagcagaagcctggcaacgcccctaaactgctgatctacgccgccagcctgctgcaatctggcgtgccaagcagattcagcgcctttggcagcggcaccgagttcaccctgacaatatctagcctccagccagaggacttcgccacctactactgccagcacctgaagtcttaccctctgttcaccttcggacccggcaccaaggtggacatcaaaagactcgagggacagcctaaggccaatcctaccgtgacactgttccctccaagcagcgaagaactccaggccaacaaggccacacttgtgtgcctgatctccgacttctaccctggggctgtgacagtggcttggaaggccgatggatctcctgtgaaagccggcgtggaaaccaccaagccatccaagcagagcaacaacaaatacgccgccagctcctacctgagcctgacacctgagcagtggaagtcccacagatcctacagctgccaagtgacccacgaaggcagcaccgtggaaaagacagtggcccctacagagtgcagcggcagagccgattgcggctttaccagcgagagctaccagcagggcgtgctgagcgccaccatcctgtacgagatcctgctgggcaaggccaccctgtacgccgtgctggtgtctgccctggtgctgatggctatggtcaagcggaaggacagccggggacgcgccaagagaagcggatctggcgtgaagcagaccctgaatttcgacctgctgaagctggctggcgacgtggaatccaacccaggccctactagtatggactggatttggcgcatccttttccttgtcggcgctgctaccggcgcgcattccttcgaagaagttcagctggttgagtctggcggcagagtcgttagacctggcggaagcctgagactgtcttgtgccgccagcggcttcacctttgacgactacggcatgagctgggtccgacagcctcctggaaagggcctcgaatttgtgtccggcctgaactggaacggcgacatcaccgcctttaccgacagcgtgaagggcagattcaccatcagccgggacaacgtgaagtccagcctgtacctccagatgaacagcctgagagccgacgacaccgccttctactactgtgccagagtgcggacctggggcgattacacaacaggcgaggaaatcatcaacagctggtacttcgacctgtggggcagaggcacactggtcacagtctcttctacgcgtgcctctacaaagggaccctccgtgtttcctctggctcccagcagcaagtctacaagcggaggaacagccgctctgggctgcctggtcaaggattactttcccgagcctgtgaccgtgtcctggaatagcggagcactgacaagcggcgtgcacacctttccagccgtgctgcaaagcagcggcctgtactctctgagcagcgtggtcacagtgcctagctctagcctgggcacccagacctacatctgcaatgtgaaccacaagcctagcaacaccaaggtggacaagagagtggaacccaagagctgtatccccgaggacacattcttcccaagccccgagagcagctgcgacgtgaagctggtggaaaagagcttcgagacagacaccaacctgaacttccagaacctgagcgtgatcggcttcagaatcctgctgctgaaagtggccggctttaacctgctgatgaccctgcggctgtggtccagc

SEQ ID NO: 9609 - DNA, 2724 bp, Artificial Sequence
  Synthetic Polynucloetide
atggccttaccagtgaccgccttgctcctgccgctggccttgctgctccacgccgccaggccggaagtgcagctggttgaatctggcggaggactggttcagcctggcggatctctgagactgtcttgtgccgccagcggcttcagcttcagcgacttttggatgagctgggtccgacaggcccctggcaaaggacttgaatgggtcgccacaatcagccaggccggcagcgagaaggactacgtggactctgtgaagggcagattcaccatcagccgggacaacgccaagaagtccctgtacctccagatgaacagcctgagagccgaggacaccgccgtgtactattgtgcctctggcgtgtacagcttcgactacagaggccagggcaccctggtcacagtctcttctggtaccggcggaggcggatctggcggcggaggtagcggtggcggaggatctgaattcgacatccagctgactcagagccctagctttctgagcgccagcgtgggcgacagagtgaccattacatgtagagccagccaggacatcagcagctacctggcctggtatcagcagaagcctggcaacgcccctaaactgctgatctacgccgccagcctgctgcaatctggcgtgccaagcagattcagcgcctttggcagcggcaccgagttcaccctgacaatatctagcctccagccagaggacttcgccacctactactgccagcacctgaagtcttaccctctgttcaccttcggacccggcaccaaggtggacatcaaaagactcgagatccagaaccctgatcctgccgtgtaccagctgcgggatagcaagagcagcgacaagagcgtgtgtctgttcaccgacttcgacagccagaccaacgtgtcccagagcaaggactccgacgtgtacatcaccgataagtgcgtgctggacatgcggagcatggacttcaagagcaactccgccgtggcctggtccaacaagtccgatttcgcctgcgccaacgccttcaacaacagcattatccccgaggacacattcttcccaagccccgagagcagctgcgacgtgaagctggtggaaaagagcttcgagacagacaccaacctgaacttccagaacctgagcgtgatcggcttcagaatcctgctgctgaaagtggccggctttaacctgctgatgaccctgcggctgtggtccagccgcgccaagagaagcggatctggcgtgaagcagaccctgaatttcgacctgctgaagctggctggcgacgtggaatccaacccaggccctactagtatggactggatttggcgcatccttttccttgtcggcgctgctaccggcgcgcattccgggccccagctccagctgcaagagtctggacctggcctggtcaagcctagcgagacactgagcctgacctgtaccgtgtccggcgatagcatcagcagcggcgattactactggggctggatcagacagcctcctggcaaaggactggaatggatcggccacatctactacagcggcgtgacctactacaaccccagcctgaagtccagagtgaccatcagcgtggacaccagccggaaccagttctccctgaagctgtctagcgtgacagccgccgataccgccgtgtactactgcaccagagaggacagcagcaactggcggagtagaggccagggaacactggtcacagttagctctggatccggcggaggcggaagtggaggcggaggatctggcggcggaggctctttcgaagaagttcagctggttgagtctggcggcagagtcgttagacctggcggaagcctgagactgtcttgtgccgccagcggcttcacctttgacgactacggcatgagctgggtccgacagcctcctggaaagggcctcgaatttgtgtccggcctgaactggaacggcgacatcaccgcctttaccgacagcgtgaagggcagattcaccatcagccgggacaacgtgaagtccagcctgtacctccagatgaacagcctgagagccgacgacaccgccttctactactgtgccagagtgcggacctggggcgattacacaacaggcgaggaaatcatcaacagctggtacttcgacctgtggggcagaggcacactggtcacagtctcttctacgcgtgaggacctgaagaacgtgttcccacctgaggtggccgtgttcgagcctagcgaggccgagatcagccacacccagaaagccaccctcgtgtgcctggctaccggcttctaccccgaccatgtggaactgtcttggtgggtcaacggcaaagaggtgcacagcggcgtgtgtaccgacccccagccactgaaagaacagcccgccctgaacgacagccggtactgcctgagcagcagactgagagtgtccgccaccttctggcagaacccccggaaccacttcagatgccaggtgcagttctacggcctgagcgagaacgacgagtggacccaggacagagccaagcccgtgacccagatcgtgtctgccgaagcctggggcagagccgattgcggctttaccagcgagagctaccagcagggcgtgctgagcgccaccatcctgtacgagatcctgctgggcaaggccaccctgtacgccgtgctggtgtctgccctggtgctgatggctatggtcaagcggaaggacagccgggga

SEQ ID NO: 9610 - DNA, 3300 bp, Artificial Sequence
  Synthetic Polynucloetide
atggccttaccagtgaccgccttgctcctgccgctggccttgctgctccacgccgccaggccggaagtgcagctggttgaatctggcggaggactggttcagcctggcggatctctgagactgtcttgtgccgccagcggcttcagcttcagcgacttttggatgagctgggtccgacaggcccctggcaaaggacttgaatgggtcgccacaatcagccaggccggcagcgagaaggactacgtggactctgtgaagggcagattcaccatcagccgggacaacgccaagaagtccctgtacctccagatgaacagcctgagagccgaggacaccgccgtgtactattgtgcctctggcgtgtacagcttcgactacagaggccagggcaccctggtcacagtctcttctggtaccggcggaggcggatctggcggcggaggtagcggtggcggaggatctgaattcgacatccagctgactcagagccctagctttctgagcgccagcgtgggcgacagagtgaccattacatgtagagccagccaggacatcagcagctacctggcctggtatcagcagaagcctggcaacgcccctaaactgctgatctacgccgccagcctgctgcaatctggcgtgccaagcagattcagcgcctttggcagcggcaccgagttcaccctgacaatatctagcctccagccagaggacttcgccacctactactgccagcacctgaagtcttaccctctgttcaccttcggacccggcaccaaggtggacatcaaaagactcgaggacctgaagaacgtgttcccacctgaggtggccgtgttcgagcctagcgaggccgagatcagccacacccagaaagccaccctcgtgtgcctggctaccggcttctaccccgaccatgtggaactgtcttggtgggtcaacggcaaagaggtgcacagcggcgtgtctaccgacccccagccactgaaagaacagcccgccctgaacgacagccggtactgcctgagcagcagactgagagtgtccgccaccttctggcagaacccccggaaccacttcagatgccaggtgcagttctacggcctgagcgagaacgacgagtggacccaggacagagccaagcccgtgacccagatcgtgtctgccgaagcctggggcagagccgattgcggatcccagagcttcggcctgctggaccccaagctgtgctacctgctggatggcatcctgttcatctacggcgtgatcctgaccgccctgttcctgagagtgaagttcagcagaagcgccgacgcccctgcctaccagcagggacagaaccaactgtacaacgagctgaacctgggcagacgggaagagtacgacgtgctggacaagcggagaggcagggaccctgagatgggcggaaagccccagcggagaaagaacccccaggaaggactgtataacgaactccagaaagacaagatggccgaagcctacagcgagatcggcatgaagggcgagcggagaagaggcaagggccacgatggcctgtaccagggcctgagcaccgccaccaaggacacctatgacgccctgcacatgcaggccctgcctccaagaagggccaagcgatctggatctggagcaacaaacttctcactactcaaacaagcaggtgacgtggaggagaatcccgggcctactagtatggactggatttggcgcatccttttccttgtcggcgctgctaccggcgcgcattccgggccccagctccagctgcaagagtctggacctggcctggtcaagcctagcgagacactgagcctgacctgtaccgtgtccggcgatagcatcagcagcggcgattactactggggctggatcagacagcctcctggcaaaggactggaatggatcggccacatctactacagcggcgtgacctactacaaccccagcctgaagtccagagtgaccatcagcgtggacaccagccggaaccagttctccctgaagctgtctagcgtgacagccgccgataccgccgtgtactactgcaccagagaggacagcagcaactggcggagtagaggccagggaacactggtcacagttagctctggatccggcggaggcggaagtggaggcggaggatctggcggcggaggctctttcgaagaagttcagctggttgagtctggcggcagagtcgttagacctggcggaagcctgagactgtcttgtgccgccagcggcttcacctttgacgactacggcatgagctgggtccgacagcctcctggaaagggcctcgaatttgtgtccggcctgaactggaacggcgacatcaccgcctttaccgacagcgtgaagggcagattcaccatcagccgggacaacgtgaagtccagcctgtacctccagatgaacagcctgagagccgacgacaccgccttctactactgtgccagagtgcggacctggggcgattacacaacaggcgaggaaatcatcaacagctggtacttcgacctgtggggcagaggcacactggtcacagtctcttctacgcgtatccagaaccctgatcctgccgtgtaccagctgcgggatagcaagagcagcgacaagagcgtgtgtctgttcaccgacttcgacagccagaccaacgtgtcccagagcaaggactccgacgtgtacatcaccgataagaccgtgctggacatgcggagcatggacttcaagagcaactccgccgtggcctggtccaacaagtccgatttcgcctgcgccaacgccttcaacaacagcattatccccgaggacacattcttcccaagccccgagagcagctgcggtacccagagttttgggttgttggaccctaaattgtgctatctgttggacggaatcctgttcatttacggagtgatcctgaccgcattgttcctgcgggttaagttttccagatccgcagacgcacccgcttaccaacaagggcagaaccaactctacaatgaacttaatttggggcggagggaagagtacgacgttctggacaaaaggaggggacgagatcccgagatgggcggaaagcctcagcgaaggaagaatccgcaagaggggctttataacgaactccagaaagataaaatggcagaagcctatagtgagattgggatgaagggagaaaggaggaggggtaaaggtcacgatgggttgtaccaaggattgagcacagccactaaagatacctatgatgcgctccacatgcaggccctgccgccaaga

SEQ ID NO: 9611 - DNA, 2790 bp, Artificial Sequence
  Synthetic Polynucloetide
atggccttaccagtgaccgccttgctcctgccgctggccttgctgctccacgccgccaggccggaagtgcagctggttgaatctggcggaggactggttcagcctggcggatctctgagactgtcttgtgccgccagcggcttcagcttcagcgacttttggatgagctgggtccgacaggcccctggcaaaggacttgaatgggtcgccacaatcagccaggccggcagcgagaaggactacgtggactctgtgaagggcagattcaccatcagccgggacaacgccaagaagtccctgtacctccagatgaacagcctgagagccgaggacaccgccgtgtactattgtgcctctggcgtgtacagcttcgactacagaggccagggcaccctggtcacagtctcttctggtaccggcggaggcggatctggcggcggaggtagcggtggcggaggatctgaattcgacatccagctgactcagagccctagctttctgagcgccagcgtgggcgacagagtgaccattacatgtagagccagccaggacatcagcagctacctggcctggtatcagcagaagcctggcaacgcccctaaactgctgatctacgccgccagcctgctgcaatctggcgtgccaagcagattcagcgcctttggcagcggcaccgagttcaccctgacaatatctagcctccagccagaggacttcgccacctactactgccagcacctgaagtcttaccctctgttcaccttcggacccggcaccaaggtggacatcaaaagactcgagggacagcctaaggccaatcctaccgtgacactgttccctccaagcagcgaagaactccaggccaacaaggccacacttgtgtgcctgatctccgacttctaccctggggctgtgacagtggcttggaaggccgatggatctcctgtgaaagccggcgtggaaaccaccaagccatccaagcagagcaacaacaaatacgccgccagctcctacctgagcctgacacctgagcagtggaagtcccacagatcctacagctgccaagtgacccacgaaggcagcaccgtggaaaagacagtggcccctacagagtgcagccccatcaagaccgatgtgattacaatggaccccaaggacaactgctccaaggacgccaacgataccctgctgctccagctgaccaacaccagcgcctactacatgtacttgttgctgctgctgaagtccgtggtgtacttcgccatcatcacatgctgcctgctgcggagaaccgccttctgctgcaacggcgagaagtctagggccaagcgatctggatctggagcaacaaacttctcactactcaaacaagcaggtgacgtggaggagaatcccgggcctactagtatggactggatttggcgcatccttttccttgtcggcgctgctaccggcgcgcattccgggccccagctccagctgcaagagtctggacctggcctggtcaagcctagcgagacactgagcctgacctgtaccgtgtccggcgatagcatcagcagcggcgattactactggggctggatcagacagcctcctggcaaaggactggaatggatcggccacatctactacagcggcgtgacctactacaaccccagcctgaagtccagagtgaccatcagcgtggacaccagccggaaccagttctccctgaagctgtctagcgtgacagccgccgataccgccgtgtactactgcaccagagaggacagcagcaactggcggagtagaggccagggaacactggtcacagttagctctggatccggcggaggcggaagtggaggcggaggatctggcggcggaggctctttcgaagaagttcagctggttgagtctggcggcagagtcgttagacctggcggaagcctgagactgtcttgtgccgccagcggcttcacctttgacgactacggcatgagctgggtccgacagcctcctggaaagggcctcgaatttgtgtccggcctgaactggaacggcgacatcaccgcctttaccgacagcgtgaagggcagattcaccatcagccgggacaacgtgaagtccagcctgtacctccagatgaacagcctgagagccgacgacaccgccttctactactgtgccagagtgcggacctggggcgattacacaacaggcgaggaaatcatcaacagctggtacttcgacctgtggggcagaggcacactggtcacagtctcttctacgcgtgcctctacaaagggaccctccgtgtttcctctggctcccagcagcaagtctacaagcggaggaacagccgctctgggctgcctggtcaaggattactttcccgagcctgtgaccgtgtcctggaatagcggagcactgacaagcggcgtgcacacctttccagccgtgctgcaaagcagcggcctgtactctctgagcagcgtggtcacagtgcctagctctagcctgggcacccagacctacatctgcaatgtgaaccacaagcctagcaacaccaaggtggacaagagagtggaacccaagagctgtgaagtgaaaaccgactccaccgaccacgtgaagcccaaagagacagagaacaccaagcagcccagcaagagctgccacaagcccaaggccatcgtgcacaccgagaaagtgaacatgatgagcctgaccgtgctgggcctgcggatgctgttcgccaaaaccgtggccgtgaacttcctgctgaccgccaagctgttcttcctc

SEQ ID NO: 9612 - DNA, 2733 bp, Artificial Sequence
  Synthetic Polynucloetide
atggccttaccagtgaccgccttgctcctgccgctggccttgctgctccacgccgccaggccggaagtgcagctggttgaatctggcggaggactggttcagcctggcggatctctgagactgtcttgtgccgccagcggcttcagcttcagcgacttttggatgagctgggtccgacaggcccctggcaaaggacttgaatgggtcgccacaatcagccaggccggcagcgagaaggactacgtggactctgtgaagggcagattcaccatcagccgggacaacgccaagaagtccctgtacctccagatgaacagcctgagagccgaggacaccgccgtgtactattgtgcctctggcgtgtacagcttcgactacagaggccagggcaccctggtcacagtctcttctggtaccggcggaggcggatctggcggcggaggtagcggtggcggaggatctgaattcgacatccagctgactcagagccctagctttctgagcgccagcgtgggcgacagagtgaccattacatgtagagccagccaggacatcagcagctacctggcctggtatcagcagaagcctggcaacgcccctaaactgctgatctacgccgccagcctgctgcaatctggcgtgccaagcagattcagcgcctttggcagcggcaccgagttcaccctgacaatatctagcctccagccagaggacttcgccacctactactgccagcacctgaagtcttaccctctgttcaccttcggacccggcaccaaggtggacatcaaaagactcgagggacagcctaaggccaatcctaccgtgacactgttccctccaagcagcgaagaactccaggccaacaaggccacacttgtgtgcctgatctccgacttctaccctggggctgtgacagtggcttggaaggccgatggatctcctgtgaaagccggcgtggaaaccaccaagccatccaagcagagcaacaacaaatacgccgccagctcctacctgagcctgacacctgagcagtggaagtcccacagatcctacagctgccaagtgacccacgaaggcagcaccgtggaaaagacagtggcccctacagagtgcagcggcagagccgattgcggctttaccagcgagagctaccagcagggcgtgctgagcgccaccatcctgtacgagatcctgctgggcaaggccaccctgtacgccgtgctggtgtctgccctggtgctgatggctatggtcaagcggaaggacagccggggacgcgccaagagaagcggatctggcgtgaagcagaccctgaatttcgacctgctgaagctggctggcgacgtggaatccaacccaggccctactagtatggactggatttggcgcatccttttccttgtcggcgctgctaccggcgcgcattccgggccccagctccagctgcaagagtctggacctggcctggtcaagcctagcgagacactgagcctgacctgtaccgtgtccggcgatagcatcagcagcggcgattactactggggctggatcagacagcctcctggcaaaggactggaatggatcggccacatctactacagcggcgtgacctactacaaccccagcctgaagtccagagtgaccatcagcgtggacaccagccggaaccagttctccctgaagctgtctagcgtgacagccgccgataccgccgtgtactactgcaccagagaggacagcagcaactggcggagtagaggccagggaacactggtcacagttagctctggatccggcggaggcggaagtggaggcggaggatctggcggcggaggctctttcgaagaagttcagctggttgagtctggcggcagagtcgttagacctggcggaagcctgagactgtcttgtgccgccagcggcttcacctttgacgactacggcatgagctgggtccgacagcctcctggaaagggcctcgaatttgtgtccggcctgaactggaacggcgacatcaccgcctttaccgacagcgtgaagggcagattcaccatcagccgggacaacgtgaagtccagcctgtacctccagatgaacagcctgagagccgacgacaccgccttctactactgtgccagagtgcggacctggggcgattacacaacaggcgaggaaatcatcaacagctggtacttcgacctgtggggcagaggcacactggtcacagtctcttctacgcgtgcctctacaaagggaccctccgtgtttcctctggctcccagcagcaagtctacaagcggaggaacagccgctctgggctgcctggtcaaggattactttcccgagcctgtgaccgtgtcctggaatagcggagcactgacaagcggcgtgcacacctttccagccgtgctgcaaagcagcggcctgtactctctgagcagcgtggtcacagtgcctagctctagcctgggcacccagacctacatctgcaatgtgaaccacaagcctagcaacaccaaggtggacaagagagtggaacccaagagctgtatccccgaggacacattcttcccaagccccgagagcagctgcgacgtgaagctggtggaaaagagcttcgagacagacaccaacctgaacttccagaacctgagcgtgatcggcttcagaatcctgctgctgaaagtggccggctttaacctgctgatgaccctgcggctgtggtccagc

SEQ ID NO: 9613 - DNA, 2304 bp, Artificial Sequence
  Synthetic Polynucloetide
atggccttaccagtgaccgccttgctcctgccgctggccttgctgctccacgccgccaggccggaagtgcaggttttggagtctggcggaggactggttcagcctggcggatctctgagactgtcttgtgccgccagcggcttcaccttcagcaactttgccatgagctgggtccgacaggcccctggcaaaggacttgaatgggtgtccacaatcagcggcagcgccggcacaacagattacgccgattctgtgaagggcagattcaccatcagccgggacaacagcaagaaaaccctgtacctccagatgaacagcctgcgcgtggaagataccgccgtgtactactgtgccgatggcagaggccccttcttcgattatcgcggccagggcacactggtcaccgtttcttctggtaccggcggaggcggatctggcggcggaggtagcggtggcggaggatctgaattcgacatccagctgactcagagccctagctttctgagcgccagcgtgggcgacagagtgaccattacatgtagagccagccaggacatcagcagctacctggcctggtatcagcagaagcctggcaacgcccctaaactgctgatctacgccgccagcctgctgcaatctggcgtgccaagcagattcagcgcctttggcagcggcaccgagttcaccctgacaatatctagcctccagccagaggacttcgccacctactactgccagcacctgaagtcttaccctctgttcaccttcggacccggcaccaaggtggacatcaaaagactcgaggacctgaagaacgtgttcccacctgaggtggccgtgttcgagcctagcgaggccgagatcagccacacccagaaagccaccctcgtgtgcctggctaccggcttctaccccgaccatgtggaactgtcttggtgggtcaacggcaaagaggtgcacagcggcgtgtgtaccgacccccagccactgaaagaacagcccgccctgaacgacagccggtactgcctgagcagcagactgagagtgtccgccaccttctggcagaacccccggaaccacttcagatgccaggtgcagttctacggcctgagcgagaacgacgagtggacccaggacagagccaagcccgtgacccagatcgtgtctgccgaagcctggggcagagccgattgcggctttaccagcgagagctaccagcagggcgtgctgagcgccaccatcctgtacgagatcctgctgggcaaggccaccctgtacgccgtgctggtgtctgccctggtgctgatggctatggtcaagcggaaggacagccggggaagggccaagcgatctggatctggagcaacaaacttctcactactcaaacaagcaggtgacgtggaggagaatcccgggcctactagtatggactggatttggcgcatccttttccttgtcggcgctgctaccggcgcgcattccttcgaagaagttcagctggttgagtctggcggcagagtcgttagacctggcggaagcctgagactgtcttgtgccgccagcggcttcacctttgacgactacggcatgagctgggtccgacagcctcctggaaagggcctcgaatttgtgtccggcctgaactggaacggcgacatcaccgcctttaccgacagcgtgaagggcagattcaccatcagccgggacaacgtgaagtccagcctgtacctccagatgaacagcctgagagccgacgacaccgccttctactactgtgccagagtgcggacctggggcgattacacaacaggcgaggaaatcatcaacagctggtacttcgacctgtggggcagaggcacactggtcacagtctcttctacgcgtatccagaaccctgatcctgccgtgtaccagctgcgggatagcaagagcagcgacaagagcgtgtgtctgttcaccgacttcgacagccagaccaacgtgtcccagagcaaggactccgacgtgtacatcaccgataagtgcgtgctggacatgcggagcatggacttcaagagcaactccgccgtggcctggtccaacaagtccgatttcgcctgcgccaacgccttcaacaacagcattatccccgaggacacattcttcccaagccccgagagcagctgcgacgtgaagctggtggaaaagagcttcgagacagacaccaacctgaacttccagaacctgagcgtgatcggcttcagaatcctgctgctgaaagtggccggctttaacctgctgatgaccctgcggctgtggtccagc

SEQ ID NO: 9614 - DNA, 2307 bp, Artificial Sequence
  Synthetic Polynucloetide
atggccttaccagtgaccgccttgctcctgccgctggccttgctgctccacgccgccaggccggacatccagctgactcagagccctagctttctgagcgccagcgtgggcgacagagtgaccattacatgtagagccagccaggacatcagcagctacctggcctggtatcagcagaagcctggcaacgcccctaaactgctgatctacgccgccagcctgctgcaatctggcgtgccaagcagattcagcgcctttggcagcggcaccgagttcaccctgacaatatctagcctccagccagaggacttcgccacctactactgccagcacctgaagtcttaccctctgttcaccttcggacccggcaccaaggtggacatcaaaagactcgaggacctgaagaacgtgttcccacctgaggtggccgtgttcgagcctagcgaggccgagatcagccacacccagaaagccaccctcgtgtgcctggctaccggcttctaccccgaccatgtggaactgtcttggtgggtcaacggcaaagaggtgcacagcggcgtgtgtaccgacccccagccactgaaagaacagcccgccctgaacgacagccggtactgcctgagcagcagactgagagtgtccgccaccttctggcagaacccccggaaccacttcagatgccaggtgcagttctacggcctgagcgagaacgacgagtggacccaggacagagccaagcccgtgacccagatcgtgtctgccgaagcctggggcagagccgattgcggctttaccagcgagagctaccagcagggcgtgctgagcgccaccatcctgtacgagatcctgctgggcaaggccaccctgtacgccgtgctggtgtctgccctggtgctgatggctatggtcaagcggaaggacagccggggaagggccaagcgatctggatctggagcaacaaacttctcactactcaaacaagcaggtgacgtggaggagaatcccgggcctactagtatggactggatttggcgcatccttttccttgtcggcgctgctaccggcgcccattccgggcccgaagtgcagctggttgaatctggcggaggactggttcaggctggcggatctctgagactgtcttgtgccgccagcggcagaacctttagcatgggctggtttagacaggcccctggcaaagagagagagttcgtcgccgccatcacatactctggcggcagcccttactacgccgactctgtgaagggcagattcaccatcagccgggacaacgccaagaacaccgtgtacctccagatgaacagcctgaagcctgaggacaccgccgtgtactactgcgccgccaatccaacatacggcagcgactggaacgccgagaattggggccagggaacccaagtgacagtgtctagcggatccggcggcggaggatctggcggaggcggatctgggggcggaggctctttcgaagaagttcagctggttgagtctggcggcagagtcgttagacctggcggaagcctgagactgtcttgtgccgccagcggcttcacctttgacgactacggcatgagctgggtccgacagcctcctggaaagggcctcgaatttgtgtccggcctgaactggaacggcgacatcaccgcctttaccgacagcgtgaagggcagattcaccatcagccgggacaacgtgaagtccagcctgtacctccagatgaacagcctgagagccgacgacaccgccttctactactgtgccagagtgcggacctggggcgattacacaacaggcgaggaaatcatcaacagctggtacttcgacctgtggggcagaggcacactggtcacagtctcttctacgcgtatccagaaccctgatcctgccgtgtaccagctgcgggatagcaagagcagcgacaagagcgtgtgtctgttcaccgacttcgacagccagaccaacgtgtcccagagcaaggactccgacgtgtacatcaccgataagtgcgtgctggacatgcggagcatggacttcaagagcaactccgccgtggcctggtccaacaagtccgatttcgcctgcgccaacgccttcaacaacagcattatccccgaggacacattcttcccaagccccgagagcagctgcgacgtgaagctggtggaaaagagcttcgagacagacaccaacctgaacttccagaacctgagcgtgatcggcttcagaatcctgctgctgaaagtggccggctttaacctgctgatgaccctgcggctgtggtccagc

SEQ ID NO: 9615 - DNA, 2688 bp, Artificial Sequence
  Synthetic Polynucloetide
atggccttaccagtgaccgccttgctcctgccgctggccttgctgctccacgccgccaggccggacatccagctgactcagagccctagctttctgagcgccagcgtgggcgacagagtgaccattacatgtagagccagccaggacatcagcagctacctggcctggtatcagcagaagcctggcaacgcccctaaactgctgatctacgccgccagcctgctgcaatctggcgtgccaagcagattcagcgcctttggcagcggcaccgagttcaccctgacaatatctagcctccagccagaggacttcgccacctactactgccagcacctgaagtcttaccctctgttcaccttcggacccggcaccaaggtggacatcaaaagactcgaggacctgaagaacgtgttcccacctgaggtggccgtgttcgagcctagcgaggccgagatcagccacacccagaaagccaccctcgtgtgcctggctaccggcttctaccccgaccatgtggaactgtcttggtgggtcaacggcaaagaggtgcacagcggcgtgtgtaccgacccccagccactgaaagaacagcccgccctgaacgacagccggtactgcctgagcagcagactgagagtgtccgccaccttctggcagaacccccggaaccacttcagatgccaggtgcagttctacggcctgagcgagaacgacgagtggacccaggacagagccaagcccgtgacccagatcgtgtctgccgaagcctggggcagagccgattgcggctttaccagcgagagctaccagcagggcgtgctgagcgccaccatcctgtacgagatcctgctgggcaaggccaccctgtacgccgtgctggtgtctgccctggtgctgatggctatggtcaagcggaaggacagccggggaagggccaagcgatctggatctggagcaacaaacttctcactactcaaacaagcaggtgacgtggaggagaatcccgggcctactagtatggactggatttggcgcatccttttccttgtcggcgctgctaccggcgcccattcccaactgcaactgcaagagtctggccctggcctggtcaagccttctgaaaccctgagcctgacctgtaccgtgtccggcggctctatcagcagcggcgattactactggggctggatcagacagcctccaggcaagggactcgaatggatcggcagcatcagctacagcggctccacctactacaacccaagcctgaagtccagagtgaccatcagcgtggacaccagcagaaaccagttctccctgaagctgagcagcgtgacagccgccgatacagccgtgtattattgcaccagagaggacagcagcaactggcggagtagaggacagggcacactggtcacagtgtcctcttctggaggcggtggaagcggtggaggaggatctgaagtgcagctggttgaatctggcggaggactggttcaggctggcggatctctgagactgtcttgtgccgccagcggcagaacctttagcatgggctggtttagacaggcccctggcaaagagagagagttcgtcgccgccatcacatactctggcggcagcccttactacgccgactctgtgaagggcagattcaccatcagccgggacaacgccaagaacaccgtgtacctccagatgaacagcctgaagcctgaggacaccgccgtgtactactgcgccgccaatccaacatacggcagcgactggaacgccgagaattggggccagggaacccaagtgacagtgtctagcggatccggcggcggaggatctggcggaggcggatctgggggcggaggctctttcgaagaagttcagctggttgagtctggcggcagagtcgttagacctggcggaagcctgagactgtcttgtgccgccagcggcttcacctttgacgactacggcatgagctgggtccgacagcctcctggaaagggcctcgaatttgtgtccggcctgaactggaacggcgacatcaccgcctttaccgacagcgtgaagggcagattcaccatcagccgggacaacgtgaagtccagcctgtacctccagatgaacagcctgagagccgacgacaccgccttctactactgtgccagagtgcggacctggggcgattacacaacaggcgaggaaatcatcaacagctggtacttcgacctgtggggcagaggcacactggtcacagtctcttctacgcgtatccagaaccctgatcctgccgtgtaccagctgcgggatagcaagagcagcgacaagagcgtgtgtctgttcaccgacttcgacagccagaccaacgtgtcccagagcaaggactccgacgtgtacatcaccgataagtgcgtgctggacatgcggagcatggacttcaagagcaactccgccgtggcctggtccaacaagtccgatttcgcctgcgccaacgccttcaacaacagcattatccccgaggacacattcttcccaagccccgagagcagctgcgacgtgaagctggtggaaaagagcttcgagacagacaccaacctgaacttccagaacctgagcgtgatcggcttcagaatcctgctgctgaaagtggccggctttaacctgctgatgaccctgcggctgtggtccagc

SEQ ID NO: 9616 - DNA, 2715 bp, Artificial Sequence
  Synthetic Polynucloetide
atggccttaccagtgaccgccttgctcctgccgctggccttgctgctccacgccgccaggccggaagtgcaggttttggagtctggcggaggactggttcagcctggcggatctctgagactgtcttgtgccgccagcggcttcaccttcagcaactttgccatgagctgggtccgacaggcccctggcaaaggacttgaatgggtgtccacaatcagcggcagcgccggcacaacagattacgccgattctgtgaagggcagattcaccatcagccgggacaacagcaagaaaaccctgtacctccagatgaacagcctgcgcgtggaagataccgccgtgtactactgtgccgatggcagaggccccttcttcgattatcgcggccagggcacactggtcaccgtttcttctggtaccggcggaggcggatctggcggcggaggtagcggtggcggaggatctgaattcgacatccagctgactcagagccctagctttctgagcgccagcgtgggcgacagagtgaccattacatgtagagccagccaggacatcagcagctacctggcctggtatcagcagaagcctggcaacgcccctaaactgctgatctacgccgccagcctgctgcaatctggcgtgccaagcagattcagcgcctttggcagcggcaccgagttcaccctgacaatatctagcctccagccagaggacttcgccacctactactgccagcacctgaagtcttaccctctgttcaccttcggacccggcaccaaggtggacatcaaaagactcgaggacctgaagaacgtgttcccacctgaggtggccgtgttcgagcctagcgaggccgagatcagccacacccagaaagccaccctcgtgtgcctggctaccggcttctaccccgaccatgtggaactgtcttggtgggtcaacggcaaagaggtgcacagcggcgtgtgtaccgacccccagccactgaaagaacagcccgccctgaacgacagccggtactgcctgagcagcagactgagagtgtccgccaccttctggcagaacccccggaaccacttcagatgccaggtgcagttctacggcctgagcgagaacgacgagtggacccaggacagagccaagcccgtgacccagatcgtgtctgccgaagcctggggcagagccgattgcggctttaccagcgagagctaccagcagggcgtgctgagcgccaccatcctgtacgagatcctgctgggcaaggccaccctgtacgccgtgctggtgtctgccctggtgctgatggctatggtcaagcggaaggacagccggggaagggccaagcgatctggatctggagcaacaaacttctcactactcaaacaagcaggtgacgtggaggagaatcccgggcctactagtatggactggatttggcgcatccttttccttgtcggcgctgctaccggcgcccattccgggcccgaagtgcagctggttgaatctggcggaggactggttcaggctggcggatctctgagactgtcttgtgccgccagcggcagaacctttagcatgggctggtttagacaggcccctggcaaagagagagagttcgtcgccgccatcacatacagcggcggcagcccttactacgcctcttctgtcagaggccggttcaccatcagccgggacaacgccaagaacaccgtgtacctccagatgaacagcctgaagccagaggacaccgccgtgtactactgtgccgccaatccaacctacggcagcgactggaatgccgagaattggggccagggcacccaagtgacagtgtctagtggatccggcggcggaggatctggcggaggcggatctgggggcggaggctctttcgaagaagttcagctggttgagtctggcggcagagtcgttagacctggcggaagcctgagactgtcttgtgccgccagcggcttcacctttgacgactacggcatgagctgggtccgacagcctcctggaaagggcctcgaatttgtgtccggcctgaactggaacggcgacatcaccgcctttaccgacagcgtgaagggcagattcaccatcagccgggacaacgtgaagtccagcctgtacctccagatgaacagcctgagagccgacgacaccgccttctactactgtgccagagtgcggacctggggcgattacacaacaggcgaggaaatcatcaacagctggtacttcgacctgtggggcagaggcacactggtcacagtctcttctacgcgtatccagaaccctgatcctgccgtgtaccagctgcgggatagcaagagcagcgacaagagcgtgtgtctgttcaccgacttcgacagccagaccaacgtgtcccagagcaaggactccgacgtgtacatcaccgataagtgcgtgctggacatgcggagcatggacttcaagagcaactccgccgtggcctggtccaacaagtccgatttcgcctgcgccaacgccttcaacaacagcattatccccgaggacacattcttcccaagccccgagagcagctgcgacgtgaagctggtggaaaagagcttcgagacagacaccaacctgaacttccagaacctgagcgtgatcggcttcagaatcctgctgctgaaagtggccggctttaacctgctgatgaccctgcggctgtggtccagc

SEQ ID NO: 9617 - DNA, 2175 bp, Artificial Sequence
  Synthetic Polynucloetide
atggccttaccagtgaccgccttgctcctgccgctggccttgctgctccacgccgccaggccggaactccagatgacacagagccctagcagcctgtctgccagcgtgggagacagagtggctatcacctgtagagccagccagagcatcagcagccacctgaactggtatcagcagaagcctggcaaggcccctaagctgctgatctatgccgccagctctctccagagcggagtgcctagcagattttctggcagcggctccggcaccgatttcaccctgacaatatccagcctccagcctgaggacttcgccacctactactgccagcagagctacagcaccccttacacattcggccagggcaccaagctggaaatcaaaggcggaggcggaagtggaggcggaggatctggcggcggaggctctgaagtgcagctggttgaatcaggtggcggcctggttcaacctggcggatctctgagactgagctgtgccgcctccggcttcacctttagcagctactggatgagctgggtccgacaggcccctggcaaaggacttgagtgggtcgccaacatcaagcaggacggcagcgagaagtattacgtggacagcgtgaagggcagattcaccatcagccgggacaacgccaagaacagcctgtacctgcggatgaactccctgagagccgaggataccgccgtgtactattgtgccagagcctggggctacagctcctactacttcgactattggggccagggaaccctggtcaccgtttctccaacgcgtgagcagaaactgatctcggaagaggatctggcgaagcccaccacgacgccagcgccgcgaccaccaacaccggcgcccaccatcgcgtcgcagcccctgtccctgcgcccagaggcgtgccggccagcggcggggggcgcagtgcacacgagggggctggacttcgcctgtgacatctacatctgggcgcccttggccgggacttgtggggtccttctcctgtcactggttatcaccctttactgcaaacggggcagaaagaaactcctgtatatattcaaacaaccatttatgagaccagtacaaactactcaagaggaagatggctgtagctgccgatttccagaagaagaagaaggaggatgtgaactgagagtgaagttcagcaggagcgcagacgcccccgcgtaccagcagggccagaaccagctctataacgagctgaatctaggacgaagagaggagtacgatgttttggacaagagacgtggccgggaccctgagatggggggaaagccgagaaggaagaaccctcaggaaggcctgtacaatgaactgcagaaagataagatggcggaggcctacagtgagattgggatgaaaggcgagcgccggaggggcaaggggcacgatggcctttaccagggtctcagtacagccaccaaggacacctacgacgcccttcacatgcaggccctgccccctcgctctagtggctccggcgagggcagaggaagtctactaacctgcggagatgtggaagaaaatcctggcccacatatgaccgagtacaagcccacggtgcgcctcgccacccgcgacgacgtccccagggccgtacgcaccctcgccgccgcgttcgccgactaccccgccacgcgccacaccgtcgatccggaccgccacatcgagcgggtcaccgagctgcaagaactcttcctcacgcgcgtcgggctcgacatcggcaaggtgtgggtcgcggacgacggcgccgcggtggcggtctggaccacgccggagagcgtcgaagcgggggcggtgttcgccgagatcggcccgcgcatggccgagttgagcggttcccggctggccgcgcagcaacagatggaaggcctcctggcgccgcaccggcccaaggagcccgcgtggttcctggccaccgtcggcgtctcgcccgaccaccagggcaagggtctgggcagcgccgtcgtgctccccggagtggaggcggccgagcgcgccggggtgcccgccttcctggagacctccgcgccccgcaacctccccttctacgagcggctcggcttcaccgtcaccgccgacgtcgaggtgcccgaaggaccgcgcacctggtgcatgacccgcaagcccggtgcctga

SEQ ID NO: 9618 - DNA, 2157 bp, Artificial Sequence
  Synthetic Polynucloetide
atggccttaccagtgaccgccttgctcctgccgctggccttgctgctccacgccgccaggccggaactccagatgacacagagccctagcagcctgtctgccagcgtgggagacagagtggctatcacctgtagagccagccagagcatcagcagccacctgaactggtatcagcagaagcctggcaaggcccctaagctgctgatctatgccgccagctctctccagagcggagtgcctagcagattttctggcagcggctccggcaccgatttcaccctgacaatatccagcctccagcctgaggacttcgccacctactactgccagcagagctacagcaccccttacacattcggccagggcaccaagctggaaatcaaaggcggaggcggaagtggaggcggaggatctggcggcggaggctctgaagtgcagctggttgaatcaggtggcggcctggttcaacctggcggatctctgagactgagctgtgccgcctccggcttcacctttagcagctactggatgagctgggtccgacaggcccctggcaaaggacttgagtgggtcgccaacatcaagcaggacggcagcgagaagtattacgtggacagcgtgaagggcagattcaccatcagccgggacaacgccaagaacagcctgtacctgcggatgaactccctgagagccgaggataccgccgtgtactattgtgccagagcctggggctacagctcctactacttcgactattggggccagggaaccctggtcaccgtttctccaacgcgtgagcagaaactgatctcggaagaggatctgaaaattgaagttatgtatcctcctccttacctagacaatgagaagagcaatggaaccattatccatgtgaaagggaaacacctttgtccaagtcccctatttcccggaccttctaagcccttttgggtgctggtggtggttgggggagtcctggcttgctatagcttgctagtaacagtggcctttattattttctgggtgaggagtaagaggagcaggctcctgcacagtgactacatgaacatgactccacgccgccccggacccacccgcaagcattaccagccctatgccccaccacgcgacttcgcagcctatcgctccagagtgaagttcagcaggagcgcagacgcccccgcgtaccagcagggccagaaccagctctataacgagctcaatctaggacgaagagaggagtacgatgttttggacaagagacgtggccgggaccctgagatggggggaaagccgagaaggaagaaccctcaggaaggcctgtacaatgaactgcagaaagataagatggcggaggcctacagtgagattgggatgaaaggcgagcgccggaggggcaaggggcacgatggcctttaccagggtctcagtacagccaccaaggacacctacgacgcccttcacatgcaggccctgccccctcgctctagtggctccggcgagggcagaggaagtctactaacctgcggagatgtggaagaaaatcctggcccacatatgaccgagtacaagcccacggtgcgcctcgccacccgcgacgacgtccccagggccgtacgcaccctcgccgccgcgttcgccgactaccccgccacgcgccacaccgtcgatccggaccgccacatcgagcgggtcaccgagctgcaagaactcttcctcacgcgcgtcgggctcgacatcggcaaggtgtgggtcgcggacgacggcgccgcggtggcggtctggaccacgccggagagcgtcgaagcgggggcggtgttcgccgagatcggcccgcgcatggccgagttgagcggttcccggctggccgcgcagcaacagatggaaggcctcctggcgccgcaccggcccaaggagcccgcgtggttcctggccaccgtcggcgtctcgcccgaccaccagggcaagggtctgggcagcgccgtcgtgctccccggagtggaggcggccgagcgcgccggggtgcccgccttcctggagacctccgcgccccgcaacctccccttctacgagcggctcggcttcaccgtcaccgccgacgtcgaggtgcccgaaggaccgcgcacctggtgcatgacccgcaagcccggtgcctga

SEQ ID NO: 9619 - DNA, 1485 bp, Artificial Sequence
  Synthetic Polynucloetide
atggccttaccagtgaccgccttgctcctgccgctggccttgctgctccacgccgccaggccggaactccagatgacacagagccctagcagcctgtctgccagcgtgggagacagagtggctatcacctgtagagccagccagagcatcagcagccacctgaactggtatcagcagaagcctggcaaggcccctaagctgctgatctatgccgccagctctctccagagcggagtgcctagcagattttctggcagcggctccggcaccgatttcaccctgacaatatccagcctccagcctgaggacttcgccacctactactgccagcagagctacagcaccccttacacattcggccagggcaccaagctggaaatcaaaggcggaggcggaagtggaggcggaggatctggcggcggaggctctgaagtgcagctggttgaatcaggtggcggcctggttcaacctggcggatctctgagactgagctgtgccgcctccggcttcacctttagcagctactggatgagctgggtccgacaggcccctggcaaaggacttgagtgggtcgccaacatcaagcaggacggcagcgagaagtattacgtggacagcgtgaagggcagattcaccatcagccgggacaacgccaagaacagcctgtacctgcggatgaactccctgagagccgaggataccgccgtgtactattgtgccagagcctggggctacagctcctactacttcgactattggggccagggaaccctggtcaccgtttctccaacgcgtgagcagaaactgatctcggaagaggatctgaaaattgaagttatgtatcctcctccttacctagacaatgagaagagcaatggaaccattatccatgtgaaagggaaacacctttgtccaagtcccctatttcccggaccttctaagcccttttgggtgctggtggtggttgggggagtcctggcttgctatagcttgctagtaacagtggcctttattattttctgggtgaggagtaagaggagcaggctcctgcacagtgactacatgaacatgactccacgccgccccggacccacccgcaagcattaccagccctatgccccaccacgcgacttcgcagcctatcgctccagagtgaagttcagcaggagcgcagacgcccccgcgtaccagcagggccagaaccagctctataacgagctcaatctaggacgaagagaggagtacgatgttttggacaagagacgtggccgggaccctgagatggggggaaagccgagaaggaagaaccctcaggaaggcctgtacaatgaactgcagaaagataagatggcggaggcctacagtgagattgggatgaaaggcgagcgccggaggggcaaggggcacgatggcctttaccagggtctcagtacagccaccaaggacacctacgacgcccttcacatgcaggccctgccccctcgc

SEQ ID NO: 9620 - DNA, 1506 bp, Artificial Sequence
  Synthetic Polynucloetide
atggccttaccagtgaccgccttgctcctgccgctggccttgctgctccacgccgccaggccggaactccagatgacacagagccctagcagcctgtctgccagcgtgggagacagagtggctatcacctgtagagccagccagagcatcagcagccacctgaactggtatcagcagaagcctggcaaggcccctaagctgctgatctatgccgccagctctctccagagcggagtgcctagcagattttctggcagcggctccggcaccgatttcaccctgacaatatccagcctccagcctgaggacttcgccacctactactgccagcagagctacagcaccccttacacattcggccagggcaccaagctggaaatcaaaggcggaggcggaagtggaggcggaggatctggcggcggaggctctgaagtgcagctggttgaatcaggtggcggcctggttcaacctggcggatctctgagactgagctgtgccgcctccggcttcacctttagcagctactggatgagctgggtccgacaggcccctggcaaaggacttgagtgggtcgccaacatcaagcaggacggcagcgagaagtattacgtggacagcgtgaagggcagattcaccatcagccgggacaacgccaagaacagcctgtacctgcggatgaactccctgagagccgaggataccgccgtgtactattgtgccagagcctggggctacagctcctactacttcgactattggggccagggaaccctggtcaccgtttctccaacgcgtgagcagaaactgatctcggaagaggatctggcgaagcccaccacgacgccagcgccgcgaccaccaacaccggcgcccaccatcgcgtcgcagcccctgtccctgcgcccagaggcgtgccggccagcggcggggggcgcagtgcacacgagggggctggacttcgcctgtgacatctacatctgggcgcccttggccgggacttgtggggtccttctcctgtcactggttatcaccctttactgcaaacggggcagaaagaaactcctgtatatattcaaacaaccatttatgagaccagtacaaactactcaagaggaagatggctgtagctgccgatttccagaagaagaagaaggaggatgtgaactgagagtgaagttcagcaggagcgcagacgcccccgcgtaccagcagggccagaaccagctctataacgagctgaatctaggacgaagagaggagtacgatgttttggacaagagacgtggccgggaccctgagatggggggaaagccgagaaggaagaaccctcaggaaggcctgtacaatgaactgcagaaagataagatggcggaggcctacagtgagattgggatgaaaggcgagcgccggaggggcaaggggcacgatggcctttaccagggtctcagtacagccaccaaggacacctacgacgcccttcacatgcaggccctgccccctcgctga

SEQ ID NO: 9621 - DNA, 1506 bp, Artificial Sequence
  Synthetic Polynucloetide
atggccttaccagtgaccgccttgctcctgccgctggccttgctgctccacgccgccaggccggaagtgcagctggttgaatcaggtggcggcctggttcaacctggcggatctctgagactgagctgtgccgcctccggcttcacctttagcagctactggatgagctgggtccgacaggcccctggcaaaggacttgagtgggtcgccaacatcaagcaggacggcagcgagaagtattacgtggacagcgtgaagggcagattcaccatcagccgggacaacgccaagaacagcctgtacctgcggatgaactccctgagagccgaggataccgccgtgtactattgtgccagagcctggggctacagctcctactacttcgactattggggccagggaaccctggtcaccgtttctccaggcggaggcggaagtggaggcggaggatctggcggcggaggctctgaactccagatgacacagagccctagcagcctgtctgccagcgtgggagacagagtggctatcacctgtagagccagccagagcatcagcagccacctgaactggtatcagcagaagcctggcaaggcccctaagctgctgatctatgccgccagctctctccagagcggagtgcctagcagattttctggcagcggctccggcaccgatttcaccctgacaatatccagcctccagcctgaggacttcgccacctactactgccagcagagctacagcaccccttacacattcggccagggcaccaagctggaaatcaaaacgcgtgagcagaaactgatctcggaagaggatctggcgaagcccaccacgacgccagcgccgcgaccaccaacaccggcgcccaccatcgcgtcgcagcccctgtccctgcgcccagaggcgtgccggccagcggcggggggcgcagtgcacacgagggggctggacttcgcctgtgacatctacatctgggcgcccttggccgggacttgtggggtccttctcctgtcactggttatcaccctttactgcaaacggggcagaaagaaactcctgtatatattcaaacaaccatttatgagaccagtacaaactactcaagaggaagatggctgtagctgccgatttccagaagaagaagaaggaggatgtgaactgagagtgaagttcagcaggagcgcagacgcccccgcgtaccagcagggccagaaccagctctataacgagctgaatctaggacgaagagaggagtacgatgttttggacaagagacgtggccgggaccctgagatggggggaaagccgagaaggaagaaccctcaggaaggcctgtacaatgaactgcagaaagataagatggcggaggcctacagtgagattgggatgaaaggcgagcgccggaggggcaaggggcacgatggcctttaccagggtctcagtacagccaccaaggacacctacgacgcccttcacatgcaggccctgccccctcgctga

SEQ ID NO: 9622 - DNA, 2745 bp, Artificial Sequence
  Synthetic Polynucloetide
atggccttaccagtgaccgccttgctcctgccgctggccttgctgctccacgccgccaggccggaactccagatgacacagagccctagcagcctgtctgccagcgtgggagacagagtggctatcacctgtagagccagccagagcatcagcagccacctgaactggtatcagcagaagcctggcaaggcccctaagctgctgatctatgccgccagctctctccagagcggagtgcctagcagattttctggcagcggctccggcaccgatttcaccctgacaatatccagcctccagcctgaggacttcgccacctactactgccagcagagctacagcaccccttacacattcggccagggcaccaagctggaaatcaaaggcggaggcggaagtggaggcggaggatctggcggcggaggctctgaagtgcagctggttgaatcaggtggcggcctggttcaacctggcggatctctgagactgagctgtgccgcctccggcttcacctttagcagctactggatgagctgggtccgacaggcccctggcaaaggacttgagtgggtcgccaacatcaagcaggacggcagcgagaagtattacgtggacagcgtgaagggcagattcaccatcagccgggacaacgccaagaacagcctgtacctgcggatgaactccctgagagccgaggataccgccgtgtactattgtgccagagcctggggctacagctcctactacttcgactattggggccagggaaccctggtcaccgtttctccaacgcgtgagcagaaactgatctcggaagaggatctggcgaagcccaccacgacgccagcgccgcgaccaccaacaccggcgcccaccatcgcgtcgcagcccctgtccctgcgcccagaggcgtgccggccagcggcggggggcgcagtgcacacgagggggctggacttcgcctgtgacatctacatctgggcgcccttggccgggacttgtggggtccttctcctgtcactggttatcaccctttactgcgggcgcgccagagtgaagttcagcaggagcgcagacgcccccgcgtaccagcagggccagaaccagctctataacgagctgaatctaggacgaagagaggagtacgatgttttggacaagagacgtggccgggaccctgagatggggggaaagccgagaaggaagaaccctcaggaaggcctgtacaatgaactgcagaaagataagatggcggaggcctacagtgagattgggatgaaaggcgagcgccggaggggcaaggggcacgatggcctttaccagggtctcagtacagccaccaaggacacctacgacgcccttcacatgcaggccctgccccctcgctctagaggatctggagcaacaaacttctcactactcaaacaagcaggtgacgtggaggagaatcccgggcctgggatccacatggccacttacgaggttctctgtgaggtggcgcggaaactgggcacggatgacagggaagtggtattgttcctcctaaacgtgttcatacctcaacccacactggcccaattaattggagctcttagagctttaaaggaggagggcaggttaacgtttcccctgttagcggaatgtctgtttcgtgcaggtcgcagagacctcttgcgcgacctgcttcacttagacccgcgttttttagagcgccacctagcgggcacaatgagttatttcagcccttatcagctcactgttctccacgtagacggggagctgtgtgcgagggatattaggtctttgatatttttaagcaaggacactatagggtctcgcagcacaccacagacattcttacactgggtgtactgtatggaaaacttagacctactgggtcccactgacgtggatgccctaatgtcaatgcttagatctttgtcaagagtagacctacagcgccaagtgcaaaccctaatgggccttcacctttccggcccatcacactcccaacactatcgccatacaccactcgagaccgatttctacgactacaaggacgacgatgacaagactagtggctccggcgagggcagaggaagtctactaacctgcggagatgtggaagaaaatcctggcccacatatgaccgagtacaagcccacggtgcgcctcgccacccgcgacgacgtccccagggccgtacgcaccctcgccgccgcgttcgccgactaccccgccacgcgccacaccgtcgatccggaccgccacatcgagcgggtcaccgagctgcaagaactcttcctcacgcgcgtcgggctcgacatcggcaaggtgtgggtcgcggacgacggcgccgcggtggcggtctggaccacgccggagagcgtcgaagcgggggcggtgttcgccgagatcggcccgcgcatggccgagttgagcggttcccggctggccgcgcagcaacagatggaaggcctcctggcgccgcaccggcccaaggagcccgcgtggttcctggccaccgtcggcgtctcgcccgaccaccagggcaagggtctgggcagcgccgtcgtgctccccggagtggaggcggccgagcgcgccggggtgcccgccttcctggagacctccgcgccccgcaacctccccttctacgagcggctcggcttcaccgtcaccgccgacgtcgaggtgcccgaaggaccgcgcacctggtgcatgacccgcaagcccggtgcctga

SEQ ID NO: 9623 - DNA, 2565 bp, Artificial Sequence
  Synthetic Polynucloetide
atggccttaccagtgaccgccttgctcctgccgctggccttgctgctccacgccgccaggccggaactccagatgacacagagccctagcagcctgtctgccagcgtgggagacagagtggctatcacctgtagagccagccagagcatcagcagccacctgaactggtatcagcagaagcctggcaaggcccctaagctgctgatctatgccgccagctctctccagagcggagtgcctagcagattttctggcagcggctccggcaccgatttcaccctgacaatatccagcctccagcctgaggacttcgccacctactactgccagcagagctacagcaccccttacacattcggccagggcaccaagctggaaatcaaactcgagatccagaaccctgatcctgccgtgtaccagctgcgggatagcaagagcagcgacaagagcgtgtgtctgttcaccgacttcgacagccagaccaacgtgtcccagagcaaggactccgacgtgtacatcaccgataagtgcgtgctggacatgcggagcatggacttcaagagcaactccgccgtggcctggtccaacaagtccgatttcgcctgcgccaacgccttcaacaacagcattatccccgaggacacattcttcccaagcagcgacgtgccctgcgacgtgaagctggtggaaaagagcttcgagacagacaccaacctgaacttccagaacctgagcgtgatcggcttcagaatcctgctgctgaaagtggccggctttaacctgctgatgaccctgcggctgtggtccagccgcgccaagagaagcggatctggcgtgaagcagaccctgaatttcgacctgctgaagctggctggcgacgtggaatccaacccaggccctactagtatggactggatttggcgcatccttttccttgtcggcgctgctaccggcgcgcattccttcgaagaagtgcagctggttgaatcaggtggcggcctggttcaacctggcggatctctgagactgagctgtgccgcctccggcttcacctttagcagctactggatgagctgggtccgacaggcccctggcaaaggacttgagtgggtcgccaacatcaagcaggacggcagcgagaagtattacgtggacagcgtgaagggcagattcaccatcagccgggacaacgccaagaacagcctgtacctgcggatgaactccctgagagccgaggataccgccgtgtactattgtgccagagcctggggctacagctcctactacttcgactattggggccagggaaccctggtcaccgtttctccaacgcgtgaggacctgaagaacgtgttcccacctgaggtggccgtgttcgagcctagcaaggccgagatcgcccacacccagaaagccaccctcgtgtgcctggctaccggcttctaccccgaccatgtggaactgtcttggtgggtcaacggcaaagaggtgcacagcggcgtgtgtaccgacccccagccactgaaagaacagcccgccctgaacgacagccggtactgcctgagcagcagactgagagtgtccgccaccttctggcagaacccccggaaccacttcagatgccaggtgcagttctacggcctgagcgagaacgacgagtggacccaggacagagccaagcccgtgacccagatcgtgtctgccgaagcctggggcagagccgattgcggcatcaccagcgccagctaccaccagggcgtgctgagcgccaccatcctgtacgagatcctgctgggcaaggccaccctgtacgccgtgctggtgtctgccctggtgctgatggctatggtcaagcggaaggacagccggggaagggccaagcgatctggatctggagcaacaaacttctcactactcaaacaagcaggtgacgtggaggagaatcccgggccttctagaggccatatgaccgagtacaagcccacggtgcgcctcgccacccgcgacgacgtccccagggccgtacgcaccctcgccgccgcgttcgccgactaccccgccacgcgccacaccgtcgatccggaccgccacatcgagcgggtcaccgagctgcaagaactcttcctcacgcgcgtcgggctcgacatcggcaaggtgtgggtcgcggacgacggcgccgcggtggcggtctggaccacgccggagagcgtcgaagcgggggcggtgttcgccgagatcggcccgcgcatggccgagttgagcggttcccggctggccgcgcagcaacagatggaaggcctcctggcgccgcaccggcccaaggagcccgcgtggttcctggccaccgtcggcgtctcgcccgaccaccagggcaagggtctgggcagcgccgtcgtgctccccggagtggaggcggccgagcgcgccggggtgcccgccttcctggagacctccgcgccccgcaacctccccttctacgagcggctcggcttcaccgtcaccgccgacgtcgaggtgcccgaaggaccgcgcacctggtgcatgacccgcaagcccggtgcctga

SEQ ID NO: 9624 - DNA, 2562 bp, Artificial Sequence
  Synthetic Polynucloetide
atggccttaccagtgaccgccttgctcctgccgctggccttgctgctccacgccgccaggccggaactccagatgacacagagccctagcagcctgtctgccagcgtgggagacagagtggctatcacctgtagagccagccagagcatcagcagccacctgaactggtatcagcagaagcctggcaaggcccctaagctgctgatctatgccgccagctctctccagagcggagtgcctagcagattttctggcagcggctccggcaccgatttcaccctgacaatatccagcctccagcctgaggacttcgccacctactactgccagcagagctacagcaccccttacacattcggccagggcaccaagctggaaatcaaactcgaggacctgaagaacgtgttcccacctgaggtggccgtgttcgagcctagcaaggccgagatcgcccacacccagaaagccaccctcgtgtgcctggctaccggcttctaccccgaccatgtggaactgtcttggtgggtcaacggcaaagaggtgcacagcggcgtgtgtaccgacccccagccactgaaagaacagcccgccctgaacgacagccggtactgcctgagcagcagactgagagtgtccgccaccttctggcagaacccccggaaccacttcagatgccaggtgcagttctacggcctgagcgagaacgacgagtggacccaggacagagccaagcccgtgacccagatcgtgtctgccgaagcctggggcagagccgattgcggcatcaccagcgccagctaccaccagggcgtgctgagcgccaccatcctgtacgagatcctgctgggcaaggccaccctgtacgccgtgctggtgtctgccctggtgctgatggctatggtcaagcggaaggacagccggggaagggccaagcgatctggatctggagcaacaaacttctcactactcaaacaagcaggtgacgtggaggagaatcccgggcctactagtatggactggatttggcgcatccttttccttgtcggcgctgctaccggcgcgcattccttcgaagaagtgcagctggttgaatcaggtggcggcctggttcaacctggcggatctctgagactgagctgtgccgcctccggcttcacctttagcagctactggatgagctgggtccgacaggcccctggcaaaggacttgagtgggtcgccaacatcaagcaggacggcagcgagaagtattacgtggacagcgtgaagggcagattcaccatcagccgggacaacgccaagaacagcctgtacctgcggatgaactccctgagagccgaggataccgccgtgtactattgtgccagagcctggggctacagctcctactacttcgactattggggccagggaaccctggtcaccgtttctccaacgcgtatccagaaccctgatcctgccgtgtaccagctgcgggatagcaagagcagcgacaagagcgtgtgtctgttcaccgacttcgacagccagaccaacgtgtcccagagcaaggactccgacgtgtacatcaccgataagtgcgtgctggacatgcggagcatggacttcaagagcaactccgccgtggcctggtccaacaagtccgatttcgcctgcgccaacgccttcaacaacagcattatccccgaggacacattcttcccaagcagcgacgtgccctgcgacgtgaagctggtggaaaagagcttcgagacagacaccaacctgaacttccagaacctgagcgtgatcggcttcagaatcctgctgctgaaagtggccggctttaacctgctgatgaccctgcggctgtggtccagccgcgccaagagaagcggatctggcgtgaagcagaccctgaatttcgacctgctgaagctggctggcgacgtggaatccaacccaggcccttctagaggccatatgaccgagtacaagcccacggtgcgcctcgccacccgcgacgacgtccccagggccgtacgcaccctcgccgccgcgttcgccgactaccccgccacgcgccacaccgtcgatccggaccgccacatcgagcgggtcaccgagctgcaagaactcttcctcacgcgcgtcgggctcgacatcggcaaggtgtgggtcgcggacgacggcgccgcggtggcggtctggaccacgccggagagcgtcgaagcgggggcggtgttcgccgagatcggcccgcgcatggccgagttgagcggttcccggctggccgcgcagcaacagatggaaggcctcctggcgccgcaccggcccaaggagcccgcgtggttcctggccaccgtcggcgtctcgcccgaccaccagggcaagggtctgggcagcgccgtcgtgctccccggagtggaggcggccgagcgcgccggggtgcccgccttcctggagacctccgcgccccgcaacctccccttctacgagcggctcggcttcaccgtcaccgccgacgtcgaggtgcccgaaggaccgcgcacctggtgcatgacccgcaagcccggtgcctga

SEQ ID NO: 9625 - DNA, 1860 bp, Artificial Sequence
  Synthetic Polynucloetide
atggccttaccagtgaccgccttgctcctgccgctggccttgctgctccacgccgccaggccggaactccagatgacacagagccctagcagcctgtctgccagcgtgggagacagagtggctatcacctgtagagccagccagagcatcagcagccacctgaactggtatcagcagaagcctggcaaggcccctaagctgctgatctatgccgccagctctctccagagcggagtgcctagcagattttctggcagcggctccggcaccgatttcaccctgacaatatccagcctccagcctgaggacttcgccacctactactgccagcagagctacagcaccccttacacattcggccagggcaccaagctggaaatcaaactcgaggacctgaagaacgtgttcccacctgaggtggccgtgttcgagcctagcgaggccgagatcagccacacccagaaagccaccctcgtgtgcctggctaccggcttctaccccgaccatgtggaactgtcttggtgggtcaacggcaaagaggtgcacagcggcgtgtgtaccgacccccagccactgaaagaacagcccgccctgaacgacagccggtactgcctgagcagcagactgagagtgtccgccaccttctggcagaacccccggaaccacttcagatgccaggtgcagttctacggcctgagcgagaacgacgagtggacccaggacagagccaagcccgtgacccagatcgtgtctgccgaagcctggggcagagccgattgcggctttaccagcgagagctaccagcagggcgtgctgagcgccaccatcctgtacgagatcctgctgggcaaggccaccctgtacgccgtgctggtgtctgccctggtgctgatggctatggtcaagcggaaggacagccggggaagggccaagcgatctggatctggagcaacaaacttctcactactcaaacaagcaggtgacgtggaggagaatcccgggcctactagtatggactggatttggcgcatccttttccttgtcggcgctgctaccggcgcgcattccttcgaagaagtgcagctggttgaatcaggtggcggcctggttcaacctggcggatctctgagactgagctgtgccgcctccggcttcacctttagcagctactggatgagctgggtccgacaggcccctggcaaaggacttgagtgggtcgccaacatcaagcaggacggcagcgagaagtattacgtggacagcgtgaagggcagattcaccatcagccgggacaacgccaagaacagcctgtacctgcggatgaactccctgagagccgaggataccgccgtgtactattgtgccagagcctggggctacagctcctactacttcgactattggggccagggaaccctggtcaccgtttctccaacgcgtatccagaaccctgatcctgccgtgtaccagctgcgggatagcaagagcagcgacaagagcgtgtgtctgttcaccgacttcgacagccagaccaacgtgtcccagagcaaggactccgacgtgtacatcaccgataagtgcgtgctggacatgcggagcatggacttcaagagcaactccgccgtggcctggtccaacaagtccgatttcgcctgcgccaacgccttcaacaacagcattatccccgaggacacattcttcccaagccccgagagcagctgcgacgtgaagctggtggaaaagagcttcgagacagacaccaacctgaacttccagaacctgagcgtgatcggcttcagaatcctgctgctgaaagtggccggctttaacctgctgatgaccctgcggctgtggtccagc

SEQ ID NO: 9626 - DNA, 2535 bp, Artificial Sequence
  Synthetic Polynucloetide
atggccttaccagtgaccgccttgctcctgccgctggccttgctgctccacgccgccaggccggaactccagatgacacagagccctagcagcctgtctgccagcgtgggagacagagtggctatcacctgtagagccagccagagcatcagcagccacctgaactggtatcagcagaagcctggcaaggcccctaagctgctgatctatgccgccagctctctccagagcggagtgcctagcagattttctggcagcggctccggcaccgatttcaccctgacaatatccagcctccagcctgaggacttcgccacctactactgccagcagagctacagcaccccttacacattcggccagggcaccaagctggaaatcaaactcgaggacctgaagaacgtgttcccacctgaggtggccgtgttcgagcctagcgaggccgagatcagccacacccagaaagccaccctcgtgtgcctggctaccggcttctaccccgaccatgtggaactgtcttggtgggtcaacggcaaagaggtgcacagcggcgtgtgtaccgacccccagccactgaaagaacagcccgccctgaacgacagccggtactgcctgagcagcagactgagagtgtccgccaccttctggcagaacccccggaaccacttcagatgccaggtgcagttctacggcctgagcgagaacgacgagtggacccaggacagagccaagcccgtgacccagatcgtgtctgccgaagcctggggcagagccgattgcggctttaccagcgagagctaccagcagggcgtgctgagcgccaccatcctgtacgagatcctgctgggcaaggccaccctgtacgccgtgctggtgtctgccctggtgctgatggctatggtcaagcggaaggacagccggggaagggccaagcgatctggatctggagcaacaaacttctcactactcaaacaagcaggtgacgtggaggagaatcccgggcctactagtatggactggatttggcgcatccttttccttgtcggcgctgctaccggcgcgcattccttcgaagaagtgcagctggttgaatcaggtggcggcctggttcaacctggcggatctctgagactgagctgtgccgcctccggcttcacctttagcagctactggatgagctgggtccgacaggcccctggcaaaggacttgagtgggtcgccaacatcaagcaggacggcagcgagaagtattacgtggacagcgtgaagggcagattcaccatcagccgggacaacgccaagaacagcctgtacctgcggatgaactccctgagagccgaggataccgccgtgtactattgtgccagagcctggggctacagctcctactacttcgactattggggccagggaaccctggtcaccgtttctccaacgcgtatccagaaccctgatcctgccgtgtaccagctgcgggatagcaagagcagcgacaagagcgtgtgtctgttcaccgacttcgacagccagaccaacgtgtcccagagcaaggactccgacgtgtacatcaccgataagtgcgtgctggacatgcggagcatggacttcaagagcaactccgccgtggcctggtccaacaagtccgatttcgcctgcgccaacgccttcaacaacagcattatccccgaggacacattcttcccaagccccgagagcagctgcgacgtgaagctggtggaaaagagcttcgagacagacaccaacctgaacttccagaacctgagcgtgatcggcttcagaatcctgctgctgaaagtggccggctttaacctgctgatgaccctgcggctgtggtccagccgcgccaagagaagcggatctggcgtgaagcagaccctgaatttcgacctgctgaagctggctggcgacgtggaatccaacccaggcccttctagaggcgggatccacaccatggctacctacgaggtgctgtgcgaggtggcaagaaagctgggcaccgacgacagagaagtggtgctgttcctgctgaacgtgttcatccctcagcctacactggcccagctgatcggtgcactgagagccctgaaagaggaaggccggctgacctttcctctgctggccgaatgcctgttcagagccggaagaagggatctgctgcgggacctgctgcatctggaccccagatttctggaaagacacctggccggcaccatgagctacttcagcccttaccagctgaccgtgctgcacgttgacggcgaactgtgcgccagagatattcggagcctgatcttcctgagcaaggacaccatcggcagccggtctacccctcagacatttctgcactgggtgtactgcatggaaaacctggacctgctcggccccacagatgtggatgccctgatgtccatgctgagaagcctgagcagagtggacctccagagacaggtgcagacactgatgggactgcacctgagcggacctagccacagccagcactacagacacacccct

SEQ ID NO: 9627 - DNA, 1872 bp, Artificial Sequence
  Synthetic Polynucloetide
atggccttaccagtgaccgccttgctcctgccgctggccttgctgctccacgccgccaggccggaactccagatgacacagagccctagcagcctgtctgccagcgtgggagacagagtggctatcacctgtagagccagccagagcatcagcagccacctgaactggtatcagcagaagcctggcaaggcccctaagctgctgatctatgccgccagctctctccagagcggagtgcctagcagattttctggcagcggctccggcaccgatttcaccctgacaatatccagcctccagcctgaggacttcgccacctactactgccagcagagctacagcaccccttacacattcggccagggcaccaagctggaaatcaaactcgagatccagaaccctgatcctgccgtgtaccagctgcgggatagcaagagcagcgacaagagcgtgtgtctgttcaccgacttcgacagccagaccaacgtgtcccagagcaaggactccgacgtgtacatcaccgataagtgcgtgctggacatgcggagcatggacttcaagagcaactccgccgtggcctggtccaacaagtccgatttcgcctgcgccaacgccttcaacaacagcattatccccgaggacacattcttcccaagccccgagagcagctgcgacgtgaagctggtggaaaagagcttcgagacagacaccaacctgaacttccagaacctgagcgtgatcggcttcagaatcctgctgctgaaagtggccggctttaacctgctgatgaccctgcggctgtggtccagccgcgccaagagaagcggatctggcgtgaagcagaccctgaatttcgacctgctgaagctggctggcgacgtggaatccaacccaggccctactagtatggactggatttggcgcatccttttccttgtcggcgctgctaccggcgcgcattccttcgaagaagtgcagctggttgaatcaggtggcggcctggttcaacctggcggatctctgagactgagctgtgccgcctccggcttcacctttagcagctactggatgagctgggtccgacaggcccctggcaaaggacttgagtgggtcgccaacatcaagcaggacggcagcgagaagtattacgtggacagcgtgaagggcagattcaccatcagccgggacaacgccaagaacagcctgtacctgcggatgaactccctgagagccgaggataccgccgtgtactattgtgccagagcctggggctacagctcctactacttcgactattggggccagggaaccctggtcaccgtttctccaacgcgtgaggacctgaagaacgtgttcccacctgaggtggccgtgttcgagcctagcgaggccgagatcagccacacccagaaagccaccctcgtgtgcctggctaccggcttctaccccgaccatgtggaactgtcttggtgggtcaacggcaaagaggtgcacagcggcgtgtgtaccgacccccagccactgaaagaacagcccgccctgaacgacagccggtactgcctgagcagcagactgagagtgtccgccaccttctggcagaacccccggaaccacttcagatgccaggtgcagttctacggcctgagcgagaacgacgagtggacccaggacagagccaagcccgtgacccagatcgtgtctgccgaagcctggggcagagccgattgcggctttaccagcgagagctaccagcagggcgtgctgagcgccaccatcctgtacgagatcctgctgggcaaggccaccctgtacgccgtgctggtgtctgccctggtgctgatggctatggtcaagcggaaggacagccgggga

SEQ ID NO: 9628 - DNA, 2538 bp, Artificial Sequence
  Synthetic Polynucloetide
atggccttaccagtgaccgccttgctcctgccgctggccttgctgctccacgccgccaggccggaactccagatgacacagagccctagcagcctgtctgccagcgtgggagacagagtggctatcacctgtagagccagccagagcatcagcagccacctgaactggtatcagcagaagcctggcaaggcccctaagctgctgatctatgccgccagctctctccagagcggagtgcctagcagattttctggcagcggctccggcaccgatttcaccctgacaatatccagcctccagcctgaggacttcgccacctactactgccagcagagctacagcaccccttacacattcggccagggcaccaagctggaaatcaaactcgagatccagaaccctgatcctgccgtgtaccagctgcgggatagcaagagcagcgacaagagcgtgtgtctgttcaccgacttcgacagccagaccaacgtgtcccagagcaaggactccgacgtgtacatcaccgataagtgcgtgctggacatgcggagcatggacttcaagagcaactccgccgtggcctggtccaacaagtccgatttcgcctgcgccaacgccttcaacaacagcattatccccgaggacacattcttcccaagccccgagagcagctgcgacgtgaagctggtggaaaagagcttcgagacagacaccaacctgaacttccagaacctgagcgtgatcggcttcagaatcctgctgctgaaagtggccggctttaacctgctgatgaccctgcggctgtggtccagccgcgccaagagaagcggatctggcgtgaagcagaccctgaatttcgacctgctgaagctggctggcgacgtggaatccaacccaggccctactagtatggactggatttggcgcatccttttccttgtcggcgctgctaccggcgcgcattccttcgaagaagtgcagctggttgaatcaggtggcggcctggttcaacctggcggatctctgagactgagctgtgccgcctccggcttcacctttagcagctactggatgagctgggtccgacaggcccctggcaaaggacttgagtgggtcgccaacatcaagcaggacggcagcgagaagtattacgtggacagcgtgaagggcagattcaccatcagccgggacaacgccaagaacagcctgtacctgcggatgaactccctgagagccgaggataccgccgtgtactattgtgccagagcctggggctacagctcctactacttcgactattggggccagggaaccctggtcaccgtttctccaacgcgtgaggacctgaagaacgtgttcccacctgaggtggccgtgttcgagcctagcgaggccgagatcagccacacccagaaagccaccctcgtgtgcctggctaccggcttctaccccgaccatgtggaactgtcttggtgggtcaacggcaaagaggtgcacagcggcgtgtgtaccgacccccagccactgaaagaacagcccgccctgaacgacagccggtactgcctgagcagcagactgagagtgtccgccaccttctggcagaacccccggaaccacttcagatgccaggtgcagttctacggcctgagcgagaacgacgagtggacccaggacagagccaagcccgtgacccagatcgtgtctgccgaagcctggggcagagccgattgcggctttaccagcgagagctaccagcagggcgtgctgagcgccaccatcctgtacgagatcctgctgggcaaggccaccctgtacgccgtgctggtgtctgccctggtgctgatggctatggtcaagcggaaggacagccggggaagggccaagcgatctggatctggagcaacaaacttctcactactcaaacaagcaggtgacgtggaggagaatcccgggccttctagaggcgggatccacaccatggctacctacgaggtgctgtgcgaggtggcaagaaagctgggcaccgacgacagagaagtggtgctgttcctgctgaacgtgttcatccctcagcctacactggcccagctgatcggtgcactgagagccctgaaagaggaaggccggctgacctttcctctgctggccgaatgcctgttcagagccggaagaagggatctgctgcgggacctgctgcatctggaccccagatttctggaaagacacctggccggcaccatgagctacttcagcccttaccagctgaccgtgctgcacgttgacggcgaactgtgcgccagagatattcggagcctgatcttcctgagcaaggacaccatcggcagccggtctacccctcagacatttctgcactgggtgtactgcatggaaaacctggacctgctcggccccacagatgtggatgccctgatgtccatgctgagaagcctgagcagagtggacctccagagacaggtgcagacactgatgggactgcacctgagcggacctagccacagccagcactacagacacacccct

SEQ ID NO: 9629 - DNA, 2697 bp, Artificial Sequence
  Synthetic Polynucloetide
atggccttaccagtgaccgccttgctcctgccgctggccttgctgctccacgccgccaggccgctcgaggggaaaccaattcccaaccctcttctgggactggattcaaccggcagcggcgaggacctgaagaacgtgttcccacctgaggtggccgtgttcgagcctagcaaggccgagatcgcccacacccagaaagccaccctcgtgtgcctggctaccggcttctaccccgaccatgtggaactgtcttggtgggtcaacggcaaagaggtgcacagcggcgtgtgtaccgacccccagccactgaaagaacagcccgccctgaacgacagccggtactgcctgagcagcagactgagagtgtccgccaccttctggcagaacccccggaaccacttcagatgccaggtgcagttctacggcctgagcgagaacgacgagtggacccaggacagagccaagcccgtgacccagatcgtgtctgccgaagcctggggcagagccgattgcggcatcaccagcgccagctaccaccagggcgtgctgagcgccaccatcctgtacgagatcctgctgggcaaggccaccctgtacgccgtgctggtgtctgccctggtgctgatggctatggtcaagcggaaggacagccggggaagggccaagcgatctggatctggagcaacaaacttctcactactcaaacaagcaggtgacgtggaggagaatcccgggcctactagcatggccttaccagtgaccgccttgctcctgccgctggccttgctgctccacgccgccaggccggaactccagatgacacagagccctagcagcctgtctgccagcgtgggagacagagtggctatcacctgtagagccagccagagcatcagcagccacctgaactggtatcagcagaagcctggcaaggcccctaagctgctgatctatgccgccagctctctccagagcggagtgcctagcagattttctggcagcggctccggcaccgatttcaccctgacaatatccagcctccagcctgaggacttcgccacctactactgccagcagagctacagcaccccttacacattcggccagggcaccaagctggaaatcaaaggcggaggcggaagtggaggcggaggatctggcggcggaggctctgaagtgcagctggttgaatcaggtggcggcctggttcaacctggcggatctctgagactgagctgtgccgcctccggcttcacctttagcagctactggatgagctgggtccgacaggcccctggcaaaggacttgagtgggtcgccaacatcaagcaggacggcagcgagaagtattacgtggacagcgtgaagggcagattcaccatcagccgggacaacgccaagaacagcctgtacctgcggatgaactccctgagagccgaggataccgccgtgtactattgtgccagagcctggggctacagctcctactacttcgactattggggccagggaaccctggtcaccgtttctccaacgcgtgagcagaaactgatctcggaagaggatgggagcggcatccagaaccctgatcctgccgtgtaccagctgcgggatagcaagagcagcgacaagagcgtgtgtctgttcaccgacttcgacagccagaccaacgtgtcccagagcaaggactccgacgtgtacatcaccgataagtgcgtgctggacatgcggagcatggacttcaagagcaactccgccgtggcctggtccaacaagtccgatttcgcctgcgccaacgccttcaacaacagcattatccccgaggacacattcttcccaagcagcgacgtgccctgcgacgtgaagctggtggaaaagagcttcgagacagacaccaacctgaacttccagaacctgagcgtgatcggcttcagaatcctgctgctgaaagtggccggctttaacctgctgatgaccctgcggctgtggtccagccgcgccaagagaagcggatctggcgtgaagcagaccctgaatttcgacctgctgaagctggctggcgacgtggaatccaacccaggcccttctagaggccatatgaccgagtacaagcccacggtgcgcctcgccacccgcgacgacgtccccagggccgtacgcaccctcgccgccgcgttcgccgactaccccgccacgcgccacaccgtcgatccggaccgccacatcgagcgggtcaccgagctgcaagaactcttcctcacgcgcgtcgggctcgacatcggcaaggtgtgggtcgcggacgacggcgccgcggtggcggtctggaccacgccggagagcgtcgaagcgggggcggtgttcgccgagatcggcccgcgcatggccgagttgagcggttcccggctggccgcgcagcaacagatggaaggcctcctggcgccgcaccggcccaaggagcccgcgtggttcctggccaccgtcggcgtctcgcccgaccaccagggcaagggtctgggcagcgccgtcgtgctccccggagtggaggcggccgagcgcgccggggtgcccgccttcctggagacctccgcgccccgcaacctccccttctacgagcggctcggcttcaccgtcaccgccgacgtcgaggtgcccgaaggaccgcgcacctggtgcatgacccgcaagcccggtgcctga

SEQ ID NO: 9630 - DNA, 2700 bp, Artificial Sequence
  Synthetic Polynucloetide
atggccttaccagtgaccgccttgctcctgccgctggccttgctgctccacgccgccaggccgctcgagcagaaactgatctcggaagaggatctgggctccggcgatcgccctgatcctgccgtgtaccagctgcgggatagcaagagcagcgacaagagcgtgtgtctgttcaccgacttcgacagccagaccaacgtgtcccagagcaaggactccgacgtgtacatcaccgataagtgcgtgctggacatgcggagcatggacttcaagagcaactccgccgtggcctggtccaacaagtccgatttcgcctgcgccaacgccttcaacaacagcattatccccgaggacacattcttcccaagccccgagagcagctgcgacgtgaagctggtggaaaagagcttcgagacagacaccaacctgaacttccagaacctgagcgtgatcggcttcagaatcctgctgctgaaagtggccggctttaacctgctgatgaccctgcggctgtggtccagctctagtcgcgccaagagaagcggatctggcgtgaagcagaccctgaatttcgacctgctgaagctggctggcgacgtggaatccaacccaggccccactagcatggccttaccagtgaccgccttgctcctgccgctggccttgctgctccacgccgccaggccggaactccagatgacacagagccctagcagcctgtctgccagcgtgggagacagagtggctatcacctgtagagccagccagagcatcagcagccacctgaactggtatcagcagaagcctggcaaggcccctaagctgctgatctatgccgccagctctctccagagcggagtgcctagcagattttctggcagcggctccggcaccgatttcaccctgacaatatccagcctccagcctgaggacttcgccacctactactgccagcagagctacagcaccccttacacattcggccagggcaccaagctggaaatcaaaggcggaggcggaagtggaggcggaggatctggcggcggaggctctgaagtgcagctggttgaatcaggtggcggcctggttcaacctggcggatctctgagactgagctgtgccgcctccggcttcacctttagcagctactggatgagctgggtccgacaggcccctggcaaaggacttgagtgggtcgccaacatcaagcaggacggcagcgagaagtattacgtggacagcgtgaagggcagattcaccatcagccgggacaacgccaagaacagcctgtacctgcggatgaactccctgagagccgaggataccgccgtgtactattgtgccagagcctggggctacagctcctactacttcgactattggggccagggaaccctggtcaccgtttctccaacgcgtgggaaaccaattcccaaccctcttctgggactggattcaaccggcagcggcgaggacctgaagaacgtgttcccacctgaggtggccgtgttcgagcctagcgaggccgagatcagccacacccagaaagccaccctcgtgtgcctggctaccggcttctaccccgaccatgtggaactgtcttggtgggtcaacggcaaagaggtgcacagcggcgtgtgtaccgacccccagccactgaaagaacagcccgccctgaacgacagccggtactgcctgagcagcagactgagagtgtccgccaccttctggcagaacccccggaaccacttcagatgccaggtgcagttctacggcctgagcgagaacgacgagtggacccaggacagagccaagcccgtgacccagatcgtgtctgccgaagcctggggcagagccgattgcggctttaccagcgagagctaccagcagggcgtgctgagcgccaccatcctgtacgagatcctgctgggcaaggccaccctgtacgccgtgctggtgtctgccctggtgctgatggctatggtcaagcggaaggacagccggggaagggccaagcgatctggatctggagcaacaaacttctcactactcaaacaagcaggtgacgtggaggagaatcccgggccttctagaggccatatgaccgagtacaagcccacggtgcgcctcgccacccgcgacgacgtccccagggccgtacgcaccctcgccgccgcgttcgccgactaccccgccacgcgccacaccgtcgatccggaccgccacatcgagcgggtcaccgagctgcaagaactcttcctcacgcgcgtcgggctcgacatcggcaaggtgtgggtcgcggacgacggcgccgcggtggcggtctggaccacgccggagagcgtcgaagcgggggcggtgttcgccgagatcggcccgcgcatggccgagttgagcggttcccggctggccgcgcagcaacagatggaaggcctcctggcgccgcaccggcccaaggagcccgcgtggttcctggccaccgtcggcgtctcgcccgaccaccagggcaagggtctgggcagcgccgtcgtgctccccggagtggaggcggccgagcgcgccggggtgcccgccttcctggagacctccgcgccccgcaacctccccttctacgagcggctcggcttcaccgtcaccgccgacgtcgaggtgcccgaaggaccgcgcacctggtgcatgacccgcaagcccggtgcctga

SEQ ID NO: 9631 - DNA, 2562 bp, Artificial Sequence
  Synthetic Polynucloetide
atggccttaccagtgaccgccttgctcctgccgctggccttgctgctccacgccgccaggccggaactccagatgacacagagccctagcagcctgtctgccagcgtgggagacagagtggctatcacctgtagagccagccagagcatcagcagccacctgaactggtatcagcagaagcctggcaaggcccctaagctgctgatctatgccgccagctctctccagagcggagtgcctagcagattttctggcagcggctccggcaccgatttcaccctgacaatatccagcctccagcctgaggacttcgccacctactactgccagcagagctacagcaccccttacacattcggccagggcaccaagctggaaatcaaactcgaggacctgaagaacgtgttcccacctgaggtggccgtgttcgagcctagcgaggccgagatcagccacacccagaaagccaccctcgtgtgcctggctaccggcttctaccccgaccatgtggaactgtcttggtgggtcaacggcaaagaggtgcacagcggcgtgtctaccgacccccagccactgaaagaacagcccgccctgaacgacagccggtactgcctgagcagcagactgagagtgtccgccaccttctggcagaacccccggaaccacttcagatgccaggtgcagttctacggcctgagcgagaacgacgagtggacccaggacagagccaagcccgtgacccagatcgtgtctgccgaagcctggggcagagccgattgcggctttaccagcgagagctaccagcagggcgtgctgagcgccaccatcctgtacgagatcctgctgggcaaggccaccctgtacgccgtgctggtgtctgccctggtgctgatggctatggtcaagcggaaggacagccggggaagggccaagcgatctggatctggagcaacaaacttctcactactcaaacaagcaggtgacgtggaggagaatcccgggcctactagtatggactggatttggcgcatccttttccttgtcggcgctgctaccggcgcgcattccttcgaagaagtgcagctggttgaatcaggtggcggcctggttcaacctggcggatctctgagactgagctgtgccgcctccggcttcacctttagcagctactggatgagctgggtccgacaggcccctggcaaaggacttgagtgggtcgccaacatcaagcaggacggcagcgagaagtattacgtggacagcgtgaagggcagattcaccatcagccgggacaacgccaagaacagcctgtacctgcggatgaactccctgagagccgaggataccgccgtgtactattgtgccagagcctggggctacagctcctactacttcgactattggggccagggaaccctggtcaccgtttctccaacgcgtatccagaaccctgatcctgccgtgtaccagctgcgggatagcaagagcagcgacaagagcgtgtgtctgttcaccgacttcgacagccagaccaacgtgtcccagagcaaggactccgacgtgtacatcaccgataagaccgtgctggacatgcggagcatggacttcaagagcaactccgccgtggcctggtccaacaagtccgatttcgcctgcgccaacgccttcaacaacagcattatccccgaggacacattcttcccaagccccgagagcagctgcgacgtgaagctggtggaaaagagcttcgagacagacaccaacctgaacttccagaacctgagcgtgatcggcttcagaatcctgctgctgaaagtggccggctttaacctgctgatgaccctgcggctgtggtccagccgcgccaagagaagcggatctggcgtgaagcagaccctgaatttcgacctgctgaagctggctggcgacgtggaatccaacccaggcccttctagaggccatatgaccgagtacaagcccacggtgcgcctcgccacccgcgacgacgtccccagggccgtacgcaccctcgccgccgcgttcgccgactaccccgccacgcgccacaccgtcgatccggaccgccacatcgagcgggtcaccgagctgcaagaactcttcctcacgcgcgtcgggctcgacatcggcaaggtgtgggtcgcggacgacggcgccgcggtggcggtctggaccacgccggagagcgtcgaagcgggggcggtgttcgccgagatcggcccgcgcatggccgagttgagcggttcccggctggccgcgcagcaacagatggaaggcctcctggcgccgcaccggcccaaggagcccgcgtggttcctggccaccgtcggcgtctcgcccgaccaccagggcaagggtctgggcagcgccgtcgtgctccccggagtggaggcggccgagcgcgccggggtgcccgccttcctggagacctccgcgccccgcaacctccccttctacgagcggctcggcttcaccgtcaccgccgacgtcgaggtgcccgaaggaccgcgcacctggtgcatgacccgcaagcccggtgcctga

SEQ ID NO: 9632 - DNA, 2808 bp, Artificial Sequence
  Synthetic Polynucloetide
atggccttaccagtgaccgccttgctcctgccgctggccttgctgctccacgccgccaggccggaactccagatgacacagagccctagcagcctgtctgccagcgtgggagacagagtggctatcacctgtagagccagccagagcatcagcagccacctgaactggtatcagcagaagcctggcaaggcccctaagctgctgatctatgccgccagctctctccagagcggagtgcctagcagattttctggcagcggctccggcaccgatttcaccctgacaatatccagcctccagcctgaggacttcgccacctactactgccagcagagctacagcaccccttacacattcggccagggcaccaagctggaaatcaaactcgaggacctgaagaacgtgttcccacctgaggtggccgtgttcgagcctagcgaggccgagatcagccacacccagaaagccaccctcgtgtgcctggctaccggcttctaccccgaccatgtggaactgtcttggtgggtcaacggcaaagaggtgcacagcggcgtgtctaccgacccccagccactgaaagaacagcccgccctgaacgacagccggtactgcctgagcagcagactgagagtgtccgccaccttctggcagaacccccggaaccacttcagatgccaggtgcagttctacggcctgagcgagaacgacgagtggacccaggacagagccaagcccgtgacccagatcgtgtctgccgaagcctggggcagagccgattgcggctttaccagcgagagctaccagcagggcgtgctgagcgccaccatcctgtacgagatcctgctgggcaaggccaccctgtacgccgtgctggtgtctgccctggtgctgatggctatggtcaagcggaaggacagccggggaagggccaagcgatctggatctggagcaacaaacttctcactactcaaacaagcaggtgacgtggaggagaatcccgggcctactagtatggactggatttggcgcatccttttccttgtcggcgctgctaccggcgcgcattccttcgaagaagtgcagctggttgaatcaggtggcggcctggttcaacctggcggatctctgagactgagctgtgccgcctccggcttcacctttagcagctactggatgagctgggtccgacaggcccctggcaaaggacttgagtgggtcgccaacatcaagcaggacggcagcgagaagtattacgtggacagcgtgaagggcagattcaccatcagccgggacaacgccaagaacagcctgtacctgcggatgaactccctgagagccgaggataccgccgtgtactattgtgccagagcctggggctacagctcctactacttcgactattggggccagggaaccctggtcaccgtttctccaacgcgtgagcagaaactgatctcggaagaggatgggagcggcaccccattcccttctctggcccctcccatcatgctgctggtggacggcaagcagcagatggtggtcgtgtgcctggtgctggatgtggccccacctggactggacagccccatctggtttagcgccggcaatggctctgccctggacgcctttacctacggcccaagccctgccaccgatggcacctggacaaatctggcccacctgagcctgcccagcgaggaactggcttcttgggagcctctcgtgtgccacacaggacctggcgctgagggacacagcagatccacccagcctatgcacctgtctggcgaggccagcaccgccagaacctgtcctcaggaacctctgagaggcacccctggcggagcactgtggctgggagtgctgagactgctgctgttcaagctgctgctgtttgacctgctgctgacctgctcctgtctgtgcgatcctgccggccctctgccttctcctgccaccaccacaagactgagagccctgggcagccacagactgcaccctgccacagagacaggcggcagagaggccacaagcagccctagaccccagcccagagacagaagatggggcgataccccccctggcagaaagcctggatctccagtccgcgccaagagaagcggatctggcgtgaagcagaccctgaatttcgacctgctgaagctggctggcgacgtggaatccaacccaggcccttctagaggccatatgaccgagtacaagcccacggtgcgcctcgccacccgcgacgacgtccccagggccgtacgcaccctcgccgccgcgttcgccgactaccccgccacgcgccacaccgtcgatccggaccgccacatcgagcgggtcaccgagctgcaagaactcttcctcacgcgcgtcgggctcgacatcggcaaggtgtgggtcgcggacgacggcgccgcggtggcggtctggaccacgccggagagcgtcgaagcgggggcggtgttcgccgagatcggcccgcgcatggccgagttgagcggttcccggctggccgcgcagcaacagatggaaggcctcctggcgccgcaccggcccaaggagcccgcgtggttcctggccaccgtcggcgtctcgcccgaccaccagggcaagggtctgggcagcgccgtcgtgctccccggagtggaggcggccgagcgcgccggggtgcccgccttcctggagacctccgcgccccgcaacctccccttctacgagcggctcggcttcaccgtcaccgccgacgtcgaggtgcccgaaggaccgcgcacctggtgcatgacccgcaagcccggtgcctga

SEQ ID NO: 9633 - DNA, 2862 bp, Artificial Sequence
  Synthetic Polynucloetide
atggccttaccagtgaccgccttgctcctgccgctggccttgctgctccacgccgccaggccgctcgaggacctgaagaacgtgttcccacctgaggtggccgtgttcgagcctagcgaggccgagatcagccacacccagaaagccaccctcgtgtgcctggctaccggcttctaccccgaccatgtggaactgtcttggtgggtcaacggcaaagaggtgcacagcggcgtgtctaccgacccccagccactgaaagaacagcccgccctgaacgacagccggtactgcctgagcagcagactgagagtgtccgccaccttctggcagaacccccggaaccacttcagatgccaggtgcagttctacggcctgagcgagaacgacgagtggacccaggacagagccaagcccgtgacccagatcgtgtctgccgaagcctggggcagagccgattgcggctttaccagcgagagctaccagcagggcgtgctgagcgccaccatcctgtacgagatcctgctgggcaaggccaccctgtacgccgtgctggtgtctgccctggtgctgatggctatggtcaagcggaaggacagccggggaagggccaagcgatctggatctggagcaacaaacttctcactactcaaacaagcaggtgacgtggaggagaatcccgggcctactagcatggccttaccagtgaccgccttgctcctgccgctggccttgctgctccacgccgccaggccggaactccagatgacacagagccctagcagcctgtctgccagcgtgggagacagagtggctatcacctgtagagccagccagagcatcagcagccacctgaactggtatcagcagaagcctggcaaggcccctaagctgctgatctatgccgccagctctctccagagcggagtgcctagcagattttctggcagcggctccggcaccgatttcaccctgacaatatccagcctccagcctgaggacttcgccacctactactgccagcagagctacagcaccccttacacattcggccagggcaccaagctggaaatcaaaggcggaggcggaagtggaggcggaggatctggcggcggaggctctgaagtgcagctggttgaatcaggtggcggcctggttcaacctggcggatctctgagactgagctgtgccgcctccggcttcacctttagcagctactggatgagctgggtccgacaggcccctggcaaaggacttgagtgggtcgccaacatcaagcaggacggcagcgagaagtattacgtggacagcgtgaagggcagattcaccatcagccgggacaacgccaagaacagcctgtacctgcggatgaactccctgagagccgaggataccgccgtgtactattgtgccagagcctggggctacagctcctactacttcgactattggggccagggaaccctggtcaccgtttctccaacgcgtgagcagaaactgatctcggaagaggatctggggagcggcaccccattcccttctctggcccctcccatcatgctgctggtggacggcaagcagcagatggtggtcgtgtgcctggtgctggatgtggccccacctggactggacagccccatctggtttagcgccggcaatggctctgccctggacgcctttacctacggcccaagccctgccaccgatggcacctggacaaatctggcccacctgagcctgcccagcgaggaactggcttcttgggagcctctcgtgtgccacacaggacctggcgctgagggacacagcagatccacccagcctatgcacctgtctggcgaggccagcaccgccagaacctgtcctcaggaacctctgagaggcacccctggcggagcactgtggctgggagtgctgagactgctgctgttcaagctgctgctgtttgacctgctgctgacctgctcctgtctgtgcgatcctgccggccctctgccttctcctgccaccaccacaagactgagagccctgggcagccacagactgcaccctgccacagagacaggcggcagagaggccacaagcagccctagaccccagcccagagacagaagatggggcgataccccccctggcagaaagcctggatctccagtccgcgccaagagaagcggatctggcgtgaagcagaccctgaatttcgacctgctgaagctggctggcgacgtggaatccaacccaggcccttctagatctagaggccatatgaccgagtacaagcccacggtgcgcctcgccacccgcgacgacgtccccagggccgtacgcaccctcgccgccgcgttcgccgactaccccgccacgcgccacaccgtcgatccggaccgccacatcgagcgggtcaccgagctgcaagaactcttcctcacgcgcgtcgggctcgacatcggcaaggtgtgggtcgcggacgacggcgccgcggtggcggtctggaccacgccggagagcgtcgaagcgggggcggtgttcgccgagatcggcccgcgcatggccgagttgagcggttcccggctggccgcgcagcaacagatggaaggcctcctggcgccgcaccggcccaaggagcccgcgtggttcctggccaccgtcggcgtctcgcccgaccaccagggcaagggtctgggcagcgccgtcgtgctccccggagtggaggcggccgagcgcgccggggtgcccgccttcctggagacctccgcgccccgcaacctccccttctacgagcggctcggcttcaccgtcaccgccgacgtcgaggtgcccgaaggaccgcgcacctggtgcatgacccgcaagcccggtgcctga

SEQ ID NO: 9634 - DNA, 2673 bp, Artificial Sequence
  Synthetic Polynucloetide
atggccttaccagtgaccgccttgctcctgccgctggccttgctgctccacgccgccaggccggaactccagatgacacagagccctagcagcctgtctgccagcgtgggagacagagtggctatcacctgtagagccagccagagcatcagcagccacctgaactggtatcagcagaagcctggcaaggcccctaagctgctgatctatgccgccagctctctccagagcggagtgcctagcagattttctggcagcggctccggcaccgatttcaccctgacaatatccagcctccagcctgaggacttcgccacctactactgccagcagagctacagcaccccttacacattcggccagggcaccaagctggaaatcaaactcgaggggaaaccaattcccaaccctcttctgggactggattcaaccggcagcggcgacaagcagctggacgccgacgtgtcccccaagcctaccatcttcctgccctctatcgccgagacaaagctccagaaggccggcacctacctgtgcctgctggaaaagttcttcccagatgtgattaagatccactggcaggaaaagaagtccaacaccatcctgggcagccaggaaggcaacaccatgaagaccaacgacacctacatgaagttcagctggctgaccgtgcccgagaagtccctggacaaagaacacagatgcatcgtgcggcacgaaaacaacaagaacggcgtggaccaggaaatcatcttcccacccatcaagaccgatgtgattacaatggaccccaaggacaactgctccaaggacgccaacgataccctgctgctccagctgaccaacaccagcgcctactacatgtacttgttgctgctgctgaagtccgtggtgtacttcgccatcatcacatgctgcctgctgcggagaaccgccttctgctgcaacggcgagaagtctagggccaagcgatctggatctggagcaacaaacttctcactactcaaacaagcaggtgacgtggaggagaatcccgggcctactagtatggactggatttggcgcatccttttccttgtcggcgctgctaccggcgcgcattccttcgaagaagtgcagctggttgaatcaggtggcggcctggttcaacctggcggatctctgagactgagctgtgccgcctccggcttcacctttagcagctactggatgagctgggtccgacaggcccctggcaaaggacttgagtgggtcgccaacatcaagcaggacggcagcgagaagtattacgtggacagcgtgaagggcagattcaccatcagccgggacaacgccaagaacagcctgtacctgcggatgaactccctgagagccgaggataccgccgtgtactattgtgccagagcctggggctacagctcctactacttcgactattggggccagggaaccctggtcaccgtttctccaacgcgtgagcagaaactgatctcggaagaggatgggagcggcagccagcctcacaccaagcccagcgtgttcgtgatgaagaacggcaccaacgtggcctgcctcgtgaaagagttctaccccaaggacatcaggatcaacctggtgtccagcaagaagatcaccgagttcgaccccgccatcgtgatctcccccagcggcaagtacaacgccgtgaagctggggaagtacgaggacagcaacagcgtgacctgctccgtgcagcacgacaacaagaccgtgcacagcaccgactttgaagtgaaaaccgactccaccgaccacgtgaagcccaaagagacagagaacaccaagcagcccagcaagagctgccacaagcccaaggccatcgtgcacaccgagaaagtgaacatgatgagcctgaccgtgctgggcctgcggatgctgttcgccaaaaccgtggccgtgaacttcctgctgaccgccaagctgttcttcctccgcgccaagagaagcggatctggcgtgaagcagaccctgaatttcgacctgctgaagctggctggcgacgtggaatccaacccaggcccttctagaggccatatgaccgagtacaagcccacggtgcgcctcgccacccgcgacgacgtccccagggccgtacgcaccctcgccgccgcgttcgccgactaccccgccacgcgccacaccgtcgatccggaccgccacatcgagcgggtcaccgagctgcaagaactcttcctcacgcgcgtcgggctcgacatcggcaaggtgtgggtcgcggacgacggcgccgcggtggcggtctggaccacgccggagagcgtcgaagcgggggcggtgttcgccgagatcggcccgcgcatggccgagttgagcggttcccggctggccgcgcagcaacagatggaaggcctcctggcgccgcaccggcccaaggagcccgcgtggttcctggccaccgtcggcgtctcgcccgaccaccagggcaagggtctgggcagcgccgtcgtgctccccggagtggaggcggccgagcgcgccggggtgcccgccttcctggagacctccgcgccccgcaacctccccttctacgagcggctcggcttcaccgtcaccgccgacgtcgaggtgcccgaaggaccgcgcacctggtgcatgacccgcaagcccggtgcctga

SEQ ID NO: 9635 - DNA, 1884 bp, Artificial Sequence
  Synthetic Polynucloetide
atggccttaccagtgaccgccttgctcctgccgctggccttgctgctccacgccgccaggccggaactccagatgacacagagccctagcagcctgtctgccagcgtgggagacagagtggctatcacctgtagagccagccagagcatcagcagccacctgaactggtatcagcagaagcctggcaaggcccctaagctgctgatctatgccgccagctctctccagagcggagtgcctagcagattttctggcagcggctccggcaccgatttcaccctgacaatatccagcctccagcctgaggacttcgccacctactactgccagcagagctacagcaccccttacacattcggccagggcaccaagctggaaatcaaactcgagagccagcctcacaccaagcccagcgtgttcgtgatgaagaacggcaccaacgtggcctgcctcgtgaaagagttctaccccaaggacatcaggatcaacctggtgtccagcaagaagatcaccgagttcgaccccgccatcgtgatctcccccagcggcaagtacaacgccgtgaagctggggaagtacgaggacagcaacagcgtgacctgctccgtgcagcacgacaacaagaccgtgcacagcaccgactttgaagtgaaaaccgactccaccgaccacgtgaagcccaaagagacagagaacaccaagcagcccagcaagagctgccacaagcccaaggccatcgtgcacaccgagaaagtgaacatgatgagcctgaccgtgctgggcctgcggatgctgttcgccaaaaccgtggccgtgaacttcctgctgaccgccaagctgttcttcctcagggccaagcgatctggatctggagcaacaaacttctcactactcaaacaagcaggtgacgtggaggagaatcccgggcctactagtatggactggatttggcgcatccttttccttgtcggcgctgctaccggcgcgcattccttcgaagaagtgcagctggttgaatcaggtggcggcctggttcaacctggcggatctctgagactgagctgtgccgcctccggcttcacctttagcagctactggatgagctgggtccgacaggcccctggcaaaggacttgagtgggtcgccaacatcaagcaggacggcagcgagaagtattacgtggacagcgtgaagggcagattcaccatcagccgggacaacgccaagaacagcctgtacctgcggatgaactccctgagagccgaggataccgccgtgtactattgtgccagagcctggggctacagctcctactacttcgactattggggccagggaaccctggtcaccgtttctccaacgcgtgacaagcagctggacgccgacgtgtcccccaagcctaccatcttcctgccctctatcgccgagacaaagctccagaaggccggcacctacctgtgcctgctggaaaagttcttcccagatgtgattaagatccactggcaggaaaagaagtccaacaccatcctgggcagccaggaaggcaacaccatgaagaccaacgacacctacatgaagttcagctggctgaccgtgcccgagaagtccctggacaaagaacacagatgcatcgtgcggcacgaaaacaacaagaacggcgtggaccaggaaatcatcttcccacccatcaagaccgatgtgattacaatggaccccaaggacaactgctccaaggacgccaacgataccctgctgctccagctgaccaacaccagcgcctactacatgtacttgttgctgctgctgaagtccgtggtgtacttcgccatcatcacatgctgcctgctgcggagaaccgccttctgctgcaacggcgagaagtct

SEQ ID NO: 9636 - DNA, 2718 bp, Artificial Sequence
  Synthetic Polynucloetide
atggccttaccagtgaccgccttgctcctgccgctggccttgctgctccacgccgccaggccgctcgaggggaaaccaattcccaaccctcttctgggactggattcaaccggcagcggcgacaagcagctggacgccgacgtgtcccccaagcctaccatcttcctgccctctatcgccgagacaaagctccagaaggccggcacctacctgtgcctgctggaaaagttcttcccagatgtgattaagatccactggcaggaaaagaagtccaacaccatcctgggcagccaggaaggcaacaccatgaagaccaacgacacctacatgaagttcagctggctgaccgtgcccgagaagtccctggacaaagaacacagatgcatcgtgcggcacgaaaacaacaagaacggcgtggaccaggaaatcatcttcccacccatcaagaccgatgtgattacaatggaccccaaggacaactgctccaaggacgccaacgataccctgctgctccagctgaccaacaccagcgcctactacatgtacttgttgctgctgctgaagtccgtggtgtacttcgccatcatcacatgctgcctgctgcggagaaccgccttctgctgcaacggcgagaagtctagggccaagcgatctggatctggagcaacaaacttctcactactcaaacaagcaggtgacgtggaggagaatcccgggcctactagcatggccttaccagtgaccgccttgctcctgccgctggccttgctgctccacgccgccaggccggaactccagatgacacagagccctagcagcctgtctgccagcgtgggagacagagtggctatcacctgtagagccagccagagcatcagcagccacctgaactggtatcagcagaagcctggcaaggcccctaagctgctgatctatgccgccagctctctccagagcggagtgcctagcagattttctggcagcggctccggcaccgatttcaccctgacaatatccagcctccagcctgaggacttcgccacctactactgccagcagagctacagcaccccttacacattcggccagggcaccaagctggaaatcaaaggcggaggcggaagtggaggcggaggatctggcggcggaggctctgaagtgcagctggttgaatcaggtggcggcctggttcaacctggcggatctctgagactgagctgtgccgcctccggcttcacctttagcagctactggatgagctgggtccgacaggcccctggcaaaggacttgagtgggtcgccaacatcaagcaggacggcagcgagaagtattacgtggacagcgtgaagggcagattcaccatcagccgggacaacgccaagaacagcctgtacctgcggatgaactccctgagagccgaggataccgccgtgtactattgtgccagagcctggggctacagctcctactacttcgactattggggccagggaaccctggtcaccgtttctccaacgcgtgagcagaaactgatctcggaagaggatgggagcggcagccagcctcacaccaagcccagcgtgttcgtgatgaagaacggcaccaacgtggcctgcctcgtgaaagagttctaccccaaggacatcaggatcaacctggtgtccagcaagaagatcaccgagttcgaccccgccatcgtgatctcccccagcggcaagtacaacgccgtgaagctggggaagtacgaggacagcaacagcgtgacctgctccgtgcagcacgacaacaagaccgtgcacagcaccgactttgaagtgaaaaccgactccaccgaccacgtgaagcccaaagagacagagaacaccaagcagcccagcaagagctgccacaagcccaaggccatcgtgcacaccgagaaagtgaacatgatgagcctgaccgtgctgggcctgcggatgctgttcgccaaaaccgtggccgtgaacttcctgctgaccgccaagctgttcttcctccgcgccaagagaagcggatctggcgtgaagcagaccctgaatttcgacctgctgaagctggctggcgacgtggaatccaacccaggcccttctagaggccatatgaccgagtacaagcccacggtgcgcctcgccacccgcgacgacgtccccagggccgtacgcaccctcgccgccgcgttcgccgactaccccgccacgcgccacaccgtcgatccggaccgccacatcgagcgggtcaccgagctgcaagaactcttcctcacgcgcgtcgggctcgacatcggcaaggtgtgggtcgcggacgacggcgccgcggtggcggtctggaccacgccggagagcgtcgaagcgggggcggtgttcgccgagatcggcccgcgcatggccgagttgagcggttcccggctggccgcgcagcaacagatggaaggcctcctggcgccgcaccggcccaaggagcccgcgtggttcctggccaccgtcggcgtctcgcccgaccaccagggcaagggtctgggcagcgccgtcgtgctccccggagtggaggcggccgagcgcgccggggtgcccgccttcctggagacctccgcgccccgcaacctccccttctacgagcggctcggcttcaccgtcaccgccgacgtcgaggtgcccgaaggaccgcgcacctggtgcatgacccgcaagcccggtgcctga

SEQ ID NO: 9637 - DNA, 3093 bp, Artificial Sequence
  Synthetic Polynucloetide
atggccttaccagtgaccgccttgctcctgccgctggccttgctgctccacgccgccaggccggaactccagatgacacagagccctagcagcctgtctgccagcgtgggagacagagtggctatcacctgtagagccagccagagcatcagcagccacctgaactggtatcagcagaagcctggcaaggcccctaagctgctgatctatgccgccagctctctccagagcggagtgcctagcagattttctggcagcggctccggcaccgatttcaccctgacaatatccagcctccagcctgaggacttcgccacctactactgccagcagagctacagcaccccttacacattcggccagggcaccaagctggaaatcaaaggacagcctaaggccaatcctaccgtgacactgttccctccaagcagcgaagaactccaggccaacaaggccacacttgtgtgcctgatctccgacttctaccctggggctgtgacagtggcttggaaggccgatggatctcctgtgaaagccggcgtggaaaccaccaagccatccaagcagagcaacaacaaatacgccgccagctcctacctgagcctgacacctgagcagtggaagtcccacagatcctacagctgccaagtgacccacgaaggcagcaccgtggaaaagacagtggcccctacagagtgcagcggatcccagagcttcggcctgctggaccccaagctgtgctacctgctggatggcatcctgttcatctacggcgtgatcctgaccgccctgttcctgagagtgaagttcagcagaagcgccgacgcccctgcctaccagcagggacagaaccaactgtacaacgagctgaacctgggcagacgggaagagtacgacgtgctggacaagcggagaggcagggaccctgagatgggcggaaagccccagcggagaaagaacccccaggaaggactgtataacgaactccagaaagacaagatggccgaagcctacagcgagatcggcatgaagggcgagcggagaagaggcaagggccacgatggcctgtaccagggcctgagcaccgccaccaaggacacctatgacgccctgcacatgcaggccctgcctccaagaagggccaagcgatctggatctggagcaacaaacttctcactactcaaacaagcaggtgacgtggaggagaatcccgggcctactagtatggactggatttggcgcatccttttccttgtcggcgctgctaccggcgcgcattccttcgaagaagtgcagctggttgaatcaggtggcggcctggttcaacctggcggatctctgagactgagctgtgccgcctccggcttcacctttagcagctactggatgagctgggtccgacaggcccctggcaaaggacttgagtgggtcgccaacatcaagcaggacggcagcgagaagtattacgtggacagcgtgaagggcagattcaccatcagccgggacaacgccaagaacagcctgtacctgcggatgaactccctgagagccgaggataccgccgtgtactattgtgccagagcctggggctacagctcctactacttcgactattggggccagggaaccctggtcaccgtttctccagcctctacaaagggaccctccgtgtttcctctggctcccagcagcaagtctacaagcggaggaacagccgctctgggctgcctggtcaaggattactttcccgagcctgtgaccgtgtcctggaatagcggagcactgacaagcggcgtgcacacctttccagccgtgctgcaaagcagcggcctgtactctctgagcagcgtggtcacagtgcctagctctagcctgggcacccagacctacatctgcaatgtgaaccacaagcctagcaacaccaaggtggacaagagagtggaacccaagagctgtggtacccagagttttgggttgttggaccctaaattgtgctatctgttggacggaatcctgttcatttacggagtgatcctgaccgcattgttcctgcgggttaagttttccagatccgcagacgcacccgcttaccaacaagggcagaaccaactctacaatgaacttaatttggggcggagggaagagtacgacgttctggacaaaaggaggggacgagatcccgagatgggcggaaagcctcagcgaaggaagaatccgcaagaggggctttataacgaactccagaaagataaaatggcagaagcctatagtgagattgggatgaagggagaaaggaggaggggtaaaggtcacgatgggttgtaccaaggattgagcacagccactaaagatacctatgatgcgctccacatgcaggccctgccgccaagacgcgccaagagaagcggatctggcgtgaagcagaccctgaatttcgacctgctgaagctggctggcgacgtggaatccaacccaggcccttctagaggccatatgaccgagtacaagcccacggtgcgcctcgccacccgcgacgacgtccccagggccgtacgcaccctcgccgccgcgttcgccgactaccccgccacgcgccacaccgtcgatccggaccgccacatcgagcgggtcaccgagctgcaagaactcttcctcacgcgcgtcgggctcgacatcggcaaggtgtgggtcgcggacgacggcgccgcggtggcggtctggaccacgccggagagcgtcgaagcgggggcggtgttcgccgagatcggcccgcgcatggccgagttgagcggttcccggctggccgcgcagcaacagatggaaggcctcctggcgccgcaccggcccaaggagcccgcgtggttcctggccaccgtcggcgtctcgcccgaccaccagggcaagggtctgggcagcgccgtcgtgctccccggagtggaggcggccgagcgcgccggggtgcccgccttcctggagacctccgcgccccgcaacctccccttctacgagcggctcggcttcaccgtcaccgccgacgtcgaggtgcccgaaggaccgcgcacctggtgcatgacccgcaagcccggtgcctga

SEQ ID NO: 9638 - DNA, 2448 bp, Artificial Sequence
  Synthetic Polynucloetide
atggccttaccagtgaccgccttgctcctgccgctggccttgctgctccacgccgccaggccggaactccagatgacacagagccctagcagcctgtctgccagcgtgggagacagagtggctatcacctgtagagccagccagagcatcagcagccacctgaactggtatcagcagaagcctggcaaggcccctaagctgctgatctatgccgccagctctctccagagcggagtgcctagcagattttctggcagcggctccggcaccgatttcaccctgacaatatccagcctccagcctgaggacttcgccacctactactgccagcagagctacagcaccccttacacattcggccagggcaccaagctggaaatcaaactcgaggacctgaagaacgtgttcccacctgaggtggccgtgttcgagcctagcgaggccgagatcagccacacccagaaagccaccctcgtgtgcctggctaccggcttctaccccgaccatgtggaactgtcttggtgggtcaacggcaaagaggtgcacagcggcgtgtctaccgacccccagccactgaaagaacagcccgccctgaacgacagccggtactgcctgagcagcagactgagagtgtccgccaccttctggcagaacccccggaaccacttcagatgccaggtgcagttctacggcctgagcgagaacgacgagtggacccaggacagagccaagcccgtgacccagatcgtgtctgccgaagcctggggcagagccgattgcggatcccagagcttcggcctgctggaccccaagctgtgctacctgctggatggcatcctgttcatctacggcgtgatcctgaccgccctgttcctgagagtgaagttcagcagaagcgccgacgcccctgcctaccagcagggacagaaccaactgtacaacgagctgaacctgggcagacgggaagagtacgacgtgctggacaagcggagaggcagggaccctgagatgggcggaaagccccagcggagaaagaacccccaggaaggactgtataacgaactccagaaagacaagatggccgaagcctacagcgagatcggcatgaagggcgagcggagaagaggcaagggccacgatggcctgtaccagggcctgagcaccgccaccaaggacacctatgacgccctgcacatgcaggccctgcctccaagaagggccaagcgatctggatctggagcaacaaacttctcactactcaaacaagcaggtgacgtggaggagaatcccgggcctactagtatggactggatttggcgcatccttttccttgtcggcgctgctaccggcgcgcattccttcgaagaagtgcagctggttgaatcaggtggcggcctggttcaacctggcggatctctgagactgagctgtgccgcctccggcttcacctttagcagctactggatgagctgggtccgacaggcccctggcaaaggacttgagtgggtcgccaacatcaagcaggacggcagcgagaagtattacgtggacagcgtgaagggcagattcaccatcagccgggacaacgccaagaacagcctgtacctgcggatgaactccctgagagccgaggataccgccgtgtactattgtgccagagcctggggctacagctcctactacttcgactattggggccagggaaccctggtcaccgtttctccaacgcgtatccagaaccctgatcctgccgtgtaccagctgcgggatagcaagagcagcgacaagagcgtgtgtctgttcaccgacttcgacagccagaccaacgtgtcccagagcaaggactccgacgtgtacatcaccgataagaccgtgctggacatgcggagcatggacttcaagagcaactccgccgtggcctggtccaacaagtccgatttcgcctgcgccaacgccttcaacaacagcattatccccgaggacacattcttcccaagccccgagagcagctgcggtacccagagttttgggttgttggaccctaaattgtgctatctgttggacggaatcctgttcatttacggagtgatcctgaccgcattgttcctgcgggttaagttttccagatccgcagacgcacccgcttaccaacaagggcagaaccaactctacaatgaacttaatttggggcggagggaagagtacgacgttctggacaaaaggaggggacgagatcccgagatgggcggaaagcctcagcgaaggaagaatccgcaagaggggctttataacgaactccagaaagataaaatggcagaagcctatagtgagattgggatgaagggagaaaggaggaggggtaaaggtcacgatgggttgtaccaaggattgagcacagccactaaagatacctatgatgcgctccacatgcaggccctgccgccaaga

SEQ ID NO: 9639 - DNA, 2448 bp, Artificial Sequence
  Synthetic Polynucloetide
atggccttaccagtgaccgccttgctcctgccgctggccttgctgctccacgccgccaggccggaactccagatgacacagagccctagcagcctgtctgccagcgtgggagacagagtggctatcacctgtagagccagccagagcatcagcagccacctgaactggtatcagcagaagcctggcaaggcccctaagctgctgatctatgccgccagctctctccagagcggagtgcctagcagattttctggcagcggctccggcaccgatttcaccctgacaatatccagcctccagcctgaggacttcgccacctactactgccagcagagctacagcaccccttacacattcggccagggcaccaagctggaaatcaaactcgaggacctgaagaacgtgttcccacctgaggtggccgtgttcgagcctagcaaggccgagatcgcccacacccagaaagccaccctcgtgtgcctggctaccggcttctaccccgaccatgtggaactgtcttggtgggtcaacggcaaagaggtgcacagcggcgtgtgtaccgacccccagccactgaaagaacagcccgccctgaacgacagccggtactgcctgagcagcagactgagagtgtccgccaccttctggcagaacccccggaaccacttcagatgccaggtgcagttctacggcctgagcgagaacgacgagtggacccaggacagagccaagcccgtgacccagatcgtgtctgccgaagcctggggcagagccgattgcggatcccagagcttcggcctgctggaccccaagctgtgctacctgctggatggcatcctgttcatctacggcgtgatcctgaccgccctgttcctgagagtgaagttcagcagaagcgccgacgcccctgcctaccagcagggacagaaccaactgtacaacgagctgaacctgggcagacgggaagagtacgacgtgctggacaagcggagaggcagggaccctgagatgggcggaaagccccagcggagaaagaacccccaggaaggactgtataacgaactccagaaagacaagatggccgaagcctacagcgagatcggcatgaagggcgagcggagaagaggcaagggccacgatggcctgtaccagggcctgagcaccgccaccaaggacacctatgacgccctgcacatgcaggccctgcctccaagaagggccaagcgatctggatctggagcaacaaacttctcactactcaaacaagcaggtgacgtggaggagaatcccgggcctactagtatggactggatttggcgcatccttttccttgtcggcgctgctaccggcgcgcattccttcgaagaagtgcagctggttgaatcaggtggcggcctggttcaacctggcggatctctgagactgagctgtgccgcctccggcttcacctttagcagctactggatgagctgggtccgacaggcccctggcaaaggacttgagtgggtcgccaacatcaagcaggacggcagcgagaagtattacgtggacagcgtgaagggcagattcaccatcagccgggacaacgccaagaacagcctgtacctgcggatgaactccctgagagccgaggataccgccgtgtactattgtgccagagcctggggctacagctcctactacttcgactattggggccagggaaccctggtcaccgtttctccaacgcgtatccagaaccctgatcctgccgtgtaccagctgcgggatagcaagagcagcgacaagagcgtgtgtctgttcaccgacttcgacagccagaccaacgtgtcccagagcaaggactccgacgtgtacatcaccgataagtgcgtgctggacatgcggagcatggacttcaagagcaactccgccgtggcctggtccaacaagtccgatttcgcctgcgccaacgccttcaacaacagcattatccccgaggacacattcttcccaagcagcgacgtgccctgcggtacccagagttttgggttgttggaccctaaattgtgctatctgttggacggaatcctgttcatttacggagtgatcctgaccgcattgttcctgcgggttaagttttccagatccgcagacgcacccgcttaccaacaagggcagaaccaactctacaatgaacttaatttggggcggagggaagagtacgacgttctggacaaaaggaggggacgagatcccgagatgggcggaaagcctcagcgaaggaagaatccgcaagaggggctttataacgaactccagaaagataaaatggcagaagcctatagtgagattgggatgaagggagaaaggaggaggggtaaaggtcacgatgggttgtaccaaggattgagcacagccactaaagatacctatgatgcgctccacatgcaggccctgccgccaaga

SEQ ID NO: 9640 - DNA, 2661 bp, Artificial Sequence
  Synthetic Polynucloetide
atggccttaccagtgaccgccttgctcctgccgctggccttgctgctccacgccgccaggccggaactccagatgacacagagccctagcagcctgtctgccagcgtgggagacagagtggctatcacctgtagagccagccagagcatcagcagccacctgaactggtatcagcagaagcctggcaaggcccctaagctgctgatctatgccgccagctctctccagagcggagtgcctagcagattttctggcagcggctccggcaccgatttcaccctgacaatatccagcctccagcctgaggacttcgccacctactactgccagcagagctacagcaccccttacacattcggccagggcaccaagctggaaatcaaactcgaggggaaaccaattcccaaccctcttctgggactggattcaaccggcagcggcgaggacctgaagaacgtgttcccacctgaggtggccgtgttcgagcctagcgaggccgagatcagccacacccagaaagccaccctcgtgtgcctggctaccggcttctaccccgaccatgtggaactgtcttggtgggtcaacggcaaagaggtgcacagcggcgtgtctaccgacccccagccactgaaagaacagcccgccctgaacgacagccggtactgcctgagcagcagactgagagtgtccgccaccttctggcagaacccccggaaccacttcagatgccaggtgcagttctacggcctgagcgagaacgacgagtggacccaggacagagccaagcccgtgacccagatcgtgtctgccgaagcctggggcagagccgattgcggatcccagagcttcggcctgctggaccccaagctgtgctacctgctggatggcatcctgttcatctacggcgtgatcctgaccgccctgttcctgagagtgaagttcagcagaagcgccgacgcccctgcctaccagcagggacagaaccaactgtacaacgagctgaacctgggcagacgggaagagtacgacgtgctggacaagcggagaggcagggaccctgagatgggcggaaagccccagcggagaaagaacccccaggaaggactgtataacgaactccagaaagacaagatggccgaagcctacagcgagatcggcatgaagggcgagcggagaagaggcaagggccacgatggcctgtaccagggcctgagcaccgccaccaaggacacctatgacgccctgcacatgcaggccctgcctccaagaagggccaagcgatctggatctggagcaacaaacttctcactactcaaacaagcaggtgacgtggaggagaatcccgggcctactagtatggactggatttggcgcatccttttccttgtcggcgctgctaccggcgcgcattccttcgaagaagtgcagctggttgaatcaggtggcggcctggttcaacctggcggatctctgagactgagctgtgccgcctccggcttcacctttagcagctactggatgagctgggtccgacaggcccctggcaaaggacttgagtgggtcgccaacatcaagcaggacggcagcgagaagtattacgtggacagcgtgaagggcagattcaccatcagccgggacaacgccaagaacagcctgtacctgcggatgaactccctgagagccgaggataccgccgtgtactattgtgccagagcctggggctacagctcctactacttcgactattggggccagggaaccctggtcaccgtttctccaacgcgtgagcagaaactgatctcggaagaggatgggagcggcatccagaaccctgatcctgccgtgtaccagctgcgggatagcaagagcagcgacaagagcgtgtgtctgttcaccgacttcgacagccagaccaacgtgtcccagagcaaggactccgacgtgtacatcaccgataagaccgtgctggacatgcggagcatggacttcaagagcaactccgccgtggcctggtccaacaagtccgatttcgcctgcgccaacgccttcaacaacagcattatccccgaggacacattcttcccaagccccgagagcagctgcggtacccagagttttgggttgttggaccctaaattgtgctatctgttggacggaatcctgttcatttacggagtgatcctgaccgcattgttcctgaggagcaagcggtcacggctgctccacagcgattacatgaatatgacaccacgaagaccgggtcctactcgcaaacactaccaaccctacgcacctccccgcgactttgcagcgtaccgatctcgggttaagttttccagatccgcagacgcacccgcttaccaacaagggcagaaccaactctacaatgaacttaatttggggcggagggaagagtacgacgttctggacaaaaggaggggacgagatcccgagatgggcggaaagcctcagcgaaggaagaatccgcaagaggggctttataacgaactccagaaagataaaatggcagaagcctatagtgagattgggatgaagggagaaaggaggaggggtaaaggtcacgatgggttgtaccaaggattgagcacagccactaaagatacctatgatgcgctccacatgcaggccctgccgccaaga

SEQ ID NO: 9641 - DNA, 2784 bp, Artificial Sequence
  Synthetic Polynucloetide
atggccttaccagtgaccgccttgctcctgccgctggccttgctgctccacgccgccaggccggaactccagatgacacagagccctagcagcctgtctgccagcgtgggagacagagtggctatcacctgtagagccagccagagcatcagcagccacctgaactggtatcagcagaagcctggcaaggcccctaagctgctgatctatgccgccagctctctccagagcggagtgcctagcagattttctggcagcggctccggcaccgatttcaccctgacaatatccagcctccagcctgaggacttcgccacctactactgccagcagagctacagcaccccttacacattcggccagggcaccaagctggaaatcaaactcgaggggaaaccaattcccaaccctcttctgggactggattcaaccggcagcggcgaggacctgaagaacgtgttcccacctgaggtggccgtgttcgagcctagcgaggccgagatcagccacacccagaaagccaccctcgtgtgcctggctaccggcttctaccccgaccatgtggaactgtcttggtgggtcaacggcaaagaggtgcacagcggcgtgtctaccgacccccagccactgaaagaacagcccgccctgaacgacagccggtactgcctgagcagcagactgagagtgtccgccaccttctggcagaacccccggaaccacttcagatgccaggtgcagttctacggcctgagcgagaacgacgagtggacccaggacagagccaagcccgtgacccagatcgtgtctgccgaagcctggggcagagccgattgcggatcccagagcttcggcctgctggaccccaagctgtgctacctgctggatggcatcctgttcatctacggcgtgatcctgaccgccctgttcctgaggagtaagaggagcaggctcctgcacagtgactacatgaacatgactccacgccgccccggacccacccgcaagcattaccagccctatgccccaccacgcgacttcgcagcctatcgctccagagtgaagttcagcagaagcgccgacgcccctgcctaccagcagggacagaaccaactgtacaacgagctgaacctgggcagacgggaagagtacgacgtgctggacaagcggagaggcagggaccctgagatgggcggaaagccccagcggagaaagaacccccaggaaggactgtataacgaactccagaaagacaagatggccgaagcctacagcgagatcggcatgaagggcgagcggagaagaggcaagggccacgatggcctgtaccagggcctgagcaccgccaccaaggacacctatgacgccctgcacatgcaggccctgcctccaagaagggccaagcgatctggatctggagcaacaaacttctcactactcaaacaagcaggtgacgtggaggagaatcccgggcctactagtatggactggatttggcgcatccttttccttgtcggcgctgctaccggcgcgcattccttcgaagaagtgcagctggttgaatcaggtggcggcctggttcaacctggcggatctctgagactgagctgtgccgcctccggcttcacctttagcagctactggatgagctgggtccgacaggcccctggcaaaggacttgagtgggtcgccaacatcaagcaggacggcagcgagaagtattacgtggacagcgtgaagggcagattcaccatcagccgggacaacgccaagaacagcctgtacctgcggatgaactccctgagagccgaggataccgccgtgtactattgtgccagagcctggggctacagctcctactacttcgactattggggccagggaaccctggtcaccgtttctccaacgcgtgagcagaaactgatctcggaagaggatgggagcggcatccagaaccctgatcctgccgtgtaccagctgcgggatagcaagagcagcgacaagagcgtgtgtctgttcaccgacttcgacagccagaccaacgtgtcccagagcaaggactccgacgtgtacatcaccgataagaccgtgctggacatgcggagcatggacttcaagagcaactccgccgtggcctggtccaacaagtccgatttcgcctgcgccaacgccttcaacaacagcattatccccgaggacacattcttcccaagccccgagagcagctgcggtacccagagttttgggttgttggaccctaaattgtgctatctgttggacggaatcctgttcatttacggagtgatcctgaccgcattgttcctgaggagcaagcggtcacggctgctccacagcgattacatgaatatgacaccacgaagaccgggtcctactcgcaaacactaccaaccctacgcacctccccgcgactttgcagcgtaccgatctcgggttaagttttccagatccgcagacgcacccgcttaccaacaagggcagaaccaactctacaatgaacttaatttggggcggagggaagagtacgacgttctggacaaaaggaggggacgagatcccgagatgggcggaaagcctcagcgaaggaagaatccgcaagaggggctttataacgaactccagaaagataaaatggcagaagcctatagtgagattgggatgaagggagaaaggaggaggggtaaaggtcacgatgggttgtaccaaggattgagcacagccactaaagatacctatgatgcgctccacatgcaggccctgccgccaaga

SEQ ID NO: 9642 - DNA, 2667 bp, Artificial Sequence
  Synthetic Polynucloetide
atggccttaccagtgaccgccttgctcctgccgctggccttgctgctccacgccgccaggccggaactccagatgacacagagccctagcagcctgtctgccagcgtgggagacagagtggctatcacctgtagagccagccagagcatcagcagccacctgaactggtatcagcagaagcctggcaaggcccctaagctgctgatctatgccgccagctctctccagagcggagtgcctagcagattttctggcagcggctccggcaccgatttcaccctgacaatatccagcctccagcctgaggacttcgccacctactactgccagcagagctacagcaccccttacacattcggccagggcaccaagctggaaatcaaactcgaggggaaaccaattcccaaccctcttctgggactggattcaaccggcagcggcgaggacctgaagaacgtgttcccacctgaggtggccgtgttcgagcctagcgaggccgagatcagccacacccagaaagccaccctcgtgtgcctggctaccggcttctaccccgaccatgtggaactgtcttggtgggtcaacggcaaagaggtgcacagcggcgtgtctaccgacccccagccactgaaagaacagcccgccctgaacgacagccggtactgcctgagcagcagactgagagtgtccgccaccttctggcagaacccccggaaccacttcagatgccaggtgcagttctacggcctgagcgagaacgacgagtggacccaggacagagccaagcccgtgacccagatcgtgtctgccgaagcctggggcagagccgattgcggatcccagagcttcggcctgctggaccccaagctgtgctacctgctggatggcatcctgttcatctacggcgtgatcctgaccgccctgttcctgagagtgaagttcagcagaagcgccgacgcccctgcctaccagcagggacagaaccaactgtacaacgagctgaacctgggcagacgggaagagtacgacgtgctggacaagcggagaggcagggaccctgagatgggcggaaagccccagcggagaaagaacccccaggaaggactgtataacgaactccagaaagacaagatggccgaagcctacagcgagatcggcatgaagggcgagcggagaagaggcaagggccacgatggcctgtaccagggcctgagcaccgccaccaaggacacctatgacgccctgcacatgcaggccctgcctccaagaagggccaagcgatctggatctggagcaacaaacttctcactactcaaacaagcaggtgacgtggaggagaatcccgggcctactagtatggactggatttggcgcatccttttccttgtcggcgctgctaccggcgcgcattccttcgaagaagtgcagctggttgaatcaggtggcggcctggttcaacctggcggatctctgagactgagctgtgccgcctccggcttcacctttagcagctactggatgagctgggtccgacaggcccctggcaaaggacttgagtgggtcgccaacatcaagcaggacggcagcgagaagtattacgtggacagcgtgaagggcagattcaccatcagccgggacaacgccaagaacagcctgtacctgcggatgaactccctgagagccgaggataccgccgtgtactattgtgccagagcctggggctacagctcctactacttcgactattggggccagggaaccctggtcaccgtttctccaacgcgtgagcagaaactgatctcggaagaggatctggggagcggcatccagaaccctgatcctgccgtgtaccagctgcgggatagcaagagcagcgacaagagcgtgtgtctgttcaccgacttcgacagccagaccaacgtgtcccagagcaaggactccgacgtgtacatcaccgataagaccgtgctggacatgcggagcatggacttcaagagcaactccgccgtggcctggtccaacaagtccgatttcgcctgcgccaacgccttcaacaacagcattatccccgaggacacattcttcccaagccccgagagcagctgcggtacccagagttttgggttgttggaccctaaattgtgctatctgttggacggaatcctgttcatttacggagtgatcctgaccgcattgttcctgaagagaggccggaagaagctgctgtacatcttcaagcagcctttcatgcggcccgtgcagaccacccaggaagaggacggctgctcctgccggttccccgaggaagaagaaggcggctgcgagctgcgggttaagttttccagatccgcagacgcacccgcttaccaacaagggcagaaccaactctacaatgaacttaatttggggcggagggaagagtacgacgttctggacaaaaggaggggacgagatcccgagatgggcggaaagcctcagcgaaggaagaatccgcaagaggggctttataacgaactccagaaagataaaatggcagaagcctatagtgagattgggatgaagggagaaaggaggaggggtaaaggtcacgatgggttgtaccaaggattgagcacagccactaaagatacctatgatgcgctccacatgcaggccctgccgccaaga

SEQ ID NO: 9643 - DNA, 2793 bp, Artificial Sequence
  Synthetic Polynucloetide
atggccttaccagtgaccgccttgctcctgccgctggccttgctgctccacgccgccaggccggaactccagatgacacagagccctagcagcctgtctgccagcgtgggagacagagtggctatcacctgtagagccagccagagcatcagcagccacctgaactggtatcagcagaagcctggcaaggcccctaagctgctgatctatgccgccagctctctccagagcggagtgcctagcagattttctggcagcggctccggcaccgatttcaccctgacaatatccagcctccagcctgaggacttcgccacctactactgccagcagagctacagcaccccttacacattcggccagggcaccaagctggaaatcaaactcgaggggaaaccaattcccaaccctcttctgggactggattcaaccggcagcggcgaggacctgaagaacgtgttcccacctgaggtggccgtgttcgagcctagcgaggccgagatcagccacacccagaaagccaccctcgtgtgcctggctaccggcttctaccccgaccatgtggaactgtcttggtgggtcaacggcaaagaggtgcacagcggcgtgtctaccgacccccagccactgaaagaacagcccgccctgaacgacagccggtactgcctgagcagcagactgagagtgtccgccaccttctggcagaacccccggaaccacttcagatgccaggtgcagttctacggcctgagcgagaacgacgagtggacccaggacagagccaagcccgtgacccagatcgtgtctgccgaagcctggggcagagccgattgcggatcccagagcttcggcctgctggaccccaagctgtgctacctgctggatggcatcctgttcatctacggcgtgatcctgaccgccctgttcctgaaacggggcagaaagaaactcctgtatatattcaaacaaccatttatgagaccagtacaaactactcaagaggaagatggctgtagctgccgatttccagaagaagaagaaggaggatgtgaactgagagtgaagttcagcagaagcgccgacgcccctgcctaccagcagggacagaaccaactgtacaacgagctgaacctgggcagacgggaagagtacgacgtgctggacaagcggagaggcagggaccctgagatgggcggaaagccccagcggagaaagaacccccaggaaggactgtataacgaactccagaaagacaagatggccgaagcctacagcgagatcggcatgaagggcgagcggagaagaggcaagggccacgatggcctgtaccagggcctgagcaccgccaccaaggacacctatgacgccctgcacatgcaggccctgcctccaagaagggccaagcgatctggatctggagcaacaaacttctcactactcaaacaagcaggtgacgtggaggagaatcccgggcctactagtatggactggatttggcgcatccttttccttgtcggcgctgctaccggcgcgcattccttcgaagaagtgcagctggttgaatcaggtggcggcctggttcaacctggcggatctctgagactgagctgtgccgcctccggcttcacctttagcagctactggatgagctgggtccgacaggcccctggcaaaggacttgagtgggtcgccaacatcaagcaggacggcagcgagaagtattacgtggacagcgtgaagggcagattcaccatcagccgggacaacgccaagaacagcctgtacctgcggatgaactccctgagagccgaggataccgccgtgtactattgtgccagagcctggggctacagctcctactacttcgactattggggccagggaaccctggtcaccgtttctccaacgcgtgagcagaaactgatctcggaagaggatctggggagcggcatccagaaccctgatcctgccgtgtaccagctgcgggatagcaagagcagcgacaagagcgtgtgtctgttcaccgacttcgacagccagaccaacgtgtcccagagcaaggactccgacgtgtacatcaccgataagaccgtgctggacatgcggagcatggacttcaagagcaactccgccgtggcctggtccaacaagtccgatttcgcctgcgccaacgccttcaacaacagcattatccccgaggacacattcttcccaagccccgagagcagctgcggtacccagagttttgggttgttggaccctaaattgtgctatctgttggacggaatcctgttcatttacggagtgatcctgaccgcattgttcctgaagagaggccggaagaagctgctgtacatcttcaagcagcctttcatgcggcccgtgcagaccacccaggaagaggacggctgctcctgccggttccccgaggaagaagaaggcggctgcgagctgcgggttaagttttccagatccgcagacgcacccgcttaccaacaagggcagaaccaactctacaatgaacttaatttggggcggagggaagagtacgacgttctggacaaaaggaggggacgagatcccgagatgggcggaaagcctcagcgaaggaagaatccgcaagaggggctttataacgaactccagaaagataaaatggcagaagcctatagtgagattgggatgaagggagaaaggaggaggggtaaaggtcacgatgggttgtaccaaggattgagcacagccactaaagatacctatgatgcgctccacatgcaggccctgccgccaaga

SEQ ID NO: 9644 - DNA, 2466 bp, Artificial Sequence
  Synthetic Polynucloetide
atggccttaccagtgaccgccttgctcctgccgctggccttgctgctccacgccgccaggccggaactccagatgacacagagccctagcagcctgtctgccagcgtgggagacagagtggctatcacctgtagagccagccagagcatcagcagccacctgaactggtatcagcagaagcctggcaaggcccctaagctgctgatctatgccgccagctctctccagagcggagtgcctagcagattttctggcagcggctccggcaccgatttcaccctgacaatatccagcctccagcctgaggacttcgccacctactactgccagcagagctacagcaccccttacacattcggccagggcaccaagctggaaatcaaactcgagcagagcttcggcctgctggaccccaagctgtgctacctgctggatggcatcctgttcatctacggcgtgatcctgaccgccctgttcctgagagtgaagttcagcagaagcgccgacgcccctgcctaccagcagggacagaaccaactgtacaacgagctgaacctgggcagacgggaagagtacgacgtgctggacaagcggagaggcagggaccctgagatgggcggaaagccccagcggagaaagaacccccaggaaggactgtataacgaactccagaaagacaagatggccgaagcctacagcgagatcggcatgaagggcgagcggagaagaggcaagggccacgatggcctgtaccagggcctgagcaccgccaccaaggacacctatgacgccctgcacatgcaggccctgcctccaagaagggccaagcgatctggatctggagcaacaaacttctcactactcaaacaagcaggtgacgtggaggagaatcccgggcctactagtatggactggatttggcgcatccttttccttgtcggcgctgctaccggcgcgcattccttcgaagaagtgcagctggttgaatcaggtggcggcctggttcaacctggcggatctctgagactgagctgtgccgcctccggcttcacctttagcagctactggatgagctgggtccgacaggcccctggcaaaggacttgagtgggtcgccaacatcaagcaggacggcagcgagaagtattacgtggacagcgtgaagggcagattcaccatcagccgggacaacgccaagaacagcctgtacctgcggatgaactccctgagagccgaggataccgccgtgtactattgtgccagagcctggggctacagctcctactacttcgactattggggccagggaaccctggtcaccgtttctccaacgcgtcagagttttgggttgttggaccctaaattgtgctatctgttggacggaatcctgttcatttacggagtgatcctgaccgcattgttcctgcgggttaagttttccagatccgcagacgcacccgcttaccaacaagggcagaaccaactctacaatgaacttaatttggggcggagggaagagtacgacgttctggacaaaaggaggggacgagatcccgagatgggcggaaagcctcagcgaaggaagaatccgcaagaggggctttataacgaactccagaaagataaaatggcagaagcctatagtgagattgggatgaagggagaaaggaggaggggtaaaggtcacgatgggttgtaccaaggattgagcacagccactaaagatacctatgatgcgctccacatgcaggccctgccgccaagacgcgccaagagaagcggatctggcgtgaagcagaccctgaatttcgacctgctgaagctggctggcgacgtggaatccaacccaggcccttctagaggccatatgaccgagtacaagcccacggtgcgcctcgccacccgcgacgacgtccccagggccgtacgcaccctcgccgccgcgttcgccgactaccccgccacgcgccacaccgtcgatccggaccgccacatcgagcgggtcaccgagctgcaagaactcttcctcacgcgcgtcgggctcgacatcggcaaggtgtgggtcgcggacgacggcgccgcggtggcggtctggaccacgccggagagcgtcgaagcgggggcggtgttcgccgagatcggcccgcgcatggccgagttgagcggttcccggctggccgcgcagcaacagatggaaggcctcctggcgccgcaccggcccaaggagcccgcgtggttcctggccaccgtcggcgtctcgcccgaccaccagggcaagggtctgggcagcgccgtcgtgctccccggagtggaggcggccgagcgcgccggggtgcccgccttcctggagacctccgcgccccgcaacctccccttctacgagcggctcggcttcaccgtcaccgccgacgtcgaggtgcccgaaggaccgcgcacctggtgcatgacccgcaagcccggtgcctga

SEQ ID NO: 9645 - DNA, 1938 bp, Artificial Sequence
  Synthetic Polynucloetide
atggccttaccagtgaccgccttgctcctgccgctggccttgctgctccacgccgccaggccggaactccagatgacacagagccctagcagcctgtctgccagcgtgggagacagagtggctatcacctgtagagccagccagagcatcagcagccacctgaactggtatcagcagaagcctggcaaggcccctaagctgctgatctatgccgccagctctctccagagcggagtgcctagcagattttctggcagcggctccggcaccgatttcaccctgacaatatccagcctccagcctgaggacttcgccacctactactgccagcagagctacagcaccccttacacattcggccagggcaccaagctggaaatcaaactcgagggacagcctaaggccaatcctaccgtgacactgttccctccaagcagcgaagaactccaggccaacaaggccacacttgtgtgcctgatctccgacttctaccctggggctgtgacagtggcttggaaggccgatggatctcctgtgaaagccggcgtggaaaccaccaagccatccaagcagagcaacaacaaatacgccgccagctcctacctgagcctgacacctgagcagtggaagtcccacagatcctacagctgccaagtgacccacgaaggcagcaccgtggaaaagacagtggcccctacagagtgcagccccatcaagaccgatgtgattacaatggaccccaaggacaactgctccaaggacgccaacgataccctgctgctccagctgaccaacaccagcgcctactacatgtacttgttgctgctgctgaagtccgtggtgtacttcgccatcatcacatgctgcctgctgcggagaaccgccttctgctgcaacggcgagaagtctagggccaagcgatctggatctggagcaacaaacttctcactactcaaacaagcaggtgacgtggaggagaatcccgggcctactagtatggactggatttggcgcatccttttccttgtcggcgctgctaccggcgcgcattccttcgaagaagtgcagctggttgaatcaggtggcggcctggttcaacctggcggatctctgagactgagctgtgccgcctccggcttcacctttagcagctactggatgagctgggtccgacaggcccctggcaaaggacttgagtgggtcgccaacatcaagcaggacggcagcgagaagtattacgtggacagcgtgaagggcagattcaccatcagccgggacaacgccaagaacagcctgtacctgcggatgaactccctgagagccgaggataccgccgtgtactattgtgccagagcctggggctacagctcctactacttcgactattggggccagggaaccctggtcaccgtttctccaacgcgtgcctctacaaagggaccctccgtgtttcctctggctcccagcagcaagtctacaagcggaggaacagccgctctgggctgcctggtcaaggattactttcccgagcctgtgaccgtgtcctggaatagcggagcactgacaagcggcgtgcacacctttccagccgtgctgcaaagcagcggcctgtactctctgagcagcgtggtcacagtgcctagctctagcctgggcacccagacctacatctgcaatgtgaaccacaagcctagcaacaccaaggtggacaagagagtggaacccaagagctgtgaagtgaaaaccgactccaccgaccacgtgaagcccaaagagacagagaacaccaagcagcccagcaagagctgccacaagcccaaggccatcgtgcacaccgagaaagtgaacatgatgagcctgaccgtgctgggcctgcggatgctgttcgccaaaaccgtggccgtgaacttcctgctgaccgccaagctgttcttcctc

SEQ ID NO: 9646 - DNA, 1872 bp, Artificial Sequence
  Synthetic Polynucloetide
atggccttaccagtgaccgccttgctcctgccgctggccttgctgctccacgccgccaggccggaactccagatgacacagagccctagcagcctgtctgccagcgtgggagacagagtggctatcacctgtagagccagccagagcatcagcagccacctgaactggtatcagcagaagcctggcaaggcccctaagctgctgatctatgccgccagctctctccagagcggagtgcctagcagattttctggcagcggctccggcaccgatttcaccctgacaatatccagcctccagcctgaggacttcgccacctactactgccagcagagctacagcaccccttacacattcggccagggcaccaagctggaaatcaaactcgagggacagcctaaggccaatcctaccgtgacactgttccctccaagcagcgaagaactccaggccaacaaggccacacttgtgtgcctgatctccgacttctaccctggggctgtgacagtggcttggaaggccgatggatctcctgtgaaagccggcgtggaaaccaccaagccatccaagcagagcaacaacaaatacgccgccagctcctacctgagcctgacacctgagcagtggaagtcccacagatcctacagctgccaagtgacccacgaaggcagcaccgtggaaaagacagtggcccctacagagtgcagcggcagagccgattgcggcatcaccagcgccagctaccaccagggcgtgctgagcgccaccatcctgtacgagatcctgctgggcaaggccaccctgtacgccgtgctggtgtctgccctggtgctgatggctatggtcaagcggaaggacagccggggaagggccaagcgatctggatctggagcaacaaacttctcactactcaaacaagcaggtgacgtggaggagaatcccgggcctactagtatggactggatttggcgcatccttttccttgtcggcgctgctaccggcgcgcattccttcgaagaagtgcagctggttgaatcaggtggcggcctggttcaacctggcggatctctgagactgagctgtgccgcctccggcttcacctttagcagctactggatgagctgggtccgacaggcccctggcaaaggacttgagtgggtcgccaacatcaagcaggacggcagcgagaagtattacgtggacagcgtgaagggcagattcaccatcagccgggacaacgccaagaacagcctgtacctgcggatgaactccctgagagccgaggataccgccgtgtactattgtgccagagcctggggctacagctcctactacttcgactattggggccagggaaccctggtcaccgtttctccaacgcgtgcctctacaaagggaccctccgtgtttcctctggctcccagcagcaagtctacaagcggaggaacagccgctctgggctgcctggtcaaggattactttcccgagcctgtgaccgtgtcctggaatagcggagcactgacaagcggcgtgcacacctttccagccgtgctgcaaagcagcggcctgtactctctgagcagcgtggtcacagtgcctagctctagcctgggcacccagacctacatctgcaatgtgaaccacaagcctagcaacaccaaggtggacaagagagtggaacccaagagctgtatccccgaggacacattcttcccaagcagcgacgtgccctgcgacgtgaagctggtggaaaagagcttcgagacagacaccaacctgaacttccagaacctgagcgtgatcggcttcagaatcctgctgctgaaagtggccggctttaacctgctgatgaccctgcggctgtggtccagc

SEQ ID NO: 9647 - DNA, 1872 bp, Artificial Sequence
  Synthetic Polynucloetide
atggccttaccagtgaccgccttgctcctgccgctggccttgctgctccacgccgccaggccggaactccagatgacacagagccctagcagcctgtctgccagcgtgggagacagagtggctatcacctgtagagccagccagagcatcagcagccacctgaactggtatcagcagaagcctggcaaggcccctaagctgctgatctatgccgccagctctctccagagcggagtgcctagcagattttctggcagcggctccggcaccgatttcaccctgacaatatccagcctccagcctgaggacttcgccacctactactgccagcagagctacagcaccccttacacattcggccagggcaccaagctggaaatcaaactcgagggacagcctaaggccaatcctaccgtgacactgttccctccaagcagcgaagaactccaggccaacaaggccacacttgtgtgcctgatctccgacttctaccctggggctgtgacagtggcttggaaggccgatggatctcctgtgaaagccggcgtggaaaccaccaagccatccaagcagagcaacaacaaatacgccgccagctcctacctgagcctgacacctgagcagtggaagtcccacagatcctacagctgccaagtgacccacgaaggcagcaccgtggaaaagacagtggcccctacagagtgcagcggcagagccgattgcggctttaccagcgagagctaccagcagggcgtgctgagcgccaccatcctgtacgagatcctgctgggcaaggccaccctgtacgccgtgctggtgtctgccctggtgctgatggctatggtcaagcggaaggacagccggggaagggccaagcgatctggatctggagcaacaaacttctcactactcaaacaagcaggtgacgtggaggagaatcccgggcctactagtatggactggatttggcgcatccttttccttgtcggcgctgctaccggcgcgcattccttcgaagaagtgcagctggttgaatcaggtggcggcctggttcaacctggcggatctctgagactgagctgtgccgcctccggcttcacctttagcagctactggatgagctgggtccgacaggcccctggcaaaggacttgagtgggtcgccaacatcaagcaggacggcagcgagaagtattacgtggacagcgtgaagggcagattcaccatcagccgggacaacgccaagaacagcctgtacctgcggatgaactccctgagagccgaggataccgccgtgtactattgtgccagagcctggggctacagctcctactacttcgactattggggccagggaaccctggtcaccgtttctccaacgcgtgcctctacaaagggaccctccgtgtttcctctggctcccagcagcaagtctacaagcggaggaacagccgctctgggctgcctggtcaaggattactttcccgagcctgtgaccgtgtcctggaatagcggagcactgacaagcggcgtgcacacctttccagccgtgctgcaaagcagcggcctgtactctctgagcagcgtggtcacagtgcctagctctagcctgggcacccagacctacatctgcaatgtgaaccacaagcctagcaacaccaaggtggacaagagagtggaacccaagagctgtatccccgaggacacattcttcccaagccccgagagcagctgcgacgtgaagctggtggaaaagagcttcgagacagacaccaacctgaacttccagaacctgagcgtgatcggcttcagaatcctgctgctgaaagtggccggctttaacctgctgatgaccctgcggctgtggtccagc

SEQ ID NO: 9648 - DNA, 1350 bp, Artificial Sequence
  Synthetic Polynucloetide
atggccttaccagtgaccgccttgctcctgccgctggccttgctgctccacgccgccaggccggaactccagatgacacagagccctagcagcctgtctgccagcgtgggagacagagtggctatcacctgtagagccagccagagcatcagcagccacctgaactggtatcagcagaagcctggcaaggcccctaagctgctgatctatgccgccagctctctccagagcggagtgcctagcagattttctggcagcggctccggcaccgatttcaccctgacaatatccagcctccagcctgaggacttcgccacctactactgccagcagagctacagcaccccttacacattcggccagggcaccaagctggaaatcaaaggcggaggcggaagtggaggcggaggatctggcggcggaggctctgaagtgcagctggttgaatcaggtggcggcctggttcaacctggcggatctctgagactgagctgtgccgcctccggcttcacctttagcagctactggatgagctgggtccgacaggcccctggcaaaggacttgagtgggtcgccaacatcaagcaggacggcagcgagaagtattacgtggacagcgtgaagggcagattcaccatcagccgggacaacgccaagaacagcctgtacctgcggatgaactccctgagagccgaggataccgccgtgtactattgtgccagagcctggggctacagctcctactacttcgactattggggccagggaaccctggtcaccgtttctccaacgcgtgacggtaacgaggagatgggaggaatcactcaaaccccttacaaagtctcaatttcaggaacaactgttatccttacatgtccccagtatcctggcagcgagatcctttggcagcataacgacaagaatatagggggagatgaagacgataagaatatcggatctgacgaggatcacttgagcctgaaagagttctccgagcttgaacaaagcggatattatgtgtgctatccgcgcgggtcaaagccggaagacgctaacttttacctttatctccgagccagagtgtgcgaaaattgcatggaaatggacgttatgtccgttgctacaatagttatcgtagatatatgcatcacgggtggactgcttctgctggtttattattggtccaagaatagaaaggccaaagctaaacccgtgaccagaggcgctggcgcaggcggaaggcaaaggggacaaaacaaagaacggccaccaccagtgccaaatccagattatgagcctattcggaaaggacagagggacctgtactctggcctgaatcagagaagaatc

SEQ ID NO: 9649 - DNA, 1245 bp, Artificial Sequence
  Synthetic Polynucloetide
atggccttaccagtgaccgccttgctcctgccgctggccttgctgctccacgccgccaggccggaactccagatgacacagagccctagcagcctgtctgccagcgtgggagacagagtggctatcacctgtagagccagccagagcatcagcagccacctgaactggtatcagcagaagcctggcaaggcccctaagctgctgatctatgccgccagctctctccagagcggagtgcctagcagattttctggcagcggctccggcaccgatttcaccctgacaatatccagcctccagcctgaggacttcgccacctactactgccagcagagctacagcaccccttacacattcggccagggcaccaagctggaaatcaaaggcggaggcggaagtggaggcggaggatctggcggcggaggctctgaagtgcagctggttgaatcaggtggcggcctggttcaacctggcggatctctgagactgagctgtgccgcctccggcttcacctttagcagctactggatgagctgggtccgacaggcccctggcaaaggacttgagtgggtcgccaacatcaagcaggacggcagcgagaagtattacgtggacagcgtgaagggcagattcaccatcagccgggacaacgccaagaacagcctgtacctgcggatgaactccctgagagccgaggataccgccgtgtactattgtgccagagcctggggctacagctcctactacttcgactattggggccagggaaccctggtcaccgtttctccaacgcgtttcaagatccccatcgaggaactggaagatcgggtgttcgtgaactgcaacacctctatcacctgggtggaaggcaccgtgggaacactgctgagcgacatcaccagactggacctcggcaagcggattctggaccctcggggcatctacagatgcaacggcaccgacatctacaaggacaaagaaagcaccgtgcaggtccactacagaatgtgccagtcctgcgtggaactggaccctgctacagtggccggcatcatcgtgaccgatgtgatcgctactctgctgctggctctgggagtgttctgcttcgccggacacgaaacaggcagactgtctggcgctgccgatacacaggccctgctgagaaacgaccaagtgtatcagcccctgcgcgacagagatgatgcccagtattctcacctcggcggcaactgggctagaaacaag

SEQ ID NO: 9650 - DNA, 1275 bp, Artificial Sequence
  Synthetic Polynucloetide
atggccttaccagtgaccgccttgctcctgccgctggccttgctgctccacgccgccaggccggaactccagatgacacagagccctagcagcctgtctgccagcgtgggagacagagtggctatcacctgtagagccagccagagcatcagcagccacctgaactggtatcagcagaagcctggcaaggcccctaagctgctgatctatgccgccagctctctccagagcggagtgcctagcagattttctggcagcggctccggcaccgatttcaccctgacaatatccagcctccagcctgaggacttcgccacctactactgccagcagagctacagcaccccttacacattcggccagggcaccaagctggaaatcaaaggcggaggcggaagtggaggcggaggatctggcggcggaggctctgaagtgcagctggttgaatcaggtggcggcctggttcaacctggcggatctctgagactgagctgtgccgcctccggcttcacctttagcagctactggatgagctgggtccgacaggcccctggcaaaggacttgagtgggtcgccaacatcaagcaggacggcagcgagaagtattacgtggacagcgtgaagggcagattcaccatcagccgggacaacgccaagaacagcctgtacctgcggatgaactccctgagagccgaggataccgccgtgtactattgtgccagagcctggggctacagctcctactacttcgactattggggccagggaaccctggtcaccgtttctccaacgcgtcagagcatcaagggcaaccacctggtcaaggtgtacgactaccaagaggacggcagcgtgctgctgacatgtgatgccgaggccaagaacatcacctggtttaaggacggcaagatgatcggcttcctgaccgaggacaagaagaagtggaacctgggcagcaacgctaaggaccccagaggcatgtatcagtgcaagggcagccagaacaagagcaagcccctccaggtgtactaccggatgtgccagaactgcatcgagctgaacgccgctaccatcagcggctttctgttcgccgagatcgtgtccatcttcgtgctggccgtgggcgtgtactttatcgctggacaggatggcgtgcggcagagcagagcttccgataagcaaaccctgctgcctaacgaccagctgtaccagcctctgaaggacagagaggacgaccagtacagccacctccagggcaatcagctgagaagaaac

SEQ ID NO: 9651 - DNA, 1224 bp, Artificial Sequence
  Synthetic Polynucloetide
atggccttaccagtgaccgccttgctcctgccgctggccttgctgctccacgccgccaggccggaactccagatgacacagagccctagcagcctgtctgccagcgtgggagacagagtggctatcacctgtagagccagccagagcatcagcagccacctgaactggtatcagcagaagcctggcaaggcccctaagctgctgatctatgccgccagctctctccagagcggagtgcctagcagattttctggcagcggctccggcaccgatttcaccctgacaatatccagcctccagcctgaggacttcgccacctactactgccagcagagctacagcaccccttacacattcggccagggcaccaagctggaaatcaaaggcggaggcggaagtggaggcggaggatctggcggcggaggctctgaagtgcagctggttgaatcaggtggcggcctggttcaacctggcggatctctgagactgagctgtgccgcctccggcttcacctttagcagctactggatgagctgggtccgacaggcccctggcaaaggacttgagtgggtcgccaacatcaagcaggacggcagcgagaagtattacgtggacagcgtgaagggcagattcaccatcagccgggacaacgccaagaacagcctgtacctgcggatgaactccctgagagccgaggataccgccgtgtactattgtgccagagcctggggctacagctcctactacttcgactattggggccagggaaccctggtcaccgtttctccaacgcgtcagagttttgggttgttggaccctaaattgtgctatctgttggacggaatcctgttcatttacggagtgatcctgaccgcattgttcctgcgggttaagttttccagatccgcagacgcacccgcttaccaacaagggcagaaccaactctacaatgaacttaatttggggcggagggaagagtacgacgttctggacaaaaggaggggacgagatcccgagatgggcggaaagcctcagcgaaggaagaatccgcaagaggggctttataacgaactccagaaagataaaatggcagaagcctatagtgagattgggatgaagggagaaaggaggaggggtaaaggtcacgatgggttgtaccaaggattgagcacagccactaaagatacctatgatgcgctccacatgcaggccctgccgccaaga

SEQ ID NO: 9652 - DNA, 1350 bp, Artificial Sequence
  Synthetic Polynucloetide
atggccttaccagtgaccgccttgctcctgccgctggccttgctgctccacgccgccaggccggaagtgcagctggttgaatcaggtggcggcctggttcaacctggcggatctctgagactgagctgtgccgcctccggcttcacctttagcagctactggatgagctgggtccgacaggcccctggcaaaggacttgagtgggtcgccaacatcaagcaggacggcagcgagaagtattacgtggacagcgtgaagggcagattcaccatcagccgggacaacgccaagaacagcctgtacctgcggatgaactccctgagagccgaggataccgccgtgtactattgtgccagagcctggggctacagctcctactacttcgactattggggccagggaaccctggtcaccgtttctccaggcggaggcggaagtggaggcggaggatctggcggcggaggctctgaactccagatgacacagagccctagcagcctgtctgccagcgtgggagacagagtggctatcacctgtagagccagccagagcatcagcagccacctgaactggtatcagcagaagcctggcaaggcccctaagctgctgatctatgccgccagctctctccagagcggagtgcctagcagattttctggcagcggctccggcaccgatttcaccctgacaatatccagcctccagcctgaggacttcgccacctactactgccagcagagctacagcaccccttacacattcggccagggcaccaagctggaaatcaaaacgcgtgacggtaacgaggagatgggaggaatcactcaaaccccttacaaagtctcaatttcaggaacaactgttatccttacatgtccccagtatcctggcagcgagatcctttggcagcataacgacaagaatatagggggagatgaagacgataagaatatcggatctgacgaggatcacttgagcctgaaagagttctccgagcttgaacaaagcggatattatgtgtgctatccgcgcgggtcaaagccggaagacgctaacttttacctttatctccgagccagagtgtgcgaaaattgcatggaaatggacgttatgtccgttgctacaatagttatcgtagatatatgcatcacgggtggactgcttctgctggtttattattggtccaagaatagaaaggccaaagctaaacccgtgaccagaggcgctggcgcaggcggaaggcaaaggggacaaaacaaagaacggccaccaccagtgccaaatccagattatgagcctattcggaaaggacagagggacctgtactctggcctgaatcagagaagaatc

SEQ ID NO: 9653 - DNA, 1245 bp, Artificial Sequence
  Synthetic Polynucloetide
atggccttaccagtgaccgccttgctcctgccgctggccttgctgctccacgccgccaggccggaagtgcagctggttgaatcaggtggcggcctggttcaacctggcggatctctgagactgagctgtgccgcctccggcttcacctttagcagctactggatgagctgggtccgacaggcccctggcaaaggacttgagtgggtcgccaacatcaagcaggacggcagcgagaagtattacgtggacagcgtgaagggcagattcaccatcagccgggacaacgccaagaacagcctgtacctgcggatgaactccctgagagccgaggataccgccgtgtactattgtgccagagcctggggctacagctcctactacttcgactattggggccagggaaccctggtcaccgtttctccaggcggaggcggaagtggaggcggaggatctggcggcggaggctctgaactccagatgacacagagccctagcagcctgtctgccagcgtgggagacagagtggctatcacctgtagagccagccagagcatcagcagccacctgaactggtatcagcagaagcctggcaaggcccctaagctgctgatctatgccgccagctctctccagagcggagtgcctagcagattttctggcagcggctccggcaccgatttcaccctgacaatatccagcctccagcctgaggacttcgccacctactactgccagcagagctacagcaccccttacacattcggccagggcaccaagctggaaatcaaaacgcgtttcaagatccccatcgaggaactggaagatcgggtgttcgtgaactgcaacacctctatcacctgggtggaaggcaccgtgggaacactgctgagcgacatcaccagactggacctcggcaagcggattctggaccctcggggcatctacagatgcaacggcaccgacatctacaaggacaaagaaagcaccgtgcaggtccactacagaatgtgccagtcctgcgtggaactggaccctgctacagtggccggcatcatcgtgaccgatgtgatcgctactctgctgctggctctgggagtgttctgcttcgccggacacgaaacaggcagactgtctggcgctgccgatacacaggccctgctgagaaacgaccaagtgtatcagcccctgcgcgacagagatgatgcccagtattctcacctcggcggcaactgggctagaaacaag

SEQ ID NO: 9654 - DNA, 1275 bp, Artificial Sequence
  Synthetic Polynucloetide
atggccttaccagtgaccgccttgctcctgccgctggccttgctgctccacgccgccaggccggaagtgcagctggttgaatcaggtggcggcctggttcaacctggcggatctctgagactgagctgtgccgcctccggcttcacctttagcagctactggatgagctgggtccgacaggcccctggcaaaggacttgagtgggtcgccaacatcaagcaggacggcagcgagaagtattacgtggacagcgtgaagggcagattcaccatcagccgggacaacgccaagaacagcctgtacctgcggatgaactccctgagagccgaggataccgccgtgtactattgtgccagagcctggggctacagctcctactacttcgactattggggccagggaaccctggtcaccgtttctccaggcggaggcggaagtggaggcggaggatctggcggcggaggctctgaactccagatgacacagagccctagcagcctgtctgccagcgtgggagacagagtggctatcacctgtagagccagccagagcatcagcagccacctgaactggtatcagcagaagcctggcaaggcccctaagctgctgatctatgccgccagctctctccagagcggagtgcctagcagattttctggcagcggctccggcaccgatttcaccctgacaatatccagcctccagcctgaggacttcgccacctactactgccagcagagctacagcaccccttacacattcggccagggcaccaagctggaaatcaaaacgcgtcagagcatcaagggcaaccacctggtcaaggtgtacgactaccaagaggacggcagcgtgctgctgacatgtgatgccgaggccaagaacatcacctggtttaaggacggcaagatgatcggcttcctgaccgaggacaagaagaagtggaacctgggcagcaacgctaaggaccccagaggcatgtatcagtgcaagggcagccagaacaagagcaagcccctccaggtgtactaccggatgtgccagaactgcatcgagctgaacgccgctaccatcagcggctttctgttcgccgagatcgtgtccatcttcgtgctggccgtgggcgtgtactttatcgctggacaggatggcgtgcggcagagcagagcttccgataagcaaaccctgctgcctaacgaccagctgtaccagcctctgaaggacagagaggacgaccagtacagccacctccagggcaatcagctgagaagaaac

SEQ ID NO: 9655 - DNA, 1224 bp, Artificial Sequence
  Synthetic Polynucloetide
atggccttaccagtgaccgccttgctcctgccgctggccttgctgctccacgccgccaggccggaagtgcagctggttgaatcaggtggcggcctggttcaacctggcggatctctgagactgagctgtgccgcctccggcttcacctttagcagctactggatgagctgggtccgacaggcccctggcaaaggacttgagtgggtcgccaacatcaagcaggacggcagcgagaagtattacgtggacagcgtgaagggcagattcaccatcagccgggacaacgccaagaacagcctgtacctgcggatgaactccctgagagccgaggataccgccgtgtactattgtgccagagcctggggctacagctcctactacttcgactattggggccagggaaccctggtcaccgtttctccaggcggaggcggaagtggaggcggaggatctggcggcggaggctctgaactccagatgacacagagccctagcagcctgtctgccagcgtgggagacagagtggctatcacctgtagagccagccagagcatcagcagccacctgaactggtatcagcagaagcctggcaaggcccctaagctgctgatctatgccgccagctctctccagagcggagtgcctagcagattttctggcagcggctccggcaccgatttcaccctgacaatatccagcctccagcctgaggacttcgccacctactactgccagcagagctacagcaccccttacacattcggccagggcaccaagctggaaatcaaaacgcgtcagagttttgggttgttggaccctaaattgtgctatctgttggacggaatcctgttcatttacggagtgatcctgaccgcattgttcctgcgggttaagttttccagatccgcagacgcacccgcttaccaacaagggcagaaccaactctacaatgaacttaatttggggcggagggaagagtacgacgttctggacaaaaggaggggacgagatcccgagatgggcggaaagcctcagcgaaggaagaatccgcaagaggggctttataacgaactccagaaagataaaatggcagaagcctatagtgagattgggatgaagggagaaaggaggaggggtaaaggtcacgatgggttgtaccaaggattgagcacagccactaaagatacctatgatgcgctccacatgcaggccctgccgccaaga

SEQ ID NO: 9656 - DNA, 1926 bp, Artificial Sequence
  Synthetic Polynucloetide
atggccttaccagtgaccgccttgctcctgccgctggccttgctgctccacgccgccaggccggaactccagatgacacagagccctagcagcctgtctgccagcgtgggagacagagtggctatcacctgtagagccagccagagcatcagcagccacctgaactggtatcagcagaagcctggcaaggcccctaagctgctgatctatgccgccagctctctccagagcggagtgcctagcagattttctggcagcggctccggcaccgatttcaccctgacaatatccagcctccagcctgaggacttcgccacctactactgccagcagagctacagcaccccttacacattcggccagggcaccaagctggaaatcaaaggcggaggcggaagtggaggcggaggatctggcggcggaggctctgaagtgcagctggttgaatcaggtggcggcctggttcaacctggcggatctctgagactgagctgtgccgcctccggcttcacctttagcagctactggatgagctgggtccgacaggcccctggcaaaggacttgagtgggtcgccaacatcaagcaggacggcagcgagaagtattacgtggacagcgtgaagggcagattcaccatcagccgggacaacgccaagaacagcctgtacctgcggatgaactccctgagagccgaggataccgccgtgtactattgtgccagagcctggggctacagctcctactacttcgactattggggccagggaaccctggtcaccgtttctccaacgcgtgggagcggcatccagaaccctgatcctgccgtgtaccagctgcgggatagcaagagcagcgacaagagcgtgtgtctgttcaccgacttcgacagccagaccaacgtgtcccagagcaaggactccgacgtgtacatcaccgataagaccgtgctggacatgcggagcatggacttcaagagcaactccgccgtggcctggtccaacaagtccgatttcgcctgcgccaacgccttcaacaacagcattatccccgaggacacattcttcccaagccccgagagcagctgcgacgtgaagctggtggaaaagagcttcgagacagacaccaacctgaacttccagaacctgagcgtgatcggcttcagaatcctgctgctgaaagtggccggctttaacctgctgatgaccctgcggctgtggtccagccgcgccaagagaagcggatctggcgtgaagcagaccctgaatttcgacctgctgaagctggctggcgacgtggaatccaacccaggcccttctagaggccatatgaccgagtacaagcccacggtgcgcctcgccacccgcgacgacgtccccagggccgtacgcaccctcgccgccgcgttcgccgactaccccgccacgcgccacaccgtcgatccggaccgccacatcgagcgggtcaccgagctgcaagaactcttcctcacgcgcgtcgggctcgacatcggcaaggtgtgggtcgcggacgacggcgccgcggtggcggtctggaccacgccggagagcgtcgaagcgggggcggtgttcgccgagatcggcccgcgcatggccgagttgagcggttcccggctggccgcgcagcaacagatggaaggcctcctggcgccgcaccggcccaaggagcccgcgtggttcctggccaccgtcggcgtctcgcccgaccaccagggcaagggtctgggcagcgccgtcgtgctccccggagtggaggcggccgagcgcgccggggtgcccgccttcctggagacctccgcgccccgcaacctccccttctacgagcggctcggcttcaccgtcaccgccgacgtcgaggtgcccgaaggaccgcgcacctggtgcatgacccgcaagcccggtgcctga

SEQ ID NO: 9657 - DNA, 2022 bp, Artificial Sequence
  Synthetic Polynucloetide
atggccttaccagtgaccgccttgctcctgccgctggccttgctgctccacgccgccaggccggaactccagatgacacagagccctagcagcctgtctgccagcgtgggagacagagtggctatcacctgtagagccagccagagcatcagcagccacctgaactggtatcagcagaagcctggcaaggcccctaagctgctgatctatgccgccagctctctccagagcggagtgcctagcagattttctggcagcggctccggcaccgatttcaccctgacaatatccagcctccagcctgaggacttcgccacctactactgccagcagagctacagcaccccttacacattcggccagggcaccaagctggaaatcaaaggcggaggcggaagtggaggcggaggatctggcggcggaggctctgaagtgcagctggttgaatcaggtggcggcctggttcaacctggcggatctctgagactgagctgtgccgcctccggcttcacctttagcagctactggatgagctgggtccgacaggcccctggcaaaggacttgagtgggtcgccaacatcaagcaggacggcagcgagaagtattacgtggacagcgtgaagggcagattcaccatcagccgggacaacgccaagaacagcctgtacctgcggatgaactccctgagagccgaggataccgccgtgtactattgtgccagagcctggggctacagctcctactacttcgactattggggccagggaaccctggtcaccgtttctccactcgaggacctgaagaacgtgttcccacctgaggtggccgtgttcgagcctagcgaggccgagatcagccacacccagaaagccaccctcgtgtgcctggctaccggcttctaccccgaccatgtggaactgtcttggtgggtcaacggcaaagaggtgcacagcggcgtgtctaccgacccccagccactgaaagaacagcccgccctgaacgacagccggtactgcctgagcagcagactgagagtgtccgccaccttctggcagaacccccggaaccacttcagatgccaggtgcagttctacggcctgagcgagaacgacgagtggacccaggacagagccaagcccgtgacccagatcgtgtctgccgaagcctggggcagagccgattgcggctttaccagcgagagctaccagcagggcgtgctgagcgccaccatcctgtacgagatcctgctgggcaaggccaccctgtacgccgtgctggtgtctgccctggtgctgatggctatggtcaagcggaaggacagccggggaagggccaagcgatctggatctggagcaacaaacttctcactactcaaacaagcaggtgacgtggaggagaatcccgggcctactagaggccatatgaccgagtacaagcccacggtgcgcctcgccacccgcgacgacgtccccagggccgtacgcaccctcgccgccgcgttcgccgactaccccgccacgcgccacaccgtcgatccggaccgccacatcgagcgggtcaccgagctgcaagaactcttcctcacgcgcgtcgggctcgacatcggcaaggtgtgggtcgcggacgacggcgccgcggtggcggtctggaccacgccggagagcgtcgaagcgggggcggtgttcgccgagatcggcccgcgcatggccgagttgagcggttcccggctggccgcgcagcaacagatggaaggcctcctggcgccgcaccggcccaaggagcccgcgtggttcctggccaccgtcggcgtctcgcccgaccaccagggcaagggtctgggcagcgccgtcgtgctccccggagtggaggcggccgagcgcgccggggtgcccgccttcctggagacctccgcgccccgcaacctccccttctacgagcggctcggcttcaccgtcaccgccgacgtcgaggtgcccgaaggaccgcgcacctggtgcatgacccgcaagcccggtgcctga

SEQ ID NO: 9658 - DNA, 2172 bp, Artificial Sequence
  Synthetic Polynucloetide
atggccttaccagtgaccgccttgctcctgccgctggccttgctgctccacgccgccaggccggaactccagatgacacagagccctagcagcctgtctgccagcgtgggagacagagtggctatcacctgtagagccagccagagcatcagcagccacctgaactggtatcagcagaagcctggcaaggcccctaagctgctgatctatgccgccagctctctccagagcggagtgcctagcagattttctggcagcggctccggcaccgatttcaccctgacaatatccagcctccagcctgaggacttcgccacctactactgccagcagagctacagcaccccttacacattcggccagggcaccaagctggaaatcaaaggcggaggcggaagtggaggcggaggatctggcggcggaggctctgaagtgcagctggttgaatcaggtggcggcctggttcaacctggcggatctctgagactgagctgtgccgcctccggcttcacctttagcagctactggatgagctgggtccgacaggcccctggcaaaggacttgagtgggtcgccaacatcaagcaggacggcagcgagaagtattacgtggacagcgtgaagggcagattcaccatcagccgggacaacgccaagaacagcctgtacctgcggatgaactccctgagagccgaggataccgccgtgtactattgtgccagagcctggggctacagctcctactacttcgactattggggccagggaaccctggtcaccgtttctccaacgcgtgagcagaaactgatctcggaagaggatctggggagcggcaccccattcccttctctggcccctcccatcatgctgctggtggacggcaagcagcagatggtggtcgtgtgcctggtgctggatgtggccccacctggactggacagccccatctggtttagcgccggcaatggctctgccctggacgcctttacctacggcccaagccctgccaccgatggcacctggacaaatctggcccacctgagcctgcccagcgaggaactggcttcttgggagcctctcgtgtgccacacaggacctggcgctgagggacacagcagatccacccagcctatgcacctgtctggcgaggccagcaccgccagaacctgtcctcaggaacctctgagaggcacccctggcggagcactgtggctgggagtgctgagactgctgctgttcaagctgctgctgtttgacctgctgctgacctgctcctgtctgtgcgatcctgccggccctctgccttctcctgccaccaccacaagactgagagccctgggcagccacagactgcaccctgccacagagacaggcggcagagaggccacaagcagccctagaccccagcccagagacagaagatggggcgataccccccctggcagaaagcctggatctccagtccgcgccaagagaagcggatctggcgtgaagcagaccctgaatttcgacctgctgaagctggctggcgacgtggaatccaacccaggcccttctagatctagaggccatatgaccgagtacaagcccacggtgcgcctcgccacccgcgacgacgtccccagggccgtacgcaccctcgccgccgcgttcgccgactaccccgccacgcgccacaccgtcgatccggaccgccacatcgagcgggtcaccgagctgcaagaactcttcctcacgcgcgtcgggctcgacatcggcaaggtgtgggtcgcggacgacggcgccgcggtggcggtctggaccacgccggagagcgtcgaagcgggggcggtgttcgccgagatcggcccgcgcatggccgagttgagcggttcccggctggccgcgcagcaacagatggaaggcctcctggcgccgcaccggcccaaggagcccgcgtggttcctggccaccgtcggcgtctcgcccgaccaccagggcaagggtctgggcagcgccgtcgtgctccccggagtggaggcggccgagcgcgccggggtgcccgccttcctggagacctccgcgccccgcaacctccccttctacgagcggctcggcttcaccgtcaccgccgacgtcgaggtgcccgaaggaccgcgcacctggtgcatgacccgcaagcccggtgcctga

SEQ ID NO: 9659 - DNA, 1617 bp, Artificial Sequence
  Synthetic Polynucloetide
atggccttaccagtgaccgccttgctcctgccgctggccttgctgctccacgccgccaggccggaactccagatgacacagagccctagcagcctgtctgccagcgtgggagacagagtggctatcacctgtagagccagccagagcatcagcagccacctgaactggtatcagcagaagcctggcaaggcccctaagctgctgatctatgccgccagctctctccagagcggagtgcctagcagattttctggcagcggctccggcaccgatttcaccctgacaatatccagcctccagcctgaggacttcgccacctactactgccagcagagctacagcaccccttacacattcggccagggcaccaagctggaaatcaaactcgaggacctgaagaacgtgttcccacctgaggtggccgtgttcgagcctagcgaggccgagatcagccacacccagaaagccaccctcgtgtgcctggctaccggcttctaccccgaccatgtggaactgtcttggtgggtcaacggcaaagaggtgcacagcggcgtgtctaccgacccccagccactgaaagaacagcccgccctgaacgacagccggtactgcctgagcagcagactgagagtgtccgccaccttctggcagaacccccggaaccacttcagatgccaggtgcagttctacggcctgagcgagaacgacgagtggacccaggacagagccaagcccgtgacccagatcgtgtctgccgaagcctggggcagagccgattgcggctttaccagcgagagctaccagcagggcgtgctgagcgccaccatcctgtacgagatcctgctgggcaaggccaccctgtacgccgtgctggtgtctgccctggtgctgatggctatggtcaagcggaaggacagccggggaagggccaagcgatctggatctggagcaacaaacttctcactactcaaacaagcaggtgacgtggaggagaatcccgggcctactagaggccatatgaccgagtacaagcccacggtgcgcctcgccacccgcgacgacgtccccagggccgtacgcaccctcgccgccgcgttcgccgactaccccgccacgcgccacaccgtcgatccggaccgccacatcgagcgggtcaccgagctgcaagaactcttcctcacgcgcgtcgggctcgacatcggcaaggtgtgggtcgcggacgacggcgccgcggtggcggtctggaccacgccggagagcgtcgaagcgggggcggtgttcgccgagatcggcccgcgcatggccgagttgagcggttcccggctggccgcgcagcaacagatggaaggcctcctggcgccgcaccggcccaaggagcccgcgtggttcctggccaccgtcggcgtctcgcccgaccaccagggcaagggtctgggcagcgccgtcgtgctccccggagtggaggcggccgagcgcgccggggtgcccgccttcctggagacctccgcgccccgcaacctccccttctacgagcggctcggcttcaccgtcaccgccgacgtcgaggtgcccgaaggaccgcgcacctggtgcatgacccgcaagcccggtgcctga

SEQ ID NO: 9660 - DNA, 924 bp, Artificial Sequence
  Synthetic Polynucloetide
atggccttaccagtgaccgccttgctcctgccgctggccttgctgctccacgccgccaggccggaactccagatgacacagagccctagcagcctgtctgccagcgtgggagacagagtggctatcacctgtagagccagccagagcatcagcagccacctgaactggtatcagcagaagcctggcaaggcccctaagctgctgatctatgccgccagctctctccagagcggagtgcctagcagattttctggcagcggctccggcaccgatttcaccctgacaatatccagcctccagcctgaggacttcgccacctactactgccagcagagctacagcaccccttacacattcggccagggcaccaagctggaaatcaaactcgaggacctgaagaacgtgttcccacctgaggtggccgtgttcgagcctagcgaggccgagatcagccacacccagaaagccaccctcgtgtgcctggctaccggcttctaccccgaccatgtggaactgtcttggtgggtcaacggcaaagaggtgcacagcggcgtgtctaccgacccccagccactgaaagaacagcccgccctgaacgacagccggtactgcctgagcagcagactgagagtgtccgccaccttctggcagaacccccggaaccacttcagatgccaggtgcagttctacggcctgagcgagaacgacgagtggacccaggacagagccaagcccgtgacccagatcgtgtctgccgaagcctggggcagagccgattgcggctttaccagcgagagctaccagcagggcgtgctgagcgccaccatcctgtacgagatcctgctgggcaaggccaccctgtacgccgtgctggtgtctgccctggtgctgatggctatggtcaagcggaaggacagccgggga

SEQ ID NO: 9661 - DNA, 1350 bp, Artificial Sequence
  Synthetic Polynucloetide
atggactggatttggcgcatccttttccttgtcggcgctgctaccggcgcgcattccttcgaagaagtgcagctggttgaatcaggtggcggcctggttcaacctggcggatctctgagactgagctgtgccgcctccggcttcacctttagcagctactggatgagctgggtccgacaggcccctggcaaaggacttgagtgggtcgccaacatcaagcaggacggcagcgagaagtattacgtggacagcgtgaagggcagattcaccatcagccgggacaacgccaagaacagcctgtacctgcggatgaactccctgagagccgaggataccgccgtgtactattgtgccagagcctggggctacagctcctactacttcgactattggggccagggaaccctggtcaccgtttctccaacgcgtatccagaaccctgatcctgccgtgtaccagctgcgggatagcaagagcagcgacaagagcgtgtgtctgttcaccgacttcgacagccagaccaacgtgtcccagagcaaggactccgacgtgtacatcaccgataagaccgtgctggacatgcggagcatggacttcaagagcaactccgccgtggcctggtccaacaagtccgatttcgcctgcgccaacgccttcaacaacagcattatccccgaggacacattcttcccaagccccgagagcagctgcgacgtgaagctggtggaaaagagcttcgagacagacaccaacctgaacttccagaacctgagcgtgatcggcttcagaatcctgctgctgaaagtggccggctttaacctgctgatgaccctgcggctgtggtccagccgcgccaagagaagcggatctggcgtgaagcagaccctgaatttcgacctgctgaagctggctggcgacgtggaatccaacccaggcccttctagaggccatatggccaagcctttgtctcaagaagaatccaccctcattgaaagagcaacggctacaatcaacagcatccccatctctgaagactacagcgtcgccagcgcagctctctctagcgacggccgcatcttcactggtgtcaatgtatatcattttactgggggaccttgtgcagaactcgtggtgctgggcactgctgctgctgcggcagctggcaacctgacttgtatcgtcgcgatcggaaatgagaacaggggcatcttgagcccctgcggacggtgccgacaggtgcttctcgatctgcatcctgggatcaaagccatagtgaaggacagtgatggacagccgacggcagttgggattcgtgaattgctgccctctggttatgtgtgggagggctga

SEQ ID NO: 9662 - DNA, 849 bp, Artificial Sequence
  Synthetic Polynucloetide
atggactggatttggcgcatccttttccttgtcggcgctgctaccggcgcgcattccttcgaagaagtgcagctggttgaatcaggtggcggcctggttcaacctggcggatctctgagactgagctgtgccgcctccggcttcacctttagcagctactggatgagctgggtccgacaggcccctggcaaaggacttgagtgggtcgccaacatcaagcaggacggcagcgagaagtattacgtggacagcgtgaagggcagattcaccatcagccgggacaacgccaagaacagcctgtacctgcggatgaactccctgagagccgaggataccgccgtgtactattgtgccagagcctggggctacagctcctactacttcgactattggggccagggaaccctggtcaccgtttctccaacgcgtatccagaaccctgatcctgccgtgtaccagctgcgggatagcaagagcagcgacaagagcgtgtgtctgttcaccgacttcgacagccagaccaacgtgtcccagagcaaggactccgacgtgtacatcaccgataagaccgtgctggacatgcggagcatggacttcaagagcaactccgccgtggcctggtccaacaagtccgatttcgcctgcgccaacgccttcaacaacagcattatccccgaggacacattcttcccaagccccgagagcagctgcgacgtgaagctggtggaaaagagcttcgagacagacaccaacctgaacttccagaacctgagcgtgatcggcttcagaatcctgctgctgaaagtggccggctttaacctgctgatgaccctgcggctgtggtccagc

SEQ ID NO: 9663 - DNA, 1671 bp, Artificial Sequence
  Synthetic Polynucloetide
atggccttaccagtgaccgccttgctcctgccgctggccttgctgctccacgccgccaggccggaactccagatgacacagagccctagcagcctgtctgccagcgtgggagacagagtggctatcacctgtagagccagccagagcatcagcagccacctgaactggtatcagcagaagcctggcaaggcccctaagctgctgatctatgccgccagctctctccagagcggagtgcctagcagattttctggcagcggctccggcaccgatttcaccctgacaatatccagcctccagcctgaggacttcgccacctactactgccagcagagctacagcaccccttacacattcggccagggcaccaagctggaaatcaaactcgaggggaaaccaattcccaaccctcttctgggactggattcaaccggcagcggcgaggacctgaagaacgtgttcccacctgaggtggccgtgttcgagcctagcgaggccgagatcagccacacccagaaagccaccctcgtgtgcctggctaccggcttctaccccgaccatgtggaactgtcttggtgggtcaacggcaaagaggtgcacagcggcgtgtgtaccgacccccagccactgaaagaacagcccgccctgaacgacagccggtactgcctgagcagcagactgagagtgtccgccaccttctggcagaacccccggaaccacttcagatgccaggtgcagttctacggcctgagcgagaacgacgagtggacccaggacagagccaagcccgtgacccagatcgtgtctgccgaagcctggggcagagccgattgcggctttaccagcgagagctaccagcagggcgtgctgagcgccaccatcctgtacgagatcctgctgggcaaggccaccctgtacgccgtgctggtgtctgccctggtgctgatggctatggtcaagcggaaggacagccggggaagggccaagcgatctggatctggagcaacaaacttctcactactcaaacaagcaggtgacgtggaggagaatcccgggcctactagaggccatatgaccgagtacaagcccacggtgcgcctcgccacccgcgacgacgtccccagggccgtacgcaccctcgccgccgcgttcgccgactaccccgccacgcgccacaccgtcgatccggaccgccacatcgagcgggtcaccgagctgcaagaactcttcctcacgcgcgtcgggctcgacatcggcaaggtgtgggtcgcggacgacggcgccgcggtggcggtctggaccacgccggagagcgtcgaagcgggggcggtgttcgccgagatcggcccgcgcatggccgagttgagcggttcccggctggccgcgcagcaacagatggaaggcctcctggcgccgcaccggcccaaggagcccgcgtggttcctggccaccgtcggcgtctcgcccgaccaccagggcaagggtctgggcagcgccgtcgtgctccccggagtggaggcggccgagcgcgccggggtgcccgccttcctggagacctccgcgccccgcaacctccccttctacgagcggctcggcttcaccgtcaccgccgacgtcgaggtgcccgaaggaccgcgcacctggtgcatgacccgcaagcccggtgcctga

SEQ ID NO: 9664 - DNA, 981 bp, Artificial Sequence
  Synthetic Polynucloetide
atggccttaccagtgaccgccttgctcctgccgctggccttgctgctccacgccgccaggccggaactccagatgacacagagccctagcagcctgtctgccagcgtgggagacagagtggctatcacctgtagagccagccagagcatcagcagccacctgaactggtatcagcagaagcctggcaaggcccctaagctgctgatctatgccgccagctctctccagagcggagtgcctagcagattttctggcagcggctccggcaccgatttcaccctgacaatatccagcctccagcctgaggacttcgccacctactactgccagcagagctacagcaccccttacacattcggccagggcaccaagctggaaatcaaactcgaggggaaaccaattcccaaccctcttctgggactggattcaaccggcagcggcgaggacctgaagaacgtgttcccacctgaggtggccgtgttcgagcctagcgaggccgagatcagccacacccagaaagccaccctcgtgtgcctggctaccggcttctaccccgaccatgtggaactgtcttggtgggtcaacggcaaagaggtgcacagcggcgtgtgtaccgacccccagccactgaaagaacagcccgccctgaacgacagccggtactgcctgagcagcagactgagagtgtccgccaccttctggcagaacccccggaaccacttcagatgccaggtgcagttctacggcctgagcgagaacgacgagtggacccaggacagagccaagcccgtgacccagatcgtgtctgccgaagcctggggcagagccgattgcggctttaccagcgagagctaccagcagggcgtgctgagcgccaccatcctgtacgagatcctgctgggcaaggccaccctgtacgccgtgctggtgtctgccctggtgctgatggctatggtcaagcggaaggacagccggggatga

SEQ ID NO: 9665 - DNA, 1386 bp, Artificial Sequence
  Synthetic Polynucloetide
atggactggatttggcgcatccttttccttgtcggcgctgctaccggcgcgcattccttcgaagaagtgcagctggttgaatcaggtggcggcctggttcaacctggcggatctctgagactgagctgtgccgcctccggcttcacctttagcagctactggatgagctgggtccgacaggcccctggcaaaggacttgagtgggtcgccaacatcaagcaggacggcagcgagaagtattacgtggacagcgtgaagggcagattcaccatcagccgggacaacgccaagaacagcctgtacctgcggatgaactccctgagagccgaggataccgccgtgtactattgtgccagagcctggggctacagctcctactacttcgactattggggccagggaaccctggtcaccgtttctccaacgcgtgagcagaaactgatctcggaagaggatgggagcggcatccagaaccctgatcctgccgtgtaccagctgcgggatagcaagagcagcgacaagagcgtgtgtctgttcaccgacttcgacagccagaccaacgtgtcccagagcaaggactccgacgtgtacatcaccgataagtgcgtgctggacatgcggagcatggacttcaagagcaactccgccgtggcctggtccaacaagtccgatttcgcctgcgccaacgccttcaacaacagcattatccccgaggacacattcttcccaagccccgagagcagctgcgacgtgaagctggtggaaaagagcttcgagacagacaccaacctgaacttccagaacctgagcgtgatcggcttcagaatcctgctgctgaaagtggccggctttaacctgctgatgaccctgcggctgtggtccagccgcgccaagagaagcggatctggcgtgaagcagaccctgaatttcgacctgctgaagctggctggcgacgtggaatccaacccaggcccttctagaggccatatggccaagcctttgtctcaagaagaatccaccctcattgaaagagcaacggctacaatcaacagcatccccatctctgaagactacagcgtcgccagcgcagctctctctagcgacggccgcatcttcactggtgtcaatgtatatcattttactgggggaccttgtgcagaactcgtggtgctgggcactgctgctgctgcggcagctggcaacctgacttgtatcgtcgcgatcggaaatgagaacaggggcatcttgagcccctgcggacggtgccgacaggtgcttctcgatctgcatcctgggatcaaagccatagtgaaggacagtgatggacagccgacggcagttgggattcgtgaattgctgccctctggttatgtgtgggagggctga

SEQ ID NO: 9666 - DNA, 888 bp, Artificial Sequence
  Synthetic Polynucloetide
atggactggatttggcgcatccttttccttgtcggcgctgctaccggcgcgcattccttcgaagaagtgcagctggttgaatcaggtggcggcctggttcaacctggcggatctctgagactgagctgtgccgcctccggcttcacctttagcagctactggatgagctgggtccgacaggcccctggcaaaggacttgagtgggtcgccaacatcaagcaggacggcagcgagaagtattacgtggacagcgtgaagggcagattcaccatcagccgggacaacgccaagaacagcctgtacctgcggatgaactccctgagagccgaggataccgccgtgtactattgtgccagagcctggggctacagctcctactacttcgactattggggccagggaaccctggtcaccgtttctccaacgcgtgagcagaaactgatctcggaagaggatgggagcggcatccagaaccctgatcctgccgtgtaccagctgcgggatagcaagagcagcgacaagagcgtgtgtctgttcaccgacttcgacagccagaccaacgtgtcccagagcaaggactccgacgtgtacatcaccgataagtgcgtgctggacatgcggagcatggacttcaagagcaactccgccgtggcctggtccaacaagtccgatttcgcctgcgccaacgccttcaacaacagcattatccccgaggacacattcttcccaagccccgagagcagctgcgacgtgaagctggtggaaaagagcttcgagacagacaccaacctgaacttccagaacctgagcgtgatcggcttcagaatcctgctgctgaaagtggccggctttaacctgctgatgaccctgcggctgtggtccagctga

SEQ ID NO: 9667 - DNA, 1926 bp, Artificial Sequence
  Synthetic Polynucloetide
atggccttaccagtgaccgccttgctcctgccgctggccttgctgctccacgccgccaggccggaactccagatgacacagagccctagcagcctgtctgccagcgtgggagacagagtggctatcacctgtagagccagccagagcatcagcagccacctgaactggtatcagcagaagcctggcaaggcccctaagctgctgatctatgccgccagctctctccagagcggagtgcctagcagattttctggcagcggctccggcaccgatttcaccctgacaatatccagcctccagcctgaggacttcgccacctactactgccagcagagctacagcaccccttacacattcggccagggcaccaagctggaaatcaaaggcggaggcggaagtggaggcggaggatctggcggcggaggctctgaagtgcagctggttgaatcaggtggcggcctggttcaacctggcggatctctgagactgagctgtgccgcctccggcttcacctttagcagctactggatgagctgggtccgacaggcccctggcaaaggacttgagtgggtcgccaacatcaagcaggacggcagcgagaagtattacgtggacagcgtgaagggcagattcaccatcagccgggacaacgccaagaacagcctgtacctgcggatgaactccctgagagccgaggataccgccgtgtactattgtgccagagcctggggctacagctcctactacttcgactattggggccagggaaccctggtcaccgtttctccaacgcgtgggagcggcatccagaaccctgatcctgccgtgtaccagctgcgggatagcaagagcagcgacaagagcgtgtgtctgttcaccgacttcgacagccagaccaacgtgtcccagagcaaggactccgacgtgtacatcaccgataagaccgtgctggacatgcggagcatggacttcaagagcaactccgccgtggcctggtccaacaagtccgatttcgcctgcgccaacgccttcaacaacagcattatccccgaggacacattcttcccaagcagcgacgtgccctgcgacgtgaagctggtggaaaagagcttcgagacagacaccaacctgaacttccagaacctgagcgtgatcggcttcagaatcctgctgctgaaagtggccggctttaacctgctgatgaccctgcggctgtggtccagccgcgccaagagaagcggatctggcgtgaagcagaccctgaatttcgacctgctgaagctggctggcgacgtggaatccaacccaggcccttctagaggccatatgaccgagtacaagcccacggtgcgcctcgccacccgcgacgacgtccccagggccgtacgcaccctcgccgccgcgttcgccgactaccccgccacgcgccacaccgtcgatccggaccgccacatcgagcgggtcaccgagctgcaagaactcttcctcacgcgcgtcgggctcgacatcggcaaggtgtgggtcgcggacgacggcgccgcggtggcggtctggaccacgccggagagcgtcgaagcgggggcggtgttcgccgagatcggcccgcgcatggccgagttgagcggttcccggctggccgcgcagcaacagatggaaggcctcctggcgccgcaccggcccaaggagcccgcgtggttcctggccaccgtcggcgtctcgcccgaccaccagggcaagggtctgggcagcgccgtcgtgctccccggagtggaggcggccgagcgcgccggggtgcccgccttcctggagacctccgcgccccgcaacctccccttctacgagcggctcggcttcaccgtcaccgccgacgtcgaggtgcccgaaggaccgcgcacctggtgcatgacccgcaagcccggtgcctga

SEQ ID NO: 9668 - DNA, 2022 bp, Artificial Sequence
  Synthetic Polynucloetide
atggccttaccagtgaccgccttgctcctgccgctggccttgctgctccacgccgccaggccggaactccagatgacacagagccctagcagcctgtctgccagcgtgggagacagagtggctatcacctgtagagccagccagagcatcagcagccacctgaactggtatcagcagaagcctggcaaggcccctaagctgctgatctatgccgccagctctctccagagcggagtgcctagcagattttctggcagcggctccggcaccgatttcaccctgacaatatccagcctccagcctgaggacttcgccacctactactgccagcagagctacagcaccccttacacattcggccagggcaccaagctggaaatcaaaggcggaggcggaagtggaggcggaggatctggcggcggaggctctgaagtgcagctggttgaatcaggtggcggcctggttcaacctggcggatctctgagactgagctgtgccgcctccggcttcacctttagcagctactggatgagctgggtccgacaggcccctggcaaaggacttgagtgggtcgccaacatcaagcaggacggcagcgagaagtattacgtggacagcgtgaagggcagattcaccatcagccgggacaacgccaagaacagcctgtacctgcggatgaactccctgagagccgaggataccgccgtgtactattgtgccagagcctggggctacagctcctactacttcgactattggggccagggaaccctggtcaccgtttctccactcgaggacctgaagaacgtgttcccacctgaggtggccgtgttcgagcctagcaaggccgagatcgcccacacccagaaagccaccctcgtgtgcctggctaccggcttctaccccgaccatgtggaactgtcttggtgggtcaacggcaaagaggtgcacagcggcgtgtctaccgacccccagccactgaaagaacagcccgccctgaacgacagccggtactgcctgagcagcagactgagagtgtccgccaccttctggcagaacccccggaaccacttcagatgccaggtgcagttctacggcctgagcgagaacgacgagtggacccaggacagagccaagcccgtgacccagatcgtgtctgccgaagcctggggcagagccgattgcggcatcaccagcgccagctaccaccagggcgtgctgagcgccaccatcctgtacgagatcctgctgggcaaggccaccctgtacgccgtgctggtgtctgccctggtgctgatggctatggtcaagcggaaggacagccggggaagggccaagcgatctggatctggagcaacaaacttctcactactcaaacaagcaggtgacgtggaggagaatcccgggcctactagaggccatatgaccgagtacaagcccacggtgcgcctcgccacccgcgacgacgtccccagggccgtacgcaccctcgccgccgcgttcgccgactaccccgccacgcgccacaccgtcgatccggaccgccacatcgagcgggtcaccgagctgcaagaactcttcctcacgcgcgtcgggctcgacatcggcaaggtgtgggtcgcggacgacggcgccgcggtggcggtctggaccacgccggagagcgtcgaagcgggggcggtgttcgccgagatcggcccgcgcatggccgagttgagcggttcccggctggccgcgcagcaacagatggaaggcctcctggcgccgcaccggcccaaggagcccgcgtggttcctggccaccgtcggcgtctcgcccgaccaccagggcaagggtctgggcagcgccgtcgtgctccccggagtggaggcggccgagcgcgccggggtgcccgccttcctggagacctccgcgccccgcaacctccccttctacgagcggctcggcttcaccgtcaccgccgacgtcgaggtgcccgaaggaccgcgcacctggtgcatgacccgcaagcccggtgcctga

SEQ ID NO: 9669 - DNA, 2091 bp, Artificial Sequence
  Synthetic Polynucloetide
atggccttaccagtgaccgccttgctcctgccgctggccttgctgctccacgccgccaggccggaactccagatgacacagagccctagcagcctgtctgccagcgtgggagacagagtggctatcacctgtagagccagccagagcatcagcagccacctgaactggtatcagcagaagcctggcaaggcccctaagctgctgatctatgccgccagctctctccagagcggagtgcctagcagattttctggcagcggctccggcaccgatttcaccctgacaatatccagcctccagcctgaggacttcgccacctactactgccagcagagctacagcaccccttacacattcggccagggcaccaagctggaaatcaaaggcggaggcggaagtggaggcggaggatctggcggcggaggctctgaagtgcagctggttgaatcaggtggcggcctggttcaacctggcggatctctgagactgagctgtgccgcctccggcttcacctttagcagctactggatgagctgggtccgacaggcccctggcaaaggacttgagtgggtcgccaacatcaagcaggacggcagcgagaagtattacgtggacagcgtgaagggcagattcaccatcagccgggacaacgccaagaacagcctgtacctgcggatgaactccctgagagccgaggataccgccgtgtactattgtgccagagcctggggctacagctcctactacttcgactattggggccagggaaccctggtcaccgtttctccaacgcgtgggtctggaggcggaggcagcggcggaggcgggagcggcgacggtaacgaggagatgggaggaatcactcaaaccccttacaaagtctcaatttcaggaacaactgttatccttacatgtccccagtatcctggcagcgagatcctttggcagcataacgacaagaatatagggggagatgaagacgataagaatatcggatctgacgaggatcacttgagcctgaaagagttctccgagcttgaacaaagcggatattatgtgtgctatccgcgcgggtcaaagccggaagacgctaacttttacctttatctccgagccagagtgtgcgaaaattgcatggaaatggacgttatgtccgttgctacaatagttatcgtagatatatgcatcacgggtggactgcttctgctggtttattattggtccaagaatagaaaggccaaagctaaacccgtgaccagaggcgctggcgcaggcggaaggcaaaggggacaaaacaaagaacggccaccaccagtgccaaatccagattatgagcctattcggaaaggacagagggacctgtactctggcctgaatcagagaagaatccgcgccaagagaagcggatctggcgtgaagcagaccctgaatttcgacctgctgaagctggctggcgacgtggaatccaacccaggcccttctagaggccatatgaccgagtacaagcccacggtgcgcctcgccacccgcgacgacgtccccagggccgtacgcaccctcgccgccgcgttcgccgactaccccgccacgcgccacaccgtcgatccggaccgccacatcgagcgggtcaccgagctgcaagaactcttcctcacgcgcgtcgggctcgacatcggcaaggtgtgggtcgcggacgacggcgccgcggtggcggtctggaccacgccggagagcgtcgaagcgggggcggtgttcgccgagatcggcccgcgcatggccgagttgagcggttcccggctggccgcgcagcaacagatggaaggcctcctggcgccgcaccggcccaaggagcccgcgtggttcctggccaccgtcggcgtctcgcccgaccaccagggcaagggtctgggcagcgccgtcgtgctccccggagtggaggcggccgagcgcgccggggtgcccgccttcctggagacctccgcgccccgcaacctccccttctacgagcggctcggcttcaccgtcaccgccgacgtcgaggtgcccgaaggaccgcgcacctggtgcatgacccgcaagcccggtgcctga

SEQ ID NO: 9670 - DNA, 1986 bp, Artificial Sequence
  Synthetic Polynucloetide
atggccttaccagtgaccgccttgctcctgccgctggccttgctgctccacgccgccaggccggaactccagatgacacagagccctagcagcctgtctgccagcgtgggagacagagtggctatcacctgtagagccagccagagcatcagcagccacctgaactggtatcagcagaagcctggcaaggcccctaagctgctgatctatgccgccagctctctccagagcggagtgcctagcagattttctggcagcggctccggcaccgatttcaccctgacaatatccagcctccagcctgaggacttcgccacctactactgccagcagagctacagcaccccttacacattcggccagggcaccaagctggaaatcaaaggcggaggcggaagtggaggcggaggatctggcggcggaggctctgaagtgcagctggttgaatcaggtggcggcctggttcaacctggcggatctctgagactgagctgtgccgcctccggcttcacctttagcagctactggatgagctgggtccgacaggcccctggcaaaggacttgagtgggtcgccaacatcaagcaggacggcagcgagaagtattacgtggacagcgtgaagggcagattcaccatcagccgggacaacgccaagaacagcctgtacctgcggatgaactccctgagagccgaggataccgccgtgtactattgtgccagagcctggggctacagctcctactacttcgactattggggccagggaaccctggtcaccgtttctccaacgcgtgggtctggaggcggaggcagcggcggaggcgggagcggcttcaagatccccatcgaggaactggaagatcgggtgttcgtgaactgcaacacctctatcacctgggtggaaggcaccgtgggaacactgctgagcgacatcaccagactggacctcggcaagcggattctggaccctcggggcatctacagatgcaacggcaccgacatctacaaggacaaagaaagcaccgtgcaggtccactacagaatgtgccagtcctgcgtggaactggaccctgctacagtggccggcatcatcgtgaccgatgtgatcgctactctgctgctggctctgggagtgttctgcttcgccggacacgaaacaggcagactgtctggcgctgccgatacacaggccctgctgagaaacgaccaagtgtatcagcccctgcgcgacagagatgatgcccagtattctcacctcggcggcaactgggctagaaacaagcgcgccaagagaagcggatctggcgtgaagcagaccctgaatttcgacctgctgaagctggctggcgacgtggaatccaacccaggcccttctagaggccatatgaccgagtacaagcccacggtgcgcctcgccacccgcgacgacgtccccagggccgtacgcaccctcgccgccgcgttcgccgactaccccgccacgcgccacaccgtcgatccggaccgccacatcgagcgggtcaccgagctgcaagaactcttcctcacgcgcgtcgggctcgacatcggcaaggtgtgggtcgcggacgacggcgccgcggtggcggtctggaccacgccggagagcgtcgaagcgggggcggtgttcgccgagatcggcccgcgcatggccgagttgagcggttcccggctggccgcgcagcaacagatggaaggcctcctggcgccgcaccggcccaaggagcccgcgtggttcctggccaccgtcggcgtctcgcccgaccaccagggcaagggtctgggcagcgccgtcgtgctccccggagtggaggcggccgagcgcgccggggtgcccgccttcctggagacctccgcgccccgcaacctccccttctacgagcggctcggcttcaccgtcaccgccgacgtcgaggtgcccgaaggaccgcgcacctggtgcatgacccgcaagcccggtgcctga

SEQ ID NO: 9671 - DNA, 2016 bp, Artificial Sequence
  Synthetic Polynucloetide
atggccttaccagtgaccgccttgctcctgccgctggccttgctgctccacgccgccaggccggaactccagatgacacagagccctagcagcctgtctgccagcgtgggagacagagtggctatcacctgtagagccagccagagcatcagcagccacctgaactggtatcagcagaagcctggcaaggcccctaagctgctgatctatgccgccagctctctccagagcggagtgcctagcagattttctggcagcggctccggcaccgatttcaccctgacaatatccagcctccagcctgaggacttcgccacctactactgccagcagagctacagcaccccttacacattcggccagggcaccaagctggaaatcaaaggcggaggcggaagtggaggcggaggatctggcggcggaggctctgaagtgcagctggttgaatcaggtggcggcctggttcaacctggcggatctctgagactgagctgtgccgcctccggcttcacctttagcagctactggatgagctgggtccgacaggcccctggcaaaggacttgagtgggtcgccaacatcaagcaggacggcagcgagaagtattacgtggacagcgtgaagggcagattcaccatcagccgggacaacgccaagaacagcctgtacctgcggatgaactccctgagagccgaggataccgccgtgtactattgtgccagagcctggggctacagctcctactacttcgactattggggccagggaaccctggtcaccgtttctccaacgcgtgggtctggaggcggaggcagcggcggaggcgggagcggccagagcatcaagggcaaccacctggtcaaggtgtacgactaccaagaggacggcagcgtgctgctgacatgtgatgccgaggccaagaacatcacctggtttaaggacggcaagatgatcggcttcctgaccgaggacaagaagaagtggaacctgggcagcaacgctaaggaccccagaggcatgtatcagtgcaagggcagccagaacaagagcaagcccctccaggtgtactaccggatgtgccagaactgcatcgagctgaacgccgctaccatcagcggctttctgttcgccgagatcgtgtccatcttcgtgctggccgtgggcgtgtactttatcgctggacaggatggcgtgcggcagagcagagcttccgataagcaaaccctgctgcctaacgaccagctgtaccagcctctgaaggacagagaggacgaccagtacagccacctccagggcaatcagctgagaagaaaccgcgccaagagaagcggatctggcgtgaagcagaccctgaatttcgacctgctgaagctggctggcgacgtggaatccaacccaggcccttctagaggccatatgaccgagtacaagcccacggtgcgcctcgccacccgcgacgacgtccccagggccgtacgcaccctcgccgccgcgttcgccgactaccccgccacgcgccacaccgtcgatccggaccgccacatcgagcgggtcaccgagctgcaagaactcttcctcacgcgcgtcgggctcgacatcggcaaggtgtgggtcgcggacgacggcgccgcggtggcggtctggaccacgccggagagcgtcgaagcgggggcggtgttcgccgagatcggcccgcgcatggccgagttgagcggttcccggctggccgcgcagcaacagatggaaggcctcctggcgccgcaccggcccaaggagcccgcgtggttcctggccaccgtcggcgtctcgcccgaccaccagggcaagggtctgggcagcgccgtcgtgctccccggagtggaggcggccgagcgcgccggggtgcccgccttcctggagacctccgcgccccgcaacctccccttctacgagcggctcggcttcaccgtcaccgccgacgtcgaggtgcccgaaggaccgcgcacctggtgcatgacccgcaagcccggtgcctga

SEQ ID NO: 9672 - DNA, 1965 bp, Artificial Sequence
  Synthetic Polynucloetide
atggccttaccagtgaccgccttgctcctgccgctggccttgctgctccacgccgccaggccggaactccagatgacacagagccctagcagcctgtctgccagcgtgggagacagagtggctatcacctgtagagccagccagagcatcagcagccacctgaactggtatcagcagaagcctggcaaggcccctaagctgctgatctatgccgccagctctctccagagcggagtgcctagcagattttctggcagcggctccggcaccgatttcaccctgacaatatccagcctccagcctgaggacttcgccacctactactgccagcagagctacagcaccccttacacattcggccagggcaccaagctggaaatcaaaggcggaggcggaagtggaggcggaggatctggcggcggaggctctgaagtgcagctggttgaatcaggtggcggcctggttcaacctggcggatctctgagactgagctgtgccgcctccggcttcacctttagcagctactggatgagctgggtccgacaggcccctggcaaaggacttgagtgggtcgccaacatcaagcaggacggcagcgagaagtattacgtggacagcgtgaagggcagattcaccatcagccgggacaacgccaagaacagcctgtacctgcggatgaactccctgagagccgaggataccgccgtgtactattgtgccagagcctggggctacagctcctactacttcgactattggggccagggaaccctggtcaccgtttctccaacgcgtgggtctggaggcggaggcagcggcggaggcgggagcggccagagttttgggttgttggaccctaaattgtgctatctgttggacggaatcctgttcatttacggagtgatcctgaccgcattgttcctgcgggttaagttttccagatccgcagacgcacccgcttaccaacaagggcagaaccaactctacaatgaacttaatttggggcggagggaagagtacgacgttctggacaaaaggaggggacgagatcccgagatgggcggaaagcctcagcgaaggaagaatccgcaagaggggctttataacgaactccagaaagataaaatggcagaagcctatagtgagattgggatgaagggagaaaggaggaggggtaaaggtcacgatgggttgtaccaaggattgagcacagccactaaagatacctatgatgcgctccacatgcaggccctgccgccaagacgcgccaagagaagcggatctggcgtgaagcagaccctgaatttcgacctgctgaagctggctggcgacgtggaatccaacccaggcccttctagaggccatatgaccgagtacaagcccacggtgcgcctcgccacccgcgacgacgtccccagggccgtacgcaccctcgccgccgcgttcgccgactaccccgccacgcgccacaccgtcgatccggaccgccacatcgagcgggtcaccgagctgcaagaactcttcctcacgcgcgtcgggctcgacatcggcaaggtgtgggtcgcggacgacggcgccgcggtggcggtctggaccacgccggagagcgtcgaagcgggggcggtgttcgccgagatcggcccgcgcatggccgagttgagcggttcccggctggccgcgcagcaacagatggaaggcctcctggcgccgcaccggcccaaggagcccgcgtggttcctggccaccgtcggcgtctcgcccgaccaccagggcaagggtctgggcagcgccgtcgtgctccccggagtggaggcggccgagcgcgccggggtgcccgccttcctggagacctccgcgccccgcaacctccccttctacgagcggctcggcttcaccgtcaccgccgacgtcgaggtgcccgaaggaccgcgcacctggtgcatgacccgcaagcccggtgcctga

SEQ ID NO: 9673 - DNA, 2265 bp, Artificial Sequence
  Synthetic Polynucloetide
atggccttaccagtgaccgccttgctcctgccgctggccttgctgctccacgccgccaggccggaagtgcagctggttgaatctggcggaggactggttcagcctggcggatctctgagactgtcttgtgccgccagcggcttcagcttcagcgacttttggatgagctgggtccgacaggcccctggcaaaggacttgaatgggtcgccacaatcagccaggccggcagcgagaaggactacgtggactctgtgaagggcagattcaccatcagccgggacaacgccaagaagtccctgtacctccagatgaacagcctgagagccgaggacaccgccgtgtactattgtgcctctggcgtgtacagcttcgactacagaggccagggcaccctggtcacagtctcttctggtaccggcggaggcggatctggcggcggaggtagcggtggcggaggatctgaattcgaactccagatgacacagagccctagcagcctgtctgccagcgtgggagacagagtggctatcacctgtagagccagccagagcatcagcagccacctgaactggtatcagcagaagcctggcaaggcccctaagctgctgatctatgccgccagctctctccagagcggagtgcctagcagattttctggcagcggctccggcaccgatttcaccctgacaatatccagcctccagcctgaggacttcgccacctactactgccagcagagctacagcaccccttacacattcggccagggcaccaagctggaaatcaaactcgaggacctgaagaacgtgttcccacctgaggtggccgtgttcgagcctagcgaggccgagatcagccacacccagaaagccaccctcgtgtgcctggctaccggcttctaccccgaccatgtggaactgtcttggtgggtcaacggcaaagaggtgcacagcggcgtgtgtaccgacccccagccactgaaagaacagcccgccctgaacgacagccggtactgcctgagcagcagactgagagtgtccgccaccttctggcagaacccccggaaccacttcagatgccaggtgcagttctacggcctgagcgagaacgacgagtggacccaggacagagccaagcccgtgacccagatcgtgtctgccgaagcctggggcagagccgattgcggctttaccagcgagagctaccagcagggcgtgctgagcgccaccatcctgtacgagatcctgctgggcaaggccaccctgtacgccgtgctggtgtctgccctggtgctgatggctatggtcaagcggaaggacagccggggaagggccaagcgatctggatctggagcaacaaacttctcactactcaaacaagcaggtgacgtggaggagaatcccgggcctactagtatggactggatttggcgcatccttttccttgtcggcgctgctaccggcgcgcattccttcgaagaagtgcagctggttgaatcaggtggcggcctggttcaacctggcggatctctgagactgagctgtgccgcctccggcttcacctttagcagctactggatgagctgggtccgacaggcccctggcaaaggacttgagtgggtcgccaacatcaagcaggacggcagcgagaagtattacgtggacagcgtgaagggcagattcaccatcagccgggacaacgccaagaacagcctgtacctgcggatgaactccctgagagccgaggataccgccgtgtactattgtgccagagcctggggctacagctcctactacttcgactattggggccagggaaccctggtcaccgtttctccaacgcgtatccagaaccctgatcctgccgtgtaccagctgcgggatagcaagagcagcgacaagagcgtgtgtctgttcaccgacttcgacagccagaccaacgtgtcccagagcaaggactccgacgtgtacatcaccgataagtgcgtgctggacatgcggagcatggacttcaagagcaactccgccgtggcctggtccaacaagtccgatttcgcctgcgccaacgccttcaacaacagcattatccccgaggacacattcttcccaagccccgagagcagctgcgacgtgaagctggtggaaaagagcttcgagacagacaccaacctgaacttccagaacctgagcgtgatcggcttcagaatcctgctgctgaaagtggccggctttaacctgctgatgaccctgcggctgtggtccagc

SEQ ID NO: 9674 - DNA, 2277 bp, Artificial Sequence
  Synthetic Polynucloetide
atggccttaccagtgaccgccttgctcctgccgctggccttgctgctccacgccgccaggccggaagtgcagctggttgaatctggcggaggactggttcagcctggcggatctctgagactgtcttgtgccgccagcggcttcagcttcagcgacttttggatgagctgggtccgacaggcccctggcaaaggacttgaatgggtcgccacaatcagccaggccggcagcgagaaggactacgtggactctgtgaagggcagattcaccatcagccgggacaacgccaagaagtccctgtacctccagatgaacagcctgagagccgaggacaccgccgtgtactattgtgcctctggcgtgtacagcttcgactacagaggccagggcaccctggtcacagtctcttctggtaccggcggaggcggatctggcggcggaggtagcggtggcggaggatctgaattcgaactccagatgacacagagccctagcagcctgtctgccagcgtgggagacagagtggctatcacctgtagagccagccagagcatcagcagccacctgaactggtatcagcagaagcctggcaaggcccctaagctgctgatctatgccgccagctctctccagagcggagtgcctagcagattttctggcagcggctccggcaccgatttcaccctgacaatatccagcctccagcctgaggacttcgccacctactactgccagcagagctacagcaccccttacacattcggccagggcaccaagctggaaatcaaactcgagatccagaaccctgatcctgccgtgtaccagctgcgggatagcaagagcagcgacaagagcgtgtgtctgttcaccgacttcgacagccagaccaacgtgtcccagagcaaggactccgacgtgtacatcaccgataagtgcgtgctggacatgcggagcatggacttcaagagcaactccgccgtggcctggtccaacaagtccgatttcgcctgcgccaacgccttcaacaacagcattatccccgaggacacattcttcccaagccccgagagcagctgcgacgtgaagctggtggaaaagagcttcgagacagacaccaacctgaacttccagaacctgagcgtgatcggcttcagaatcctgctgctgaaagtggccggctttaacctgctgatgaccctgcggctgtggtccagccgcgccaagagaagcggatctggcgtgaagcagaccctgaatttcgacctgctgaagctggctggcgacgtggaatccaacccaggccctactagtatggactggatttggcgcatccttttccttgtcggcgctgctaccggcgcgcattccttcgaagaagtgcagctggttgaatcaggtggcggcctggttcaacctggcggatctctgagactgagctgtgccgcctccggcttcacctttagcagctactggatgagctgggtccgacaggcccctggcaaaggacttgagtgggtcgccaacatcaagcaggacggcagcgagaagtattacgtggacagcgtgaagggcagattcaccatcagccgggacaacgccaagaacagcctgtacctgcggatgaactccctgagagccgaggataccgccgtgtactattgtgccagagcctggggctacagctcctactacttcgactattggggccagggaaccctggtcaccgtttctccaacgcgtgaggacctgaagaacgtgttcccacctgaggtggccgtgttcgagcctagcgaggccgagatcagccacacccagaaagccaccctcgtgtgcctggctaccggcttctaccccgaccatgtggaactgtcttggtgggtcaacggcaaagaggtgcacagcggcgtgtgtaccgacccccagccactgaaagaacagcccgccctgaacgacagccggtactgcctgagcagcagactgagagtgtccgccaccttctggcagaacccccggaaccacttcagatgccaggtgcagttctacggcctgagcgagaacgacgagtggacccaggacagagccaagcccgtgacccagatcgtgtctgccgaagcctggggcagagccgattgcggctttaccagcgagagctaccagcagggcgtgctgagcgccaccatcctgtacgagatcctgctgggcaaggccaccctgtacgccgtgctggtgtctgccctggtgctgatggctatggtcaagcggaaggacagccgggga

SEQ ID NO: 9675 - DNA, 2853 bp, Artificial Sequence
  Synthetic Polynucloetide
atggccttaccagtgaccgccttgctcctgccgctggccttgctgctccacgccgccaggccggaagtgcagctggttgaatctggcggaggactggttcagcctggcggatctctgagactgtcttgtgccgccagcggcttcagcttcagcgacttttggatgagctgggtccgacaggcccctggcaaaggacttgaatgggtcgccacaatcagccaggccggcagcgagaaggactacgtggactctgtgaagggcagattcaccatcagccgggacaacgccaagaagtccctgtacctccagatgaacagcctgagagccgaggacaccgccgtgtactattgtgcctctggcgtgtacagcttcgactacagaggccagggcaccctggtcacagtctcttctggtaccggcggaggcggatctggcggcggaggtagcggtggcggaggatctgaattcgaactccagatgacacagagccctagcagcctgtctgccagcgtgggagacagagtggctatcacctgtagagccagccagagcatcagcagccacctgaactggtatcagcagaagcctggcaaggcccctaagctgctgatctatgccgccagctctctccagagcggagtgcctagcagattttctggcagcggctccggcaccgatttcaccctgacaatatccagcctccagcctgaggacttcgccacctactactgccagcagagctacagcaccccttacacattcggccagggcaccaagctggaaatcaaactcgaggacctgaagaacgtgttcccacctgaggtggccgtgttcgagcctagcgaggccgagatcagccacacccagaaagccaccctcgtgtgcctggctaccggcttctaccccgaccatgtggaactgtcttggtgggtcaacggcaaagaggtgcacagcggcgtgtctaccgacccccagccactgaaagaacagcccgccctgaacgacagccggtactgcctgagcagcagactgagagtgtccgccaccttctggcagaacccccggaaccacttcagatgccaggtgcagttctacggcctgagcgagaacgacgagtggacccaggacagagccaagcccgtgacccagatcgtgtctgccgaagcctggggcagagccgattgcggatcccagagcttcggcctgctggaccccaagctgtgctacctgctggatggcatcctgttcatctacggcgtgatcctgaccgccctgttcctgagagtgaagttcagcagaagcgccgacgcccctgcctaccagcagggacagaaccaactgtacaacgagctgaacctgggcagacgggaagagtacgacgtgctggacaagcggagaggcagggaccctgagatgggcggaaagccccagcggagaaagaacccccaggaaggactgtataacgaactccagaaagacaagatggccgaagcctacagcgagatcggcatgaagggcgagcggagaagaggcaagggccacgatggcctgtaccagggcctgagcaccgccaccaaggacacctatgacgccctgcacatgcaggccctgcctccaagaagggccaagcgatctggatctggagcaacaaacttctcactactcaaacaagcaggtgacgtggaggagaatcccgggcctactagtatggactggatttggcgcatccttttccttgtcggcgctgctaccggcgcgcattccttcgaagaagtgcagctggttgaatcaggtggcggcctggttcaacctggcggatctctgagactgagctgtgccgcctccggcttcacctttagcagctactggatgagctgggtccgacaggcccctggcaaaggacttgagtgggtcgccaacatcaagcaggacggcagcgagaagtattacgtggacagcgtgaagggcagattcaccatcagccgggacaacgccaagaacagcctgtacctgcggatgaactccctgagagccgaggataccgccgtgtactattgtgccagagcctggggctacagctcctactacttcgactattggggccagggaaccctggtcaccgtttctccaacgcgtatccagaaccctgatcctgccgtgtaccagctgcgggatagcaagagcagcgacaagagcgtgtgtctgttcaccgacttcgacagccagaccaacgtgtcccagagcaaggactccgacgtgtacatcaccgataagaccgtgctggacatgcggagcatggacttcaagagcaactccgccgtggcctggtccaacaagtccgatttcgcctgcgccaacgccttcaacaacagcattatccccgaggacacattcttcccaagccccgagagcagctgcggtacccagagttttgggttgttggaccctaaattgtgctatctgttggacggaatcctgttcatttacggagtgatcctgaccgcattgttcctgcgggttaagttttccagatccgcagacgcacccgcttaccaacaagggcagaaccaactctacaatgaacttaatttggggcggagggaagagtacgacgttctggacaaaaggaggggacgagatcccgagatgggcggaaagcctcagcgaaggaagaatccgcaagaggggctttataacgaactccagaaagataaaatggcagaagcctatagtgagattgggatgaagggagaaaggaggaggggtaaaggtcacgatgggttgtaccaaggattgagcacagccactaaagatacctatgatgcgctccacatgcaggccctgccgccaaga

SEQ ID NO: 9676 - DNA, 2343 bp, Artificial Sequence
  Synthetic Polynucloetide
atggccttaccagtgaccgccttgctcctgccgctggccttgctgctccacgccgccaggccggaagtgcagctggttgaatctggcggaggactggttcagcctggcggatctctgagactgtcttgtgccgccagcggcttcagcttcagcgacttttggatgagctgggtccgacaggcccctggcaaaggacttgaatgggtcgccacaatcagccaggccggcagcgagaaggactacgtggactctgtgaagggcagattcaccatcagccgggacaacgccaagaagtccctgtacctccagatgaacagcctgagagccgaggacaccgccgtgtactattgtgcctctggcgtgtacagcttcgactacagaggccagggcaccctggtcacagtctcttctggtaccggcggaggcggatctggcggcggaggtagcggtggcggaggatctgaattcgaactccagatgacacagagccctagcagcctgtctgccagcgtgggagacagagtggctatcacctgtagagccagccagagcatcagcagccacctgaactggtatcagcagaagcctggcaaggcccctaagctgctgatctatgccgccagctctctccagagcggagtgcctagcagattttctggcagcggctccggcaccgatttcaccctgacaatatccagcctccagcctgaggacttcgccacctactactgccagcagagctacagcaccccttacacattcggccagggcaccaagctggaaatcaaactcgagggacagcctaaggccaatcctaccgtgacactgttccctccaagcagcgaagaactccaggccaacaaggccacacttgtgtgcctgatctccgacttctaccctggggctgtgacagtggcttggaaggccgatggatctcctgtgaaagccggcgtggaaaccaccaagccatccaagcagagcaacaacaaatacgccgccagctcctacctgagcctgacacctgagcagtggaagtcccacagatcctacagctgccaagtgacccacgaaggcagcaccgtggaaaagacagtggcccctacagagtgcagccccatcaagaccgatgtgattacaatggaccccaaggacaactgctccaaggacgccaacgataccctgctgctccagctgaccaacaccagcgcctactacatgtacttgttgctgctgctgaagtccgtggtgtacttcgccatcatcacatgctgcctgctgcggagaaccgccttctgctgcaacggcgagaagtctagggccaagcgatctggatctggagcaacaaacttctcactactcaaacaagcaggtgacgtggaggagaatcccgggcctactagtatggactggatttggcgcatccttttccttgtcggcgctgctaccggcgcgcattccttcgaagaagtgcagctggttgaatcaggtggcggcctggttcaacctggcggatctctgagactgagctgtgccgcctccggcttcacctttagcagctactggatgagctgggtccgacaggcccctggcaaaggacttgagtgggtcgccaacatcaagcaggacggcagcgagaagtattacgtggacagcgtgaagggcagattcaccatcagccgggacaacgccaagaacagcctgtacctgcggatgaactccctgagagccgaggataccgccgtgtactattgtgccagagcctggggctacagctcctactacttcgactattggggccagggaaccctggtcaccgtttctccaacgcgtgcctctacaaagggaccctccgtgtttcctctggctcccagcagcaagtctacaagcggaggaacagccgctctgggctgcctggtcaaggattactttcccgagcctgtgaccgtgtcctggaatagcggagcactgacaagcggcgtgcacacctttccagccgtgctgcaaagcagcggcctgtactctctgagcagcgtggtcacagtgcctagctctagcctgggcacccagacctacatctgcaatgtgaaccacaagcctagcaacaccaaggtggacaagagagtggaacccaagagctgtgaagtgaaaaccgactccaccgaccacgtgaagcccaaagagacagagaacaccaagcagcccagcaagagctgccacaagcccaaggccatcgtgcacaccgagaaagtgaacatgatgagcctgaccgtgctgggcctgcggatgctgttcgccaaaaccgtggccgtgaacttcctgctgaccgccaagctgttcttcctc

SEQ ID NO: 9677 - DNA, 2286 bp, Artificial Sequence
  Synthetic Polynucloetide
atggccttaccagtgaccgccttgctcctgccgctggccttgctgctccacgccgccaggccggaagtgcagctggttgaatctggcggaggactggttcagcctggcggatctctgagactgtcttgtgccgccagcggcttcagcttcagcgacttttggatgagctgggtccgacaggcccctggcaaaggacttgaatgggtcgccacaatcagccaggccggcagcgagaaggactacgtggactctgtgaagggcagattcaccatcagccgggacaacgccaagaagtccctgtacctccagatgaacagcctgagagccgaggacaccgccgtgtactattgtgcctctggcgtgtacagcttcgactacagaggccagggcaccctggtcacagtctcttctggtaccggcggaggcggatctggcggcggaggtagcggtggcggaggatctgaattcgaactccagatgacacagagccctagcagcctgtctgccagcgtgggagacagagtggctatcacctgtagagccagccagagcatcagcagccacctgaactggtatcagcagaagcctggcaaggcccctaagctgctgatctatgccgccagctctctccagagcggagtgcctagcagattttctggcagcggctccggcaccgatttcaccctgacaatatccagcctccagcctgaggacttcgccacctactactgccagcagagctacagcaccccttacacattcggccagggcaccaagctggaaatcaaactcgagggacagcctaaggccaatcctaccgtgacactgttccctccaagcagcgaagaactccaggccaacaaggccacacttgtgtgcctgatctccgacttctaccctggggctgtgacagtggcttggaaggccgatggatctcctgtgaaagccggcgtggaaaccaccaagccatccaagcagagcaacaacaaatacgccgccagctcctacctgagcctgacacctgagcagtggaagtcccacagatcctacagctgccaagtgacccacgaaggcagcaccgtggaaaagacagtggcccctacagagtgcagcggcagagccgattgcggctttaccagcgagagctaccagcagggcgtgctgagcgccaccatcctgtacgagatcctgctgggcaaggccaccctgtacgccgtgctggtgtctgccctggtgctgatggctatggtcaagcggaaggacagccggggacgcgccaagagaagcggatctggcgtgaagcagaccctgaatttcgacctgctgaagctggctggcgacgtggaatccaacccaggccctactagtatggactggatttggcgcatccttttccttgtcggcgctgctaccggcgcgcattccttcgaagaagtgcagctggttgaatcaggtggcggcctggttcaacctggcggatctctgagactgagctgtgccgcctccggcttcacctttagcagctactggatgagctgggtccgacaggcccctggcaaaggacttgagtgggtcgccaacatcaagcaggacggcagcgagaagtattacgtggacagcgtgaagggcagattcaccatcagccgggacaacgccaagaacagcctgtacctgcggatgaactccctgagagccgaggataccgccgtgtactattgtgccagagcctggggctacagctcctactacttcgactattggggccagggaaccctggtcaccgtttctccaacgcgtgcctctacaaagggaccctccgtgtttcctctggctcccagcagcaagtctacaagcggaggaacagccgctctgggctgcctggtcaaggattactttcccgagcctgtgaccgtgtcctggaatagcggagcactgacaagcggcgtgcacacctttccagccgtgctgcaaagcagcggcctgtactctctgagcagcgtggtcacagtgcctagctctagcctgggcacccagacctacatctgcaatgtgaaccacaagcctagcaacaccaaggtggacaagagagtggaacccaagagctgtatccccgaggacacattcttcccaagccccgagagcagctgcgacgtgaagctggtggaaaagagcttcgagacagacaccaacctgaacttccagaacctgagcgtgatcggcttcagaatcctgctgctgaaagtggccggctttaacctgctgatgaccctgcggctgtggtccagc

SEQ ID NO: 9678 - DNA, 2688 bp, Artificial Sequence
  Synthetic Polynucloetide
atggccttaccagtgaccgccttgctcctgccgctggccttgctgctccacgccgccaggccggaagtgcagctggttgaatctggcggaggactggttcagcctggcggatctctgagactgtcttgtgccgccagcggcttcagcttcagcgacttttggatgagctgggtccgacaggcccctggcaaaggacttgaatgggtcgccacaatcagccaggccggcagcgagaaggactacgtggactctgtgaagggcagattcaccatcagccgggacaacgccaagaagtccctgtacctccagatgaacagcctgagagccgaggacaccgccgtgtactattgtgcctctggcgtgtacagcttcgactacagaggccagggcaccctggtcacagtctcttctggtaccggcggaggcggatctggcggcggaggtagcggtggcggaggatctgaattcgaactccagatgacacagagccctagcagcctgtctgccagcgtgggagacagagtggctatcacctgtagagccagccagagcatcagcagccacctgaactggtatcagcagaagcctggcaaggcccctaagctgctgatctatgccgccagctctctccagagcggagtgcctagcagattttctggcagcggctccggcaccgatttcaccctgacaatatccagcctccagcctgaggacttcgccacctactactgccagcagagctacagcaccccttacacattcggccagggcaccaagctggaaatcaaactcgagatccagaaccctgatcctgccgtgtaccagctgcgggatagcaagagcagcgacaagagcgtgtgtctgttcaccgacttcgacagccagaccaacgtgtcccagagcaaggactccgacgtgtacatcaccgataagtgcgtgctggacatgcggagcatggacttcaagagcaactccgccgtggcctggtccaacaagtccgatttcgcctgcgccaacgccttcaacaacagcattatccccgaggacacattcttcccaagccccgagagcagctgcgacgtgaagctggtggaaaagagcttcgagacagacaccaacctgaacttccagaacctgagcgtgatcggcttcagaatcctgctgctgaaagtggccggctttaacctgctgatgaccctgcggctgtggtccagccgcgccaagagaagcggatctggcgtgaagcagaccctgaatttcgacctgctgaagctggctggcgacgtggaatccaacccaggccctactagtatggactggatttggcgcatccttttccttgtcggcgctgctaccggcgcgcattccgggccccagctccagctgcaagagtctggacctggcctggtcaagcctagcgagacactgagcctgacctgtaccgtgtccggcgatagcatcagcagcggcgattactactggggctggatcagacagcctcctggcaaaggactggaatggatcggccacatctactacagcggcgtgacctactacaaccccagcctgaagtccagagtgaccatcagcgtggacaccagccggaaccagttctccctgaagctgtctagcgtgacagccgccgataccgccgtgtactactgcaccagagaggacagcagcaactggcggagtagaggccagggaacactggtcacagttagctctggatccggcggaggcggaagtggaggcggaggatctggcggcggaggctctttcgaagaagtgcagctggttgaatcaggtggcggcctggttcaacctggcggatctctgagactgagctgtgccgcctccggcttcacctttagcagctactggatgagctgggtccgacaggcccctggcaaaggacttgagtgggtcgccaacatcaagcaggacggcagcgagaagtattacgtggacagcgtgaagggcagattcaccatcagccgggacaacgccaagaacagcctgtacctgcggatgaactccctgagagccgaggataccgccgtgtactattgtgccagagcctggggctacagctcctactacttcgactattggggccagggaaccctggtcaccgtttctccaacgcgtgaggacctgaagaacgtgttcccacctgaggtggccgtgttcgagcctagcgaggccgagatcagccacacccagaaagccaccctcgtgtgcctggctaccggcttctaccccgaccatgtggaactgtcttggtgggtcaacggcaaagaggtgcacagcggcgtgtgtaccgacccccagccactgaaagaacagcccgccctgaacgacagccggtactgcctgagcagcagactgagagtgtccgccaccttctggcagaacccccggaaccacttcagatgccaggtgcagttctacggcctgagcgagaacgacgagtggacccaggacagagccaagcccgtgacccagatcgtgtctgccgaagcctggggcagagccgattgcggctttaccagcgagagctaccagcagggcgtgctgagcgccaccatcctgtacgagatcctgctgggcaaggccaccctgtacgccgtgctggtgtctgccctggtgctgatggctatggtcaagcggaaggacagccgggga

SEQ ID NO: 9679 - DNA, 3264 bp, Artificial Sequence
  Synthetic Polynucloetide
atggccttaccagtgaccgccttgctcctgccgctggccttgctgctccacgccgccaggccggaagtgcagctggttgaatctggcggaggactggttcagcctggcggatctctgagactgtcttgtgccgccagcggcttcagcttcagcgacttttggatgagctgggtccgacaggcccctggcaaaggacttgaatgggtcgccacaatcagccaggccggcagcgagaaggactacgtggactctgtgaagggcagattcaccatcagccgggacaacgccaagaagtccctgtacctccagatgaacagcctgagagccgaggacaccgccgtgtactattgtgcctctggcgtgtacagcttcgactacagaggccagggcaccctggtcacagtctcttctggtaccggcggaggcggatctggcggcggaggtagcggtggcggaggatctgaattcgaactccagatgacacagagccctagcagcctgtctgccagcgtgggagacagagtggctatcacctgtagagccagccagagcatcagcagccacctgaactggtatcagcagaagcctggcaaggcccctaagctgctgatctatgccgccagctctctccagagcggagtgcctagcagattttctggcagcggctccggcaccgatttcaccctgacaatatccagcctccagcctgaggacttcgccacctactactgccagcagagctacagcaccccttacacattcggccagggcaccaagctggaaatcaaactcgaggacctgaagaacgtgttcccacctgaggtggccgtgttcgagcctagcgaggccgagatcagccacacccagaaagccaccctcgtgtgcctggctaccggcttctaccccgaccatgtggaactgtcttggtgggtcaacggcaaagaggtgcacagcggcgtgtctaccgacccccagccactgaaagaacagcccgccctgaacgacagccggtactgcctgagcagcagactgagagtgtccgccaccttctggcagaacccccggaaccacttcagatgccaggtgcagttctacggcctgagcgagaacgacgagtggacccaggacagagccaagcccgtgacccagatcgtgtctgccgaagcctggggcagagccgattgcggatcccagagcttcggcctgctggaccccaagctgtgctacctgctggatggcatcctgttcatctacggcgtgatcctgaccgccctgttcctgagagtgaagttcagcagaagcgccgacgcccctgcctaccagcagggacagaaccaactgtacaacgagctgaacctgggcagacgggaagagtacgacgtgctggacaagcggagaggcagggaccctgagatgggcggaaagccccagcggagaaagaacccccaggaaggactgtataacgaactccagaaagacaagatggccgaagcctacagcgagatcggcatgaagggcgagcggagaagaggcaagggccacgatggcctgtaccagggcctgagcaccgccaccaaggacacctatgacgccctgcacatgcaggccctgcctccaagaagggccaagcgatctggatctggagcaacaaacttctcactactcaaacaagcaggtgacgtggaggagaatcccgggcctactagtatggactggatttggcgcatccttttccttgtcggcgctgctaccggcgcgcattccgggccccagctccagctgcaagagtctggacctggcctggtcaagcctagcgagacactgagcctgacctgtaccgtgtccggcgatagcatcagcagcggcgattactactggggctggatcagacagcctcctggcaaaggactggaatggatcggccacatctactacagcggcgtgacctactacaaccccagcctgaagtccagagtgaccatcagcgtggacaccagccggaaccagttctccctgaagctgtctagcgtgacagccgccgataccgccgtgtactactgcaccagagaggacagcagcaactggcggagtagaggccagggaacactggtcacagttagctctggatccggcggaggcggaagtggaggcggaggatctggcggcggaggctctttcgaagaagtgcagctggttgaatcaggtggcggcctggttcaacctggcggatctctgagactgagctgtgccgcctccggcttcacctttagcagctactggatgagctgggtccgacaggcccctggcaaaggacttgagtgggtcgccaacatcaagcaggacggcagcgagaagtattacgtggacagcgtgaagggcagattcaccatcagccgggacaacgccaagaacagcctgtacctgcggatgaactccctgagagccgaggataccgccgtgtactattgtgccagagcctggggctacagctcctactacttcgactattggggccagggaaccctggtcaccgtttctccaacgcgtatccagaaccctgatcctgccgtgtaccagctgcgggatagcaagagcagcgacaagagcgtgtgtctgttcaccgacttcgacagccagaccaacgtgtcccagagcaaggactccgacgtgtacatcaccgataagaccgtgctggacatgcggagcatggacttcaagagcaactccgccgtggcctggtccaacaagtccgatttcgcctgcgccaacgccttcaacaacagcattatccccgaggacacattcttcccaagccccgagagcagctgcggtacccagagttttgggttgttggaccctaaattgtgctatctgttggacggaatcctgttcatttacggagtgatcctgaccgcattgttcctgcgggttaagttttccagatccgcagacgcacccgcttaccaacaagggcagaaccaactctacaatgaacttaatttggggcggagggaagagtacgacgttctggacaaaaggaggggacgagatcccgagatgggcggaaagcctcagcgaaggaagaatccgcaagaggggctttataacgaactccagaaagataaaatggcagaagcctatagtgagattgggatgaagggagaaaggaggaggggtaaaggtcacgatgggttgtaccaaggattgagcacagccactaaagatacctatgatgcgctccacatgcaggccctgccgccaaga

SEQ ID NO: 9680 - DNA, 2754 bp, Artificial Sequence
  Synthetic Polynucloetide
atggccttaccagtgaccgccttgctcctgccgctggccttgctgctccacgccgccaggccggaagtgcagctggttgaatctggcggaggactggttcagcctggcggatctctgagactgtcttgtgccgccagcggcttcagcttcagcgacttttggatgagctgggtccgacaggcccctggcaaaggacttgaatgggtcgccacaatcagccaggccggcagcgagaaggactacgtggactctgtgaagggcagattcaccatcagccgggacaacgccaagaagtccctgtacctccagatgaacagcctgagagccgaggacaccgccgtgtactattgtgcctctggcgtgtacagcttcgactacagaggccagggcaccctggtcacagtctcttctggtaccggcggaggcggatctggcggcggaggtagcggtggcggaggatctgaattcgaactccagatgacacagagccctagcagcctgtctgccagcgtgggagacagagtggctatcacctgtagagccagccagagcatcagcagccacctgaactggtatcagcagaagcctggcaaggcccctaagctgctgatctatgccgccagctctctccagagcggagtgcctagcagattttctggcagcggctccggcaccgatttcaccctgacaatatccagcctccagcctgaggacttcgccacctactactgccagcagagctacagcaccccttacacattcggccagggcaccaagctggaaatcaaactcgagggacagcctaaggccaatcctaccgtgacactgttccctccaagcagcgaagaactccaggccaacaaggccacacttgtgtgcctgatctccgacttctaccctggggctgtgacagtggcttggaaggccgatggatctcctgtgaaagccggcgtggaaaccaccaagccatccaagcagagcaacaacaaatacgccgccagctcctacctgagcctgacacctgagcagtggaagtcccacagatcctacagctgccaagtgacccacgaaggcagcaccgtggaaaagacagtggcccctacagagtgcagccccatcaagaccgatgtgattacaatggaccccaaggacaactgctccaaggacgccaacgataccctgctgctccagctgaccaacaccagcgcctactacatgtacttgttgctgctgctgaagtccgtggtgtacttcgccatcatcacatgctgcctgctgcggagaaccgccttctgctgcaacggcgagaagtctagggccaagcgatctggatctggagcaacaaacttctcactactcaaacaagcaggtgacgtggaggagaatcccgggcctactagtatggactggatttggcgcatccttttccttgtcggcgctgctaccggcgcgcattccgggccccagctccagctgcaagagtctggacctggcctggtcaagcctagcgagacactgagcctgacctgtaccgtgtccggcgatagcatcagcagcggcgattactactggggctggatcagacagcctcctggcaaaggactggaatggatcggccacatctactacagcggcgtgacctactacaaccccagcctgaagtccagagtgaccatcagcgtggacaccagccggaaccagttctccctgaagctgtctagcgtgacagccgccgataccgccgtgtactactgcaccagagaggacagcagcaactggcggagtagaggccagggaacactggtcacagttagctctggatccggcggaggcggaagtggaggcggaggatctggcggcggaggctctttcgaagaagtgcagctggttgaatcaggtggcggcctggttcaacctggcggatctctgagactgagctgtgccgcctccggcttcacctttagcagctactggatgagctgggtccgacaggcccctggcaaaggacttgagtgggtcgccaacatcaagcaggacggcagcgagaagtattacgtggacagcgtgaagggcagattcaccatcagccgggacaacgccaagaacagcctgtacctgcggatgaactccctgagagccgaggataccgccgtgtactattgtgccagagcctggggctacagctcctactacttcgactattggggccagggaaccctggtcaccgtttctccaacgcgtgcctctacaaagggaccctccgtgtttcctctggctcccagcagcaagtctacaagcggaggaacagccgctctgggctgcctggtcaaggattactttcccgagcctgtgaccgtgtcctggaatagcggagcactgacaagcggcgtgcacacctttccagccgtgctgcaaagcagcggcctgtactctctgagcagcgtggtcacagtgcctagctctagcctgggcacccagacctacatctgcaatgtgaaccacaagcctagcaacaccaaggtggacaagagagtggaacccaagagctgtgaagtgaaaaccgactccaccgaccacgtgaagcccaaagagacagagaacaccaagcagcccagcaagagctgccacaagcccaaggccatcgtgcacaccgagaaagtgaacatgatgagcctgaccgtgctgggcctgcggatgctgttcgccaaaaccgtggccgtgaacttcctgctgaccgccaagctgttcttcctc

SEQ ID NO: 9681 - DNA, 2697 bp, Artificial Sequence
  Synthetic Polynucloetide
atggccttaccagtgaccgccttgctcctgccgctggccttgctgctccacgccgccaggccggaagtgcagctggttgaatctggcggaggactggttcagcctggcggatctctgagactgtcttgtgccgccagcggcttcagcttcagcgacttttggatgagctgggtccgacaggcccctggcaaaggacttgaatgggtcgccacaatcagccaggccggcagcgagaaggactacgtggactctgtgaagggcagattcaccatcagccgggacaacgccaagaagtccctgtacctccagatgaacagcctgagagccgaggacaccgccgtgtactattgtgcctctggcgtgtacagcttcgactacagaggccagggcaccctggtcacagtctcttctggtaccggcggaggcggatctggcggcggaggtagcggtggcggaggatctgaattcgaactccagatgacacagagccctagcagcctgtctgccagcgtgggagacagagtggctatcacctgtagagccagccagagcatcagcagccacctgaactggtatcagcagaagcctggcaaggcccctaagctgctgatctatgccgccagctctctccagagcggagtgcctagcagattttctggcagcggctccggcaccgatttcaccctgacaatatccagcctccagcctgaggacttcgccacctactactgccagcagagctacagcaccccttacacattcggccagggcaccaagctggaaatcaaactcgagggacagcctaaggccaatcctaccgtgacactgttccctccaagcagcgaagaactccaggccaacaaggccacacttgtgtgcctgatctccgacttctaccctggggctgtgacagtggcttggaaggccgatggatctcctgtgaaagccggcgtggaaaccaccaagccatccaagcagagcaacaacaaatacgccgccagctcctacctgagcctgacacctgagcagtggaagtcccacagatcctacagctgccaagtgacccacgaaggcagcaccgtggaaaagacagtggcccctacagagtgcagcggcagagccgattgcggctttaccagcgagagctaccagcagggcgtgctgagcgccaccatcctgtacgagatcctgctgggcaaggccaccctgtacgccgtgctggtgtctgccctggtgctgatggctatggtcaagcggaaggacagccggggacgcgccaagagaagcggatctggcgtgaagcagaccctgaatttcgacctgctgaagctggctggcgacgtggaatccaacccaggccctactagtatggactggatttggcgcatccttttccttgtcggcgctgctaccggcgcgcattccgggccccagctccagctgcaagagtctggacctggcctggtcaagcctagcgagacactgagcctgacctgtaccgtgtccggcgatagcatcagcagcggcgattactactggggctggatcagacagcctcctggcaaaggactggaatggatcggccacatctactacagcggcgtgacctactacaaccccagcctgaagtccagagtgaccatcagcgtggacaccagccggaaccagttctccctgaagctgtctagcgtgacagccgccgataccgccgtgtactactgcaccagagaggacagcagcaactggcggagtagaggccagggaacactggtcacagttagctctggatccggcggaggcggaagtggaggcggaggatctggcggcggaggctctttcgaagaagtgcagctggttgaatcaggtggcggcctggttcaacctggcggatctctgagactgagctgtgccgcctccggcttcacctttagcagctactggatgagctgggtccgacaggcccctggcaaaggacttgagtgggtcgccaacatcaagcaggacggcagcgagaagtattacgtggacagcgtgaagggcagattcaccatcagccgggacaacgccaagaacagcctgtacctgcggatgaactccctgagagccgaggataccgccgtgtactattgtgccagagcctggggctacagctcctactacttcgactattggggccagggaaccctggtcaccgtttctccaacgcgtgcctctacaaagggaccctccgtgtttcctctggctcccagcagcaagtctacaagcggaggaacagccgctctgggctgcctggtcaaggattactttcccgagcctgtgaccgtgtcctggaatagcggagcactgacaagcggcgtgcacacctttccagccgtgctgcaaagcagcggcctgtactctctgagcagcgtggtcacagtgcctagctctagcctgggcacccagacctacatctgcaatgtgaaccacaagcctagcaacaccaaggtggacaagagagtggaacccaagagctgtatccccgaggacacattcttcccaagccccgagagcagctgcgacgtgaagctggtggaaaagagcttcgagacagacaccaacctgaacttccagaacctgagcgtgatcggcttcagaatcctgctgctgaaagtggccggctttaacctgctgatgaccctgcggctgtggtccagc

SEQ ID NO: 9682 - DNA, 2268 bp, Artificial Sequence
  Synthetic Polynucloetide
atggccttaccagtgaccgccttgctcctgccgctggccttgctgctccacgccgccaggccggaagtgcaggttttggagtctggcggaggactggttcagcctggcggatctctgagactgtcttgtgccgccagcggcttcaccttcagcaactttgccatgagctgggtccgacaggcccctggcaaaggacttgaatgggtgtccacaatcagcggcagcgccggcacaacagattacgccgattctgtgaagggcagattcaccatcagccgggacaacagcaagaaaaccctgtacctccagatgaacagcctgcgcgtggaagataccgccgtgtactactgtgccgatggcagaggccccttcttcgattatcgcggccagggcacactggtcaccgtttcttctggtaccggcggaggcggatctggcggcggaggtagcggtggcggaggatctgaattcgaactccagatgacacagagccctagcagcctgtctgccagcgtgggagacagagtggctatcacctgtagagccagccagagcatcagcagccacctgaactggtatcagcagaagcctggcaaggcccctaagctgctgatctatgccgccagctctctccagagcggagtgcctagcagattttctggcagcggctccggcaccgatttcaccctgacaatatccagcctccagcctgaggacttcgccacctactactgccagcagagctacagcaccccttacacattcggccagggcaccaagctggaaatcaaactcgaggacctgaagaacgtgttcccacctgaggtggccgtgttcgagcctagcgaggccgagatcagccacacccagaaagccaccctcgtgtgcctggctaccggcttctaccccgaccatgtggaactgtcttggtgggtcaacggcaaagaggtgcacagcggcgtgtgtaccgacccccagccactgaaagaacagcccgccctgaacgacagccggtactgcctgagcagcagactgagagtgtccgccaccttctggcagaacccccggaaccacttcagatgccaggtgcagttctacggcctgagcgagaacgacgagtggacccaggacagagccaagcccgtgacccagatcgtgtctgccgaagcctggggcagagccgattgcggctttaccagcgagagctaccagcagggcgtgctgagcgccaccatcctgtacgagatcctgctgggcaaggccaccctgtacgccgtgctggtgtctgccctggtgctgatggctatggtcaagcggaaggacagccggggaagggccaagcgatctggatctggagcaacaaacttctcactactcaaacaagcaggtgacgtggaggagaatcccgggcctactagtatggactggatttggcgcatccttttccttgtcggcgctgctaccggcgcgcattccttcgaagaagtgcagctggttgaatcaggtggcggcctggttcaacctggcggatctctgagactgagctgtgccgcctccggcttcacctttagcagctactggatgagctgggtccgacaggcccctggcaaaggacttgagtgggtcgccaacatcaagcaggacggcagcgagaagtattacgtggacagcgtgaagggcagattcaccatcagccgggacaacgccaagaacagcctgtacctgcggatgaactccctgagagccgaggataccgccgtgtactattgtgccagagcctggggctacagctcctactacttcgactattggggccagggaaccctggtcaccgtttctccaacgcgtatccagaaccctgatcctgccgtgtaccagctgcgggatagcaagagcagcgacaagagcgtgtgtctgttcaccgacttcgacagccagaccaacgtgtcccagagcaaggactccgacgtgtacatcaccgataagtgcgtgctggacatgcggagcatggacttcaagagcaactccgccgtggcctggtccaacaagtccgatttcgcctgcgccaacgccttcaacaacagcattatccccgaggacacattcttcccaagccccgagagcagctgcgacgtgaagctggtggaaaagagcttcgagacagacaccaacctgaacttccagaacctgagcgtgatcggcttcagaatcctgctgctgaaagtggccggctttaacctgctgatgaccctgcggctgtggtccagc

SEQ ID NO: 9683 - DNA, 2271 bp, Artificial Sequence
  Synthetic Polynucloetide
atggccttaccagtgaccgccttgctcctgccgctggccttgctgctccacgccgccaggccggaactccagatgacacagagccctagcagcctgtctgccagcgtgggagacagagtggctatcacctgtagagccagccagagcatcagcagccacctgaactggtatcagcagaagcctggcaaggcccctaagctgctgatctatgccgccagctctctccagagcggagtgcctagcagattttctggcagcggctccggcaccgatttcaccctgacaatatccagcctccagcctgaggacttcgccacctactactgccagcagagctacagcaccccttacacattcggccagggcaccaagctggaaatcaaactcgaggacctgaagaacgtgttcccacctgaggtggccgtgttcgagcctagcgaggccgagatcagccacacccagaaagccaccctcgtgtgcctggctaccggcttctaccccgaccatgtggaactgtcttggtgggtcaacggcaaagaggtgcacagcggcgtgtgtaccgacccccagccactgaaagaacagcccgccctgaacgacagccggtactgcctgagcagcagactgagagtgtccgccaccttctggcagaacccccggaaccacttcagatgccaggtgcagttctacggcctgagcgagaacgacgagtggacccaggacagagccaagcccgtgacccagatcgtgtctgccgaagcctggggcagagccgattgcggctttaccagcgagagctaccagcagggcgtgctgagcgccaccatcctgtacgagatcctgctgggcaaggccaccctgtacgccgtgctggtgtctgccctggtgctgatggctatggtcaagcggaaggacagccggggaagggccaagcgatctggatctggagcaacaaacttctcactactcaaacaagcaggtgacgtggaggagaatcccgggcctactagtatggactggatttggcgcatccttttccttgtcggcgctgctaccggcgcccattccgggcccgaagtgcagctggttgaatctggcggaggactggttcaggctggcggatctctgagactgtcttgtgccgccagcggcagaacctttagcatgggctggtttagacaggcccctggcaaagagagagagttcgtcgccgccatcacatactctggcggcagcccttactacgccgactctgtgaagggcagattcaccatcagccgggacaacgccaagaacaccgtgtacctccagatgaacagcctgaagcctgaggacaccgccgtgtactactgcgccgccaatccaacatacggcagcgactggaacgccgagaattggggccagggaacccaagtgacagtgtctagcggatccggcggcggaggatctggcggaggcggatctgggggcggaggctctttcgaagaagtgcagctggttgaatcaggtggcggcctggttcaacctggcggatctctgagactgagctgtgccgcctccggcttcacctttagcagctactggatgagctgggtccgacaggcccctggcaaaggacttgagtgggtcgccaacatcaagcaggacggcagcgagaagtattacgtggacagcgtgaagggcagattcaccatcagccgggacaacgccaagaacagcctgtacctgcggatgaactccctgagagccgaggataccgccgtgtactattgtgccagagcctggggctacagctcctactacttcgactattggggccagggaaccctggtcaccgtttctccaacgcgtatccagaaccctgatcctgccgtgtaccagctgcgggatagcaagagcagcgacaagagcgtgtgtctgttcaccgacttcgacagccagaccaacgtgtcccagagcaaggactccgacgtgtacatcaccgataagtgcgtgctggacatgcggagcatggacttcaagagcaactccgccgtggcctggtccaacaagtccgatttcgcctgcgccaacgccttcaacaacagcattatccccgaggacacattcttcccaagccccgagagcagctgcgacgtgaagctggtggaaaagagcttcgagacagacaccaacctgaacttccagaacctgagcgtgatcggcttcagaatcctgctgctgaaagtggccggctttaacctgctgatgaccctgcggctgtggtccagc

SEQ ID NO: 9684 - DNA, 2652 bp, Artificial Sequence
  Synthetic Polynucloetide
atggccttaccagtgaccgccttgctcctgccgctggccttgctgctccacgccgccaggccggaactccagatgacacagagccctagcagcctgtctgccagcgtgggagacagagtggctatcacctgtagagccagccagagcatcagcagccacctgaactggtatcagcagaagcctggcaaggcccctaagctgctgatctatgccgccagctctctccagagcggagtgcctagcagattttctggcagcggctccggcaccgatttcaccctgacaatatccagcctccagcctgaggacttcgccacctactactgccagcagagctacagcaccccttacacattcggccagggcaccaagctggaaatcaaactcgaggacctgaagaacgtgttcccacctgaggtggccgtgttcgagcctagcgaggccgagatcagccacacccagaaagccaccctcgtgtgcctggctaccggcttctaccccgaccatgtggaactgtcttggtgggtcaacggcaaagaggtgcacagcggcgtgtgtaccgacccccagccactgaaagaacagcccgccctgaacgacagccggtactgcctgagcagcagactgagagtgtccgccaccttctggcagaacccccggaaccacttcagatgccaggtgcagttctacggcctgagcgagaacgacgagtggacccaggacagagccaagcccgtgacccagatcgtgtctgccgaagcctggggcagagccgattgcggctttaccagcgagagctaccagcagggcgtgctgagcgccaccatcctgtacgagatcctgctgggcaaggccaccctgtacgccgtgctggtgtctgccctggtgctgatggctatggtcaagcggaaggacagccggggaagggccaagcgatctggatctggagcaacaaacttctcactactcaaacaagcaggtgacgtggaggagaatcccgggcctactagtatggactggatttggcgcatccttttccttgtcggcgctgctaccggcgcccattcccaactgcaactgcaagagtctggccctggcctggtcaagccttctgaaaccctgagcctgacctgtaccgtgtccggcggctctatcagcagcggcgattactactggggctggatcagacagcctccaggcaagggactcgaatggatcggcagcatcagctacagcggctccacctactacaacccaagcctgaagtccagagtgaccatcagcgtggacaccagcagaaaccagttctccctgaagctgagcagcgtgacagccgccgatacagccgtgtattattgcaccagagaggacagcagcaactggcggagtagaggacagggcacactggtcacagtgtcctcttctggaggcggtggaagcggtggaggaggatctgaagtgcagctggttgaatctggcggaggactggttcaggctggcggatctctgagactgtcttgtgccgccagcggcagaacctttagcatgggctggtttagacaggcccctggcaaagagagagagttcgtcgccgccatcacatactctggcggcagcccttactacgccgactctgtgaagggcagattcaccatcagccgggacaacgccaagaacaccgtgtacctccagatgaacagcctgaagcctgaggacaccgccgtgtactactgcgccgccaatccaacatacggcagcgactggaacgccgagaattggggccagggaacccaagtgacagtgtctagcggatccggcggcggaggatctggcggaggcggatctgggggcggaggctctttcgaagaagtgcagctggttgaatcaggtggcggcctggttcaacctggcggatctctgagactgagctgtgccgcctccggcttcacctttagcagctactggatgagctgggtccgacaggcccctggcaaaggacttgagtgggtcgccaacatcaagcaggacggcagcgagaagtattacgtggacagcgtgaagggcagattcaccatcagccgggacaacgccaagaacagcctgtacctgcggatgaactccctgagagccgaggataccgccgtgtactattgtgccagagcctggggctacagctcctactacttcgactattggggccagggaaccctggtcaccgtttctccaacgcgtatccagaaccctgatcctgccgtgtaccagctgcgggatagcaagagcagcgacaagagcgtgtgtctgttcaccgacttcgacagccagaccaacgtgtcccagagcaaggactccgacgtgtacatcaccgataagtgcgtgctggacatgcggagcatggacttcaagagcaactccgccgtggcctggtccaacaagtccgatttcgcctgcgccaacgccttcaacaacagcattatccccgaggacacattcttcccaagccccgagagcagctgcgacgtgaagctggtggaaaagagcttcgagacagacaccaacctgaacttccagaacctgagcgtgatcggcttcagaatcctgctgctgaaagtggccggctttaacctgctgatgaccctgcggctgtggtccagc

SEQ ID NO: 9685 - DNA, 2679 bp, Artificial Sequence
  Synthetic Polynucloetide
atggccttaccagtgaccgccttgctcctgccgctggccttgctgctccacgccgccaggccggaagtgcaggttttggagtctggcggaggactggttcagcctggcggatctctgagactgtcttgtgccgccagcggcttcaccttcagcaactttgccatgagctgggtccgacaggcccctggcaaaggacttgaatgggtgtccacaatcagcggcagcgccggcacaacagattacgccgattctgtgaagggcagattcaccatcagccgggacaacagcaagaaaaccctgtacctccagatgaacagcctgcgcgtggaagataccgccgtgtactactgtgccgatggcagaggccccttcttcgattatcgcggccagggcacactggtcaccgtttcttctggtaccggcggaggcggatctggcggcggaggtagcggtggcggaggatctgaattcgaactccagatgacacagagccctagcagcctgtctgccagcgtgggagacagagtggctatcacctgtagagccagccagagcatcagcagccacctgaactggtatcagcagaagcctggcaaggcccctaagctgctgatctatgccgccagctctctccagagcggagtgcctagcagattttctggcagcggctccggcaccgatttcaccctgacaatatccagcctccagcctgaggacttcgccacctactactgccagcagagctacagcaccccttacacattcggccagggcaccaagctggaaatcaaactcgaggacctgaagaacgtgttcccacctgaggtggccgtgttcgagcctagcgaggccgagatcagccacacccagaaagccaccctcgtgtgcctggctaccggcttctaccccgaccatgtggaactgtcttggtgggtcaacggcaaagaggtgcacagcggcgtgtgtaccgacccccagccactgaaagaacagcccgccctgaacgacagccggtactgcctgagcagcagactgagagtgtccgccaccttctggcagaacccccggaaccacttcagatgccaggtgcagttctacggcctgagcgagaacgacgagtggacccaggacagagccaagcccgtgacccagatcgtgtctgccgaagcctggggcagagccgattgcggctttaccagcgagagctaccagcagggcgtgctgagcgccaccatcctgtacgagatcctgctgggcaaggccaccctgtacgccgtgctggtgtctgccctggtgctgatggctatggtcaagcggaaggacagccggggaagggccaagcgatctggatctggagcaacaaacttctcactactcaaacaagcaggtgacgtggaggagaatcccgggcctactagtatggactggatttggcgcatccttttccttgtcggcgctgctaccggcgcccattccgggcccgaagtgcagctggttgaatctggcggaggactggttcaggctggcggatctctgagactgtcttgtgccgccagcggcagaacctttagcatgggctggtttagacaggcccctggcaaagagagagagttcgtcgccgccatcacatacagcggcggcagcccttactacgcctcttctgtcagaggccggttcaccatcagccgggacaacgccaagaacaccgtgtacctccagatgaacagcctgaagccagaggacaccgccgtgtactactgtgccgccaatccaacctacggcagcgactggaatgccgagaattggggccagggcacccaagtgacagtgtctagtggatccggcggcggaggatctggcggaggcggatctgggggcggaggctctttcgaagaagtgcagctggttgaatcaggtggcggcctggttcaacctggcggatctctgagactgagctgtgccgcctccggcttcacctttagcagctactggatgagctgggtccgacaggcccctggcaaaggacttgagtgggtcgccaacatcaagcaggacggcagcgagaagtattacgtggacagcgtgaagggcagattcaccatcagccgggacaacgccaagaacagcctgtacctgcggatgaactccctgagagccgaggataccgccgtgtactattgtgccagagcctggggctacagctcctactacttcgactattggggccagggaaccctggtcaccgtttctccaacgcgtatccagaaccctgatcctgccgtgtaccagctgcgggatagcaagagcagcgacaagagcgtgtgtctgttcaccgacttcgacagccagaccaacgtgtcccagagcaaggactccgacgtgtacatcaccgataagtgcgtgctggacatgcggagcatggacttcaagagcaactccgccgtggcctggtccaacaagtccgatttcgcctgcgccaacgccttcaacaacagcattatccccgaggacacattcttcccaagccccgagagcagctgcgacgtgaagctggtggaaaagagcttcgagacagacaccaacctgaacttccagaacctgagcgtgatcggcttcagaatcctgctgctgaaagtggccggctttaacctgctgatgaccctgcggctgtggtccagc

SEQ ID NO: 9686 - DNA, 2163 bp, Artificial Sequence
  Synthetic Polynucloetide
atggccttaccagtgaccgccttgctcctgccgctggccttgctgctccacgccgccaggccggacatcgtgatgacccagagccacaagttcatgagcaccagcgtgggcgacagagtgtccatcatctgcaaggccagccaggatgtgggcacagccgtggattggtatcagcagaagcctggacagagccccaagctgctgatctactgggccagcacaagacacaccggcgtgcccgatagattcacaggctctggcagcggcaccgatttcaccctggccatcacaaacgtgcagagcgaggacctggccgactacttctgccagcagtacaacagctaccctctgacctttggagccggcaccaagctggaaatcaagagaggcggaggcggaagtggaggcggaggatctggcggcggaggctctgaagttcagctgcaacagtctggccccgagctggttaagcctggaacaagcgtgcggatctcctgcaagaccagcggctacaccttcaccgagtacaccatccactgggtcaagcagagccacggcaagagcctggaatggatcggcaacatcaaccccaacaacggcggcaccacctacaaccagaagttcgaggacaaggccacactgaccgtggacaagagcagcagcaccgcctacatggaactgagaagcctgaccagcgaggacagcgccgtgtactattgtgccgccggatggaacttcgactactggggccagggaacaaccctgaccgttagctctacgcgtgagcagaaactgatctcggaagaggatctggcgaagcccaccacgacgccagcgccgcgaccaccaacaccggcgcccaccatcgcgtcgcagcccctgtccctgcgcccagaggcgtgccggccagcggcggggggcgcagtgcacacgagggggctggacttcgcctgtgacatctacatctgggcgcccttggccgggacttgtggggtccttctcctgtcactggttatcaccctttactgcaaacggggcagaaagaaactcctgtatatattcaaacaaccatttatgagaccagtacaaactactcaagaggaagatggctgtagctgccgatttccagaagaagaagaaggaggatgtgaactgagagtgaagttcagcaggagcgcagacgcccccgcgtaccagcagggccagaaccagctctataacgagctgaatctaggacgaagagaggagtacgatgttttggacaagagacgtggccgggaccctgagatggggggaaagccgagaaggaagaaccctcaggaaggcctgtacaatgaactgcagaaagataagatggcggaggcctacagtgagattgggatgaaaggcgagcgccggaggggcaaggggcacgatggcctttaccagggtctcagtacagccaccaaggacacctacgacgcccttcacatgcaggccctgccccctcgctctagtggctccggcgagggcagaggaagtctactaacctgcggagatgtggaagaaaatcctggcccacatatgaccgagtacaagcccacggtgcgcctcgccacccgcgacgacgtccccagggccgtacgcaccctcgccgccgcgttcgccgactaccccgccacgcgccacaccgtcgatccggaccgccacatcgagcgggtcaccgagctgcaagaactcttcctcacgcgcgtcgggctcgacatcggcaaggtgtgggtcgcggacgacggcgccgcggtggcggtctggaccacgccggagagcgtcgaagcgggggcggtgttcgccgagatcggcccgcgcatggccgagttgagcggttcccggctggccgcgcagcaacagatggaaggcctcctggcgccgcaccggcccaaggagcccgcgtggttcctggccaccgtcggcgtctcgcccgaccaccagggcaagggtctgggcagcgccgtcgtgctccccggagtggaggcggccgagcgcgccggggtgcccgccttcctggagacctccgcgccccgcaacctccccttctacgagcggctcggcttcaccgtcaccgccgacgtcgaggtgcccgaaggaccgcgcacctggtgcatgacccgcaagcccggtgcctga

SEQ ID NO: 9687 - DNA, 2145 bp, Artificial Sequence
  Synthetic Polynucloetide
atggccttaccagtgaccgccttgctcctgccgctggccttgctgctccacgccgccaggccggacatcgtgatgacccagagccacaagttcatgagcaccagcgtgggcgacagagtgtccatcatctgcaaggccagccaggatgtgggcacagccgtggattggtatcagcagaagcctggacagagccccaagctgctgatctactgggccagcacaagacacaccggcgtgcccgatagattcacaggctctggcagcggcaccgatttcaccctggccatcacaaacgtgcagagcgaggacctggccgactacttctgccagcagtacaacagctaccctctgacctttggagccggcaccaagctggaaatcaagagaggcggaggcggaagtggaggcggaggatctggcggcggaggctctgaagttcagctgcaacagtctggccccgagctggttaagcctggaacaagcgtgcggatctcctgcaagaccagcggctacaccttcaccgagtacaccatccactgggtcaagcagagccacggcaagagcctggaatggatcggcaacatcaaccccaacaacggcggcaccacctacaaccagaagttcgaggacaaggccacactgaccgtggacaagagcagcagcaccgcctacatggaactgagaagcctgaccagcgaggacagcgccgtgtactattgtgccgccggatggaacttcgactactggggccagggaacaaccctgaccgttagctctacgcgtgagcagaaactgatctcggaagaggatctgaaaattgaagttatgtatcctcctccttacctagacaatgagaagagcaatggaaccattatccatgtgaaagggaaacacctttgtccaagtcccctatttcccggaccttctaagcccttttgggtgctggtggtggttgggggagtcctggcttgctatagcttgctagtaacagtggcctttattattttctgggtgaggagtaagaggagcaggctcctgcacagtgactacatgaacatgactccacgccgccccggacccacccgcaagcattaccagccctatgccccaccacgcgacttcgcagcctatcgctccagagtgaagttcagcaggagcgcagacgcccccgcgtaccagcagggccagaaccagctctataacgagctcaatctaggacgaagagaggagtacgatgttttggacaagagacgtggccgggaccctgagatggggggaaagccgagaaggaagaaccctcaggaaggcctgtacaatgaactgcagaaagataagatggcggaggcctacagtgagattgggatgaaaggcgagcgccggaggggcaaggggcacgatggcctttaccagggtctcagtacagccaccaaggacacctacgacgcccttcacatgcaggccctgccccctcgctctagtggctccggcgagggcagaggaagtctactaacctgcggagatgtggaagaaaatcctggcccacatatgaccgagtacaagcccacggtgcgcctcgccacccgcgacgacgtccccagggccgtacgcaccctcgccgccgcgttcgccgactaccccgccacgcgccacaccgtcgatccggaccgccacatcgagcgggtcaccgagctgcaagaactcttcctcacgcgcgtcgggctcgacatcggcaaggtgtgggtcgcggacgacggcgccgcggtggcggtctggaccacgccggagagcgtcgaagcgggggcggtgttcgccgagatcggcccgcgcatggccgagttgagcggttcccggctggccgcgcagcaacagatggaaggcctcctggcgccgcaccggcccaaggagcccgcgtggttcctggccaccgtcggcgtctcgcccgaccaccagggcaagggtctgggcagcgccgtcgtgctccccggagtggaggcggccgagcgcgccggggtgcccgccttcctggagacctccgcgccccgcaacctccccttctacgagcggctcggcttcaccgtcaccgccgacgtcgaggtgcccgaaggaccgcgcacctggtgcatgacccgcaagcccggtgcctga

SEQ ID NO: 9688 - DNA, 1473 bp, Artificial Sequence
  Synthetic Polynucloetide
atggccttaccagtgaccgccttgctcctgccgctggccttgctgctccacgccgccaggccggacatcgtgatgacccagagccacaagttcatgagcaccagcgtgggcgacagagtgtccatcatctgcaaggccagccaggatgtgggcacagccgtggattggtatcagcagaagcctggacagagccccaagctgctgatctactgggccagcacaagacacaccggcgtgcccgatagattcacaggctctggcagcggcaccgatttcaccctggccatcacaaacgtgcagagcgaggacctggccgactacttctgccagcagtacaacagctaccctctgacctttggagccggcaccaagctggaaatcaagagaggcggaggcggaagtggaggcggaggatctggcggcggaggctctgaagttcagctgcaacagtctggccccgagctggttaagcctggaacaagcgtgcggatctcctgcaagaccagcggctacaccttcaccgagtacaccatccactgggtcaagcagagccacggcaagagcctggaatggatcggcaacatcaaccccaacaacggcggcaccacctacaaccagaagttcgaggacaaggccacactgaccgtggacaagagcagcagcaccgcctacatggaactgagaagcctgaccagcgaggacagcgccgtgtactattgtgccgccggatggaacttcgactactggggccagggaacaaccctgaccgttagctctacgcgtgagcagaaactgatctcggaagaggatctgaaaattgaagttatgtatcctcctccttacctagacaatgagaagagcaatggaaccattatccatgtgaaagggaaacacctttgtccaagtcccctatttcccggaccttctaagcccttttgggtgctggtggtggttgggggagtcctggcttgctatagcttgctagtaacagtggcctttattattttctgggtgaggagtaagaggagcaggctcctgcacagtgactacatgaacatgactccacgccgccccggacccacccgcaagcattaccagccctatgccccaccacgcgacttcgcagcctatcgctccagagtgaagttcagcaggagcgcagacgcccccgcgtaccagcagggccagaaccagctctataacgagctcaatctaggacgaagagaggagtacgatgttttggacaagagacgtggccgggaccctgagatggggggaaagccgagaaggaagaaccctcaggaaggcctgtacaatgaactgcagaaagataagatggcggaggcctacagtgagattgggatgaaaggcgagcgccggaggggcaaggggcacgatggcctttaccagggtctcagtacagccaccaaggacacctacgacgcccttcacatgcaggccctgccccctcgc

SEQ ID NO: 9689 - DNA, 1494 bp, Artificial Sequence
  Synthetic Polynucloetide
atggccttaccagtgaccgccttgctcctgccgctggccttgctgctccacgccgccaggccggacatcgtgatgacccagagccacaagttcatgagcaccagcgtgggcgacagagtgtccatcatctgcaaggccagccaggatgtgggcacagccgtggattggtatcagcagaagcctggacagagccccaagctgctgatctactgggccagcacaagacacaccggcgtgcccgatagattcacaggctctggcagcggcaccgatttcaccctggccatcacaaacgtgcagagcgaggacctggccgactacttctgccagcagtacaacagctaccctctgacctttggagccggcaccaagctggaaatcaagagaggcggaggcggaagtggaggcggaggatctggcggcggaggctctgaagttcagctgcaacagtctggccccgagctggttaagcctggaacaagcgtgcggatctcctgcaagaccagcggctacaccttcaccgagtacaccatccactgggtcaagcagagccacggcaagagcctggaatggatcggcaacatcaaccccaacaacggcggcaccacctacaaccagaagttcgaggacaaggccacactgaccgtggacaagagcagcagcaccgcctacatggaactgagaagcctgaccagcgaggacagcgccgtgtactattgtgccgccggatggaacttcgactactggggccagggaacaaccctgaccgttagctctacgcgtgagcagaaactgatctcggaagaggatctggcgaagcccaccacgacgccagcgccgcgaccaccaacaccggcgcccaccatcgcgtcgcagcccctgtccctgcgcccagaggcgtgccggccagcggcggggggcgcagtgcacacgagggggctggacttcgcctgtgacatctacatctgggcgcccttggccgggacttgtggggtccttctcctgtcactggttatcaccctttactgcaaacggggcagaaagaaactcctgtatatattcaaacaaccatttatgagaccagtacaaactactcaagaggaagatggctgtagctgccgatttccagaagaagaagaaggaggatgtgaactgagagtgaagttcagcaggagcgcagacgcccccgcgtaccagcagggccagaaccagctctataacgagctgaatctaggacgaagagaggagtacgatgttttggacaagagacgtggccgggaccctgagatggggggaaagccgagaaggaagaaccctcaggaaggcctgtacaatgaactgcagaaagataagatggcggaggcctacagtgagattgggatgaaaggcgagcgccggaggggcaaggggcacgatggcctttaccagggtctcagtacagccaccaaggacacctacgacgcccttcacatgcaggccctgccccctcgctga

SEQ ID NO: 9690 - DNA, 1494 bp, Artificial Sequence
  Synthetic Polynucloetide
atggccttaccagtgaccgccttgctcctgccgctggccttgctgctccacgccgccaggccggaagttcagctgcaacagtctggccccgagctggttaagcctggaacaagcgtgcggatctcctgcaagaccagcggctacaccttcaccgagtacaccatccactgggtcaagcagagccacggcaagagcctggaatggatcggcaacatcaaccccaacaacggcggcaccacctacaaccagaagttcgaggacaaggccacactgaccgtggacaagagcagcagcaccgcctacatggaactgagaagcctgaccagcgaggacagcgccgtgtactattgtgccgccggatggaacttcgactactggggccagggaacaaccctgaccgttagctctggcggaggcggaagtggaggcggaggatctggcggcggaggctctgacatcgtgatgacccagagccacaagttcatgagcaccagcgtgggcgacagagtgtccatcatctgcaaggccagccaggatgtgggcacagccgtggattggtatcagcagaagcctggacagagccccaagctgctgatctactgggccagcacaagacacaccggcgtgcccgatagattcacaggctctggcagcggcaccgatttcaccctggccatcacaaacgtgcagagcgaggacctggccgactacttctgccagcagtacaacagctaccctctgacctttggagccggcaccaagctggaaatcaagagaacgcgtgagcagaaactgatctcggaagaggatctggcgaagcccaccacgacgccagcgccgcgaccaccaacaccggcgcccaccatcgcgtcgcagcccctgtccctgcgcccagaggcgtgccggccagcggcggggggcgcagtgcacacgagggggctggacttcgcctgtgacatctacatctgggcgcccttggccgggacttgtggggtccttctcctgtcactggttatcaccctttactgcaaacggggcagaaagaaactcctgtatatattcaaacaaccatttatgagaccagtacaaactactcaagaggaagatggctgtagctgccgatttccagaagaagaagaaggaggatgtgaactgagagtgaagttcagcaggagcgcagacgcccccgcgtaccagcagggccagaaccagctctataacgagctgaatctaggacgaagagaggagtacgatgttttggacaagagacgtggccgggaccctgagatggggggaaagccgagaaggaagaaccctcaggaaggcctgtacaatgaactgcagaaagataagatggcggaggcctacagtgagattgggatgaaaggcgagcgccggaggggcaaggggcacgatggcctttaccagggtctcagtacagccaccaaggacacctacgacgcccttcacatgcaggccctgccccctcgctga

SEQ ID NO: 9691 - DNA, 2733 bp, Artificial Sequence
  Synthetic Polynucloetide
atggccttaccagtgaccgccttgctcctgccgctggccttgctgctccacgccgccaggccggacatcgtgatgacccagagccacaagttcatgagcaccagcgtgggcgacagagtgtccatcatctgcaaggccagccaggatgtgggcacagccgtggattggtatcagcagaagcctggacagagccccaagctgctgatctactgggccagcacaagacacaccggcgtgcccgatagattcacaggctctggcagcggcaccgatttcaccctggccatcacaaacgtgcagagcgaggacctggccgactacttctgccagcagtacaacagctaccctctgacctttggagccggcaccaagctggaaatcaagagaggcggaggcggaagtggaggcggaggatctggcggcggaggctctgaagttcagctgcaacagtctggccccgagctggttaagcctggaacaagcgtgcggatctcctgcaagaccagcggctacaccttcaccgagtacaccatccactgggtcaagcagagccacggcaagagcctggaatggatcggcaacatcaaccccaacaacggcggcaccacctacaaccagaagttcgaggacaaggccacactgaccgtggacaagagcagcagcaccgcctacatggaactgagaagcctgaccagcgaggacagcgccgtgtactattgtgccgccggatggaacttcgactactggggccagggaacaaccctgaccgttagctctacgcgtgagcagaaactgatctcggaagaggatctggcgaagcccaccacgacgccagcgccgcgaccaccaacaccggcgcccaccatcgcgtcgcagcccctgtccctgcgcccagaggcgtgccggccagcggcggggggcgcagtgcacacgagggggctggacttcgcctgtgacatctacatctgggcgcccttggccgggacttgtggggtccttctcctgtcactggttatcaccctttactgcgggcgcgccagagtgaagttcagcaggagcgcagacgcccccgcgtaccagcagggccagaaccagctctataacgagctgaatctaggacgaagagaggagtacgatgttttggacaagagacgtggccgggaccctgagatggggggaaagccgagaaggaagaaccctcaggaaggcctgtacaatgaactgcagaaagataagatggcggaggcctacagtgagattgggatgaaaggcgagcgccggaggggcaaggggcacgatggcctttaccagggtctcagtacagccaccaaggacacctacgacgcccttcacatgcaggccctgccccctcgctctagaggatctggagcaacaaacttctcactactcaaacaagcaggtgacgtggaggagaatcccgggcctgggatccacatggccacttacgaggttctctgtgaggtggcgcggaaactgggcacggatgacagggaagtggtattgttcctcctaaacgtgttcatacctcaacccacactggcccaattaattggagctcttagagctttaaaggaggagggcaggttaacgtttcccctgttagcggaatgtctgtttcgtgcaggtcgcagagacctcttgcgcgacctgcttcacttagacccgcgttttttagagcgccacctagcgggcacaatgagttatttcagcccttatcagctcactgttctccacgtagacggggagctgtgtgcgagggatattaggtctttgatatttttaagcaaggacactatagggtctcgcagcacaccacagacattcttacactgggtgtactgtatggaaaacttagacctactgggtcccactgacgtggatgccctaatgtcaatgcttagatctttgtcaagagtagacctacagcgccaagtgcaaaccctaatgggccttcacctttccggcccatcacactcccaacactatcgccatacaccactcgagaccgatttctacgactacaaggacgacgatgacaagactagtggctccggcgagggcagaggaagtctactaacctgcggagatgtggaagaaaatcctggcccacatatgaccgagtacaagcccacggtgcgcctcgccacccgcgacgacgtccccagggccgtacgcaccctcgccgccgcgttcgccgactaccccgccacgcgccacaccgtcgatccggaccgccacatcgagcgggtcaccgagctgcaagaactcttcctcacgcgcgtcgggctcgacatcggcaaggtgtgggtcgcggacgacggcgccgcggtggcggtctggaccacgccggagagcgtcgaagcgggggcggtgttcgccgagatcggcccgcgcatggccgagttgagcggttcccggctggccgcgcagcaacagatggaaggcctcctggcgccgcaccggcccaaggagcccgcgtggttcctggccaccgtcggcgtctcgcccgaccaccagggcaagggtctgggcagcgccgtcgtgctccccggagtggaggcggccgagcgcgccggggtgcccgccttcctggagacctccgcgccccgcaacctccccttctacgagcggctcggcttcaccgtcaccgccgacgtcgaggtgcccgaaggaccgcgcacctggtgcatgacccgcaagcccggtgcctga

SEQ ID NO: 9692 - DNA, 2553 bp, Artificial Sequence
  Synthetic Polynucloetide
atggccttaccagtgaccgccttgctcctgccgctggccttgctgctccacgccgccaggccggacatcgtgatgacccagagccacaagttcatgagcaccagcgtgggcgacagagtgtccatcatctgcaaggccagccaggatgtgggcacagccgtggattggtatcagcagaagcctggacagagccccaagctgctgatctactgggccagcacaagacacaccggcgtgcccgatagattcacaggctctggcagcggcaccgatttcaccctggccatcacaaacgtgcagagcgaggacctggccgactacttctgccagcagtacaacagctaccctctgacctttggagccggcaccaagctggaaatcaagagactcgagatccagaaccctgatcctgccgtgtaccagctgcgggatagcaagagcagcgacaagagcgtgtgtctgttcaccgacttcgacagccagaccaacgtgtcccagagcaaggactccgacgtgtacatcaccgataagtgcgtgctggacatgcggagcatggacttcaagagcaactccgccgtggcctggtccaacaagtccgatttcgcctgcgccaacgccttcaacaacagcattatccccgaggacacattcttcccaagcagcgacgtgccctgcgacgtgaagctggtggaaaagagcttcgagacagacaccaacctgaacttccagaacctgagcgtgatcggcttcagaatcctgctgctgaaagtggccggctttaacctgctgatgaccctgcggctgtggtccagccgcgccaagagaagcggatctggcgtgaagcagaccctgaatttcgacctgctgaagctggctggcgacgtggaatccaacccaggccctactagtatggactggatttggcgcatccttttccttgtcggcgctgctaccggcgcgcattccttcgaagaagttcagctgcaacagtctggccccgagctggttaagcctggaacaagcgtgcggatctcctgcaagaccagcggctacaccttcaccgagtacaccatccactgggtcaagcagagccacggcaagagcctggaatggatcggcaacatcaaccccaacaacggcggcaccacctacaaccagaagttcgaggacaaggccacactgaccgtggacaagagcagcagcaccgcctacatggaactgagaagcctgaccagcgaggacagcgccgtgtactattgtgccgccggatggaacttcgactactggggccagggaacaaccctgaccgttagctctacgcgtgaggacctgaagaacgtgttcccacctgaggtggccgtgttcgagcctagcaaggccgagatcgcccacacccagaaagccaccctcgtgtgcctggctaccggcttctaccccgaccatgtggaactgtcttggtgggtcaacggcaaagaggtgcacagcggcgtgtgtaccgacccccagccactgaaagaacagcccgccctgaacgacagccggtactgcctgagcagcagactgagagtgtccgccaccttctggcagaacccccggaaccacttcagatgccaggtgcagttctacggcctgagcgagaacgacgagtggacccaggacagagccaagcccgtgacccagatcgtgtctgccgaagcctggggcagagccgattgcggcatcaccagcgccagctaccaccagggcgtgctgagcgccaccatcctgtacgagatcctgctgggcaaggccaccctgtacgccgtgctggtgtctgccctggtgctgatggctatggtcaagcggaaggacagccggggaagggccaagcgatctggatctggagcaacaaacttctcactactcaaacaagcaggtgacgtggaggagaatcccgggccttctagaggccatatgaccgagtacaagcccacggtgcgcctcgccacccgcgacgacgtccccagggccgtacgcaccctcgccgccgcgttcgccgactaccccgccacgcgccacaccgtcgatccggaccgccacatcgagcgggtcaccgagctgcaagaactcttcctcacgcgcgtcgggctcgacatcggcaaggtgtgggtcgcggacgacggcgccgcggtggcggtctggaccacgccggagagcgtcgaagcgggggcggtgttcgccgagatcggcccgcgcatggccgagttgagcggttcccggctggccgcgcagcaacagatggaaggcctcctggcgccgcaccggcccaaggagcccgcgtggttcctggccaccgtcggcgtctcgcccgaccaccagggcaagggtctgggcagcgccgtcgtgctccccggagtggaggcggccgagcgcgccggggtgcccgccttcctggagacctccgcgccccgcaacctccccttctacgagcggctcggcttcaccgtcaccgccgacgtcgaggtgcccgaaggaccgcgcacctggtgcatgacccgcaagcccggtgcctga

SEQ ID NO: 9693 - DNA, 2550 bp, Artificial Sequence
  Synthetic Polynucloetide
atggccttaccagtgaccgccttgctcctgccgctggccttgctgctccacgccgccaggccggacatcgtgatgacccagagccacaagttcatgagcaccagcgtgggcgacagagtgtccatcatctgcaaggccagccaggatgtgggcacagccgtggattggtatcagcagaagcctggacagagccccaagctgctgatctactgggccagcacaagacacaccggcgtgcccgatagattcacaggctctggcagcggcaccgatttcaccctggccatcacaaacgtgcagagcgaggacctggccgactacttctgccagcagtacaacagctaccctctgacctttggagccggcaccaagctggaaatcaagagactcgaggacctgaagaacgtgttcccacctgaggtggccgtgttcgagcctagcaaggccgagatcgcccacacccagaaagccaccctcgtgtgcctggctaccggcttctaccccgaccatgtggaactgtcttggtgggtcaacggcaaagaggtgcacagcggcgtgtgtaccgacccccagccactgaaagaacagcccgccctgaacgacagccggtactgcctgagcagcagactgagagtgtccgccaccttctggcagaacccccggaaccacttcagatgccaggtgcagttctacggcctgagcgagaacgacgagtggacccaggacagagccaagcccgtgacccagatcgtgtctgccgaagcctggggcagagccgattgcggcatcaccagcgccagctaccaccagggcgtgctgagcgccaccatcctgtacgagatcctgctgggcaaggccaccctgtacgccgtgctggtgtctgccctggtgctgatggctatggtcaagcggaaggacagccggggaagggccaagcgatctggatctggagcaacaaacttctcactactcaaacaagcaggtgacgtggaggagaatcccgggcctactagtatggactggatttggcgcatccttttccttgtcggcgctgctaccggcgcgcattccttcgaagaagttcagctgcaacagtctggccccgagctggttaagcctggaacaagcgtgcggatctcctgcaagaccagcggctacaccttcaccgagtacaccatccactgggtcaagcagagccacggcaagagcctggaatggatcggcaacatcaaccccaacaacggcggcaccacctacaaccagaagttcgaggacaaggccacactgaccgtggacaagagcagcagcaccgcctacatggaactgagaagcctgaccagcgaggacagcgccgtgtactattgtgccgccggatggaacttcgactactggggccagggaacaaccctgaccgttagctctacgcgtatccagaaccctgatcctgccgtgtaccagctgcgggatagcaagagcagcgacaagagcgtgtgtctgttcaccgacttcgacagccagaccaacgtgtcccagagcaaggactccgacgtgtacatcaccgataagtgcgtgctggacatgcggagcatggacttcaagagcaactccgccgtggcctggtccaacaagtccgatttcgcctgcgccaacgccttcaacaacagcattatccccgaggacacattcttcccaagcagcgacgtgccctgcgacgtgaagctggtggaaaagagcttcgagacagacaccaacctgaacttccagaacctgagcgtgatcggcttcagaatcctgctgctgaaagtggccggctttaacctgctgatgaccctgcggctgtggtccagccgcgccaagagaagcggatctggcgtgaagcagaccctgaatttcgacctgctgaagctggctggcgacgtggaatccaacccaggcccttctagaggccatatgaccgagtacaagcccacggtgcgcctcgccacccgcgacgacgtccccagggccgtacgcaccctcgccgccgcgttcgccgactaccccgccacgcgccacaccgtcgatccggaccgccacatcgagcgggtcaccgagctgcaagaactcttcctcacgcgcgtcgggctcgacatcggcaaggtgtgggtcgcggacgacggcgccgcggtggcggtctggaccacgccggagagcgtcgaagcgggggcggtgttcgccgagatcggcccgcgcatggccgagttgagcggttcccggctggccgcgcagcaacagatggaaggcctcctggcgccgcaccggcccaaggagcccgcgtggttcctggccaccgtcggcgtctcgcccgaccaccagggcaagggtctgggcagcgccgtcgtgctccccggagtggaggcggccgagcgcgccggggtgcccgccttcctggagacctccgcgccccgcaacctccccttctacgagcggctcggcttcaccgtcaccgccgacgtcgaggtgcccgaaggaccgcgcacctggtgcatgacccgcaagcccggtgcctga

SEQ ID NO: 9694 - DNA, 1848 bp, Artificial Sequence
  Synthetic Polynucloetide
atggccttaccagtgaccgccttgctcctgccgctggccttgctgctccacgccgccaggccggacatcgtgatgacccagagccacaagttcatgagcaccagcgtgggcgacagagtgtccatcatctgcaaggccagccaggatgtgggcacagccgtggattggtatcagcagaagcctggacagagccccaagctgctgatctactgggccagcacaagacacaccggcgtgcccgatagattcacaggctctggcagcggcaccgatttcaccctggccatcacaaacgtgcagagcgaggacctggccgactacttctgccagcagtacaacagctaccctctgacctttggagccggcaccaagctggaaatcaagagactcgaggacctgaagaacgtgttcccacctgaggtggccgtgttcgagcctagcgaggccgagatcagccacacccagaaagccaccctcgtgtgcctggctaccggcttctaccccgaccatgtggaactgtcttggtgggtcaacggcaaagaggtgcacagcggcgtgtgtaccgacccccagccactgaaagaacagcccgccctgaacgacagccggtactgcctgagcagcagactgagagtgtccgccaccttctggcagaacccccggaaccacttcagatgccaggtgcagttctacggcctgagcgagaacgacgagtggacccaggacagagccaagcccgtgacccagatcgtgtctgccgaagcctggggcagagccgattgcggctttaccagcgagagctaccagcagggcgtgctgagcgccaccatcctgtacgagatcctgctgggcaaggccaccctgtacgccgtgctggtgtctgccctggtgctgatggctatggtcaagcggaaggacagccggggaagggccaagcgatctggatctggagcaacaaacttctcactactcaaacaagcaggtgacgtggaggagaatcccgggcctactagtatggactggatttggcgcatccttttccttgtcggcgctgctaccggcgcgcattccttcgaagaagttcagctgcaacagtctggccccgagctggttaagcctggaacaagcgtgcggatctcctgcaagaccagcggctacaccttcaccgagtacaccatccactgggtcaagcagagccacggcaagagcctggaatggatcggcaacatcaaccccaacaacggcggcaccacctacaaccagaagttcgaggacaaggccacactgaccgtggacaagagcagcagcaccgcctacatggaactgagaagcctgaccagcgaggacagcgccgtgtactattgtgccgccggatggaacttcgactactggggccagggaacaaccctgaccgttagctctacgcgtatccagaaccctgatcctgccgtgtaccagctgcgggatagcaagagcagcgacaagagcgtgtgtctgttcaccgacttcgacagccagaccaacgtgtcccagagcaaggactccgacgtgtacatcaccgataagtgcgtgctggacatgcggagcatggacttcaagagcaactccgccgtggcctggtccaacaagtccgatttcgcctgcgccaacgccttcaacaacagcattatccccgaggacacattcttcccaagccccgagagcagctgcgacgtgaagctggtggaaaagagcttcgagacagacaccaacctgaacttccagaacctgagcgtgatcggcttcagaatcctgctgctgaaagtggccggctttaacctgctgatgaccctgcggctgtggtccagc

SEQ ID NO: 9695 - DNA, 2523 bp, Artificial Sequence
  Synthetic Polynucloetide
atggccttaccagtgaccgccttgctcctgccgctggccttgctgctccacgccgccaggccggacatcgtgatgacccagagccacaagttcatgagcaccagcgtgggcgacagagtgtccatcatctgcaaggccagccaggatgtgggcacagccgtggattggtatcagcagaagcctggacagagccccaagctgctgatctactgggccagcacaagacacaccggcgtgcccgatagattcacaggctctggcagcggcaccgatttcaccctggccatcacaaacgtgcagagcgaggacctggccgactacttctgccagcagtacaacagctaccctctgacctttggagccggcaccaagctggaaatcaagagactcgaggacctgaagaacgtgttcccacctgaggtggccgtgttcgagcctagcgaggccgagatcagccacacccagaaagccaccctcgtgtgcctggctaccggcttctaccccgaccatgtggaactgtcttggtgggtcaacggcaaagaggtgcacagcggcgtgtgtaccgacccccagccactgaaagaacagcccgccctgaacgacagccggtactgcctgagcagcagactgagagtgtccgccaccttctggcagaacccccggaaccacttcagatgccaggtgcagttctacggcctgagcgagaacgacgagtggacccaggacagagccaagcccgtgacccagatcgtgtctgccgaagcctggggcagagccgattgcggctttaccagcgagagctaccagcagggcgtgctgagcgccaccatcctgtacgagatcctgctgggcaaggccaccctgtacgccgtgctggtgtctgccctggtgctgatggctatggtcaagcggaaggacagccggggaagggccaagcgatctggatctggagcaacaaacttctcactactcaaacaagcaggtgacgtggaggagaatcccgggcctactagtatggactggatttggcgcatccttttccttgtcggcgctgctaccggcgcgcattccttcgaagaagttcagctgcaacagtctggccccgagctggttaagcctggaacaagcgtgcggatctcctgcaagaccagcggctacaccttcaccgagtacaccatccactgggtcaagcagagccacggcaagagcctggaatggatcggcaacatcaaccccaacaacggcggcaccacctacaaccagaagttcgaggacaaggccacactgaccgtggacaagagcagcagcaccgcctacatggaactgagaagcctgaccagcgaggacagcgccgtgtactattgtgccgccggatggaacttcgactactggggccagggaacaaccctgaccgttagctctacgcgtatccagaaccctgatcctgccgtgtaccagctgcgggatagcaagagcagcgacaagagcgtgtgtctgttcaccgacttcgacagccagaccaacgtgtcccagagcaaggactccgacgtgtacatcaccgataagtgcgtgctggacatgcggagcatggacttcaagagcaactccgccgtggcctggtccaacaagtccgatttcgcctgcgccaacgccttcaacaacagcattatccccgaggacacattcttcccaagccccgagagcagctgcgacgtgaagctggtggaaaagagcttcgagacagacaccaacctgaacttccagaacctgagcgtgatcggcttcagaatcctgctgctgaaagtggccggctttaacctgctgatgaccctgcggctgtggtccagccgcgccaagagaagcggatctggcgtgaagcagaccctgaatttcgacctgctgaagctggctggcgacgtggaatccaacccaggcccttctagaggcgggatccacaccatggctacctacgaggtgctgtgcgaggtggcaagaaagctgggcaccgacgacagagaagtggtgctgttcctgctgaacgtgttcatccctcagcctacactggcccagctgatcggtgcactgagagccctgaaagaggaaggccggctgacctttcctctgctggccgaatgcctgttcagagccggaagaagggatctgctgcgggacctgctgcatctggaccccagatttctggaaagacacctggccggcaccatgagctacttcagcccttaccagctgaccgtgctgcacgttgacggcgaactgtgcgccagagatattcggagcctgatcttcctgagcaaggacaccatcggcagccggtctacccctcagacatttctgcactgggtgtactgcatggaaaacctggacctgctcggccccacagatgtggatgccctgatgtccatgctgagaagcctgagcagagtggacctccagagacaggtgcagacactgatgggactgcacctgagcggacctagccacagccagcactacagacacacccct

SEQ ID NO: 9696 - DNA, 1860 bp, Artificial Sequence
  Synthetic Polynucloetide
atggccttaccagtgaccgccttgctcctgccgctggccttgctgctccacgccgccaggccggacatcgtgatgacccagagccacaagttcatgagcaccagcgtgggcgacagagtgtccatcatctgcaaggccagccaggatgtgggcacagccgtggattggtatcagcagaagcctggacagagccccaagctgctgatctactgggccagcacaagacacaccggcgtgcccgatagattcacaggctctggcagcggcaccgatttcaccctggccatcacaaacgtgcagagcgaggacctggccgactacttctgccagcagtacaacagctaccctctgacctttggagccggcaccaagctggaaatcaagagactcgagatccagaaccctgatcctgccgtgtaccagctgcgggatagcaagagcagcgacaagagcgtgtgtctgttcaccgacttcgacagccagaccaacgtgtcccagagcaaggactccgacgtgtacatcaccgataagtgcgtgctggacatgcggagcatggacttcaagagcaactccgccgtggcctggtccaacaagtccgatttcgcctgcgccaacgccttcaacaacagcattatccccgaggacacattcttcccaagccccgagagcagctgcgacgtgaagctggtggaaaagagcttcgagacagacaccaacctgaacttccagaacctgagcgtgatcggcttcagaatcctgctgctgaaagtggccggctttaacctgctgatgaccctgcggctgtggtccagccgcgccaagagaagcggatctggcgtgaagcagaccctgaatttcgacctgctgaagctggctggcgacgtggaatccaacccaggccctactagtatggactggatttggcgcatccttttccttgtcggcgctgctaccggcgcgcattccttcgaagaagttcagctgcaacagtctggccccgagctggttaagcctggaacaagcgtgcggatctcctgcaagaccagcggctacaccttcaccgagtacaccatccactgggtcaagcagagccacggcaagagcctggaatggatcggcaacatcaaccccaacaacggcggcaccacctacaaccagaagttcgaggacaaggccacactgaccgtggacaagagcagcagcaccgcctacatggaactgagaagcctgaccagcgaggacagcgccgtgtactattgtgccgccggatggaacttcgactactggggccagggaacaaccctgaccgttagctctacgcgtgaggacctgaagaacgtgttcccacctgaggtggccgtgttcgagcctagcgaggccgagatcagccacacccagaaagccaccctcgtgtgcctggctaccggcttctaccccgaccatgtggaactgtcttggtgggtcaacggcaaagaggtgcacagcggcgtgtgtaccgacccccagccactgaaagaacagcccgccctgaacgacagccggtactgcctgagcagcagactgagagtgtccgccaccttctggcagaacccccggaaccacttcagatgccaggtgcagttctacggcctgagcgagaacgacgagtggacccaggacagagccaagcccgtgacccagatcgtgtctgccgaagcctggggcagagccgattgcggctttaccagcgagagctaccagcagggcgtgctgagcgccaccatcctgtacgagatcctgctgggcaaggccaccctgtacgccgtgctggtgtctgccctggtgctgatggctatggtcaagcggaaggacagccgggga

SEQ ID NO: 9697 - DNA, 2526 bp, Artificial Sequence
  Synthetic Polynucloetide
atggccttaccagtgaccgccttgctcctgccgctggccttgctgctccacgccgccaggccggacatcgtgatgacccagagccacaagttcatgagcaccagcgtgggcgacagagtgtccatcatctgcaaggccagccaggatgtgggcacagccgtggattggtatcagcagaagcctggacagagccccaagctgctgatctactgggccagcacaagacacaccggcgtgcccgatagattcacaggctctggcagcggcaccgatttcaccctggccatcacaaacgtgcagagcgaggacctggccgactacttctgccagcagtacaacagctaccctctgacctttggagccggcaccaagctggaaatcaagagactcgagatccagaaccctgatcctgccgtgtaccagctgcgggatagcaagagcagcgacaagagcgtgtgtctgttcaccgacttcgacagccagaccaacgtgtcccagagcaaggactccgacgtgtacatcaccgataagtgcgtgctggacatgcggagcatggacttcaagagcaactccgccgtggcctggtccaacaagtccgatttcgcctgcgccaacgccttcaacaacagcattatccccgaggacacattcttcccaagccccgagagcagctgcgacgtgaagctggtggaaaagagcttcgagacagacaccaacctgaacttccagaacctgagcgtgatcggcttcagaatcctgctgctgaaagtggccggctttaacctgctgatgaccctgcggctgtggtccagccgcgccaagagaagcggatctggcgtgaagcagaccctgaatttcgacctgctgaagctggctggcgacgtggaatccaacccaggccctactagtatggactggatttggcgcatccttttccttgtcggcgctgctaccggcgcgcattccttcgaagaagttcagctgcaacagtctggccccgagctggttaagcctggaacaagcgtgcggatctcctgcaagaccagcggctacaccttcaccgagtacaccatccactgggtcaagcagagccacggcaagagcctggaatggatcggcaacatcaaccccaacaacggcggcaccacctacaaccagaagttcgaggacaaggccacactgaccgtggacaagagcagcagcaccgcctacatggaactgagaagcctgaccagcgaggacagcgccgtgtactattgtgccgccggatggaacttcgactactggggccagggaacaaccctgaccgttagctctacgcgtgaggacctgaagaacgtgttcccacctgaggtggccgtgttcgagcctagcgaggccgagatcagccacacccagaaagccaccctcgtgtgcctggctaccggcttctaccccgaccatgtggaactgtcttggtgggtcaacggcaaagaggtgcacagcggcgtgtgtaccgacccccagccactgaaagaacagcccgccctgaacgacagccggtactgcctgagcagcagactgagagtgtccgccaccttctggcagaacccccggaaccacttcagatgccaggtgcagttctacggcctgagcgagaacgacgagtggacccaggacagagccaagcccgtgacccagatcgtgtctgccgaagcctggggcagagccgattgcggctttaccagcgagagctaccagcagggcgtgctgagcgccaccatcctgtacgagatcctgctgggcaaggccaccctgtacgccgtgctggtgtctgccctggtgctgatggctatggtcaagcggaaggacagccggggaagggccaagcgatctggatctggagcaacaaacttctcactactcaaacaagcaggtgacgtggaggagaatcccgggccttctagaggcgggatccacaccatggctacctacgaggtgctgtgcgaggtggcaagaaagctgggcaccgacgacagagaagtggtgctgttcctgctgaacgtgttcatccctcagcctacactggcccagctgatcggtgcactgagagccctgaaagaggaaggccggctgacctttcctctgctggccgaatgcctgttcagagccggaagaagggatctgctgcgggacctgctgcatctggaccccagatttctggaaagacacctggccggcaccatgagctacttcagcccttaccagctgaccgtgctgcacgttgacggcgaactgtgcgccagagatattcggagcctgatcttcctgagcaaggacaccatcggcagccggtctacccctcagacatttctgcactgggtgtactgcatggaaaacctggacctgctcggccccacagatgtggatgccctgatgtccatgctgagaagcctgagcagagtggacctccagagacaggtgcagacactgatgggactgcacctgagcggacctagccacagccagcactacagacacacccct

SEQ ID NO: 9698 - DNA, 2685 bp, Artificial Sequence
  Synthetic Polynucloetide
atggccttaccagtgaccgccttgctcctgccgctggccttgctgctccacgccgccaggccgctcgaggggaaaccaattcccaaccctcttctgggactggattcaaccggcagcggcgaggacctgaagaacgtgttcccacctgaggtggccgtgttcgagcctagcaaggccgagatcgcccacacccagaaagccaccctcgtgtgcctggctaccggcttctaccccgaccatgtggaactgtcttggtgggtcaacggcaaagaggtgcacagcggcgtgtgtaccgacccccagccactgaaagaacagcccgccctgaacgacagccggtactgcctgagcagcagactgagagtgtccgccaccttctggcagaacccccggaaccacttcagatgccaggtgcagttctacggcctgagcgagaacgacgagtggacccaggacagagccaagcccgtgacccagatcgtgtctgccgaagcctggggcagagccgattgcggcatcaccagcgccagctaccaccagggcgtgctgagcgccaccatcctgtacgagatcctgctgggcaaggccaccctgtacgccgtgctggtgtctgccctggtgctgatggctatggtcaagcggaaggacagccggggaagggccaagcgatctggatctggagcaacaaacttctcactactcaaacaagcaggtgacgtggaggagaatcccgggcctactagcatggccttaccagtgaccgccttgctcctgccgctggccttgctgctccacgccgccaggccggacatcgtgatgacccagagccacaagttcatgagcaccagcgtgggcgacagagtgtccatcatctgcaaggccagccaggatgtgggcacagccgtggattggtatcagcagaagcctggacagagccccaagctgctgatctactgggccagcacaagacacaccggcgtgcccgatagattcacaggctctggcagcggcaccgatttcaccctggccatcacaaacgtgcagagcgaggacctggccgactacttctgccagcagtacaacagctaccctctgacctttggagccggcaccaagctggaaatcaagagaggcggaggcggaagtggaggcggaggatctggcggcggaggctctgaagttcagctgcaacagtctggccccgagctggttaagcctggaacaagcgtgcggatctcctgcaagaccagcggctacaccttcaccgagtacaccatccactgggtcaagcagagccacggcaagagcctggaatggatcggcaacatcaaccccaacaacggcggcaccacctacaaccagaagttcgaggacaaggccacactgaccgtggacaagagcagcagcaccgcctacatggaactgagaagcctgaccagcgaggacagcgccgtgtactattgtgccgccggatggaacttcgactactggggccagggaacaaccctgaccgttagctctacgcgtgagcagaaactgatctcggaagaggatgggagcggcatccagaaccctgatcctgccgtgtaccagctgcgggatagcaagagcagcgacaagagcgtgtgtctgttcaccgacttcgacagccagaccaacgtgtcccagagcaaggactccgacgtgtacatcaccgataagtgcgtgctggacatgcggagcatggacttcaagagcaactccgccgtggcctggtccaacaagtccgatttcgcctgcgccaacgccttcaacaacagcattatccccgaggacacattcttcccaagcagcgacgtgccctgcgacgtgaagctggtggaaaagagcttcgagacagacaccaacctgaacttccagaacctgagcgtgatcggcttcagaatcctgctgctgaaagtggccggctttaacctgctgatgaccctgcggctgtggtccagccgcgccaagagaagcggatctggcgtgaagcagaccctgaatttcgacctgctgaagctggctggcgacgtggaatccaacccaggcccttctagaggccatatgaccgagtacaagcccacggtgcgcctcgccacccgcgacgacgtccccagggccgtacgcaccctcgccgccgcgttcgccgactaccccgccacgcgccacaccgtcgatccggaccgccacatcgagcgggtcaccgagctgcaagaactcttcctcacgcgcgtcgggctcgacatcggcaaggtgtgggtcgcggacgacggcgccgcggtggcggtctggaccacgccggagagcgtcgaagcgggggcggtgttcgccgagatcggcccgcgcatggccgagttgagcggttcccggctggccgcgcagcaacagatggaaggcctcctggcgccgcaccggcccaaggagcccgcgtggttcctggccaccgtcggcgtctcgcccgaccaccagggcaagggtctgggcagcgccgtcgtgctccccggagtggaggcggccgagcgcgccggggtgcccgccttcctggagacctccgcgccccgcaacctccccttctacgagcggctcggcttcaccgtcaccgccgacgtcgaggtgcccgaaggaccgcgcacctggtgcatgacccgcaagcccggtgcctga

SEQ ID NO: 9699 - DNA, 2688 bp, Artificial Sequence
  Synthetic Polynucloetide
atggccttaccagtgaccgccttgctcctgccgctggccttgctgctccacgccgccaggccgctcgagcagaaactgatctcggaagaggatctgggctccggcgatcgccctgatcctgccgtgtaccagctgcgggatagcaagagcagcgacaagagcgtgtgtctgttcaccgacttcgacagccagaccaacgtgtcccagagcaaggactccgacgtgtacatcaccgataagtgcgtgctggacatgcggagcatggacttcaagagcaactccgccgtggcctggtccaacaagtccgatttcgcctgcgccaacgccttcaacaacagcattatccccgaggacacattcttcccaagccccgagagcagctgcgacgtgaagctggtggaaaagagcttcgagacagacaccaacctgaacttccagaacctgagcgtgatcggcttcagaatcctgctgctgaaagtggccggctttaacctgctgatgaccctgcggctgtggtccagctctagtcgcgccaagagaagcggatctggcgtgaagcagaccctgaatttcgacctgctgaagctggctggcgacgtggaatccaacccaggccccactagcatggccttaccagtgaccgccttgctcctgccgctggccttgctgctccacgccgccaggccggacatcgtgatgacccagagccacaagttcatgagcaccagcgtgggcgacagagtgtccatcatctgcaaggccagccaggatgtgggcacagccgtggattggtatcagcagaagcctggacagagccccaagctgctgatctactgggccagcacaagacacaccggcgtgcccgatagattcacaggctctggcagcggcaccgatttcaccctggccatcacaaacgtgcagagcgaggacctggccgactacttctgccagcagtacaacagctaccctctgacctttggagccggcaccaagctggaaatcaagagaggcggaggcggaagtggaggcggaggatctggcggcggaggctctgaagttcagctgcaacagtctggccccgagctggttaagcctggaacaagcgtgcggatctcctgcaagaccagcggctacaccttcaccgagtacaccatccactgggtcaagcagagccacggcaagagcctggaatggatcggcaacatcaaccccaacaacggcggcaccacctacaaccagaagttcgaggacaaggccacactgaccgtggacaagagcagcagcaccgcctacatggaactgagaagcctgaccagcgaggacagcgccgtgtactattgtgccgccggatggaacttcgactactggggccagggaacaaccctgaccgttagctctacgcgtgggaaaccaattcccaaccctcttctgggactggattcaaccggcagcggcgaggacctgaagaacgtgttcccacctgaggtggccgtgttcgagcctagcgaggccgagatcagccacacccagaaagccaccctcgtgtgcctggctaccggcttctaccccgaccatgtggaactgtcttggtgggtcaacggcaaagaggtgcacagcggcgtgtgtaccgacccccagccactgaaagaacagcccgccctgaacgacagccggtactgcctgagcagcagactgagagtgtccgccaccttctggcagaacccccggaaccacttcagatgccaggtgcagttctacggcctgagcgagaacgacgagtggacccaggacagagccaagcccgtgacccagatcgtgtctgccgaagcctggggcagagccgattgcggctttaccagcgagagctaccagcagggcgtgctgagcgccaccatcctgtacgagatcctgctgggcaaggccaccctgtacgccgtgctggtgtctgccctggtgctgatggctatggtcaagcggaaggacagccggggaagggccaagcgatctggatctggagcaacaaacttctcactactcaaacaagcaggtgacgtggaggagaatcccgggccttctagaggccatatgaccgagtacaagcccacggtgcgcctcgccacccgcgacgacgtccccagggccgtacgcaccctcgccgccgcgttcgccgactaccccgccacgcgccacaccgtcgatccggaccgccacatcgagcgggtcaccgagctgcaagaactcttcctcacgcgcgtcgggctcgacatcggcaaggtgtgggtcgcggacgacggcgccgcggtggcggtctggaccacgccggagagcgtcgaagcgggggcggtgttcgccgagatcggcccgcgcatggccgagttgagcggttcccggctggccgcgcagcaacagatggaaggcctcctggcgccgcaccggcccaaggagcccgcgtggttcctggccaccgtcggcgtctcgcccgaccaccagggcaagggtctgggcagcgccgtcgtgctccccggagtggaggcggccgagcgcgccggggtgcccgccttcctggagacctccgcgccccgcaacctccccttctacgagcggctcggcttcaccgtcaccgccgacgtcgaggtgcccgaaggaccgcgcacctggtgcatgacccgcaagcccggtgcctga

SEQ ID NO: 9700 - DNA, 2550 bp, Artificial Sequence
  Synthetic Polynucloetide
atggccttaccagtgaccgccttgctcctgccgctggccttgctgctccacgccgccaggccggacatcgtgatgacccagagccacaagttcatgagcaccagcgtgggcgacagagtgtccatcatctgcaaggccagccaggatgtgggcacagccgtggattggtatcagcagaagcctggacagagccccaagctgctgatctactgggccagcacaagacacaccggcgtgcccgatagattcacaggctctggcagcggcaccgatttcaccctggccatcacaaacgtgcagagcgaggacctggccgactacttctgccagcagtacaacagctaccctctgacctttggagccggcaccaagctggaaatcaagagactcgaggacctgaagaacgtgttcccacctgaggtggccgtgttcgagcctagcgaggccgagatcagccacacccagaaagccaccctcgtgtgcctggctaccggcttctaccccgaccatgtggaactgtcttggtgggtcaacggcaaagaggtgcacagcggcgtgtctaccgacccccagccactgaaagaacagcccgccctgaacgacagccggtactgcctgagcagcagactgagagtgtccgccaccttctggcagaacccccggaaccacttcagatgccaggtgcagttctacggcctgagcgagaacgacgagtggacccaggacagagccaagcccgtgacccagatcgtgtctgccgaagcctggggcagagccgattgcggctttaccagcgagagctaccagcagggcgtgctgagcgccaccatcctgtacgagatcctgctgggcaaggccaccctgtacgccgtgctggtgtctgccctggtgctgatggctatggtcaagcggaaggacagccggggaagggccaagcgatctggatctggagcaacaaacttctcactactcaaacaagcaggtgacgtggaggagaatcccgggcctactagtatggactggatttggcgcatccttttccttgtcggcgctgctaccggcgcgcattccttcgaagaagttcagctgcaacagtctggccccgagctggttaagcctggaacaagcgtgcggatctcctgcaagaccagcggctacaccttcaccgagtacaccatccactgggtcaagcagagccacggcaagagcctggaatggatcggcaacatcaaccccaacaacggcggcaccacctacaaccagaagttcgaggacaaggccacactgaccgtggacaagagcagcagcaccgcctacatggaactgagaagcctgaccagcgaggacagcgccgtgtactattgtgccgccggatggaacttcgactactggggccagggaacaaccctgaccgttagctctacgcgtatccagaaccctgatcctgccgtgtaccagctgcgggatagcaagagcagcgacaagagcgtgtgtctgttcaccgacttcgacagccagaccaacgtgtcccagagcaaggactccgacgtgtacatcaccgataagaccgtgctggacatgcggagcatggacttcaagagcaactccgccgtggcctggtccaacaagtccgatttcgcctgcgccaacgccttcaacaacagcattatccccgaggacacattcttcccaagccccgagagcagctgcgacgtgaagctggtggaaaagagcttcgagacagacaccaacctgaacttccagaacctgagcgtgatcggcttcagaatcctgctgctgaaagtggccggctttaacctgctgatgaccctgcggctgtggtccagccgcgccaagagaagcggatctggcgtgaagcagaccctgaatttcgacctgctgaagctggctggcgacgtggaatccaacccaggcccttctagaggccatatgaccgagtacaagcccacggtgcgcctcgccacccgcgacgacgtccccagggccgtacgcaccctcgccgccgcgttcgccgactaccccgccacgcgccacaccgtcgatccggaccgccacatcgagcgggtcaccgagctgcaagaactcttcctcacgcgcgtcgggctcgacatcggcaaggtgtgggtcgcggacgacggcgccgcggtggcggtctggaccacgccggagagcgtcgaagcgggggcggtgttcgccgagatcggcccgcgcatggccgagttgagcggttcccggctggccgcgcagcaacagatggaaggcctcctggcgccgcaccggcccaaggagcccgcgtggttcctggccaccgtcggcgtctcgcccgaccaccagggcaagggtctgggcagcgccgtcgtgctccccggagtggaggcggccgagcgcgccggggtgcccgccttcctggagacctccgcgccccgcaacctccccttctacgagcggctcggcttcaccgtcaccgccgacgtcgaggtgcccgaaggaccgcgcacctggtgcatgacccgcaagcccggtgcctga

SEQ ID NO: 9701 - DNA, 2796 bp, Artificial Sequence
  Synthetic Polynucloetide
atggccttaccagtgaccgccttgctcctgccgctggccttgctgctccacgccgccaggccggacatcgtgatgacccagagccacaagttcatgagcaccagcgtgggcgacagagtgtccatcatctgcaaggccagccaggatgtgggcacagccgtggattggtatcagcagaagcctggacagagccccaagctgctgatctactgggccagcacaagacacaccggcgtgcccgatagattcacaggctctggcagcggcaccgatttcaccctggccatcacaaacgtgcagagcgaggacctggccgactacttctgccagcagtacaacagctaccctctgacctttggagccggcaccaagctggaaatcaagagactcgaggacctgaagaacgtgttcccacctgaggtggccgtgttcgagcctagcgaggccgagatcagccacacccagaaagccaccctcgtgtgcctggctaccggcttctaccccgaccatgtggaactgtcttggtgggtcaacggcaaagaggtgcacagcggcgtgtctaccgacccccagccactgaaagaacagcccgccctgaacgacagccggtactgcctgagcagcagactgagagtgtccgccaccttctggcagaacccccggaaccacttcagatgccaggtgcagttctacggcctgagcgagaacgacgagtggacccaggacagagccaagcccgtgacccagatcgtgtctgccgaagcctggggcagagccgattgcggctttaccagcgagagctaccagcagggcgtgctgagcgccaccatcctgtacgagatcctgctgggcaaggccaccctgtacgccgtgctggtgtctgccctggtgctgatggctatggtcaagcggaaggacagccggggaagggccaagcgatctggatctggagcaacaaacttctcactactcaaacaagcaggtgacgtggaggagaatcccgggcctactagtatggactggatttggcgcatccttttccttgtcggcgctgctaccggcgcgcattccttcgaagaagttcagctgcaacagtctggccccgagctggttaagcctggaacaagcgtgcggatctcctgcaagaccagcggctacaccttcaccgagtacaccatccactgggtcaagcagagccacggcaagagcctggaatggatcggcaacatcaaccccaacaacggcggcaccacctacaaccagaagttcgaggacaaggccacactgaccgtggacaagagcagcagcaccgcctacatggaactgagaagcctgaccagcgaggacagcgccgtgtactattgtgccgccggatggaacttcgactactggggccagggaacaaccctgaccgttagctctacgcgtgagcagaaactgatctcggaagaggatgggagcggcaccccattcccttctctggcccctcccatcatgctgctggtggacggcaagcagcagatggtggtcgtgtgcctggtgctggatgtggccccacctggactggacagccccatctggtttagcgccggcaatggctctgccctggacgcctttacctacggcccaagccctgccaccgatggcacctggacaaatctggcccacctgagcctgcccagcgaggaactggcttcttgggagcctctcgtgtgccacacaggacctggcgctgagggacacagcagatccacccagcctatgcacctgtctggcgaggccagcaccgccagaacctgtcctcaggaacctctgagaggcacccctggcggagcactgtggctgggagtgctgagactgctgctgttcaagctgctgctgtttgacctgctgctgacctgctcctgtctgtgcgatcctgccggccctctgccttctcctgccaccaccacaagactgagagccctgggcagccacagactgcaccctgccacagagacaggcggcagagaggccacaagcagccctagaccccagcccagagacagaagatggggcgataccccccctggcagaaagcctggatctccagtccgcgccaagagaagcggatctggcgtgaagcagaccctgaatttcgacctgctgaagctggctggcgacgtggaatccaacccaggcccttctagaggccatatgaccgagtacaagcccacggtgcgcctcgccacccgcgacgacgtccccagggccgtacgcaccctcgccgccgcgttcgccgactaccccgccacgcgccacaccgtcgatccggaccgccacatcgagcgggtcaccgagctgcaagaactcttcctcacgcgcgtcgggctcgacatcggcaaggtgtgggtcgcggacgacggcgccgcggtggcggtctggaccacgccggagagcgtcgaagcgggggcggtgttcgccgagatcggcccgcgcatggccgagttgagcggttcccggctggccgcgcagcaacagatggaaggcctcctggcgccgcaccggcccaaggagcccgcgtggttcctggccaccgtcggcgtctcgcccgaccaccagggcaagggtctgggcagcgccgtcgtgctccccggagtggaggcggccgagcgcgccggggtgcccgccttcctggagacctccgcgccccgcaacctccccttctacgagcggctcggcttcaccgtcaccgccgacgtcgaggtgcccgaaggaccgcgcacctggtgcatgacccgcaagcccggtgcctga

SEQ ID NO: 9702 - DNA, 2850 bp, Artificial Sequence
  Synthetic Polynucloetide
atggccttaccagtgaccgccttgctcctgccgctggccttgctgctccacgccgccaggccgctcgaggacctgaagaacgtgttcccacctgaggtggccgtgttcgagcctagcgaggccgagatcagccacacccagaaagccaccctcgtgtgcctggctaccggcttctaccccgaccatgtggaactgtcttggtgggtcaacggcaaagaggtgcacagcggcgtgtctaccgacccccagccactgaaagaacagcccgccctgaacgacagccggtactgcctgagcagcagactgagagtgtccgccaccttctggcagaacccccggaaccacttcagatgccaggtgcagttctacggcctgagcgagaacgacgagtggacccaggacagagccaagcccgtgacccagatcgtgtctgccgaagcctggggcagagccgattgcggctttaccagcgagagctaccagcagggcgtgctgagcgccaccatcctgtacgagatcctgctgggcaaggccaccctgtacgccgtgctggtgtctgccctggtgctgatggctatggtcaagcggaaggacagccggggaagggccaagcgatctggatctggagcaacaaacttctcactactcaaacaagcaggtgacgtggaggagaatcccgggcctactagcatggccttaccagtgaccgccttgctcctgccgctggccttgctgctccacgccgccaggccggacatcgtgatgacccagagccacaagttcatgagcaccagcgtgggcgacagagtgtccatcatctgcaaggccagccaggatgtgggcacagccgtggattggtatcagcagaagcctggacagagccccaagctgctgatctactgggccagcacaagacacaccggcgtgcccgatagattcacaggctctggcagcggcaccgatttcaccctggccatcacaaacgtgcagagcgaggacctggccgactacttctgccagcagtacaacagctaccctctgacctttggagccggcaccaagctggaaatcaagagaggcggaggcggaagtggaggcggaggatctggcggcggaggctctgaagttcagctgcaacagtctggccccgagctggttaagcctggaacaagcgtgcggatctcctgcaagaccagcggctacaccttcaccgagtacaccatccactgggtcaagcagagccacggcaagagcctggaatggatcggcaacatcaaccccaacaacggcggcaccacctacaaccagaagttcgaggacaaggccacactgaccgtggacaagagcagcagcaccgcctacatggaactgagaagcctgaccagcgaggacagcgccgtgtactattgtgccgccggatggaacttcgactactggggccagggaacaaccctgaccgttagctctacgcgtgagcagaaactgatctcggaagaggatctggggagcggcaccccattcccttctctggcccctcccatcatgctgctggtggacggcaagcagcagatggtggtcgtgtgcctggtgctggatgtggccccacctggactggacagccccatctggtttagcgccggcaatggctctgccctggacgcctttacctacggcccaagccctgccaccgatggcacctggacaaatctggcccacctgagcctgcccagcgaggaactggcttcttgggagcctctcgtgtgccacacaggacctggcgctgagggacacagcagatccacccagcctatgcacctgtctggcgaggccagcaccgccagaacctgtcctcaggaacctctgagaggcacccctggcggagcactgtggctgggagtgctgagactgctgctgttcaagctgctgctgtttgacctgctgctgacctgctcctgtctgtgcgatcctgccggccctctgccttctcctgccaccaccacaagactgagagccctgggcagccacagactgcaccctgccacagagacaggcggcagagaggccacaagcagccctagaccccagcccagagacagaagatggggcgataccccccctggcagaaagcctggatctccagtccgcgccaagagaagcggatctggcgtgaagcagaccctgaatttcgacctgctgaagctggctggcgacgtggaatccaacccaggcccttctagatctagaggccatatgaccgagtacaagcccacggtgcgcctcgccacccgcgacgacgtccccagggccgtacgcaccctcgccgccgcgttcgccgactaccccgccacgcgccacaccgtcgatccggaccgccacatcgagcgggtcaccgagctgcaagaactcttcctcacgcgcgtcgggctcgacatcggcaaggtgtgggtcgcggacgacggcgccgcggtggcggtctggaccacgccggagagcgtcgaagcgggggcggtgttcgccgagatcggcccgcgcatggccgagttgagcggttcccggctggccgcgcagcaacagatggaaggcctcctggcgccgcaccggcccaaggagcccgcgtggttcctggccaccgtcggcgtctcgcccgaccaccagggcaagggtctgggcagcgccgtcgtgctccccggagtggaggcggccgagcgcgccggggtgcccgccttcctggagacctccgcgccccgcaacctccccttctacgagcggctcggcttcaccgtcaccgccgacgtcgaggtgcccgaaggaccgcgcacctggtgcatgacccgcaagcccggtgcctga

SEQ ID NO: 9703 - DNA, 2661 bp, Artificial Sequence
  Synthetic Polynucloetide
atggccttaccagtgaccgccttgctcctgccgctggccttgctgctccacgccgccaggccggacatcgtgatgacccagagccacaagttcatgagcaccagcgtgggcgacagagtgtccatcatctgcaaggccagccaggatgtgggcacagccgtggattggtatcagcagaagcctggacagagccccaagctgctgatctactgggccagcacaagacacaccggcgtgcccgatagattcacaggctctggcagcggcaccgatttcaccctggccatcacaaacgtgcagagcgaggacctggccgactacttctgccagcagtacaacagctaccctctgacctttggagccggcaccaagctggaaatcaagagactcgaggggaaaccaattcccaaccctcttctgggactggattcaaccggcagcggcgacaagcagctggacgccgacgtgtcccccaagcctaccatcttcctgccctctatcgccgagacaaagctccagaaggccggcacctacctgtgcctgctggaaaagttcttcccagatgtgattaagatccactggcaggaaaagaagtccaacaccatcctgggcagccaggaaggcaacaccatgaagaccaacgacacctacatgaagttcagctggctgaccgtgcccgagaagtccctggacaaagaacacagatgcatcgtgcggcacgaaaacaacaagaacggcgtggaccaggaaatcatcttcccacccatcaagaccgatgtgattacaatggaccccaaggacaactgctccaaggacgccaacgataccctgctgctccagctgaccaacaccagcgcctactacatgtacttgttgctgctgctgaagtccgtggtgtacttcgccatcatcacatgctgcctgctgcggagaaccgccttctgctgcaacggcgagaagtctagggccaagcgatctggatctggagcaacaaacttctcactactcaaacaagcaggtgacgtggaggagaatcccgggcctactagtatggactggatttggcgcatccttttccttgtcggcgctgctaccggcgcgcattccttcgaagaagttcagctgcaacagtctggccccgagctggttaagcctggaacaagcgtgcggatctcctgcaagaccagcggctacaccttcaccgagtacaccatccactgggtcaagcagagccacggcaagagcctggaatggatcggcaacatcaaccccaacaacggcggcaccacctacaaccagaagttcgaggacaaggccacactgaccgtggacaagagcagcagcaccgcctacatggaactgagaagcctgaccagcgaggacagcgccgtgtactattgtgccgccggatggaacttcgactactggggccagggaacaaccctgaccgttagctctacgcgtgagcagaaactgatctcggaagaggatgggagcggcagccagcctcacaccaagcccagcgtgttcgtgatgaagaacggcaccaacgtggcctgcctcgtgaaagagttctaccccaaggacatcaggatcaacctggtgtccagcaagaagatcaccgagttcgaccccgccatcgtgatctcccccagcggcaagtacaacgccgtgaagctggggaagtacgaggacagcaacagcgtgacctgctccgtgcagcacgacaacaagaccgtgcacagcaccgactttgaagtgaaaaccgactccaccgaccacgtgaagcccaaagagacagagaacaccaagcagcccagcaagagctgccacaagcccaaggccatcgtgcacaccgagaaagtgaacatgatgagcctgaccgtgctgggcctgcggatgctgttcgccaaaaccgtggccgtgaacttcctgctgaccgccaagctgttcttcctccgcgccaagagaagcggatctggcgtgaagcagaccctgaatttcgacctgctgaagctggctggcgacgtggaatccaacccaggcccttctagaggccatatgaccgagtacaagcccacggtgcgcctcgccacccgcgacgacgtccccagggccgtacgcaccctcgccgccgcgttcgccgactaccccgccacgcgccacaccgtcgatccggaccgccacatcgagcgggtcaccgagctgcaagaactcttcctcacgcgcgtcgggctcgacatcggcaaggtgtgggtcgcggacgacggcgccgcggtggcggtctggaccacgccggagagcgtcgaagcgggggcggtgttcgccgagatcggcccgcgcatggccgagttgagcggttcccggctggccgcgcagcaacagatggaaggcctcctggcgccgcaccggcccaaggagcccgcgtggttcctggccaccgtcggcgtctcgcccgaccaccagggcaagggtctgggcagcgccgtcgtgctccccggagtggaggcggccgagcgcgccggggtgcccgccttcctggagacctccgcgccccgcaacctccccttctacgagcggctcggcttcaccgtcaccgccgacgtcgaggtgcccgaaggaccgcgcacctggtgcatgacccgcaagcccggtgcctga

SEQ ID NO: 9704 - DNA, 1872 bp, Artificial Sequence
  Synthetic Polynucloetide
atggccttaccagtgaccgccttgctcctgccgctggccttgctgctccacgccgccaggccggacatcgtgatgacccagagccacaagttcatgagcaccagcgtgggcgacagagtgtccatcatctgcaaggccagccaggatgtgggcacagccgtggattggtatcagcagaagcctggacagagccccaagctgctgatctactgggccagcacaagacacaccggcgtgcccgatagattcacaggctctggcagcggcaccgatttcaccctggccatcacaaacgtgcagagcgaggacctggccgactacttctgccagcagtacaacagctaccctctgacctttggagccggcaccaagctggaaatcaagagactcgagagccagcctcacaccaagcccagcgtgttcgtgatgaagaacggcaccaacgtggcctgcctcgtgaaagagttctaccccaaggacatcaggatcaacctggtgtccagcaagaagatcaccgagttcgaccccgccatcgtgatctcccccagcggcaagtacaacgccgtgaagctggggaagtacgaggacagcaacagcgtgacctgctccgtgcagcacgacaacaagaccgtgcacagcaccgactttgaagtgaaaaccgactccaccgaccacgtgaagcccaaagagacagagaacaccaagcagcccagcaagagctgccacaagcccaaggccatcgtgcacaccgagaaagtgaacatgatgagcctgaccgtgctgggcctgcggatgctgttcgccaaaaccgtggccgtgaacttcctgctgaccgccaagctgttcttcctcagggccaagcgatctggatctggagcaacaaacttctcactactcaaacaagcaggtgacgtggaggagaatcccgggcctactagtatggactggatttggcgcatccttttccttgtcggcgctgctaccggcgcgcattccttcgaagaagttcagctgcaacagtctggccccgagctggttaagcctggaacaagcgtgcggatctcctgcaagaccagcggctacaccttcaccgagtacaccatccactgggtcaagcagagccacggcaagagcctggaatggatcggcaacatcaaccccaacaacggcggcaccacctacaaccagaagttcgaggacaaggccacactgaccgtggacaagagcagcagcaccgcctacatggaactgagaagcctgaccagcgaggacagcgccgtgtactattgtgccgccggatggaacttcgactactggggccagggaacaaccctgaccgttagctctacgcgtgacaagcagctggacgccgacgtgtcccccaagcctaccatcttcctgccctctatcgccgagacaaagctccagaaggccggcacctacctgtgcctgctggaaaagttcttcccagatgtgattaagatccactggcaggaaaagaagtccaacaccatcctgggcagccaggaaggcaacaccatgaagaccaacgacacctacatgaagttcagctggctgaccgtgcccgagaagtccctggacaaagaacacagatgcatcgtgcggcacgaaaacaacaagaacggcgtggaccaggaaatcatcttcccacccatcaagaccgatgtgattacaatggaccccaaggacaactgctccaaggacgccaacgataccctgctgctccagctgaccaacaccagcgcctactacatgtacttgttgctgctgctgaagtccgtggtgtacttcgccatcatcacatgctgcctgctgcggagaaccgccttctgctgcaacggcgagaagtct

SEQ ID NO: 9705 - DNA, 2706 bp, Artificial Sequence
  Synthetic Polynucloetide
atggccttaccagtgaccgccttgctcctgccgctggccttgctgctccacgccgccaggccgctcgaggggaaaccaattcccaaccctcttctgggactggattcaaccggcagcggcgacaagcagctggacgccgacgtgtcccccaagcctaccatcttcctgccctctatcgccgagacaaagctccagaaggccggcacctacctgtgcctgctggaaaagttcttcccagatgtgattaagatccactggcaggaaaagaagtccaacaccatcctgggcagccaggaaggcaacaccatgaagaccaacgacacctacatgaagttcagctggctgaccgtgcccgagaagtccctggacaaagaacacagatgcatcgtgcggcacgaaaacaacaagaacggcgtggaccaggaaatcatcttcccacccatcaagaccgatgtgattacaatggaccccaaggacaactgctccaaggacgccaacgataccctgctgctccagctgaccaacaccagcgcctactacatgtacttgttgctgctgctgaagtccgtggtgtacttcgccatcatcacatgctgcctgctgcggagaaccgccttctgctgcaacggcgagaagtctagggccaagcgatctggatctggagcaacaaacttctcactactcaaacaagcaggtgacgtggaggagaatcccgggcctactagcatggccttaccagtgaccgccttgctcctgccgctggccttgctgctccacgccgccaggccggacatcgtgatgacccagagccacaagttcatgagcaccagcgtgggcgacagagtgtccatcatctgcaaggccagccaggatgtgggcacagccgtggattggtatcagcagaagcctggacagagccccaagctgctgatctactgggccagcacaagacacaccggcgtgcccgatagattcacaggctctggcagcggcaccgatttcaccctggccatcacaaacgtgcagagcgaggacctggccgactacttctgccagcagtacaacagctaccctctgacctttggagccggcaccaagctggaaatcaagagaggcggaggcggaagtggaggcggaggatctggcggcggaggctctgaagttcagctgcaacagtctggccccgagctggttaagcctggaacaagcgtgcggatctcctgcaagaccagcggctacaccttcaccgagtacaccatccactgggtcaagcagagccacggcaagagcctggaatggatcggcaacatcaaccccaacaacggcggcaccacctacaaccagaagttcgaggacaaggccacactgaccgtggacaagagcagcagcaccgcctacatggaactgagaagcctgaccagcgaggacagcgccgtgtactattgtgccgccggatggaacttcgactactggggccagggaacaaccctgaccgttagctctacgcgtgagcagaaactgatctcggaagaggatgggagcggcagccagcctcacaccaagcccagcgtgttcgtgatgaagaacggcaccaacgtggcctgcctcgtgaaagagttctaccccaaggacatcaggatcaacctggtgtccagcaagaagatcaccgagttcgaccccgccatcgtgatctcccccagcggcaagtacaacgccgtgaagctggggaagtacgaggacagcaacagcgtgacctgctccgtgcagcacgacaacaagaccgtgcacagcaccgactttgaagtgaaaaccgactccaccgaccacgtgaagcccaaagagacagagaacaccaagcagcccagcaagagctgccacaagcccaaggccatcgtgcacaccgagaaagtgaacatgatgagcctgaccgtgctgggcctgcggatgctgttcgccaaaaccgtggccgtgaacttcctgctgaccgccaagctgttcttcctccgcgccaagagaagcggatctggcgtgaagcagaccctgaatttcgacctgctgaagctggctggcgacgtggaatccaacccaggcccttctagaggccatatgaccgagtacaagcccacggtgcgcctcgccacccgcgacgacgtccccagggccgtacgcaccctcgccgccgcgttcgccgactaccccgccacgcgccacaccgtcgatccggaccgccacatcgagcgggtcaccgagctgcaagaactcttcctcacgcgcgtcgggctcgacatcggcaaggtgtgggtcgcggacgacggcgccgcggtggcggtctggaccacgccggagagcgtcgaagcgggggcggtgttcgccgagatcggcccgcgcatggccgagttgagcggttcccggctggccgcgcagcaacagatggaaggcctcctggcgccgcaccggcccaaggagcccgcgtggttcctggccaccgtcggcgtctcgcccgaccaccagggcaagggtctgggcagcgccgtcgtgctccccggagtggaggcggccgagcgcgccggggtgcccgccttcctggagacctccgcgccccgcaacctccccttctacgagcggctcggcttcaccgtcaccgccgacgtcgaggtgcccgaaggaccgcgcacctggtgcatgacccgcaagcccggtgcctga

SEQ ID NO: 9706 - DNA, 3081 bp, Artificial Sequence
  Synthetic Polynucloetide
atggccttaccagtgaccgccttgctcctgccgctggccttgctgctccacgccgccaggccggacatcgtgatgacccagagccacaagttcatgagcaccagcgtgggcgacagagtgtccatcatctgcaaggccagccaggatgtgggcacagccgtggattggtatcagcagaagcctggacagagccccaagctgctgatctactgggccagcacaagacacaccggcgtgcccgatagattcacaggctctggcagcggcaccgatttcaccctggccatcacaaacgtgcagagcgaggacctggccgactacttctgccagcagtacaacagctaccctctgacctttggagccggcaccaagctggaaatcaagagaggacagcctaaggccaatcctaccgtgacactgttccctccaagcagcgaagaactccaggccaacaaggccacacttgtgtgcctgatctccgacttctaccctggggctgtgacagtggcttggaaggccgatggatctcctgtgaaagccggcgtggaaaccaccaagccatccaagcagagcaacaacaaatacgccgccagctcctacctgagcctgacacctgagcagtggaagtcccacagatcctacagctgccaagtgacccacgaaggcagcaccgtggaaaagacagtggcccctacagagtgcagcggatcccagagcttcggcctgctggaccccaagctgtgctacctgctggatggcatcctgttcatctacggcgtgatcctgaccgccctgttcctgagagtgaagttcagcagaagcgccgacgcccctgcctaccagcagggacagaaccaactgtacaacgagctgaacctgggcagacgggaagagtacgacgtgctggacaagcggagaggcagggaccctgagatgggcggaaagccccagcggagaaagaacccccaggaaggactgtataacgaactccagaaagacaagatggccgaagcctacagcgagatcggcatgaagggcgagcggagaagaggcaagggccacgatggcctgtaccagggcctgagcaccgccaccaaggacacctatgacgccctgcacatgcaggccctgcctccaagaagggccaagcgatctggatctggagcaacaaacttctcactactcaaacaagcaggtgacgtggaggagaatcccgggcctactagtatggactggatttggcgcatccttttccttgtcggcgctgctaccggcgcgcattccttcgaagaagttcagctgcaacagtctggccccgagctggttaagcctggaacaagcgtgcggatctcctgcaagaccagcggctacaccttcaccgagtacaccatccactgggtcaagcagagccacggcaagagcctggaatggatcggcaacatcaaccccaacaacggcggcaccacctacaaccagaagttcgaggacaaggccacactgaccgtggacaagagcagcagcaccgcctacatggaactgagaagcctgaccagcgaggacagcgccgtgtactattgtgccgccggatggaacttcgactactggggccagggaacaaccctgaccgttagctctgcctctacaaagggaccctccgtgtttcctctggctcccagcagcaagtctacaagcggaggaacagccgctctgggctgcctggtcaaggattactttcccgagcctgtgaccgtgtcctggaatagcggagcactgacaagcggcgtgcacacctttccagccgtgctgcaaagcagcggcctgtactctctgagcagcgtggtcacagtgcctagctctagcctgggcacccagacctacatctgcaatgtgaaccacaagcctagcaacaccaaggtggacaagagagtggaacccaagagctgtggtacccagagttttgggttgttggaccctaaattgtgctatctgttggacggaatcctgttcatttacggagtgatcctgaccgcattgttcctgcgggttaagttttccagatccgcagacgcacccgcttaccaacaagggcagaaccaactctacaatgaacttaatttggggcggagggaagagtacgacgttctggacaaaaggaggggacgagatcccgagatgggcggaaagcctcagcgaaggaagaatccgcaagaggggctttataacgaactccagaaagataaaatggcagaagcctatagtgagattgggatgaagggagaaaggaggaggggtaaaggtcacgatgggttgtaccaaggattgagcacagccactaaagatacctatgatgcgctccacatgcaggccctgccgccaagacgcgccaagagaagcggatctggcgtgaagcagaccctgaatttcgacctgctgaagctggctggcgacgtggaatccaacccaggcccttctagaggccatatgaccgagtacaagcccacggtgcgcctcgccacccgcgacgacgtccccagggccgtacgcaccctcgccgccgcgttcgccgactaccccgccacgcgccacaccgtcgatccggaccgccacatcgagcgggtcaccgagctgcaagaactcttcctcacgcgcgtcgggctcgacatcggcaaggtgtgggtcgcggacgacggcgccgcggtggcggtctggaccacgccggagagcgtcgaagcgggggcggtgttcgccgagatcggcccgcgcatggccgagttgagcggttcccggctggccgcgcagcaacagatggaaggcctcctggcgccgcaccggcccaaggagcccgcgtggttcctggccaccgtcggcgtctcgcccgaccaccagggcaagggtctgggcagcgccgtcgtgctccccggagtggaggcggccgagcgcgccggggtgcccgccttcctggagacctccgcgccccgcaacctccccttctacgagcggctcggcttcaccgtcaccgccgacgtcgaggtgcccgaaggaccgcgcacctggtgcatgacccgcaagcccggtgcctga

SEQ ID NO: 9707 - DNA, 2436 bp, Artificial Sequence
  Synthetic Polynucloetide
atggccttaccagtgaccgccttgctcctgccgctggccttgctgctccacgccgccaggccggacatcgtgatgacccagagccacaagttcatgagcaccagcgtgggcgacagagtgtccatcatctgcaaggccagccaggatgtgggcacagccgtggattggtatcagcagaagcctggacagagccccaagctgctgatctactgggccagcacaagacacaccggcgtgcccgatagattcacaggctctggcagcggcaccgatttcaccctggccatcacaaacgtgcagagcgaggacctggccgactacttctgccagcagtacaacagctaccctctgacctttggagccggcaccaagctggaaatcaagagactcgaggacctgaagaacgtgttcccacctgaggtggccgtgttcgagcctagcgaggccgagatcagccacacccagaaagccaccctcgtgtgcctggctaccggcttctaccccgaccatgtggaactgtcttggtgggtcaacggcaaagaggtgcacagcggcgtgtctaccgacccccagccactgaaagaacagcccgccctgaacgacagccggtactgcctgagcagcagactgagagtgtccgccaccttctggcagaacccccggaaccacttcagatgccaggtgcagttctacggcctgagcgagaacgacgagtggacccaggacagagccaagcccgtgacccagatcgtgtctgccgaagcctggggcagagccgattgcggatcccagagcttcggcctgctggaccccaagctgtgctacctgctggatggcatcctgttcatctacggcgtgatcctgaccgccctgttcctgagagtgaagttcagcagaagcgccgacgcccctgcctaccagcagggacagaaccaactgtacaacgagctgaacctgggcagacgggaagagtacgacgtgctggacaagcggagaggcagggaccctgagatgggcggaaagccccagcggagaaagaacccccaggaaggactgtataacgaactccagaaagacaagatggccgaagcctacagcgagatcggcatgaagggcgagcggagaagaggcaagggccacgatggcctgtaccagggcctgagcaccgccaccaaggacacctatgacgccctgcacatgcaggccctgcctccaagaagggccaagcgatctggatctggagcaacaaacttctcactactcaaacaagcaggtgacgtggaggagaatcccgggcctactagtatggactggatttggcgcatccttttccttgtcggcgctgctaccggcgcgcattccttcgaagaagttcagctgcaacagtctggccccgagctggttaagcctggaacaagcgtgcggatctcctgcaagaccagcggctacaccttcaccgagtacaccatccactgggtcaagcagagccacggcaagagcctggaatggatcggcaacatcaaccccaacaacggcggcaccacctacaaccagaagttcgaggacaaggccacactgaccgtggacaagagcagcagcaccgcctacatggaactgagaagcctgaccagcgaggacagcgccgtgtactattgtgccgccggatggaacttcgactactggggccagggaacaaccctgaccgttagctctacgcgtatccagaaccctgatcctgccgtgtaccagctgcgggatagcaagagcagcgacaagagcgtgtgtctgttcaccgacttcgacagccagaccaacgtgtcccagagcaaggactccgacgtgtacatcaccgataagaccgtgctggacatgcggagcatggacttcaagagcaactccgccgtggcctggtccaacaagtccgatttcgcctgcgccaacgccttcaacaacagcattatccccgaggacacattcttcccaagccccgagagcagctgcggtacccagagttttgggttgttggaccctaaattgtgctatctgttggacggaatcctgttcatttacggagtgatcctgaccgcattgttcctgcgggttaagttttccagatccgcagacgcacccgcttaccaacaagggcagaaccaactctacaatgaacttaatttggggcggagggaagagtacgacgttctggacaaaaggaggggacgagatcccgagatgggcggaaagcctcagcgaaggaagaatccgcaagaggggctttataacgaactccagaaagataaaatggcagaagcctatagtgagattgggatgaagggagaaaggaggaggggtaaaggtcacgatgggttgtaccaaggattgagcacagccactaaagatacctatgatgcgctccacatgcaggccctgccgccaaga

SEQ ID NO: 9708 - DNA, 2436 bp, Artificial Sequence
  Synthetic Polynucloetide
atggccttaccagtgaccgccttgctcctgccgctggccttgctgctccacgccgccaggccggacatcgtgatgacccagagccacaagttcatgagcaccagcgtgggcgacagagtgtccatcatctgcaaggccagccaggatgtgggcacagccgtggattggtatcagcagaagcctggacagagccccaagctgctgatctactgggccagcacaagacacaccggcgtgcccgatagattcacaggctctggcagcggcaccgatttcaccctggccatcacaaacgtgcagagcgaggacctggccgactacttctgccagcagtacaacagctaccctctgacctttggagccggcaccaagctggaaatcaagagactcgaggacctgaagaacgtgttcccacctgaggtggccgtgttcgagcctagcaaggccgagatcgcccacacccagaaagccaccctcgtgtgcctggctaccggcttctaccccgaccatgtggaactgtcttggtgggtcaacggcaaagaggtgcacagcggcgtgtgtaccgacccccagccactgaaagaacagcccgccctgaacgacagccggtactgcctgagcagcagactgagagtgtccgccaccttctggcagaacccccggaaccacttcagatgccaggtgcagttctacggcctgagcgagaacgacgagtggacccaggacagagccaagcccgtgacccagatcgtgtctgccgaagcctggggcagagccgattgcggatcccagagcttcggcctgctggaccccaagctgtgctacctgctggatggcatcctgttcatctacggcgtgatcctgaccgccctgttcctgagagtgaagttcagcagaagcgccgacgcccctgcctaccagcagggacagaaccaactgtacaacgagctgaacctgggcagacgggaagagtacgacgtgctggacaagcggagaggcagggaccctgagatgggcggaaagccccagcggagaaagaacccccaggaaggactgtataacgaactccagaaagacaagatggccgaagcctacagcgagatcggcatgaagggcgagcggagaagaggcaagggccacgatggcctgtaccagggcctgagcaccgccaccaaggacacctatgacgccctgcacatgcaggccctgcctccaagaagggccaagcgatctggatctggagcaacaaacttctcactactcaaacaagcaggtgacgtggaggagaatcccgggcctactagtatggactggatttggcgcatccttttccttgtcggcgctgctaccggcgcgcattccttcgaagaagttcagctgcaacagtctggccccgagctggttaagcctggaacaagcgtgcggatctcctgcaagaccagcggctacaccttcaccgagtacaccatccactgggtcaagcagagccacggcaagagcctggaatggatcggcaacatcaaccccaacaacggcggcaccacctacaaccagaagttcgaggacaaggccacactgaccgtggacaagagcagcagcaccgcctacatggaactgagaagcctgaccagcgaggacagcgccgtgtactattgtgccgccggatggaacttcgactactggggccagggaacaaccctgaccgttagctctacgcgtatccagaaccctgatcctgccgtgtaccagctgcgggatagcaagagcagcgacaagagcgtgtgtctgttcaccgacttcgacagccagaccaacgtgtcccagagcaaggactccgacgtgtacatcaccgataagtgcgtgctggacatgcggagcatggacttcaagagcaactccgccgtggcctggtccaacaagtccgatttcgcctgcgccaacgccttcaacaacagcattatccccgaggacacattcttcccaagcagcgacgtgccctgcggtacccagagttttgggttgttggaccctaaattgtgctatctgttggacggaatcctgttcatttacggagtgatcctgaccgcattgttcctgcgggttaagttttccagatccgcagacgcacccgcttaccaacaagggcagaaccaactctacaatgaacttaatttggggcggagggaagagtacgacgttctggacaaaaggaggggacgagatcccgagatgggcggaaagcctcagcgaaggaagaatccgcaagaggggctttataacgaactccagaaagataaaatggcagaagcctatagtgagattgggatgaagggagaaaggaggaggggtaaaggtcacgatgggttgtaccaaggattgagcacagccactaaagatacctatgatgcgctccacatgcaggccctgccgccaaga

SEQ ID NO: 9709 - DNA, 2649 bp, Artificial Sequence
  Synthetic Polynucloetide
atggccttaccagtgaccgccttgctcctgccgctggccttgctgctccacgccgccaggccggacatcgtgatgacccagagccacaagttcatgagcaccagcgtgggcgacagagtgtccatcatctgcaaggccagccaggatgtgggcacagccgtggattggtatcagcagaagcctggacagagccccaagctgctgatctactgggccagcacaagacacaccggcgtgcccgatagattcacaggctctggcagcggcaccgatttcaccctggccatcacaaacgtgcagagcgaggacctggccgactacttctgccagcagtacaacagctaccctctgacctttggagccggcaccaagctggaaatcaagagactcgaggggaaaccaattcccaaccctcttctgggactggattcaaccggcagcggcgaggacctgaagaacgtgttcccacctgaggtggccgtgttcgagcctagcgaggccgagatcagccacacccagaaagccaccctcgtgtgcctggctaccggcttctaccccgaccatgtggaactgtcttggtgggtcaacggcaaagaggtgcacagcggcgtgtctaccgacccccagccactgaaagaacagcccgccctgaacgacagccggtactgcctgagcagcagactgagagtgtccgccaccttctggcagaacccccggaaccacttcagatgccaggtgcagttctacggcctgagcgagaacgacgagtggacccaggacagagccaagcccgtgacccagatcgtgtctgccgaagcctggggcagagccgattgcggatcccagagcttcggcctgctggaccccaagctgtgctacctgctggatggcatcctgttcatctacggcgtgatcctgaccgccctgttcctgagagtgaagttcagcagaagcgccgacgcccctgcctaccagcagggacagaaccaactgtacaacgagctgaacctgggcagacgggaagagtacgacgtgctggacaagcggagaggcagggaccctgagatgggcggaaagccccagcggagaaagaacccccaggaaggactgtataacgaactccagaaagacaagatggccgaagcctacagcgagatcggcatgaagggcgagcggagaagaggcaagggccacgatggcctgtaccagggcctgagcaccgccaccaaggacacctatgacgccctgcacatgcaggccctgcctccaagaagggccaagcgatctggatctggagcaacaaacttctcactactcaaacaagcaggtgacgtggaggagaatcccgggcctactagtatggactggatttggcgcatccttttccttgtcggcgctgctaccggcgcgcattccttcgaagaagttcagctgcaacagtctggccccgagctggttaagcctggaacaagcgtgcggatctcctgcaagaccagcggctacaccttcaccgagtacaccatccactgggtcaagcagagccacggcaagagcctggaatggatcggcaacatcaaccccaacaacggcggcaccacctacaaccagaagttcgaggacaaggccacactgaccgtggacaagagcagcagcaccgcctacatggaactgagaagcctgaccagcgaggacagcgccgtgtactattgtgccgccggatggaacttcgactactggggccagggaacaaccctgaccgttagctctacgcgtgagcagaaactgatctcggaagaggatgggagcggcatccagaaccctgatcctgccgtgtaccagctgcgggatagcaagagcagcgacaagagcgtgtgtctgttcaccgacttcgacagccagaccaacgtgtcccagagcaaggactccgacgtgtacatcaccgataagaccgtgctggacatgcggagcatggacttcaagagcaactccgccgtggcctggtccaacaagtccgatttcgcctgcgccaacgccttcaacaacagcattatccccgaggacacattcttcccaagccccgagagcagctgcggtacccagagttttgggttgttggaccctaaattgtgctatctgttggacggaatcctgttcatttacggagtgatcctgaccgcattgttcctgaggagcaagcggtcacggctgctccacagcgattacatgaatatgacaccacgaagaccgggtcctactcgcaaacactaccaaccctacgcacctccccgcgactttgcagcgtaccgatctcgggttaagttttccagatccgcagacgcacccgcttaccaacaagggcagaaccaactctacaatgaacttaatttggggcggagggaagagtacgacgttctggacaaaaggaggggacgagatcccgagatgggcggaaagcctcagcgaaggaagaatccgcaagaggggctttataacgaactccagaaagataaaatggcagaagcctatagtgagattgggatgaagggagaaaggaggaggggtaaaggtcacgatgggttgtaccaaggattgagcacagccactaaagatacctatgatgcgctccacatgcaggccctgccgccaaga

SEQ ID NO: 9710 - DNA, 2772 bp, Artificial Sequence
  Synthetic Polynucloetide
atggccttaccagtgaccgccttgctcctgccgctggccttgctgctccacgccgccaggccggacatcgtgatgacccagagccacaagttcatgagcaccagcgtgggcgacagagtgtccatcatctgcaaggccagccaggatgtgggcacagccgtggattggtatcagcagaagcctggacagagccccaagctgctgatctactgggccagcacaagacacaccggcgtgcccgatagattcacaggctctggcagcggcaccgatttcaccctggccatcacaaacgtgcagagcgaggacctggccgactacttctgccagcagtacaacagctaccctctgacctttggagccggcaccaagctggaaatcaagagactcgaggggaaaccaattcccaaccctcttctgggactggattcaaccggcagcggcgaggacctgaagaacgtgttcccacctgaggtggccgtgttcgagcctagcgaggccgagatcagccacacccagaaagccaccctcgtgtgcctggctaccggcttctaccccgaccatgtggaactgtcttggtgggtcaacggcaaagaggtgcacagcggcgtgtctaccgacccccagccactgaaagaacagcccgccctgaacgacagccggtactgcctgagcagcagactgagagtgtccgccaccttctggcagaacccccggaaccacttcagatgccaggtgcagttctacggcctgagcgagaacgacgagtggacccaggacagagccaagcccgtgacccagatcgtgtctgccgaagcctggggcagagccgattgcggatcccagagcttcggcctgctggaccccaagctgtgctacctgctggatggcatcctgttcatctacggcgtgatcctgaccgccctgttcctgaggagtaagaggagcaggctcctgcacagtgactacatgaacatgactccacgccgccccggacccacccgcaagcattaccagccctatgccccaccacgcgacttcgcagcctatcgctccagagtgaagttcagcagaagcgccgacgcccctgcctaccagcagggacagaaccaactgtacaacgagctgaacctgggcagacgggaagagtacgacgtgctggacaagcggagaggcagggaccctgagatgggcggaaagccccagcggagaaagaacccccaggaaggactgtataacgaactccagaaagacaagatggccgaagcctacagcgagatcggcatgaagggcgagcggagaagaggcaagggccacgatggcctgtaccagggcctgagcaccgccaccaaggacacctatgacgccctgcacatgcaggccctgcctccaagaagggccaagcgatctggatctggagcaacaaacttctcactactcaaacaagcaggtgacgtggaggagaatcccgggcctactagtatggactggatttggcgcatccttttccttgtcggcgctgctaccggcgcgcattccttcgaagaagttcagctgcaacagtctggccccgagctggttaagcctggaacaagcgtgcggatctcctgcaagaccagcggctacaccttcaccgagtacaccatccactgggtcaagcagagccacggcaagagcctggaatggatcggcaacatcaaccccaacaacggcggcaccacctacaaccagaagttcgaggacaaggccacactgaccgtggacaagagcagcagcaccgcctacatggaactgagaagcctgaccagcgaggacagcgccgtgtactattgtgccgccggatggaacttcgactactggggccagggaacaaccctgaccgttagctctacgcgtgagcagaaactgatctcggaagaggatgggagcggcatccagaaccctgatcctgccgtgtaccagctgcgggatagcaagagcagcgacaagagcgtgtgtctgttcaccgacttcgacagccagaccaacgtgtcccagagcaaggactccgacgtgtacatcaccgataagaccgtgctggacatgcggagcatggacttcaagagcaactccgccgtggcctggtccaacaagtccgatttcgcctgcgccaacgccttcaacaacagcattatccccgaggacacattcttcccaagccccgagagcagctgcggtacccagagttttgggttgttggaccctaaattgtgctatctgttggacggaatcctgttcatttacggagtgatcctgaccgcattgttcctgaggagcaagcggtcacggctgctccacagcgattacatgaatatgacaccacgaagaccgggtcctactcgcaaacactaccaaccctacgcacctccccgcgactttgcagcgtaccgatctcgggttaagttttccagatccgcagacgcacccgcttaccaacaagggcagaaccaactctacaatgaacttaatttggggcggagggaagagtacgacgttctggacaaaaggaggggacgagatcccgagatgggcggaaagcctcagcgaaggaagaatccgcaagaggggctttataacgaactccagaaagataaaatggcagaagcctatagtgagattgggatgaagggagaaaggaggaggggtaaaggtcacgatgggttgtaccaaggattgagcacagccactaaagatacctatgatgcgctccacatgcaggccctgccgccaaga

SEQ ID NO: 9711 - DNA, 2655 bp, Artificial Sequence
  Synthetic Polynucloetide
atggccttaccagtgaccgccttgctcctgccgctggccttgctgctccacgccgccaggccggacatcgtgatgacccagagccacaagttcatgagcaccagcgtgggcgacagagtgtccatcatctgcaaggccagccaggatgtgggcacagccgtggattggtatcagcagaagcctggacagagccccaagctgctgatctactgggccagcacaagacacaccggcgtgcccgatagattcacaggctctggcagcggcaccgatttcaccctggccatcacaaacgtgcagagcgaggacctggccgactacttctgccagcagtacaacagctaccctctgacctttggagccggcaccaagctggaaatcaagagactcgaggggaaaccaattcccaaccctcttctgggactggattcaaccggcagcggcgaggacctgaagaacgtgttcccacctgaggtggccgtgttcgagcctagcgaggccgagatcagccacacccagaaagccaccctcgtgtgcctggctaccggcttctaccccgaccatgtggaactgtcttggtgggtcaacggcaaagaggtgcacagcggcgtgtctaccgacccccagccactgaaagaacagcccgccctgaacgacagccggtactgcctgagcagcagactgagagtgtccgccaccttctggcagaacccccggaaccacttcagatgccaggtgcagttctacggcctgagcgagaacgacgagtggacccaggacagagccaagcccgtgacccagatcgtgtctgccgaagcctggggcagagccgattgcggatcccagagcttcggcctgctggaccccaagctgtgctacctgctggatggcatcctgttcatctacggcgtgatcctgaccgccctgttcctgagagtgaagttcagcagaagcgccgacgcccctgcctaccagcagggacagaaccaactgtacaacgagctgaacctgggcagacgggaagagtacgacgtgctggacaagcggagaggcagggaccctgagatgggcggaaagccccagcggagaaagaacccccaggaaggactgtataacgaactccagaaagacaagatggccgaagcctacagcgagatcggcatgaagggcgagcggagaagaggcaagggccacgatggcctgtaccagggcctgagcaccgccaccaaggacacctatgacgccctgcacatgcaggccctgcctccaagaagggccaagcgatctggatctggagcaacaaacttctcactactcaaacaagcaggtgacgtggaggagaatcccgggcctactagtatggactggatttggcgcatccttttccttgtcggcgctgctaccggcgcgcattccttcgaagaagttcagctgcaacagtctggccccgagctggttaagcctggaacaagcgtgcggatctcctgcaagaccagcggctacaccttcaccgagtacaccatccactgggtcaagcagagccacggcaagagcctggaatggatcggcaacatcaaccccaacaacggcggcaccacctacaaccagaagttcgaggacaaggccacactgaccgtggacaagagcagcagcaccgcctacatggaactgagaagcctgaccagcgaggacagcgccgtgtactattgtgccgccggatggaacttcgactactggggccagggaacaaccctgaccgttagctctacgcgtgagcagaaactgatctcggaagaggatctggggagcggcatccagaaccctgatcctgccgtgtaccagctgcgggatagcaagagcagcgacaagagcgtgtgtctgttcaccgacttcgacagccagaccaacgtgtcccagagcaaggactccgacgtgtacatcaccgataagaccgtgctggacatgcggagcatggacttcaagagcaactccgccgtggcctggtccaacaagtccgatttcgcctgcgccaacgccttcaacaacagcattatccccgaggacacattcttcccaagccccgagagcagctgcggtacccagagttttgggttgttggaccctaaattgtgctatctgttggacggaatcctgttcatttacggagtgatcctgaccgcattgttcctgaagagaggccggaagaagctgctgtacatcttcaagcagcctttcatgcggcccgtgcagaccacccaggaagaggacggctgctcctgccggttccccgaggaagaagaaggcggctgcgagctgcgggttaagttttccagatccgcagacgcacccgcttaccaacaagggcagaaccaactctacaatgaacttaatttggggcggagggaagagtacgacgttctggacaaaaggaggggacgagatcccgagatgggcggaaagcctcagcgaaggaagaatccgcaagaggggctttataacgaactccagaaagataaaatggcagaagcctatagtgagattgggatgaagggagaaaggaggaggggtaaaggtcacgatgggttgtaccaaggattgagcacagccactaaagatacctatgatgcgctccacatgcaggccctgccgccaaga

SEQ ID NO: 9712 - DNA, 2781 bp, Artificial Sequence
  Synthetic Polynucloetide
atggccttaccagtgaccgccttgctcctgccgctggccttgctgctccacgccgccaggccggacatcgtgatgacccagagccacaagttcatgagcaccagcgtgggcgacagagtgtccatcatctgcaaggccagccaggatgtgggcacagccgtggattggtatcagcagaagcctggacagagccccaagctgctgatctactgggccagcacaagacacaccggcgtgcccgatagattcacaggctctggcagcggcaccgatttcaccctggccatcacaaacgtgcagagcgaggacctggccgactacttctgccagcagtacaacagctaccctctgacctttggagccggcaccaagctggaaatcaagagactcgaggggaaaccaattcccaaccctcttctgggactggattcaaccggcagcggcgaggacctgaagaacgtgttcccacctgaggtggccgtgttcgagcctagcgaggccgagatcagccacacccagaaagccaccctcgtgtgcctggctaccggcttctaccccgaccatgtggaactgtcttggtgggtcaacggcaaagaggtgcacagcggcgtgtctaccgacccccagccactgaaagaacagcccgccctgaacgacagccggtactgcctgagcagcagactgagagtgtccgccaccttctggcagaacccccggaaccacttcagatgccaggtgcagttctacggcctgagcgagaacgacgagtggacccaggacagagccaagcccgtgacccagatcgtgtctgccgaagcctggggcagagccgattgcggatcccagagcttcggcctgctggaccccaagctgtgctacctgctggatggcatcctgttcatctacggcgtgatcctgaccgccctgttcctgaaacggggcagaaagaaactcctgtatatattcaaacaaccatttatgagaccagtacaaactactcaagaggaagatggctgtagctgccgatttccagaagaagaagaaggaggatgtgaactgagagtgaagttcagcagaagcgccgacgcccctgcctaccagcagggacagaaccaactgtacaacgagctgaacctgggcagacgggaagagtacgacgtgctggacaagcggagaggcagggaccctgagatgggcggaaagccccagcggagaaagaacccccaggaaggactgtataacgaactccagaaagacaagatggccgaagcctacagcgagatcggcatgaagggcgagcggagaagaggcaagggccacgatggcctgtaccagggcctgagcaccgccaccaaggacacctatgacgccctgcacatgcaggccctgcctccaagaagggccaagcgatctggatctggagcaacaaacttctcactactcaaacaagcaggtgacgtggaggagaatcccgggcctactagtatggactggatttggcgcatccttttccttgtcggcgctgctaccggcgcgcattccttcgaagaagttcagctgcaacagtctggccccgagctggttaagcctggaacaagcgtgcggatctcctgcaagaccagcggctacaccttcaccgagtacaccatccactgggtcaagcagagccacggcaagagcctggaatggatcggcaacatcaaccccaacaacggcggcaccacctacaaccagaagttcgaggacaaggccacactgaccgtggacaagagcagcagcaccgcctacatggaactgagaagcctgaccagcgaggacagcgccgtgtactattgtgccgccggatggaacttcgactactggggccagggaacaaccctgaccgttagctctacgcgtgagcagaaactgatctcggaagaggatctggggagcggcatccagaaccctgatcctgccgtgtaccagctgcgggatagcaagagcagcgacaagagcgtgtgtctgttcaccgacttcgacagccagaccaacgtgtcccagagcaaggactccgacgtgtacatcaccgataagaccgtgctggacatgcggagcatggacttcaagagcaactccgccgtggcctggtccaacaagtccgatttcgcctgcgccaacgccttcaacaacagcattatccccgaggacacattcttcccaagccccgagagcagctgcggtacccagagttttgggttgttggaccctaaattgtgctatctgttggacggaatcctgttcatttacggagtgatcctgaccgcattgttcctgaagagaggccggaagaagctgctgtacatcttcaagcagcctttcatgcggcccgtgcagaccacccaggaagaggacggctgctcctgccggttccccgaggaagaagaaggcggctgcgagctgcgggttaagttttccagatccgcagacgcacccgcttaccaacaagggcagaaccaactctacaatgaacttaatttggggcggagggaagagtacgacgttctggacaaaaggaggggacgagatcccgagatgggcggaaagcctcagcgaaggaagaatccgcaagaggggctttataacgaactccagaaagataaaatggcagaagcctatagtgagattgggatgaagggagaaaggaggaggggtaaaggtcacgatgggttgtaccaaggattgagcacagccactaaagatacctatgatgcgctccacatgcaggccctgccgccaaga

SEQ ID NO: 9713 - DNA, 2454 bp, Artificial Sequence
  Synthetic Polynucloetide
atggccttaccagtgaccgccttgctcctgccgctggccttgctgctccacgccgccaggccggacatcgtgatgacccagagccacaagttcatgagcaccagcgtgggcgacagagtgtccatcatctgcaaggccagccaggatgtgggcacagccgtggattggtatcagcagaagcctggacagagccccaagctgctgatctactgggccagcacaagacacaccggcgtgcccgatagattcacaggctctggcagcggcaccgatttcaccctggccatcacaaacgtgcagagcgaggacctggccgactacttctgccagcagtacaacagctaccctctgacctttggagccggcaccaagctggaaatcaagagactcgagcagagcttcggcctgctggaccccaagctgtgctacctgctggatggcatcctgttcatctacggcgtgatcctgaccgccctgttcctgagagtgaagttcagcagaagcgccgacgcccctgcctaccagcagggacagaaccaactgtacaacgagctgaacctgggcagacgggaagagtacgacgtgctggacaagcggagaggcagggaccctgagatgggcggaaagccccagcggagaaagaacccccaggaaggactgtataacgaactccagaaagacaagatggccgaagcctacagcgagatcggcatgaagggcgagcggagaagaggcaagggccacgatggcctgtaccagggcctgagcaccgccaccaaggacacctatgacgccctgcacatgcaggccctgcctccaagaagggccaagcgatctggatctggagcaacaaacttctcactactcaaacaagcaggtgacgtggaggagaatcccgggcctactagtatggactggatttggcgcatccttttccttgtcggcgctgctaccggcgcgcattccttcgaagaagttcagctgcaacagtctggccccgagctggttaagcctggaacaagcgtgcggatctcctgcaagaccagcggctacaccttcaccgagtacaccatccactgggtcaagcagagccacggcaagagcctggaatggatcggcaacatcaaccccaacaacggcggcaccacctacaaccagaagttcgaggacaaggccacactgaccgtggacaagagcagcagcaccgcctacatggaactgagaagcctgaccagcgaggacagcgccgtgtactattgtgccgccggatggaacttcgactactggggccagggaacaaccctgaccgttagctctacgcgtcagagttttgggttgttggaccctaaattgtgctatctgttggacggaatcctgttcatttacggagtgatcctgaccgcattgttcctgcgggttaagttttccagatccgcagacgcacccgcttaccaacaagggcagaaccaactctacaatgaacttaatttggggcggagggaagagtacgacgttctggacaaaaggaggggacgagatcccgagatgggcggaaagcctcagcgaaggaagaatccgcaagaggggctttataacgaactccagaaagataaaatggcagaagcctatagtgagattgggatgaagggagaaaggaggaggggtaaaggtcacgatgggttgtaccaaggattgagcacagccactaaagatacctatgatgcgctccacatgcaggccctgccgccaagacgcgccaagagaagcggatctggcgtgaagcagaccctgaatttcgacctgctgaagctggctggcgacgtggaatccaacccaggcccttctagaggccatatgaccgagtacaagcccacggtgcgcctcgccacccgcgacgacgtccccagggccgtacgcaccctcgccgccgcgttcgccgactaccccgccacgcgccacaccgtcgatccggaccgccacatcgagcgggtcaccgagctgcaagaactcttcctcacgcgcgtcgggctcgacatcggcaaggtgtgggtcgcggacgacggcgccgcggtggcggtctggaccacgccggagagcgtcgaagcgggggcggtgttcgccgagatcggcccgcgcatggccgagttgagcggttcccggctggccgcgcagcaacagatggaaggcctcctggcgccgcaccggcccaaggagcccgcgtggttcctggccaccgtcggcgtctcgcccgaccaccagggcaagggtctgggcagcgccgtcgtgctccccggagtggaggcggccgagcgcgccggggtgcccgccttcctggagacctccgcgccccgcaacctccccttctacgagcggctcggcttcaccgtcaccgccgacgtcgaggtgcccgaaggaccgcgcacctggtgcatgacccgcaagcccggtgcctga

SEQ ID NO: 9714 - DNA, 1926 bp, Artificial Sequence
  Synthetic Polynucloetide
atggccttaccagtgaccgccttgctcctgccgctggccttgctgctccacgccgccaggccggacatcgtgatgacccagagccacaagttcatgagcaccagcgtgggcgacagagtgtccatcatctgcaaggccagccaggatgtgggcacagccgtggattggtatcagcagaagcctggacagagccccaagctgctgatctactgggccagcacaagacacaccggcgtgcccgatagattcacaggctctggcagcggcaccgatttcaccctggccatcacaaacgtgcagagcgaggacctggccgactacttctgccagcagtacaacagctaccctctgacctttggagccggcaccaagctggaaatcaagagactcgagggacagcctaaggccaatcctaccgtgacactgttccctccaagcagcgaagaactccaggccaacaaggccacacttgtgtgcctgatctccgacttctaccctggggctgtgacagtggcttggaaggccgatggatctcctgtgaaagccggcgtggaaaccaccaagccatccaagcagagcaacaacaaatacgccgccagctcctacctgagcctgacacctgagcagtggaagtcccacagatcctacagctgccaagtgacccacgaaggcagcaccgtggaaaagacagtggcccctacagagtgcagccccatcaagaccgatgtgattacaatggaccccaaggacaactgctccaaggacgccaacgataccctgctgctccagctgaccaacaccagcgcctactacatgtacttgttgctgctgctgaagtccgtggtgtacttcgccatcatcacatgctgcctgctgcggagaaccgccttctgctgcaacggcgagaagtctagggccaagcgatctggatctggagcaacaaacttctcactactcaaacaagcaggtgacgtggaggagaatcccgggcctactagtatggactggatttggcgcatccttttccttgtcggcgctgctaccggcgcgcattccttcgaagaagttcagctgcaacagtctggccccgagctggttaagcctggaacaagcgtgcggatctcctgcaagaccagcggctacaccttcaccgagtacaccatccactgggtcaagcagagccacggcaagagcctggaatggatcggcaacatcaaccccaacaacggcggcaccacctacaaccagaagttcgaggacaaggccacactgaccgtggacaagagcagcagcaccgcctacatggaactgagaagcctgaccagcgaggacagcgccgtgtactattgtgccgccggatggaacttcgactactggggccagggaacaaccctgaccgttagctctacgcgtgcctctacaaagggaccctccgtgtttcctctggctcccagcagcaagtctacaagcggaggaacagccgctctgggctgcctggtcaaggattactttcccgagcctgtgaccgtgtcctggaatagcggagcactgacaagcggcgtgcacacctttccagccgtgctgcaaagcagcggcctgtactctctgagcagcgtggtcacagtgcctagctctagcctgggcacccagacctacatctgcaatgtgaaccacaagcctagcaacaccaaggtggacaagagagtggaacccaagagctgtgaagtgaaaaccgactccaccgaccacgtgaagcccaaagagacagagaacaccaagcagcccagcaagagctgccacaagcccaaggccatcgtgcacaccgagaaagtgaacatgatgagcctgaccgtgctgggcctgcggatgctgttcgccaaaaccgtggccgtgaacttcctgctgaccgccaagctgttcttcctc

SEQ ID NO: 9715 - DNA, 1860 bp, Artificial Sequence
  Synthetic Polynucloetide
atggccttaccagtgaccgccttgctcctgccgctggccttgctgctccacgccgccaggccggacatcgtgatgacccagagccacaagttcatgagcaccagcgtgggcgacagagtgtccatcatctgcaaggccagccaggatgtgggcacagccgtggattggtatcagcagaagcctggacagagccccaagctgctgatctactgggccagcacaagacacaccggcgtgcccgatagattcacaggctctggcagcggcaccgatttcaccctggccatcacaaacgtgcagagcgaggacctggccgactacttctgccagcagtacaacagctaccctctgacctttggagccggcaccaagctggaaatcaagagactcgagggacagcctaaggccaatcctaccgtgacactgttccctccaagcagcgaagaactccaggccaacaaggccacacttgtgtgcctgatctccgacttctaccctggggctgtgacagtggcttggaaggccgatggatctcctgtgaaagccggcgtggaaaccaccaagccatccaagcagagcaacaacaaatacgccgccagctcctacctgagcctgacacctgagcagtggaagtcccacagatcctacagctgccaagtgacccacgaaggcagcaccgtggaaaagacagtggcccctacagagtgcagcggcagagccgattgcggcatcaccagcgccagctaccaccagggcgtgctgagcgccaccatcctgtacgagatcctgctgggcaaggccaccctgtacgccgtgctggtgtctgccctggtgctgatggctatggtcaagcggaaggacagccggggaagggccaagcgatctggatctggagcaacaaacttctcactactcaaacaagcaggtgacgtggaggagaatcccgggcctactagtatggactggatttggcgcatccttttccttgtcggcgctgctaccggcgcgcattccttcgaagaagttcagctgcaacagtctggccccgagctggttaagcctggaacaagcgtgcggatctcctgcaagaccagcggctacaccttcaccgagtacaccatccactgggtcaagcagagccacggcaagagcctggaatggatcggcaacatcaaccccaacaacggcggcaccacctacaaccagaagttcgaggacaaggccacactgaccgtggacaagagcagcagcaccgcctacatggaactgagaagcctgaccagcgaggacagcgccgtgtactattgtgccgccggatggaacttcgactactggggccagggaacaaccctgaccgttagctctacgcgtgcctctacaaagggaccctccgtgtttcctctggctcccagcagcaagtctacaagcggaggaacagccgctctgggctgcctggtcaaggattactttcccgagcctgtgaccgtgtcctggaatagcggagcactgacaagcggcgtgcacacctttccagccgtgctgcaaagcagcggcctgtactctctgagcagcgtggtcacagtgcctagctctagcctgggcacccagacctacatctgcaatgtgaaccacaagcctagcaacaccaaggtggacaagagagtggaacccaagagctgtatccccgaggacacattcttcccaagcagcgacgtgccctgcgacgtgaagctggtggaaaagagcttcgagacagacaccaacctgaacttccagaacctgagcgtgatcggcttcagaatcctgctgctgaaagtggccggctttaacctgctgatgaccctgcggctgtggtccagc

SEQ ID NO: 9716 - DNA, 1860 bp, Artificial Sequence
  Synthetic Polynucloetide
atggccttaccagtgaccgccttgctcctgccgctggccttgctgctccacgccgccaggccggacatcgtgatgacccagagccacaagttcatgagcaccagcgtgggcgacagagtgtccatcatctgcaaggccagccaggatgtgggcacagccgtggattggtatcagcagaagcctggacagagccccaagctgctgatctactgggccagcacaagacacaccggcgtgcccgatagattcacaggctctggcagcggcaccgatttcaccctggccatcacaaacgtgcagagcgaggacctggccgactacttctgccagcagtacaacagctaccctctgacctttggagccggcaccaagctggaaatcaagagactcgagggacagcctaaggccaatcctaccgtgacactgttccctccaagcagcgaagaactccaggccaacaaggccacacttgtgtgcctgatctccgacttctaccctggggctgtgacagtggcttggaaggccgatggatctcctgtgaaagccggcgtggaaaccaccaagccatccaagcagagcaacaacaaatacgccgccagctcctacctgagcctgacacctgagcagtggaagtcccacagatcctacagctgccaagtgacccacgaaggcagcaccgtggaaaagacagtggcccctacagagtgcagcggcagagccgattgcggctttaccagcgagagctaccagcagggcgtgctgagcgccaccatcctgtacgagatcctgctgggcaaggccaccctgtacgccgtgctggtgtctgccctggtgctgatggctatggtcaagcggaaggacagccggggaagggccaagcgatctggatctggagcaacaaacttctcactactcaaacaagcaggtgacgtggaggagaatcccgggcctactagtatggactggatttggcgcatccttttccttgtcggcgctgctaccggcgcgcattccttcgaagaagttcagctgcaacagtctggccccgagctggttaagcctggaacaagcgtgcggatctcctgcaagaccagcggctacaccttcaccgagtacaccatccactgggtcaagcagagccacggcaagagcctggaatggatcggcaacatcaaccccaacaacggcggcaccacctacaaccagaagttcgaggacaaggccacactgaccgtggacaagagcagcagcaccgcctacatggaactgagaagcctgaccagcgaggacagcgccgtgtactattgtgccgccggatggaacttcgactactggggccagggaacaaccctgaccgttagctctacgcgtgcctctacaaagggaccctccgtgtttcctctggctcccagcagcaagtctacaagcggaggaacagccgctctgggctgcctggtcaaggattactttcccgagcctgtgaccgtgtcctggaatagcggagcactgacaagcggcgtgcacacctttccagccgtgctgcaaagcagcggcctgtactctctgagcagcgtggtcacagtgcctagctctagcctgggcacccagacctacatctgcaatgtgaaccacaagcctagcaacaccaaggtggacaagagagtggaacccaagagctgtatccccgaggacacattcttcccaagccccgagagcagctgcgacgtgaagctggtggaaaagagcttcgagacagacaccaacctgaacttccagaacctgagcgtgatcggcttcagaatcctgctgctgaaagtggccggctttaacctgctgatgaccctgcggctgtggtccagc

SEQ ID NO: 9717 - DNA, 1338 bp, Artificial Sequence
  Synthetic Polynucloetide
atggccttaccagtgaccgccttgctcctgccgctggccttgctgctccacgccgccaggccggacatcgtgatgacccagagccacaagttcatgagcaccagcgtgggcgacagagtgtccatcatctgcaaggccagccaggatgtgggcacagccgtggattggtatcagcagaagcctggacagagccccaagctgctgatctactgggccagcacaagacacaccggcgtgcccgatagattcacaggctctggcagcggcaccgatttcaccctggccatcacaaacgtgcagagcgaggacctggccgactacttctgccagcagtacaacagctaccctctgacctttggagccggcaccaagctggaaatcaagagaggcggaggcggaagtggaggcggaggatctggcggcggaggctctgaagttcagctgcaacagtctggccccgagctggttaagcctggaacaagcgtgcggatctcctgcaagaccagcggctacaccttcaccgagtacaccatccactgggtcaagcagagccacggcaagagcctggaatggatcggcaacatcaaccccaacaacggcggcaccacctacaaccagaagttcgaggacaaggccacactgaccgtggacaagagcagcagcaccgcctacatggaactgagaagcctgaccagcgaggacagcgccgtgtactattgtgccgccggatggaacttcgactactggggccagggaacaaccctgaccgttagctctacgcgtgacggtaacgaggagatgggaggaatcactcaaaccccttacaaagtctcaatttcaggaacaactgttatccttacatgtccccagtatcctggcagcgagatcctttggcagcataacgacaagaatatagggggagatgaagacgataagaatatcggatctgacgaggatcacttgagcctgaaagagttctccgagcttgaacaaagcggatattatgtgtgctatccgcgcgggtcaaagccggaagacgctaacttttacctttatctccgagccagagtgtgcgaaaattgcatggaaatggacgttatgtccgttgctacaatagttatcgtagatatatgcatcacgggtggactgcttctgctggtttattattggtccaagaatagaaaggccaaagctaaacccgtgaccagaggcgctggcgcaggcggaaggcaaaggggacaaaacaaagaacggccaccaccagtgccaaatccagattatgagcctattcggaaaggacagagggacctgtactctggcctgaatcagagaagaatc

SEQ ID NO: 9718 - DNA, 1233 bp, Artificial Sequence
  Synthetic Polynucloetide
atggccttaccagtgaccgccttgctcctgccgctggccttgctgctccacgccgccaggccggacatcgtgatgacccagagccacaagttcatgagcaccagcgtgggcgacagagtgtccatcatctgcaaggccagccaggatgtgggcacagccgtggattggtatcagcagaagcctggacagagccccaagctgctgatctactgggccagcacaagacacaccggcgtgcccgatagattcacaggctctggcagcggcaccgatttcaccctggccatcacaaacgtgcagagcgaggacctggccgactacttctgccagcagtacaacagctaccctctgacctttggagccggcaccaagctggaaatcaagagaggcggaggcggaagtggaggcggaggatctggcggcggaggctctgaagttcagctgcaacagtctggccccgagctggttaagcctggaacaagcgtgcggatctcctgcaagaccagcggctacaccttcaccgagtacaccatccactgggtcaagcagagccacggcaagagcctggaatggatcggcaacatcaaccccaacaacggcggcaccacctacaaccagaagttcgaggacaaggccacactgaccgtggacaagagcagcagcaccgcctacatggaactgagaagcctgaccagcgaggacagcgccgtgtactattgtgccgccggatggaacttcgactactggggccagggaacaaccctgaccgttagctctacgcgtttcaagatccccatcgaggaactggaagatcgggtgttcgtgaactgcaacacctctatcacctgggtggaaggcaccgtgggaacactgctgagcgacatcaccagactggacctcggcaagcggattctggaccctcggggcatctacagatgcaacggcaccgacatctacaaggacaaagaaagcaccgtgcaggtccactacagaatgtgccagtcctgcgtggaactggaccctgctacagtggccggcatcatcgtgaccgatgtgatcgctactctgctgctggctctgggagtgttctgcttcgccggacacgaaacaggcagactgtctggcgctgccgatacacaggccctgctgagaaacgaccaagtgtatcagcccctgcgcgacagagatgatgcccagtattctcacctcggcggcaactgggctagaaacaag

SEQ ID NO: 9719 - DNA, 1263 bp, Artificial Sequence
  Synthetic Polynucloetide
atggccttaccagtgaccgccttgctcctgccgctggccttgctgctccacgccgccaggccggacatcgtgatgacccagagccacaagttcatgagcaccagcgtgggcgacagagtgtccatcatctgcaaggccagccaggatgtgggcacagccgtggattggtatcagcagaagcctggacagagccccaagctgctgatctactgggccagcacaagacacaccggcgtgcccgatagattcacaggctctggcagcggcaccgatttcaccctggccatcacaaacgtgcagagcgaggacctggccgactacttctgccagcagtacaacagctaccctctgacctttggagccggcaccaagctggaaatcaagagaggcggaggcggaagtggaggcggaggatctggcggcggaggctctgaagttcagctgcaacagtctggccccgagctggttaagcctggaacaagcgtgcggatctcctgcaagaccagcggctacaccttcaccgagtacaccatccactgggtcaagcagagccacggcaagagcctggaatggatcggcaacatcaaccccaacaacggcggcaccacctacaaccagaagttcgaggacaaggccacactgaccgtggacaagagcagcagcaccgcctacatggaactgagaagcctgaccagcgaggacagcgccgtgtactattgtgccgccggatggaacttcgactactggggccagggaacaaccctgaccgttagctctacgcgtcagagcatcaagggcaaccacctggtcaaggtgtacgactaccaagaggacggcagcgtgctgctgacatgtgatgccgaggccaagaacatcacctggtttaaggacggcaagatgatcggcttcctgaccgaggacaagaagaagtggaacctgggcagcaacgctaaggaccccagaggcatgtatcagtgcaagggcagccagaacaagagcaagcccctccaggtgtactaccggatgtgccagaactgcatcgagctgaacgccgctaccatcagcggctttctgttcgccgagatcgtgtccatcttcgtgctggccgtgggcgtgtactttatcgctggacaggatggcgtgcggcagagcagagcttccgataagcaaaccctgctgcctaacgaccagctgtaccagcctctgaaggacagagaggacgaccagtacagccacctccagggcaatcagctgagaagaaac

SEQ ID NO: 9720 - DNA, 1212 bp, Artificial Sequence
  Synthetic Polynucloetide
atggccttaccagtgaccgccttgctcctgccgctggccttgctgctccacgccgccaggccggacatcgtgatgacccagagccacaagttcatgagcaccagcgtgggcgacagagtgtccatcatctgcaaggccagccaggatgtgggcacagccgtggattggtatcagcagaagcctggacagagccccaagctgctgatctactgggccagcacaagacacaccggcgtgcccgatagattcacaggctctggcagcggcaccgatttcaccctggccatcacaaacgtgcagagcgaggacctggccgactacttctgccagcagtacaacagctaccctctgacctttggagccggcaccaagctggaaatcaagagaggcggaggcggaagtggaggcggaggatctggcggcggaggctctgaagttcagctgcaacagtctggccccgagctggttaagcctggaacaagcgtgcggatctcctgcaagaccagcggctacaccttcaccgagtacaccatccactgggtcaagcagagccacggcaagagcctggaatggatcggcaacatcaaccccaacaacggcggcaccacctacaaccagaagttcgaggacaaggccacactgaccgtggacaagagcagcagcaccgcctacatggaactgagaagcctgaccagcgaggacagcgccgtgtactattgtgccgccggatggaacttcgactactggggccagggaacaaccctgaccgttagctctacgcgtcagagttttgggttgttggaccctaaattgtgctatctgttggacggaatcctgttcatttacggagtgatcctgaccgcattgttcctgcgggttaagttttccagatccgcagacgcacccgcttaccaacaagggcagaaccaactctacaatgaacttaatttggggcggagggaagagtacgacgttctggacaaaaggaggggacgagatcccgagatgggcggaaagcctcagcgaaggaagaatccgcaagaggggctttataacgaactccagaaagataaaatggcagaagcctatagtgagattgggatgaagggagaaaggaggaggggtaaaggtcacgatgggttgtaccaaggattgagcacagccactaaagatacctatgatgcgctccacatgcaggccctgccgccaaga

SEQ ID NO: 9721 - DNA, 1338 bp, Artificial Sequence
  Synthetic Polynucloetide
atggccttaccagtgaccgccttgctcctgccgctggccttgctgctccacgccgccaggccggaagttcagctgcaacagtctggccccgagctggttaagcctggaacaagcgtgcggatctcctgcaagaccagcggctacaccttcaccgagtacaccatccactgggtcaagcagagccacggcaagagcctggaatggatcggcaacatcaaccccaacaacggcggcaccacctacaaccagaagttcgaggacaaggccacactgaccgtggacaagagcagcagcaccgcctacatggaactgagaagcctgaccagcgaggacagcgccgtgtactattgtgccgccggatggaacttcgactactggggccagggaacaaccctgaccgttagctctggcggaggcggaagtggaggcggaggatctggcggcggaggctctgacatcgtgatgacccagagccacaagttcatgagcaccagcgtgggcgacagagtgtccatcatctgcaaggccagccaggatgtgggcacagccgtggattggtatcagcagaagcctggacagagccccaagctgctgatctactgggccagcacaagacacaccggcgtgcccgatagattcacaggctctggcagcggcaccgatttcaccctggccatcacaaacgtgcagagcgaggacctggccgactacttctgccagcagtacaacagctaccctctgacctttggagccggcaccaagctggaaatcaagagaacgcgtgacggtaacgaggagatgggaggaatcactcaaaccccttacaaagtctcaatttcaggaacaactgttatccttacatgtccccagtatcctggcagcgagatcctttggcagcataacgacaagaatatagggggagatgaagacgataagaatatcggatctgacgaggatcacttgagcctgaaagagttctccgagcttgaacaaagcggatattatgtgtgctatccgcgcgggtcaaagccggaagacgctaacttttacctttatctccgagccagagtgtgcgaaaattgcatggaaatggacgttatgtccgttgctacaatagttatcgtagatatatgcatcacgggtggactgcttctgctggtttattattggtccaagaatagaaaggccaaagctaaacccgtgaccagaggcgctggcgcaggcggaaggcaaaggggacaaaacaaagaacggccaccaccagtgccaaatccagattatgagcctattcggaaaggacagagggacctgtactctggcctgaatcagagaagaatc

SEQ ID NO: 9722 - DNA, 1233 bp, Artificial Sequence
  Synthetic Polynucloetide
atggccttaccagtgaccgccttgctcctgccgctggccttgctgctccacgccgccaggccggaagttcagctgcaacagtctggccccgagctggttaagcctggaacaagcgtgcggatctcctgcaagaccagcggctacaccttcaccgagtacaccatccactgggtcaagcagagccacggcaagagcctggaatggatcggcaacatcaaccccaacaacggcggcaccacctacaaccagaagttcgaggacaaggccacactgaccgtggacaagagcagcagcaccgcctacatggaactgagaagcctgaccagcgaggacagcgccgtgtactattgtgccgccggatggaacttcgactactggggccagggaacaaccctgaccgttagctctggcggaggcggaagtggaggcggaggatctggcggcggaggctctgacatcgtgatgacccagagccacaagttcatgagcaccagcgtgggcgacagagtgtccatcatctgcaaggccagccaggatgtgggcacagccgtggattggtatcagcagaagcctggacagagccccaagctgctgatctactgggccagcacaagacacaccggcgtgcccgatagattcacaggctctggcagcggcaccgatttcaccctggccatcacaaacgtgcagagcgaggacctggccgactacttctgccagcagtacaacagctaccctctgacctttggagccggcaccaagctggaaatcaagagaacgcgtttcaagatccccatcgaggaactggaagatcgggtgttcgtgaactgcaacacctctatcacctgggtggaaggcaccgtgggaacactgctgagcgacatcaccagactggacctcggcaagcggattctggaccctcggggcatctacagatgcaacggcaccgacatctacaaggacaaagaaagcaccgtgcaggtccactacagaatgtgccagtcctgcgtggaactggaccctgctacagtggccggcatcatcgtgaccgatgtgatcgctactctgctgctggctctgggagtgttctgcttcgccggacacgaaacaggcagactgtctggcgctgccgatacacaggccctgctgagaaacgaccaagtgtatcagcccctgcgcgacagagatgatgcccagtattctcacctcggcggcaactgggctagaaacaag

SEQ ID NO: 9723 - DNA, 1263 bp, Artificial Sequence
  Synthetic Polynucloetide
atggccttaccagtgaccgccttgctcctgccgctggccttgctgctccacgccgccaggccggaagttcagctgcaacagtctggccccgagctggttaagcctggaacaagcgtgcggatctcctgcaagaccagcggctacaccttcaccgagtacaccatccactgggtcaagcagagccacggcaagagcctggaatggatcggcaacatcaaccccaacaacggcggcaccacctacaaccagaagttcgaggacaaggccacactgaccgtggacaagagcagcagcaccgcctacatggaactgagaagcctgaccagcgaggacagcgccgtgtactattgtgccgccggatggaacttcgactactggggccagggaacaaccctgaccgttagctctggcggaggcggaagtggaggcggaggatctggcggcggaggctctgacatcgtgatgacccagagccacaagttcatgagcaccagcgtgggcgacagagtgtccatcatctgcaaggccagccaggatgtgggcacagccgtggattggtatcagcagaagcctggacagagccccaagctgctgatctactgggccagcacaagacacaccggcgtgcccgatagattcacaggctctggcagcggcaccgatttcaccctggccatcacaaacgtgcagagcgaggacctggccgactacttctgccagcagtacaacagctaccctctgacctttggagccggcaccaagctggaaatcaagagaacgcgtcagagcatcaagggcaaccacctggtcaaggtgtacgactaccaagaggacggcagcgtgctgctgacatgtgatgccgaggccaagaacatcacctggtttaaggacggcaagatgatcggcttcctgaccgaggacaagaagaagtggaacctgggcagcaacgctaaggaccccagaggcatgtatcagtgcaagggcagccagaacaagagcaagcccctccaggtgtactaccggatgtgccagaactgcatcgagctgaacgccgctaccatcagcggctttctgttcgccgagatcgtgtccatcttcgtgctggccgtgggcgtgtactttatcgctggacaggatggcgtgcggcagagcagagcttccgataagcaaaccctgctgcctaacgaccagctgtaccagcctctgaaggacagagaggacgaccagtacagccacctccagggcaatcagctgagaagaaac

SEQ ID NO: 9724 - DNA, 1212 bp, Artificial Sequence
  Synthetic Polynucloetide
atggccttaccagtgaccgccttgctcctgccgctggccttgctgctccacgccgccaggccggaagttcagctgcaacagtctggccccgagctggttaagcctggaacaagcgtgcggatctcctgcaagaccagcggctacaccttcaccgagtacaccatccactgggtcaagcagagccacggcaagagcctggaatggatcggcaacatcaaccccaacaacggcggcaccacctacaaccagaagttcgaggacaaggccacactgaccgtggacaagagcagcagcaccgcctacatggaactgagaagcctgaccagcgaggacagcgccgtgtactattgtgccgccggatggaacttcgactactggggccagggaacaaccctgaccgttagctctggcggaggcggaagtggaggcggaggatctggcggcggaggctctgacatcgtgatgacccagagccacaagttcatgagcaccagcgtgggcgacagagtgtccatcatctgcaaggccagccaggatgtgggcacagccgtggattggtatcagcagaagcctggacagagccccaagctgctgatctactgggccagcacaagacacaccggcgtgcccgatagattcacaggctctggcagcggcaccgatttcaccctggccatcacaaacgtgcagagcgaggacctggccgactacttctgccagcagtacaacagctaccctctgacctttggagccggcaccaagctggaaatcaagagaacgcgtcagagttttgggttgttggaccctaaattgtgctatctgttggacggaatcctgttcatttacggagtgatcctgaccgcattgttcctgcgggttaagttttccagatccgcagacgcacccgcttaccaacaagggcagaaccaactctacaatgaacttaatttggggcggagggaagagtacgacgttctggacaaaaggaggggacgagatcccgagatgggcggaaagcctcagcgaaggaagaatccgcaagaggggctttataacgaactccagaaagataaaatggcagaagcctatagtgagattgggatgaagggagaaaggaggaggggtaaaggtcacgatgggttgtaccaaggattgagcacagccactaaagatacctatgatgcgctccacatgcaggccctgccgccaaga

SEQ ID NO: 9725 - DNA, 1914 bp, Artificial Sequence
  Synthetic Polynucloetide
atggccttaccagtgaccgccttgctcctgccgctggccttgctgctccacgccgccaggccggacatcgtgatgacccagagccacaagttcatgagcaccagcgtgggcgacagagtgtccatcatctgcaaggccagccaggatgtgggcacagccgtggattggtatcagcagaagcctggacagagccccaagctgctgatctactgggccagcacaagacacaccggcgtgcccgatagattcacaggctctggcagcggcaccgatttcaccctggccatcacaaacgtgcagagcgaggacctggccgactacttctgccagcagtacaacagctaccctctgacctttggagccggcaccaagctggaaatcaagagaggcggaggcggaagtggaggcggaggatctggcggcggaggctctgaagttcagctgcaacagtctggccccgagctggttaagcctggaacaagcgtgcggatctcctgcaagaccagcggctacaccttcaccgagtacaccatccactgggtcaagcagagccacggcaagagcctggaatggatcggcaacatcaaccccaacaacggcggcaccacctacaaccagaagttcgaggacaaggccacactgaccgtggacaagagcagcagcaccgcctacatggaactgagaagcctgaccagcgaggacagcgccgtgtactattgtgccgccggatggaacttcgactactggggccagggaacaaccctgaccgttagctctacgcgtgggagcggcatccagaaccctgatcctgccgtgtaccagctgcgggatagcaagagcagcgacaagagcgtgtgtctgttcaccgacttcgacagccagaccaacgtgtcccagagcaaggactccgacgtgtacatcaccgataagaccgtgctggacatgcggagcatggacttcaagagcaactccgccgtggcctggtccaacaagtccgatttcgcctgcgccaacgccttcaacaacagcattatccccgaggacacattcttcccaagccccgagagcagctgcgacgtgaagctggtggaaaagagcttcgagacagacaccaacctgaacttccagaacctgagcgtgatcggcttcagaatcctgctgctgaaagtggccggctttaacctgctgatgaccctgcggctgtggtccagccgcgccaagagaagcggatctggcgtgaagcagaccctgaatttcgacctgctgaagctggctggcgacgtggaatccaacccaggcccttctagaggccatatgaccgagtacaagcccacggtgcgcctcgccacccgcgacgacgtccccagggccgtacgcaccctcgccgccgcgttcgccgactaccccgccacgcgccacaccgtcgatccggaccgccacatcgagcgggtcaccgagctgcaagaactcttcctcacgcgcgtcgggctcgacatcggcaaggtgtgggtcgcggacgacggcgccgcggtggcggtctggaccacgccggagagcgtcgaagcgggggcggtgttcgccgagatcggcccgcgcatggccgagttgagcggttcccggctggccgcgcagcaacagatggaaggcctcctggcgccgcaccggcccaaggagcccgcgtggttcctggccaccgtcggcgtctcgcccgaccaccagggcaagggtctgggcagcgccgtcgtgctccccggagtggaggcggccgagcgcgccggggtgcccgccttcctggagacctccgcgccccgcaacctccccttctacgagcggctcggcttcaccgtcaccgccgacgtcgaggtgcccgaaggaccgcgcacctggtgcatgacccgcaagcccggtgcctga

SEQ ID NO: 9726 - DNA, 2010 bp, Artificial Sequence
  Synthetic Polynucloetide
atggccttaccagtgaccgccttgctcctgccgctggccttgctgctccacgccgccaggccggacatcgtgatgacccagagccacaagttcatgagcaccagcgtgggcgacagagtgtccatcatctgcaaggccagccaggatgtgggcacagccgtggattggtatcagcagaagcctggacagagccccaagctgctgatctactgggccagcacaagacacaccggcgtgcccgatagattcacaggctctggcagcggcaccgatttcaccctggccatcacaaacgtgcagagcgaggacctggccgactacttctgccagcagtacaacagctaccctctgacctttggagccggcaccaagctggaaatcaagagaggcggaggcggaagtggaggcggaggatctggcggcggaggctctgaagttcagctgcaacagtctggccccgagctggttaagcctggaacaagcgtgcggatctcctgcaagaccagcggctacaccttcaccgagtacaccatccactgggtcaagcagagccacggcaagagcctggaatggatcggcaacatcaaccccaacaacggcggcaccacctacaaccagaagttcgaggacaaggccacactgaccgtggacaagagcagcagcaccgcctacatggaactgagaagcctgaccagcgaggacagcgccgtgtactattgtgccgccggatggaacttcgactactggggccagggaacaaccctgaccgttagctctctcgaggacctgaagaacgtgttcccacctgaggtggccgtgttcgagcctagcgaggccgagatcagccacacccagaaagccaccctcgtgtgcctggctaccggcttctaccccgaccatgtggaactgtcttggtgggtcaacggcaaagaggtgcacagcggcgtgtctaccgacccccagccactgaaagaacagcccgccctgaacgacagccggtactgcctgagcagcagactgagagtgtccgccaccttctggcagaacccccggaaccacttcagatgccaggtgcagttctacggcctgagcgagaacgacgagtggacccaggacagagccaagcccgtgacccagatcgtgtctgccgaagcctggggcagagccgattgcggctttaccagcgagagctaccagcagggcgtgctgagcgccaccatcctgtacgagatcctgctgggcaaggccaccctgtacgccgtgctggtgtctgccctggtgctgatggctatggtcaagcggaaggacagccggggaagggccaagcgatctggatctggagcaacaaacttctcactactcaaacaagcaggtgacgtggaggagaatcccgggcctactagaggccatatgaccgagtacaagcccacggtgcgcctcgccacccgcgacgacgtccccagggccgtacgcaccctcgccgccgcgttcgccgactaccccgccacgcgccacaccgtcgatccggaccgccacatcgagcgggtcaccgagctgcaagaactcttcctcacgcgcgtcgggctcgacatcggcaaggtgtgggtcgcggacgacggcgccgcggtggcggtctggaccacgccggagagcgtcgaagcgggggcggtgttcgccgagatcggcccgcgcatggccgagttgagcggttcccggctggccgcgcagcaacagatggaaggcctcctggcgccgcaccggcccaaggagcccgcgtggttcctggccaccgtcggcgtctcgcccgaccaccagggcaagggtctgggcagcgccgtcgtgctccccggagtggaggcggccgagcgcgccggggtgcccgccttcctggagacctccgcgccccgcaacctccccttctacgagcggctcggcttcaccgtcaccgccgacgtcgaggtgcccgaaggaccgcgcacctggtgcatgacccgcaagcccggtgcctga

SEQ ID NO: 9727 - DNA, 2160 bp, Artificial Sequence
  Synthetic Polynucloetide
atggccttaccagtgaccgccttgctcctgccgctggccttgctgctccacgccgccaggccggacatcgtgatgacccagagccacaagttcatgagcaccagcgtgggcgacagagtgtccatcatctgcaaggccagccaggatgtgggcacagccgtggattggtatcagcagaagcctggacagagccccaagctgctgatctactgggccagcacaagacacaccggcgtgcccgatagattcacaggctctggcagcggcaccgatttcaccctggccatcacaaacgtgcagagcgaggacctggccgactacttctgccagcagtacaacagctaccctctgacctttggagccggcaccaagctggaaatcaagagaggcggaggcggaagtggaggcggaggatctggcggcggaggctctgaagttcagctgcaacagtctggccccgagctggttaagcctggaacaagcgtgcggatctcctgcaagaccagcggctacaccttcaccgagtacaccatccactgggtcaagcagagccacggcaagagcctggaatggatcggcaacatcaaccccaacaacggcggcaccacctacaaccagaagttcgaggacaaggccacactgaccgtggacaagagcagcagcaccgcctacatggaactgagaagcctgaccagcgaggacagcgccgtgtactattgtgccgccggatggaacttcgactactggggccagggaacaaccctgaccgttagctctacgcgtgagcagaaactgatctcggaagaggatctggggagcggcaccccattcccttctctggcccctcccatcatgctgctggtggacggcaagcagcagatggtggtcgtgtgcctggtgctggatgtggccccacctggactggacagccccatctggtttagcgccggcaatggctctgccctggacgcctttacctacggcccaagccctgccaccgatggcacctggacaaatctggcccacctgagcctgcccagcgaggaactggcttcttgggagcctctcgtgtgccacacaggacctggcgctgagggacacagcagatccacccagcctatgcacctgtctggcgaggccagcaccgccagaacctgtcctcaggaacctctgagaggcacccctggcggagcactgtggctgggagtgctgagactgctgctgttcaagctgctgctgtttgacctgctgctgacctgctcctgtctgtgcgatcctgccggccctctgccttctcctgccaccaccacaagactgagagccctgggcagccacagactgcaccctgccacagagacaggcggcagagaggccacaagcagccctagaccccagcccagagacagaagatggggcgataccccccctggcagaaagcctggatctccagtccgcgccaagagaagcggatctggcgtgaagcagaccctgaatttcgacctgctgaagctggctggcgacgtggaatccaacccaggcccttctagatctagaggccatatgaccgagtacaagcccacggtgcgcctcgccacccgcgacgacgtccccagggccgtacgcaccctcgccgccgcgttcgccgactaccccgccacgcgccacaccgtcgatccggaccgccacatcgagcgggtcaccgagctgcaagaactcttcctcacgcgcgtcgggctcgacatcggcaaggtgtgggtcgcggacgacggcgccgcggtggcggtctggaccacgccggagagcgtcgaagcgggggcggtgttcgccgagatcggcccgcgcatggccgagttgagcggttcccggctggccgcgcagcaacagatggaaggcctcctggcgccgcaccggcccaaggagcccgcgtggttcctggccaccgtcggcgtctcgcccgaccaccagggcaagggtctgggcagcgccgtcgtgctccccggagtggaggcggccgagcgcgccggggtgcccgccttcctggagacctccgcgccccgcaacctccccttctacgagcggctcggcttcaccgtcaccgccgacgtcgaggtgcccgaaggaccgcgcacctggtgcatgacccgcaagcccggtgcctga

SEQ ID NO: 9728 - DNA, 1620 bp, Artificial Sequence
  Synthetic Polynucloetide
atggccttaccagtgaccgccttgctcctgccgctggccttgctgctccacgccgccaggccggacatcgtgatgacccagagccacaagttcatgagcaccagcgtgggcgacagagtgtccatcatctgcaaggccagccaggatgtgggcacagccgtggattggtatcagcagaagcctggacagagccccaagctgctgatctactgggccagcacaagacacaccggcgtgcccgatagattcacaggctctggcagcggcaccgatttcaccctggccatcacaaacgtgcagagcgaggacctggccgactacttctgccagcagtacaacagctaccctctgacctttggagccggcaccaagctggaaatcaagagactcgaggacctgaagaacgtgttcccacctgaggtggccgtgttcgagcctagcgaggccgagatcagccacacccagaaagccaccctcgtgtgcctggctaccggcttctaccccgaccatgtggaactgtcttggtgggtcaacggcaaagaggtgcacagcggcgtgtctaccgacccccagccactgaaagaacagcccgccctgaacgacagccggtactgcctgagcagcagactgagagtgtccgccaccttctggcagaacccccggaaccacttcagatgccaggtgcagttctacggcctgagcgagaacgacgagtggacccaggacagagccaagcccgtgacccagatcgtgtctgccgaagcctggggcagagccgattgcggctttaccagcgagagctaccagcagggcgtgctgagcgccaccatcctgtacgagatcctgctgggcaaggccaccctgtacgccgtgctggtgtctgccctggtgctgatggctatggtcaagcggaaggacagccggggaagggccaagcgatctggatctggagcaacaaacttctcactactcaaacaagcaggtgacgtggaggagaatcccgggcctactagaggccatatgaccgagtacaagcccacggtgcgcctcgccacccgcgacgacgtccccagggccgtacgcaccctcgccgccgcgttcgccgactaccccgccacgcgccacaccgtcgatccggaccgccacatcgagcgggtcaccgagctgcaagaactcttcctcacgcgcgtcgggctcgacatcggcaaggtgtgggtcgcggacgacggcgccgcggtggcggtctggaccacgccggagagcgtcgaagcgggggcggtgttcgccgagatcggcccgcgcatggccgagttgagcggttcccggctggccgcgcagcaacagatggaaggcctcctggcgccgcaccggcccaaggagcccgcgtggttcctggccaccgtcggcgtctcgcccgaccaccagggcaagggtctgggcagcgccgtcgtgctccccggagtggaggcggccgagcgcgccggggtgcccgccttcctggagacctccgcgccccgcaacctccccttctacgagcggctcggcttcaccgtcaccgccgacgtcgaggtgcccgaaggaccgcgcacctggtgcatgacccgcaagcccggtgcctga

SEQ ID NO: 9729 - DNA, 927 bp, Artificial Sequence
  Synthetic Polynucloetide
atggccttaccagtgaccgccttgctcctgccgctggccttgctgctccacgccgccaggccggacatcgtgatgacccagagccacaagttcatgagcaccagcgtgggcgacagagtgtccatcatctgcaaggccagccaggatgtgggcacagccgtggattggtatcagcagaagcctggacagagccccaagctgctgatctactgggccagcacaagacacaccggcgtgcccgatagattcacaggctctggcagcggcaccgatttcaccctggccatcacaaacgtgcagagcgaggacctggccgactacttctgccagcagtacaacagctaccctctgacctttggagccggcaccaagctggaaatcaagagactcgaggacctgaagaacgtgttcccacctgaggtggccgtgttcgagcctagcgaggccgagatcagccacacccagaaagccaccctcgtgtgcctggctaccggcttctaccccgaccatgtggaactgtcttggtgggtcaacggcaaagaggtgcacagcggcgtgtctaccgacccccagccactgaaagaacagcccgccctgaacgacagccggtactgcctgagcagcagactgagagtgtccgccaccttctggcagaacccccggaaccacttcagatgccaggtgcagttctacggcctgagcgagaacgacgagtggacccaggacagagccaagcccgtgacccagatcgtgtctgccgaagcctggggcagagccgattgcggctttaccagcgagagctaccagcagggcgtgctgagcgccaccatcctgtacgagatcctgctgggcaaggccaccctgtacgccgtgctggtgtctgccctggtgctgatggctatggtcaagcggaaggacagccgggga

SEQ ID NO: 9730 - DNA, 1335 bp, Artificial Sequence
  Synthetic Polynucloetide
atggactggatttggcgcatccttttccttgtcggcgctgctaccggcgcgcattccttcgaagaagttcagctgcaacagtctggccccgagctggttaagcctggaacaagcgtgcggatctcctgcaagaccagcggctacaccttcaccgagtacaccatccactgggtcaagcagagccacggcaagagcctggaatggatcggcaacatcaaccccaacaacggcggcaccacctacaaccagaagttcgaggacaaggccacactgaccgtggacaagagcagcagcaccgcctacatggaactgagaagcctgaccagcgaggacagcgccgtgtactattgtgccgccggatggaacttcgactactggggccagggaacaaccctgaccgttagctctacgcgtatccagaaccctgatcctgccgtgtaccagctgcgggatagcaagagcagcgacaagagcgtgtgtctgttcaccgacttcgacagccagaccaacgtgtcccagagcaaggactccgacgtgtacatcaccgataagaccgtgctggacatgcggagcatggacttcaagagcaactccgccgtggcctggtccaacaagtccgatttcgcctgcgccaacgccttcaacaacagcattatccccgaggacacattcttcccaagccccgagagcagctgcgacgtgaagctggtggaaaagagcttcgagacagacaccaacctgaacttccagaacctgagcgtgatcggcttcagaatcctgctgctgaaagtggccggctttaacctgctgatgaccctgcggctgtggtccagccgcgccaagagaagcggatctggcgtgaagcagaccctgaatttcgacctgctgaagctggctggcgacgtggaatccaacccaggcccttctagaggccatatggccaagcctttgtctcaagaagaatccaccctcattgaaagagcaacggctacaatcaacagcatccccatctctgaagactacagcgtcgccagcgcagctctctctagcgacggccgcatcttcactggtgtcaatgtatatcattttactgggggaccttgtgcagaactcgtggtgctgggcactgctgctgctgcggcagctggcaacctgacttgtatcgtcgcgatcggaaatgagaacaggggcatcttgagcccctgcggacggtgccgacaggtgcttctcgatctgcatcctgggatcaaagccatagtgaaggacagtgatggacagccgacggcagttgggattcgtgaattgctgccctctggttatgtgtgggagggctga

SEQ ID NO: 9731 - DNA, 834 bp, Artificial Sequence
  Synthetic Polynucloetide
atggactggatttggcgcatccttttccttgtcggcgctgctaccggcgcgcattccttcgaagaagttcagctgcaacagtctggccccgagctggttaagcctggaacaagcgtgcggatctcctgcaagaccagcggctacaccttcaccgagtacaccatccactgggtcaagcagagccacggcaagagcctggaatggatcggcaacatcaaccccaacaacggcggcaccacctacaaccagaagttcgaggacaaggccacactgaccgtggacaagagcagcagcaccgcctacatggaactgagaagcctgaccagcgaggacagcgccgtgtactattgtgccgccggatggaacttcgactactggggccagggaacaaccctgaccgttagctctacgcgtatccagaaccctgatcctgccgtgtaccagctgcgggatagcaagagcagcgacaagagcgtgtgtctgttcaccgacttcgacagccagaccaacgtgtcccagagcaaggactccgacgtgtacatcaccgataagaccgtgctggacatgcggagcatggacttcaagagcaactccgccgtggcctggtccaacaagtccgatttcgcctgcgccaacgccttcaacaacagcattatccccgaggacacattcttcccaagccccgagagcagctgcgacgtgaagctggtggaaaagagcttcgagacagacaccaacctgaacttccagaacctgagcgtgatcggcttcagaatcctgctgctgaaagtggccggctttaacctgctgatgaccctgcggctgtggtccagc

SEQ ID NO: 9732 - DNA, 1674 bp, Artificial Sequence
  Synthetic Polynucloetide
atggccttaccagtgaccgccttgctcctgccgctggccttgctgctccacgccgccaggccggacatcgtgatgacccagagccacaagttcatgagcaccagcgtgggcgacagagtgtccatcatctgcaaggccagccaggatgtgggcacagccgtggattggtatcagcagaagcctggacagagccccaagctgctgatctactgggccagcacaagacacaccggcgtgcccgatagattcacaggctctggcagcggcaccgatttcaccctggccatcacaaacgtgcagagcgaggacctggccgactacttctgccagcagtacaacagctaccctctgacctttggagccggcaccaagctggaaatcaagagactcgaggggaaaccaattcccaaccctcttctgggactggattcaaccggcagcggcgaggacctgaagaacgtgttcccacctgaggtggccgtgttcgagcctagcgaggccgagatcagccacacccagaaagccaccctcgtgtgcctggctaccggcttctaccccgaccatgtggaactgtcttggtgggtcaacggcaaagaggtgcacagcggcgtgtgtaccgacccccagccactgaaagaacagcccgccctgaacgacagccggtactgcctgagcagcagactgagagtgtccgccaccttctggcagaacccccggaaccacttcagatgccaggtgcagttctacggcctgagcgagaacgacgagtggacccaggacagagccaagcccgtgacccagatcgtgtctgccgaagcctggggcagagccgattgcggctttaccagcgagagctaccagcagggcgtgctgagcgccaccatcctgtacgagatcctgctgggcaaggccaccctgtacgccgtgctggtgtctgccctggtgctgatggctatggtcaagcggaaggacagccggggaagggccaagcgatctggatctggagcaacaaacttctcactactcaaacaagcaggtgacgtggaggagaatcccgggcctactagaggccatatgaccgagtacaagcccacggtgcgcctcgccacccgcgacgacgtccccagggccgtacgcaccctcgccgccgcgttcgccgactaccccgccacgcgccacaccgtcgatccggaccgccacatcgagcgggtcaccgagctgcaagaactcttcctcacgcgcgtcgggctcgacatcggcaaggtgtgggtcgcggacgacggcgccgcggtggcggtctggaccacgccggagagcgtcgaagcgggggcggtgttcgccgagatcggcccgcgcatggccgagttgagcggttcccggctggccgcgcagcaacagatggaaggcctcctggcgccgcaccggcccaaggagcccgcgtggttcctggccaccgtcggcgtctcgcccgaccaccagggcaagggtctgggcagcgccgtcgtgctccccggagtggaggcggccgagcgcgccggggtgcccgccttcctggagacctccgcgccccgcaacctccccttctacgagcggctcggcttcaccgtcaccgccgacgtcgaggtgcccgaaggaccgcgcacctggtgcatgacccgcaagcccggtgcctga

SEQ ID NO: 9733 - DNA, 984 bp, Artificial Sequence
  Synthetic Polynucloetide
atggccttaccagtgaccgccttgctcctgccgctggccttgctgctccacgccgccaggccggacatcgtgatgacccagagccacaagttcatgagcaccagcgtgggcgacagagtgtccatcatctgcaaggccagccaggatgtgggcacagccgtggattggtatcagcagaagcctggacagagccccaagctgctgatctactgggccagcacaagacacaccggcgtgcccgatagattcacaggctctggcagcggcaccgatttcaccctggccatcacaaacgtgcagagcgaggacctggccgactacttctgccagcagtacaacagctaccctctgacctttggagccggcaccaagctggaaatcaagagactcgaggggaaaccaattcccaaccctcttctgggactggattcaaccggcagcggcgaggacctgaagaacgtgttcccacctgaggtggccgtgttcgagcctagcgaggccgagatcagccacacccagaaagccaccctcgtgtgcctggctaccggcttctaccccgaccatgtggaactgtcttggtgggtcaacggcaaagaggtgcacagcggcgtgtgtaccgacccccagccactgaaagaacagcccgccctgaacgacagccggtactgcctgagcagcagactgagagtgtccgccaccttctggcagaacccccggaaccacttcagatgccaggtgcagttctacggcctgagcgagaacgacgagtggacccaggacagagccaagcccgtgacccagatcgtgtctgccgaagcctggggcagagccgattgcggctttaccagcgagagctaccagcagggcgtgctgagcgccaccatcctgtacgagatcctgctgggcaaggccaccctgtacgccgtgctggtgtctgccctggtgctgatggctatggtcaagcggaaggacagccggggatga

SEQ ID NO: 9734 - DNA, 1371 bp, Artificial Sequence
  Synthetic Polynucloetide
atggactggatttggcgcatccttttccttgtcggcgctgctaccggcgcgcattccttcgaagaagttcagctgcaacagtctggccccgagctggttaagcctggaacaagcgtgcggatctcctgcaagaccagcggctacaccttcaccgagtacaccatccactgggtcaagcagagccacggcaagagcctggaatggatcggcaacatcaaccccaacaacggcggcaccacctacaaccagaagttcgaggacaaggccacactgaccgtggacaagagcagcagcaccgcctacatggaactgagaagcctgaccagcgaggacagcgccgtgtactattgtgccgccggatggaacttcgactactggggccagggaacaaccctgaccgttagctctacgcgtgagcagaaactgatctcggaagaggatgggagcggcatccagaaccctgatcctgccgtgtaccagctgcgggatagcaagagcagcgacaagagcgtgtgtctgttcaccgacttcgacagccagaccaacgtgtcccagagcaaggactccgacgtgtacatcaccgataagtgcgtgctggacatgcggagcatggacttcaagagcaactccgccgtggcctggtccaacaagtccgatttcgcctgcgccaacgccttcaacaacagcattatccccgaggacacattcttcccaagccccgagagcagctgcgacgtgaagctggtggaaaagagcttcgagacagacaccaacctgaacttccagaacctgagcgtgatcggcttcagaatcctgctgctgaaagtggccggctttaacctgctgatgaccctgcggctgtggtccagccgcgccaagagaagcggatctggcgtgaagcagaccctgaatttcgacctgctgaagctggctggcgacgtggaatccaacccaggcccttctagaggccatatggccaagcctttgtctcaagaagaatccaccctcattgaaagagcaacggctacaatcaacagcatccccatctctgaagactacagcgtcgccagcgcagctctctctagcgacggccgcatcttcactggtgtcaatgtatatcattttactgggggaccttgtgcagaactcgtggtgctgggcactgctgctgctgcggcagctggcaacctgacttgtatcgtcgcgatcggaaatgagaacaggggcatcttgagcccctgcggacggtgccgacaggtgcttctcgatctgcatcctgggatcaaagccatagtgaaggacagtgatggacagccgacggcagttgggattcgtgaattgctgccctctggttatgtgtgggagggctga

SEQ ID NO: 9735 - DNA, 873 bp, Artificial Sequence
  Synthetic Polynucloetide
atggactggatttggcgcatccttttccttgtcggcgctgctaccggcgcgcattccttcgaagaagttcagctgcaacagtctggccccgagctggttaagcctggaacaagcgtgcggatctcctgcaagaccagcggctacaccttcaccgagtacaccatccactgggtcaagcagagccacggcaagagcctggaatggatcggcaacatcaaccccaacaacggcggcaccacctacaaccagaagttcgaggacaaggccacactgaccgtggacaagagcagcagcaccgcctacatggaactgagaagcctgaccagcgaggacagcgccgtgtactattgtgccgccggatggaacttcgactactggggccagggaacaaccctgaccgttagctctacgcgtgagcagaaactgatctcggaagaggatgggagcggcatccagaaccctgatcctgccgtgtaccagctgcgggatagcaagagcagcgacaagagcgtgtgtctgttcaccgacttcgacagccagaccaacgtgtcccagagcaaggactccgacgtgtacatcaccgataagtgcgtgctggacatgcggagcatggacttcaagagcaactccgccgtggcctggtccaacaagtccgatttcgcctgcgccaacgccttcaacaacagcattatccccgaggacacattcttcccaagccccgagagcagctgcgacgtgaagctggtggaaaagagcttcgagacagacaccaacctgaacttccagaacctgagcgtgatcggcttcagaatcctgctgctgaaagtggccggctttaacctgctgatgaccctgcggctgtggtccagctga

SEQ ID NO: 9736 - DNA, 1914 bp, Artificial Sequence
  Synthetic Polynucloetide
atggccttaccagtgaccgccttgctcctgccgctggccttgctgctccacgccgccaggccggacatcgtgatgacccagagccacaagttcatgagcaccagcgtgggcgacagagtgtccatcatctgcaaggccagccaggatgtgggcacagccgtggattggtatcagcagaagcctggacagagccccaagctgctgatctactgggccagcacaagacacaccggcgtgcccgatagattcacaggctctggcagcggcaccgatttcaccctggccatcacaaacgtgcagagcgaggacctggccgactacttctgccagcagtacaacagctaccctctgacctttggagccggcaccaagctggaaatcaagagaggcggaggcggaagtggaggcggaggatctggcggcggaggctctgaagttcagctgcaacagtctggccccgagctggttaagcctggaacaagcgtgcggatctcctgcaagaccagcggctacaccttcaccgagtacaccatccactgggtcaagcagagccacggcaagagcctggaatggatcggcaacatcaaccccaacaacggcggcaccacctacaaccagaagttcgaggacaaggccacactgaccgtggacaagagcagcagcaccgcctacatggaactgagaagcctgaccagcgaggacagcgccgtgtactattgtgccgccggatggaacttcgactactggggccagggaacaaccctgaccgttagctctacgcgtgggagcggcatccagaaccctgatcctgccgtgtaccagctgcgggatagcaagagcagcgacaagagcgtgtgtctgttcaccgacttcgacagccagaccaacgtgtcccagagcaaggactccgacgtgtacatcaccgataagaccgtgctggacatgcggagcatggacttcaagagcaactccgccgtggcctggtccaacaagtccgatttcgcctgcgccaacgccttcaacaacagcattatccccgaggacacattcttcccaagcagcgacgtgccctgcgacgtgaagctggtggaaaagagcttcgagacagacaccaacctgaacttccagaacctgagcgtgatcggcttcagaatcctgctgctgaaagtggccggctttaacctgctgatgaccctgcggctgtggtccagccgcgccaagagaagcggatctggcgtgaagcagaccctgaatttcgacctgctgaagctggctggcgacgtggaatccaacccaggcccttctagaggccatatgaccgagtacaagcccacggtgcgcctcgccacccgcgacgacgtccccagggccgtacgcaccctcgccgccgcgttcgccgactaccccgccacgcgccacaccgtcgatccggaccgccacatcgagcgggtcaccgagctgcaagaactcttcctcacgcgcgtcgggctcgacatcggcaaggtgtgggtcgcggacgacggcgccgcggtggcggtctggaccacgccggagagcgtcgaagcgggggcggtgttcgccgagatcggcccgcgcatggccgagttgagcggttcccggctggccgcgcagcaacagatggaaggcctcctggcgccgcaccggcccaaggagcccgcgtggttcctggccaccgtcggcgtctcgcccgaccaccagggcaagggtctgggcagcgccgtcgtgctccccggagtggaggcggccgagcgcgccggggtgcccgccttcctggagacctccgcgccccgcaacctccccttctacgagcggctcggcttcaccgtcaccgccgacgtcgaggtgcccgaaggaccgcgcacctggtgcatgacccgcaagcccggtgcctga

SEQ ID NO: 9737 - DNA, 2010 bp, Artificial Sequence
  Synthetic Polynucloetide
atggccttaccagtgaccgccttgctcctgccgctggccttgctgctccacgccgccaggccggacatcgtgatgacccagagccacaagttcatgagcaccagcgtgggcgacagagtgtccatcatctgcaaggccagccaggatgtgggcacagccgtggattggtatcagcagaagcctggacagagccccaagctgctgatctactgggccagcacaagacacaccggcgtgcccgatagattcacaggctctggcagcggcaccgatttcaccctggccatcacaaacgtgcagagcgaggacctggccgactacttctgccagcagtacaacagctaccctctgacctttggagccggcaccaagctggaaatcaagagaggcggaggcggaagtggaggcggaggatctggcggcggaggctctgaagttcagctgcaacagtctggccccgagctggttaagcctggaacaagcgtgcggatctcctgcaagaccagcggctacaccttcaccgagtacaccatccactgggtcaagcagagccacggcaagagcctggaatggatcggcaacatcaaccccaacaacggcggcaccacctacaaccagaagttcgaggacaaggccacactgaccgtggacaagagcagcagcaccgcctacatggaactgagaagcctgaccagcgaggacagcgccgtgtactattgtgccgccggatggaacttcgactactggggccagggaacaaccctgaccgttagctctctcgaggacctgaagaacgtgttcccacctgaggtggccgtgttcgagcctagcaaggccgagatcgcccacacccagaaagccaccctcgtgtgcctggctaccggcttctaccccgaccatgtggaactgtcttggtgggtcaacggcaaagaggtgcacagcggcgtgtctaccgacccccagccactgaaagaacagcccgccctgaacgacagccggtactgcctgagcagcagactgagagtgtccgccaccttctggcagaacccccggaaccacttcagatgccaggtgcagttctacggcctgagcgagaacgacgagtggacccaggacagagccaagcccgtgacccagatcgtgtctgccgaagcctggggcagagccgattgcggcatcaccagcgccagctaccaccagggcgtgctgagcgccaccatcctgtacgagatcctgctgggcaaggccaccctgtacgccgtgctggtgtctgccctggtgctgatggctatggtcaagcggaaggacagccggggaagggccaagcgatctggatctggagcaacaaacttctcactactcaaacaagcaggtgacgtggaggagaatcccgggcctactagaggccatatgaccgagtacaagcccacggtgcgcctcgccacccgcgacgacgtccccagggccgtacgcaccctcgccgccgcgttcgccgactaccccgccacgcgccacaccgtcgatccggaccgccacatcgagcgggtcaccgagctgcaagaactcttcctcacgcgcgtcgggctcgacatcggcaaggtgtgggtcgcggacgacggcgccgcggtggcggtctggaccacgccggagagcgtcgaagcgggggcggtgttcgccgagatcggcccgcgcatggccgagttgagcggttcccggctggccgcgcagcaacagatggaaggcctcctggcgccgcaccggcccaaggagcccgcgtggttcctggccaccgtcggcgtctcgcccgaccaccagggcaagggtctgggcagcgccgtcgtgctccccggagtggaggcggccgagcgcgccggggtgcccgccttcctggagacctccgcgccccgcaacctccccttctacgagcggctcggcttcaccgtcaccgccgacgtcgaggtgcccgaaggaccgcgcacctggtgcatgacccgcaagcccggtgcctga

SEQ ID NO: 9738 - DNA, 2079 bp, Artificial Sequence
  Synthetic Polynucloetide
atggccttaccagtgaccgccttgctcctgccgctggccttgctgctccacgccgccaggccggacatcgtgatgacccagagccacaagttcatgagcaccagcgtgggcgacagagtgtccatcatctgcaaggccagccaggatgtgggcacagccgtggattggtatcagcagaagcctggacagagccccaagctgctgatctactgggccagcacaagacacaccggcgtgcccgatagattcacaggctctggcagcggcaccgatttcaccctggccatcacaaacgtgcagagcgaggacctggccgactacttctgccagcagtacaacagctaccctctgacctttggagccggcaccaagctggaaatcaagagaggcggaggcggaagtggaggcggaggatctggcggcggaggctctgaagttcagctgcaacagtctggccccgagctggttaagcctggaacaagcgtgcggatctcctgcaagaccagcggctacaccttcaccgagtacaccatccactgggtcaagcagagccacggcaagagcctggaatggatcggcaacatcaaccccaacaacggcggcaccacctacaaccagaagttcgaggacaaggccacactgaccgtggacaagagcagcagcaccgcctacatggaactgagaagcctgaccagcgaggacagcgccgtgtactattgtgccgccggatggaacttcgactactggggccagggaacaaccctgaccgttagctctacgcgtgggtctggaggcggaggcagcggcggaggcgggagcggcgacggtaacgaggagatgggaggaatcactcaaaccccttacaaagtctcaatttcaggaacaactgttatccttacatgtccccagtatcctggcagcgagatcctttggcagcataacgacaagaatatagggggagatgaagacgataagaatatcggatctgacgaggatcacttgagcctgaaagagttctccgagcttgaacaaagcggatattatgtgtgctatccgcgcgggtcaaagccggaagacgctaacttttacctttatctccgagccagagtgtgcgaaaattgcatggaaatggacgttatgtccgttgctacaatagttatcgtagatatatgcatcacgggtggactgcttctgctggtttattattggtccaagaatagaaaggccaaagctaaacccgtgaccagaggcgctggcgcaggcggaaggcaaaggggacaaaacaaagaacggccaccaccagtgccaaatccagattatgagcctattcggaaaggacagagggacctgtactctggcctgaatcagagaagaatccgcgccaagagaagcggatctggcgtgaagcagaccctgaatttcgacctgctgaagctggctggcgacgtggaatccaacccaggcccttctagaggccatatgaccgagtacaagcccacggtgcgcctcgccacccgcgacgacgtccccagggccgtacgcaccctcgccgccgcgttcgccgactaccccgccacgcgccacaccgtcgatccggaccgccacatcgagcgggtcaccgagctgcaagaactcttcctcacgcgcgtcgggctcgacatcggcaaggtgtgggtcgcggacgacggcgccgcggtggcggtctggaccacgccggagagcgtcgaagcgggggcggtgttcgccgagatcggcccgcgcatggccgagttgagcggttcccggctggccgcgcagcaacagatggaaggcctcctggcgccgcaccggcccaaggagcccgcgtggttcctggccaccgtcggcgtctcgcccgaccaccagggcaagggtctgggcagcgccgtcgtgctccccggagtggaggcggccgagcgcgccggggtgcccgccttcctggagacctccgcgccccgcaacctccccttctacgagcggctcggcttcaccgtcaccgccgacgtcgaggtgcccgaaggaccgcgcacctggtgcatgacccgcaagcccggtgcctga

SEQ ID NO: 9739 - DNA, 1974 bp, Artificial Sequence
  Synthetic Polynucloetide
atggccttaccagtgaccgccttgctcctgccgctggccttgctgctccacgccgccaggccggacatcgtgatgacccagagccacaagttcatgagcaccagcgtgggcgacagagtgtccatcatctgcaaggccagccaggatgtgggcacagccgtggattggtatcagcagaagcctggacagagccccaagctgctgatctactgggccagcacaagacacaccggcgtgcccgatagattcacaggctctggcagcggcaccgatttcaccctggccatcacaaacgtgcagagcgaggacctggccgactacttctgccagcagtacaacagctaccctctgacctttggagccggcaccaagctggaaatcaagagaggcggaggcggaagtggaggcggaggatctggcggcggaggctctgaagttcagctgcaacagtctggccccgagctggttaagcctggaacaagcgtgcggatctcctgcaagaccagcggctacaccttcaccgagtacaccatccactgggtcaagcagagccacggcaagagcctggaatggatcggcaacatcaaccccaacaacggcggcaccacctacaaccagaagttcgaggacaaggccacactgaccgtggacaagagcagcagcaccgcctacatggaactgagaagcctgaccagcgaggacagcgccgtgtactattgtgccgccggatggaacttcgactactggggccagggaacaaccctgaccgttagctctacgcgtgggtctggaggcggaggcagcggcggaggcgggagcggcttcaagatccccatcgaggaactggaagatcgggtgttcgtgaactgcaacacctctatcacctgggtggaaggcaccgtgggaacactgctgagcgacatcaccagactggacctcggcaagcggattctggaccctcggggcatctacagatgcaacggcaccgacatctacaaggacaaagaaagcaccgtgcaggtccactacagaatgtgccagtcctgcgtggaactggaccctgctacagtggccggcatcatcgtgaccgatgtgatcgctactctgctgctggctctgggagtgttctgcttcgccggacacgaaacaggcagactgtctggcgctgccgatacacaggccctgctgagaaacgaccaagtgtatcagcccctgcgcgacagagatgatgcccagtattctcacctcggcggcaactgggctagaaacaagcgcgccaagagaagcggatctggcgtgaagcagaccctgaatttcgacctgctgaagctggctggcgacgtggaatccaacccaggcccttctagaggccatatgaccgagtacaagcccacggtgcgcctcgccacccgcgacgacgtccccagggccgtacgcaccctcgccgccgcgttcgccgactaccccgccacgcgccacaccgtcgatccggaccgccacatcgagcgggtcaccgagctgcaagaactcttcctcacgcgcgtcgggctcgacatcggcaaggtgtgggtcgcggacgacggcgccgcggtggcggtctggaccacgccggagagcgtcgaagcgggggcggtgttcgccgagatcggcccgcgcatggccgagttgagcggttcccggctggccgcgcagcaacagatggaaggcctcctggcgccgcaccggcccaaggagcccgcgtggttcctggccaccgtcggcgtctcgcccgaccaccagggcaagggtctgggcagcgccgtcgtgctccccggagtggaggcggccgagcgcgccggggtgcccgccttcctggagacctccgcgccccgcaacctccccttctacgagcggctcggcttcaccgtcaccgccgacgtcgaggtgcccgaaggaccgcgcacctggtgcatgacccgcaagcccggtgcctga

SEQ ID NO: 9740 - DNA, 2004 bp, Artificial Sequence
  Synthetic Polynucloetide
atggccttaccagtgaccgccttgctcctgccgctggccttgctgctccacgccgccaggccggacatcgtgatgacccagagccacaagttcatgagcaccagcgtgggcgacagagtgtccatcatctgcaaggccagccaggatgtgggcacagccgtggattggtatcagcagaagcctggacagagccccaagctgctgatctactgggccagcacaagacacaccggcgtgcccgatagattcacaggctctggcagcggcaccgatttcaccctggccatcacaaacgtgcagagcgaggacctggccgactacttctgccagcagtacaacagctaccctctgacctttggagccggcaccaagctggaaatcaagagaggcggaggcggaagtggaggcggaggatctggcggcggaggctctgaagttcagctgcaacagtctggccccgagctggttaagcctggaacaagcgtgcggatctcctgcaagaccagcggctacaccttcaccgagtacaccatccactgggtcaagcagagccacggcaagagcctggaatggatcggcaacatcaaccccaacaacggcggcaccacctacaaccagaagttcgaggacaaggccacactgaccgtggacaagagcagcagcaccgcctacatggaactgagaagcctgaccagcgaggacagcgccgtgtactattgtgccgccggatggaacttcgactactggggccagggaacaaccctgaccgttagctctacgcgtgggtctggaggcggaggcagcggcggaggcgggagcggccagagcatcaagggcaaccacctggtcaaggtgtacgactaccaagaggacggcagcgtgctgctgacatgtgatgccgaggccaagaacatcacctggtttaaggacggcaagatgatcggcttcctgaccgaggacaagaagaagtggaacctgggcagcaacgctaaggaccccagaggcatgtatcagtgcaagggcagccagaacaagagcaagcccctccaggtgtactaccggatgtgccagaactgcatcgagctgaacgccgctaccatcagcggctttctgttcgccgagatcgtgtccatcttcgtgctggccgtgggcgtgtactttatcgctggacaggatggcgtgcggcagagcagagcttccgataagcaaaccctgctgcctaacgaccagctgtaccagcctctgaaggacagagaggacgaccagtacagccacctccagggcaatcagctgagaagaaaccgcgccaagagaagcggatctggcgtgaagcagaccctgaatttcgacctgctgaagctggctggcgacgtggaatccaacccaggcccttctagaggccatatgaccgagtacaagcccacggtgcgcctcgccacccgcgacgacgtccccagggccgtacgcaccctcgccgccgcgttcgccgactaccccgccacgcgccacaccgtcgatccggaccgccacatcgagcgggtcaccgagctgcaagaactcttcctcacgcgcgtcgggctcgacatcggcaaggtgtgggtcgcggacgacggcgccgcggtggcggtctggaccacgccggagagcgtcgaagcgggggcggtgttcgccgagatcggcccgcgcatggccgagttgagcggttcccggctggccgcgcagcaacagatggaaggcctcctggcgccgcaccggcccaaggagcccgcgtggttcctggccaccgtcggcgtctcgcccgaccaccagggcaagggtctgggcagcgccgtcgtgctccccggagtggaggcggccgagcgcgccggggtgcccgccttcctggagacctccgcgccccgcaacctccccttctacgagcggctcggcttcaccgtcaccgccgacgtcgaggtgcccgaaggaccgcgcacctggtgcatgacccgcaagcccggtgcctga

SEQ ID NO: 9741 - DNA, 1953 bp, Artificial Sequence
  Synthetic Polynucloetide
atggccttaccagtgaccgccttgctcctgccgctggccttgctgctccacgccgccaggccggacatcgtgatgacccagagccacaagttcatgagcaccagcgtgggcgacagagtgtccatcatctgcaaggccagccaggatgtgggcacagccgtggattggtatcagcagaagcctggacagagccccaagctgctgatctactgggccagcacaagacacaccggcgtgcccgatagattcacaggctctggcagcggcaccgatttcaccctggccatcacaaacgtgcagagcgaggacctggccgactacttctgccagcagtacaacagctaccctctgacctttggagccggcaccaagctggaaatcaagagaggcggaggcggaagtggaggcggaggatctggcggcggaggctctgaagttcagctgcaacagtctggccccgagctggttaagcctggaacaagcgtgcggatctcctgcaagaccagcggctacaccttcaccgagtacaccatccactgggtcaagcagagccacggcaagagcctggaatggatcggcaacatcaaccccaacaacggcggcaccacctacaaccagaagttcgaggacaaggccacactgaccgtggacaagagcagcagcaccgcctacatggaactgagaagcctgaccagcgaggacagcgccgtgtactattgtgccgccggatggaacttcgactactggggccagggaacaaccctgaccgttagctctacgcgtgggtctggaggcggaggcagcggcggaggcgggagcggccagagttttgggttgttggaccctaaattgtgctatctgttggacggaatcctgttcatttacggagtgatcctgaccgcattgttcctgcgggttaagttttccagatccgcagacgcacccgcttaccaacaagggcagaaccaactctacaatgaacttaatttggggcggagggaagagtacgacgttctggacaaaaggaggggacgagatcccgagatgggcggaaagcctcagcgaaggaagaatccgcaagaggggctttataacgaactccagaaagataaaatggcagaagcctatagtgagattgggatgaagggagaaaggaggaggggtaaaggtcacgatgggttgtaccaaggattgagcacagccactaaagatacctatgatgcgctccacatgcaggccctgccgccaagacgcgccaagagaagcggatctggcgtgaagcagaccctgaatttcgacctgctgaagctggctggcgacgtggaatccaacccaggcccttctagaggccatatgaccgagtacaagcccacggtgcgcctcgccacccgcgacgacgtccccagggccgtacgcaccctcgccgccgcgttcgccgactaccccgccacgcgccacaccgtcgatccggaccgccacatcgagcgggtcaccgagctgcaagaactcttcctcacgcgcgtcgggctcgacatcggcaaggtgtgggtcgcggacgacggcgccgcggtggcggtctggaccacgccggagagcgtcgaagcgggggcggtgttcgccgagatcggcccgcgcatggccgagttgagcggttcccggctggccgcgcagcaacagatggaaggcctcctggcgccgcaccggcccaaggagcccgcgtggttcctggccaccgtcggcgtctcgcccgaccaccagggcaagggtctgggcagcgccgtcgtgctccccggagtggaggcggccgagcgcgccggggtgcccgccttcctggagacctccgcgccccgcaacctccccttctacgagcggctcggcttcaccgtcaccgccgacgtcgaggtgcccgaaggaccgcgcacctggtgcatgacccgcaagcccggtgcctga

SEQ ID NO: 9742 - DNA, 2253 bp, Artificial Sequence
  Synthetic Polynucloetide
atggccttaccagtgaccgccttgctcctgccgctggccttgctgctccacgccgccaggccggaagtgcagctggttgaatctggcggaggactggttcagcctggcggatctctgagactgtcttgtgccgccagcggcttcagcttcagcgacttttggatgagctgggtccgacaggcccctggcaaaggacttgaatgggtcgccacaatcagccaggccggcagcgagaaggactacgtggactctgtgaagggcagattcaccatcagccgggacaacgccaagaagtccctgtacctccagatgaacagcctgagagccgaggacaccgccgtgtactattgtgcctctggcgtgtacagcttcgactacagaggccagggcaccctggtcacagtctcttctggtaccggcggaggcggatctggcggcggaggtagcggtggcggaggatctgaattcgacatcgtgatgacccagagccacaagttcatgagcaccagcgtgggcgacagagtgtccatcatctgcaaggccagccaggatgtgggcacagccgtggattggtatcagcagaagcctggacagagccccaagctgctgatctactgggccagcacaagacacaccggcgtgcccgatagattcacaggctctggcagcggcaccgatttcaccctggccatcacaaacgtgcagagcgaggacctggccgactacttctgccagcagtacaacagctaccctctgacctttggagccggcaccaagctggaaatcaagagactcgaggacctgaagaacgtgttcccacctgaggtggccgtgttcgagcctagcgaggccgagatcagccacacccagaaagccaccctcgtgtgcctggctaccggcttctaccccgaccatgtggaactgtcttggtgggtcaacggcaaagaggtgcacagcggcgtgtgtaccgacccccagccactgaaagaacagcccgccctgaacgacagccggtactgcctgagcagcagactgagagtgtccgccaccttctggcagaacccccggaaccacttcagatgccaggtgcagttctacggcctgagcgagaacgacgagtggacccaggacagagccaagcccgtgacccagatcgtgtctgccgaagcctggggcagagccgattgcggctttaccagcgagagctaccagcagggcgtgctgagcgccaccatcctgtacgagatcctgctgggcaaggccaccctgtacgccgtgctggtgtctgccctggtgctgatggctatggtcaagcggaaggacagccggggaagggccaagcgatctggatctggagcaacaaacttctcactactcaaacaagcaggtgacgtggaggagaatcccgggcctactagtatggactggatttggcgcatccttttccttgtcggcgctgctaccggcgcgcattccttcgaagaagttcagctgcaacagtctggccccgagctggttaagcctggaacaagcgtgcggatctcctgcaagaccagcggctacaccttcaccgagtacaccatccactgggtcaagcagagccacggcaagagcctggaatggatcggcaacatcaaccccaacaacggcggcaccacctacaaccagaagttcgaggacaaggccacactgaccgtggacaagagcagcagcaccgcctacatggaactgagaagcctgaccagcgaggacagcgccgtgtactattgtgccgccggatggaacttcgactactggggccagggaacaaccctgaccgttagctctacgcgtatccagaaccctgatcctgccgtgtaccagctgcgggatagcaagagcagcgacaagagcgtgtgtctgttcaccgacttcgacagccagaccaacgtgtcccagagcaaggactccgacgtgtacatcaccgataagtgcgtgctggacatgcggagcatggacttcaagagcaactccgccgtggcctggtccaacaagtccgatttcgcctgcgccaacgccttcaacaacagcattatccccgaggacacattcttcccaagccccgagagcagctgcgacgtgaagctggtggaaaagagcttcgagacagacaccaacctgaacttccagaacctgagcgtgatcggcttcagaatcctgctgctgaaagtggccggctttaacctgctgatgaccctgcggctgtggtccagc

SEQ ID NO: 9743 - DNA, 2265 bp, Artificial Sequence
  Synthetic Polynucloetide
atggccttaccagtgaccgccttgctcctgccgctggccttgctgctccacgccgccaggccggaagtgcagctggttgaatctggcggaggactggttcagcctggcggatctctgagactgtcttgtgccgccagcggcttcagcttcagcgacttttggatgagctgggtccgacaggcccctggcaaaggacttgaatgggtcgccacaatcagccaggccggcagcgagaaggactacgtggactctgtgaagggcagattcaccatcagccgggacaacgccaagaagtccctgtacctccagatgaacagcctgagagccgaggacaccgccgtgtactattgtgcctctggcgtgtacagcttcgactacagaggccagggcaccctggtcacagtctcttctggtaccggcggaggcggatctggcggcggaggtagcggtggcggaggatctgaattcgacatcgtgatgacccagagccacaagttcatgagcaccagcgtgggcgacagagtgtccatcatctgcaaggccagccaggatgtgggcacagccgtggattggtatcagcagaagcctggacagagccccaagctgctgatctactgggccagcacaagacacaccggcgtgcccgatagattcacaggctctggcagcggcaccgatttcaccctggccatcacaaacgtgcagagcgaggacctggccgactacttctgccagcagtacaacagctaccctctgacctttggagccggcaccaagctggaaatcaagagactcgagatccagaaccctgatcctgccgtgtaccagctgcgggatagcaagagcagcgacaagagcgtgtgtctgttcaccgacttcgacagccagaccaacgtgtcccagagcaaggactccgacgtgtacatcaccgataagtgcgtgctggacatgcggagcatggacttcaagagcaactccgccgtggcctggtccaacaagtccgatttcgcctgcgccaacgccttcaacaacagcattatccccgaggacacattcttcccaagccccgagagcagctgcgacgtgaagctggtggaaaagagcttcgagacagacaccaacctgaacttccagaacctgagcgtgatcggcttcagaatcctgctgctgaaagtggccggctttaacctgctgatgaccctgcggctgtggtccagccgcgccaagagaagcggatctggcgtgaagcagaccctgaatttcgacctgctgaagctggctggcgacgtggaatccaacccaggccctactagtatggactggatttggcgcatccttttccttgtcggcgctgctaccggcgcgcattccttcgaagaagttcagctgcaacagtctggccccgagctggttaagcctggaacaagcgtgcggatctcctgcaagaccagcggctacaccttcaccgagtacaccatccactgggtcaagcagagccacggcaagagcctggaatggatcggcaacatcaaccccaacaacggcggcaccacctacaaccagaagttcgaggacaaggccacactgaccgtggacaagagcagcagcaccgcctacatggaactgagaagcctgaccagcgaggacagcgccgtgtactattgtgccgccggatggaacttcgactactggggccagggaacaaccctgaccgttagctctacgcgtgaggacctgaagaacgtgttcccacctgaggtggccgtgttcgagcctagcgaggccgagatcagccacacccagaaagccaccctcgtgtgcctggctaccggcttctaccccgaccatgtggaactgtcttggtgggtcaacggcaaagaggtgcacagcggcgtgtgtaccgacccccagccactgaaagaacagcccgccctgaacgacagccggtactgcctgagcagcagactgagagtgtccgccaccttctggcagaacccccggaaccacttcagatgccaggtgcagttctacggcctgagcgagaacgacgagtggacccaggacagagccaagcccgtgacccagatcgtgtctgccgaagcctggggcagagccgattgcggctttaccagcgagagctaccagcagggcgtgctgagcgccaccatcctgtacgagatcctgctgggcaaggccaccctgtacgccgtgctggtgtctgccctggtgctgatggctatggtcaagcggaaggacagccgggga

SEQ ID NO: 9744 - DNA, 2841 bp, Artificial Sequence
  Synthetic Polynucloetide
atggccttaccagtgaccgccttgctcctgccgctggccttgctgctccacgccgccaggccggaagtgcagctggttgaatctggcggaggactggttcagcctggcggatctctgagactgtcttgtgccgccagcggcttcagcttcagcgacttttggatgagctgggtccgacaggcccctggcaaaggacttgaatgggtcgccacaatcagccaggccggcagcgagaaggactacgtggactctgtgaagggcagattcaccatcagccgggacaacgccaagaagtccctgtacctccagatgaacagcctgagagccgaggacaccgccgtgtactattgtgcctctggcgtgtacagcttcgactacagaggccagggcaccctggtcacagtctcttctggtaccggcggaggcggatctggcggcggaggtagcggtggcggaggatctgaattcgacatcgtgatgacccagagccacaagttcatgagcaccagcgtgggcgacagagtgtccatcatctgcaaggccagccaggatgtgggcacagccgtggattggtatcagcagaagcctggacagagccccaagctgctgatctactgggccagcacaagacacaccggcgtgcccgatagattcacaggctctggcagcggcaccgatttcaccctggccatcacaaacgtgcagagcgaggacctggccgactacttctgccagcagtacaacagctaccctctgacctttggagccggcaccaagctggaaatcaagagactcgaggacctgaagaacgtgttcccacctgaggtggccgtgttcgagcctagcgaggccgagatcagccacacccagaaagccaccctcgtgtgcctggctaccggcttctaccccgaccatgtggaactgtcttggtgggtcaacggcaaagaggtgcacagcggcgtgtctaccgacccccagccactgaaagaacagcccgccctgaacgacagccggtactgcctgagcagcagactgagagtgtccgccaccttctggcagaacccccggaaccacttcagatgccaggtgcagttctacggcctgagcgagaacgacgagtggacccaggacagagccaagcccgtgacccagatcgtgtctgccgaagcctggggcagagccgattgcggatcccagagcttcggcctgctggaccccaagctgtgctacctgctggatggcatcctgttcatctacggcgtgatcctgaccgccctgttcctgagagtgaagttcagcagaagcgccgacgcccctgcctaccagcagggacagaaccaactgtacaacgagctgaacctgggcagacgggaagagtacgacgtgctggacaagcggagaggcagggaccctgagatgggcggaaagccccagcggagaaagaacccccaggaaggactgtataacgaactccagaaagacaagatggccgaagcctacagcgagatcggcatgaagggcgagcggagaagaggcaagggccacgatggcctgtaccagggcctgagcaccgccaccaaggacacctatgacgccctgcacatgcaggccctgcctccaagaagggccaagcgatctggatctggagcaacaaacttctcactactcaaacaagcaggtgacgtggaggagaatcccgggcctactagtatggactggatttggcgcatccttttccttgtcggcgctgctaccggcgcgcattccttcgaagaagttcagctgcaacagtctggccccgagctggttaagcctggaacaagcgtgcggatctcctgcaagaccagcggctacaccttcaccgagtacaccatccactgggtcaagcagagccacggcaagagcctggaatggatcggcaacatcaaccccaacaacggcggcaccacctacaaccagaagttcgaggacaaggccacactgaccgtggacaagagcagcagcaccgcctacatggaactgagaagcctgaccagcgaggacagcgccgtgtactattgtgccgccggatggaacttcgactactggggccagggaacaaccctgaccgttagctctacgcgtatccagaaccctgatcctgccgtgtaccagctgcgggatagcaagagcagcgacaagagcgtgtgtctgttcaccgacttcgacagccagaccaacgtgtcccagagcaaggactccgacgtgtacatcaccgataagaccgtgctggacatgcggagcatggacttcaagagcaactccgccgtggcctggtccaacaagtccgatttcgcctgcgccaacgccttcaacaacagcattatccccgaggacacattcttcccaagccccgagagcagctgcggtacccagagttttgggttgttggaccctaaattgtgctatctgttggacggaatcctgttcatttacggagtgatcctgaccgcattgttcctgcgggttaagttttccagatccgcagacgcacccgcttaccaacaagggcagaaccaactctacaatgaacttaatttggggcggagggaagagtacgacgttctggacaaaaggaggggacgagatcccgagatgggcggaaagcctcagcgaaggaagaatccgcaagaggggctttataacgaactccagaaagataaaatggcagaagcctatagtgagattgggatgaagggagaaaggaggaggggtaaaggtcacgatgggttgtaccaaggattgagcacagccactaaagatacctatgatgcgctccacatgcaggccctgccgccaaga

SEQ ID NO: 9745 - DNA, 2331 bp, Artificial Sequence
  Synthetic Polynucloetide
atggccttaccagtgaccgccttgctcctgccgctggccttgctgctccacgccgccaggccggaagtgcagctggttgaatctggcggaggactggttcagcctggcggatctctgagactgtcttgtgccgccagcggcttcagcttcagcgacttttggatgagctgggtccgacaggcccctggcaaaggacttgaatgggtcgccacaatcagccaggccggcagcgagaaggactacgtggactctgtgaagggcagattcaccatcagccgggacaacgccaagaagtccctgtacctccagatgaacagcctgagagccgaggacaccgccgtgtactattgtgcctctggcgtgtacagcttcgactacagaggccagggcaccctggtcacagtctcttctggtaccggcggaggcggatctggcggcggaggtagcggtggcggaggatctgaattcgacatcgtgatgacccagagccacaagttcatgagcaccagcgtgggcgacagagtgtccatcatctgcaaggccagccaggatgtgggcacagccgtggattggtatcagcagaagcctggacagagccccaagctgctgatctactgggccagcacaagacacaccggcgtgcccgatagattcacaggctctggcagcggcaccgatttcaccctggccatcacaaacgtgcagagcgaggacctggccgactacttctgccagcagtacaacagctaccctctgacctttggagccggcaccaagctggaaatcaagagactcgagggacagcctaaggccaatcctaccgtgacactgttccctccaagcagcgaagaactccaggccaacaaggccacacttgtgtgcctgatctccgacttctaccctggggctgtgacagtggcttggaaggccgatggatctcctgtgaaagccggcgtggaaaccaccaagccatccaagcagagcaacaacaaatacgccgccagctcctacctgagcctgacacctgagcagtggaagtcccacagatcctacagctgccaagtgacccacgaaggcagcaccgtggaaaagacagtggcccctacagagtgcagccccatcaagaccgatgtgattacaatggaccccaaggacaactgctccaaggacgccaacgataccctgctgctccagctgaccaacaccagcgcctactacatgtacttgttgctgctgctgaagtccgtggtgtacttcgccatcatcacatgctgcctgctgcggagaaccgccttctgctgcaacggcgagaagtctagggccaagcgatctggatctggagcaacaaacttctcactactcaaacaagcaggtgacgtggaggagaatcccgggcctactagtatggactggatttggcgcatccttttccttgtcggcgctgctaccggcgcgcattccttcgaagaagttcagctgcaacagtctggccccgagctggttaagcctggaacaagcgtgcggatctcctgcaagaccagcggctacaccttcaccgagtacaccatccactgggtcaagcagagccacggcaagagcctggaatggatcggcaacatcaaccccaacaacggcggcaccacctacaaccagaagttcgaggacaaggccacactgaccgtggacaagagcagcagcaccgcctacatggaactgagaagcctgaccagcgaggacagcgccgtgtactattgtgccgccggatggaacttcgactactggggccagggaacaaccctgaccgttagctctacgcgtgcctctacaaagggaccctccgtgtttcctctggctcccagcagcaagtctacaagcggaggaacagccgctctgggctgcctggtcaaggattactttcccgagcctgtgaccgtgtcctggaatagcggagcactgacaagcggcgtgcacacctttccagccgtgctgcaaagcagcggcctgtactctctgagcagcgtggtcacagtgcctagctctagcctgggcacccagacctacatctgcaatgtgaaccacaagcctagcaacaccaaggtggacaagagagtggaacccaagagctgtgaagtgaaaaccgactccaccgaccacgtgaagcccaaagagacagagaacaccaagcagcccagcaagagctgccacaagcccaaggccatcgtgcacaccgagaaagtgaacatgatgagcctgaccgtgctgggcctgcggatgctgttcgccaaaaccgtggccgtgaacttcctgctgaccgccaagctgttcttcctc

SEQ ID NO: 9746 - DNA, 2274 bp, Artificial Sequence
  Synthetic Polynucloetide
atggccttaccagtgaccgccttgctcctgccgctggccttgctgctccacgccgccaggccggaagtgcagctggttgaatctggcggaggactggttcagcctggcggatctctgagactgtcttgtgccgccagcggcttcagcttcagcgacttttggatgagctgggtccgacaggcccctggcaaaggacttgaatgggtcgccacaatcagccaggccggcagcgagaaggactacgtggactctgtgaagggcagattcaccatcagccgggacaacgccaagaagtccctgtacctccagatgaacagcctgagagccgaggacaccgccgtgtactattgtgcctctggcgtgtacagcttcgactacagaggccagggcaccctggtcacagtctcttctggtaccggcggaggcggatctggcggcggaggtagcggtggcggaggatctgaattcgacatcgtgatgacccagagccacaagttcatgagcaccagcgtgggcgacagagtgtccatcatctgcaaggccagccaggatgtgggcacagccgtggattggtatcagcagaagcctggacagagccccaagctgctgatctactgggccagcacaagacacaccggcgtgcccgatagattcacaggctctggcagcggcaccgatttcaccctggccatcacaaacgtgcagagcgaggacctggccgactacttctgccagcagtacaacagctaccctctgacctttggagccggcaccaagctggaaatcaagagactcgagggacagcctaaggccaatcctaccgtgacactgttccctccaagcagcgaagaactccaggccaacaaggccacacttgtgtgcctgatctccgacttctaccctggggctgtgacagtggcttggaaggccgatggatctcctgtgaaagccggcgtggaaaccaccaagccatccaagcagagcaacaacaaatacgccgccagctcctacctgagcctgacacctgagcagtggaagtcccacagatcctacagctgccaagtgacccacgaaggcagcaccgtggaaaagacagtggcccctacagagtgcagcggcagagccgattgcggctttaccagcgagagctaccagcagggcgtgctgagcgccaccatcctgtacgagatcctgctgggcaaggccaccctgtacgccgtgctggtgtctgccctggtgctgatggctatggtcaagcggaaggacagccggggacgcgccaagagaagcggatctggcgtgaagcagaccctgaatttcgacctgctgaagctggctggcgacgtggaatccaacccaggccctactagtatggactggatttggcgcatccttttccttgtcggcgctgctaccggcgcgcattccttcgaagaagttcagctgcaacagtctggccccgagctggttaagcctggaacaagcgtgcggatctcctgcaagaccagcggctacaccttcaccgagtacaccatccactgggtcaagcagagccacggcaagagcctggaatggatcggcaacatcaaccccaacaacggcggcaccacctacaaccagaagttcgaggacaaggccacactgaccgtggacaagagcagcagcaccgcctacatggaactgagaagcctgaccagcgaggacagcgccgtgtactattgtgccgccggatggaacttcgactactggggccagggaacaaccctgaccgttagctctacgcgtgcctctacaaagggaccctccgtgtttcctctggctcccagcagcaagtctacaagcggaggaacagccgctctgggctgcctggtcaaggattactttcccgagcctgtgaccgtgtcctggaatagcggagcactgacaagcggcgtgcacacctttccagccgtgctgcaaagcagcggcctgtactctctgagcagcgtggtcacagtgcctagctctagcctgggcacccagacctacatctgcaatgtgaaccacaagcctagcaacaccaaggtggacaagagagtggaacccaagagctgtatccccgaggacacattcttcccaagccccgagagcagctgcgacgtgaagctggtggaaaagagcttcgagacagacaccaacctgaacttccagaacctgagcgtgatcggcttcagaatcctgctgctgaaagtggccggctttaacctgctgatgaccctgcggctgtggtccagc

SEQ ID NO: 9747 - DNA, 2676 bp, Artificial Sequence
  Synthetic Polynucloetide
atggccttaccagtgaccgccttgctcctgccgctggccttgctgctccacgccgccaggccggaagtgcagctggttgaatctggcggaggactggttcagcctggcggatctctgagactgtcttgtgccgccagcggcttcagcttcagcgacttttggatgagctgggtccgacaggcccctggcaaaggacttgaatgggtcgccacaatcagccaggccggcagcgagaaggactacgtggactctgtgaagggcagattcaccatcagccgggacaacgccaagaagtccctgtacctccagatgaacagcctgagagccgaggacaccgccgtgtactattgtgcctctggcgtgtacagcttcgactacagaggccagggcaccctggtcacagtctcttctggtaccggcggaggcggatctggcggcggaggtagcggtggcggaggatctgaattcgacatcgtgatgacccagagccacaagttcatgagcaccagcgtgggcgacagagtgtccatcatctgcaaggccagccaggatgtgggcacagccgtggattggtatcagcagaagcctggacagagccccaagctgctgatctactgggccagcacaagacacaccggcgtgcccgatagattcacaggctctggcagcggcaccgatttcaccctggccatcacaaacgtgcagagcgaggacctggccgactacttctgccagcagtacaacagctaccctctgacctttggagccggcaccaagctggaaatcaagagactcgagatccagaaccctgatcctgccgtgtaccagctgcgggatagcaagagcagcgacaagagcgtgtgtctgttcaccgacttcgacagccagaccaacgtgtcccagagcaaggactccgacgtgtacatcaccgataagtgcgtgctggacatgcggagcatggacttcaagagcaactccgccgtggcctggtccaacaagtccgatttcgcctgcgccaacgccttcaacaacagcattatccccgaggacacattcttcccaagccccgagagcagctgcgacgtgaagctggtggaaaagagcttcgagacagacaccaacctgaacttccagaacctgagcgtgatcggcttcagaatcctgctgctgaaagtggccggctttaacctgctgatgaccctgcggctgtggtccagccgcgccaagagaagcggatctggcgtgaagcagaccctgaatttcgacctgctgaagctggctggcgacgtggaatccaacccaggccctactagtatggactggatttggcgcatccttttccttgtcggcgctgctaccggcgcgcattccgggccccagctccagctgcaagagtctggacctggcctggtcaagcctagcgagacactgagcctgacctgtaccgtgtccggcgatagcatcagcagcggcgattactactggggctggatcagacagcctcctggcaaaggactggaatggatcggccacatctactacagcggcgtgacctactacaaccccagcctgaagtccagagtgaccatcagcgtggacaccagccggaaccagttctccctgaagctgtctagcgtgacagccgccgataccgccgtgtactactgcaccagagaggacagcagcaactggcggagtagaggccagggaacactggtcacagttagctctggatccggcggaggcggaagtggaggcggaggatctggcggcggaggctctttcgaagaagttcagctgcaacagtctggccccgagctggttaagcctggaacaagcgtgcggatctcctgcaagaccagcggctacaccttcaccgagtacaccatccactgggtcaagcagagccacggcaagagcctggaatggatcggcaacatcaaccccaacaacggcggcaccacctacaaccagaagttcgaggacaaggccacactgaccgtggacaagagcagcagcaccgcctacatggaactgagaagcctgaccagcgaggacagcgccgtgtactattgtgccgccggatggaacttcgactactggggccagggaacaaccctgaccgttagctctacgcgtgaggacctgaagaacgtgttcccacctgaggtggccgtgttcgagcctagcgaggccgagatcagccacacccagaaagccaccctcgtgtgcctggctaccggcttctaccccgaccatgtggaactgtcttggtgggtcaacggcaaagaggtgcacagcggcgtgtgtaccgacccccagccactgaaagaacagcccgccctgaacgacagccggtactgcctgagcagcagactgagagtgtccgccaccttctggcagaacccccggaaccacttcagatgccaggtgcagttctacggcctgagcgagaacgacgagtggacccaggacagagccaagcccgtgacccagatcgtgtctgccgaagcctggggcagagccgattgcggctttaccagcgagagctaccagcagggcgtgctgagcgccaccatcctgtacgagatcctgctgggcaaggccaccctgtacgccgtgctggtgtctgccctggtgctgatggctatggtcaagcggaaggacagccgggga

SEQ ID NO: 9748 - DNA, 3252 bp, Artificial Sequence
  Synthetic Polynucloetide
atggccttaccagtgaccgccttgctcctgccgctggccttgctgctccacgccgccaggccggaagtgcagctggttgaatctggcggaggactggttcagcctggcggatctctgagactgtcttgtgccgccagcggcttcagcttcagcgacttttggatgagctgggtccgacaggcccctggcaaaggacttgaatgggtcgccacaatcagccaggccggcagcgagaaggactacgtggactctgtgaagggcagattcaccatcagccgggacaacgccaagaagtccctgtacctccagatgaacagcctgagagccgaggacaccgccgtgtactattgtgcctctggcgtgtacagcttcgactacagaggccagggcaccctggtcacagtctcttctggtaccggcggaggcggatctggcggcggaggtagcggtggcggaggatctgaattcgacatcgtgatgacccagagccacaagttcatgagcaccagcgtgggcgacagagtgtccatcatctgcaaggccagccaggatgtgggcacagccgtggattggtatcagcagaagcctggacagagccccaagctgctgatctactgggccagcacaagacacaccggcgtgcccgatagattcacaggctctggcagcggcaccgatttcaccctggccatcacaaacgtgcagagcgaggacctggccgactacttctgccagcagtacaacagctaccctctgacctttggagccggcaccaagctggaaatcaagagactcgaggacctgaagaacgtgttcccacctgaggtggccgtgttcgagcctagcgaggccgagatcagccacacccagaaagccaccctcgtgtgcctggctaccggcttctaccccgaccatgtggaactgtcttggtgggtcaacggcaaagaggtgcacagcggcgtgtctaccgacccccagccactgaaagaacagcccgccctgaacgacagccggtactgcctgagcagcagactgagagtgtccgccaccttctggcagaacccccggaaccacttcagatgccaggtgcagttctacggcctgagcgagaacgacgagtggacccaggacagagccaagcccgtgacccagatcgtgtctgccgaagcctggggcagagccgattgcggatcccagagcttcggcctgctggaccccaagctgtgctacctgctggatggcatcctgttcatctacggcgtgatcctgaccgccctgttcctgagagtgaagttcagcagaagcgccgacgcccctgcctaccagcagggacagaaccaactgtacaacgagctgaacctgggcagacgggaagagtacgacgtgctggacaagcggagaggcagggaccctgagatgggcggaaagccccagcggagaaagaacccccaggaaggactgtataacgaactccagaaagacaagatggccgaagcctacagcgagatcggcatgaagggcgagcggagaagaggcaagggccacgatggcctgtaccagggcctgagcaccgccaccaaggacacctatgacgccctgcacatgcaggccctgcctccaagaagggccaagcgatctggatctggagcaacaaacttctcactactcaaacaagcaggtgacgtggaggagaatcccgggcctactagtatggactggatttggcgcatccttttccttgtcggcgctgctaccggcgcgcattccgggccccagctccagctgcaagagtctggacctggcctggtcaagcctagcgagacactgagcctgacctgtaccgtgtccggcgatagcatcagcagcggcgattactactggggctggatcagacagcctcctggcaaaggactggaatggatcggccacatctactacagcggcgtgacctactacaaccccagcctgaagtccagagtgaccatcagcgtggacaccagccggaaccagttctccctgaagctgtctagcgtgacagccgccgataccgccgtgtactactgcaccagagaggacagcagcaactggcggagtagaggccagggaacactggtcacagttagctctggatccggcggaggcggaagtggaggcggaggatctggcggcggaggctctttcgaagaagttcagctgcaacagtctggccccgagctggttaagcctggaacaagcgtgcggatctcctgcaagaccagcggctacaccttcaccgagtacaccatccactgggtcaagcagagccacggcaagagcctggaatggatcggcaacatcaaccccaacaacggcggcaccacctacaaccagaagttcgaggacaaggccacactgaccgtggacaagagcagcagcaccgcctacatggaactgagaagcctgaccagcgaggacagcgccgtgtactattgtgccgccggatggaacttcgactactggggccagggaacaaccctgaccgttagctctacgcgtatccagaaccctgatcctgccgtgtaccagctgcgggatagcaagagcagcgacaagagcgtgtgtctgttcaccgacttcgacagccagaccaacgtgtcccagagcaaggactccgacgtgtacatcaccgataagaccgtgctggacatgcggagcatggacttcaagagcaactccgccgtggcctggtccaacaagtccgatttcgcctgcgccaacgccttcaacaacagcattatccccgaggacacattcttcccaagccccgagagcagctgcggtacccagagttttgggttgttggaccctaaattgtgctatctgttggacggaatcctgttcatttacggagtgatcctgaccgcattgttcctgcgggttaagttttccagatccgcagacgcacccgcttaccaacaagggcagaaccaactctacaatgaacttaatttggggcggagggaagagtacgacgttctggacaaaaggaggggacgagatcccgagatgggcggaaagcctcagcgaaggaagaatccgcaagaggggctttataacgaactccagaaagataaaatggcagaagcctatagtgagattgggatgaagggagaaaggaggaggggtaaaggtcacgatgggttgtaccaaggattgagcacagccactaaagatacctatgatgcgctccacatgcaggccctgccgccaaga

SEQ ID NO: 9749 - DNA, 2742 bp, Artificial Sequence
  Synthetic Polynucloetide
atggccttaccagtgaccgccttgctcctgccgctggccttgctgctccacgccgccaggccggaagtgcagctggttgaatctggcggaggactggttcagcctggcggatctctgagactgtcttgtgccgccagcggcttcagcttcagcgacttttggatgagctgggtccgacaggcccctggcaaaggacttgaatgggtcgccacaatcagccaggccggcagcgagaaggactacgtggactctgtgaagggcagattcaccatcagccgggacaacgccaagaagtccctgtacctccagatgaacagcctgagagccgaggacaccgccgtgtactattgtgcctctggcgtgtacagcttcgactacagaggccagggcaccctggtcacagtctcttctggtaccggcggaggcggatctggcggcggaggtagcggtggcggaggatctgaattcgacatcgtgatgacccagagccacaagttcatgagcaccagcgtgggcgacagagtgtccatcatctgcaaggccagccaggatgtgggcacagccgtggattggtatcagcagaagcctggacagagccccaagctgctgatctactgggccagcacaagacacaccggcgtgcccgatagattcacaggctctggcagcggcaccgatttcaccctggccatcacaaacgtgcagagcgaggacctggccgactacttctgccagcagtacaacagctaccctctgacctttggagccggcaccaagctggaaatcaagagactcgagggacagcctaaggccaatcctaccgtgacactgttccctccaagcagcgaagaactccaggccaacaaggccacacttgtgtgcctgatctccgacttctaccctggggctgtgacagtggcttggaaggccgatggatctcctgtgaaagccggcgtggaaaccaccaagccatccaagcagagcaacaacaaatacgccgccagctcctacctgagcctgacacctgagcagtggaagtcccacagatcctacagctgccaagtgacccacgaaggcagcaccgtggaaaagacagtggcccctacagagtgcagccccatcaagaccgatgtgattacaatggaccccaaggacaactgctccaaggacgccaacgataccctgctgctccagctgaccaacaccagcgcctactacatgtacttgttgctgctgctgaagtccgtggtgtacttcgccatcatcacatgctgcctgctgcggagaaccgccttctgctgcaacggcgagaagtctagggccaagcgatctggatctggagcaacaaacttctcactactcaaacaagcaggtgacgtggaggagaatcccgggcctactagtatggactggatttggcgcatccttttccttgtcggcgctgctaccggcgcgcattccgggccccagctccagctgcaagagtctggacctggcctggtcaagcctagcgagacactgagcctgacctgtaccgtgtccggcgatagcatcagcagcggcgattactactggggctggatcagacagcctcctggcaaaggactggaatggatcggccacatctactacagcggcgtgacctactacaaccccagcctgaagtccagagtgaccatcagcgtggacaccagccggaaccagttctccctgaagctgtctagcgtgacagccgccgataccgccgtgtactactgcaccagagaggacagcagcaactggcggagtagaggccagggaacactggtcacagttagctctggatccggcggaggcggaagtggaggcggaggatctggcggcggaggctctttcgaagaagttcagctgcaacagtctggccccgagctggttaagcctggaacaagcgtgcggatctcctgcaagaccagcggctacaccttcaccgagtacaccatccactgggtcaagcagagccacggcaagagcctggaatggatcggcaacatcaaccccaacaacggcggcaccacctacaaccagaagttcgaggacaaggccacactgaccgtggacaagagcagcagcaccgcctacatggaactgagaagcctgaccagcgaggacagcgccgtgtactattgtgccgccggatggaacttcgactactggggccagggaacaaccctgaccgttagctctacgcgtgcctctacaaagggaccctccgtgtttcctctggctcccagcagcaagtctacaagcggaggaacagccgctctgggctgcctggtcaaggattactttcccgagcctgtgaccgtgtcctggaatagcggagcactgacaagcggcgtgcacacctttccagccgtgctgcaaagcagcggcctgtactctctgagcagcgtggtcacagtgcctagctctagcctgggcacccagacctacatctgcaatgtgaaccacaagcctagcaacaccaaggtggacaagagagtggaacccaagagctgtgaagtgaaaaccgactccaccgaccacgtgaagcccaaagagacagagaacaccaagcagcccagcaagagctgccacaagcccaaggccatcgtgcacaccgagaaagtgaacatgatgagcctgaccgtgctgggcctgcggatgctgttcgccaaaaccgtggccgtgaacttcctgctgaccgccaagctgttcttcctc

SEQ ID NO: 9750 - DNA, 2685 bp, Artificial Sequence
  Synthetic Polynucloetide
atggccttaccagtgaccgccttgctcctgccgctggccttgctgctccacgccgccaggccggaagtgcagctggttgaatctggcggaggactggttcagcctggcggatctctgagactgtcttgtgccgccagcggcttcagcttcagcgacttttggatgagctgggtccgacaggcccctggcaaaggacttgaatgggtcgccacaatcagccaggccggcagcgagaaggactacgtggactctgtgaagggcagattcaccatcagccgggacaacgccaagaagtccctgtacctccagatgaacagcctgagagccgaggacaccgccgtgtactattgtgcctctggcgtgtacagcttcgactacagaggccagggcaccctggtcacagtctcttctggtaccggcggaggcggatctggcggcggaggtagcggtggcggaggatctgaattcgacatcgtgatgacccagagccacaagttcatgagcaccagcgtgggcgacagagtgtccatcatctgcaaggccagccaggatgtgggcacagccgtggattggtatcagcagaagcctggacagagccccaagctgctgatctactgggccagcacaagacacaccggcgtgcccgatagattcacaggctctggcagcggcaccgatttcaccctggccatcacaaacgtgcagagcgaggacctggccgactacttctgccagcagtacaacagctaccctctgacctttggagccggcaccaagctggaaatcaagagactcgagggacagcctaaggccaatcctaccgtgacactgttccctccaagcagcgaagaactccaggccaacaaggccacacttgtgtgcctgatctccgacttctaccctggggctgtgacagtggcttggaaggccgatggatctcctgtgaaagccggcgtggaaaccaccaagccatccaagcagagcaacaacaaatacgccgccagctcctacctgagcctgacacctgagcagtggaagtcccacagatcctacagctgccaagtgacccacgaaggcagcaccgtggaaaagacagtggcccctacagagtgcagcggcagagccgattgcggctttaccagcgagagctaccagcagggcgtgctgagcgccaccatcctgtacgagatcctgctgggcaaggccaccctgtacgccgtgctggtgtctgccctggtgctgatggctatggtcaagcggaaggacagccggggacgcgccaagagaagcggatctggcgtgaagcagaccctgaatttcgacctgctgaagctggctggcgacgtggaatccaacccaggccctactagtatggactggatttggcgcatccttttccttgtcggcgctgctaccggcgcgcattccgggccccagctccagctgcaagagtctggacctggcctggtcaagcctagcgagacactgagcctgacctgtaccgtgtccggcgatagcatcagcagcggcgattactactggggctggatcagacagcctcctggcaaaggactggaatggatcggccacatctactacagcggcgtgacctactacaaccccagcctgaagtccagagtgaccatcagcgtggacaccagccggaaccagttctccctgaagctgtctagcgtgacagccgccgataccgccgtgtactactgcaccagagaggacagcagcaactggcggagtagaggccagggaacactggtcacagttagctctggatccggcggaggcggaagtggaggcggaggatctggcggcggaggctctttcgaagaagttcagctgcaacagtctggccccgagctggttaagcctggaacaagcgtgcggatctcctgcaagaccagcggctacaccttcaccgagtacaccatccactgggtcaagcagagccacggcaagagcctggaatggatcggcaacatcaaccccaacaacggcggcaccacctacaaccagaagttcgaggacaaggccacactgaccgtggacaagagcagcagcaccgcctacatggaactgagaagcctgaccagcgaggacagcgccgtgtactattgtgccgccggatggaacttcgactactggggccagggaacaaccctgaccgttagctctacgcgtgcctctacaaagggaccctccgtgtttcctctggctcccagcagcaagtctacaagcggaggaacagccgctctgggctgcctggtcaaggattactttcccgagcctgtgaccgtgtcctggaatagcggagcactgacaagcggcgtgcacacctttccagccgtgctgcaaagcagcggcctgtactctctgagcagcgtggtcacagtgcctagctctagcctgggcacccagacctacatctgcaatgtgaaccacaagcctagcaacaccaaggtggacaagagagtggaacccaagagctgtatccccgaggacacattcttcccaagccccgagagcagctgcgacgtgaagctggtggaaaagagcttcgagacagacaccaacctgaacttccagaacctgagcgtgatcggcttcagaatcctgctgctgaaagtggccggctttaacctgctgatgaccctgcggctgtggtccagc

SEQ ID NO: 9751 - DNA, 2256 bp, Artificial Sequence
  Synthetic Polynucloetide
atggccttaccagtgaccgccttgctcctgccgctggccttgctgctccacgccgccaggccggaagtgcaggttttggagtctggcggaggactggttcagcctggcggatctctgagactgtcttgtgccgccagcggcttcaccttcagcaactttgccatgagctgggtccgacaggcccctggcaaaggacttgaatgggtgtccacaatcagcggcagcgccggcacaacagattacgccgattctgtgaagggcagattcaccatcagccgggacaacagcaagaaaaccctgtacctccagatgaacagcctgcgcgtggaagataccgccgtgtactactgtgccgatggcagaggccccttcttcgattatcgcggccagggcacactggtcaccgtttcttctggtaccggcggaggcggatctggcggcggaggtagcggtggcggaggatctgaattcgacatcgtgatgacccagagccacaagttcatgagcaccagcgtgggcgacagagtgtccatcatctgcaaggccagccaggatgtgggcacagccgtggattggtatcagcagaagcctggacagagccccaagctgctgatctactgggccagcacaagacacaccggcgtgcccgatagattcacaggctctggcagcggcaccgatttcaccctggccatcacaaacgtgcagagcgaggacctggccgactacttctgccagcagtacaacagctaccctctgacctttggagccggcaccaagctggaaatcaagagactcgaggacctgaagaacgtgttcccacctgaggtggccgtgttcgagcctagcgaggccgagatcagccacacccagaaagccaccctcgtgtgcctggctaccggcttctaccccgaccatgtggaactgtcttggtgggtcaacggcaaagaggtgcacagcggcgtgtgtaccgacccccagccactgaaagaacagcccgccctgaacgacagccggtactgcctgagcagcagactgagagtgtccgccaccttctggcagaacccccggaaccacttcagatgccaggtgcagttctacggcctgagcgagaacgacgagtggacccaggacagagccaagcccgtgacccagatcgtgtctgccgaagcctggggcagagccgattgcggctttaccagcgagagctaccagcagggcgtgctgagcgccaccatcctgtacgagatcctgctgggcaaggccaccctgtacgccgtgctggtgtctgccctggtgctgatggctatggtcaagcggaaggacagccggggaagggccaagcgatctggatctggagcaacaaacttctcactactcaaacaagcaggtgacgtggaggagaatcccgggcctactagtatggactggatttggcgcatccttttccttgtcggcgctgctaccggcgcgcattccttcgaagaagttcagctgcaacagtctggccccgagctggttaagcctggaacaagcgtgcggatctcctgcaagaccagcggctacaccttcaccgagtacaccatccactgggtcaagcagagccacggcaagagcctggaatggatcggcaacatcaaccccaacaacggcggcaccacctacaaccagaagttcgaggacaaggccacactgaccgtggacaagagcagcagcaccgcctacatggaactgagaagcctgaccagcgaggacagcgccgtgtactattgtgccgccggatggaacttcgactactggggccagggaacaaccctgaccgttagctctacgcgtatccagaaccctgatcctgccgtgtaccagctgcgggatagcaagagcagcgacaagagcgtgtgtctgttcaccgacttcgacagccagaccaacgtgtcccagagcaaggactccgacgtgtacatcaccgataagtgcgtgctggacatgcggagcatggacttcaagagcaactccgccgtggcctggtccaacaagtccgatttcgcctgcgccaacgccttcaacaacagcattatccccgaggacacattcttcccaagccccgagagcagctgcgacgtgaagctggtggaaaagagcttcgagacagacaccaacctgaacttccagaacctgagcgtgatcggcttcagaatcctgctgctgaaagtggccggctttaacctgctgatgaccctgcggctgtggtccagc

SEQ ID NO: 9752 - DNA, 2259 bp, Artificial Sequence
  Synthetic Polynucloetide
atggccttaccagtgaccgccttgctcctgccgctggccttgctgctccacgccgccaggccggacatcgtgatgacccagagccacaagttcatgagcaccagcgtgggcgacagagtgtccatcatctgcaaggccagccaggatgtgggcacagccgtggattggtatcagcagaagcctggacagagccccaagctgctgatctactgggccagcacaagacacaccggcgtgcccgatagattcacaggctctggcagcggcaccgatttcaccctggccatcacaaacgtgcagagcgaggacctggccgactacttctgccagcagtacaacagctaccctctgacctttggagccggcaccaagctggaaatcaagagactcgaggacctgaagaacgtgttcccacctgaggtggccgtgttcgagcctagcgaggccgagatcagccacacccagaaagccaccctcgtgtgcctggctaccggcttctaccccgaccatgtggaactgtcttggtgggtcaacggcaaagaggtgcacagcggcgtgtgtaccgacccccagccactgaaagaacagcccgccctgaacgacagccggtactgcctgagcagcagactgagagtgtccgccaccttctggcagaacccccggaaccacttcagatgccaggtgcagttctacggcctgagcgagaacgacgagtggacccaggacagagccaagcccgtgacccagatcgtgtctgccgaagcctggggcagagccgattgcggctttaccagcgagagctaccagcagggcgtgctgagcgccaccatcctgtacgagatcctgctgggcaaggccaccctgtacgccgtgctggtgtctgccctggtgctgatggctatggtcaagcggaaggacagccggggaagggccaagcgatctggatctggagcaacaaacttctcactactcaaacaagcaggtgacgtggaggagaatcccgggcctactagtatggactggatttggcgcatccttttccttgtcggcgctgctaccggcgcccattccgggcccgaagtgcagctggttgaatctggcggaggactggttcaggctggcggatctctgagactgtcttgtgccgccagcggcagaacctttagcatgggctggtttagacaggcccctggcaaagagagagagttcgtcgccgccatcacatactctggcggcagcccttactacgccgactctgtgaagggcagattcaccatcagccgggacaacgccaagaacaccgtgtacctccagatgaacagcctgaagcctgaggacaccgccgtgtactactgcgccgccaatccaacatacggcagcgactggaacgccgagaattggggccagggaacccaagtgacagtgtctagcggatccggcggcggaggatctggcggaggcggatctgggggcggaggctctttcgaagaagttcagctgcaacagtctggccccgagctggttaagcctggaacaagcgtgcggatctcctgcaagaccagcggctacaccttcaccgagtacaccatccactgggtcaagcagagccacggcaagagcctggaatggatcggcaacatcaaccccaacaacggcggcaccacctacaaccagaagttcgaggacaaggccacactgaccgtggacaagagcagcagcaccgcctacatggaactgagaagcctgaccagcgaggacagcgccgtgtactattgtgccgccggatggaacttcgactactggggccagggaacaaccctgaccgttagctctacgcgtatccagaaccctgatcctgccgtgtaccagctgcgggatagcaagagcagcgacaagagcgtgtgtctgttcaccgacttcgacagccagaccaacgtgtcccagagcaaggactccgacgtgtacatcaccgataagtgcgtgctggacatgcggagcatggacttcaagagcaactccgccgtggcctggtccaacaagtccgatttcgcctgcgccaacgccttcaacaacagcattatccccgaggacacattcttcccaagccccgagagcagctgcgacgtgaagctggtggaaaagagcttcgagacagacaccaacctgaacttccagaacctgagcgtgatcggcttcagaatcctgctgctgaaagtggccggctttaacctgctgatgaccctgcggctgtggtccagc

SEQ ID NO: 9753 - DNA, 2640 bp, Artificial Sequence
  Synthetic Polynucloetide
atggccttaccagtgaccgccttgctcctgccgctggccttgctgctccacgccgccaggccggacatcgtgatgacccagagccacaagttcatgagcaccagcgtgggcgacagagtgtccatcatctgcaaggccagccaggatgtgggcacagccgtggattggtatcagcagaagcctggacagagccccaagctgctgatctactgggccagcacaagacacaccggcgtgcccgatagattcacaggctctggcagcggcaccgatttcaccctggccatcacaaacgtgcagagcgaggacctggccgactacttctgccagcagtacaacagctaccctctgacctttggagccggcaccaagctggaaatcaagagactcgaggacctgaagaacgtgttcccacctgaggtggccgtgttcgagcctagcgaggccgagatcagccacacccagaaagccaccctcgtgtgcctggctaccggcttctaccccgaccatgtggaactgtcttggtgggtcaacggcaaagaggtgcacagcggcgtgtgtaccgacccccagccactgaaagaacagcccgccctgaacgacagccggtactgcctgagcagcagactgagagtgtccgccaccttctggcagaacccccggaaccacttcagatgccaggtgcagttctacggcctgagcgagaacgacgagtggacccaggacagagccaagcccgtgacccagatcgtgtctgccgaagcctggggcagagccgattgcggctttaccagcgagagctaccagcagggcgtgctgagcgccaccatcctgtacgagatcctgctgggcaaggccaccctgtacgccgtgctggtgtctgccctggtgctgatggctatggtcaagcggaaggacagccggggaagggccaagcgatctggatctggagcaacaaacttctcactactcaaacaagcaggtgacgtggaggagaatcccgggcctactagtatggactggatttggcgcatccttttccttgtcggcgctgctaccggcgcccattcccaactgcaactgcaagagtctggccctggcctggtcaagccttctgaaaccctgagcctgacctgtaccgtgtccggcggctctatcagcagcggcgattactactggggctggatcagacagcctccaggcaagggactcgaatggatcggcagcatcagctacagcggctccacctactacaacccaagcctgaagtccagagtgaccatcagcgtggacaccagcagaaaccagttctccctgaagctgagcagcgtgacagccgccgatacagccgtgtattattgcaccagagaggacagcagcaactggcggagtagaggacagggcacactggtcacagtgtcctcttctggaggcggtggaagcggtggaggaggatctgaagtgcagctggttgaatctggcggaggactggttcaggctggcggatctctgagactgtcttgtgccgccagcggcagaacctttagcatgggctggtttagacaggcccctggcaaagagagagagttcgtcgccgccatcacatactctggcggcagcccttactacgccgactctgtgaagggcagattcaccatcagccgggacaacgccaagaacaccgtgtacctccagatgaacagcctgaagcctgaggacaccgccgtgtactactgcgccgccaatccaacatacggcagcgactggaacgccgagaattggggccagggaacccaagtgacagtgtctagcggatccggcggcggaggatctggcggaggcggatctgggggcggaggctctttcgaagaagttcagctgcaacagtctggccccgagctggttaagcctggaacaagcgtgcggatctcctgcaagaccagcggctacaccttcaccgagtacaccatccactgggtcaagcagagccacggcaagagcctggaatggatcggcaacatcaaccccaacaacggcggcaccacctacaaccagaagttcgaggacaaggccacactgaccgtggacaagagcagcagcaccgcctacatggaactgagaagcctgaccagcgaggacagcgccgtgtactattgtgccgccggatggaacttcgactactggggccagggaacaaccctgaccgttagctctacgcgtatccagaaccctgatcctgccgtgtaccagctgcgggatagcaagagcagcgacaagagcgtgtgtctgttcaccgacttcgacagccagaccaacgtgtcccagagcaaggactccgacgtgtacatcaccgataagtgcgtgctggacatgcggagcatggacttcaagagcaactccgccgtggcctggtccaacaagtccgatttcgcctgcgccaacgccttcaacaacagcattatccccgaggacacattcttcccaagccccgagagcagctgcgacgtgaagctggtggaaaagagcttcgagacagacaccaacctgaacttccagaacctgagcgtgatcggcttcagaatcctgctgctgaaagtggccggctttaacctgctgatgaccctgcggctgtggtccagc

SEQ ID NO: 9754 - DNA, 2667 bp, Artificial Sequence
  Synthetic Polynucloetide
atggccttaccagtgaccgccttgctcctgccgctggccttgctgctccacgccgccaggccggaagtgcaggttttggagtctggcggaggactggttcagcctggcggatctctgagactgtcttgtgccgccagcggcttcaccttcagcaactttgccatgagctgggtccgacaggcccctggcaaaggacttgaatgggtgtccacaatcagcggcagcgccggcacaacagattacgccgattctgtgaagggcagattcaccatcagccgggacaacagcaagaaaaccctgtacctccagatgaacagcctgcgcgtggaagataccgccgtgtactactgtgccgatggcagaggccccttcttcgattatcgcggccagggcacactggtcaccgtttcttctggtaccggcggaggcggatctggcggcggaggtagcggtggcggaggatctgaattcgacatcgtgatgacccagagccacaagttcatgagcaccagcgtgggcgacagagtgtccatcatctgcaaggccagccaggatgtgggcacagccgtggattggtatcagcagaagcctggacagagccccaagctgctgatctactgggccagcacaagacacaccggcgtgcccgatagattcacaggctctggcagcggcaccgatttcaccctggccatcacaaacgtgcagagcgaggacctggccgactacttctgccagcagtacaacagctaccctctgacctttggagccggcaccaagctggaaatcaagagactcgaggacctgaagaacgtgttcccacctgaggtggccgtgttcgagcctagcgaggccgagatcagccacacccagaaagccaccctcgtgtgcctggctaccggcttctaccccgaccatgtggaactgtcttggtgggtcaacggcaaagaggtgcacagcggcgtgtgtaccgacccccagccactgaaagaacagcccgccctgaacgacagccggtactgcctgagcagcagactgagagtgtccgccaccttctggcagaacccccggaaccacttcagatgccaggtgcagttctacggcctgagcgagaacgacgagtggacccaggacagagccaagcccgtgacccagatcgtgtctgccgaagcctggggcagagccgattgcggctttaccagcgagagctaccagcagggcgtgctgagcgccaccatcctgtacgagatcctgctgggcaaggccaccctgtacgccgtgctggtgtctgccctggtgctgatggctatggtcaagcggaaggacagccggggaagggccaagcgatctggatctggagcaacaaacttctcactactcaaacaagcaggtgacgtggaggagaatcccgggcctactagtatggactggatttggcgcatccttttccttgtcggcgctgctaccggcgcccattccgggcccgaagtgcagctggttgaatctggcggaggactggttcaggctggcggatctctgagactgtcttgtgccgccagcggcagaacctttagcatgggctggtttagacaggcccctggcaaagagagagagttcgtcgccgccatcacatacagcggcggcagcccttactacgcctcttctgtcagaggccggttcaccatcagccgggacaacgccaagaacaccgtgtacctccagatgaacagcctgaagccagaggacaccgccgtgtactactgtgccgccaatccaacctacggcagcgactggaatgccgagaattggggccagggcacccaagtgacagtgtctagtggatccggcggcggaggatctggcggaggcggatctgggggcggaggctctttcgaagaagttcagctgcaacagtctggccccgagctggttaagcctggaacaagcgtgcggatctcctgcaagaccagcggctacaccttcaccgagtacaccatccactgggtcaagcagagccacggcaagagcctggaatggatcggcaacatcaaccccaacaacggcggcaccacctacaaccagaagttcgaggacaaggccacactgaccgtggacaagagcagcagcaccgcctacatggaactgagaagcctgaccagcgaggacagcgccgtgtactattgtgccgccggatggaacttcgactactggggccagggaacaaccctgaccgttagctctacgcgtatccagaaccctgatcctgccgtgtaccagctgcgggatagcaagagcagcgacaagagcgtgtgtctgttcaccgacttcgacagccagaccaacgtgtcccagagcaaggactccgacgtgtacatcaccgataagtgcgtgctggacatgcggagcatggacttcaagagcaactccgccgtggcctggtccaacaagtccgatttcgcctgcgccaacgccttcaacaacagcattatccccgaggacacattcttcccaagccccgagagcagctgcgacgtgaagctggtggaaaagagcttcgagacagacaccaacctgaacttccagaacctgagcgtgatcggcttcagaatcctgctgctgaaagtggccggctttaacctgctgatgaccctgcggctgtggtccagc

SEQ ID NO: 9755 - DNA, 2163 bp, Artificial Sequence
  Synthetic Polynucloetide
atggccttaccagtgaccgccttgctcctgccgctggccttgctgctccacgccgccaggccggacatccagatgacacagagccctagcagcctgtctgccagcgtgggagacagagtgaccatcacatgcaaggccagccaggatgtgggcacagccgtggattggtatcagcagaagcctggcaaggcccctaagctgctgatctactgggccagcacaagacacacaggcgtgcccagcagattttctggcagcggctctggcaccgacttcaccctgacaatatccagcctccagcctgaggacttcgccacctactactgccagcagtacaacagctaccctctgaccttcggccagggcaccaaggtggaaatcaaaagaggcggaggcggaagtggaggcggaggatctggcggcggaggctctgaagtgcagctggttgaatcaggtggcggcctggttcaacctggcggatctctgagactgagctgtgccgccagcggctacacctttaccgagtacacaatccactgggtccgacaggcccctggcaaaggacttgagtgggtcgccaacatcaaccccaacaatggcggcaccacctacaaccagaagttcgaggacagattcaccatcagccgggacaacagcaagaacaccctgtacctccagatgaactccctgagagccgaggacaccgccgtgtactattgtgccagaggctggaacttcgactactggggccagggaacactggtcaccgttagctctacgcgtgagcagaaactgatctcggaagaggatctggcgaagcccaccacgacgccagcgccgcgaccaccaacaccggcgcccaccatcgcgtcgcagcccctgtccctgcgcccagaggcgtgccggccagcggcggggggcgcagtgcacacgagggggctggacttcgcctgtgacatctacatctgggcgcccttggccgggacttgtggggtccttctcctgtcactggttatcaccctttactgcaaacggggcagaaagaaactcctgtatatattcaaacaaccatttatgagaccagtacaaactactcaagaggaagatggctgtagctgccgatttccagaagaagaagaaggaggatgtgaactgagagtgaagttcagcaggagcgcagacgcccccgcgtaccagcagggccagaaccagctctataacgagctgaatctaggacgaagagaggagtacgatgttttggacaagagacgtggccgggaccctgagatggggggaaagccgagaaggaagaaccctcaggaaggcctgtacaatgaactgcagaaagataagatggcggaggcctacagtgagattgggatgaaaggcgagcgccggaggggcaaggggcacgatggcctttaccagggtctcagtacagccaccaaggacacctacgacgcccttcacatgcaggccctgccccctcgctctagtggctccggcgagggcagaggaagtctactaacctgcggagatgtggaagaaaatcctggcccacatatgaccgagtacaagcccacggtgcgcctcgccacccgcgacgacgtccccagggccgtacgcaccctcgccgccgcgttcgccgactaccccgccacgcgccacaccgtcgatccggaccgccacatcgagcgggtcaccgagctgcaagaactcttcctcacgcgcgtcgggctcgacatcggcaaggtgtgggtcgcggacgacggcgccgcggtggcggtctggaccacgccggagagcgtcgaagcgggggcggtgttcgccgagatcggcccgcgcatggccgagttgagcggttcccggctggccgcgcagcaacagatggaaggcctcctggcgccgcaccggcccaaggagcccgcgtggttcctggccaccgtcggcgtctcgcccgaccaccagggcaagggtctgggcagcgccgtcgtgctccccggagtggaggcggccgagcgcgccggggtgcccgccttcctggagacctccgcgccccgcaacctccccttctacgagcggctcggcttcaccgtcaccgccgacgtcgaggtgcccgaaggaccgcgcacctggtgcatgacccgcaagcccggtgcctga

SEQ ID NO: 9756 - DNA, 2145 bp, Artificial Sequence
  Synthetic Polynucloetide
atggccttaccagtgaccgccttgctcctgccgctggccttgctgctccacgccgccaggccggacatccagatgacacagagccctagcagcctgtctgccagcgtgggagacagagtgaccatcacatgcaaggccagccaggatgtgggcacagccgtggattggtatcagcagaagcctggcaaggcccctaagctgctgatctactgggccagcacaagacacacaggcgtgcccagcagattttctggcagcggctctggcaccgacttcaccctgacaatatccagcctccagcctgaggacttcgccacctactactgccagcagtacaacagctaccctctgaccttcggccagggcaccaaggtggaaatcaaaagaggcggaggcggaagtggaggcggaggatctggcggcggaggctctgaagtgcagctggttgaatcaggtggcggcctggttcaacctggcggatctctgagactgagctgtgccgccagcggctacacctttaccgagtacacaatccactgggtccgacaggcccctggcaaaggacttgagtgggtcgccaacatcaaccccaacaatggcggcaccacctacaaccagaagttcgaggacagattcaccatcagccgggacaacagcaagaacaccctgtacctccagatgaactccctgagagccgaggacaccgccgtgtactattgtgccagaggctggaacttcgactactggggccagggaacactggtcaccgttagctctacgcgtgagcagaaactgatctcggaagaggatctgaaaattgaagttatgtatcctcctccttacctagacaatgagaagagcaatggaaccattatccatgtgaaagggaaacacctttgtccaagtcccctatttcccggaccttctaagcccttttgggtgctggtggtggttgggggagtcctggcttgctatagcttgctagtaacagtggcctttattattttctgggtgaggagtaagaggagcaggctcctgcacagtgactacatgaacatgactccacgccgccccggacccacccgcaagcattaccagccctatgccccaccacgcgacttcgcagcctatcgctccagagtgaagttcagcaggagcgcagacgcccccgcgtaccagcagggccagaaccagctctataacgagctcaatctaggacgaagagaggagtacgatgttttggacaagagacgtggccgggaccctgagatggggggaaagccgagaaggaagaaccctcaggaaggcctgtacaatgaactgcagaaagataagatggcggaggcctacagtgagattgggatgaaaggcgagcgccggaggggcaaggggcacgatggcctttaccagggtctcagtacagccaccaaggacacctacgacgcccttcacatgcaggccctgccccctcgctctagtggctccggcgagggcagaggaagtctactaacctgcggagatgtggaagaaaatcctggcccacatatgaccgagtacaagcccacggtgcgcctcgccacccgcgacgacgtccccagggccgtacgcaccctcgccgccgcgttcgccgactaccccgccacgcgccacaccgtcgatccggaccgccacatcgagcgggtcaccgagctgcaagaactcttcctcacgcgcgtcgggctcgacatcggcaaggtgtgggtcgcggacgacggcgccgcggtggcggtctggaccacgccggagagcgtcgaagcgggggcggtgttcgccgagatcggcccgcgcatggccgagttgagcggttcccggctggccgcgcagcaacagatggaaggcctcctggcgccgcaccggcccaaggagcccgcgtggttcctggccaccgtcggcgtctcgcccgaccaccagggcaagggtctgggcagcgccgtcgtgctccccggagtggaggcggccgagcgcgccggggtgcccgccttcctggagacctccgcgccccgcaacctccccttctacgagcggctcggcttcaccgtcaccgccgacgtcgaggtgcccgaaggaccgcgcacctggtgcatgacccgcaagcccggtgcctga

SEQ ID NO: 9757 - DNA, 1473 bp, Artificial Sequence
  Synthetic Polynucloetide
atggccttaccagtgaccgccttgctcctgccgctggccttgctgctccacgccgccaggccggacatccagatgacacagagccctagcagcctgtctgccagcgtgggagacagagtgaccatcacatgcaaggccagccaggatgtgggcacagccgtggattggtatcagcagaagcctggcaaggcccctaagctgctgatctactgggccagcacaagacacacaggcgtgcccagcagattttctggcagcggctctggcaccgacttcaccctgacaatatccagcctccagcctgaggacttcgccacctactactgccagcagtacaacagctaccctctgaccttcggccagggcaccaaggtggaaatcaaaagaggcggaggcggaagtggaggcggaggatctggcggcggaggctctgaagtgcagctggttgaatcaggtggcggcctggttcaacctggcggatctctgagactgagctgtgccgccagcggctacacctttaccgagtacacaatccactgggtccgacaggcccctggcaaaggacttgagtgggtcgccaacatcaaccccaacaatggcggcaccacctacaaccagaagttcgaggacagattcaccatcagccgggacaacagcaagaacaccctgtacctccagatgaactccctgagagccgaggacaccgccgtgtactattgtgccagaggctggaacttcgactactggggccagggaacactggtcaccgttagctctacgcgtgagcagaaactgatctcggaagaggatctgaaaattgaagttatgtatcctcctccttacctagacaatgagaagagcaatggaaccattatccatgtgaaagggaaacacctttgtccaagtcccctatttcccggaccttctaagcccttttgggtgctggtggtggttgggggagtcctggcttgctatagcttgctagtaacagtggcctttattattttctgggtgaggagtaagaggagcaggctcctgcacagtgactacatgaacatgactccacgccgccccggacccacccgcaagcattaccagccctatgccccaccacgcgacttcgcagcctatcgctccagagtgaagttcagcaggagcgcagacgcccccgcgtaccagcagggccagaaccagctctataacgagctcaatctaggacgaagagaggagtacgatgttttggacaagagacgtggccgggaccctgagatggggggaaagccgagaaggaagaaccctcaggaaggcctgtacaatgaactgcagaaagataagatggcggaggcctacagtgagattgggatgaaaggcgagcgccggaggggcaaggggcacgatggcctttaccagggtctcagtacagccaccaaggacacctacgacgcccttcacatgcaggccctgccccctcgc

SEQ ID NO: 9758 - DNA, 1494 bp, Artificial Sequence
  Synthetic Polynucloetide
atggccttaccagtgaccgccttgctcctgccgctggccttgctgctccacgccgccaggccggacatccagatgacacagagccctagcagcctgtctgccagcgtgggagacagagtgaccatcacatgcaaggccagccaggatgtgggcacagccgtggattggtatcagcagaagcctggcaaggcccctaagctgctgatctactgggccagcacaagacacacaggcgtgcccagcagattttctggcagcggctctggcaccgacttcaccctgacaatatccagcctccagcctgaggacttcgccacctactactgccagcagtacaacagctaccctctgaccttcggccagggcaccaaggtggaaatcaaaagaggcggaggcggaagtggaggcggaggatctggcggcggaggctctgaagtgcagctggttgaatcaggtggcggcctggttcaacctggcggatctctgagactgagctgtgccgccagcggctacacctttaccgagtacacaatccactgggtccgacaggcccctggcaaaggacttgagtgggtcgccaacatcaaccccaacaatggcggcaccacctacaaccagaagttcgaggacagattcaccatcagccgggacaacagcaagaacaccctgtacctccagatgaactccctgagagccgaggacaccgccgtgtactattgtgccagaggctggaacttcgactactggggccagggaacactggtcaccgttagctctacgcgtgagcagaaactgatctcggaagaggatctggcgaagcccaccacgacgccagcgccgcgaccaccaacaccggcgcccaccatcgcgtcgcagcccctgtccctgcgcccagaggcgtgccggccagcggcggggggcgcagtgcacacgagggggctggacttcgcctgtgacatctacatctgggcgcccttggccgggacttgtggggtccttctcctgtcactggttatcaccctttactgcaaacggggcagaaagaaactcctgtatatattcaaacaaccatttatgagaccagtacaaactactcaagaggaagatggctgtagctgccgatttccagaagaagaagaaggaggatgtgaactgagagtgaagttcagcaggagcgcagacgcccccgcgtaccagcagggccagaaccagctctataacgagctgaatctaggacgaagagaggagtacgatgttttggacaagagacgtggccgggaccctgagatggggggaaagccgagaaggaagaaccctcaggaaggcctgtacaatgaactgcagaaagataagatggcggaggcctacagtgagattgggatgaaaggcgagcgccggaggggcaaggggcacgatggcctttaccagggtctcagtacagccaccaaggacacctacgacgcccttcacatgcaggccctgccccctcgctga

SEQ ID NO: 9759 - DNA, 1494 bp, Artificial Sequence
  Synthetic Polynucloetide
atggccttaccagtgaccgccttgctcctgccgctggccttgctgctccacgccgccaggccggaagtgcagctggttgaatcaggtggcggcctggttcaacctggcggatctctgagactgagctgtgccgccagcggctacacctttaccgagtacacaatccactgggtccgacaggcccctggcaaaggacttgagtgggtcgccaacatcaaccccaacaatggcggcaccacctacaaccagaagttcgaggacagattcaccatcagccgggacaacagcaagaacaccctgtacctccagatgaactccctgagagccgaggacaccgccgtgtactattgtgccagaggctggaacttcgactactggggccagggaacactggtcaccgttagctctggcggaggcggaagtggaggcggaggatctggcggcggaggctctgacatccagatgacacagagccctagcagcctgtctgccagcgtgggagacagagtgaccatcacatgcaaggccagccaggatgtgggcacagccgtggattggtatcagcagaagcctggcaaggcccctaagctgctgatctactgggccagcacaagacacacaggcgtgcccagcagattttctggcagcggctctggcaccgacttcaccctgacaatatccagcctccagcctgaggacttcgccacctactactgccagcagtacaacagctaccctctgaccttcggccagggcaccaaggtggaaatcaaaagaacgcgtgagcagaaactgatctcggaagaggatctggcgaagcccaccacgacgccagcgccgcgaccaccaacaccggcgcccaccatcgcgtcgcagcccctgtccctgcgcccagaggcgtgccggccagcggcggggggcgcagtgcacacgagggggctggacttcgcctgtgacatctacatctgggcgcccttggccgggacttgtggggtccttctcctgtcactggttatcaccctttactgcaaacggggcagaaagaaactcctgtatatattcaaacaaccatttatgagaccagtacaaactactcaagaggaagatggctgtagctgccgatttccagaagaagaagaaggaggatgtgaactgagagtgaagttcagcaggagcgcagacgcccccgcgtaccagcagggccagaaccagctctataacgagctgaatctaggacgaagagaggagtacgatgttttggacaagagacgtggccgggaccctgagatggggggaaagccgagaaggaagaaccctcaggaaggcctgtacaatgaactgcagaaagataagatggcggaggcctacagtgagattgggatgaaaggcgagcgccggaggggcaaggggcacgatggcctttaccagggtctcagtacagccaccaaggacacctacgacgcccttcacatgcaggccctgccccctcgctga

SEQ ID NO: 9760 - DNA, 2733 bp, Artificial Sequence
  Synthetic Polynucloetide
atggccttaccagtgaccgccttgctcctgccgctggccttgctgctccacgccgccaggccggacatccagatgacacagagccctagcagcctgtctgccagcgtgggagacagagtgaccatcacatgcaaggccagccaggatgtgggcacagccgtggattggtatcagcagaagcctggcaaggcccctaagctgctgatctactgggccagcacaagacacacaggcgtgcccagcagattttctggcagcggctctggcaccgacttcaccctgacaatatccagcctccagcctgaggacttcgccacctactactgccagcagtacaacagctaccctctgaccttcggccagggcaccaaggtggaaatcaaaagaggcggaggcggaagtggaggcggaggatctggcggcggaggctctgaagtgcagctggttgaatcaggtggcggcctggttcaacctggcggatctctgagactgagctgtgccgccagcggctacacctttaccgagtacacaatccactgggtccgacaggcccctggcaaaggacttgagtgggtcgccaacatcaaccccaacaatggcggcaccacctacaaccagaagttcgaggacagattcaccatcagccgggacaacagcaagaacaccctgtacctccagatgaactccctgagagccgaggacaccgccgtgtactattgtgccagaggctggaacttcgactactggggccagggaacactggtcaccgttagctctacgcgtgagcagaaactgatctcggaagaggatctggcgaagcccaccacgacgccagcgccgcgaccaccaacaccggcgcccaccatcgcgtcgcagcccctgtccctgcgcccagaggcgtgccggccagcggcggggggcgcagtgcacacgagggggctggacttcgcctgtgacatctacatctgggcgcccttggccgggacttgtggggtccttctcctgtcactggttatcaccctttactgcgggcgcgccagagtgaagttcagcaggagcgcagacgcccccgcgtaccagcagggccagaaccagctctataacgagctgaatctaggacgaagagaggagtacgatgttttggacaagagacgtggccgggaccctgagatggggggaaagccgagaaggaagaaccctcaggaaggcctgtacaatgaactgcagaaagataagatggcggaggcctacagtgagattgggatgaaaggcgagcgccggaggggcaaggggcacgatggcctttaccagggtctcagtacagccaccaaggacacctacgacgcccttcacatgcaggccctgccccctcgctctagaggatctggagcaacaaacttctcactactcaaacaagcaggtgacgtggaggagaatcccgggcctgggatccacatggccacttacgaggttctctgtgaggtggcgcggaaactgggcacggatgacagggaagtggtattgttcctcctaaacgtgttcatacctcaacccacactggcccaattaattggagctcttagagctttaaaggaggagggcaggttaacgtttcccctgttagcggaatgtctgtttcgtgcaggtcgcagagacctcttgcgcgacctgcttcacttagacccgcgttttttagagcgccacctagcgggcacaatgagttatttcagcccttatcagctcactgttctccacgtagacggggagctgtgtgcgagggatattaggtctttgatatttttaagcaaggacactatagggtctcgcagcacaccacagacattcttacactgggtgtactgtatggaaaacttagacctactgggtcccactgacgtggatgccctaatgtcaatgcttagatctttgtcaagagtagacctacagcgccaagtgcaaaccctaatgggccttcacctttccggcccatcacactcccaacactatcgccatacaccactcgagaccgatttctacgactacaaggacgacgatgacaagactagtggctccggcgagggcagaggaagtctactaacctgcggagatgtggaagaaaatcctggcccacatatgaccgagtacaagcccacggtgcgcctcgccacccgcgacgacgtccccagggccgtacgcaccctcgccgccgcgttcgccgactaccccgccacgcgccacaccgtcgatccggaccgccacatcgagcgggtcaccgagctgcaagaactcttcctcacgcgcgtcgggctcgacatcggcaaggtgtgggtcgcggacgacggcgccgcggtggcggtctggaccacgccggagagcgtcgaagcgggggcggtgttcgccgagatcggcccgcgcatggccgagttgagcggttcccggctggccgcgcagcaacagatggaaggcctcctggcgccgcaccggcccaaggagcccgcgtggttcctggccaccgtcggcgtctcgcccgaccaccagggcaagggtctgggcagcgccgtcgtgctccccggagtggaggcggccgagcgcgccggggtgcccgccttcctggagacctccgcgccccgcaacctccccttctacgagcggctcggcttcaccgtcaccgccgacgtcgaggtgcccgaaggaccgcgcacctggtgcatgacccgcaagcccggtgcctga

SEQ ID NO: 9761 - DNA, 2553 bp, Artificial Sequence
  Synthetic Polynucloetide
atggccttaccagtgaccgccttgctcctgccgctggccttgctgctccacgccgccaggccggacatccagatgacacagagccctagcagcctgtctgccagcgtgggagacagagtgaccatcacatgcaaggccagccaggatgtgggcacagccgtggattggtatcagcagaagcctggcaaggcccctaagctgctgatctactgggccagcacaagacacacaggcgtgcccagcagattttctggcagcggctctggcaccgacttcaccctgacaatatccagcctccagcctgaggacttcgccacctactactgccagcagtacaacagctaccctctgaccttcggccagggcaccaaggtggaaatcaaaagactcgagatccagaaccctgatcctgccgtgtaccagctgcgggatagcaagagcagcgacaagagcgtgtgtctgttcaccgacttcgacagccagaccaacgtgtcccagagcaaggactccgacgtgtacatcaccgataagtgcgtgctggacatgcggagcatggacttcaagagcaactccgccgtggcctggtccaacaagtccgatttcgcctgcgccaacgccttcaacaacagcattatccccgaggacacattcttcccaagcagcgacgtgccctgcgacgtgaagctggtggaaaagagcttcgagacagacaccaacctgaacttccagaacctgagcgtgatcggcttcagaatcctgctgctgaaagtggccggctttaacctgctgatgaccctgcggctgtggtccagccgcgccaagagaagcggatctggcgtgaagcagaccctgaatttcgacctgctgaagctggctggcgacgtggaatccaacccaggccctactagtatggactggatttggcgcatccttttccttgtcggcgctgctaccggcgcgcattccttcgaagaagtgcagctggttgaatcaggtggcggcctggttcaacctggcggatctctgagactgagctgtgccgccagcggctacacctttaccgagtacacaatccactgggtccgacaggcccctggcaaaggacttgagtgggtcgccaacatcaaccccaacaatggcggcaccacctacaaccagaagttcgaggacagattcaccatcagccgggacaacagcaagaacaccctgtacctccagatgaactccctgagagccgaggacaccgccgtgtactattgtgccagaggctggaacttcgactactggggccagggaacactggtcaccgttagctctacgcgtgaggacctgaagaacgtgttcccacctgaggtggccgtgttcgagcctagcaaggccgagatcgcccacacccagaaagccaccctcgtgtgcctggctaccggcttctaccccgaccatgtggaactgtcttggtgggtcaacggcaaagaggtgcacagcggcgtgtgtaccgacccccagccactgaaagaacagcccgccctgaacgacagccggtactgcctgagcagcagactgagagtgtccgccaccttctggcagaacccccggaaccacttcagatgccaggtgcagttctacggcctgagcgagaacgacgagtggacccaggacagagccaagcccgtgacccagatcgtgtctgccgaagcctggggcagagccgattgcggcatcaccagcgccagctaccaccagggcgtgctgagcgccaccatcctgtacgagatcctgctgggcaaggccaccctgtacgccgtgctggtgtctgccctggtgctgatggctatggtcaagcggaaggacagccggggaagggccaagcgatctggatctggagcaacaaacttctcactactcaaacaagcaggtgacgtggaggagaatcccgggccttctagaggccatatgaccgagtacaagcccacggtgcgcctcgccacccgcgacgacgtccccagggccgtacgcaccctcgccgccgcgttcgccgactaccccgccacgcgccacaccgtcgatccggaccgccacatcgagcgggtcaccgagctgcaagaactcttcctcacgcgcgtcgggctcgacatcggcaaggtgtgggtcgcggacgacggcgccgcggtggcggtctggaccacgccggagagcgtcgaagcgggggcggtgttcgccgagatcggcccgcgcatggccgagttgagcggttcccggctggccgcgcagcaacagatggaaggcctcctggcgccgcaccggcccaaggagcccgcgtggttcctggccaccgtcggcgtctcgcccgaccaccagggcaagggtctgggcagcgccgtcgtgctccccggagtggaggcggccgagcgcgccggggtgcccgccttcctggagacctccgcgccccgcaacctccccttctacgagcggctcggcttcaccgtcaccgccgacgtcgaggtgcccgaaggaccgcgcacctggtgcatgacccgcaagcccggtgcctga

SEQ ID NO: 9762 - DNA, 2550 bp, Artificial Sequence
  Synthetic Polynucloetide
atggccttaccagtgaccgccttgctcctgccgctggccttgctgctccacgccgccaggccggacatccagatgacacagagccctagcagcctgtctgccagcgtgggagacagagtgaccatcacatgcaaggccagccaggatgtgggcacagccgtggattggtatcagcagaagcctggcaaggcccctaagctgctgatctactgggccagcacaagacacacaggcgtgcccagcagattttctggcagcggctctggcaccgacttcaccctgacaatatccagcctccagcctgaggacttcgccacctactactgccagcagtacaacagctaccctctgaccttcggccagggcaccaaggtggaaatcaaaagactcgaggacctgaagaacgtgttcccacctgaggtggccgtgttcgagcctagcaaggccgagatcgcccacacccagaaagccaccctcgtgtgcctggctaccggcttctaccccgaccatgtggaactgtcttggtgggtcaacggcaaagaggtgcacagcggcgtgtgtaccgacccccagccactgaaagaacagcccgccctgaacgacagccggtactgcctgagcagcagactgagagtgtccgccaccttctggcagaacccccggaaccacttcagatgccaggtgcagttctacggcctgagcgagaacgacgagtggacccaggacagagccaagcccgtgacccagatcgtgtctgccgaagcctggggcagagccgattgcggcatcaccagcgccagctaccaccagggcgtgctgagcgccaccatcctgtacgagatcctgctgggcaaggccaccctgtacgccgtgctggtgtctgccctggtgctgatggctatggtcaagcggaaggacagccggggaagggccaagcgatctggatctggagcaacaaacttctcactactcaaacaagcaggtgacgtggaggagaatcccgggcctactagtatggactggatttggcgcatccttttccttgtcggcgctgctaccggcgcgcattccttcgaagaagtgcagctggttgaatcaggtggcggcctggttcaacctggcggatctctgagactgagctgtgccgccagcggctacacctttaccgagtacacaatccactgggtccgacaggcccctggcaaaggacttgagtgggtcgccaacatcaaccccaacaatggcggcaccacctacaaccagaagttcgaggacagattcaccatcagccgggacaacagcaagaacaccctgtacctccagatgaactccctgagagccgaggacaccgccgtgtactattgtgccagaggctggaacttcgactactggggccagggaacactggtcaccgttagctctacgcgtatccagaaccctgatcctgccgtgtaccagctgcgggatagcaagagcagcgacaagagcgtgtgtctgttcaccgacttcgacagccagaccaacgtgtcccagagcaaggactccgacgtgtacatcaccgataagtgcgtgctggacatgcggagcatggacttcaagagcaactccgccgtggcctggtccaacaagtccgatttcgcctgcgccaacgccttcaacaacagcattatccccgaggacacattcttcccaagcagcgacgtgccctgcgacgtgaagctggtggaaaagagcttcgagacagacaccaacctgaacttccagaacctgagcgtgatcggcttcagaatcctgctgctgaaagtggccggctttaacctgctgatgaccctgcggctgtggtccagccgcgccaagagaagcggatctggcgtgaagcagaccctgaatttcgacctgctgaagctggctggcgacgtggaatccaacccaggcccttctagaggccatatgaccgagtacaagcccacggtgcgcctcgccacccgcgacgacgtccccagggccgtacgcaccctcgccgccgcgttcgccgactaccccgccacgcgccacaccgtcgatccggaccgccacatcgagcgggtcaccgagctgcaagaactcttcctcacgcgcgtcgggctcgacatcggcaaggtgtgggtcgcggacgacggcgccgcggtggcggtctggaccacgccggagagcgtcgaagcgggggcggtgttcgccgagatcggcccgcgcatggccgagttgagcggttcccggctggccgcgcagcaacagatggaaggcctcctggcgccgcaccggcccaaggagcccgcgtggttcctggccaccgtcggcgtctcgcccgaccaccagggcaagggtctgggcagcgccgtcgtgctccccggagtggaggcggccgagcgcgccggggtgcccgccttcctggagacctccgcgccccgcaacctccccttctacgagcggctcggcttcaccgtcaccgccgacgtcgaggtgcccgaaggaccgcgcacctggtgcatgacccgcaagcccggtgcctga

SEQ ID NO: 9763 - DNA, 1848 bp, Artificial Sequence
  Synthetic Polynucloetide
atggccttaccagtgaccgccttgctcctgccgctggccttgctgctccacgccgccaggccggacatccagatgacacagagccctagcagcctgtctgccagcgtgggagacagagtgaccatcacatgcaaggccagccaggatgtgggcacagccgtggattggtatcagcagaagcctggcaaggcccctaagctgctgatctactgggccagcacaagacacacaggcgtgcccagcagattttctggcagcggctctggcaccgacttcaccctgacaatatccagcctccagcctgaggacttcgccacctactactgccagcagtacaacagctaccctctgaccttcggccagggcaccaaggtggaaatcaaaagactcgaggacctgaagaacgtgttcccacctgaggtggccgtgttcgagcctagcgaggccgagatcagccacacccagaaagccaccctcgtgtgcctggctaccggcttctaccccgaccatgtggaactgtcttggtgggtcaacggcaaagaggtgcacagcggcgtgtgtaccgacccccagccactgaaagaacagcccgccctgaacgacagccggtactgcctgagcagcagactgagagtgtccgccaccttctggcagaacccccggaaccacttcagatgccaggtgcagttctacggcctgagcgagaacgacgagtggacccaggacagagccaagcccgtgacccagatcgtgtctgccgaagcctggggcagagccgattgcggctttaccagcgagagctaccagcagggcgtgctgagcgccaccatcctgtacgagatcctgctgggcaaggccaccctgtacgccgtgctggtgtctgccctggtgctgatggctatggtcaagcggaaggacagccggggaagggccaagcgatctggatctggagcaacaaacttctcactactcaaacaagcaggtgacgtggaggagaatcccgggcctactagtatggactggatttggcgcatccttttccttgtcggcgctgctaccggcgcgcattccttcgaagaagtgcagctggttgaatcaggtggcggcctggttcaacctggcggatctctgagactgagctgtgccgccagcggctacacctttaccgagtacacaatccactgggtccgacaggcccctggcaaaggacttgagtgggtcgccaacatcaaccccaacaatggcggcaccacctacaaccagaagttcgaggacagattcaccatcagccgggacaacagcaagaacaccctgtacctccagatgaactccctgagagccgaggacaccgccgtgtactattgtgccagaggctggaacttcgactactggggccagggaacactggtcaccgttagctctacgcgtatccagaaccctgatcctgccgtgtaccagctgcgggatagcaagagcagcgacaagagcgtgtgtctgttcaccgacttcgacagccagaccaacgtgtcccagagcaaggactccgacgtgtacatcaccgataagtgcgtgctggacatgcggagcatggacttcaagagcaactccgccgtggcctggtccaacaagtccgatttcgcctgcgccaacgccttcaacaacagcattatccccgaggacacattcttcccaagccccgagagcagctgcgacgtgaagctggtggaaaagagcttcgagacagacaccaacctgaacttccagaacctgagcgtgatcggcttcagaatcctgctgctgaaagtggccggctttaacctgctgatgaccctgcggctgtggtccagc

SEQ ID NO: 9764 - DNA, 2523 bp, Artificial Sequence
  Synthetic Polynucloetide
atggccttaccagtgaccgccttgctcctgccgctggccttgctgctccacgccgccaggccggacatccagatgacacagagccctagcagcctgtctgccagcgtgggagacagagtgaccatcacatgcaaggccagccaggatgtgggcacagccgtggattggtatcagcagaagcctggcaaggcccctaagctgctgatctactgggccagcacaagacacacaggcgtgcccagcagattttctggcagcggctctggcaccgacttcaccctgacaatatccagcctccagcctgaggacttcgccacctactactgccagcagtacaacagctaccctctgaccttcggccagggcaccaaggtggaaatcaaaagactcgaggacctgaagaacgtgttcccacctgaggtggccgtgttcgagcctagcgaggccgagatcagccacacccagaaagccaccctcgtgtgcctggctaccggcttctaccccgaccatgtggaactgtcttggtgggtcaacggcaaagaggtgcacagcggcgtgtgtaccgacccccagccactgaaagaacagcccgccctgaacgacagccggtactgcctgagcagcagactgagagtgtccgccaccttctggcagaacccccggaaccacttcagatgccaggtgcagttctacggcctgagcgagaacgacgagtggacccaggacagagccaagcccgtgacccagatcgtgtctgccgaagcctggggcagagccgattgcggctttaccagcgagagctaccagcagggcgtgctgagcgccaccatcctgtacgagatcctgctgggcaaggccaccctgtacgccgtgctggtgtctgccctggtgctgatggctatggtcaagcggaaggacagccggggaagggccaagcgatctggatctggagcaacaaacttctcactactcaaacaagcaggtgacgtggaggagaatcccgggcctactagtatggactggatttggcgcatccttttccttgtcggcgctgctaccggcgcgcattccttcgaagaagtgcagctggttgaatcaggtggcggcctggttcaacctggcggatctctgagactgagctgtgccgccagcggctacacctttaccgagtacacaatccactgggtccgacaggcccctggcaaaggacttgagtgggtcgccaacatcaaccccaacaatggcggcaccacctacaaccagaagttcgaggacagattcaccatcagccgggacaacagcaagaacaccctgtacctccagatgaactccctgagagccgaggacaccgccgtgtactattgtgccagaggctggaacttcgactactggggccagggaacactggtcaccgttagctctacgcgtatccagaaccctgatcctgccgtgtaccagctgcgggatagcaagagcagcgacaagagcgtgtgtctgttcaccgacttcgacagccagaccaacgtgtcccagagcaaggactccgacgtgtacatcaccgataagtgcgtgctggacatgcggagcatggacttcaagagcaactccgccgtggcctggtccaacaagtccgatttcgcctgcgccaacgccttcaacaacagcattatccccgaggacacattcttcccaagccccgagagcagctgcgacgtgaagctggtggaaaagagcttcgagacagacaccaacctgaacttccagaacctgagcgtgatcggcttcagaatcctgctgctgaaagtggccggctttaacctgctgatgaccctgcggctgtggtccagccgcgccaagagaagcggatctggcgtgaagcagaccctgaatttcgacctgctgaagctggctggcgacgtggaatccaacccaggcccttctagaggcgggatccacaccatggctacctacgaggtgctgtgcgaggtggcaagaaagctgggcaccgacgacagagaagtggtgctgttcctgctgaacgtgttcatccctcagcctacactggcccagctgatcggtgcactgagagccctgaaagaggaaggccggctgacctttcctctgctggccgaatgcctgttcagagccggaagaagggatctgctgcgggacctgctgcatctggaccccagatttctggaaagacacctggccggcaccatgagctacttcagcccttaccagctgaccgtgctgcacgttgacggcgaactgtgcgccagagatattcggagcctgatcttcctgagcaaggacaccatcggcagccggtctacccctcagacatttctgcactgggtgtactgcatggaaaacctggacctgctcggccccacagatgtggatgccctgatgtccatgctgagaagcctgagcagagtggacctccagagacaggtgcagacactgatgggactgcacctgagcggacctagccacagccagcactacagacacacccct

SEQ ID NO: 9765 - DNA, 1860 bp, Artificial Sequence
  Synthetic Polynucloetide
atggccttaccagtgaccgccttgctcctgccgctggccttgctgctccacgccgccaggccggacatccagatgacacagagccctagcagcctgtctgccagcgtgggagacagagtgaccatcacatgcaaggccagccaggatgtgggcacagccgtggattggtatcagcagaagcctggcaaggcccctaagctgctgatctactgggccagcacaagacacacaggcgtgcccagcagattttctggcagcggctctggcaccgacttcaccctgacaatatccagcctccagcctgaggacttcgccacctactactgccagcagtacaacagctaccctctgaccttcggccagggcaccaaggtggaaatcaaaagactcgagatccagaaccctgatcctgccgtgtaccagctgcgggatagcaagagcagcgacaagagcgtgtgtctgttcaccgacttcgacagccagaccaacgtgtcccagagcaaggactccgacgtgtacatcaccgataagtgcgtgctggacatgcggagcatggacttcaagagcaactccgccgtggcctggtccaacaagtccgatttcgcctgcgccaacgccttcaacaacagcattatccccgaggacacattcttcccaagccccgagagcagctgcgacgtgaagctggtggaaaagagcttcgagacagacaccaacctgaacttccagaacctgagcgtgatcggcttcagaatcctgctgctgaaagtggccggctttaacctgctgatgaccctgcggctgtggtccagccgcgccaagagaagcggatctggcgtgaagcagaccctgaatttcgacctgctgaagctggctggcgacgtggaatccaacccaggccctactagtatggactggatttggcgcatccttttccttgtcggcgctgctaccggcgcgcattccttcgaagaagtgcagctggttgaatcaggtggcggcctggttcaacctggcggatctctgagactgagctgtgccgccagcggctacacctttaccgagtacacaatccactgggtccgacaggcccctggcaaaggacttgagtgggtcgccaacatcaaccccaacaatggcggcaccacctacaaccagaagttcgaggacagattcaccatcagccgggacaacagcaagaacaccctgtacctccagatgaactccctgagagccgaggacaccgccgtgtactattgtgccagaggctggaacttcgactactggggccagggaacactggtcaccgttagctctacgcgtgaggacctgaagaacgtgttcccacctgaggtggccgtgttcgagcctagcgaggccgagatcagccacacccagaaagccaccctcgtgtgcctggctaccggcttctaccccgaccatgtggaactgtcttggtgggtcaacggcaaagaggtgcacagcggcgtgtgtaccgacccccagccactgaaagaacagcccgccctgaacgacagccggtactgcctgagcagcagactgagagtgtccgccaccttctggcagaacccccggaaccacttcagatgccaggtgcagttctacggcctgagcgagaacgacgagtggacccaggacagagccaagcccgtgacccagatcgtgtctgccgaagcctggggcagagccgattgcggctttaccagcgagagctaccagcagggcgtgctgagcgccaccatcctgtacgagatcctgctgggcaaggccaccctgtacgccgtgctggtgtctgccctggtgctgatggctatggtcaagcggaaggacagccgggga

SEQ ID NO: 9766 - DNA, 2526 bp, Artificial Sequence
  Synthetic Polynucloetide
atggccttaccagtgaccgccttgctcctgccgctggccttgctgctccacgccgccaggccggacatccagatgacacagagccctagcagcctgtctgccagcgtgggagacagagtgaccatcacatgcaaggccagccaggatgtgggcacagccgtggattggtatcagcagaagcctggcaaggcccctaagctgctgatctactgggccagcacaagacacacaggcgtgcccagcagattttctggcagcggctctggcaccgacttcaccctgacaatatccagcctccagcctgaggacttcgccacctactactgccagcagtacaacagctaccctctgaccttcggccagggcaccaaggtggaaatcaaaagactcgagatccagaaccctgatcctgccgtgtaccagctgcgggatagcaagagcagcgacaagagcgtgtgtctgttcaccgacttcgacagccagaccaacgtgtcccagagcaaggactccgacgtgtacatcaccgataagtgcgtgctggacatgcggagcatggacttcaagagcaactccgccgtggcctggtccaacaagtccgatttcgcctgcgccaacgccttcaacaacagcattatccccgaggacacattcttcccaagccccgagagcagctgcgacgtgaagctggtggaaaagagcttcgagacagacaccaacctgaacttccagaacctgagcgtgatcggcttcagaatcctgctgctgaaagtggccggctttaacctgctgatgaccctgcggctgtggtccagccgcgccaagagaagcggatctggcgtgaagcagaccctgaatttcgacctgctgaagctggctggcgacgtggaatccaacccaggccctactagtatggactggatttggcgcatccttttccttgtcggcgctgctaccggcgcgcattccttcgaagaagtgcagctggttgaatcaggtggcggcctggttcaacctggcggatctctgagactgagctgtgccgccagcggctacacctttaccgagtacacaatccactgggtccgacaggcccctggcaaaggacttgagtgggtcgccaacatcaaccccaacaatggcggcaccacctacaaccagaagttcgaggacagattcaccatcagccgggacaacagcaagaacaccctgtacctccagatgaactccctgagagccgaggacaccgccgtgtactattgtgccagaggctggaacttcgactactggggccagggaacactggtcaccgttagctctacgcgtgaggacctgaagaacgtgttcccacctgaggtggccgtgttcgagcctagcgaggccgagatcagccacacccagaaagccaccctcgtgtgcctggctaccggcttctaccccgaccatgtggaactgtcttggtgggtcaacggcaaagaggtgcacagcggcgtgtgtaccgacccccagccactgaaagaacagcccgccctgaacgacagccggtactgcctgagcagcagactgagagtgtccgccaccttctggcagaacccccggaaccacttcagatgccaggtgcagttctacggcctgagcgagaacgacgagtggacccaggacagagccaagcccgtgacccagatcgtgtctgccgaagcctggggcagagccgattgcggctttaccagcgagagctaccagcagggcgtgctgagcgccaccatcctgtacgagatcctgctgggcaaggccaccctgtacgccgtgctggtgtctgccctggtgctgatggctatggtcaagcggaaggacagccggggaagggccaagcgatctggatctggagcaacaaacttctcactactcaaacaagcaggtgacgtggaggagaatcccgggccttctagaggcgggatccacaccatggctacctacgaggtgctgtgcgaggtggcaagaaagctgggcaccgacgacagagaagtggtgctgttcctgctgaacgtgttcatccctcagcctacactggcccagctgatcggtgcactgagagccctgaaagaggaaggccggctgacctttcctctgctggccgaatgcctgttcagagccggaagaagggatctgctgcgggacctgctgcatctggaccccagatttctggaaagacacctggccggcaccatgagctacttcagcccttaccagctgaccgtgctgcacgttgacggcgaactgtgcgccagagatattcggagcctgatcttcctgagcaaggacaccatcggcagccggtctacccctcagacatttctgcactgggtgtactgcatggaaaacctggacctgctcggccccacagatgtggatgccctgatgtccatgctgagaagcctgagcagagtggacctccagagacaggtgcagacactgatgggactgcacctgagcggacctagccacagccagcactacagacacacccct

SEQ ID NO: 9767 - DNA, 2685 bp, Artificial Sequence
  Synthetic Polynucloetide
atggccttaccagtgaccgccttgctcctgccgctggccttgctgctccacgccgccaggccgctcgaggggaaaccaattcccaaccctcttctgggactggattcaaccggcagcggcgaggacctgaagaacgtgttcccacctgaggtggccgtgttcgagcctagcaaggccgagatcgcccacacccagaaagccaccctcgtgtgcctggctaccggcttctaccccgaccatgtggaactgtcttggtgggtcaacggcaaagaggtgcacagcggcgtgtgtaccgacccccagccactgaaagaacagcccgccctgaacgacagccggtactgcctgagcagcagactgagagtgtccgccaccttctggcagaacccccggaaccacttcagatgccaggtgcagttctacggcctgagcgagaacgacgagtggacccaggacagagccaagcccgtgacccagatcgtgtctgccgaagcctggggcagagccgattgcggcatcaccagcgccagctaccaccagggcgtgctgagcgccaccatcctgtacgagatcctgctgggcaaggccaccctgtacgccgtgctggtgtctgccctggtgctgatggctatggtcaagcggaaggacagccggggaagggccaagcgatctggatctggagcaacaaacttctcactactcaaacaagcaggtgacgtggaggagaatcccgggcctactagcatggccttaccagtgaccgccttgctcctgccgctggccttgctgctccacgccgccaggccggacatccagatgacacagagccctagcagcctgtctgccagcgtgggagacagagtgaccatcacatgcaaggccagccaggatgtgggcacagccgtggattggtatcagcagaagcctggcaaggcccctaagctgctgatctactgggccagcacaagacacacaggcgtgcccagcagattttctggcagcggctctggcaccgacttcaccctgacaatatccagcctccagcctgaggacttcgccacctactactgccagcagtacaacagctaccctctgaccttcggccagggcaccaaggtggaaatcaaaagaggcggaggcggaagtggaggcggaggatctggcggcggaggctctgaagtgcagctggttgaatcaggtggcggcctggttcaacctggcggatctctgagactgagctgtgccgccagcggctacacctttaccgagtacacaatccactgggtccgacaggcccctggcaaaggacttgagtgggtcgccaacatcaaccccaacaatggcggcaccacctacaaccagaagttcgaggacagattcaccatcagccgggacaacagcaagaacaccctgtacctccagatgaactccctgagagccgaggacaccgccgtgtactattgtgccagaggctggaacttcgactactggggccagggaacactggtcaccgttagctctacgcgtgagcagaaactgatctcggaagaggatgggagcggcatccagaaccctgatcctgccgtgtaccagctgcgggatagcaagagcagcgacaagagcgtgtgtctgttcaccgacttcgacagccagaccaacgtgtcccagagcaaggactccgacgtgtacatcaccgataagtgcgtgctggacatgcggagcatggacttcaagagcaactccgccgtggcctggtccaacaagtccgatttcgcctgcgccaacgccttcaacaacagcattatccccgaggacacattcttcccaagcagcgacgtgccctgcgacgtgaagctggtggaaaagagcttcgagacagacaccaacctgaacttccagaacctgagcgtgatcggcttcagaatcctgctgctgaaagtggccggctttaacctgctgatgaccctgcggctgtggtccagccgcgccaagagaagcggatctggcgtgaagcagaccctgaatttcgacctgctgaagctggctggcgacgtggaatccaacccaggcccttctagaggccatatgaccgagtacaagcccacggtgcgcctcgccacccgcgacgacgtccccagggccgtacgcaccctcgccgccgcgttcgccgactaccccgccacgcgccacaccgtcgatccggaccgccacatcgagcgggtcaccgagctgcaagaactcttcctcacgcgcgtcgggctcgacatcggcaaggtgtgggtcgcggacgacggcgccgcggtggcggtctggaccacgccggagagcgtcgaagcgggggcggtgttcgccgagatcggcccgcgcatggccgagttgagcggttcccggctggccgcgcagcaacagatggaaggcctcctggcgccgcaccggcccaaggagcccgcgtggttcctggccaccgtcggcgtctcgcccgaccaccagggcaagggtctgggcagcgccgtcgtgctccccggagtggaggcggccgagcgcgccggggtgcccgccttcctggagacctccgcgccccgcaacctccccttctacgagcggctcggcttcaccgtcaccgccgacgtcgaggtgcccgaaggaccgcgcacctggtgcatgacccgcaagcccggtgcctga

SEQ ID NO: 9768 - DNA, 2688 bp, Artificial Sequence
  Synthetic Polynucloetide
atggccttaccagtgaccgccttgctcctgccgctggccttgctgctccacgccgccaggccgctcgagcagaaactgatctcggaagaggatctgggctccggcgatcgccctgatcctgccgtgtaccagctgcgggatagcaagagcagcgacaagagcgtgtgtctgttcaccgacttcgacagccagaccaacgtgtcccagagcaaggactccgacgtgtacatcaccgataagtgcgtgctggacatgcggagcatggacttcaagagcaactccgccgtggcctggtccaacaagtccgatttcgcctgcgccaacgccttcaacaacagcattatccccgaggacacattcttcccaagccccgagagcagctgcgacgtgaagctggtggaaaagagcttcgagacagacaccaacctgaacttccagaacctgagcgtgatcggcttcagaatcctgctgctgaaagtggccggctttaacctgctgatgaccctgcggctgtggtccagctctagtcgcgccaagagaagcggatctggcgtgaagcagaccctgaatttcgacctgctgaagctggctggcgacgtggaatccaacccaggccccactagcatggccttaccagtgaccgccttgctcctgccgctggccttgctgctccacgccgccaggccggacatccagatgacacagagccctagcagcctgtctgccagcgtgggagacagagtgaccatcacatgcaaggccagccaggatgtgggcacagccgtggattggtatcagcagaagcctggcaaggcccctaagctgctgatctactgggccagcacaagacacacaggcgtgcccagcagattttctggcagcggctctggcaccgacttcaccctgacaatatccagcctccagcctgaggacttcgccacctactactgccagcagtacaacagctaccctctgaccttcggccagggcaccaaggtggaaatcaaaagaggcggaggcggaagtggaggcggaggatctggcggcggaggctctgaagtgcagctggttgaatcaggtggcggcctggttcaacctggcggatctctgagactgagctgtgccgccagcggctacacctttaccgagtacacaatccactgggtccgacaggcccctggcaaaggacttgagtgggtcgccaacatcaaccccaacaatggcggcaccacctacaaccagaagttcgaggacagattcaccatcagccgggacaacagcaagaacaccctgtacctccagatgaactccctgagagccgaggacaccgccgtgtactattgtgccagaggctggaacttcgactactggggccagggaacactggtcaccgttagctctacgcgtgggaaaccaattcccaaccctcttctgggactggattcaaccggcagcggcgaggacctgaagaacgtgttcccacctgaggtggccgtgttcgagcctagcgaggccgagatcagccacacccagaaagccaccctcgtgtgcctggctaccggcttctaccccgaccatgtggaactgtcttggtgggtcaacggcaaagaggtgcacagcggcgtgtgtaccgacccccagccactgaaagaacagcccgccctgaacgacagccggtactgcctgagcagcagactgagagtgtccgccaccttctggcagaacccccggaaccacttcagatgccaggtgcagttctacggcctgagcgagaacgacgagtggacccaggacagagccaagcccgtgacccagatcgtgtctgccgaagcctggggcagagccgattgcggctttaccagcgagagctaccagcagggcgtgctgagcgccaccatcctgtacgagatcctgctgggcaaggccaccctgtacgccgtgctggtgtctgccctggtgctgatggctatggtcaagcggaaggacagccggggaagggccaagcgatctggatctggagcaacaaacttctcactactcaaacaagcaggtgacgtggaggagaatcccgggccttctagaggccatatgaccgagtacaagcccacggtgcgcctcgccacccgcgacgacgtccccagggccgtacgcaccctcgccgccgcgttcgccgactaccccgccacgcgccacaccgtcgatccggaccgccacatcgagcgggtcaccgagctgcaagaactcttcctcacgcgcgtcgggctcgacatcggcaaggtgtgggtcgcggacgacggcgccgcggtggcggtctggaccacgccggagagcgtcgaagcgggggcggtgttcgccgagatcggcccgcgcatggccgagttgagcggttcccggctggccgcgcagcaacagatggaaggcctcctggcgccgcaccggcccaaggagcccgcgtggttcctggccaccgtcggcgtctcgcccgaccaccagggcaagggtctgggcagcgccgtcgtgctccccggagtggaggcggccgagcgcgccggggtgcccgccttcctggagacctccgcgccccgcaacctccccttctacgagcggctcggcttcaccgtcaccgccgacgtcgaggtgcccgaaggaccgcgcacctggtgcatgacccgcaagcccggtgcctga

SEQ ID NO: 9769 - DNA, 2550 bp, Artificial Sequence
  Synthetic Polynucloetide
atggccttaccagtgaccgccttgctcctgccgctggccttgctgctccacgccgccaggccggacatccagatgacacagagccctagcagcctgtctgccagcgtgggagacagagtgaccatcacatgcaaggccagccaggatgtgggcacagccgtggattggtatcagcagaagcctggcaaggcccctaagctgctgatctactgggccagcacaagacacacaggcgtgcccagcagattttctggcagcggctctggcaccgacttcaccctgacaatatccagcctccagcctgaggacttcgccacctactactgccagcagtacaacagctaccctctgaccttcggccagggcaccaaggtggaaatcaaaagactcgaggacctgaagaacgtgttcccacctgaggtggccgtgttcgagcctagcgaggccgagatcagccacacccagaaagccaccctcgtgtgcctggctaccggcttctaccccgaccatgtggaactgtcttggtgggtcaacggcaaagaggtgcacagcggcgtgtctaccgacccccagccactgaaagaacagcccgccctgaacgacagccggtactgcctgagcagcagactgagagtgtccgccaccttctggcagaacccccggaaccacttcagatgccaggtgcagttctacggcctgagcgagaacgacgagtggacccaggacagagccaagcccgtgacccagatcgtgtctgccgaagcctggggcagagccgattgcggctttaccagcgagagctaccagcagggcgtgctgagcgccaccatcctgtacgagatcctgctgggcaaggccaccctgtacgccgtgctggtgtctgccctggtgctgatggctatggtcaagcggaaggacagccggggaagggccaagcgatctggatctggagcaacaaacttctcactactcaaacaagcaggtgacgtggaggagaatcccgggcctactagtatggactggatttggcgcatccttttccttgtcggcgctgctaccggcgcgcattccttcgaagaagtgcagctggttgaatcaggtggcggcctggttcaacctggcggatctctgagactgagctgtgccgccagcggctacacctttaccgagtacacaatccactgggtccgacaggcccctggcaaaggacttgagtgggtcgccaacatcaaccccaacaatggcggcaccacctacaaccagaagttcgaggacagattcaccatcagccgggacaacagcaagaacaccctgtacctccagatgaactccctgagagccgaggacaccgccgtgtactattgtgccagaggctggaacttcgactactggggccagggaacactggtcaccgttagctctacgcgtatccagaaccctgatcctgccgtgtaccagctgcgggatagcaagagcagcgacaagagcgtgtgtctgttcaccgacttcgacagccagaccaacgtgtcccagagcaaggactccgacgtgtacatcaccgataagaccgtgctggacatgcggagcatggacttcaagagcaactccgccgtggcctggtccaacaagtccgatttcgcctgcgccaacgccttcaacaacagcattatccccgaggacacattcttcccaagccccgagagcagctgcgacgtgaagctggtggaaaagagcttcgagacagacaccaacctgaacttccagaacctgagcgtgatcggcttcagaatcctgctgctgaaagtggccggctttaacctgctgatgaccctgcggctgtggtccagccgcgccaagagaagcggatctggcgtgaagcagaccctgaatttcgacctgctgaagctggctggcgacgtggaatccaacccaggcccttctagaggccatatgaccgagtacaagcccacggtgcgcctcgccacccgcgacgacgtccccagggccgtacgcaccctcgccgccgcgttcgccgactaccccgccacgcgccacaccgtcgatccggaccgccacatcgagcgggtcaccgagctgcaagaactcttcctcacgcgcgtcgggctcgacatcggcaaggtgtgggtcgcggacgacggcgccgcggtggcggtctggaccacgccggagagcgtcgaagcgggggcggtgttcgccgagatcggcccgcgcatggccgagttgagcggttcccggctggccgcgcagcaacagatggaaggcctcctggcgccgcaccggcccaaggagcccgcgtggttcctggccaccgtcggcgtctcgcccgaccaccagggcaagggtctgggcagcgccgtcgtgctccccggagtggaggcggccgagcgcgccggggtgcccgccttcctggagacctccgcgccccgcaacctccccttctacgagcggctcggcttcaccgtcaccgccgacgtcgaggtgcccgaaggaccgcgcacctggtgcatgacccgcaagcccggtgcctga

SEQ ID NO: 9770 - DNA, 2796 bp, Artificial Sequence
  Synthetic Polynucloetide
atggccttaccagtgaccgccttgctcctgccgctggccttgctgctccacgccgccaggccggacatccagatgacacagagccctagcagcctgtctgccagcgtgggagacagagtgaccatcacatgcaaggccagccaggatgtgggcacagccgtggattggtatcagcagaagcctggcaaggcccctaagctgctgatctactgggccagcacaagacacacaggcgtgcccagcagattttctggcagcggctctggcaccgacttcaccctgacaatatccagcctccagcctgaggacttcgccacctactactgccagcagtacaacagctaccctctgaccttcggccagggcaccaaggtggaaatcaaaagactcgaggacctgaagaacgtgttcccacctgaggtggccgtgttcgagcctagcgaggccgagatcagccacacccagaaagccaccctcgtgtgcctggctaccggcttctaccccgaccatgtggaactgtcttggtgggtcaacggcaaagaggtgcacagcggcgtgtctaccgacccccagccactgaaagaacagcccgccctgaacgacagccggtactgcctgagcagcagactgagagtgtccgccaccttctggcagaacccccggaaccacttcagatgccaggtgcagttctacggcctgagcgagaacgacgagtggacccaggacagagccaagcccgtgacccagatcgtgtctgccgaagcctggggcagagccgattgcggctttaccagcgagagctaccagcagggcgtgctgagcgccaccatcctgtacgagatcctgctgggcaaggccaccctgtacgccgtgctggtgtctgccctggtgctgatggctatggtcaagcggaaggacagccggggaagggccaagcgatctggatctggagcaacaaacttctcactactcaaacaagcaggtgacgtggaggagaatcccgggcctactagtatggactggatttggcgcatccttttccttgtcggcgctgctaccggcgcgcattccttcgaagaagtgcagctggttgaatcaggtggcggcctggttcaacctggcggatctctgagactgagctgtgccgccagcggctacacctttaccgagtacacaatccactgggtccgacaggcccctggcaaaggacttgagtgggtcgccaacatcaaccccaacaatggcggcaccacctacaaccagaagttcgaggacagattcaccatcagccgggacaacagcaagaacaccctgtacctccagatgaactccctgagagccgaggacaccgccgtgtactattgtgccagaggctggaacttcgactactggggccagggaacactggtcaccgttagctctacgcgtgagcagaaactgatctcggaagaggatgggagcggcaccccattcccttctctggcccctcccatcatgctgctggtggacggcaagcagcagatggtggtcgtgtgcctggtgctggatgtggccccacctggactggacagccccatctggtttagcgccggcaatggctctgccctggacgcctttacctacggcccaagccctgccaccgatggcacctggacaaatctggcccacctgagcctgcccagcgaggaactggcttcttgggagcctctcgtgtgccacacaggacctggcgctgagggacacagcagatccacccagcctatgcacctgtctggcgaggccagcaccgccagaacctgtcctcaggaacctctgagaggcacccctggcggagcactgtggctgggagtgctgagactgctgctgttcaagctgctgctgtttgacctgctgctgacctgctcctgtctgtgcgatcctgccggccctctgccttctcctgccaccaccacaagactgagagccctgggcagccacagactgcaccctgccacagagacaggcggcagagaggccacaagcagccctagaccccagcccagagacagaagatggggcgataccccccctggcagaaagcctggatctccagtccgcgccaagagaagcggatctggcgtgaagcagaccctgaatttcgacctgctgaagctggctggcgacgtggaatccaacccaggcccttctagaggccatatgaccgagtacaagcccacggtgcgcctcgccacccgcgacgacgtccccagggccgtacgcaccctcgccgccgcgttcgccgactaccccgccacgcgccacaccgtcgatccggaccgccacatcgagcgggtcaccgagctgcaagaactcttcctcacgcgcgtcgggctcgacatcggcaaggtgtgggtcgcggacgacggcgccgcggtggcggtctggaccacgccggagagcgtcgaagcgggggcggtgttcgccgagatcggcccgcgcatggccgagttgagcggttcccggctggccgcgcagcaacagatggaaggcctcctggcgccgcaccggcccaaggagcccgcgtggttcctggccaccgtcggcgtctcgcccgaccaccagggcaagggtctgggcagcgccgtcgtgctccccggagtggaggcggccgagcgcgccggggtgcccgccttcctggagacctccgcgccccgcaacctccccttctacgagcggctcggcttcaccgtcaccgccgacgtcgaggtgcccgaaggaccgcgcacctggtgcatgacccgcaagcccggtgcctga

SEQ ID NO: 9771 - DNA, 2850 bp, Artificial Sequence
  Synthetic Polynucloetide
atggccttaccagtgaccgccttgctcctgccgctggccttgctgctccacgccgccaggccgctcgaggacctgaagaacgtgttcccacctgaggtggccgtgttcgagcctagcgaggccgagatcagccacacccagaaagccaccctcgtgtgcctggctaccggcttctaccccgaccatgtggaactgtcttggtgggtcaacggcaaagaggtgcacagcggcgtgtctaccgacccccagccactgaaagaacagcccgccctgaacgacagccggtactgcctgagcagcagactgagagtgtccgccaccttctggcagaacccccggaaccacttcagatgccaggtgcagttctacggcctgagcgagaacgacgagtggacccaggacagagccaagcccgtgacccagatcgtgtctgccgaagcctggggcagagccgattgcggctttaccagcgagagctaccagcagggcgtgctgagcgccaccatcctgtacgagatcctgctgggcaaggccaccctgtacgccgtgctggtgtctgccctggtgctgatggctatggtcaagcggaaggacagccggggaagggccaagcgatctggatctggagcaacaaacttctcactactcaaacaagcaggtgacgtggaggagaatcccgggcctactagcatggccttaccagtgaccgccttgctcctgccgctggccttgctgctccacgccgccaggccggacatccagatgacacagagccctagcagcctgtctgccagcgtgggagacagagtgaccatcacatgcaaggccagccaggatgtgggcacagccgtggattggtatcagcagaagcctggcaaggcccctaagctgctgatctactgggccagcacaagacacacaggcgtgcccagcagattttctggcagcggctctggcaccgacttcaccctgacaatatccagcctccagcctgaggacttcgccacctactactgccagcagtacaacagctaccctctgaccttcggccagggcaccaaggtggaaatcaaaagaggcggaggcggaagtggaggcggaggatctggcggcggaggctctgaagtgcagctggttgaatcaggtggcggcctggttcaacctggcggatctctgagactgagctgtgccgccagcggctacacctttaccgagtacacaatccactgggtccgacaggcccctggcaaaggacttgagtgggtcgccaacatcaaccccaacaatggcggcaccacctacaaccagaagttcgaggacagattcaccatcagccgggacaacagcaagaacaccctgtacctccagatgaactccctgagagccgaggacaccgccgtgtactattgtgccagaggctggaacttcgactactggggccagggaacactggtcaccgttagctctacgcgtgagcagaaactgatctcggaagaggatctggggagcggcaccccattcccttctctggcccctcccatcatgctgctggtggacggcaagcagcagatggtggtcgtgtgcctggtgctggatgtggccccacctggactggacagccccatctggtttagcgccggcaatggctctgccctggacgcctttacctacggcccaagccctgccaccgatggcacctggacaaatctggcccacctgagcctgcccagcgaggaactggcttcttgggagcctctcgtgtgccacacaggacctggcgctgagggacacagcagatccacccagcctatgcacctgtctggcgaggccagcaccgccagaacctgtcctcaggaacctctgagaggcacccctggcggagcactgtggctgggagtgctgagactgctgctgttcaagctgctgctgtttgacctgctgctgacctgctcctgtctgtgcgatcctgccggccctctgccttctcctgccaccaccacaagactgagagccctgggcagccacagactgcaccctgccacagagacaggcggcagagaggccacaagcagccctagaccccagcccagagacagaagatggggcgataccccccctggcagaaagcctggatctccagtccgcgccaagagaagcggatctggcgtgaagcagaccctgaatttcgacctgctgaagctggctggcgacgtggaatccaacccaggcccttctagatctagaggccatatgaccgagtacaagcccacggtgcgcctcgccacccgcgacgacgtccccagggccgtacgcaccctcgccgccgcgttcgccgactaccccgccacgcgccacaccgtcgatccggaccgccacatcgagcgggtcaccgagctgcaagaactcttcctcacgcgcgtcgggctcgacatcggcaaggtgtgggtcgcggacgacggcgccgcggtggcggtctggaccacgccggagagcgtcgaagcgggggcggtgttcgccgagatcggcccgcgcatggccgagttgagcggttcccggctggccgcgcagcaacagatggaaggcctcctggcgccgcaccggcccaaggagcccgcgtggttcctggccaccgtcggcgtctcgcccgaccaccagggcaagggtctgggcagcgccgtcgtgctccccggagtggaggcggccgagcgcgccggggtgcccgccttcctggagacctccgcgccccgcaacctccccttctacgagcggctcggcttcaccgtcaccgccgacgtcgaggtgcccgaaggaccgcgcacctggtgcatgacccgcaagcccggtgcctga

SEQ ID NO: 9772 - DNA, 2661 bp, Artificial Sequence
  Synthetic Polynucloetide
atggccttaccagtgaccgccttgctcctgccgctggccttgctgctccacgccgccaggccggacatccagatgacacagagccctagcagcctgtctgccagcgtgggagacagagtgaccatcacatgcaaggccagccaggatgtgggcacagccgtggattggtatcagcagaagcctggcaaggcccctaagctgctgatctactgggccagcacaagacacacaggcgtgcccagcagattttctggcagcggctctggcaccgacttcaccctgacaatatccagcctccagcctgaggacttcgccacctactactgccagcagtacaacagctaccctctgaccttcggccagggcaccaaggtggaaatcaaaagactcgaggggaaaccaattcccaaccctcttctgggactggattcaaccggcagcggcgacaagcagctggacgccgacgtgtcccccaagcctaccatcttcctgccctctatcgccgagacaaagctccagaaggccggcacctacctgtgcctgctggaaaagttcttcccagatgtgattaagatccactggcaggaaaagaagtccaacaccatcctgggcagccaggaaggcaacaccatgaagaccaacgacacctacatgaagttcagctggctgaccgtgcccgagaagtccctggacaaagaacacagatgcatcgtgcggcacgaaaacaacaagaacggcgtggaccaggaaatcatcttcccacccatcaagaccgatgtgattacaatggaccccaaggacaactgctccaaggacgccaacgataccctgctgctccagctgaccaacaccagcgcctactacatgtacttgttgctgctgctgaagtccgtggtgtacttcgccatcatcacatgctgcctgctgcggagaaccgccttctgctgcaacggcgagaagtctagggccaagcgatctggatctggagcaacaaacttctcactactcaaacaagcaggtgacgtggaggagaatcccgggcctactagtatggactggatttggcgcatccttttccttgtcggcgctgctaccggcgcgcattccttcgaagaagtgcagctggttgaatcaggtggcggcctggttcaacctggcggatctctgagactgagctgtgccgccagcggctacacctttaccgagtacacaatccactgggtccgacaggcccctggcaaaggacttgagtgggtcgccaacatcaaccccaacaatggcggcaccacctacaaccagaagttcgaggacagattcaccatcagccgggacaacagcaagaacaccctgtacctccagatgaactccctgagagccgaggacaccgccgtgtactattgtgccagaggctggaacttcgactactggggccagggaacactggtcaccgttagctctacgcgtgagcagaaactgatctcggaagaggatgggagcggcagccagcctcacaccaagcccagcgtgttcgtgatgaagaacggcaccaacgtggcctgcctcgtgaaagagttctaccccaaggacatcaggatcaacctggtgtccagcaagaagatcaccgagttcgaccccgccatcgtgatctcccccagcggcaagtacaacgccgtgaagctggggaagtacgaggacagcaacagcgtgacctgctccgtgcagcacgacaacaagaccgtgcacagcaccgactttgaagtgaaaaccgactccaccgaccacgtgaagcccaaagagacagagaacaccaagcagcccagcaagagctgccacaagcccaaggccatcgtgcacaccgagaaagtgaacatgatgagcctgaccgtgctgggcctgcggatgctgttcgccaaaaccgtggccgtgaacttcctgctgaccgccaagctgttcttcctccgcgccaagagaagcggatctggcgtgaagcagaccctgaatttcgacctgctgaagctggctggcgacgtggaatccaacccaggcccttctagaggccatatgaccgagtacaagcccacggtgcgcctcgccacccgcgacgacgtccccagggccgtacgcaccctcgccgccgcgttcgccgactaccccgccacgcgccacaccgtcgatccggaccgccacatcgagcgggtcaccgagctgcaagaactcttcctcacgcgcgtcgggctcgacatcggcaaggtgtgggtcgcggacgacggcgccgcggtggcggtctggaccacgccggagagcgtcgaagcgggggcggtgttcgccgagatcggcccgcgcatggccgagttgagcggttcccggctggccgcgcagcaacagatggaaggcctcctggcgccgcaccggcccaaggagcccgcgtggttcctggccaccgtcggcgtctcgcccgaccaccagggcaagggtctgggcagcgccgtcgtgctccccggagtggaggcggccgagcgcgccggggtgcccgccttcctggagacctccgcgccccgcaacctccccttctacgagcggctcggcttcaccgtcaccgccgacgtcgaggtgcccgaaggaccgcgcacctggtgcatgacccgcaagcccggtgcctga

SEQ ID NO: 9773 - DNA, 1872 bp, Artificial Sequence
  Synthetic Polynucloetide
atggccttaccagtgaccgccttgctcctgccgctggccttgctgctccacgccgccaggccggacatccagatgacacagagccctagcagcctgtctgccagcgtgggagacagagtgaccatcacatgcaaggccagccaggatgtgggcacagccgtggattggtatcagcagaagcctggcaaggcccctaagctgctgatctactgggccagcacaagacacacaggcgtgcccagcagattttctggcagcggctctggcaccgacttcaccctgacaatatccagcctccagcctgaggacttcgccacctactactgccagcagtacaacagctaccctctgaccttcggccagggcaccaaggtggaaatcaaaagactcgagagccagcctcacaccaagcccagcgtgttcgtgatgaagaacggcaccaacgtggcctgcctcgtgaaagagttctaccccaaggacatcaggatcaacctggtgtccagcaagaagatcaccgagttcgaccccgccatcgtgatctcccccagcggcaagtacaacgccgtgaagctggggaagtacgaggacagcaacagcgtgacctgctccgtgcagcacgacaacaagaccgtgcacagcaccgactttgaagtgaaaaccgactccaccgaccacgtgaagcccaaagagacagagaacaccaagcagcccagcaagagctgccacaagcccaaggccatcgtgcacaccgagaaagtgaacatgatgagcctgaccgtgctgggcctgcggatgctgttcgccaaaaccgtggccgtgaacttcctgctgaccgccaagctgttcttcctcagggccaagcgatctggatctggagcaacaaacttctcactactcaaacaagcaggtgacgtggaggagaatcccgggcctactagtatggactggatttggcgcatccttttccttgtcggcgctgctaccggcgcgcattccttcgaagaagtgcagctggttgaatcaggtggcggcctggttcaacctggcggatctctgagactgagctgtgccgccagcggctacacctttaccgagtacacaatccactgggtccgacaggcccctggcaaaggacttgagtgggtcgccaacatcaaccccaacaatggcggcaccacctacaaccagaagttcgaggacagattcaccatcagccgggacaacagcaagaacaccctgtacctccagatgaactccctgagagccgaggacaccgccgtgtactattgtgccagaggctggaacttcgactactggggccagggaacactggtcaccgttagctctacgcgtgacaagcagctggacgccgacgtgtcccccaagcctaccatcttcctgccctctatcgccgagacaaagctccagaaggccggcacctacctgtgcctgctggaaaagttcttcccagatgtgattaagatccactggcaggaaaagaagtccaacaccatcctgggcagccaggaaggcaacaccatgaagaccaacgacacctacatgaagttcagctggctgaccgtgcccgagaagtccctggacaaagaacacagatgcatcgtgcggcacgaaaacaacaagaacggcgtggaccaggaaatcatcttcccacccatcaagaccgatgtgattacaatggaccccaaggacaactgctccaaggacgccaacgataccctgctgctccagctgaccaacaccagcgcctactacatgtacttgttgctgctgctgaagtccgtggtgtacttcgccatcatcacatgctgcctgctgcggagaaccgccttctgctgcaacggcgagaagtct

SEQ ID NO: 9774 - DNA, 2706 bp, Artificial Sequence
  Synthetic Polynucloetide
atggccttaccagtgaccgccttgctcctgccgctggccttgctgctccacgccgccaggccgctcgaggggaaaccaattcccaaccctcttctgggactggattcaaccggcagcggcgacaagcagctggacgccgacgtgtcccccaagcctaccatcttcctgccctctatcgccgagacaaagctccagaaggccggcacctacctgtgcctgctggaaaagttcttcccagatgtgattaagatccactggcaggaaaagaagtccaacaccatcctgggcagccaggaaggcaacaccatgaagaccaacgacacctacatgaagttcagctggctgaccgtgcccgagaagtccctggacaaagaacacagatgcatcgtgcggcacgaaaacaacaagaacggcgtggaccaggaaatcatcttcccacccatcaagaccgatgtgattacaatggaccccaaggacaactgctccaaggacgccaacgataccctgctgctccagctgaccaacaccagcgcctactacatgtacttgttgctgctgctgaagtccgtggtgtacttcgccatcatcacatgctgcctgctgcggagaaccgccttctgctgcaacggcgagaagtctagggccaagcgatctggatctggagcaacaaacttctcactactcaaacaagcaggtgacgtggaggagaatcccgggcctactagcatggccttaccagtgaccgccttgctcctgccgctggccttgctgctccacgccgccaggccggacatccagatgacacagagccctagcagcctgtctgccagcgtgggagacagagtgaccatcacatgcaaggccagccaggatgtgggcacagccgtggattggtatcagcagaagcctggcaaggcccctaagctgctgatctactgggccagcacaagacacacaggcgtgcccagcagattttctggcagcggctctggcaccgacttcaccctgacaatatccagcctccagcctgaggacttcgccacctactactgccagcagtacaacagctaccctctgaccttcggccagggcaccaaggtggaaatcaaaagaggcggaggcggaagtggaggcggaggatctggcggcggaggctctgaagtgcagctggttgaatcaggtggcggcctggttcaacctggcggatctctgagactgagctgtgccgccagcggctacacctttaccgagtacacaatccactgggtccgacaggcccctggcaaaggacttgagtgggtcgccaacatcaaccccaacaatggcggcaccacctacaaccagaagttcgaggacagattcaccatcagccgggacaacagcaagaacaccctgtacctccagatgaactccctgagagccgaggacaccgccgtgtactattgtgccagaggctggaacttcgactactggggccagggaacactggtcaccgttagctctacgcgtgagcagaaactgatctcggaagaggatgggagcggcagccagcctcacaccaagcccagcgtgttcgtgatgaagaacggcaccaacgtggcctgcctcgtgaaagagttctaccccaaggacatcaggatcaacctggtgtccagcaagaagatcaccgagttcgaccccgccatcgtgatctcccccagcggcaagtacaacgccgtgaagctggggaagtacgaggacagcaacagcgtgacctgctccgtgcagcacgacaacaagaccgtgcacagcaccgactttgaagtgaaaaccgactccaccgaccacgtgaagcccaaagagacagagaacaccaagcagcccagcaagagctgccacaagcccaaggccatcgtgcacaccgagaaagtgaacatgatgagcctgaccgtgctgggcctgcggatgctgttcgccaaaaccgtggccgtgaacttcctgctgaccgccaagctgttcttcctccgcgccaagagaagcggatctggcgtgaagcagaccctgaatttcgacctgctgaagctggctggcgacgtggaatccaacccaggcccttctagaggccatatgaccgagtacaagcccacggtgcgcctcgccacccgcgacgacgtccccagggccgtacgcaccctcgccgccgcgttcgccgactaccccgccacgcgccacaccgtcgatccggaccgccacatcgagcgggtcaccgagctgcaagaactcttcctcacgcgcgtcgggctcgacatcggcaaggtgtgggtcgcggacgacggcgccgcggtggcggtctggaccacgccggagagcgtcgaagcgggggcggtgttcgccgagatcggcccgcgcatggccgagttgagcggttcccggctggccgcgcagcaacagatggaaggcctcctggcgccgcaccggcccaaggagcccgcgtggttcctggccaccgtcggcgtctcgcccgaccaccagggcaagggtctgggcagcgccgtcgtgctccccggagtggaggcggccgagcgcgccggggtgcccgccttcctggagacctccgcgccccgcaacctccccttctacgagcggctcggcttcaccgtcaccgccgacgtcgaggtgcccgaaggaccgcgcacctggtgcatgacccgcaagcccggtgcctga

SEQ ID NO: 9775 - DNA, 3081 bp, Artificial Sequence
  Synthetic Polynucloetide
atggccttaccagtgaccgccttgctcctgccgctggccttgctgctccacgccgccaggccggacatccagatgacacagagccctagcagcctgtctgccagcgtgggagacagagtgaccatcacatgcaaggccagccaggatgtgggcacagccgtggattggtatcagcagaagcctggcaaggcccctaagctgctgatctactgggccagcacaagacacacaggcgtgcccagcagattttctggcagcggctctggcaccgacttcaccctgacaatatccagcctccagcctgaggacttcgccacctactactgccagcagtacaacagctaccctctgaccttcggccagggcaccaaggtggaaatcaaaagaggacagcctaaggccaatcctaccgtgacactgttccctccaagcagcgaagaactccaggccaacaaggccacacttgtgtgcctgatctccgacttctaccctggggctgtgacagtggcttggaaggccgatggatctcctgtgaaagccggcgtggaaaccaccaagccatccaagcagagcaacaacaaatacgccgccagctcctacctgagcctgacacctgagcagtggaagtcccacagatcctacagctgccaagtgacccacgaaggcagcaccgtggaaaagacagtggcccctacagagtgcagcggatcccagagcttcggcctgctggaccccaagctgtgctacctgctggatggcatcctgttcatctacggcgtgatcctgaccgccctgttcctgagagtgaagttcagcagaagcgccgacgcccctgcctaccagcagggacagaaccaactgtacaacgagctgaacctgggcagacgggaagagtacgacgtgctggacaagcggagaggcagggaccctgagatgggcggaaagccccagcggagaaagaacccccaggaaggactgtataacgaactccagaaagacaagatggccgaagcctacagcgagatcggcatgaagggcgagcggagaagaggcaagggccacgatggcctgtaccagggcctgagcaccgccaccaaggacacctatgacgccctgcacatgcaggccctgcctccaagaagggccaagcgatctggatctggagcaacaaacttctcactactcaaacaagcaggtgacgtggaggagaatcccgggcctactagtatggactggatttggcgcatccttttccttgtcggcgctgctaccggcgcgcattccttcgaagaagtgcagctggttgaatcaggtggcggcctggttcaacctggcggatctctgagactgagctgtgccgccagcggctacacctttaccgagtacacaatccactgggtccgacaggcccctggcaaaggacttgagtgggtcgccaacatcaaccccaacaatggcggcaccacctacaaccagaagttcgaggacagattcaccatcagccgggacaacagcaagaacaccctgtacctccagatgaactccctgagagccgaggacaccgccgtgtactattgtgccagaggctggaacttcgactactggggccagggaacactggtcaccgttagctctgcctctacaaagggaccctccgtgtttcctctggctcccagcagcaagtctacaagcggaggaacagccgctctgggctgcctggtcaaggattactttcccgagcctgtgaccgtgtcctggaatagcggagcactgacaagcggcgtgcacacctttccagccgtgctgcaaagcagcggcctgtactctctgagcagcgtggtcacagtgcctagctctagcctgggcacccagacctacatctgcaatgtgaaccacaagcctagcaacaccaaggtggacaagagagtggaacccaagagctgtggtacccagagttttgggttgttggaccctaaattgtgctatctgttggacggaatcctgttcatttacggagtgatcctgaccgcattgttcctgcgggttaagttttccagatccgcagacgcacccgcttaccaacaagggcagaaccaactctacaatgaacttaatttggggcggagggaagagtacgacgttctggacaaaaggaggggacgagatcccgagatgggcggaaagcctcagcgaaggaagaatccgcaagaggggctttataacgaactccagaaagataaaatggcagaagcctatagtgagattgggatgaagggagaaaggaggaggggtaaaggtcacgatgggttgtaccaaggattgagcacagccactaaagatacctatgatgcgctccacatgcaggccctgccgccaagacgcgccaagagaagcggatctggcgtgaagcagaccctgaatttcgacctgctgaagctggctggcgacgtggaatccaacccaggcccttctagaggccatatgaccgagtacaagcccacggtgcgcctcgccacccgcgacgacgtccccagggccgtacgcaccctcgccgccgcgttcgccgactaccccgccacgcgccacaccgtcgatccggaccgccacatcgagcgggtcaccgagctgcaagaactcttcctcacgcgcgtcgggctcgacatcggcaaggtgtgggtcgcggacgacggcgccgcggtggcggtctggaccacgccggagagcgtcgaagcgggggcggtgttcgccgagatcggcccgcgcatggccgagttgagcggttcccggctggccgcgcagcaacagatggaaggcctcctggcgccgcaccggcccaaggagcccgcgtggttcctggccaccgtcggcgtctcgcccgaccaccagggcaagggtctgggcagcgccgtcgtgctccccggagtggaggcggccgagcgcgccggggtgcccgccttcctggagacctccgcgccccgcaacctccccttctacgagcggctcggcttcaccgtcaccgccgacgtcgaggtgcccgaaggaccgcgcacctggtgcatgacccgcaagcccggtgcctga

SEQ ID NO: 9776 - DNA, 2436 bp, Artificial Sequence
  Synthetic Polynucloetide
atggccttaccagtgaccgccttgctcctgccgctggccttgctgctccacgccgccaggccggacatccagatgacacagagccctagcagcctgtctgccagcgtgggagacagagtgaccatcacatgcaaggccagccaggatgtgggcacagccgtggattggtatcagcagaagcctggcaaggcccctaagctgctgatctactgggccagcacaagacacacaggcgtgcccagcagattttctggcagcggctctggcaccgacttcaccctgacaatatccagcctccagcctgaggacttcgccacctactactgccagcagtacaacagctaccctctgaccttcggccagggcaccaaggtggaaatcaaaagactcgaggacctgaagaacgtgttcccacctgaggtggccgtgttcgagcctagcgaggccgagatcagccacacccagaaagccaccctcgtgtgcctggctaccggcttctaccccgaccatgtggaactgtcttggtgggtcaacggcaaagaggtgcacagcggcgtgtctaccgacccccagccactgaaagaacagcccgccctgaacgacagccggtactgcctgagcagcagactgagagtgtccgccaccttctggcagaacccccggaaccacttcagatgccaggtgcagttctacggcctgagcgagaacgacgagtggacccaggacagagccaagcccgtgacccagatcgtgtctgccgaagcctggggcagagccgattgcggatcccagagcttcggcctgctggaccccaagctgtgctacctgctggatggcatcctgttcatctacggcgtgatcctgaccgccctgttcctgagagtgaagttcagcagaagcgccgacgcccctgcctaccagcagggacagaaccaactgtacaacgagctgaacctgggcagacgggaagagtacgacgtgctggacaagcggagaggcagggaccctgagatgggcggaaagccccagcggagaaagaacccccaggaaggactgtataacgaactccagaaagacaagatggccgaagcctacagcgagatcggcatgaagggcgagcggagaagaggcaagggccacgatggcctgtaccagggcctgagcaccgccaccaaggacacctatgacgccctgcacatgcaggccctgcctccaagaagggccaagcgatctggatctggagcaacaaacttctcactactcaaacaagcaggtgacgtggaggagaatcccgggcctactagtatggactggatttggcgcatccttttccttgtcggcgctgctaccggcgcgcattccttcgaagaagtgcagctggttgaatcaggtggcggcctggttcaacctggcggatctctgagactgagctgtgccgccagcggctacacctttaccgagtacacaatccactgggtccgacaggcccctggcaaaggacttgagtgggtcgccaacatcaaccccaacaatggcggcaccacctacaaccagaagttcgaggacagattcaccatcagccgggacaacagcaagaacaccctgtacctccagatgaactccctgagagccgaggacaccgccgtgtactattgtgccagaggctggaacttcgactactggggccagggaacactggtcaccgttagctctacgcgtatccagaaccctgatcctgccgtgtaccagctgcgggatagcaagagcagcgacaagagcgtgtgtctgttcaccgacttcgacagccagaccaacgtgtcccagagcaaggactccgacgtgtacatcaccgataagaccgtgctggacatgcggagcatggacttcaagagcaactccgccgtggcctggtccaacaagtccgatttcgcctgcgccaacgccttcaacaacagcattatccccgaggacacattcttcccaagccccgagagcagctgcggtacccagagttttgggttgttggaccctaaattgtgctatctgttggacggaatcctgttcatttacggagtgatcctgaccgcattgttcctgcgggttaagttttccagatccgcagacgcacccgcttaccaacaagggcagaaccaactctacaatgaacttaatttggggcggagggaagagtacgacgttctggacaaaaggaggggacgagatcccgagatgggcggaaagcctcagcgaaggaagaatccgcaagaggggctttataacgaactccagaaagataaaatggcagaagcctatagtgagattgggatgaagggagaaaggaggaggggtaaaggtcacgatgggttgtaccaaggattgagcacagccactaaagatacctatgatgcgctccacatgcaggccctgccgccaaga

SEQ ID NO: 9777 - DNA, 2436 bp, Artificial Sequence
  Synthetic Polynucloetide
atggccttaccagtgaccgccttgctcctgccgctggccttgctgctccacgccgccaggccggacatccagatgacacagagccctagcagcctgtctgccagcgtgggagacagagtgaccatcacatgcaaggccagccaggatgtgggcacagccgtggattggtatcagcagaagcctggcaaggcccctaagctgctgatctactgggccagcacaagacacacaggcgtgcccagcagattttctggcagcggctctggcaccgacttcaccctgacaatatccagcctccagcctgaggacttcgccacctactactgccagcagtacaacagctaccctctgaccttcggccagggcaccaaggtggaaatcaaaagactcgaggacctgaagaacgtgttcccacctgaggtggccgtgttcgagcctagcaaggccgagatcgcccacacccagaaagccaccctcgtgtgcctggctaccggcttctaccccgaccatgtggaactgtcttggtgggtcaacggcaaagaggtgcacagcggcgtgtgtaccgacccccagccactgaaagaacagcccgccctgaacgacagccggtactgcctgagcagcagactgagagtgtccgccaccttctggcagaacccccggaaccacttcagatgccaggtgcagttctacggcctgagcgagaacgacgagtggacccaggacagagccaagcccgtgacccagatcgtgtctgccgaagcctggggcagagccgattgcggatcccagagcttcggcctgctggaccccaagctgtgctacctgctggatggcatcctgttcatctacggcgtgatcctgaccgccctgttcctgagagtgaagttcagcagaagcgccgacgcccctgcctaccagcagggacagaaccaactgtacaacgagctgaacctgggcagacgggaagagtacgacgtgctggacaagcggagaggcagggaccctgagatgggcggaaagccccagcggagaaagaacccccaggaaggactgtataacgaactccagaaagacaagatggccgaagcctacagcgagatcggcatgaagggcgagcggagaagaggcaagggccacgatggcctgtaccagggcctgagcaccgccaccaaggacacctatgacgccctgcacatgcaggccctgcctccaagaagggccaagcgatctggatctggagcaacaaacttctcactactcaaacaagcaggtgacgtggaggagaatcccgggcctactagtatggactggatttggcgcatccttttccttgtcggcgctgctaccggcgcgcattccttcgaagaagtgcagctggttgaatcaggtggcggcctggttcaacctggcggatctctgagactgagctgtgccgccagcggctacacctttaccgagtacacaatccactgggtccgacaggcccctggcaaaggacttgagtgggtcgccaacatcaaccccaacaatggcggcaccacctacaaccagaagttcgaggacagattcaccatcagccgggacaacagcaagaacaccctgtacctccagatgaactccctgagagccgaggacaccgccgtgtactattgtgccagaggctggaacttcgactactggggccagggaacactggtcaccgttagctctacgcgtatccagaaccctgatcctgccgtgtaccagctgcgggatagcaagagcagcgacaagagcgtgtgtctgttcaccgacttcgacagccagaccaacgtgtcccagagcaaggactccgacgtgtacatcaccgataagtgcgtgctggacatgcggagcatggacttcaagagcaactccgccgtggcctggtccaacaagtccgatttcgcctgcgccaacgccttcaacaacagcattatccccgaggacacattcttcccaagcagcgacgtgccctgcggtacccagagttttgggttgttggaccctaaattgtgctatctgttggacggaatcctgttcatttacggagtgatcctgaccgcattgttcctgcgggttaagttttccagatccgcagacgcacccgcttaccaacaagggcagaaccaactctacaatgaacttaatttggggcggagggaagagtacgacgttctggacaaaaggaggggacgagatcccgagatgggcggaaagcctcagcgaaggaagaatccgcaagaggggctttataacgaactccagaaagataaaatggcagaagcctatagtgagattgggatgaagggagaaaggaggaggggtaaaggtcacgatgggttgtaccaaggattgagcacagccactaaagatacctatgatgcgctccacatgcaggccctgccgccaaga

SEQ ID NO: 9778 - DNA, 2649 bp, Artificial Sequence
  Synthetic Polynucloetide
atggccttaccagtgaccgccttgctcctgccgctggccttgctgctccacgccgccaggccggacatccagatgacacagagccctagcagcctgtctgccagcgtgggagacagagtgaccatcacatgcaaggccagccaggatgtgggcacagccgtggattggtatcagcagaagcctggcaaggcccctaagctgctgatctactgggccagcacaagacacacaggcgtgcccagcagattttctggcagcggctctggcaccgacttcaccctgacaatatccagcctccagcctgaggacttcgccacctactactgccagcagtacaacagctaccctctgaccttcggccagggcaccaaggtggaaatcaaaagactcgaggggaaaccaattcccaaccctcttctgggactggattcaaccggcagcggcgaggacctgaagaacgtgttcccacctgaggtggccgtgttcgagcctagcgaggccgagatcagccacacccagaaagccaccctcgtgtgcctggctaccggcttctaccccgaccatgtggaactgtcttggtgggtcaacggcaaagaggtgcacagcggcgtgtctaccgacccccagccactgaaagaacagcccgccctgaacgacagccggtactgcctgagcagcagactgagagtgtccgccaccttctggcagaacccccggaaccacttcagatgccaggtgcagttctacggcctgagcgagaacgacgagtggacccaggacagagccaagcccgtgacccagatcgtgtctgccgaagcctggggcagagccgattgcggatcccagagcttcggcctgctggaccccaagctgtgctacctgctggatggcatcctgttcatctacggcgtgatcctgaccgccctgttcctgagagtgaagttcagcagaagcgccgacgcccctgcctaccagcagggacagaaccaactgtacaacgagctgaacctgggcagacgggaagagtacgacgtgctggacaagcggagaggcagggaccctgagatgggcggaaagccccagcggagaaagaacccccaggaaggactgtataacgaactccagaaagacaagatggccgaagcctacagcgagatcggcatgaagggcgagcggagaagaggcaagggccacgatggcctgtaccagggcctgagcaccgccaccaaggacacctatgacgccctgcacatgcaggccctgcctccaagaagggccaagcgatctggatctggagcaacaaacttctcactactcaaacaagcaggtgacgtggaggagaatcccgggcctactagtatggactggatttggcgcatccttttccttgtcggcgctgctaccggcgcgcattccttcgaagaagtgcagctggttgaatcaggtggcggcctggttcaacctggcggatctctgagactgagctgtgccgccagcggctacacctttaccgagtacacaatccactgggtccgacaggcccctggcaaaggacttgagtgggtcgccaacatcaaccccaacaatggcggcaccacctacaaccagaagttcgaggacagattcaccatcagccgggacaacagcaagaacaccctgtacctccagatgaactccctgagagccgaggacaccgccgtgtactattgtgccagaggctggaacttcgactactggggccagggaacactggtcaccgttagctctacgcgtgagcagaaactgatctcggaagaggatgggagcggcatccagaaccctgatcctgccgtgtaccagctgcgggatagcaagagcagcgacaagagcgtgtgtctgttcaccgacttcgacagccagaccaacgtgtcccagagcaaggactccgacgtgtacatcaccgataagaccgtgctggacatgcggagcatggacttcaagagcaactccgccgtggcctggtccaacaagtccgatttcgcctgcgccaacgccttcaacaacagcattatccccgaggacacattcttcccaagccccgagagcagctgcggtacccagagttttgggttgttggaccctaaattgtgctatctgttggacggaatcctgttcatttacggagtgatcctgaccgcattgttcctgaggagcaagcggtcacggctgctccacagcgattacatgaatatgacaccacgaagaccgggtcctactcgcaaacactaccaaccctacgcacctccccgcgactttgcagcgtaccgatctcgggttaagttttccagatccgcagacgcacccgcttaccaacaagggcagaaccaactctacaatgaacttaatttggggcggagggaagagtacgacgttctggacaaaaggaggggacgagatcccgagatgggcggaaagcctcagcgaaggaagaatccgcaagaggggctttataacgaactccagaaagataaaatggcagaagcctatagtgagattgggatgaagggagaaaggaggaggggtaaaggtcacgatgggttgtaccaaggattgagcacagccactaaagatacctatgatgcgctccacatgcaggccctgccgccaaga

SEQ ID NO: 9779 - DNA, 2772 bp, Artificial Sequence
  Synthetic Polynucloetide
atggccttaccagtgaccgccttgctcctgccgctggccttgctgctccacgccgccaggccggacatccagatgacacagagccctagcagcctgtctgccagcgtgggagacagagtgaccatcacatgcaaggccagccaggatgtgggcacagccgtggattggtatcagcagaagcctggcaaggcccctaagctgctgatctactgggccagcacaagacacacaggcgtgcccagcagattttctggcagcggctctggcaccgacttcaccctgacaatatccagcctccagcctgaggacttcgccacctactactgccagcagtacaacagctaccctctgaccttcggccagggcaccaaggtggaaatcaaaagactcgaggggaaaccaattcccaaccctcttctgggactggattcaaccggcagcggcgaggacctgaagaacgtgttcccacctgaggtggccgtgttcgagcctagcgaggccgagatcagccacacccagaaagccaccctcgtgtgcctggctaccggcttctaccccgaccatgtggaactgtcttggtgggtcaacggcaaagaggtgcacagcggcgtgtctaccgacccccagccactgaaagaacagcccgccctgaacgacagccggtactgcctgagcagcagactgagagtgtccgccaccttctggcagaacccccggaaccacttcagatgccaggtgcagttctacggcctgagcgagaacgacgagtggacccaggacagagccaagcccgtgacccagatcgtgtctgccgaagcctggggcagagccgattgcggatcccagagcttcggcctgctggaccccaagctgtgctacctgctggatggcatcctgttcatctacggcgtgatcctgaccgccctgttcctgaggagtaagaggagcaggctcctgcacagtgactacatgaacatgactccacgccgccccggacccacccgcaagcattaccagccctatgccccaccacgcgacttcgcagcctatcgctccagagtgaagttcagcagaagcgccgacgcccctgcctaccagcagggacagaaccaactgtacaacgagctgaacctgggcagacgggaagagtacgacgtgctggacaagcggagaggcagggaccctgagatgggcggaaagccccagcggagaaagaacccccaggaaggactgtataacgaactccagaaagacaagatggccgaagcctacagcgagatcggcatgaagggcgagcggagaagaggcaagggccacgatggcctgtaccagggcctgagcaccgccaccaaggacacctatgacgccctgcacatgcaggccctgcctccaagaagggccaagcgatctggatctggagcaacaaacttctcactactcaaacaagcaggtgacgtggaggagaatcccgggcctactagtatggactggatttggcgcatccttttccttgtcggcgctgctaccggcgcgcattccttcgaagaagtgcagctggttgaatcaggtggcggcctggttcaacctggcggatctctgagactgagctgtgccgccagcggctacacctttaccgagtacacaatccactgggtccgacaggcccctggcaaaggacttgagtgggtcgccaacatcaaccccaacaatggcggcaccacctacaaccagaagttcgaggacagattcaccatcagccgggacaacagcaagaacaccctgtacctccagatgaactccctgagagccgaggacaccgccgtgtactattgtgccagaggctggaacttcgactactggggccagggaacactggtcaccgttagctctacgcgtgagcagaaactgatctcggaagaggatgggagcggcatccagaaccctgatcctgccgtgtaccagctgcgggatagcaagagcagcgacaagagcgtgtgtctgttcaccgacttcgacagccagaccaacgtgtcccagagcaaggactccgacgtgtacatcaccgataagaccgtgctggacatgcggagcatggacttcaagagcaactccgccgtggcctggtccaacaagtccgatttcgcctgcgccaacgccttcaacaacagcattatccccgaggacacattcttcccaagccccgagagcagctgcggtacccagagttttgggttgttggaccctaaattgtgctatctgttggacggaatcctgttcatttacggagtgatcctgaccgcattgttcctgaggagcaagcggtcacggctgctccacagcgattacatgaatatgacaccacgaagaccgggtcctactcgcaaacactaccaaccctacgcacctccccgcgactttgcagcgtaccgatctcgggttaagttttccagatccgcagacgcacccgcttaccaacaagggcagaaccaactctacaatgaacttaatttggggcggagggaagagtacgacgttctggacaaaaggaggggacgagatcccgagatgggcggaaagcctcagcgaaggaagaatccgcaagaggggctttataacgaactccagaaagataaaatggcagaagcctatagtgagattgggatgaagggagaaaggaggaggggtaaaggtcacgatgggttgtaccaaggattgagcacagccactaaagatacctatgatgcgctccacatgcaggccctgccgccaaga

SEQ ID NO: 9780 - DNA, 2655 bp, Artificial Sequence
  Synthetic Polynucloetide
atggccttaccagtgaccgccttgctcctgccgctggccttgctgctccacgccgccaggccggacatccagatgacacagagccctagcagcctgtctgccagcgtgggagacagagtgaccatcacatgcaaggccagccaggatgtgggcacagccgtggattggtatcagcagaagcctggcaaggcccctaagctgctgatctactgggccagcacaagacacacaggcgtgcccagcagattttctggcagcggctctggcaccgacttcaccctgacaatatccagcctccagcctgaggacttcgccacctactactgccagcagtacaacagctaccctctgaccttcggccagggcaccaaggtggaaatcaaaagactcgaggggaaaccaattcccaaccctcttctgggactggattcaaccggcagcggcgaggacctgaagaacgtgttcccacctgaggtggccgtgttcgagcctagcgaggccgagatcagccacacccagaaagccaccctcgtgtgcctggctaccggcttctaccccgaccatgtggaactgtcttggtgggtcaacggcaaagaggtgcacagcggcgtgtctaccgacccccagccactgaaagaacagcccgccctgaacgacagccggtactgcctgagcagcagactgagagtgtccgccaccttctggcagaacccccggaaccacttcagatgccaggtgcagttctacggcctgagcgagaacgacgagtggacccaggacagagccaagcccgtgacccagatcgtgtctgccgaagcctggggcagagccgattgcggatcccagagcttcggcctgctggaccccaagctgtgctacctgctggatggcatcctgttcatctacggcgtgatcctgaccgccctgttcctgagagtgaagttcagcagaagcgccgacgcccctgcctaccagcagggacagaaccaactgtacaacgagctgaacctgggcagacgggaagagtacgacgtgctggacaagcggagaggcagggaccctgagatgggcggaaagccccagcggagaaagaacccccaggaaggactgtataacgaactccagaaagacaagatggccgaagcctacagcgagatcggcatgaagggcgagcggagaagaggcaagggccacgatggcctgtaccagggcctgagcaccgccaccaaggacacctatgacgccctgcacatgcaggccctgcctccaagaagggccaagcgatctggatctggagcaacaaacttctcactactcaaacaagcaggtgacgtggaggagaatcccgggcctactagtatggactggatttggcgcatccttttccttgtcggcgctgctaccggcgcgcattccttcgaagaagtgcagctggttgaatcaggtggcggcctggttcaacctggcggatctctgagactgagctgtgccgccagcggctacacctttaccgagtacacaatccactgggtccgacaggcccctggcaaaggacttgagtgggtcgccaacatcaaccccaacaatggcggcaccacctacaaccagaagttcgaggacagattcaccatcagccgggacaacagcaagaacaccctgtacctccagatgaactccctgagagccgaggacaccgccgtgtactattgtgccagaggctggaacttcgactactggggccagggaacactggtcaccgttagctctacgcgtgagcagaaactgatctcggaagaggatctggggagcggcatccagaaccctgatcctgccgtgtaccagctgcgggatagcaagagcagcgacaagagcgtgtgtctgttcaccgacttcgacagccagaccaacgtgtcccagagcaaggactccgacgtgtacatcaccgataagaccgtgctggacatgcggagcatggacttcaagagcaactccgccgtggcctggtccaacaagtccgatttcgcctgcgccaacgccttcaacaacagcattatccccgaggacacattcttcccaagccccgagagcagctgcggtacccagagttttgggttgttggaccctaaattgtgctatctgttggacggaatcctgttcatttacggagtgatcctgaccgcattgttcctgaagagaggccggaagaagctgctgtacatcttcaagcagcctttcatgcggcccgtgcagaccacccaggaagaggacggctgctcctgccggttccccgaggaagaagaaggcggctgcgagctgcgggttaagttttccagatccgcagacgcacccgcttaccaacaagggcagaaccaactctacaatgaacttaatttggggcggagggaagagtacgacgttctggacaaaaggaggggacgagatcccgagatgggcggaaagcctcagcgaaggaagaatccgcaagaggggctttataacgaactccagaaagataaaatggcagaagcctatagtgagattgggatgaagggagaaaggaggaggggtaaaggtcacgatgggttgtaccaaggattgagcacagccactaaagatacctatgatgcgctccacatgcaggccctgccgccaaga

SEQ ID NO: 9781 - DNA, 2781 bp, Artificial Sequence
  Synthetic Polynucloetide
atggccttaccagtgaccgccttgctcctgccgctggccttgctgctccacgccgccaggccggacatccagatgacacagagccctagcagcctgtctgccagcgtgggagacagagtgaccatcacatgcaaggccagccaggatgtgggcacagccgtggattggtatcagcagaagcctggcaaggcccctaagctgctgatctactgggccagcacaagacacacaggcgtgcccagcagattttctggcagcggctctggcaccgacttcaccctgacaatatccagcctccagcctgaggacttcgccacctactactgccagcagtacaacagctaccctctgaccttcggccagggcaccaaggtggaaatcaaaagactcgaggggaaaccaattcccaaccctcttctgggactggattcaaccggcagcggcgaggacctgaagaacgtgttcccacctgaggtggccgtgttcgagcctagcgaggccgagatcagccacacccagaaagccaccctcgtgtgcctggctaccggcttctaccccgaccatgtggaactgtcttggtgggtcaacggcaaagaggtgcacagcggcgtgtctaccgacccccagccactgaaagaacagcccgccctgaacgacagccggtactgcctgagcagcagactgagagtgtccgccaccttctggcagaacccccggaaccacttcagatgccaggtgcagttctacggcctgagcgagaacgacgagtggacccaggacagagccaagcccgtgacccagatcgtgtctgccgaagcctggggcagagccgattgcggatcccagagcttcggcctgctggaccccaagctgtgctacctgctggatggcatcctgttcatctacggcgtgatcctgaccgccctgttcctgaaacggggcagaaagaaactcctgtatatattcaaacaaccatttatgagaccagtacaaactactcaagaggaagatggctgtagctgccgatttccagaagaagaagaaggaggatgtgaactgagagtgaagttcagcagaagcgccgacgcccctgcctaccagcagggacagaaccaactgtacaacgagctgaacctgggcagacgggaagagtacgacgtgctggacaagcggagaggcagggaccctgagatgggcggaaagccccagcggagaaagaacccccaggaaggactgtataacgaactccagaaagacaagatggccgaagcctacagcgagatcggcatgaagggcgagcggagaagaggcaagggccacgatggcctgtaccagggcctgagcaccgccaccaaggacacctatgacgccctgcacatgcaggccctgcctccaagaagggccaagcgatctggatctggagcaacaaacttctcactactcaaacaagcaggtgacgtggaggagaatcccgggcctactagtatggactggatttggcgcatccttttccttgtcggcgctgctaccggcgcgcattccttcgaagaagtgcagctggttgaatcaggtggcggcctggttcaacctggcggatctctgagactgagctgtgccgccagcggctacacctttaccgagtacacaatccactgggtccgacaggcccctggcaaaggacttgagtgggtcgccaacatcaaccccaacaatggcggcaccacctacaaccagaagttcgaggacagattcaccatcagccgggacaacagcaagaacaccctgtacctccagatgaactccctgagagccgaggacaccgccgtgtactattgtgccagaggctggaacttcgactactggggccagggaacactggtcaccgttagctctacgcgtgagcagaaactgatctcggaagaggatctggggagcggcatccagaaccctgatcctgccgtgtaccagctgcgggatagcaagagcagcgacaagagcgtgtgtctgttcaccgacttcgacagccagaccaacgtgtcccagagcaaggactccgacgtgtacatcaccgataagaccgtgctggacatgcggagcatggacttcaagagcaactccgccgtggcctggtccaacaagtccgatttcgcctgcgccaacgccttcaacaacagcattatccccgaggacacattcttcccaagccccgagagcagctgcggtacccagagttttgggttgttggaccctaaattgtgctatctgttggacggaatcctgttcatttacggagtgatcctgaccgcattgttcctgaagagaggccggaagaagctgctgtacatcttcaagcagcctttcatgcggcccgtgcagaccacccaggaagaggacggctgctcctgccggttccccgaggaagaagaaggcggctgcgagctgcgggttaagttttccagatccgcagacgcacccgcttaccaacaagggcagaaccaactctacaatgaacttaatttggggcggagggaagagtacgacgttctggacaaaaggaggggacgagatcccgagatgggcggaaagcctcagcgaaggaagaatccgcaagaggggctttataacgaactccagaaagataaaatggcagaagcctatagtgagattgggatgaagggagaaaggaggaggggtaaaggtcacgatgggttgtaccaaggattgagcacagccactaaagatacctatgatgcgctccacatgcaggccctgccgccaaga

SEQ ID NO: 9782 - DNA, 2454 bp, Artificial Sequence
  Synthetic Polynucloetide
atggccttaccagtgaccgccttgctcctgccgctggccttgctgctccacgccgccaggccggacatccagatgacacagagccctagcagcctgtctgccagcgtgggagacagagtgaccatcacatgcaaggccagccaggatgtgggcacagccgtggattggtatcagcagaagcctggcaaggcccctaagctgctgatctactgggccagcacaagacacacaggcgtgcccagcagattttctggcagcggctctggcaccgacttcaccctgacaatatccagcctccagcctgaggacttcgccacctactactgccagcagtacaacagctaccctctgaccttcggccagggcaccaaggtggaaatcaaaagactcgagcagagcttcggcctgctggaccccaagctgtgctacctgctggatggcatcctgttcatctacggcgtgatcctgaccgccctgttcctgagagtgaagttcagcagaagcgccgacgcccctgcctaccagcagggacagaaccaactgtacaacgagctgaacctgggcagacgggaagagtacgacgtgctggacaagcggagaggcagggaccctgagatgggcggaaagccccagcggagaaagaacccccaggaaggactgtataacgaactccagaaagacaagatggccgaagcctacagcgagatcggcatgaagggcgagcggagaagaggcaagggccacgatggcctgtaccagggcctgagcaccgccaccaaggacacctatgacgccctgcacatgcaggccctgcctccaagaagggccaagcgatctggatctggagcaacaaacttctcactactcaaacaagcaggtgacgtggaggagaatcccgggcctactagtatggactggatttggcgcatccttttccttgtcggcgctgctaccggcgcgcattccttcgaagaagtgcagctggttgaatcaggtggcggcctggttcaacctggcggatctctgagactgagctgtgccgccagcggctacacctttaccgagtacacaatccactgggtccgacaggcccctggcaaaggacttgagtgggtcgccaacatcaaccccaacaatggcggcaccacctacaaccagaagttcgaggacagattcaccatcagccgggacaacagcaagaacaccctgtacctccagatgaactccctgagagccgaggacaccgccgtgtactattgtgccagaggctggaacttcgactactggggccagggaacactggtcaccgttagctctacgcgtcagagttttgggttgttggaccctaaattgtgctatctgttggacggaatcctgttcatttacggagtgatcctgaccgcattgttcctgcgggttaagttttccagatccgcagacgcacccgcttaccaacaagggcagaaccaactctacaatgaacttaatttggggcggagggaagagtacgacgttctggacaaaaggaggggacgagatcccgagatgggcggaaagcctcagcgaaggaagaatccgcaagaggggctttataacgaactccagaaagataaaatggcagaagcctatagtgagattgggatgaagggagaaaggaggaggggtaaaggtcacgatgggttgtaccaaggattgagcacagccactaaagatacctatgatgcgctccacatgcaggccctgccgccaagacgcgccaagagaagcggatctggcgtgaagcagaccctgaatttcgacctgctgaagctggctggcgacgtggaatccaacccaggcccttctagaggccatatgaccgagtacaagcccacggtgcgcctcgccacccgcgacgacgtccccagggccgtacgcaccctcgccgccgcgttcgccgactaccccgccacgcgccacaccgtcgatccggaccgccacatcgagcgggtcaccgagctgcaagaactcttcctcacgcgcgtcgggctcgacatcggcaaggtgtgggtcgcggacgacggcgccgcggtggcggtctggaccacgccggagagcgtcgaagcgggggcggtgttcgccgagatcggcccgcgcatggccgagttgagcggttcccggctggccgcgcagcaacagatggaaggcctcctggcgccgcaccggcccaaggagcccgcgtggttcctggccaccgtcggcgtctcgcccgaccaccagggcaagggtctgggcagcgccgtcgtgctccccggagtggaggcggccgagcgcgccggggtgcccgccttcctggagacctccgcgccccgcaacctccccttctacgagcggctcggcttcaccgtcaccgccgacgtcgaggtgcccgaaggaccgcgcacctggtgcatgacccgcaagcccggtgcctga

SEQ ID NO: 9783 - DNA, 1926 bp, Artificial Sequence
  Synthetic Polynucloetide
atggccttaccagtgaccgccttgctcctgccgctggccttgctgctccacgccgccaggccggacatccagatgacacagagccctagcagcctgtctgccagcgtgggagacagagtgaccatcacatgcaaggccagccaggatgtgggcacagccgtggattggtatcagcagaagcctggcaaggcccctaagctgctgatctactgggccagcacaagacacacaggcgtgcccagcagattttctggcagcggctctggcaccgacttcaccctgacaatatccagcctccagcctgaggacttcgccacctactactgccagcagtacaacagctaccctctgaccttcggccagggcaccaaggtggaaatcaaaagactcgagggacagcctaaggccaatcctaccgtgacactgttccctccaagcagcgaagaactccaggccaacaaggccacacttgtgtgcctgatctccgacttctaccctggggctgtgacagtggcttggaaggccgatggatctcctgtgaaagccggcgtggaaaccaccaagccatccaagcagagcaacaacaaatacgccgccagctcctacctgagcctgacacctgagcagtggaagtcccacagatcctacagctgccaagtgacccacgaaggcagcaccgtggaaaagacagtggcccctacagagtgcagccccatcaagaccgatgtgattacaatggaccccaaggacaactgctccaaggacgccaacgataccctgctgctccagctgaccaacaccagcgcctactacatgtacttgttgctgctgctgaagtccgtggtgtacttcgccatcatcacatgctgcctgctgcggagaaccgccttctgctgcaacggcgagaagtctagggccaagcgatctggatctggagcaacaaacttctcactactcaaacaagcaggtgacgtggaggagaatcccgggcctactagtatggactggatttggcgcatccttttccttgtcggcgctgctaccggcgcgcattccttcgaagaagtgcagctggttgaatcaggtggcggcctggttcaacctggcggatctctgagactgagctgtgccgccagcggctacacctttaccgagtacacaatccactgggtccgacaggcccctggcaaaggacttgagtgggtcgccaacatcaaccccaacaatggcggcaccacctacaaccagaagttcgaggacagattcaccatcagccgggacaacagcaagaacaccctgtacctccagatgaactccctgagagccgaggacaccgccgtgtactattgtgccagaggctggaacttcgactactggggccagggaacactggtcaccgttagctctacgcgtgcctctacaaagggaccctccgtgtttcctctggctcccagcagcaagtctacaagcggaggaacagccgctctgggctgcctggtcaaggattactttcccgagcctgtgaccgtgtcctggaatagcggagcactgacaagcggcgtgcacacctttccagccgtgctgcaaagcagcggcctgtactctctgagcagcgtggtcacagtgcctagctctagcctgggcacccagacctacatctgcaatgtgaaccacaagcctagcaacaccaaggtggacaagagagtggaacccaagagctgtgaagtgaaaaccgactccaccgaccacgtgaagcccaaagagacagagaacaccaagcagcccagcaagagctgccacaagcccaaggccatcgtgcacaccgagaaagtgaacatgatgagcctgaccgtgctgggcctgcggatgctgttcgccaaaaccgtggccgtgaacttcctgctgaccgccaagctgttcttcctc

SEQ ID NO: 9784 - DNA, 1860 bp, Artificial Sequence
  Synthetic Polynucloetide
atggccttaccagtgaccgccttgctcctgccgctggccttgctgctccacgccgccaggccggacatccagatgacacagagccctagcagcctgtctgccagcgtgggagacagagtgaccatcacatgcaaggccagccaggatgtgggcacagccgtggattggtatcagcagaagcctggcaaggcccctaagctgctgatctactgggccagcacaagacacacaggcgtgcccagcagattttctggcagcggctctggcaccgacttcaccctgacaatatccagcctccagcctgaggacttcgccacctactactgccagcagtacaacagctaccctctgaccttcggccagggcaccaaggtggaaatcaaaagactcgagggacagcctaaggccaatcctaccgtgacactgttccctccaagcagcgaagaactccaggccaacaaggccacacttgtgtgcctgatctccgacttctaccctggggctgtgacagtggcttggaaggccgatggatctcctgtgaaagccggcgtggaaaccaccaagccatccaagcagagcaacaacaaatacgccgccagctcctacctgagcctgacacctgagcagtggaagtcccacagatcctacagctgccaagtgacccacgaaggcagcaccgtggaaaagacagtggcccctacagagtgcagcggcagagccgattgcggcatcaccagcgccagctaccaccagggcgtgctgagcgccaccatcctgtacgagatcctgctgggcaaggccaccctgtacgccgtgctggtgtctgccctggtgctgatggctatggtcaagcggaaggacagccggggaagggccaagcgatctggatctggagcaacaaacttctcactactcaaacaagcaggtgacgtggaggagaatcccgggcctactagtatggactggatttggcgcatccttttccttgtcggcgctgctaccggcgcgcattccttcgaagaagtgcagctggttgaatcaggtggcggcctggttcaacctggcggatctctgagactgagctgtgccgccagcggctacacctttaccgagtacacaatccactgggtccgacaggcccctggcaaaggacttgagtgggtcgccaacatcaaccccaacaatggcggcaccacctacaaccagaagttcgaggacagattcaccatcagccgggacaacagcaagaacaccctgtacctccagatgaactccctgagagccgaggacaccgccgtgtactattgtgccagaggctggaacttcgactactggggccagggaacactggtcaccgttagctctacgcgtgcctctacaaagggaccctccgtgtttcctctggctcccagcagcaagtctacaagcggaggaacagccgctctgggctgcctggtcaaggattactttcccgagcctgtgaccgtgtcctggaatagcggagcactgacaagcggcgtgcacacctttccagccgtgctgcaaagcagcggcctgtactctctgagcagcgtggtcacagtgcctagctctagcctgggcacccagacctacatctgcaatgtgaaccacaagcctagcaacaccaaggtggacaagagagtggaacccaagagctgtatccccgaggacacattcttcccaagcagcgacgtgccctgcgacgtgaagctggtggaaaagagcttcgagacagacaccaacctgaacttccagaacctgagcgtgatcggcttcagaatcctgctgctgaaagtggccggctttaacctgctgatgaccctgcggctgtggtccagc

SEQ ID NO: 9785 - DNA, 1860 bp, Artificial Sequence
  Synthetic Polynucloetide
atggccttaccagtgaccgccttgctcctgccgctggccttgctgctccacgccgccaggccggacatccagatgacacagagccctagcagcctgtctgccagcgtgggagacagagtgaccatcacatgcaaggccagccaggatgtgggcacagccgtggattggtatcagcagaagcctggcaaggcccctaagctgctgatctactgggccagcacaagacacacaggcgtgcccagcagattttctggcagcggctctggcaccgacttcaccctgacaatatccagcctccagcctgaggacttcgccacctactactgccagcagtacaacagctaccctctgaccttcggccagggcaccaaggtggaaatcaaaagactcgagggacagcctaaggccaatcctaccgtgacactgttccctccaagcagcgaagaactccaggccaacaaggccacacttgtgtgcctgatctccgacttctaccctggggctgtgacagtggcttggaaggccgatggatctcctgtgaaagccggcgtggaaaccaccaagccatccaagcagagcaacaacaaatacgccgccagctcctacctgagcctgacacctgagcagtggaagtcccacagatcctacagctgccaagtgacccacgaaggcagcaccgtggaaaagacagtggcccctacagagtgcagcggcagagccgattgcggctttaccagcgagagctaccagcagggcgtgctgagcgccaccatcctgtacgagatcctgctgggcaaggccaccctgtacgccgtgctggtgtctgccctggtgctgatggctatggtcaagcggaaggacagccggggaagggccaagcgatctggatctggagcaacaaacttctcactactcaaacaagcaggtgacgtggaggagaatcccgggcctactagtatggactggatttggcgcatccttttccttgtcggcgctgctaccggcgcgcattccttcgaagaagtgcagctggttgaatcaggtggcggcctggttcaacctggcggatctctgagactgagctgtgccgccagcggctacacctttaccgagtacacaatccactgggtccgacaggcccctggcaaaggacttgagtgggtcgccaacatcaaccccaacaatggcggcaccacctacaaccagaagttcgaggacagattcaccatcagccgggacaacagcaagaacaccctgtacctccagatgaactccctgagagccgaggacaccgccgtgtactattgtgccagaggctggaacttcgactactggggccagggaacactggtcaccgttagctctacgcgtgcctctacaaagggaccctccgtgtttcctctggctcccagcagcaagtctacaagcggaggaacagccgctctgggctgcctggtcaaggattactttcccgagcctgtgaccgtgtcctggaatagcggagcactgacaagcggcgtgcacacctttccagccgtgctgcaaagcagcggcctgtactctctgagcagcgtggtcacagtgcctagctctagcctgggcacccagacctacatctgcaatgtgaaccacaagcctagcaacaccaaggtggacaagagagtggaacccaagagctgtatccccgaggacacattcttcccaagccccgagagcagctgcgacgtgaagctggtggaaaagagcttcgagacagacaccaacctgaacttccagaacctgagcgtgatcggcttcagaatcctgctgctgaaagtggccggctttaacctgctgatgaccctgcggctgtggtccagc

SEQ ID NO: 9786 - DNA, 1338 bp, Artificial Sequence
  Synthetic Polynucloetide
atggccttaccagtgaccgccttgctcctgccgctggccttgctgctccacgccgccaggccggacatccagatgacacagagccctagcagcctgtctgccagcgtgggagacagagtgaccatcacatgcaaggccagccaggatgtgggcacagccgtggattggtatcagcagaagcctggcaaggcccctaagctgctgatctactgggccagcacaagacacacaggcgtgcccagcagattttctggcagcggctctggcaccgacttcaccctgacaatatccagcctccagcctgaggacttcgccacctactactgccagcagtacaacagctaccctctgaccttcggccagggcaccaaggtggaaatcaaaagaggcggaggcggaagtggaggcggaggatctggcggcggaggctctgaagtgcagctggttgaatcaggtggcggcctggttcaacctggcggatctctgagactgagctgtgccgccagcggctacacctttaccgagtacacaatccactgggtccgacaggcccctggcaaaggacttgagtgggtcgccaacatcaaccccaacaatggcggcaccacctacaaccagaagttcgaggacagattcaccatcagccgggacaacagcaagaacaccctgtacctccagatgaactccctgagagccgaggacaccgccgtgtactattgtgccagaggctggaacttcgactactggggccagggaacactggtcaccgttagctctacgcgtgacggtaacgaggagatgggaggaatcactcaaaccccttacaaagtctcaatttcaggaacaactgttatccttacatgtccccagtatcctggcagcgagatcctttggcagcataacgacaagaatatagggggagatgaagacgataagaatatcggatctgacgaggatcacttgagcctgaaagagttctccgagcttgaacaaagcggatattatgtgtgctatccgcgcgggtcaaagccggaagacgctaacttttacctttatctccgagccagagtgtgcgaaaattgcatggaaatggacgttatgtccgttgctacaatagttatcgtagatatatgcatcacgggtggactgcttctgctggtttattattggtccaagaatagaaaggccaaagctaaacccgtgaccagaggcgctggcgcaggcggaaggcaaaggggacaaaacaaagaacggccaccaccagtgccaaatccagattatgagcctattcggaaaggacagagggacctgtactctggcctgaatcagagaagaatc

SEQ ID NO: 9787 - DNA, 1233 bp, Artificial Sequence
  Synthetic Polynucloetide
atggccttaccagtgaccgccttgctcctgccgctggccttgctgctccacgccgccaggccggacatccagatgacacagagccctagcagcctgtctgccagcgtgggagacagagtgaccatcacatgcaaggccagccaggatgtgggcacagccgtggattggtatcagcagaagcctggcaaggcccctaagctgctgatctactgggccagcacaagacacacaggcgtgcccagcagattttctggcagcggctctggcaccgacttcaccctgacaatatccagcctccagcctgaggacttcgccacctactactgccagcagtacaacagctaccctctgaccttcggccagggcaccaaggtggaaatcaaaagaggcggaggcggaagtggaggcggaggatctggcggcggaggctctgaagtgcagctggttgaatcaggtggcggcctggttcaacctggcggatctctgagactgagctgtgccgccagcggctacacctttaccgagtacacaatccactgggtccgacaggcccctggcaaaggacttgagtgggtcgccaacatcaaccccaacaatggcggcaccacctacaaccagaagttcgaggacagattcaccatcagccgggacaacagcaagaacaccctgtacctccagatgaactccctgagagccgaggacaccgccgtgtactattgtgccagaggctggaacttcgactactggggccagggaacactggtcaccgttagctctacgcgtttcaagatccccatcgaggaactggaagatcgggtgttcgtgaactgcaacacctctatcacctgggtggaaggcaccgtgggaacactgctgagcgacatcaccagactggacctcggcaagcggattctggaccctcggggcatctacagatgcaacggcaccgacatctacaaggacaaagaaagcaccgtgcaggtccactacagaatgtgccagtcctgcgtggaactggaccctgctacagtggccggcatcatcgtgaccgatgtgatcgctactctgctgctggctctgggagtgttctgcttcgccggacacgaaacaggcagactgtctggcgctgccgatacacaggccctgctgagaaacgaccaagtgtatcagcccctgcgcgacagagatgatgcccagtattctcacctcggcggcaactgggctagaaacaag

SEQ ID NO: 9788 - DNA, 1263 bp, Artificial Sequence
  Synthetic Polynucloetide
atggccttaccagtgaccgccttgctcctgccgctggccttgctgctccacgccgccaggccggacatccagatgacacagagccctagcagcctgtctgccagcgtgggagacagagtgaccatcacatgcaaggccagccaggatgtgggcacagccgtggattggtatcagcagaagcctggcaaggcccctaagctgctgatctactgggccagcacaagacacacaggcgtgcccagcagattttctggcagcggctctggcaccgacttcaccctgacaatatccagcctccagcctgaggacttcgccacctactactgccagcagtacaacagctaccctctgaccttcggccagggcaccaaggtggaaatcaaaagaggcggaggcggaagtggaggcggaggatctggcggcggaggctctgaagtgcagctggttgaatcaggtggcggcctggttcaacctggcggatctctgagactgagctgtgccgccagcggctacacctttaccgagtacacaatccactgggtccgacaggcccctggcaaaggacttgagtgggtcgccaacatcaaccccaacaatggcggcaccacctacaaccagaagttcgaggacagattcaccatcagccgggacaacagcaagaacaccctgtacctccagatgaactccctgagagccgaggacaccgccgtgtactattgtgccagaggctggaacttcgactactggggccagggaacactggtcaccgttagctctacgcgtcagagcatcaagggcaaccacctggtcaaggtgtacgactaccaagaggacggcagcgtgctgctgacatgtgatgccgaggccaagaacatcacctggtttaaggacggcaagatgatcggcttcctgaccgaggacaagaagaagtggaacctgggcagcaacgctaaggaccccagaggcatgtatcagtgcaagggcagccagaacaagagcaagcccctccaggtgtactaccggatgtgccagaactgcatcgagctgaacgccgctaccatcagcggctttctgttcgccgagatcgtgtccatcttcgtgctggccgtgggcgtgtactttatcgctggacaggatggcgtgcggcagagcagagcttccgataagcaaaccctgctgcctaacgaccagctgtaccagcctctgaaggacagagaggacgaccagtacagccacctccagggcaatcagctgagaagaaac

SEQ ID NO: 9789 - DNA, 1212 bp, Artificial Sequence
  Synthetic Polynucloetide
atggccttaccagtgaccgccttgctcctgccgctggccttgctgctccacgccgccaggccggacatccagatgacacagagccctagcagcctgtctgccagcgtgggagacagagtgaccatcacatgcaaggccagccaggatgtgggcacagccgtggattggtatcagcagaagcctggcaaggcccctaagctgctgatctactgggccagcacaagacacacaggcgtgcccagcagattttctggcagcggctctggcaccgacttcaccctgacaatatccagcctccagcctgaggacttcgccacctactactgccagcagtacaacagctaccctctgaccttcggccagggcaccaaggtggaaatcaaaagaggcggaggcggaagtggaggcggaggatctggcggcggaggctctgaagtgcagctggttgaatcaggtggcggcctggttcaacctggcggatctctgagactgagctgtgccgccagcggctacacctttaccgagtacacaatccactgggtccgacaggcccctggcaaaggacttgagtgggtcgccaacatcaaccccaacaatggcggcaccacctacaaccagaagttcgaggacagattcaccatcagccgggacaacagcaagaacaccctgtacctccagatgaactccctgagagccgaggacaccgccgtgtactattgtgccagaggctggaacttcgactactggggccagggaacactggtcaccgttagctctacgcgtcagagttttgggttgttggaccctaaattgtgctatctgttggacggaatcctgttcatttacggagtgatcctgaccgcattgttcctgcgggttaagttttccagatccgcagacgcacccgcttaccaacaagggcagaaccaactctacaatgaacttaatttggggcggagggaagagtacgacgttctggacaaaaggaggggacgagatcccgagatgggcggaaagcctcagcgaaggaagaatccgcaagaggggctttataacgaactccagaaagataaaatggcagaagcctatagtgagattgggatgaagggagaaaggaggaggggtaaaggtcacgatgggttgtaccaaggattgagcacagccactaaagatacctatgatgcgctccacatgcaggccctgccgccaaga

SEQ ID NO: 9790 - DNA, 1338 bp, Artificial Sequence
  Synthetic Polynucloetide
atggccttaccagtgaccgccttgctcctgccgctggccttgctgctccacgccgccaggccggaagtgcagctggttgaatcaggtggcggcctggttcaacctggcggatctctgagactgagctgtgccgccagcggctacacctttaccgagtacacaatccactgggtccgacaggcccctggcaaaggacttgagtgggtcgccaacatcaaccccaacaatggcggcaccacctacaaccagaagttcgaggacagattcaccatcagccgggacaacagcaagaacaccctgtacctccagatgaactccctgagagccgaggacaccgccgtgtactattgtgccagaggctggaacttcgactactggggccagggaacactggtcaccgttagctctggcggaggcggaagtggaggcggaggatctggcggcggaggctctgacatccagatgacacagagccctagcagcctgtctgccagcgtgggagacagagtgaccatcacatgcaaggccagccaggatgtgggcacagccgtggattggtatcagcagaagcctggcaaggcccctaagctgctgatctactgggccagcacaagacacacaggcgtgcccagcagattttctggcagcggctctggcaccgacttcaccctgacaatatccagcctccagcctgaggacttcgccacctactactgccagcagtacaacagctaccctctgaccttcggccagggcaccaaggtggaaatcaaaagaacgcgtgacggtaacgaggagatgggaggaatcactcaaaccccttacaaagtctcaatttcaggaacaactgttatccttacatgtccccagtatcctggcagcgagatcctttggcagcataacgacaagaatatagggggagatgaagacgataagaatatcggatctgacgaggatcacttgagcctgaaagagttctccgagcttgaacaaagcggatattatgtgtgctatccgcgcgggtcaaagccggaagacgctaacttttacctttatctccgagccagagtgtgcgaaaattgcatggaaatggacgttatgtccgttgctacaatagttatcgtagatatatgcatcacgggtggactgcttctgctggtttattattggtccaagaatagaaaggccaaagctaaacccgtgaccagaggcgctggcgcaggcggaaggcaaaggggacaaaacaaagaacggccaccaccagtgccaaatccagattatgagcctattcggaaaggacagagggacctgtactctggcctgaatcagagaagaatc

SEQ ID NO: 9791 - DNA, 1233 bp, Artificial Sequence
  Synthetic Polynucloetide
atggccttaccagtgaccgccttgctcctgccgctggccttgctgctccacgccgccaggccggaagtgcagctggttgaatcaggtggcggcctggttcaacctggcggatctctgagactgagctgtgccgccagcggctacacctttaccgagtacacaatccactgggtccgacaggcccctggcaaaggacttgagtgggtcgccaacatcaaccccaacaatggcggcaccacctacaaccagaagttcgaggacagattcaccatcagccgggacaacagcaagaacaccctgtacctccagatgaactccctgagagccgaggacaccgccgtgtactattgtgccagaggctggaacttcgactactggggccagggaacactggtcaccgttagctctggcggaggcggaagtggaggcggaggatctggcggcggaggctctgacatccagatgacacagagccctagcagcctgtctgccagcgtgggagacagagtgaccatcacatgcaaggccagccaggatgtgggcacagccgtggattggtatcagcagaagcctggcaaggcccctaagctgctgatctactgggccagcacaagacacacaggcgtgcccagcagattttctggcagcggctctggcaccgacttcaccctgacaatatccagcctccagcctgaggacttcgccacctactactgccagcagtacaacagctaccctctgaccttcggccagggcaccaaggtggaaatcaaaagaacgcgtttcaagatccccatcgaggaactggaagatcgggtgttcgtgaactgcaacacctctatcacctgggtggaaggcaccgtgggaacactgctgagcgacatcaccagactggacctcggcaagcggattctggaccctcggggcatctacagatgcaacggcaccgacatctacaaggacaaagaaagcaccgtgcaggtccactacagaatgtgccagtcctgcgtggaactggaccctgctacagtggccggcatcatcgtgaccgatgtgatcgctactctgctgctggctctgggagtgttctgcttcgccggacacgaaacaggcagactgtctggcgctgccgatacacaggccctgctgagaaacgaccaagtgtatcagcccctgcgcgacagagatgatgcccagtattctcacctcggcggcaactgggctagaaacaag

SEQ ID NO: 9792 - DNA, 1263 bp, Artificial Sequence
  Synthetic Polynucloetide
atggccttaccagtgaccgccttgctcctgccgctggccttgctgctccacgccgccaggccggaagtgcagctggttgaatcaggtggcggcctggttcaacctggcggatctctgagactgagctgtgccgccagcggctacacctttaccgagtacacaatccactgggtccgacaggcccctggcaaaggacttgagtgggtcgccaacatcaaccccaacaatggcggcaccacctacaaccagaagttcgaggacagattcaccatcagccgggacaacagcaagaacaccctgtacctccagatgaactccctgagagccgaggacaccgccgtgtactattgtgccagaggctggaacttcgactactggggccagggaacactggtcaccgttagctctggcggaggcggaagtggaggcggaggatctggcggcggaggctctgacatccagatgacacagagccctagcagcctgtctgccagcgtgggagacagagtgaccatcacatgcaaggccagccaggatgtgggcacagccgtggattggtatcagcagaagcctggcaaggcccctaagctgctgatctactgggccagcacaagacacacaggcgtgcccagcagattttctggcagcggctctggcaccgacttcaccctgacaatatccagcctccagcctgaggacttcgccacctactactgccagcagtacaacagctaccctctgaccttcggccagggcaccaaggtggaaatcaaaagaacgcgtcagagcatcaagggcaaccacctggtcaaggtgtacgactaccaagaggacggcagcgtgctgctgacatgtgatgccgaggccaagaacatcacctggtttaaggacggcaagatgatcggcttcctgaccgaggacaagaagaagtggaacctgggcagcaacgctaaggaccccagaggcatgtatcagtgcaagggcagccagaacaagagcaagcccctccaggtgtactaccggatgtgccagaactgcatcgagctgaacgccgctaccatcagcggctttctgttcgccgagatcgtgtccatcttcgtgctggccgtgggcgtgtactttatcgctggacaggatggcgtgcggcagagcagagcttccgataagcaaaccctgctgcctaacgaccagctgtaccagcctctgaaggacagagaggacgaccagtacagccacctccagggcaatcagctgagaagaaac

SEQ ID NO: 9793 - DNA, 1212 bp, Artificial Sequence
  Synthetic Polynucloetide
atggccttaccagtgaccgccttgctcctgccgctggccttgctgctccacgccgccaggccggaagtgcagctggttgaatcaggtggcggcctggttcaacctggcggatctctgagactgagctgtgccgccagcggctacacctttaccgagtacacaatccactgggtccgacaggcccctggcaaaggacttgagtgggtcgccaacatcaaccccaacaatggcggcaccacctacaaccagaagttcgaggacagattcaccatcagccgggacaacagcaagaacaccctgtacctccagatgaactccctgagagccgaggacaccgccgtgtactattgtgccagaggctggaacttcgactactggggccagggaacactggtcaccgttagctctggcggaggcggaagtggaggcggaggatctggcggcggaggctctgacatccagatgacacagagccctagcagcctgtctgccagcgtgggagacagagtgaccatcacatgcaaggccagccaggatgtgggcacagccgtggattggtatcagcagaagcctggcaaggcccctaagctgctgatctactgggccagcacaagacacacaggcgtgcccagcagattttctggcagcggctctggcaccgacttcaccctgacaatatccagcctccagcctgaggacttcgccacctactactgccagcagtacaacagctaccctctgaccttcggccagggcaccaaggtggaaatcaaaagaacgcgtcagagttttgggttgttggaccctaaattgtgctatctgttggacggaatcctgttcatttacggagtgatcctgaccgcattgttcctgcgggttaagttttccagatccgcagacgcacccgcttaccaacaagggcagaaccaactctacaatgaacttaatttggggcggagggaagagtacgacgttctggacaaaaggaggggacgagatcccgagatgggcggaaagcctcagcgaaggaagaatccgcaagaggggctttataacgaactccagaaagataaaatggcagaagcctatagtgagattgggatgaagggagaaaggaggaggggtaaaggtcacgatgggttgtaccaaggattgagcacagccactaaagatacctatgatgcgctccacatgcaggccctgccgccaaga

SEQ ID NO: 9794 - DNA, 1914 bp, Artificial Sequence
  Synthetic Polynucloetide
atggccttaccagtgaccgccttgctcctgccgctggccttgctgctccacgccgccaggccggacatccagatgacacagagccctagcagcctgtctgccagcgtgggagacagagtgaccatcacatgcaaggccagccaggatgtgggcacagccgtggattggtatcagcagaagcctggcaaggcccctaagctgctgatctactgggccagcacaagacacacaggcgtgcccagcagattttctggcagcggctctggcaccgacttcaccctgacaatatccagcctccagcctgaggacttcgccacctactactgccagcagtacaacagctaccctctgaccttcggccagggcaccaaggtggaaatcaaaagaggcggaggcggaagtggaggcggaggatctggcggcggaggctctgaagtgcagctggttgaatcaggtggcggcctggttcaacctggcggatctctgagactgagctgtgccgccagcggctacacctttaccgagtacacaatccactgggtccgacaggcccctggcaaaggacttgagtgggtcgccaacatcaaccccaacaatggcggcaccacctacaaccagaagttcgaggacagattcaccatcagccgggacaacagcaagaacaccctgtacctccagatgaactccctgagagccgaggacaccgccgtgtactattgtgccagaggctggaacttcgactactggggccagggaacactggtcaccgttagctctacgcgtgggagcggcatccagaaccctgatcctgccgtgtaccagctgcgggatagcaagagcagcgacaagagcgtgtgtctgttcaccgacttcgacagccagaccaacgtgtcccagagcaaggactccgacgtgtacatcaccgataagaccgtgctggacatgcggagcatggacttcaagagcaactccgccgtggcctggtccaacaagtccgatttcgcctgcgccaacgccttcaacaacagcattatccccgaggacacattcttcccaagccccgagagcagctgcgacgtgaagctggtggaaaagagcttcgagacagacaccaacctgaacttccagaacctgagcgtgatcggcttcagaatcctgctgctgaaagtggccggctttaacctgctgatgaccctgcggctgtggtccagccgcgccaagagaagcggatctggcgtgaagcagaccctgaatttcgacctgctgaagctggctggcgacgtggaatccaacccaggcccttctagaggccatatgaccgagtacaagcccacggtgcgcctcgccacccgcgacgacgtccccagggccgtacgcaccctcgccgccgcgttcgccgactaccccgccacgcgccacaccgtcgatccggaccgccacatcgagcgggtcaccgagctgcaagaactcttcctcacgcgcgtcgggctcgacatcggcaaggtgtgggtcgcggacgacggcgccgcggtggcggtctggaccacgccggagagcgtcgaagcgggggcggtgttcgccgagatcggcccgcgcatggccgagttgagcggttcccggctggccgcgcagcaacagatggaaggcctcctggcgccgcaccggcccaaggagcccgcgtggttcctggccaccgtcggcgtctcgcccgaccaccagggcaagggtctgggcagcgccgtcgtgctccccggagtggaggcggccgagcgcgccggggtgcccgccttcctggagacctccgcgccccgcaacctccccttctacgagcggctcggcttcaccgtcaccgccgacgtcgaggtgcccgaaggaccgcgcacctggtgcatgacccgcaagcccggtgcctga

SEQ ID NO: 9795 - DNA, 2010 bp, Artificial Sequence
  Synthetic Polynucloetide
atggccttaccagtgaccgccttgctcctgccgctggccttgctgctccacgccgccaggccggacatccagatgacacagagccctagcagcctgtctgccagcgtgggagacagagtgaccatcacatgcaaggccagccaggatgtgggcacagccgtggattggtatcagcagaagcctggcaaggcccctaagctgctgatctactgggccagcacaagacacacaggcgtgcccagcagattttctggcagcggctctggcaccgacttcaccctgacaatatccagcctccagcctgaggacttcgccacctactactgccagcagtacaacagctaccctctgaccttcggccagggcaccaaggtggaaatcaaaagaggcggaggcggaagtggaggcggaggatctggcggcggaggctctgaagtgcagctggttgaatcaggtggcggcctggttcaacctggcggatctctgagactgagctgtgccgccagcggctacacctttaccgagtacacaatccactgggtccgacaggcccctggcaaaggacttgagtgggtcgccaacatcaaccccaacaatggcggcaccacctacaaccagaagttcgaggacagattcaccatcagccgggacaacagcaagaacaccctgtacctccagatgaactccctgagagccgaggacaccgccgtgtactattgtgccagaggctggaacttcgactactggggccagggaacactggtcaccgttagctctctcgaggacctgaagaacgtgttcccacctgaggtggccgtgttcgagcctagcgaggccgagatcagccacacccagaaagccaccctcgtgtgcctggctaccggcttctaccccgaccatgtggaactgtcttggtgggtcaacggcaaagaggtgcacagcggcgtgtctaccgacccccagccactgaaagaacagcccgccctgaacgacagccggtactgcctgagcagcagactgagagtgtccgccaccttctggcagaacccccggaaccacttcagatgccaggtgcagttctacggcctgagcgagaacgacgagtggacccaggacagagccaagcccgtgacccagatcgtgtctgccgaagcctggggcagagccgattgcggctttaccagcgagagctaccagcagggcgtgctgagcgccaccatcctgtacgagatcctgctgggcaaggccaccctgtacgccgtgctggtgtctgccctggtgctgatggctatggtcaagcggaaggacagccggggaagggccaagcgatctggatctggagcaacaaacttctcactactcaaacaagcaggtgacgtggaggagaatcccgggcctactagaggccatatgaccgagtacaagcccacggtgcgcctcgccacccgcgacgacgtccccagggccgtacgcaccctcgccgccgcgttcgccgactaccccgccacgcgccacaccgtcgatccggaccgccacatcgagcgggtcaccgagctgcaagaactcttcctcacgcgcgtcgggctcgacatcggcaaggtgtgggtcgcggacgacggcgccgcggtggcggtctggaccacgccggagagcgtcgaagcgggggcggtgttcgccgagatcggcccgcgcatggccgagttgagcggttcccggctggccgcgcagcaacagatggaaggcctcctggcgccgcaccggcccaaggagcccgcgtggttcctggccaccgtcggcgtctcgcccgaccaccagggcaagggtctgggcagcgccgtcgtgctccccggagtggaggcggccgagcgcgccggggtgcccgccttcctggagacctccgcgccccgcaacctccccttctacgagcggctcggcttcaccgtcaccgccgacgtcgaggtgcccgaaggaccgcgcacctggtgcatgacccgcaagcccggtgcctga

SEQ ID NO: 9796 - DNA, 2160 bp, Artificial Sequence
  Synthetic Polynucloetide
atggccttaccagtgaccgccttgctcctgccgctggccttgctgctccacgccgccaggccggacatccagatgacacagagccctagcagcctgtctgccagcgtgggagacagagtgaccatcacatgcaaggccagccaggatgtgggcacagccgtggattggtatcagcagaagcctggcaaggcccctaagctgctgatctactgggccagcacaagacacacaggcgtgcccagcagattttctggcagcggctctggcaccgacttcaccctgacaatatccagcctccagcctgaggacttcgccacctactactgccagcagtacaacagctaccctctgaccttcggccagggcaccaaggtggaaatcaaaagaggcggaggcggaagtggaggcggaggatctggcggcggaggctctgaagtgcagctggttgaatcaggtggcggcctggttcaacctggcggatctctgagactgagctgtgccgccagcggctacacctttaccgagtacacaatccactgggtccgacaggcccctggcaaaggacttgagtgggtcgccaacatcaaccccaacaatggcggcaccacctacaaccagaagttcgaggacagattcaccatcagccgggacaacagcaagaacaccctgtacctccagatgaactccctgagagccgaggacaccgccgtgtactattgtgccagaggctggaacttcgactactggggccagggaacactggtcaccgttagctctacgcgtgagcagaaactgatctcggaagaggatctggggagcggcaccccattcccttctctggcccctcccatcatgctgctggtggacggcaagcagcagatggtggtcgtgtgcctggtgctggatgtggccccacctggactggacagccccatctggtttagcgccggcaatggctctgccctggacgcctttacctacggcccaagccctgccaccgatggcacctggacaaatctggcccacctgagcctgcccagcgaggaactggcttcttgggagcctctcgtgtgccacacaggacctggcgctgagggacacagcagatccacccagcctatgcacctgtctggcgaggccagcaccgccagaacctgtcctcaggaacctctgagaggcacccctggcggagcactgtggctgggagtgctgagactgctgctgttcaagctgctgctgtttgacctgctgctgacctgctcctgtctgtgcgatcctgccggccctctgccttctcctgccaccaccacaagactgagagccctgggcagccacagactgcaccctgccacagagacaggcggcagagaggccacaagcagccctagaccccagcccagagacagaagatggggcgataccccccctggcagaaagcctggatctccagtccgcgccaagagaagcggatctggcgtgaagcagaccctgaatttcgacctgctgaagctggctggcgacgtggaatccaacccaggcccttctagatctagaggccatatgaccgagtacaagcccacggtgcgcctcgccacccgcgacgacgtccccagggccgtacgcaccctcgccgccgcgttcgccgactaccccgccacgcgccacaccgtcgatccggaccgccacatcgagcgggtcaccgagctgcaagaactcttcctcacgcgcgtcgggctcgacatcggcaaggtgtgggtcgcggacgacggcgccgcggtggcggtctggaccacgccggagagcgtcgaagcgggggcggtgttcgccgagatcggcccgcgcatggccgagttgagcggttcccggctggccgcgcagcaacagatggaaggcctcctggcgccgcaccggcccaaggagcccgcgtggttcctggccaccgtcggcgtctcgcccgaccaccagggcaagggtctgggcagcgccgtcgtgctccccggagtggaggcggccgagcgcgccggggtgcccgccttcctggagacctccgcgccccgcaacctccccttctacgagcggctcggcttcaccgtcaccgccgacgtcgaggtgcccgaaggaccgcgcacctggtgcatgacccgcaagcccggtgcctga

SEQ ID NO: 9797 - DNA, 1620 bp, Artificial Sequence
  Synthetic Polynucloetide
atggccttaccagtgaccgccttgctcctgccgctggccttgctgctccacgccgccaggccggacatccagatgacacagagccctagcagcctgtctgccagcgtgggagacagagtgaccatcacatgcaaggccagccaggatgtgggcacagccgtggattggtatcagcagaagcctggcaaggcccctaagctgctgatctactgggccagcacaagacacacaggcgtgcccagcagattttctggcagcggctctggcaccgacttcaccctgacaatatccagcctccagcctgaggacttcgccacctactactgccagcagtacaacagctaccctctgaccttcggccagggcaccaaggtggaaatcaaaagactcgaggacctgaagaacgtgttcccacctgaggtggccgtgttcgagcctagcgaggccgagatcagccacacccagaaagccaccctcgtgtgcctggctaccggcttctaccccgaccatgtggaactgtcttggtgggtcaacggcaaagaggtgcacagcggcgtgtctaccgacccccagccactgaaagaacagcccgccctgaacgacagccggtactgcctgagcagcagactgagagtgtccgccaccttctggcagaacccccggaaccacttcagatgccaggtgcagttctacggcctgagcgagaacgacgagtggacccaggacagagccaagcccgtgacccagatcgtgtctgccgaagcctggggcagagccgattgcggctttaccagcgagagctaccagcagggcgtgctgagcgccaccatcctgtacgagatcctgctgggcaaggccaccctgtacgccgtgctggtgtctgccctggtgctgatggctatggtcaagcggaaggacagccggggaagggccaagcgatctggatctggagcaacaaacttctcactactcaaacaagcaggtgacgtggaggagaatcccgggcctactagaggccatatgaccgagtacaagcccacggtgcgcctcgccacccgcgacgacgtccccagggccgtacgcaccctcgccgccgcgttcgccgactaccccgccacgcgccacaccgtcgatccggaccgccacatcgagcgggtcaccgagctgcaagaactcttcctcacgcgcgtcgggctcgacatcggcaaggtgtgggtcgcggacgacggcgccgcggtggcggtctggaccacgccggagagcgtcgaagcgggggcggtgttcgccgagatcggcccgcgcatggccgagttgagcggttcccggctggccgcgcagcaacagatggaaggcctcctggcgccgcaccggcccaaggagcccgcgtggttcctggccaccgtcggcgtctcgcccgaccaccagggcaagggtctgggcagcgccgtcgtgctccccggagtggaggcggccgagcgcgccggggtgcccgccttcctggagacctccgcgccccgcaacctccccttctacgagcggctcggcttcaccgtcaccgccgacgtcgaggtgcccgaaggaccgcgcacctggtgcatgacccgcaagcccggtgcctga

SEQ ID NO: 9798 - DNA, 927 bp, Artificial Sequence
  Synthetic Polynucloetide
atggccttaccagtgaccgccttgctcctgccgctggccttgctgctccacgccgccaggccggacatccagatgacacagagccctagcagcctgtctgccagcgtgggagacagagtgaccatcacatgcaaggccagccaggatgtgggcacagccgtggattggtatcagcagaagcctggcaaggcccctaagctgctgatctactgggccagcacaagacacacaggcgtgcccagcagattttctggcagcggctctggcaccgacttcaccctgacaatatccagcctccagcctgaggacttcgccacctactactgccagcagtacaacagctaccctctgaccttcggccagggcaccaaggtggaaatcaaaagactcgaggacctgaagaacgtgttcccacctgaggtggccgtgttcgagcctagcgaggccgagatcagccacacccagaaagccaccctcgtgtgcctggctaccggcttctaccccgaccatgtggaactgtcttggtgggtcaacggcaaagaggtgcacagcggcgtgtctaccgacccccagccactgaaagaacagcccgccctgaacgacagccggtactgcctgagcagcagactgagagtgtccgccaccttctggcagaacccccggaaccacttcagatgccaggtgcagttctacggcctgagcgagaacgacgagtggacccaggacagagccaagcccgtgacccagatcgtgtctgccgaagcctggggcagagccgattgcggctttaccagcgagagctaccagcagggcgtgctgagcgccaccatcctgtacgagatcctgctgggcaaggccaccctgtacgccgtgctggtgtctgccctggtgctgatggctatggtcaagcggaaggacagccgggga

SEQ ID NO: 9799 - DNA, 1335 bp, Artificial Sequence
  Synthetic Polynucloetide
atggactggatttggcgcatccttttccttgtcggcgctgctaccggcgcgcattccttcgaagaagtgcagctggttgaatcaggtggcggcctggttcaacctggcggatctctgagactgagctgtgccgccagcggctacacctttaccgagtacacaatccactgggtccgacaggcccctggcaaaggacttgagtgggtcgccaacatcaaccccaacaatggcggcaccacctacaaccagaagttcgaggacagattcaccatcagccgggacaacagcaagaacaccctgtacctccagatgaactccctgagagccgaggacaccgccgtgtactattgtgccagaggctggaacttcgactactggggccagggaacactggtcaccgttagctctacgcgtatccagaaccctgatcctgccgtgtaccagctgcgggatagcaagagcagcgacaagagcgtgtgtctgttcaccgacttcgacagccagaccaacgtgtcccagagcaaggactccgacgtgtacatcaccgataagaccgtgctggacatgcggagcatggacttcaagagcaactccgccgtggcctggtccaacaagtccgatttcgcctgcgccaacgccttcaacaacagcattatccccgaggacacattcttcccaagccccgagagcagctgcgacgtgaagctggtggaaaagagcttcgagacagacaccaacctgaacttccagaacctgagcgtgatcggcttcagaatcctgctgctgaaagtggccggctttaacctgctgatgaccctgcggctgtggtccagccgcgccaagagaagcggatctggcgtgaagcagaccctgaatttcgacctgctgaagctggctggcgacgtggaatccaacccaggcccttctagaggccatatggccaagcctttgtctcaagaagaatccaccctcattgaaagagcaacggctacaatcaacagcatccccatctctgaagactacagcgtcgccagcgcagctctctctagcgacggccgcatcttcactggtgtcaatgtatatcattttactgggggaccttgtgcagaactcgtggtgctgggcactgctgctgctgcggcagctggcaacctgacttgtatcgtcgcgatcggaaatgagaacaggggcatcttgagcccctgcggacggtgccgacaggtgcttctcgatctgcatcctgggatcaaagccatagtgaaggacagtgatggacagccgacggcagttgggattcgtgaattgctgccctctggttatgtgtgggagggctga

SEQ ID NO: 9800 - DNA, 834 bp, Artificial Sequence
  Synthetic Polynucloetide
atggactggatttggcgcatccttttccttgtcggcgctgctaccggcgcgcattccttcgaagaagtgcagctggttgaatcaggtggcggcctggttcaacctggcggatctctgagactgagctgtgccgccagcggctacacctttaccgagtacacaatccactgggtccgacaggcccctggcaaaggacttgagtgggtcgccaacatcaaccccaacaatggcggcaccacctacaaccagaagttcgaggacagattcaccatcagccgggacaacagcaagaacaccctgtacctccagatgaactccctgagagccgaggacaccgccgtgtactattgtgccagaggctggaacttcgactactggggccagggaacactggtcaccgttagctctacgcgtatccagaaccctgatcctgccgtgtaccagctgcgggatagcaagagcagcgacaagagcgtgtgtctgttcaccgacttcgacagccagaccaacgtgtcccagagcaaggactccgacgtgtacatcaccgataagaccgtgctggacatgcggagcatggacttcaagagcaactccgccgtggcctggtccaacaagtccgatttcgcctgcgccaacgccttcaacaacagcattatccccgaggacacattcttcccaagccccgagagcagctgcgacgtgaagctggtggaaaagagcttcgagacagacaccaacctgaacttccagaacctgagcgtgatcggcttcagaatcctgctgctgaaagtggccggctttaacctgctgatgaccctgcggctgtggtccagc

SEQ ID NO: 9801 - DNA, 1674 bp, Artificial Sequence
  Synthetic Polynucloetide
atggccttaccagtgaccgccttgctcctgccgctggccttgctgctccacgccgccaggccggacatccagatgacacagagccctagcagcctgtctgccagcgtgggagacagagtgaccatcacatgcaaggccagccaggatgtgggcacagccgtggattggtatcagcagaagcctggcaaggcccctaagctgctgatctactgggccagcacaagacacacaggcgtgcccagcagattttctggcagcggctctggcaccgacttcaccctgacaatatccagcctccagcctgaggacttcgccacctactactgccagcagtacaacagctaccctctgaccttcggccagggcaccaaggtggaaatcaaaagactcgaggggaaaccaattcccaaccctcttctgggactggattcaaccggcagcggcgaggacctgaagaacgtgttcccacctgaggtggccgtgttcgagcctagcgaggccgagatcagccacacccagaaagccaccctcgtgtgcctggctaccggcttctaccccgaccatgtggaactgtcttggtgggtcaacggcaaagaggtgcacagcggcgtgtgtaccgacccccagccactgaaagaacagcccgccctgaacgacagccggtactgcctgagcagcagactgagagtgtccgccaccttctggcagaacccccggaaccacttcagatgccaggtgcagttctacggcctgagcgagaacgacgagtggacccaggacagagccaagcccgtgacccagatcgtgtctgccgaagcctggggcagagccgattgcggctttaccagcgagagctaccagcagggcgtgctgagcgccaccatcctgtacgagatcctgctgggcaaggccaccctgtacgccgtgctggtgtctgccctggtgctgatggctatggtcaagcggaaggacagccggggaagggccaagcgatctggatctggagcaacaaacttctcactactcaaacaagcaggtgacgtggaggagaatcccgggcctactagaggccatatgaccgagtacaagcccacggtgcgcctcgccacccgcgacgacgtccccagggccgtacgcaccctcgccgccgcgttcgccgactaccccgccacgcgccacaccgtcgatccggaccgccacatcgagcgggtcaccgagctgcaagaactcttcctcacgcgcgtcgggctcgacatcggcaaggtgtgggtcgcggacgacggcgccgcggtggcggtctggaccacgccggagagcgtcgaagcgggggcggtgttcgccgagatcggcccgcgcatggccgagttgagcggttcccggctggccgcgcagcaacagatggaaggcctcctggcgccgcaccggcccaaggagcccgcgtggttcctggccaccgtcggcgtctcgcccgaccaccagggcaagggtctgggcagcgccgtcgtgctccccggagtggaggcggccgagcgcgccggggtgcccgccttcctggagacctccgcgccccgcaacctccccttctacgagcggctcggcttcaccgtcaccgccgacgtcgaggtgcccgaaggaccgcgcacctggtgcatgacccgcaagcccggtgcctga

SEQ ID NO: 9802 - DNA, 984 bp, Artificial Sequence
  Synthetic Polynucloetide
atggccttaccagtgaccgccttgctcctgccgctggccttgctgctccacgccgccaggccggacatccagatgacacagagccctagcagcctgtctgccagcgtgggagacagagtgaccatcacatgcaaggccagccaggatgtgggcacagccgtggattggtatcagcagaagcctggcaaggcccctaagctgctgatctactgggccagcacaagacacacaggcgtgcccagcagattttctggcagcggctctggcaccgacttcaccctgacaatatccagcctccagcctgaggacttcgccacctactactgccagcagtacaacagctaccctctgaccttcggccagggcaccaaggtggaaatcaaaagactcgaggggaaaccaattcccaaccctcttctgggactggattcaaccggcagcggcgaggacctgaagaacgtgttcccacctgaggtggccgtgttcgagcctagcgaggccgagatcagccacacccagaaagccaccctcgtgtgcctggctaccggcttctaccccgaccatgtggaactgtcttggtgggtcaacggcaaagaggtgcacagcggcgtgtgtaccgacccccagccactgaaagaacagcccgccctgaacgacagccggtactgcctgagcagcagactgagagtgtccgccaccttctggcagaacccccggaaccacttcagatgccaggtgcagttctacggcctgagcgagaacgacgagtggacccaggacagagccaagcccgtgacccagatcgtgtctgccgaagcctggggcagagccgattgcggctttaccagcgagagctaccagcagggcgtgctgagcgccaccatcctgtacgagatcctgctgggcaaggccaccctgtacgccgtgctggtgtctgccctggtgctgatggctatggtcaagcggaaggacagccggggatga

SEQ ID NO: 9803 - DNA, 1371 bp, Artificial Sequence
  Synthetic Polynucloetide
atggactggatttggcgcatccttttccttgtcggcgctgctaccggcgcgcattccttcgaagaagtgcagctggttgaatcaggtggcggcctggttcaacctggcggatctctgagactgagctgtgccgccagcggctacacctttaccgagtacacaatccactgggtccgacaggcccctggcaaaggacttgagtgggtcgccaacatcaaccccaacaatggcggcaccacctacaaccagaagttcgaggacagattcaccatcagccgggacaacagcaagaacaccctgtacctccagatgaactccctgagagccgaggacaccgccgtgtactattgtgccagaggctggaacttcgactactggggccagggaacactggtcaccgttagctctacgcgtgagcagaaactgatctcggaagaggatgggagcggcatccagaaccctgatcctgccgtgtaccagctgcgggatagcaagagcagcgacaagagcgtgtgtctgttcaccgacttcgacagccagaccaacgtgtcccagagcaaggactccgacgtgtacatcaccgataagtgcgtgctggacatgcggagcatggacttcaagagcaactccgccgtggcctggtccaacaagtccgatttcgcctgcgccaacgccttcaacaacagcattatccccgaggacacattcttcccaagccccgagagcagctgcgacgtgaagctggtggaaaagagcttcgagacagacaccaacctgaacttccagaacctgagcgtgatcggcttcagaatcctgctgctgaaagtggccggctttaacctgctgatgaccctgcggctgtggtccagccgcgccaagagaagcggatctggcgtgaagcagaccctgaatttcgacctgctgaagctggctggcgacgtggaatccaacccaggcccttctagaggccatatggccaagcctttgtctcaagaagaatccaccctcattgaaagagcaacggctacaatcaacagcatccccatctctgaagactacagcgtcgccagcgcagctctctctagcgacggccgcatcttcactggtgtcaatgtatatcattttactgggggaccttgtgcagaactcgtggtgctgggcactgctgctgctgcggcagctggcaacctgacttgtatcgtcgcgatcggaaatgagaacaggggcatcttgagcccctgcggacggtgccgacaggtgcttctcgatctgcatcctgggatcaaagccatagtgaaggacagtgatggacagccgacggcagttgggattcgtgaattgctgccctctggttatgtgtgggagggctga

SEQ ID NO: 9804 - DNA, 873 bp, Artificial Sequence
  Synthetic Polynucloetide
atggactggatttggcgcatccttttccttgtcggcgctgctaccggcgcgcattccttcgaagaagtgcagctggttgaatcaggtggcggcctggttcaacctggcggatctctgagactgagctgtgccgccagcggctacacctttaccgagtacacaatccactgggtccgacaggcccctggcaaaggacttgagtgggtcgccaacatcaaccccaacaatggcggcaccacctacaaccagaagttcgaggacagattcaccatcagccgggacaacagcaagaacaccctgtacctccagatgaactccctgagagccgaggacaccgccgtgtactattgtgccagaggctggaacttcgactactggggccagggaacactggtcaccgttagctctacgcgtgagcagaaactgatctcggaagaggatgggagcggcatccagaaccctgatcctgccgtgtaccagctgcgggatagcaagagcagcgacaagagcgtgtgtctgttcaccgacttcgacagccagaccaacgtgtcccagagcaaggactccgacgtgtacatcaccgataagtgcgtgctggacatgcggagcatggacttcaagagcaactccgccgtggcctggtccaacaagtccgatttcgcctgcgccaacgccttcaacaacagcattatccccgaggacacattcttcccaagccccgagagcagctgcgacgtgaagctggtggaaaagagcttcgagacagacaccaacctgaacttccagaacctgagcgtgatcggcttcagaatcctgctgctgaaagtggccggctttaacctgctgatgaccctgcggctgtggtccagctga

SEQ ID NO: 9805 - DNA, 1914 bp, Artificial Sequence
  Synthetic Polynucloetide
atggccttaccagtgaccgccttgctcctgccgctggccttgctgctccacgccgccaggccggacatccagatgacacagagccctagcagcctgtctgccagcgtgggagacagagtgaccatcacatgcaaggccagccaggatgtgggcacagccgtggattggtatcagcagaagcctggcaaggcccctaagctgctgatctactgggccagcacaagacacacaggcgtgcccagcagattttctggcagcggctctggcaccgacttcaccctgacaatatccagcctccagcctgaggacttcgccacctactactgccagcagtacaacagctaccctctgaccttcggccagggcaccaaggtggaaatcaaaagaggcggaggcggaagtggaggcggaggatctggcggcggaggctctgaagtgcagctggttgaatcaggtggcggcctggttcaacctggcggatctctgagactgagctgtgccgccagcggctacacctttaccgagtacacaatccactgggtccgacaggcccctggcaaaggacttgagtgggtcgccaacatcaaccccaacaatggcggcaccacctacaaccagaagttcgaggacagattcaccatcagccgggacaacagcaagaacaccctgtacctccagatgaactccctgagagccgaggacaccgccgtgtactattgtgccagaggctggaacttcgactactggggccagggaacactggtcaccgttagctctacgcgtgggagcggcatccagaaccctgatcctgccgtgtaccagctgcgggatagcaagagcagcgacaagagcgtgtgtctgttcaccgacttcgacagccagaccaacgtgtcccagagcaaggactccgacgtgtacatcaccgataagaccgtgctggacatgcggagcatggacttcaagagcaactccgccgtggcctggtccaacaagtccgatttcgcctgcgccaacgccttcaacaacagcattatccccgaggacacattcttcccaagcagcgacgtgccctgcgacgtgaagctggtggaaaagagcttcgagacagacaccaacctgaacttccagaacctgagcgtgatcggcttcagaatcctgctgctgaaagtggccggctttaacctgctgatgaccctgcggctgtggtccagccgcgccaagagaagcggatctggcgtgaagcagaccctgaatttcgacctgctgaagctggctggcgacgtggaatccaacccaggcccttctagaggccatatgaccgagtacaagcccacggtgcgcctcgccacccgcgacgacgtccccagggccgtacgcaccctcgccgccgcgttcgccgactaccccgccacgcgccacaccgtcgatccggaccgccacatcgagcgggtcaccgagctgcaagaactcttcctcacgcgcgtcgggctcgacatcggcaaggtgtgggtcgcggacgacggcgccgcggtggcggtctggaccacgccggagagcgtcgaagcgggggcggtgttcgccgagatcggcccgcgcatggccgagttgagcggttcccggctggccgcgcagcaacagatggaaggcctcctggcgccgcaccggcccaaggagcccgcgtggttcctggccaccgtcggcgtctcgcccgaccaccagggcaagggtctgggcagcgccgtcgtgctccccggagtggaggcggccgagcgcgccggggtgcccgccttcctggagacctccgcgccccgcaacctccccttctacgagcggctcggcttcaccgtcaccgccgacgtcgaggtgcccgaaggaccgcgcacctggtgcatgacccgcaagcccggtgcctga

SEQ ID NO: 9806 - DNA, 2010 bp, Artificial Sequence
  Synthetic Polynucloetide
atggccttaccagtgaccgccttgctcctgccgctggccttgctgctccacgccgccaggccggacatccagatgacacagagccctagcagcctgtctgccagcgtgggagacagagtgaccatcacatgcaaggccagccaggatgtgggcacagccgtggattggtatcagcagaagcctggcaaggcccctaagctgctgatctactgggccagcacaagacacacaggcgtgcccagcagattttctggcagcggctctggcaccgacttcaccctgacaatatccagcctccagcctgaggacttcgccacctactactgccagcagtacaacagctaccctctgaccttcggccagggcaccaaggtggaaatcaaaagaggcggaggcggaagtggaggcggaggatctggcggcggaggctctgaagtgcagctggttgaatcaggtggcggcctggttcaacctggcggatctctgagactgagctgtgccgccagcggctacacctttaccgagtacacaatccactgggtccgacaggcccctggcaaaggacttgagtgggtcgccaacatcaaccccaacaatggcggcaccacctacaaccagaagttcgaggacagattcaccatcagccgggacaacagcaagaacaccctgtacctccagatgaactccctgagagccgaggacaccgccgtgtactattgtgccagaggctggaacttcgactactggggccagggaacactggtcaccgttagctctctcgaggacctgaagaacgtgttcccacctgaggtggccgtgttcgagcctagcaaggccgagatcgcccacacccagaaagccaccctcgtgtgcctggctaccggcttctaccccgaccatgtggaactgtcttggtgggtcaacggcaaagaggtgcacagcggcgtgtctaccgacccccagccactgaaagaacagcccgccctgaacgacagccggtactgcctgagcagcagactgagagtgtccgccaccttctggcagaacccccggaaccacttcagatgccaggtgcagttctacggcctgagcgagaacgacgagtggacccaggacagagccaagcccgtgacccagatcgtgtctgccgaagcctggggcagagccgattgcggcatcaccagcgccagctaccaccagggcgtgctgagcgccaccatcctgtacgagatcctgctgggcaaggccaccctgtacgccgtgctggtgtctgccctggtgctgatggctatggtcaagcggaaggacagccggggaagggccaagcgatctggatctggagcaacaaacttctcactactcaaacaagcaggtgacgtggaggagaatcccgggcctactagaggccatatgaccgagtacaagcccacggtgcgcctcgccacccgcgacgacgtccccagggccgtacgcaccctcgccgccgcgttcgccgactaccccgccacgcgccacaccgtcgatccggaccgccacatcgagcgggtcaccgagctgcaagaactcttcctcacgcgcgtcgggctcgacatcggcaaggtgtgggtcgcggacgacggcgccgcggtggcggtctggaccacgccggagagcgtcgaagcgggggcggtgttcgccgagatcggcccgcgcatggccgagttgagcggttcccggctggccgcgcagcaacagatggaaggcctcctggcgccgcaccggcccaaggagcccgcgtggttcctggccaccgtcggcgtctcgcccgaccaccagggcaagggtctgggcagcgccgtcgtgctccccggagtggaggcggccgagcgcgccggggtgcccgccttcctggagacctccgcgccccgcaacctccccttctacgagcggctcggcttcaccgtcaccgccgacgtcgaggtgcccgaaggaccgcgcacctggtgcatgacccgcaagcccggtgcctga

SEQ ID NO: 9807 - DNA, 2079 bp, Artificial Sequence
  Synthetic Polynucloetide
atggccttaccagtgaccgccttgctcctgccgctggccttgctgctccacgccgccaggccggacatccagatgacacagagccctagcagcctgtctgccagcgtgggagacagagtgaccatcacatgcaaggccagccaggatgtgggcacagccgtggattggtatcagcagaagcctggcaaggcccctaagctgctgatctactgggccagcacaagacacacaggcgtgcccagcagattttctggcagcggctctggcaccgacttcaccctgacaatatccagcctccagcctgaggacttcgccacctactactgccagcagtacaacagctaccctctgaccttcggccagggcaccaaggtggaaatcaaaagaggcggaggcggaagtggaggcggaggatctggcggcggaggctctgaagtgcagctggttgaatcaggtggcggcctggttcaacctggcggatctctgagactgagctgtgccgccagcggctacacctttaccgagtacacaatccactgggtccgacaggcccctggcaaaggacttgagtgggtcgccaacatcaaccccaacaatggcggcaccacctacaaccagaagttcgaggacagattcaccatcagccgggacaacagcaagaacaccctgtacctccagatgaactccctgagagccgaggacaccgccgtgtactattgtgccagaggctggaacttcgactactggggccagggaacactggtcaccgttagctctacgcgtgggtctggaggcggaggcagcggcggaggcgggagcggcgacggtaacgaggagatgggaggaatcactcaaaccccttacaaagtctcaatttcaggaacaactgttatccttacatgtccccagtatcctggcagcgagatcctttggcagcataacgacaagaatatagggggagatgaagacgataagaatatcggatctgacgaggatcacttgagcctgaaagagttctccgagcttgaacaaagcggatattatgtgtgctatccgcgcgggtcaaagccggaagacgctaacttttacctttatctccgagccagagtgtgcgaaaattgcatggaaatggacgttatgtccgttgctacaatagttatcgtagatatatgcatcacgggtggactgcttctgctggtttattattggtccaagaatagaaaggccaaagctaaacccgtgaccagaggcgctggcgcaggcggaaggcaaaggggacaaaacaaagaacggccaccaccagtgccaaatccagattatgagcctattcggaaaggacagagggacctgtactctggcctgaatcagagaagaatccgcgccaagagaagcggatctggcgtgaagcagaccctgaatttcgacctgctgaagctggctggcgacgtggaatccaacccaggcccttctagaggccatatgaccgagtacaagcccacggtgcgcctcgccacccgcgacgacgtccccagggccgtacgcaccctcgccgccgcgttcgccgactaccccgccacgcgccacaccgtcgatccggaccgccacatcgagcgggtcaccgagctgcaagaactcttcctcacgcgcgtcgggctcgacatcggcaaggtgtgggtcgcggacgacggcgccgcggtggcggtctggaccacgccggagagcgtcgaagcgggggcggtgttcgccgagatcggcccgcgcatggccgagttgagcggttcccggctggccgcgcagcaacagatggaaggcctcctggcgccgcaccggcccaaggagcccgcgtggttcctggccaccgtcggcgtctcgcccgaccaccagggcaagggtctgggcagcgccgtcgtgctccccggagtggaggcggccgagcgcgccggggtgcccgccttcctggagacctccgcgccccgcaacctccccttctacgagcggctcggcttcaccgtcaccgccgacgtcgaggtgcccgaaggaccgcgcacctggtgcatgacccgcaagcccggtgcctga

SEQ ID NO: 9808 - DNA, 1974 bp, Artificial Sequence
  Synthetic Polynucloetide
atggccttaccagtgaccgccttgctcctgccgctggccttgctgctccacgccgccaggccggacatccagatgacacagagccctagcagcctgtctgccagcgtgggagacagagtgaccatcacatgcaaggccagccaggatgtgggcacagccgtggattggtatcagcagaagcctggcaaggcccctaagctgctgatctactgggccagcacaagacacacaggcgtgcccagcagattttctggcagcggctctggcaccgacttcaccctgacaatatccagcctccagcctgaggacttcgccacctactactgccagcagtacaacagctaccctctgaccttcggccagggcaccaaggtggaaatcaaaagaggcggaggcggaagtggaggcggaggatctggcggcggaggctctgaagtgcagctggttgaatcaggtggcggcctggttcaacctggcggatctctgagactgagctgtgccgccagcggctacacctttaccgagtacacaatccactgggtccgacaggcccctggcaaaggacttgagtgggtcgccaacatcaaccccaacaatggcggcaccacctacaaccagaagttcgaggacagattcaccatcagccgggacaacagcaagaacaccctgtacctccagatgaactccctgagagccgaggacaccgccgtgtactattgtgccagaggctggaacttcgactactggggccagggaacactggtcaccgttagctctacgcgtgggtctggaggcggaggcagcggcggaggcgggagcggcttcaagatccccatcgaggaactggaagatcgggtgttcgtgaactgcaacacctctatcacctgggtggaaggcaccgtgggaacactgctgagcgacatcaccagactggacctcggcaagcggattctggaccctcggggcatctacagatgcaacggcaccgacatctacaaggacaaagaaagcaccgtgcaggtccactacagaatgtgccagtcctgcgtggaactggaccctgctacagtggccggcatcatcgtgaccgatgtgatcgctactctgctgctggctctgggagtgttctgcttcgccggacacgaaacaggcagactgtctggcgctgccgatacacaggccctgctgagaaacgaccaagtgtatcagcccctgcgcgacagagatgatgcccagtattctcacctcggcggcaactgggctagaaacaagcgcgccaagagaagcggatctggcgtgaagcagaccctgaatttcgacctgctgaagctggctggcgacgtggaatccaacccaggcccttctagaggccatatgaccgagtacaagcccacggtgcgcctcgccacccgcgacgacgtccccagggccgtacgcaccctcgccgccgcgttcgccgactaccccgccacgcgccacaccgtcgatccggaccgccacatcgagcgggtcaccgagctgcaagaactcttcctcacgcgcgtcgggctcgacatcggcaaggtgtgggtcgcggacgacggcgccgcggtggcggtctggaccacgccggagagcgtcgaagcgggggcggtgttcgccgagatcggcccgcgcatggccgagttgagcggttcccggctggccgcgcagcaacagatggaaggcctcctggcgccgcaccggcccaaggagcccgcgtggttcctggccaccgtcggcgtctcgcccgaccaccagggcaagggtctgggcagcgccgtcgtgctccccggagtggaggcggccgagcgcgccggggtgcccgccttcctggagacctccgcgccccgcaacctccccttctacgagcggctcggcttcaccgtcaccgccgacgtcgaggtgcccgaaggaccgcgcacctggtgcatgacccgcaagcccggtgcctga

SEQ ID NO: 9809 - DNA, 2004 bp, Artificial Sequence
  Synthetic Polynucloetide
atggccttaccagtgaccgccttgctcctgccgctggccttgctgctccacgccgccaggccggacatccagatgacacagagccctagcagcctgtctgccagcgtgggagacagagtgaccatcacatgcaaggccagccaggatgtgggcacagccgtggattggtatcagcagaagcctggcaaggcccctaagctgctgatctactgggccagcacaagacacacaggcgtgcccagcagattttctggcagcggctctggcaccgacttcaccctgacaatatccagcctccagcctgaggacttcgccacctactactgccagcagtacaacagctaccctctgaccttcggccagggcaccaaggtggaaatcaaaagaggcggaggcggaagtggaggcggaggatctggcggcggaggctctgaagtgcagctggttgaatcaggtggcggcctggttcaacctggcggatctctgagactgagctgtgccgccagcggctacacctttaccgagtacacaatccactgggtccgacaggcccctggcaaaggacttgagtgggtcgccaacatcaaccccaacaatggcggcaccacctacaaccagaagttcgaggacagattcaccatcagccgggacaacagcaagaacaccctgtacctccagatgaactccctgagagccgaggacaccgccgtgtactattgtgccagaggctggaacttcgactactggggccagggaacactggtcaccgttagctctacgcgtgggtctggaggcggaggcagcggcggaggcgggagcggccagagcatcaagggcaaccacctggtcaaggtgtacgactaccaagaggacggcagcgtgctgctgacatgtgatgccgaggccaagaacatcacctggtttaaggacggcaagatgatcggcttcctgaccgaggacaagaagaagtggaacctgggcagcaacgctaaggaccccagaggcatgtatcagtgcaagggcagccagaacaagagcaagcccctccaggtgtactaccggatgtgccagaactgcatcgagctgaacgccgctaccatcagcggctttctgttcgccgagatcgtgtccatcttcgtgctggccgtgggcgtgtactttatcgctggacaggatggcgtgcggcagagcagagcttccgataagcaaaccctgctgcctaacgaccagctgtaccagcctctgaaggacagagaggacgaccagtacagccacctccagggcaatcagctgagaagaaaccgcgccaagagaagcggatctggcgtgaagcagaccctgaatttcgacctgctgaagctggctggcgacgtggaatccaacccaggcccttctagaggccatatgaccgagtacaagcccacggtgcgcctcgccacccgcgacgacgtccccagggccgtacgcaccctcgccgccgcgttcgccgactaccccgccacgcgccacaccgtcgatccggaccgccacatcgagcgggtcaccgagctgcaagaactcttcctcacgcgcgtcgggctcgacatcggcaaggtgtgggtcgcggacgacggcgccgcggtggcggtctggaccacgccggagagcgtcgaagcgggggcggtgttcgccgagatcggcccgcgcatggccgagttgagcggttcccggctggccgcgcagcaacagatggaaggcctcctggcgccgcaccggcccaaggagcccgcgtggttcctggccaccgtcggcgtctcgcccgaccaccagggcaagggtctgggcagcgccgtcgtgctccccggagtggaggcggccgagcgcgccggggtgcccgccttcctggagacctccgcgccccgcaacctccccttctacgagcggctcggcttcaccgtcaccgccgacgtcgaggtgcccgaaggaccgcgcacctggtgcatgacccgcaagcccggtgcctga

SEQ ID NO: 9810 - DNA, 1953 bp, Artificial Sequence
  Synthetic Polynucloetide
atggccttaccagtgaccgccttgctcctgccgctggccttgctgctccacgccgccaggccggacatccagatgacacagagccctagcagcctgtctgccagcgtgggagacagagtgaccatcacatgcaaggccagccaggatgtgggcacagccgtggattggtatcagcagaagcctggcaaggcccctaagctgctgatctactgggccagcacaagacacacaggcgtgcccagcagattttctggcagcggctctggcaccgacttcaccctgacaatatccagcctccagcctgaggacttcgccacctactactgccagcagtacaacagctaccctctgaccttcggccagggcaccaaggtggaaatcaaaagaggcggaggcggaagtggaggcggaggatctggcggcggaggctctgaagtgcagctggttgaatcaggtggcggcctggttcaacctggcggatctctgagactgagctgtgccgccagcggctacacctttaccgagtacacaatccactgggtccgacaggcccctggcaaaggacttgagtgggtcgccaacatcaaccccaacaatggcggcaccacctacaaccagaagttcgaggacagattcaccatcagccgggacaacagcaagaacaccctgtacctccagatgaactccctgagagccgaggacaccgccgtgtactattgtgccagaggctggaacttcgactactggggccagggaacactggtcaccgttagctctacgcgtgggtctggaggcggaggcagcggcggaggcgggagcggccagagttttgggttgttggaccctaaattgtgctatctgttggacggaatcctgttcatttacggagtgatcctgaccgcattgttcctgcgggttaagttttccagatccgcagacgcacccgcttaccaacaagggcagaaccaactctacaatgaacttaatttggggcggagggaagagtacgacgttctggacaaaaggaggggacgagatcccgagatgggcggaaagcctcagcgaaggaagaatccgcaagaggggctttataacgaactccagaaagataaaatggcagaagcctatagtgagattgggatgaagggagaaaggaggaggggtaaaggtcacgatgggttgtaccaaggattgagcacagccactaaagatacctatgatgcgctccacatgcaggccctgccgccaagacgcgccaagagaagcggatctggcgtgaagcagaccctgaatttcgacctgctgaagctggctggcgacgtggaatccaacccaggcccttctagaggccatatgaccgagtacaagcccacggtgcgcctcgccacccgcgacgacgtccccagggccgtacgcaccctcgccgccgcgttcgccgactaccccgccacgcgccacaccgtcgatccggaccgccacatcgagcgggtcaccgagctgcaagaactcttcctcacgcgcgtcgggctcgacatcggcaaggtgtgggtcgcggacgacggcgccgcggtggcggtctggaccacgccggagagcgtcgaagcgggggcggtgttcgccgagatcggcccgcgcatggccgagttgagcggttcccggctggccgcgcagcaacagatggaaggcctcctggcgccgcaccggcccaaggagcccgcgtggttcctggccaccgtcggcgtctcgcccgaccaccagggcaagggtctgggcagcgccgtcgtgctccccggagtggaggcggccgagcgcgccggggtgcccgccttcctggagacctccgcgccccgcaacctccccttctacgagcggctcggcttcaccgtcaccgccgacgtcgaggtgcccgaaggaccgcgcacctggtgcatgacccgcaagcccggtgcctga

SEQ ID NO: 9811 - DNA, 2253 bp, Artificial Sequence
  Synthetic Polynucloetide
atggccttaccagtgaccgccttgctcctgccgctggccttgctgctccacgccgccaggccggaagtgcagctggttgaatctggcggaggactggttcagcctggcggatctctgagactgtcttgtgccgccagcggcttcagcttcagcgacttttggatgagctgggtccgacaggcccctggcaaaggacttgaatgggtcgccacaatcagccaggccggcagcgagaaggactacgtggactctgtgaagggcagattcaccatcagccgggacaacgccaagaagtccctgtacctccagatgaacagcctgagagccgaggacaccgccgtgtactattgtgcctctggcgtgtacagcttcgactacagaggccagggcaccctggtcacagtctcttctggtaccggcggaggcggatctggcggcggaggtagcggtggcggaggatctgaattcgacatccagatgacacagagccctagcagcctgtctgccagcgtgggagacagagtgaccatcacatgcaaggccagccaggatgtgggcacagccgtggattggtatcagcagaagcctggcaaggcccctaagctgctgatctactgggccagcacaagacacacaggcgtgcccagcagattttctggcagcggctctggcaccgacttcaccctgacaatatccagcctccagcctgaggacttcgccacctactactgccagcagtacaacagctaccctctgaccttcggccagggcaccaaggtggaaatcaaaagactcgaggacctgaagaacgtgttcccacctgaggtggccgtgttcgagcctagcgaggccgagatcagccacacccagaaagccaccctcgtgtgcctggctaccggcttctaccccgaccatgtggaactgtcttggtgggtcaacggcaaagaggtgcacagcggcgtgtgtaccgacccccagccactgaaagaacagcccgccctgaacgacagccggtactgcctgagcagcagactgagagtgtccgccaccttctggcagaacccccggaaccacttcagatgccaggtgcagttctacggcctgagcgagaacgacgagtggacccaggacagagccaagcccgtgacccagatcgtgtctgccgaagcctggggcagagccgattgcggctttaccagcgagagctaccagcagggcgtgctgagcgccaccatcctgtacgagatcctgctgggcaaggccaccctgtacgccgtgctggtgtctgccctggtgctgatggctatggtcaagcggaaggacagccggggaagggccaagcgatctggatctggagcaacaaacttctcactactcaaacaagcaggtgacgtggaggagaatcccgggcctactagtatggactggatttggcgcatccttttccttgtcggcgctgctaccggcgcgcattccttcgaagaagtgcagctggttgaatcaggtggcggcctggttcaacctggcggatctctgagactgagctgtgccgccagcggctacacctttaccgagtacacaatccactgggtccgacaggcccctggcaaaggacttgagtgggtcgccaacatcaaccccaacaatggcggcaccacctacaaccagaagttcgaggacagattcaccatcagccgggacaacagcaagaacaccctgtacctccagatgaactccctgagagccgaggacaccgccgtgtactattgtgccagaggctggaacttcgactactggggccagggaacactggtcaccgttagctctacgcgtatccagaaccctgatcctgccgtgtaccagctgcgggatagcaagagcagcgacaagagcgtgtgtctgttcaccgacttcgacagccagaccaacgtgtcccagagcaaggactccgacgtgtacatcaccgataagtgcgtgctggacatgcggagcatggacttcaagagcaactccgccgtggcctggtccaacaagtccgatttcgcctgcgccaacgccttcaacaacagcattatccccgaggacacattcttcccaagccccgagagcagctgcgacgtgaagctggtggaaaagagcttcgagacagacaccaacctgaacttccagaacctgagcgtgatcggcttcagaatcctgctgctgaaagtggccggctttaacctgctgatgaccctgcggctgtggtccagc

SEQ ID NO: 9812 - DNA, 2265 bp, Artificial Sequence
  Synthetic Polynucloetide
atggccttaccagtgaccgccttgctcctgccgctggccttgctgctccacgccgccaggccggaagtgcagctggttgaatctggcggaggactggttcagcctggcggatctctgagactgtcttgtgccgccagcggcttcagcttcagcgacttttggatgagctgggtccgacaggcccctggcaaaggacttgaatgggtcgccacaatcagccaggccggcagcgagaaggactacgtggactctgtgaagggcagattcaccatcagccgggacaacgccaagaagtccctgtacctccagatgaacagcctgagagccgaggacaccgccgtgtactattgtgcctctggcgtgtacagcttcgactacagaggccagggcaccctggtcacagtctcttctggtaccggcggaggcggatctggcggcggaggtagcggtggcggaggatctgaattcgacatccagatgacacagagccctagcagcctgtctgccagcgtgggagacagagtgaccatcacatgcaaggccagccaggatgtgggcacagccgtggattggtatcagcagaagcctggcaaggcccctaagctgctgatctactgggccagcacaagacacacaggcgtgcccagcagattttctggcagcggctctggcaccgacttcaccctgacaatatccagcctccagcctgaggacttcgccacctactactgccagcagtacaacagctaccctctgaccttcggccagggcaccaaggtggaaatcaaaagactcgagatccagaaccctgatcctgccgtgtaccagctgcgggatagcaagagcagcgacaagagcgtgtgtctgttcaccgacttcgacagccagaccaacgtgtcccagagcaaggactccgacgtgtacatcaccgataagtgcgtgctggacatgcggagcatggacttcaagagcaactccgccgtggcctggtccaacaagtccgatttcgcctgcgccaacgccttcaacaacagcattatccccgaggacacattcttcccaagccccgagagcagctgcgacgtgaagctggtggaaaagagcttcgagacagacaccaacctgaacttccagaacctgagcgtgatcggcttcagaatcctgctgctgaaagtggccggctttaacctgctgatgaccctgcggctgtggtccagccgcgccaagagaagcggatctggcgtgaagcagaccctgaatttcgacctgctgaagctggctggcgacgtggaatccaacccaggccctactagtatggactggatttggcgcatccttttccttgtcggcgctgctaccggcgcgcattccttcgaagaagtgcagctggttgaatcaggtggcggcctggttcaacctggcggatctctgagactgagctgtgccgccagcggctacacctttaccgagtacacaatccactgggtccgacaggcccctggcaaaggacttgagtgggtcgccaacatcaaccccaacaatggcggcaccacctacaaccagaagttcgaggacagattcaccatcagccgggacaacagcaagaacaccctgtacctccagatgaactccctgagagccgaggacaccgccgtgtactattgtgccagaggctggaacttcgactactggggccagggaacactggtcaccgttagctctacgcgtgaggacctgaagaacgtgttcccacctgaggtggccgtgttcgagcctagcgaggccgagatcagccacacccagaaagccaccctcgtgtgcctggctaccggcttctaccccgaccatgtggaactgtcttggtgggtcaacggcaaagaggtgcacagcggcgtgtgtaccgacccccagccactgaaagaacagcccgccctgaacgacagccggtactgcctgagcagcagactgagagtgtccgccaccttctggcagaacccccggaaccacttcagatgccaggtgcagttctacggcctgagcgagaacgacgagtggacccaggacagagccaagcccgtgacccagatcgtgtctgccgaagcctggggcagagccgattgcggctttaccagcgagagctaccagcagggcgtgctgagcgccaccatcctgtacgagatcctgctgggcaaggccaccctgtacgccgtgctggtgtctgccctggtgctgatggctatggtcaagcggaaggacagccgggga

SEQ ID NO: 9813 - DNA, 2841 bp, Artificial Sequence
  Synthetic Polynucloetide
atggccttaccagtgaccgccttgctcctgccgctggccttgctgctccacgccgccaggccggaagtgcagctggttgaatctggcggaggactggttcagcctggcggatctctgagactgtcttgtgccgccagcggcttcagcttcagcgacttttggatgagctgggtccgacaggcccctggcaaaggacttgaatgggtcgccacaatcagccaggccggcagcgagaaggactacgtggactctgtgaagggcagattcaccatcagccgggacaacgccaagaagtccctgtacctccagatgaacagcctgagagccgaggacaccgccgtgtactattgtgcctctggcgtgtacagcttcgactacagaggccagggcaccctggtcacagtctcttctggtaccggcggaggcggatctggcggcggaggtagcggtggcggaggatctgaattcgacatccagatgacacagagccctagcagcctgtctgccagcgtgggagacagagtgaccatcacatgcaaggccagccaggatgtgggcacagccgtggattggtatcagcagaagcctggcaaggcccctaagctgctgatctactgggccagcacaagacacacaggcgtgcccagcagattttctggcagcggctctggcaccgacttcaccctgacaatatccagcctccagcctgaggacttcgccacctactactgccagcagtacaacagctaccctctgaccttcggccagggcaccaaggtggaaatcaaaagactcgaggacctgaagaacgtgttcccacctgaggtggccgtgttcgagcctagcgaggccgagatcagccacacccagaaagccaccctcgtgtgcctggctaccggcttctaccccgaccatgtggaactgtcttggtgggtcaacggcaaagaggtgcacagcggcgtgtctaccgacccccagccactgaaagaacagcccgccctgaacgacagccggtactgcctgagcagcagactgagagtgtccgccaccttctggcagaacccccggaaccacttcagatgccaggtgcagttctacggcctgagcgagaacgacgagtggacccaggacagagccaagcccgtgacccagatcgtgtctgccgaagcctggggcagagccgattgcggatcccagagcttcggcctgctggaccccaagctgtgctacctgctggatggcatcctgttcatctacggcgtgatcctgaccgccctgttcctgagagtgaagttcagcagaagcgccgacgcccctgcctaccagcagggacagaaccaactgtacaacgagctgaacctgggcagacgggaagagtacgacgtgctggacaagcggagaggcagggaccctgagatgggcggaaagccccagcggagaaagaacccccaggaaggactgtataacgaactccagaaagacaagatggccgaagcctacagcgagatcggcatgaagggcgagcggagaagaggcaagggccacgatggcctgtaccagggcctgagcaccgccaccaaggacacctatgacgccctgcacatgcaggccctgcctccaagaagggccaagcgatctggatctggagcaacaaacttctcactactcaaacaagcaggtgacgtggaggagaatcccgggcctactagtatggactggatttggcgcatccttttccttgtcggcgctgctaccggcgcgcattccttcgaagaagtgcagctggttgaatcaggtggcggcctggttcaacctggcggatctctgagactgagctgtgccgccagcggctacacctttaccgagtacacaatccactgggtccgacaggcccctggcaaaggacttgagtgggtcgccaacatcaaccccaacaatggcggcaccacctacaaccagaagttcgaggacagattcaccatcagccgggacaacagcaagaacaccctgtacctccagatgaactccctgagagccgaggacaccgccgtgtactattgtgccagaggctggaacttcgactactggggccagggaacactggtcaccgttagctctacgcgtatccagaaccctgatcctgccgtgtaccagctgcgggatagcaagagcagcgacaagagcgtgtgtctgttcaccgacttcgacagccagaccaacgtgtcccagagcaaggactccgacgtgtacatcaccgataagaccgtgctggacatgcggagcatggacttcaagagcaactccgccgtggcctggtccaacaagtccgatttcgcctgcgccaacgccttcaacaacagcattatccccgaggacacattcttcccaagccccgagagcagctgcggtacccagagttttgggttgttggaccctaaattgtgctatctgttggacggaatcctgttcatttacggagtgatcctgaccgcattgttcctgcgggttaagttttccagatccgcagacgcacccgcttaccaacaagggcagaaccaactctacaatgaacttaatttggggcggagggaagagtacgacgttctggacaaaaggaggggacgagatcccgagatgggcggaaagcctcagcgaaggaagaatccgcaagaggggctttataacgaactccagaaagataaaatggcagaagcctatagtgagattgggatgaagggagaaaggaggaggggtaaaggtcacgatgggttgtaccaaggattgagcacagccactaaagatacctatgatgcgctccacatgcaggccctgccgccaaga

SEQ ID NO: 9814 - DNA, 2331 bp, Artificial Sequence
  Synthetic Polynucloetide
atggccttaccagtgaccgccttgctcctgccgctggccttgctgctccacgccgccaggccggaagtgcagctggttgaatctggcggaggactggttcagcctggcggatctctgagactgtcttgtgccgccagcggcttcagcttcagcgacttttggatgagctgggtccgacaggcccctggcaaaggacttgaatgggtcgccacaatcagccaggccggcagcgagaaggactacgtggactctgtgaagggcagattcaccatcagccgggacaacgccaagaagtccctgtacctccagatgaacagcctgagagccgaggacaccgccgtgtactattgtgcctctggcgtgtacagcttcgactacagaggccagggcaccctggtcacagtctcttctggtaccggcggaggcggatctggcggcggaggtagcggtggcggaggatctgaattcgacatccagatgacacagagccctagcagcctgtctgccagcgtgggagacagagtgaccatcacatgcaaggccagccaggatgtgggcacagccgtggattggtatcagcagaagcctggcaaggcccctaagctgctgatctactgggccagcacaagacacacaggcgtgcccagcagattttctggcagcggctctggcaccgacttcaccctgacaatatccagcctccagcctgaggacttcgccacctactactgccagcagtacaacagctaccctctgaccttcggccagggcaccaaggtggaaatcaaaagactcgagggacagcctaaggccaatcctaccgtgacactgttccctccaagcagcgaagaactccaggccaacaaggccacacttgtgtgcctgatctccgacttctaccctggggctgtgacagtggcttggaaggccgatggatctcctgtgaaagccggcgtggaaaccaccaagccatccaagcagagcaacaacaaatacgccgccagctcctacctgagcctgacacctgagcagtggaagtcccacagatcctacagctgccaagtgacccacgaaggcagcaccgtggaaaagacagtggcccctacagagtgcagccccatcaagaccgatgtgattacaatggaccccaaggacaactgctccaaggacgccaacgataccctgctgctccagctgaccaacaccagcgcctactacatgtacttgttgctgctgctgaagtccgtggtgtacttcgccatcatcacatgctgcctgctgcggagaaccgccttctgctgcaacggcgagaagtctagggccaagcgatctggatctggagcaacaaacttctcactactcaaacaagcaggtgacgtggaggagaatcccgggcctactagtatggactggatttggcgcatccttttccttgtcggcgctgctaccggcgcgcattccttcgaagaagtgcagctggttgaatcaggtggcggcctggttcaacctggcggatctctgagactgagctgtgccgccagcggctacacctttaccgagtacacaatccactgggtccgacaggcccctggcaaaggacttgagtgggtcgccaacatcaaccccaacaatggcggcaccacctacaaccagaagttcgaggacagattcaccatcagccgggacaacagcaagaacaccctgtacctccagatgaactccctgagagccgaggacaccgccgtgtactattgtgccagaggctggaacttcgactactggggccagggaacactggtcaccgttagctctacgcgtgcctctacaaagggaccctccgtgtttcctctggctcccagcagcaagtctacaagcggaggaacagccgctctgggctgcctggtcaaggattactttcccgagcctgtgaccgtgtcctggaatagcggagcactgacaagcggcgtgcacacctttccagccgtgctgcaaagcagcggcctgtactctctgagcagcgtggtcacagtgcctagctctagcctgggcacccagacctacatctgcaatgtgaaccacaagcctagcaacaccaaggtggacaagagagtggaacccaagagctgtgaagtgaaaaccgactccaccgaccacgtgaagcccaaagagacagagaacaccaagcagcccagcaagagctgccacaagcccaaggccatcgtgcacaccgagaaagtgaacatgatgagcctgaccgtgctgggcctgcggatgctgttcgccaaaaccgtggccgtgaacttcctgctgaccgccaagctgttcttcctc

SEQ ID NO: 9815 - DNA, 2274 bp, Artificial Sequence
  Synthetic Polynucloetide
atggccttaccagtgaccgccttgctcctgccgctggccttgctgctccacgccgccaggccggaagtgcagctggttgaatctggcggaggactggttcagcctggcggatctctgagactgtcttgtgccgccagcggcttcagcttcagcgacttttggatgagctgggtccgacaggcccctggcaaaggacttgaatgggtcgccacaatcagccaggccggcagcgagaaggactacgtggactctgtgaagggcagattcaccatcagccgggacaacgccaagaagtccctgtacctccagatgaacagcctgagagccgaggacaccgccgtgtactattgtgcctctggcgtgtacagcttcgactacagaggccagggcaccctggtcacagtctcttctggtaccggcggaggcggatctggcggcggaggtagcggtggcggaggatctgaattcgacatccagatgacacagagccctagcagcctgtctgccagcgtgggagacagagtgaccatcacatgcaaggccagccaggatgtgggcacagccgtggattggtatcagcagaagcctggcaaggcccctaagctgctgatctactgggccagcacaagacacacaggcgtgcccagcagattttctggcagcggctctggcaccgacttcaccctgacaatatccagcctccagcctgaggacttcgccacctactactgccagcagtacaacagctaccctctgaccttcggccagggcaccaaggtggaaatcaaaagactcgagggacagcctaaggccaatcctaccgtgacactgttccctccaagcagcgaagaactccaggccaacaaggccacacttgtgtgcctgatctccgacttctaccctggggctgtgacagtggcttggaaggccgatggatctcctgtgaaagccggcgtggaaaccaccaagccatccaagcagagcaacaacaaatacgccgccagctcctacctgagcctgacacctgagcagtggaagtcccacagatcctacagctgccaagtgacccacgaaggcagcaccgtggaaaagacagtggcccctacagagtgcagcggcagagccgattgcggctttaccagcgagagctaccagcagggcgtgctgagcgccaccatcctgtacgagatcctgctgggcaaggccaccctgtacgccgtgctggtgtctgccctggtgctgatggctatggtcaagcggaaggacagccggggacgcgccaagagaagcggatctggcgtgaagcagaccctgaatttcgacctgctgaagctggctggcgacgtggaatccaacccaggccctactagtatggactggatttggcgcatccttttccttgtcggcgctgctaccggcgcgcattccttcgaagaagtgcagctggttgaatcaggtggcggcctggttcaacctggcggatctctgagactgagctgtgccgccagcggctacacctttaccgagtacacaatccactgggtccgacaggcccctggcaaaggacttgagtgggtcgccaacatcaaccccaacaatggcggcaccacctacaaccagaagttcgaggacagattcaccatcagccgggacaacagcaagaacaccctgtacctccagatgaactccctgagagccgaggacaccgccgtgtactattgtgccagaggctggaacttcgactactggggccagggaacactggtcaccgttagctctacgcgtgcctctacaaagggaccctccgtgtttcctctggctcccagcagcaagtctacaagcggaggaacagccgctctgggctgcctggtcaaggattactttcccgagcctgtgaccgtgtcctggaatagcggagcactgacaagcggcgtgcacacctttccagccgtgctgcaaagcagcggcctgtactctctgagcagcgtggtcacagtgcctagctctagcctgggcacccagacctacatctgcaatgtgaaccacaagcctagcaacaccaaggtggacaagagagtggaacccaagagctgtatccccgaggacacattcttcccaagccccgagagcagctgcgacgtgaagctggtggaaaagagcttcgagacagacaccaacctgaacttccagaacctgagcgtgatcggcttcagaatcctgctgctgaaagtggccggctttaacctgctgatgaccctgcggctgtggtccagc

SEQ ID NO: 9816 - DNA, 2676 bp, Artificial Sequence
  Synthetic Polynucloetide
atggccttaccagtgaccgccttgctcctgccgctggccttgctgctccacgccgccaggccggaagtgcagctggttgaatctggcggaggactggttcagcctggcggatctctgagactgtcttgtgccgccagcggcttcagcttcagcgacttttggatgagctgggtccgacaggcccctggcaaaggacttgaatgggtcgccacaatcagccaggccggcagcgagaaggactacgtggactctgtgaagggcagattcaccatcagccgggacaacgccaagaagtccctgtacctccagatgaacagcctgagagccgaggacaccgccgtgtactattgtgcctctggcgtgtacagcttcgactacagaggccagggcaccctggtcacagtctcttctggtaccggcggaggcggatctggcggcggaggtagcggtggcggaggatctgaattcgacatccagatgacacagagccctagcagcctgtctgccagcgtgggagacagagtgaccatcacatgcaaggccagccaggatgtgggcacagccgtggattggtatcagcagaagcctggcaaggcccctaagctgctgatctactgggccagcacaagacacacaggcgtgcccagcagattttctggcagcggctctggcaccgacttcaccctgacaatatccagcctccagcctgaggacttcgccacctactactgccagcagtacaacagctaccctctgaccttcggccagggcaccaaggtggaaatcaaaagactcgagatccagaaccctgatcctgccgtgtaccagctgcgggatagcaagagcagcgacaagagcgtgtgtctgttcaccgacttcgacagccagaccaacgtgtcccagagcaaggactccgacgtgtacatcaccgataagtgcgtgctggacatgcggagcatggacttcaagagcaactccgccgtggcctggtccaacaagtccgatttcgcctgcgccaacgccttcaacaacagcattatccccgaggacacattcttcccaagccccgagagcagctgcgacgtgaagctggtggaaaagagcttcgagacagacaccaacctgaacttccagaacctgagcgtgatcggcttcagaatcctgctgctgaaagtggccggctttaacctgctgatgaccctgcggctgtggtccagccgcgccaagagaagcggatctggcgtgaagcagaccctgaatttcgacctgctgaagctggctggcgacgtggaatccaacccaggccctactagtatggactggatttggcgcatccttttccttgtcggcgctgctaccggcgcgcattccgggccccagctccagctgcaagagtctggacctggcctggtcaagcctagcgagacactgagcctgacctgtaccgtgtccggcgatagcatcagcagcggcgattactactggggctggatcagacagcctcctggcaaaggactggaatggatcggccacatctactacagcggcgtgacctactacaaccccagcctgaagtccagagtgaccatcagcgtggacaccagccggaaccagttctccctgaagctgtctagcgtgacagccgccgataccgccgtgtactactgcaccagagaggacagcagcaactggcggagtagaggccagggaacactggtcacagttagctctggatccggcggaggcggaagtggaggcggaggatctggcggcggaggctctttcgaagaagtgcagctggttgaatcaggtggcggcctggttcaacctggcggatctctgagactgagctgtgccgccagcggctacacctttaccgagtacacaatccactgggtccgacaggcccctggcaaaggacttgagtgggtcgccaacatcaaccccaacaatggcggcaccacctacaaccagaagttcgaggacagattcaccatcagccgggacaacagcaagaacaccctgtacctccagatgaactccctgagagccgaggacaccgccgtgtactattgtgccagaggctggaacttcgactactggggccagggaacactggtcaccgttagctctacgcgtgaggacctgaagaacgtgttcccacctgaggtggccgtgttcgagcctagcgaggccgagatcagccacacccagaaagccaccctcgtgtgcctggctaccggcttctaccccgaccatgtggaactgtcttggtgggtcaacggcaaagaggtgcacagcggcgtgtgtaccgacccccagccactgaaagaacagcccgccctgaacgacagccggtactgcctgagcagcagactgagagtgtccgccaccttctggcagaacccccggaaccacttcagatgccaggtgcagttctacggcctgagcgagaacgacgagtggacccaggacagagccaagcccgtgacccagatcgtgtctgccgaagcctggggcagagccgattgcggctttaccagcgagagctaccagcagggcgtgctgagcgccaccatcctgtacgagatcctgctgggcaaggccaccctgtacgccgtgctggtgtctgccctggtgctgatggctatggtcaagcggaaggacagccgggga

SEQ ID NO: 9817 - DNA, 3252 bp, Artificial Sequence
  Synthetic Polynucloetide
atggccttaccagtgaccgccttgctcctgccgctggccttgctgctccacgccgccaggccggaagtgcagctggttgaatctggcggaggactggttcagcctggcggatctctgagactgtcttgtgccgccagcggcttcagcttcagcgacttttggatgagctgggtccgacaggcccctggcaaaggacttgaatgggtcgccacaatcagccaggccggcagcgagaaggactacgtggactctgtgaagggcagattcaccatcagccgggacaacgccaagaagtccctgtacctccagatgaacagcctgagagccgaggacaccgccgtgtactattgtgcctctggcgtgtacagcttcgactacagaggccagggcaccctggtcacagtctcttctggtaccggcggaggcggatctggcggcggaggtagcggtggcggaggatctgaattcgacatccagatgacacagagccctagcagcctgtctgccagcgtgggagacagagtgaccatcacatgcaaggccagccaggatgtgggcacagccgtggattggtatcagcagaagcctggcaaggcccctaagctgctgatctactgggccagcacaagacacacaggcgtgcccagcagattttctggcagcggctctggcaccgacttcaccctgacaatatccagcctccagcctgaggacttcgccacctactactgccagcagtacaacagctaccctctgaccttcggccagggcaccaaggtggaaatcaaaagactcgaggacctgaagaacgtgttcccacctgaggtggccgtgttcgagcctagcgaggccgagatcagccacacccagaaagccaccctcgtgtgcctggctaccggcttctaccccgaccatgtggaactgtcttggtgggtcaacggcaaagaggtgcacagcggcgtgtctaccgacccccagccactgaaagaacagcccgccctgaacgacagccggtactgcctgagcagcagactgagagtgtccgccaccttctggcagaacccccggaaccacttcagatgccaggtgcagttctacggcctgagcgagaacgacgagtggacccaggacagagccaagcccgtgacccagatcgtgtctgccgaagcctggggcagagccgattgcggatcccagagcttcggcctgctggaccccaagctgtgctacctgctggatggcatcctgttcatctacggcgtgatcctgaccgccctgttcctgagagtgaagttcagcagaagcgccgacgcccctgcctaccagcagggacagaaccaactgtacaacgagctgaacctgggcagacgggaagagtacgacgtgctggacaagcggagaggcagggaccctgagatgggcggaaagccccagcggagaaagaacccccaggaaggactgtataacgaactccagaaagacaagatggccgaagcctacagcgagatcggcatgaagggcgagcggagaagaggcaagggccacgatggcctgtaccagggcctgagcaccgccaccaaggacacctatgacgccctgcacatgcaggccctgcctccaagaagggccaagcgatctggatctggagcaacaaacttctcactactcaaacaagcaggtgacgtggaggagaatcccgggcctactagtatggactggatttggcgcatccttttccttgtcggcgctgctaccggcgcgcattccgggccccagctccagctgcaagagtctggacctggcctggtcaagcctagcgagacactgagcctgacctgtaccgtgtccggcgatagcatcagcagcggcgattactactggggctggatcagacagcctcctggcaaaggactggaatggatcggccacatctactacagcggcgtgacctactacaaccccagcctgaagtccagagtgaccatcagcgtggacaccagccggaaccagttctccctgaagctgtctagcgtgacagccgccgataccgccgtgtactactgcaccagagaggacagcagcaactggcggagtagaggccagggaacactggtcacagttagctctggatccggcggaggcggaagtggaggcggaggatctggcggcggaggctctttcgaagaagtgcagctggttgaatcaggtggcggcctggttcaacctggcggatctctgagactgagctgtgccgccagcggctacacctttaccgagtacacaatccactgggtccgacaggcccctggcaaaggacttgagtgggtcgccaacatcaaccccaacaatggcggcaccacctacaaccagaagttcgaggacagattcaccatcagccgggacaacagcaagaacaccctgtacctccagatgaactccctgagagccgaggacaccgccgtgtactattgtgccagaggctggaacttcgactactggggccagggaacactggtcaccgttagctctacgcgtatccagaaccctgatcctgccgtgtaccagctgcgggatagcaagagcagcgacaagagcgtgtgtctgttcaccgacttcgacagccagaccaacgtgtcccagagcaaggactccgacgtgtacatcaccgataagaccgtgctggacatgcggagcatggacttcaagagcaactccgccgtggcctggtccaacaagtccgatttcgcctgcgccaacgccttcaacaacagcattatccccgaggacacattcttcccaagccccgagagcagctgcggtacccagagttttgggttgttggaccctaaattgtgctatctgttggacggaatcctgttcatttacggagtgatcctgaccgcattgttcctgcgggttaagttttccagatccgcagacgcacccgcttaccaacaagggcagaaccaactctacaatgaacttaatttggggcggagggaagagtacgacgttctggacaaaaggaggggacgagatcccgagatgggcggaaagcctcagcgaaggaagaatccgcaagaggggctttataacgaactccagaaagataaaatggcagaagcctatagtgagattgggatgaagggagaaaggaggaggggtaaaggtcacgatgggttgtaccaaggattgagcacagccactaaagatacctatgatgcgctccacatgcaggccctgccgccaaga

SEQ ID NO: 9818 - DNA, 2742 bp, Artificial Sequence
  Synthetic Polynucloetide
atggccttaccagtgaccgccttgctcctgccgctggccttgctgctccacgccgccaggccggaagtgcagctggttgaatctggcggaggactggttcagcctggcggatctctgagactgtcttgtgccgccagcggcttcagcttcagcgacttttggatgagctgggtccgacaggcccctggcaaaggacttgaatgggtcgccacaatcagccaggccggcagcgagaaggactacgtggactctgtgaagggcagattcaccatcagccgggacaacgccaagaagtccctgtacctccagatgaacagcctgagagccgaggacaccgccgtgtactattgtgcctctggcgtgtacagcttcgactacagaggccagggcaccctggtcacagtctcttctggtaccggcggaggcggatctggcggcggaggtagcggtggcggaggatctgaattcgacatccagatgacacagagccctagcagcctgtctgccagcgtgggagacagagtgaccatcacatgcaaggccagccaggatgtgggcacagccgtggattggtatcagcagaagcctggcaaggcccctaagctgctgatctactgggccagcacaagacacacaggcgtgcccagcagattttctggcagcggctctggcaccgacttcaccctgacaatatccagcctccagcctgaggacttcgccacctactactgccagcagtacaacagctaccctctgaccttcggccagggcaccaaggtggaaatcaaaagactcgagggacagcctaaggccaatcctaccgtgacactgttccctccaagcagcgaagaactccaggccaacaaggccacacttgtgtgcctgatctccgacttctaccctggggctgtgacagtggcttggaaggccgatggatctcctgtgaaagccggcgtggaaaccaccaagccatccaagcagagcaacaacaaatacgccgccagctcctacctgagcctgacacctgagcagtggaagtcccacagatcctacagctgccaagtgacccacgaaggcagcaccgtggaaaagacagtggcccctacagagtgcagccccatcaagaccgatgtgattacaatggaccccaaggacaactgctccaaggacgccaacgataccctgctgctccagctgaccaacaccagcgcctactacatgtacttgttgctgctgctgaagtccgtggtgtacttcgccatcatcacatgctgcctgctgcggagaaccgccttctgctgcaacggcgagaagtctagggccaagcgatctggatctggagcaacaaacttctcactactcaaacaagcaggtgacgtggaggagaatcccgggcctactagtatggactggatttggcgcatccttttccttgtcggcgctgctaccggcgcgcattccgggccccagctccagctgcaagagtctggacctggcctggtcaagcctagcgagacactgagcctgacctgtaccgtgtccggcgatagcatcagcagcggcgattactactggggctggatcagacagcctcctggcaaaggactggaatggatcggccacatctactacagcggcgtgacctactacaaccccagcctgaagtccagagtgaccatcagcgtggacaccagccggaaccagttctccctgaagctgtctagcgtgacagccgccgataccgccgtgtactactgcaccagagaggacagcagcaactggcggagtagaggccagggaacactggtcacagttagctctggatccggcggaggcggaagtggaggcggaggatctggcggcggaggctctttcgaagaagtgcagctggttgaatcaggtggcggcctggttcaacctggcggatctctgagactgagctgtgccgccagcggctacacctttaccgagtacacaatccactgggtccgacaggcccctggcaaaggacttgagtgggtcgccaacatcaaccccaacaatggcggcaccacctacaaccagaagttcgaggacagattcaccatcagccgggacaacagcaagaacaccctgtacctccagatgaactccctgagagccgaggacaccgccgtgtactattgtgccagaggctggaacttcgactactggggccagggaacactggtcaccgttagctctacgcgtgcctctacaaagggaccctccgtgtttcctctggctcccagcagcaagtctacaagcggaggaacagccgctctgggctgcctggtcaaggattactttcccgagcctgtgaccgtgtcctggaatagcggagcactgacaagcggcgtgcacacctttccagccgtgctgcaaagcagcggcctgtactctctgagcagcgtggtcacagtgcctagctctagcctgggcacccagacctacatctgcaatgtgaaccacaagcctagcaacaccaaggtggacaagagagtggaacccaagagctgtgaagtgaaaaccgactccaccgaccacgtgaagcccaaagagacagagaacaccaagcagcccagcaagagctgccacaagcccaaggccatcgtgcacaccgagaaagtgaacatgatgagcctgaccgtgctgggcctgcggatgctgttcgccaaaaccgtggccgtgaacttcctgctgaccgccaagctgttcttcctc

SEQ ID NO: 9819 - DNA, 2685 bp, Artificial Sequence
  Synthetic Polynucloetide
atggccttaccagtgaccgccttgctcctgccgctggccttgctgctccacgccgccaggccggaagtgcagctggttgaatctggcggaggactggttcagcctggcggatctctgagactgtcttgtgccgccagcggcttcagcttcagcgacttttggatgagctgggtccgacaggcccctggcaaaggacttgaatgggtcgccacaatcagccaggccggcagcgagaaggactacgtggactctgtgaagggcagattcaccatcagccgggacaacgccaagaagtccctgtacctccagatgaacagcctgagagccgaggacaccgccgtgtactattgtgcctctggcgtgtacagcttcgactacagaggccagggcaccctggtcacagtctcttctggtaccggcggaggcggatctggcggcggaggtagcggtggcggaggatctgaattcgacatccagatgacacagagccctagcagcctgtctgccagcgtgggagacagagtgaccatcacatgcaaggccagccaggatgtgggcacagccgtggattggtatcagcagaagcctggcaaggcccctaagctgctgatctactgggccagcacaagacacacaggcgtgcccagcagattttctggcagcggctctggcaccgacttcaccctgacaatatccagcctccagcctgaggacttcgccacctactactgccagcagtacaacagctaccctctgaccttcggccagggcaccaaggtggaaatcaaaagactcgagggacagcctaaggccaatcctaccgtgacactgttccctccaagcagcgaagaactccaggccaacaaggccacacttgtgtgcctgatctccgacttctaccctggggctgtgacagtggcttggaaggccgatggatctcctgtgaaagccggcgtggaaaccaccaagccatccaagcagagcaacaacaaatacgccgccagctcctacctgagcctgacacctgagcagtggaagtcccacagatcctacagctgccaagtgacccacgaaggcagcaccgtggaaaagacagtggcccctacagagtgcagcggcagagccgattgcggctttaccagcgagagctaccagcagggcgtgctgagcgccaccatcctgtacgagatcctgctgggcaaggccaccctgtacgccgtgctggtgtctgccctggtgctgatggctatggtcaagcggaaggacagccggggacgcgccaagagaagcggatctggcgtgaagcagaccctgaatttcgacctgctgaagctggctggcgacgtggaatccaacccaggccctactagtatggactggatttggcgcatccttttccttgtcggcgctgctaccggcgcgcattccgggccccagctccagctgcaagagtctggacctggcctggtcaagcctagcgagacactgagcctgacctgtaccgtgtccggcgatagcatcagcagcggcgattactactggggctggatcagacagcctcctggcaaaggactggaatggatcggccacatctactacagcggcgtgacctactacaaccccagcctgaagtccagagtgaccatcagcgtggacaccagccggaaccagttctccctgaagctgtctagcgtgacagccgccgataccgccgtgtactactgcaccagagaggacagcagcaactggcggagtagaggccagggaacactggtcacagttagctctggatccggcggaggcggaagtggaggcggaggatctggcggcggaggctctttcgaagaagtgcagctggttgaatcaggtggcggcctggttcaacctggcggatctctgagactgagctgtgccgccagcggctacacctttaccgagtacacaatccactgggtccgacaggcccctggcaaaggacttgagtgggtcgccaacatcaaccccaacaatggcggcaccacctacaaccagaagttcgaggacagattcaccatcagccgggacaacagcaagaacaccctgtacctccagatgaactccctgagagccgaggacaccgccgtgtactattgtgccagaggctggaacttcgactactggggccagggaacactggtcaccgttagctctacgcgtgcctctacaaagggaccctccgtgtttcctctggctcccagcagcaagtctacaagcggaggaacagccgctctgggctgcctggtcaaggattactttcccgagcctgtgaccgtgtcctggaatagcggagcactgacaagcggcgtgcacacctttccagccgtgctgcaaagcagcggcctgtactctctgagcagcgtggtcacagtgcctagctctagcctgggcacccagacctacatctgcaatgtgaaccacaagcctagcaacaccaaggtggacaagagagtggaacccaagagctgtatccccgaggacacattcttcccaagccccgagagcagctgcgacgtgaagctggtggaaaagagcttcgagacagacaccaacctgaacttccagaacctgagcgtgatcggcttcagaatcctgctgctgaaagtggccggctttaacctgctgatgaccctgcggctgtggtccagc

SEQ ID NO: 9820 - DNA, 2256 bp, Artificial Sequence
  Synthetic Polynucloetide
atggccttaccagtgaccgccttgctcctgccgctggccttgctgctccacgccgccaggccggaagtgcaggttttggagtctggcggaggactggttcagcctggcggatctctgagactgtcttgtgccgccagcggcttcaccttcagcaactttgccatgagctgggtccgacaggcccctggcaaaggacttgaatgggtgtccacaatcagcggcagcgccggcacaacagattacgccgattctgtgaagggcagattcaccatcagccgggacaacagcaagaaaaccctgtacctccagatgaacagcctgcgcgtggaagataccgccgtgtactactgtgccgatggcagaggccccttcttcgattatcgcggccagggcacactggtcaccgtttcttctggtaccggcggaggcggatctggcggcggaggtagcggtggcggaggatctgaattcgacatccagatgacacagagccctagcagcctgtctgccagcgtgggagacagagtgaccatcacatgcaaggccagccaggatgtgggcacagccgtggattggtatcagcagaagcctggcaaggcccctaagctgctgatctactgggccagcacaagacacacaggcgtgcccagcagattttctggcagcggctctggcaccgacttcaccctgacaatatccagcctccagcctgaggacttcgccacctactactgccagcagtacaacagctaccctctgaccttcggccagggcaccaaggtggaaatcaaaagactcgaggacctgaagaacgtgttcccacctgaggtggccgtgttcgagcctagcgaggccgagatcagccacacccagaaagccaccctcgtgtgcctggctaccggcttctaccccgaccatgtggaactgtcttggtgggtcaacggcaaagaggtgcacagcggcgtgtgtaccgacccccagccactgaaagaacagcccgccctgaacgacagccggtactgcctgagcagcagactgagagtgtccgccaccttctggcagaacccccggaaccacttcagatgccaggtgcagttctacggcctgagcgagaacgacgagtggacccaggacagagccaagcccgtgacccagatcgtgtctgccgaagcctggggcagagccgattgcggctttaccagcgagagctaccagcagggcgtgctgagcgccaccatcctgtacgagatcctgctgggcaaggccaccctgtacgccgtgctggtgtctgccctggtgctgatggctatggtcaagcggaaggacagccggggaagggccaagcgatctggatctggagcaacaaacttctcactactcaaacaagcaggtgacgtggaggagaatcccgggcctactagtatggactggatttggcgcatccttttccttgtcggcgctgctaccggcgcgcattccttcgaagaagtgcagctggttgaatcaggtggcggcctggttcaacctggcggatctctgagactgagctgtgccgccagcggctacacctttaccgagtacacaatccactgggtccgacaggcccctggcaaaggacttgagtgggtcgccaacatcaaccccaacaatggcggcaccacctacaaccagaagttcgaggacagattcaccatcagccgggacaacagcaagaacaccctgtacctccagatgaactccctgagagccgaggacaccgccgtgtactattgtgccagaggctggaacttcgactactggggccagggaacactggtcaccgttagctctacgcgtatccagaaccctgatcctgccgtgtaccagctgcgggatagcaagagcagcgacaagagcgtgtgtctgttcaccgacttcgacagccagaccaacgtgtcccagagcaaggactccgacgtgtacatcaccgataagtgcgtgctggacatgcggagcatggacttcaagagcaactccgccgtggcctggtccaacaagtccgatttcgcctgcgccaacgccttcaacaacagcattatccccgaggacacattcttcccaagccccgagagcagctgcgacgtgaagctggtggaaaagagcttcgagacagacaccaacctgaacttccagaacctgagcgtgatcggcttcagaatcctgctgctgaaagtggccggctttaacctgctgatgaccctgcggctgtggtccagc

SEQ ID NO: 9821 - DNA, 2259 bp, Artificial Sequence
  Synthetic Polynucloetide
atggccttaccagtgaccgccttgctcctgccgctggccttgctgctccacgccgccaggccggacatccagatgacacagagccctagcagcctgtctgccagcgtgggagacagagtgaccatcacatgcaaggccagccaggatgtgggcacagccgtggattggtatcagcagaagcctggcaaggcccctaagctgctgatctactgggccagcacaagacacacaggcgtgcccagcagattttctggcagcggctctggcaccgacttcaccctgacaatatccagcctccagcctgaggacttcgccacctactactgccagcagtacaacagctaccctctgaccttcggccagggcaccaaggtggaaatcaaaagactcgaggacctgaagaacgtgttcccacctgaggtggccgtgttcgagcctagcgaggccgagatcagccacacccagaaagccaccctcgtgtgcctggctaccggcttctaccccgaccatgtggaactgtcttggtgggtcaacggcaaagaggtgcacagcggcgtgtgtaccgacccccagccactgaaagaacagcccgccctgaacgacagccggtactgcctgagcagcagactgagagtgtccgccaccttctggcagaacccccggaaccacttcagatgccaggtgcagttctacggcctgagcgagaacgacgagtggacccaggacagagccaagcccgtgacccagatcgtgtctgccgaagcctggggcagagccgattgcggctttaccagcgagagctaccagcagggcgtgctgagcgccaccatcctgtacgagatcctgctgggcaaggccaccctgtacgccgtgctggtgtctgccctggtgctgatggctatggtcaagcggaaggacagccggggaagggccaagcgatctggatctggagcaacaaacttctcactactcaaacaagcaggtgacgtggaggagaatcccgggcctactagtatggactggatttggcgcatccttttccttgtcggcgctgctaccggcgcccattccgggcccgaagtgcagctggttgaatctggcggaggactggttcaggctggcggatctctgagactgtcttgtgccgccagcggcagaacctttagcatgggctggtttagacaggcccctggcaaagagagagagttcgtcgccgccatcacatactctggcggcagcccttactacgccgactctgtgaagggcagattcaccatcagccgggacaacgccaagaacaccgtgtacctccagatgaacagcctgaagcctgaggacaccgccgtgtactactgcgccgccaatccaacatacggcagcgactggaacgccgagaattggggccagggaacccaagtgacagtgtctagcggatccggcggcggaggatctggcggaggcggatctgggggcggaggctctttcgaagaagtgcagctggttgaatcaggtggcggcctggttcaacctggcggatctctgagactgagctgtgccgccagcggctacacctttaccgagtacacaatccactgggtccgacaggcccctggcaaaggacttgagtgggtcgccaacatcaaccccaacaatggcggcaccacctacaaccagaagttcgaggacagattcaccatcagccgggacaacagcaagaacaccctgtacctccagatgaactccctgagagccgaggacaccgccgtgtactattgtgccagaggctggaacttcgactactggggccagggaacactggtcaccgttagctctacgcgtatccagaaccctgatcctgccgtgtaccagctgcgggatagcaagagcagcgacaagagcgtgtgtctgttcaccgacttcgacagccagaccaacgtgtcccagagcaaggactccgacgtgtacatcaccgataagtgcgtgctggacatgcggagcatggacttcaagagcaactccgccgtggcctggtccaacaagtccgatttcgcctgcgccaacgccttcaacaacagcattatccccgaggacacattcttcccaagccccgagagcagctgcgacgtgaagctggtggaaaagagcttcgagacagacaccaacctgaacttccagaacctgagcgtgatcggcttcagaatcctgctgctgaaagtggccggctttaacctgctgatgaccctgcggctgtggtccagc

SEQ ID NO: 9822 - DNA, 2640 bp, Artificial Sequence
  Synthetic Polynucloetide
atggccttaccagtgaccgccttgctcctgccgctggccttgctgctccacgccgccaggccggacatccagatgacacagagccctagcagcctgtctgccagcgtgggagacagagtgaccatcacatgcaaggccagccaggatgtgggcacagccgtggattggtatcagcagaagcctggcaaggcccctaagctgctgatctactgggccagcacaagacacacaggcgtgcccagcagattttctggcagcggctctggcaccgacttcaccctgacaatatccagcctccagcctgaggacttcgccacctactactgccagcagtacaacagctaccctctgaccttcggccagggcaccaaggtggaaatcaaaagactcgaggacctgaagaacgtgttcccacctgaggtggccgtgttcgagcctagcgaggccgagatcagccacacccagaaagccaccctcgtgtgcctggctaccggcttctaccccgaccatgtggaactgtcttggtgggtcaacggcaaagaggtgcacagcggcgtgtgtaccgacccccagccactgaaagaacagcccgccctgaacgacagccggtactgcctgagcagcagactgagagtgtccgccaccttctggcagaacccccggaaccacttcagatgccaggtgcagttctacggcctgagcgagaacgacgagtggacccaggacagagccaagcccgtgacccagatcgtgtctgccgaagcctggggcagagccgattgcggctttaccagcgagagctaccagcagggcgtgctgagcgccaccatcctgtacgagatcctgctgggcaaggccaccctgtacgccgtgctggtgtctgccctggtgctgatggctatggtcaagcggaaggacagccggggaagggccaagcgatctggatctggagcaacaaacttctcactactcaaacaagcaggtgacgtggaggagaatcccgggcctactagtatggactggatttggcgcatccttttccttgtcggcgctgctaccggcgcccattcccaactgcaactgcaagagtctggccctggcctggtcaagccttctgaaaccctgagcctgacctgtaccgtgtccggcggctctatcagcagcggcgattactactggggctggatcagacagcctccaggcaagggactcgaatggatcggcagcatcagctacagcggctccacctactacaacccaagcctgaagtccagagtgaccatcagcgtggacaccagcagaaaccagttctccctgaagctgagcagcgtgacagccgccgatacagccgtgtattattgcaccagagaggacagcagcaactggcggagtagaggacagggcacactggtcacagtgtcctcttctggaggcggtggaagcggtggaggaggatctgaagtgcagctggttgaatctggcggaggactggttcaggctggcggatctctgagactgtcttgtgccgccagcggcagaacctttagcatgggctggtttagacaggcccctggcaaagagagagagttcgtcgccgccatcacatactctggcggcagcccttactacgccgactctgtgaagggcagattcaccatcagccgggacaacgccaagaacaccgtgtacctccagatgaacagcctgaagcctgaggacaccgccgtgtactactgcgccgccaatccaacatacggcagcgactggaacgccgagaattggggccagggaacccaagtgacagtgtctagcggatccggcggcggaggatctggcggaggcggatctgggggcggaggctctttcgaagaagtgcagctggttgaatcaggtggcggcctggttcaacctggcggatctctgagactgagctgtgccgccagcggctacacctttaccgagtacacaatccactgggtccgacaggcccctggcaaaggacttgagtgggtcgccaacatcaaccccaacaatggcggcaccacctacaaccagaagttcgaggacagattcaccatcagccgggacaacagcaagaacaccctgtacctccagatgaactccctgagagccgaggacaccgccgtgtactattgtgccagaggctggaacttcgactactggggccagggaacactggtcaccgttagctctacgcgtatccagaaccctgatcctgccgtgtaccagctgcgggatagcaagagcagcgacaagagcgtgtgtctgttcaccgacttcgacagccagaccaacgtgtcccagagcaaggactccgacgtgtacatcaccgataagtgcgtgctggacatgcggagcatggacttcaagagcaactccgccgtggcctggtccaacaagtccgatttcgcctgcgccaacgccttcaacaacagcattatccccgaggacacattcttcccaagccccgagagcagctgcgacgtgaagctggtggaaaagagcttcgagacagacaccaacctgaacttccagaacctgagcgtgatcggcttcagaatcctgctgctgaaagtggccggctttaacctgctgatgaccctgcggctgtggtccagc

SEQ ID NO: 9823 - DNA, 2667 bp, Artificial Sequence
  Synthetic Polynucloetide
atggccttaccagtgaccgccttgctcctgccgctggccttgctgctccacgccgccaggccggaagtgcaggttttggagtctggcggaggactggttcagcctggcggatctctgagactgtcttgtgccgccagcggcttcaccttcagcaactttgccatgagctgggtccgacaggcccctggcaaaggacttgaatgggtgtccacaatcagcggcagcgccggcacaacagattacgccgattctgtgaagggcagattcaccatcagccgggacaacagcaagaaaaccctgtacctccagatgaacagcctgcgcgtggaagataccgccgtgtactactgtgccgatggcagaggccccttcttcgattatcgcggccagggcacactggtcaccgtttcttctggtaccggcggaggcggatctggcggcggaggtagcggtggcggaggatctgaattcgacatccagatgacacagagccctagcagcctgtctgccagcgtgggagacagagtgaccatcacatgcaaggccagccaggatgtgggcacagccgtggattggtatcagcagaagcctggcaaggcccctaagctgctgatctactgggccagcacaagacacacaggcgtgcccagcagattttctggcagcggctctggcaccgacttcaccctgacaatatccagcctccagcctgaggacttcgccacctactactgccagcagtacaacagctaccctctgaccttcggccagggcaccaaggtggaaatcaaaagactcgaggacctgaagaacgtgttcccacctgaggtggccgtgttcgagcctagcgaggccgagatcagccacacccagaaagccaccctcgtgtgcctggctaccggcttctaccccgaccatgtggaactgtcttggtgggtcaacggcaaagaggtgcacagcggcgtgtgtaccgacccccagccactgaaagaacagcccgccctgaacgacagccggtactgcctgagcagcagactgagagtgtccgccaccttctggcagaacccccggaaccacttcagatgccaggtgcagttctacggcctgagcgagaacgacgagtggacccaggacagagccaagcccgtgacccagatcgtgtctgccgaagcctggggcagagccgattgcggctttaccagcgagagctaccagcagggcgtgctgagcgccaccatcctgtacgagatcctgctgggcaaggccaccctgtacgccgtgctggtgtctgccctggtgctgatggctatggtcaagcggaaggacagccggggaagggccaagcgatctggatctggagcaacaaacttctcactactcaaacaagcaggtgacgtggaggagaatcccgggcctactagtatggactggatttggcgcatccttttccttgtcggcgctgctaccggcgcccattccgggcccgaagtgcagctggttgaatctggcggaggactggttcaggctggcggatctctgagactgtcttgtgccgccagcggcagaacctttagcatgggctggtttagacaggcccctggcaaagagagagagttcgtcgccgccatcacatacagcggcggcagcccttactacgcctcttctgtcagaggccggttcaccatcagccgggacaacgccaagaacaccgtgtacctccagatgaacagcctgaagccagaggacaccgccgtgtactactgtgccgccaatccaacctacggcagcgactggaatgccgagaattggggccagggcacccaagtgacagtgtctagtggatccggcggcggaggatctggcggaggcggatctgggggcggaggctctttcgaagaagtgcagctggttgaatcaggtggcggcctggttcaacctggcggatctctgagactgagctgtgccgccagcggctacacctttaccgagtacacaatccactgggtccgacaggcccctggcaaaggacttgagtgggtcgccaacatcaaccccaacaatggcggcaccacctacaaccagaagttcgaggacagattcaccatcagccgggacaacagcaagaacaccctgtacctccagatgaactccctgagagccgaggacaccgccgtgtactattgtgccagaggctggaacttcgactactggggccagggaacactggtcaccgttagctctacgcgtatccagaaccctgatcctgccgtgtaccagctgcgggatagcaagagcagcgacaagagcgtgtgtctgttcaccgacttcgacagccagaccaacgtgtcccagagcaaggactccgacgtgtacatcaccgataagtgcgtgctggacatgcggagcatggacttcaagagcaactccgccgtggcctggtccaacaagtccgatttcgcctgcgccaacgccttcaacaacagcattatccccgaggacacattcttcccaagccccgagagcagctgcgacgtgaagctggtggaaaagagcttcgagacagacaccaacctgaacttccagaacctgagcgtgatcggcttcagaatcctgctgctgaaagtggccggctttaacctgctgatgaccctgcggctgtggtccagc

SEQ ID NO: 9824 - DNA, 2169 bp, Artificial Sequence
  Synthetic Polynucloetide
atggccttaccagtgaccgccttgctcctgccgctggccttgctgctccacgccgccaggccggacatccagatgacacagagccctagcagcctgtctgccagcgtgggagacagagtgaccatcacatgcaaggccagccaggatgtgggcacagccgtggattggtatcagcagaagcctggcaaggcccctaagctgctgatctcttgggccagcacaagacacacaggcgtgcccagcagattttctggcagcggctctggcaccgacttcaccctgacaatatccagcctccagcctgaggacttcgccacctacttttgccagcagtacaacagctaccctctgaccttcggccagggcaccaaggtggaaatcaagagaacagttggcggaggcggaagtggaggcggaggatctggcggcggaggctctcaagttcagctggttcagagcggagccgaagtgaagaaacctggcgagagcgtgaaggtgtcctgcaaagccagcggctacacctttaccgagtacaccatccactgggtccgacaggctccaggacaaggactggaatggatgggcaacatcaaccccaacaacggcggcaccacctacaaccagaaattcgaggatcgcgtgacaatcaccgccgacaagagcaccagcaccgcctacatggaactgagcagcctgagaagcgaggacaccgccgtgtactattgtgccagaggctggaacttcgactactggggccagggaaccaccgtgacagtctcttctacgcgtgagcagaaactgatctcggaagaggatctggcgaagcccaccacgacgccagcgccgcgaccaccaacaccggcgcccaccatcgcgtcgcagcccctgtccctgcgcccagaggcgtgccggccagcggcggggggcgcagtgcacacgagggggctggacttcgcctgtgacatctacatctgggcgcccttggccgggacttgtggggtccttctcctgtcactggttatcaccctttactgcaaacggggcagaaagaaactcctgtatatattcaaacaaccatttatgagaccagtacaaactactcaagaggaagatggctgtagctgccgatttccagaagaagaagaaggaggatgtgaactgagagtgaagttcagcaggagcgcagacgcccccgcgtaccagcagggccagaaccagctctataacgagctgaatctaggacgaagagaggagtacgatgttttggacaagagacgtggccgggaccctgagatggggggaaagccgagaaggaagaaccctcaggaaggcctgtacaatgaactgcagaaagataagatggcggaggcctacagtgagattgggatgaaaggcgagcgccggaggggcaaggggcacgatggcctttaccagggtctcagtacagccaccaaggacacctacgacgcccttcacatgcaggccctgccccctcgctctagtggctccggcgagggcagaggaagtctactaacctgcggagatgtggaagaaaatcctggcccacatatgaccgagtacaagcccacggtgcgcctcgccacccgcgacgacgtccccagggccgtacgcaccctcgccgccgcgttcgccgactaccccgccacgcgccacaccgtcgatccggaccgccacatcgagcgggtcaccgagctgcaagaactcttcctcacgcgcgtcgggctcgacatcggcaaggtgtgggtcgcggacgacggcgccgcggtggcggtctggaccacgccggagagcgtcgaagcgggggcggtgttcgccgagatcggcccgcgcatggccgagttgagcggttcccggctggccgcgcagcaacagatggaaggcctcctggcgccgcaccggcccaaggagcccgcgtggttcctggccaccgtcggcgtctcgcccgaccaccagggcaagggtctgggcagcgccgtcgtgctccccggagtggaggcggccgagcgcgccggggtgcccgccttcctggagacctccgcgccccgcaacctccccttctacgagcggctcggcttcaccgtcaccgccgacgtcgaggtgcccgaaggaccgcgcacctggtgcatgacccgcaagcccggtgcctga

SEQ ID NO: 9825 - DNA, 2151 bp, Artificial Sequence
  Synthetic Polynucloetide
atggccttaccagtgaccgccttgctcctgccgctggccttgctgctccacgccgccaggccggacatccagatgacacagagccctagcagcctgtctgccagcgtgggagacagagtgaccatcacatgcaaggccagccaggatgtgggcacagccgtggattggtatcagcagaagcctggcaaggcccctaagctgctgatctcttgggccagcacaagacacacaggcgtgcccagcagattttctggcagcggctctggcaccgacttcaccctgacaatatccagcctccagcctgaggacttcgccacctacttttgccagcagtacaacagctaccctctgaccttcggccagggcaccaaggtggaaatcaagagaacagttggcggaggcggaagtggaggcggaggatctggcggcggaggctctcaagttcagctggttcagagcggagccgaagtgaagaaacctggcgagagcgtgaaggtgtcctgcaaagccagcggctacacctttaccgagtacaccatccactgggtccgacaggctccaggacaaggactggaatggatgggcaacatcaaccccaacaacggcggcaccacctacaaccagaaattcgaggatcgcgtgacaatcaccgccgacaagagcaccagcaccgcctacatggaactgagcagcctgagaagcgaggacaccgccgtgtactattgtgccagaggctggaacttcgactactggggccagggaaccaccgtgacagtctcttctacgcgtgagcagaaactgatctcggaagaggatctgaaaattgaagttatgtatcctcctccttacctagacaatgagaagagcaatggaaccattatccatgtgaaagggaaacacctttgtccaagtcccctatttcccggaccttctaagcccttttgggtgctggtggtggttgggggagtcctggcttgctatagcttgctagtaacagtggcctttattattttctgggtgaggagtaagaggagcaggctcctgcacagtgactacatgaacatgactccacgccgccccggacccacccgcaagcattaccagccctatgccccaccacgcgacttcgcagcctatcgctccagagtgaagttcagcaggagcgcagacgcccccgcgtaccagcagggccagaaccagctctataacgagctcaatctaggacgaagagaggagtacgatgttttggacaagagacgtggccgggaccctgagatggggggaaagccgagaaggaagaaccctcaggaaggcctgtacaatgaactgcagaaagataagatggcggaggcctacagtgagattgggatgaaaggcgagcgccggaggggcaaggggcacgatggcctttaccagggtctcagtacagccaccaaggacacctacgacgcccttcacatgcaggccctgccccctcgctctagtggctccggcgagggcagaggaagtctactaacctgcggagatgtggaagaaaatcctggcccacatatgaccgagtacaagcccacggtgcgcctcgccacccgcgacgacgtccccagggccgtacgcaccctcgccgccgcgttcgccgactaccccgccacgcgccacaccgtcgatccggaccgccacatcgagcgggtcaccgagctgcaagaactcttcctcacgcgcgtcgggctcgacatcggcaaggtgtgggtcgcggacgacggcgccgcggtggcggtctggaccacgccggagagcgtcgaagcgggggcggtgttcgccgagatcggcccgcgcatggccgagttgagcggttcccggctggccgcgcagcaacagatggaaggcctcctggcgccgcaccggcccaaggagcccgcgtggttcctggccaccgtcggcgtctcgcccgaccaccagggcaagggtctgggcagcgccgtcgtgctccccggagtggaggcggccgagcgcgccggggtgcccgccttcctggagacctccgcgccccgcaacctccccttctacgagcggctcggcttcaccgtcaccgccgacgtcgaggtgcccgaaggaccgcgcacctggtgcatgacccgcaagcccggtgcctga

SEQ ID NO: 9826 - DNA, 1479 bp, Artificial Sequence
  Synthetic Polynucloetide
atggccttaccagtgaccgccttgctcctgccgctggccttgctgctccacgccgccaggccggacatccagatgacacagagccctagcagcctgtctgccagcgtgggagacagagtgaccatcacatgcaaggccagccaggatgtgggcacagccgtggattggtatcagcagaagcctggcaaggcccctaagctgctgatctcttgggccagcacaagacacacaggcgtgcccagcagattttctggcagcggctctggcaccgacttcaccctgacaatatccagcctccagcctgaggacttcgccacctacttttgccagcagtacaacagctaccctctgaccttcggccagggcaccaaggtggaaatcaagagaacagttggcggaggcggaagtggaggcggaggatctggcggcggaggctctcaagttcagctggttcagagcggagccgaagtgaagaaacctggcgagagcgtgaaggtgtcctgcaaagccagcggctacacctttaccgagtacaccatccactgggtccgacaggctccaggacaaggactggaatggatgggcaacatcaaccccaacaacggcggcaccacctacaaccagaaattcgaggatcgcgtgacaatcaccgccgacaagagcaccagcaccgcctacatggaactgagcagcctgagaagcgaggacaccgccgtgtactattgtgccagaggctggaacttcgactactggggccagggaaccaccgtgacagtctcttctacgcgtgagcagaaactgatctcggaagaggatctgaaaattgaagttatgtatcctcctccttacctagacaatgagaagagcaatggaaccattatccatgtgaaagggaaacacctttgtccaagtcccctatttcccggaccttctaagcccttttgggtgctggtggtggttgggggagtcctggcttgctatagcttgctagtaacagtggcctttattattttctgggtgaggagtaagaggagcaggctcctgcacagtgactacatgaacatgactccacgccgccccggacccacccgcaagcattaccagccctatgccccaccacgcgacttcgcagcctatcgctccagagtgaagttcagcaggagcgcagacgcccccgcgtaccagcagggccagaaccagctctataacgagctcaatctaggacgaagagaggagtacgatgttttggacaagagacgtggccgggaccctgagatggggggaaagccgagaaggaagaaccctcaggaaggcctgtacaatgaactgcagaaagataagatggcggaggcctacagtgagattgggatgaaaggcgagcgccggaggggcaaggggcacgatggcctttaccagggtctcagtacagccaccaaggacacctacgacgcccttcacatgcaggccctgccccctcgc

SEQ ID NO: 9827 - DNA, 1500 bp, Artificial Sequence
  Synthetic Polynucloetide
atggccttaccagtgaccgccttgctcctgccgctggccttgctgctccacgccgccaggccggacatccagatgacacagagccctagcagcctgtctgccagcgtgggagacagagtgaccatcacatgcaaggccagccaggatgtgggcacagccgtggattggtatcagcagaagcctggcaaggcccctaagctgctgatctcttgggccagcacaagacacacaggcgtgcccagcagattttctggcagcggctctggcaccgacttcaccctgacaatatccagcctccagcctgaggacttcgccacctacttttgccagcagtacaacagctaccctctgaccttcggccagggcaccaaggtggaaatcaagagaacagttggcggaggcggaagtggaggcggaggatctggcggcggaggctctcaagttcagctggttcagagcggagccgaagtgaagaaacctggcgagagcgtgaaggtgtcctgcaaagccagcggctacacctttaccgagtacaccatccactgggtccgacaggctccaggacaaggactggaatggatgggcaacatcaaccccaacaacggcggcaccacctacaaccagaaattcgaggatcgcgtgacaatcaccgccgacaagagcaccagcaccgcctacatggaactgagcagcctgagaagcgaggacaccgccgtgtactattgtgccagaggctggaacttcgactactggggccagggaaccaccgtgacagtctcttctacgcgtgagcagaaactgatctcggaagaggatctggcgaagcccaccacgacgccagcgccgcgaccaccaacaccggcgcccaccatcgcgtcgcagcccctgtccctgcgcccagaggcgtgccggccagcggcggggggcgcagtgcacacgagggggctggacttcgcctgtgacatctacatctgggcgcccttggccgggacttgtggggtccttctcctgtcactggttatcaccctttactgcaaacggggcagaaagaaactcctgtatatattcaaacaaccatttatgagaccagtacaaactactcaagaggaagatggctgtagctgccgatttccagaagaagaagaaggaggatgtgaactgagagtgaagttcagcaggagcgcagacgcccccgcgtaccagcagggccagaaccagctctataacgagctgaatctaggacgaagagaggagtacgatgttttggacaagagacgtggccgggaccctgagatggggggaaagccgagaaggaagaaccctcaggaaggcctgtacaatgaactgcagaaagataagatggcggaggcctacagtgagattgggatgaaaggcgagcgccggaggggcaaggggcacgatggcctttaccagggtctcagtacagccaccaaggacacctacgacgcccttcacatgcaggccctgccccctcgctga

SEQ ID NO: 9828 - DNA, 1500 bp, Artificial Sequence
  Synthetic Polynucloetide
atggccttaccagtgaccgccttgctcctgccgctggccttgctgctccacgccgccaggccgcaagttcagctggttcagagcggagccgaagtgaagaaacctggcgagagcgtgaaggtgtcctgcaaagccagcggctacacctttaccgagtacaccatccactgggtccgacaggctccaggacaaggactggaatggatgggcaacatcaaccccaacaacggcggcaccacctacaaccagaaattcgaggatcgcgtgacaatcaccgccgacaagagcaccagcaccgcctacatggaactgagcagcctgagaagcgaggacaccgccgtgtactattgtgccagaggctggaacttcgactactggggccagggaaccaccgtgacagtctcttctggcggaggcggaagtggaggcggaggatctggcggcggaggctctgacatccagatgacacagagccctagcagcctgtctgccagcgtgggagacagagtgaccatcacatgcaaggccagccaggatgtgggcacagccgtggattggtatcagcagaagcctggcaaggcccctaagctgctgatctcttgggccagcacaagacacacaggcgtgcccagcagattttctggcagcggctctggcaccgacttcaccctgacaatatccagcctccagcctgaggacttcgccacctacttttgccagcagtacaacagctaccctctgaccttcggccagggcaccaaggtggaaatcaagagaacagttacgcgtgagcagaaactgatctcggaagaggatctggcgaagcccaccacgacgccagcgccgcgaccaccaacaccggcgcccaccatcgcgtcgcagcccctgtccctgcgcccagaggcgtgccggccagcggcggggggcgcagtgcacacgagggggctggacttcgcctgtgacatctacatctgggcgcccttggccgggacttgtggggtccttctcctgtcactggttatcaccctttactgcaaacggggcagaaagaaactcctgtatatattcaaacaaccatttatgagaccagtacaaactactcaagaggaagatggctgtagctgccgatttccagaagaagaagaaggaggatgtgaactgagagtgaagttcagcaggagcgcagacgcccccgcgtaccagcagggccagaaccagctctataacgagctgaatctaggacgaagagaggagtacgatgttttggacaagagacgtggccgggaccctgagatggggggaaagccgagaaggaagaaccctcaggaaggcctgtacaatgaactgcagaaagataagatggcggaggcctacagtgagattgggatgaaaggcgagcgccggaggggcaaggggcacgatggcctttaccagggtctcagtacagccaccaaggacacctacgacgcccttcacatgcaggccctgccccctcgctga

SEQ ID NO: 9829 - DNA, 2739 bp, Artificial Sequence
  Synthetic Polynucloetide
atggccttaccagtgaccgccttgctcctgccgctggccttgctgctccacgccgccaggccggacatccagatgacacagagccctagcagcctgtctgccagcgtgggagacagagtgaccatcacatgcaaggccagccaggatgtgggcacagccgtggattggtatcagcagaagcctggcaaggcccctaagctgctgatctcttgggccagcacaagacacacaggcgtgcccagcagattttctggcagcggctctggcaccgacttcaccctgacaatatccagcctccagcctgaggacttcgccacctacttttgccagcagtacaacagctaccctctgaccttcggccagggcaccaaggtggaaatcaagagaacagttggcggaggcggaagtggaggcggaggatctggcggcggaggctctcaagttcagctggttcagagcggagccgaagtgaagaaacctggcgagagcgtgaaggtgtcctgcaaagccagcggctacacctttaccgagtacaccatccactgggtccgacaggctccaggacaaggactggaatggatgggcaacatcaaccccaacaacggcggcaccacctacaaccagaaattcgaggatcgcgtgacaatcaccgccgacaagagcaccagcaccgcctacatggaactgagcagcctgagaagcgaggacaccgccgtgtactattgtgccagaggctggaacttcgactactggggccagggaaccaccgtgacagtctcttctacgcgtgagcagaaactgatctcggaagaggatctggcgaagcccaccacgacgccagcgccgcgaccaccaacaccggcgcccaccatcgcgtcgcagcccctgtccctgcgcccagaggcgtgccggccagcggcggggggcgcagtgcacacgagggggctggacttcgcctgtgacatctacatctgggcgcccttggccgggacttgtggggtccttctcctgtcactggttatcaccctttactgcgggcgcgccagagtgaagttcagcaggagcgcagacgcccccgcgtaccagcagggccagaaccagctctataacgagctgaatctaggacgaagagaggagtacgatgttttggacaagagacgtggccgggaccctgagatggggggaaagccgagaaggaagaaccctcaggaaggcctgtacaatgaactgcagaaagataagatggcggaggcctacagtgagattgggatgaaaggcgagcgccggaggggcaaggggcacgatggcctttaccagggtctcagtacagccaccaaggacacctacgacgcccttcacatgcaggccctgccccctcgctctagaggatctggagcaacaaacttctcactactcaaacaagcaggtgacgtggaggagaatcccgggcctgggatccacatggccacttacgaggttctctgtgaggtggcgcggaaactgggcacggatgacagggaagtggtattgttcctcctaaacgtgttcatacctcaacccacactggcccaattaattggagctcttagagctttaaaggaggagggcaggttaacgtttcccctgttagcggaatgtctgtttcgtgcaggtcgcagagacctcttgcgcgacctgcttcacttagacccgcgttttttagagcgccacctagcgggcacaatgagttatttcagcccttatcagctcactgttctccacgtagacggggagctgtgtgcgagggatattaggtctttgatatttttaagcaaggacactatagggtctcgcagcacaccacagacattcttacactgggtgtactgtatggaaaacttagacctactgggtcccactgacgtggatgccctaatgtcaatgcttagatctttgtcaagagtagacctacagcgccaagtgcaaaccctaatgggccttcacctttccggcccatcacactcccaacactatcgccatacaccactcgagaccgatttctacgactacaaggacgacgatgacaagactagtggctccggcgagggcagaggaagtctactaacctgcggagatgtggaagaaaatcctggcccacatatgaccgagtacaagcccacggtgcgcctcgccacccgcgacgacgtccccagggccgtacgcaccctcgccgccgcgttcgccgactaccccgccacgcgccacaccgtcgatccggaccgccacatcgagcgggtcaccgagctgcaagaactcttcctcacgcgcgtcgggctcgacatcggcaaggtgtgggtcgcggacgacggcgccgcggtggcggtctggaccacgccggagagcgtcgaagcgggggcggtgttcgccgagatcggcccgcgcatggccgagttgagcggttcccggctggccgcgcagcaacagatggaaggcctcctggcgccgcaccggcccaaggagcccgcgtggttcctggccaccgtcggcgtctcgcccgaccaccagggcaagggtctgggcagcgccgtcgtgctccccggagtggaggcggccgagcgcgccggggtgcccgccttcctggagacctccgcgccccgcaacctccccttctacgagcggctcggcttcaccgtcaccgccgacgtcgaggtgcccgaaggaccgcgcacctggtgcatgacccgcaagcccggtgcctga

SEQ ID NO: 9830 - DNA, 2559 bp, Artificial Sequence
  Synthetic Polynucloetide
atggccttaccagtgaccgccttgctcctgccgctggccttgctgctccacgccgccaggccggacatccagatgacacagagccctagcagcctgtctgccagcgtgggagacagagtgaccatcacatgcaaggccagccaggatgtgggcacagccgtggattggtatcagcagaagcctggcaaggcccctaagctgctgatctcttgggccagcacaagacacacaggcgtgcccagcagattttctggcagcggctctggcaccgacttcaccctgacaatatccagcctccagcctgaggacttcgccacctacttttgccagcagtacaacagctaccctctgaccttcggccagggcaccaaggtggaaatcaagagaacagttctcgagatccagaaccctgatcctgccgtgtaccagctgcgggatagcaagagcagcgacaagagcgtgtgtctgttcaccgacttcgacagccagaccaacgtgtcccagagcaaggactccgacgtgtacatcaccgataagtgcgtgctggacatgcggagcatggacttcaagagcaactccgccgtggcctggtccaacaagtccgatttcgcctgcgccaacgccttcaacaacagcattatccccgaggacacattcttcccaagcagcgacgtgccctgcgacgtgaagctggtggaaaagagcttcgagacagacaccaacctgaacttccagaacctgagcgtgatcggcttcagaatcctgctgctgaaagtggccggctttaacctgctgatgaccctgcggctgtggtccagccgcgccaagagaagcggatctggcgtgaagcagaccctgaatttcgacctgctgaagctggctggcgacgtggaatccaacccaggccctactagtatggactggatttggcgcatccttttccttgtcggcgctgctaccggcgcgcattccttcgaacaagttcagctggttcagagcggagccgaagtgaagaaacctggcgagagcgtgaaggtgtcctgcaaagccagcggctacacctttaccgagtacaccatccactgggtccgacaggctccaggacaaggactggaatggatgggcaacatcaaccccaacaacggcggcaccacctacaaccagaaattcgaggatcgcgtgacaatcaccgccgacaagagcaccagcaccgcctacatggaactgagcagcctgagaagcgaggacaccgccgtgtactattgtgccagaggctggaacttcgactactggggccagggaaccaccgtgacagtctcttctacgcgtgaggacctgaagaacgtgttcccacctgaggtggccgtgttcgagcctagcaaggccgagatcgcccacacccagaaagccaccctcgtgtgcctggctaccggcttctaccccgaccatgtggaactgtcttggtgggtcaacggcaaagaggtgcacagcggcgtgtgtaccgacccccagccactgaaagaacagcccgccctgaacgacagccggtactgcctgagcagcagactgagagtgtccgccaccttctggcagaacccccggaaccacttcagatgccaggtgcagttctacggcctgagcgagaacgacgagtggacccaggacagagccaagcccgtgacccagatcgtgtctgccgaagcctggggcagagccgattgcggcatcaccagcgccagctaccaccagggcgtgctgagcgccaccatcctgtacgagatcctgctgggcaaggccaccctgtacgccgtgctggtgtctgccctggtgctgatggctatggtcaagcggaaggacagccggggaagggccaagcgatctggatctggagcaacaaacttctcactactcaaacaagcaggtgacgtggaggagaatcccgggccttctagaggccatatgaccgagtacaagcccacggtgcgcctcgccacccgcgacgacgtccccagggccgtacgcaccctcgccgccgcgttcgccgactaccccgccacgcgccacaccgtcgatccggaccgccacatcgagcgggtcaccgagctgcaagaactcttcctcacgcgcgtcgggctcgacatcggcaaggtgtgggtcgcggacgacggcgccgcggtggcggtctggaccacgccggagagcgtcgaagcgggggcggtgttcgccgagatcggcccgcgcatggccgagttgagcggttcccggctggccgcgcagcaacagatggaaggcctcctggcgccgcaccggcccaaggagcccgcgtggttcctggccaccgtcggcgtctcgcccgaccaccagggcaagggtctgggcagcgccgtcgtgctccccggagtggaggcggccgagcgcgccggggtgcccgccttcctggagacctccgcgccccgcaacctccccttctacgagcggctcggcttcaccgtcaccgccgacgtcgaggtgcccgaaggaccgcgcacctggtgcatgacccgcaagcccggtgcctga

SEQ ID NO: 9831 - DNA, 2556 bp, Artificial Sequence
  Synthetic Polynucloetide
atggccttaccagtgaccgccttgctcctgccgctggccttgctgctccacgccgccaggccggacatccagatgacacagagccctagcagcctgtctgccagcgtgggagacagagtgaccatcacatgcaaggccagccaggatgtgggcacagccgtggattggtatcagcagaagcctggcaaggcccctaagctgctgatctcttgggccagcacaagacacacaggcgtgcccagcagattttctggcagcggctctggcaccgacttcaccctgacaatatccagcctccagcctgaggacttcgccacctacttttgccagcagtacaacagctaccctctgaccttcggccagggcaccaaggtggaaatcaagagaacagttctcgaggacctgaagaacgtgttcccacctgaggtggccgtgttcgagcctagcaaggccgagatcgcccacacccagaaagccaccctcgtgtgcctggctaccggcttctaccccgaccatgtggaactgtcttggtgggtcaacggcaaagaggtgcacagcggcgtgtgtaccgacccccagccactgaaagaacagcccgccctgaacgacagccggtactgcctgagcagcagactgagagtgtccgccaccttctggcagaacccccggaaccacttcagatgccaggtgcagttctacggcctgagcgagaacgacgagtggacccaggacagagccaagcccgtgacccagatcgtgtctgccgaagcctggggcagagccgattgcggcatcaccagcgccagctaccaccagggcgtgctgagcgccaccatcctgtacgagatcctgctgggcaaggccaccctgtacgccgtgctggtgtctgccctggtgctgatggctatggtcaagcggaaggacagccggggaagggccaagcgatctggatctggagcaacaaacttctcactactcaaacaagcaggtgacgtggaggagaatcccgggcctactagtatggactggatttggcgcatccttttccttgtcggcgctgctaccggcgcgcattccttcgaacaagttcagctggttcagagcggagccgaagtgaagaaacctggcgagagcgtgaaggtgtcctgcaaagccagcggctacacctttaccgagtacaccatccactgggtccgacaggctccaggacaaggactggaatggatgggcaacatcaaccccaacaacggcggcaccacctacaaccagaaattcgaggatcgcgtgacaatcaccgccgacaagagcaccagcaccgcctacatggaactgagcagcctgagaagcgaggacaccgccgtgtactattgtgccagaggctggaacttcgactactggggccagggaaccaccgtgacagtctcttctacgcgtatccagaaccctgatcctgccgtgtaccagctgcgggatagcaagagcagcgacaagagcgtgtgtctgttcaccgacttcgacagccagaccaacgtgtcccagagcaaggactccgacgtgtacatcaccgataagtgcgtgctggacatgcggagcatggacttcaagagcaactccgccgtggcctggtccaacaagtccgatttcgcctgcgccaacgccttcaacaacagcattatccccgaggacacattcttcccaagcagcgacgtgccctgcgacgtgaagctggtggaaaagagcttcgagacagacaccaacctgaacttccagaacctgagcgtgatcggcttcagaatcctgctgctgaaagtggccggctttaacctgctgatgaccctgcggctgtggtccagccgcgccaagagaagcggatctggcgtgaagcagaccctgaatttcgacctgctgaagctggctggcgacgtggaatccaacccaggcccttctagaggccatatgaccgagtacaagcccacggtgcgcctcgccacccgcgacgacgtccccagggccgtacgcaccctcgccgccgcgttcgccgactaccccgccacgcgccacaccgtcgatccggaccgccacatcgagcgggtcaccgagctgcaagaactcttcctcacgcgcgtcgggctcgacatcggcaaggtgtgggtcgcggacgacggcgccgcggtggcggtctggaccacgccggagagcgtcgaagcgggggcggtgttcgccgagatcggcccgcgcatggccgagttgagcggttcccggctggccgcgcagcaacagatggaaggcctcctggcgccgcaccggcccaaggagcccgcgtggttcctggccaccgtcggcgtctcgcccgaccaccagggcaagggtctgggcagcgccgtcgtgctccccggagtggaggcggccgagcgcgccggggtgcccgccttcctggagacctccgcgccccgcaacctccccttctacgagcggctcggcttcaccgtcaccgccgacgtcgaggtgcccgaaggaccgcgcacctggtgcatgacccgcaagcccggtgcctga

SEQ ID NO: 9832 - DNA, 1854 bp, Artificial Sequence
  Synthetic Polynucloetide
atggccttaccagtgaccgccttgctcctgccgctggccttgctgctccacgccgccaggccggacatccagatgacacagagccctagcagcctgtctgccagcgtgggagacagagtgaccatcacatgcaaggccagccaggatgtgggcacagccgtggattggtatcagcagaagcctggcaaggcccctaagctgctgatctcttgggccagcacaagacacacaggcgtgcccagcagattttctggcagcggctctggcaccgacttcaccctgacaatatccagcctccagcctgaggacttcgccacctacttttgccagcagtacaacagctaccctctgaccttcggccagggcaccaaggtggaaatcaagagaacagttctcgaggacctgaagaacgtgttcccacctgaggtggccgtgttcgagcctagcgaggccgagatcagccacacccagaaagccaccctcgtgtgcctggctaccggcttctaccccgaccatgtggaactgtcttggtgggtcaacggcaaagaggtgcacagcggcgtgtgtaccgacccccagccactgaaagaacagcccgccctgaacgacagccggtactgcctgagcagcagactgagagtgtccgccaccttctggcagaacccccggaaccacttcagatgccaggtgcagttctacggcctgagcgagaacgacgagtggacccaggacagagccaagcccgtgacccagatcgtgtctgccgaagcctggggcagagccgattgcggctttaccagcgagagctaccagcagggcgtgctgagcgccaccatcctgtacgagatcctgctgggcaaggccaccctgtacgccgtgctggtgtctgccctggtgctgatggctatggtcaagcggaaggacagccggggaagggccaagcgatctggatctggagcaacaaacttctcactactcaaacaagcaggtgacgtggaggagaatcccgggcctactagtatggactggatttggcgcatccttttccttgtcggcgctgctaccggcgcgcattccttcgaacaagttcagctggttcagagcggagccgaagtgaagaaacctggcgagagcgtgaaggtgtcctgcaaagccagcggctacacctttaccgagtacaccatccactgggtccgacaggctccaggacaaggactggaatggatgggcaacatcaaccccaacaacggcggcaccacctacaaccagaaattcgaggatcgcgtgacaatcaccgccgacaagagcaccagcaccgcctacatggaactgagcagcctgagaagcgaggacaccgccgtgtactattgtgccagaggctggaacttcgactactggggccagggaaccaccgtgacagtctcttctacgcgtatccagaaccctgatcctgccgtgtaccagctgcgggatagcaagagcagcgacaagagcgtgtgtctgttcaccgacttcgacagccagaccaacgtgtcccagagcaaggactccgacgtgtacatcaccgataagtgcgtgctggacatgcggagcatggacttcaagagcaactccgccgtggcctggtccaacaagtccgatttcgcctgcgccaacgccttcaacaacagcattatccccgaggacacattcttcccaagccccgagagcagctgcgacgtgaagctggtggaaaagagcttcgagacagacaccaacctgaacttccagaacctgagcgtgatcggcttcagaatcctgctgctgaaagtggccggctttaacctgctgatgaccctgcggctgtggtccagc

SEQ ID NO: 9833 - DNA, 2529 bp, Artificial Sequence
  Synthetic Polynucloetide
atggccttaccagtgaccgccttgctcctgccgctggccttgctgctccacgccgccaggccggacatccagatgacacagagccctagcagcctgtctgccagcgtgggagacagagtgaccatcacatgcaaggccagccaggatgtgggcacagccgtggattggtatcagcagaagcctggcaaggcccctaagctgctgatctcttgggccagcacaagacacacaggcgtgcccagcagattttctggcagcggctctggcaccgacttcaccctgacaatatccagcctccagcctgaggacttcgccacctacttttgccagcagtacaacagctaccctctgaccttcggccagggcaccaaggtggaaatcaagagaacagttctcgaggacctgaagaacgtgttcccacctgaggtggccgtgttcgagcctagcgaggccgagatcagccacacccagaaagccaccctcgtgtgcctggctaccggcttctaccccgaccatgtggaactgtcttggtgggtcaacggcaaagaggtgcacagcggcgtgtgtaccgacccccagccactgaaagaacagcccgccctgaacgacagccggtactgcctgagcagcagactgagagtgtccgccaccttctggcagaacccccggaaccacttcagatgccaggtgcagttctacggcctgagcgagaacgacgagtggacccaggacagagccaagcccgtgacccagatcgtgtctgccgaagcctggggcagagccgattgcggctttaccagcgagagctaccagcagggcgtgctgagcgccaccatcctgtacgagatcctgctgggcaaggccaccctgtacgccgtgctggtgtctgccctggtgctgatggctatggtcaagcggaaggacagccggggaagggccaagcgatctggatctggagcaacaaacttctcactactcaaacaagcaggtgacgtggaggagaatcccgggcctactagtatggactggatttggcgcatccttttccttgtcggcgctgctaccggcgcgcattccttcgaacaagttcagctggttcagagcggagccgaagtgaagaaacctggcgagagcgtgaaggtgtcctgcaaagccagcggctacacctttaccgagtacaccatccactgggtccgacaggctccaggacaaggactggaatggatgggcaacatcaaccccaacaacggcggcaccacctacaaccagaaattcgaggatcgcgtgacaatcaccgccgacaagagcaccagcaccgcctacatggaactgagcagcctgagaagcgaggacaccgccgtgtactattgtgccagaggctggaacttcgactactggggccagggaaccaccgtgacagtctcttctacgcgtatccagaaccctgatcctgccgtgtaccagctgcgggatagcaagagcagcgacaagagcgtgtgtctgttcaccgacttcgacagccagaccaacgtgtcccagagcaaggactccgacgtgtacatcaccgataagtgcgtgctggacatgcggagcatggacttcaagagcaactccgccgtggcctggtccaacaagtccgatttcgcctgcgccaacgccttcaacaacagcattatccccgaggacacattcttcccaagccccgagagcagctgcgacgtgaagctggtggaaaagagcttcgagacagacaccaacctgaacttccagaacctgagcgtgatcggcttcagaatcctgctgctgaaagtggccggctttaacctgctgatgaccctgcggctgtggtccagccgcgccaagagaagcggatctggcgtgaagcagaccctgaatttcgacctgctgaagctggctggcgacgtggaatccaacccaggcccttctagaggcgggatccacaccatggctacctacgaggtgctgtgcgaggtggcaagaaagctgggcaccgacgacagagaagtggtgctgttcctgctgaacgtgttcatccctcagcctacactggcccagctgatcggtgcactgagagccctgaaagaggaaggccggctgacctttcctctgctggccgaatgcctgttcagagccggaagaagggatctgctgcgggacctgctgcatctggaccccagatttctggaaagacacctggccggcaccatgagctacttcagcccttaccagctgaccgtgctgcacgttgacggcgaactgtgcgccagagatattcggagcctgatcttcctgagcaaggacaccatcggcagccggtctacccctcagacatttctgcactgggtgtactgcatggaaaacctggacctgctcggccccacagatgtggatgccctgatgtccatgctgagaagcctgagcagagtggacctccagagacaggtgcagacactgatgggactgcacctgagcggacctagccacagccagcactacagacacacccct

SEQ ID NO: 9834 - DNA, 1866 bp, Artificial Sequence
  Synthetic Polynucloetide
atggccttaccagtgaccgccttgctcctgccgctggccttgctgctccacgccgccaggccggacatccagatgacacagagccctagcagcctgtctgccagcgtgggagacagagtgaccatcacatgcaaggccagccaggatgtgggcacagccgtggattggtatcagcagaagcctggcaaggcccctaagctgctgatctcttgggccagcacaagacacacaggcgtgcccagcagattttctggcagcggctctggcaccgacttcaccctgacaatatccagcctccagcctgaggacttcgccacctacttttgccagcagtacaacagctaccctctgaccttcggccagggcaccaaggtggaaatcaagagaacagttctcgagatccagaaccctgatcctgccgtgtaccagctgcgggatagcaagagcagcgacaagagcgtgtgtctgttcaccgacttcgacagccagaccaacgtgtcccagagcaaggactccgacgtgtacatcaccgataagtgcgtgctggacatgcggagcatggacttcaagagcaactccgccgtggcctggtccaacaagtccgatttcgcctgcgccaacgccttcaacaacagcattatccccgaggacacattcttcccaagccccgagagcagctgcgacgtgaagctggtggaaaagagcttcgagacagacaccaacctgaacttccagaacctgagcgtgatcggcttcagaatcctgctgctgaaagtggccggctttaacctgctgatgaccctgcggctgtggtccagccgcgccaagagaagcggatctggcgtgaagcagaccctgaatttcgacctgctgaagctggctggcgacgtggaatccaacccaggccctactagtatggactggatttggcgcatccttttccttgtcggcgctgctaccggcgcgcattccttcgaacaagttcagctggttcagagcggagccgaagtgaagaaacctggcgagagcgtgaaggtgtcctgcaaagccagcggctacacctttaccgagtacaccatccactgggtccgacaggctccaggacaaggactggaatggatgggcaacatcaaccccaacaacggcggcaccacctacaaccagaaattcgaggatcgcgtgacaatcaccgccgacaagagcaccagcaccgcctacatggaactgagcagcctgagaagcgaggacaccgccgtgtactattgtgccagaggctggaacttcgactactggggccagggaaccaccgtgacagtctcttctacgcgtgaggacctgaagaacgtgttcccacctgaggtggccgtgttcgagcctagcgaggccgagatcagccacacccagaaagccaccctcgtgtgcctggctaccggcttctaccccgaccatgtggaactgtcttggtgggtcaacggcaaagaggtgcacagcggcgtgtgtaccgacccccagccactgaaagaacagcccgccctgaacgacagccggtactgcctgagcagcagactgagagtgtccgccaccttctggcagaacccccggaaccacttcagatgccaggtgcagttctacggcctgagcgagaacgacgagtggacccaggacagagccaagcccgtgacccagatcgtgtctgccgaagcctggggcagagccgattgcggctttaccagcgagagctaccagcagggcgtgctgagcgccaccatcctgtacgagatcctgctgggcaaggccaccctgtacgccgtgctggtgtctgccctggtgctgatggctatggtcaagcggaaggacagccgggga

SEQ ID NO: 9835 - DNA, 2532 bp, Artificial Sequence
  Synthetic Polynucloetide
atggccttaccagtgaccgccttgctcctgccgctggccttgctgctccacgccgccaggccggacatccagatgacacagagccctagcagcctgtctgccagcgtgggagacagagtgaccatcacatgcaaggccagccaggatgtgggcacagccgtggattggtatcagcagaagcctggcaaggcccctaagctgctgatctcttgggccagcacaagacacacaggcgtgcccagcagattttctggcagcggctctggcaccgacttcaccctgacaatatccagcctccagcctgaggacttcgccacctacttttgccagcagtacaacagctaccctctgaccttcggccagggcaccaaggtggaaatcaagagaacagttctcgagatccagaaccctgatcctgccgtgtaccagctgcgggatagcaagagcagcgacaagagcgtgtgtctgttcaccgacttcgacagccagaccaacgtgtcccagagcaaggactccgacgtgtacatcaccgataagtgcgtgctggacatgcggagcatggacttcaagagcaactccgccgtggcctggtccaacaagtccgatttcgcctgcgccaacgccttcaacaacagcattatccccgaggacacattcttcccaagccccgagagcagctgcgacgtgaagctggtggaaaagagcttcgagacagacaccaacctgaacttccagaacctgagcgtgatcggcttcagaatcctgctgctgaaagtggccggctttaacctgctgatgaccctgcggctgtggtccagccgcgccaagagaagcggatctggcgtgaagcagaccctgaatttcgacctgctgaagctggctggcgacgtggaatccaacccaggccctactagtatggactggatttggcgcatccttttccttgtcggcgctgctaccggcgcgcattccttcgaacaagttcagctggttcagagcggagccgaagtgaagaaacctggcgagagcgtgaaggtgtcctgcaaagccagcggctacacctttaccgagtacaccatccactgggtccgacaggctccaggacaaggactggaatggatgggcaacatcaaccccaacaacggcggcaccacctacaaccagaaattcgaggatcgcgtgacaatcaccgccgacaagagcaccagcaccgcctacatggaactgagcagcctgagaagcgaggacaccgccgtgtactattgtgccagaggctggaacttcgactactggggccagggaaccaccgtgacagtctcttctacgcgtgaggacctgaagaacgtgttcccacctgaggtggccgtgttcgagcctagcgaggccgagatcagccacacccagaaagccaccctcgtgtgcctggctaccggcttctaccccgaccatgtggaactgtcttggtgggtcaacggcaaagaggtgcacagcggcgtgtgtaccgacccccagccactgaaagaacagcccgccctgaacgacagccggtactgcctgagcagcagactgagagtgtccgccaccttctggcagaacccccggaaccacttcagatgccaggtgcagttctacggcctgagcgagaacgacgagtggacccaggacagagccaagcccgtgacccagatcgtgtctgccgaagcctggggcagagccgattgcggctttaccagcgagagctaccagcagggcgtgctgagcgccaccatcctgtacgagatcctgctgggcaaggccaccctgtacgccgtgctggtgtctgccctggtgctgatggctatggtcaagcggaaggacagccggggaagggccaagcgatctggatctggagcaacaaacttctcactactcaaacaagcaggtgacgtggaggagaatcccgggccttctagaggcgggatccacaccatggctacctacgaggtgctgtgcgaggtggcaagaaagctgggcaccgacgacagagaagtggtgctgttcctgctgaacgtgttcatccctcagcctacactggcccagctgatcggtgcactgagagccctgaaagaggaaggccggctgacctttcctctgctggccgaatgcctgttcagagccggaagaagggatctgctgcgggacctgctgcatctggaccccagatttctggaaagacacctggccggcaccatgagctacttcagcccttaccagctgaccgtgctgcacgttgacggcgaactgtgcgccagagatattcggagcctgatcttcctgagcaaggacaccatcggcagccggtctacccctcagacatttctgcactgggtgtactgcatggaaaacctggacctgctcggccccacagatgtggatgccctgatgtccatgctgagaagcctgagcagagtggacctccagagacaggtgcagacactgatgggactgcacctgagcggacctagccacagccagcactacagacacacccct

SEQ ID NO: 9836 - DNA, 2691 bp, Artificial Sequence
  Synthetic Polynucloetide
atggccttaccagtgaccgccttgctcctgccgctggccttgctgctccacgccgccaggccgctcgaggggaaaccaattcccaaccctcttctgggactggattcaaccggcagcggcgaggacctgaagaacgtgttcccacctgaggtggccgtgttcgagcctagcaaggccgagatcgcccacacccagaaagccaccctcgtgtgcctggctaccggcttctaccccgaccatgtggaactgtcttggtgggtcaacggcaaagaggtgcacagcggcgtgtgtaccgacccccagccactgaaagaacagcccgccctgaacgacagccggtactgcctgagcagcagactgagagtgtccgccaccttctggcagaacccccggaaccacttcagatgccaggtgcagttctacggcctgagcgagaacgacgagtggacccaggacagagccaagcccgtgacccagatcgtgtctgccgaagcctggggcagagccgattgcggcatcaccagcgccagctaccaccagggcgtgctgagcgccaccatcctgtacgagatcctgctgggcaaggccaccctgtacgccgtgctggtgtctgccctggtgctgatggctatggtcaagcggaaggacagccggggaagggccaagcgatctggatctggagcaacaaacttctcactactcaaacaagcaggtgacgtggaggagaatcccgggcctactagcatggccttaccagtgaccgccttgctcctgccgctggccttgctgctccacgccgccaggccggacatccagatgacacagagccctagcagcctgtctgccagcgtgggagacagagtgaccatcacatgcaaggccagccaggatgtgggcacagccgtggattggtatcagcagaagcctggcaaggcccctaagctgctgatctcttgggccagcacaagacacacaggcgtgcccagcagattttctggcagcggctctggcaccgacttcaccctgacaatatccagcctccagcctgaggacttcgccacctacttttgccagcagtacaacagctaccctctgaccttcggccagggcaccaaggtggaaatcaagagaacagttggcggaggcggaagtggaggcggaggatctggcggcggaggctctcaagttcagctggttcagagcggagccgaagtgaagaaacctggcgagagcgtgaaggtgtcctgcaaagccagcggctacacctttaccgagtacaccatccactgggtccgacaggctccaggacaaggactggaatggatgggcaacatcaaccccaacaacggcggcaccacctacaaccagaaattcgaggatcgcgtgacaatcaccgccgacaagagcaccagcaccgcctacatggaactgagcagcctgagaagcgaggacaccgccgtgtactattgtgccagaggctggaacttcgactactggggccagggaaccaccgtgacagtctcttctacgcgtgagcagaaactgatctcggaagaggatgggagcggcatccagaaccctgatcctgccgtgtaccagctgcgggatagcaagagcagcgacaagagcgtgtgtctgttcaccgacttcgacagccagaccaacgtgtcccagagcaaggactccgacgtgtacatcaccgataagtgcgtgctggacatgcggagcatggacttcaagagcaactccgccgtggcctggtccaacaagtccgatttcgcctgcgccaacgccttcaacaacagcattatccccgaggacacattcttcccaagcagcgacgtgccctgcgacgtgaagctggtggaaaagagcttcgagacagacaccaacctgaacttccagaacctgagcgtgatcggcttcagaatcctgctgctgaaagtggccggctttaacctgctgatgaccctgcggctgtggtccagccgcgccaagagaagcggatctggcgtgaagcagaccctgaatttcgacctgctgaagctggctggcgacgtggaatccaacccaggcccttctagaggccatatgaccgagtacaagcccacggtgcgcctcgccacccgcgacgacgtccccagggccgtacgcaccctcgccgccgcgttcgccgactaccccgccacgcgccacaccgtcgatccggaccgccacatcgagcgggtcaccgagctgcaagaactcttcctcacgcgcgtcgggctcgacatcggcaaggtgtgggtcgcggacgacggcgccgcggtggcggtctggaccacgccggagagcgtcgaagcgggggcggtgttcgccgagatcggcccgcgcatggccgagttgagcggttcccggctggccgcgcagcaacagatggaaggcctcctggcgccgcaccggcccaaggagcccgcgtggttcctggccaccgtcggcgtctcgcccgaccaccagggcaagggtctgggcagcgccgtcgtgctccccggagtggaggcggccgagcgcgccggggtgcccgccttcctggagacctccgcgccccgcaacctccccttctacgagcggctcggcttcaccgtcaccgccgacgtcgaggtgcccgaaggaccgcgcacctggtgcatgacccgcaagcccggtgcctga

SEQ ID NO: 9837 - DNA, 2694 bp, Artificial Sequence
  Synthetic Polynucloetide
atggccttaccagtgaccgccttgctcctgccgctggccttgctgctccacgccgccaggccgctcgagcagaaactgatctcggaagaggatctgggctccggcgatcgccctgatcctgccgtgtaccagctgcgggatagcaagagcagcgacaagagcgtgtgtctgttcaccgacttcgacagccagaccaacgtgtcccagagcaaggactccgacgtgtacatcaccgataagtgcgtgctggacatgcggagcatggacttcaagagcaactccgccgtggcctggtccaacaagtccgatttcgcctgcgccaacgccttcaacaacagcattatccccgaggacacattcttcccaagccccgagagcagctgcgacgtgaagctggtggaaaagagcttcgagacagacaccaacctgaacttccagaacctgagcgtgatcggcttcagaatcctgctgctgaaagtggccggctttaacctgctgatgaccctgcggctgtggtccagctctagtcgcgccaagagaagcggatctggcgtgaagcagaccctgaatttcgacctgctgaagctggctggcgacgtggaatccaacccaggccccactagcatggccttaccagtgaccgccttgctcctgccgctggccttgctgctccacgccgccaggccggacatccagatgacacagagccctagcagcctgtctgccagcgtgggagacagagtgaccatcacatgcaaggccagccaggatgtgggcacagccgtggattggtatcagcagaagcctggcaaggcccctaagctgctgatctcttgggccagcacaagacacacaggcgtgcccagcagattttctggcagcggctctggcaccgacttcaccctgacaatatccagcctccagcctgaggacttcgccacctacttttgccagcagtacaacagctaccctctgaccttcggccagggcaccaaggtggaaatcaagagaacagttggcggaggcggaagtggaggcggaggatctggcggcggaggctctcaagttcagctggttcagagcggagccgaagtgaagaaacctggcgagagcgtgaaggtgtcctgcaaagccagcggctacacctttaccgagtacaccatccactgggtccgacaggctccaggacaaggactggaatggatgggcaacatcaaccccaacaacggcggcaccacctacaaccagaaattcgaggatcgcgtgacaatcaccgccgacaagagcaccagcaccgcctacatggaactgagcagcctgagaagcgaggacaccgccgtgtactattgtgccagaggctggaacttcgactactggggccagggaaccaccgtgacagtctcttctacgcgtgggaaaccaattcccaaccctcttctgggactggattcaaccggcagcggcgaggacctgaagaacgtgttcccacctgaggtggccgtgttcgagcctagcgaggccgagatcagccacacccagaaagccaccctcgtgtgcctggctaccggcttctaccccgaccatgtggaactgtcttggtgggtcaacggcaaagaggtgcacagcggcgtgtgtaccgacccccagccactgaaagaacagcccgccctgaacgacagccggtactgcctgagcagcagactgagagtgtccgccaccttctggcagaacccccggaaccacttcagatgccaggtgcagttctacggcctgagcgagaacgacgagtggacccaggacagagccaagcccgtgacccagatcgtgtctgccgaagcctggggcagagccgattgcggctttaccagcgagagctaccagcagggcgtgctgagcgccaccatcctgtacgagatcctgctgggcaaggccaccctgtacgccgtgctggtgtctgccctggtgctgatggctatggtcaagcggaaggacagccggggaagggccaagcgatctggatctggagcaacaaacttctcactactcaaacaagcaggtgacgtggaggagaatcccgggccttctagaggccatatgaccgagtacaagcccacggtgcgcctcgccacccgcgacgacgtccccagggccgtacgcaccctcgccgccgcgttcgccgactaccccgccacgcgccacaccgtcgatccggaccgccacatcgagcgggtcaccgagctgcaagaactcttcctcacgcgcgtcgggctcgacatcggcaaggtgtgggtcgcggacgacggcgccgcggtggcggtctggaccacgccggagagcgtcgaagcgggggcggtgttcgccgagatcggcccgcgcatggccgagttgagcggttcccggctggccgcgcagcaacagatggaaggcctcctggcgccgcaccggcccaaggagcccgcgtggttcctggccaccgtcggcgtctcgcccgaccaccagggcaagggtctgggcagcgccgtcgtgctccccggagtggaggcggccgagcgcgccggggtgcccgccttcctggagacctccgcgccccgcaacctccccttctacgagcggctcggcttcaccgtcaccgccgacgtcgaggtgcccgaaggaccgcgcacctggtgcatgacccgcaagcccggtgcctga

SEQ ID NO: 9838 - DNA, 2556 bp, Artificial Sequence
  Synthetic Polynucloetide
atggccttaccagtgaccgccttgctcctgccgctggccttgctgctccacgccgccaggccggacatccagatgacacagagccctagcagcctgtctgccagcgtgggagacagagtgaccatcacatgcaaggccagccaggatgtgggcacagccgtggattggtatcagcagaagcctggcaaggcccctaagctgctgatctcttgggccagcacaagacacacaggcgtgcccagcagattttctggcagcggctctggcaccgacttcaccctgacaatatccagcctccagcctgaggacttcgccacctacttttgccagcagtacaacagctaccctctgaccttcggccagggcaccaaggtggaaatcaagagaacagttctcgaggacctgaagaacgtgttcccacctgaggtggccgtgttcgagcctagcgaggccgagatcagccacacccagaaagccaccctcgtgtgcctggctaccggcttctaccccgaccatgtggaactgtcttggtgggtcaacggcaaagaggtgcacagcggcgtgtctaccgacccccagccactgaaagaacagcccgccctgaacgacagccggtactgcctgagcagcagactgagagtgtccgccaccttctggcagaacccccggaaccacttcagatgccaggtgcagttctacggcctgagcgagaacgacgagtggacccaggacagagccaagcccgtgacccagatcgtgtctgccgaagcctggggcagagccgattgcggctttaccagcgagagctaccagcagggcgtgctgagcgccaccatcctgtacgagatcctgctgggcaaggccaccctgtacgccgtgctggtgtctgccctggtgctgatggctatggtcaagcggaaggacagccggggaagggccaagcgatctggatctggagcaacaaacttctcactactcaaacaagcaggtgacgtggaggagaatcccgggcctactagtatggactggatttggcgcatccttttccttgtcggcgctgctaccggcgcgcattccttcgaacaagttcagctggttcagagcggagccgaagtgaagaaacctggcgagagcgtgaaggtgtcctgcaaagccagcggctacacctttaccgagtacaccatccactgggtccgacaggctccaggacaaggactggaatggatgggcaacatcaaccccaacaacggcggcaccacctacaaccagaaattcgaggatcgcgtgacaatcaccgccgacaagagcaccagcaccgcctacatggaactgagcagcctgagaagcgaggacaccgccgtgtactattgtgccagaggctggaacttcgactactggggccagggaaccaccgtgacagtctcttctacgcgtatccagaaccctgatcctgccgtgtaccagctgcgggatagcaagagcagcgacaagagcgtgtgtctgttcaccgacttcgacagccagaccaacgtgtcccagagcaaggactccgacgtgtacatcaccgataagaccgtgctggacatgcggagcatggacttcaagagcaactccgccgtggcctggtccaacaagtccgatttcgcctgcgccaacgccttcaacaacagcattatccccgaggacacattcttcccaagccccgagagcagctgcgacgtgaagctggtggaaaagagcttcgagacagacaccaacctgaacttccagaacctgagcgtgatcggcttcagaatcctgctgctgaaagtggccggctttaacctgctgatgaccctgcggctgtggtccagccgcgccaagagaagcggatctggcgtgaagcagaccctgaatttcgacctgctgaagctggctggcgacgtggaatccaacccaggcccttctagaggccatatgaccgagtacaagcccacggtgcgcctcgccacccgcgacgacgtccccagggccgtacgcaccctcgccgccgcgttcgccgactaccccgccacgcgccacaccgtcgatccggaccgccacatcgagcgggtcaccgagctgcaagaactcttcctcacgcgcgtcgggctcgacatcggcaaggtgtgggtcgcggacgacggcgccgcggtggcggtctggaccacgccggagagcgtcgaagcgggggcggtgttcgccgagatcggcccgcgcatggccgagttgagcggttcccggctggccgcgcagcaacagatggaaggcctcctggcgccgcaccggcccaaggagcccgcgtggttcctggccaccgtcggcgtctcgcccgaccaccagggcaagggtctgggcagcgccgtcgtgctccccggagtggaggcggccgagcgcgccggggtgcccgccttcctggagacctccgcgccccgcaacctccccttctacgagcggctcggcttcaccgtcaccgccgacgtcgaggtgcccgaaggaccgcgcacctggtgcatgacccgcaagcccggtgcctga

SEQ ID NO: 9839 - DNA, 2802 bp, Artificial Sequence
  Synthetic Polynucloetide
atggccttaccagtgaccgccttgctcctgccgctggccttgctgctccacgccgccaggccggacatccagatgacacagagccctagcagcctgtctgccagcgtgggagacagagtgaccatcacatgcaaggccagccaggatgtgggcacagccgtggattggtatcagcagaagcctggcaaggcccctaagctgctgatctcttgggccagcacaagacacacaggcgtgcccagcagattttctggcagcggctctggcaccgacttcaccctgacaatatccagcctccagcctgaggacttcgccacctacttttgccagcagtacaacagctaccctctgaccttcggccagggcaccaaggtggaaatcaagagaacagttctcgaggacctgaagaacgtgttcccacctgaggtggccgtgttcgagcctagcgaggccgagatcagccacacccagaaagccaccctcgtgtgcctggctaccggcttctaccccgaccatgtggaactgtcttggtgggtcaacggcaaagaggtgcacagcggcgtgtctaccgacccccagccactgaaagaacagcccgccctgaacgacagccggtactgcctgagcagcagactgagagtgtccgccaccttctggcagaacccccggaaccacttcagatgccaggtgcagttctacggcctgagcgagaacgacgagtggacccaggacagagccaagcccgtgacccagatcgtgtctgccgaagcctggggcagagccgattgcggctttaccagcgagagctaccagcagggcgtgctgagcgccaccatcctgtacgagatcctgctgggcaaggccaccctgtacgccgtgctggtgtctgccctggtgctgatggctatggtcaagcggaaggacagccggggaagggccaagcgatctggatctggagcaacaaacttctcactactcaaacaagcaggtgacgtggaggagaatcccgggcctactagtatggactggatttggcgcatccttttccttgtcggcgctgctaccggcgcgcattccttcgaacaagttcagctggttcagagcggagccgaagtgaagaaacctggcgagagcgtgaaggtgtcctgcaaagccagcggctacacctttaccgagtacaccatccactgggtccgacaggctccaggacaaggactggaatggatgggcaacatcaaccccaacaacggcggcaccacctacaaccagaaattcgaggatcgcgtgacaatcaccgccgacaagagcaccagcaccgcctacatggaactgagcagcctgagaagcgaggacaccgccgtgtactattgtgccagaggctggaacttcgactactggggccagggaaccaccgtgacagtctcttctacgcgtgagcagaaactgatctcggaagaggatgggagcggcaccccattcccttctctggcccctcccatcatgctgctggtggacggcaagcagcagatggtggtcgtgtgcctggtgctggatgtggccccacctggactggacagccccatctggtttagcgccggcaatggctctgccctggacgcctttacctacggcccaagccctgccaccgatggcacctggacaaatctggcccacctgagcctgcccagcgaggaactggcttcttgggagcctctcgtgtgccacacaggacctggcgctgagggacacagcagatccacccagcctatgcacctgtctggcgaggccagcaccgccagaacctgtcctcaggaacctctgagaggcacccctggcggagcactgtggctgggagtgctgagactgctgctgttcaagctgctgctgtttgacctgctgctgacctgctcctgtctgtgcgatcctgccggccctctgccttctcctgccaccaccacaagactgagagccctgggcagccacagactgcaccctgccacagagacaggcggcagagaggccacaagcagccctagaccccagcccagagacagaagatggggcgataccccccctggcagaaagcctggatctccagtccgcgccaagagaagcggatctggcgtgaagcagaccctgaatttcgacctgctgaagctggctggcgacgtggaatccaacccaggcccttctagaggccatatgaccgagtacaagcccacggtgcgcctcgccacccgcgacgacgtccccagggccgtacgcaccctcgccgccgcgttcgccgactaccccgccacgcgccacaccgtcgatccggaccgccacatcgagcgggtcaccgagctgcaagaactcttcctcacgcgcgtcgggctcgacatcggcaaggtgtgggtcgcggacgacggcgccgcggtggcggtctggaccacgccggagagcgtcgaagcgggggcggtgttcgccgagatcggcccgcgcatggccgagttgagcggttcccggctggccgcgcagcaacagatggaaggcctcctggcgccgcaccggcccaaggagcccgcgtggttcctggccaccgtcggcgtctcgcccgaccaccagggcaagggtctgggcagcgccgtcgtgctccccggagtggaggcggccgagcgcgccggggtgcccgccttcctggagacctccgcgccccgcaacctccccttctacgagcggctcggcttcaccgtcaccgccgacgtcgaggtgcccgaaggaccgcgcacctggtgcatgacccgcaagcccggtgcctga

SEQ ID NO: 9840 - DNA, 2856 bp, Artificial Sequence
  Synthetic Polynucloetide
atggccttaccagtgaccgccttgctcctgccgctggccttgctgctccacgccgccaggccgctcgaggacctgaagaacgtgttcccacctgaggtggccgtgttcgagcctagcgaggccgagatcagccacacccagaaagccaccctcgtgtgcctggctaccggcttctaccccgaccatgtggaactgtcttggtgggtcaacggcaaagaggtgcacagcggcgtgtctaccgacccccagccactgaaagaacagcccgccctgaacgacagccggtactgcctgagcagcagactgagagtgtccgccaccttctggcagaacccccggaaccacttcagatgccaggtgcagttctacggcctgagcgagaacgacgagtggacccaggacagagccaagcccgtgacccagatcgtgtctgccgaagcctggggcagagccgattgcggctttaccagcgagagctaccagcagggcgtgctgagcgccaccatcctgtacgagatcctgctgggcaaggccaccctgtacgccgtgctggtgtctgccctggtgctgatggctatggtcaagcggaaggacagccggggaagggccaagcgatctggatctggagcaacaaacttctcactactcaaacaagcaggtgacgtggaggagaatcccgggcctactagcatggccttaccagtgaccgccttgctcctgccgctggccttgctgctccacgccgccaggccggacatccagatgacacagagccctagcagcctgtctgccagcgtgggagacagagtgaccatcacatgcaaggccagccaggatgtgggcacagccgtggattggtatcagcagaagcctggcaaggcccctaagctgctgatctcttgggccagcacaagacacacaggcgtgcccagcagattttctggcagcggctctggcaccgacttcaccctgacaatatccagcctccagcctgaggacttcgccacctacttttgccagcagtacaacagctaccctctgaccttcggccagggcaccaaggtggaaatcaagagaacagttggcggaggcggaagtggaggcggaggatctggcggcggaggctctcaagttcagctggttcagagcggagccgaagtgaagaaacctggcgagagcgtgaaggtgtcctgcaaagccagcggctacacctttaccgagtacaccatccactgggtccgacaggctccaggacaaggactggaatggatgggcaacatcaaccccaacaacggcggcaccacctacaaccagaaattcgaggatcgcgtgacaatcaccgccgacaagagcaccagcaccgcctacatggaactgagcagcctgagaagcgaggacaccgccgtgtactattgtgccagaggctggaacttcgactactggggccagggaaccaccgtgacagtctcttctacgcgtgagcagaaactgatctcggaagaggatctggggagcggcaccccattcccttctctggcccctcccatcatgctgctggtggacggcaagcagcagatggtggtcgtgtgcctggtgctggatgtggccccacctggactggacagccccatctggtttagcgccggcaatggctctgccctggacgcctttacctacggcccaagccctgccaccgatggcacctggacaaatctggcccacctgagcctgcccagcgaggaactggcttcttgggagcctctcgtgtgccacacaggacctggcgctgagggacacagcagatccacccagcctatgcacctgtctggcgaggccagcaccgccagaacctgtcctcaggaacctctgagaggcacccctggcggagcactgtggctgggagtgctgagactgctgctgttcaagctgctgctgtttgacctgctgctgacctgctcctgtctgtgcgatcctgccggccctctgccttctcctgccaccaccacaagactgagagccctgggcagccacagactgcaccctgccacagagacaggcggcagagaggccacaagcagccctagaccccagcccagagacagaagatggggcgataccccccctggcagaaagcctggatctccagtccgcgccaagagaagcggatctggcgtgaagcagaccctgaatttcgacctgctgaagctggctggcgacgtggaatccaacccaggcccttctagatctagaggccatatgaccgagtacaagcccacggtgcgcctcgccacccgcgacgacgtccccagggccgtacgcaccctcgccgccgcgttcgccgactaccccgccacgcgccacaccgtcgatccggaccgccacatcgagcgggtcaccgagctgcaagaactcttcctcacgcgcgtcgggctcgacatcggcaaggtgtgggtcgcggacgacggcgccgcggtggcggtctggaccacgccggagagcgtcgaagcgggggcggtgttcgccgagatcggcccgcgcatggccgagttgagcggttcccggctggccgcgcagcaacagatggaaggcctcctggcgccgcaccggcccaaggagcccgcgtggttcctggccaccgtcggcgtctcgcccgaccaccagggcaagggtctgggcagcgccgtcgtgctccccggagtggaggcggccgagcgcgccggggtgcccgccttcctggagacctccgcgccccgcaacctccccttctacgagcggctcggcttcaccgtcaccgccgacgtcgaggtgcccgaaggaccgcgcacctggtgcatgacccgcaagcccggtgcctga

SEQ ID NO: 9841 - DNA, 2667 bp, Artificial Sequence
  Synthetic Polynucloetide
atggccttaccagtgaccgccttgctcctgccgctggccttgctgctccacgccgccaggccggacatccagatgacacagagccctagcagcctgtctgccagcgtgggagacagagtgaccatcacatgcaaggccagccaggatgtgggcacagccgtggattggtatcagcagaagcctggcaaggcccctaagctgctgatctcttgggccagcacaagacacacaggcgtgcccagcagattttctggcagcggctctggcaccgacttcaccctgacaatatccagcctccagcctgaggacttcgccacctacttttgccagcagtacaacagctaccctctgaccttcggccagggcaccaaggtggaaatcaagagaacagttctcgaggggaaaccaattcccaaccctcttctgggactggattcaaccggcagcggcgacaagcagctggacgccgacgtgtcccccaagcctaccatcttcctgccctctatcgccgagacaaagctccagaaggccggcacctacctgtgcctgctggaaaagttcttcccagatgtgattaagatccactggcaggaaaagaagtccaacaccatcctgggcagccaggaaggcaacaccatgaagaccaacgacacctacatgaagttcagctggctgaccgtgcccgagaagtccctggacaaagaacacagatgcatcgtgcggcacgaaaacaacaagaacggcgtggaccaggaaatcatcttcccacccatcaagaccgatgtgattacaatggaccccaaggacaactgctccaaggacgccaacgataccctgctgctccagctgaccaacaccagcgcctactacatgtacttgttgctgctgctgaagtccgtggtgtacttcgccatcatcacatgctgcctgctgcggagaaccgccttctgctgcaacggcgagaagtctagggccaagcgatctggatctggagcaacaaacttctcactactcaaacaagcaggtgacgtggaggagaatcccgggcctactagtatggactggatttggcgcatccttttccttgtcggcgctgctaccggcgcgcattccttcgaacaagttcagctggttcagagcggagccgaagtgaagaaacctggcgagagcgtgaaggtgtcctgcaaagccagcggctacacctttaccgagtacaccatccactgggtccgacaggctccaggacaaggactggaatggatgggcaacatcaaccccaacaacggcggcaccacctacaaccagaaattcgaggatcgcgtgacaatcaccgccgacaagagcaccagcaccgcctacatggaactgagcagcctgagaagcgaggacaccgccgtgtactattgtgccagaggctggaacttcgactactggggccagggaaccaccgtgacagtctcttctacgcgtgagcagaaactgatctcggaagaggatgggagcggcagccagcctcacaccaagcccagcgtgttcgtgatgaagaacggcaccaacgtggcctgcctcgtgaaagagttctaccccaaggacatcaggatcaacctggtgtccagcaagaagatcaccgagttcgaccccgccatcgtgatctcccccagcggcaagtacaacgccgtgaagctggggaagtacgaggacagcaacagcgtgacctgctccgtgcagcacgacaacaagaccgtgcacagcaccgactttgaagtgaaaaccgactccaccgaccacgtgaagcccaaagagacagagaacaccaagcagcccagcaagagctgccacaagcccaaggccatcgtgcacaccgagaaagtgaacatgatgagcctgaccgtgctgggcctgcggatgctgttcgccaaaaccgtggccgtgaacttcctgctgaccgccaagctgttcttcctccgcgccaagagaagcggatctggcgtgaagcagaccctgaatttcgacctgctgaagctggctggcgacgtggaatccaacccaggcccttctagaggccatatgaccgagtacaagcccacggtgcgcctcgccacccgcgacgacgtccccagggccgtacgcaccctcgccgccgcgttcgccgactaccccgccacgcgccacaccgtcgatccggaccgccacatcgagcgggtcaccgagctgcaagaactcttcctcacgcgcgtcgggctcgacatcggcaaggtgtgggtcgcggacgacggcgccgcggtggcggtctggaccacgccggagagcgtcgaagcgggggcggtgttcgccgagatcggcccgcgcatggccgagttgagcggttcccggctggccgcgcagcaacagatggaaggcctcctggcgccgcaccggcccaaggagcccgcgtggttcctggccaccgtcggcgtctcgcccgaccaccagggcaagggtctgggcagcgccgtcgtgctccccggagtggaggcggccgagcgcgccggggtgcccgccttcctggagacctccgcgccccgcaacctccccttctacgagcggctcggcttcaccgtcaccgccgacgtcgaggtgcccgaaggaccgcgcacctggtgcatgacccgcaagcccggtgcctga

SEQ ID NO: 9842 - DNA, 1878 bp, Artificial Sequence
  Synthetic Polynucloetide
atggccttaccagtgaccgccttgctcctgccgctggccttgctgctccacgccgccaggccggacatccagatgacacagagccctagcagcctgtctgccagcgtgggagacagagtgaccatcacatgcaaggccagccaggatgtgggcacagccgtggattggtatcagcagaagcctggcaaggcccctaagctgctgatctcttgggccagcacaagacacacaggcgtgcccagcagattttctggcagcggctctggcaccgacttcaccctgacaatatccagcctccagcctgaggacttcgccacctacttttgccagcagtacaacagctaccctctgaccttcggccagggcaccaaggtggaaatcaagagaacagttctcgagagccagcctcacaccaagcccagcgtgttcgtgatgaagaacggcaccaacgtggcctgcctcgtgaaagagttctaccccaaggacatcaggatcaacctggtgtccagcaagaagatcaccgagttcgaccccgccatcgtgatctcccccagcggcaagtacaacgccgtgaagctggggaagtacgaggacagcaacagcgtgacctgctccgtgcagcacgacaacaagaccgtgcacagcaccgactttgaagtgaaaaccgactccaccgaccacgtgaagcccaaagagacagagaacaccaagcagcccagcaagagctgccacaagcccaaggccatcgtgcacaccgagaaagtgaacatgatgagcctgaccgtgctgggcctgcggatgctgttcgccaaaaccgtggccgtgaacttcctgctgaccgccaagctgttcttcctcagggccaagcgatctggatctggagcaacaaacttctcactactcaaacaagcaggtgacgtggaggagaatcccgggcctactagtatggactggatttggcgcatccttttccttgtcggcgctgctaccggcgcgcattccttcgaacaagttcagctggttcagagcggagccgaagtgaagaaacctggcgagagcgtgaaggtgtcctgcaaagccagcggctacacctttaccgagtacaccatccactgggtccgacaggctccaggacaaggactggaatggatgggcaacatcaaccccaacaacggcggcaccacctacaaccagaaattcgaggatcgcgtgacaatcaccgccgacaagagcaccagcaccgcctacatggaactgagcagcctgagaagcgaggacaccgccgtgtactattgtgccagaggctggaacttcgactactggggccagggaaccaccgtgacagtctcttctacgcgtgacaagcagctggacgccgacgtgtcccccaagcctaccatcttcctgccctctatcgccgagacaaagctccagaaggccggcacctacctgtgcctgctggaaaagttcttcccagatgtgattaagatccactggcaggaaaagaagtccaacaccatcctgggcagccaggaaggcaacaccatgaagaccaacgacacctacatgaagttcagctggctgaccgtgcccgagaagtccctggacaaagaacacagatgcatcgtgcggcacgaaaacaacaagaacggcgtggaccaggaaatcatcttcccacccatcaagaccgatgtgattacaatggaccccaaggacaactgctccaaggacgccaacgataccctgctgctccagctgaccaacaccagcgcctactacatgtacttgttgctgctgctgaagtccgtggtgtacttcgccatcatcacatgctgcctgctgcggagaaccgccttctgctgcaacggcgagaagtct

SEQ ID NO: 9843 - DNA, 2712 bp, Artificial Sequence
  Synthetic Polynucloetide
atggccttaccagtgaccgccttgctcctgccgctggccttgctgctccacgccgccaggccgctcgaggggaaaccaattcccaaccctcttctgggactggattcaaccggcagcggcgacaagcagctggacgccgacgtgtcccccaagcctaccatcttcctgccctctatcgccgagacaaagctccagaaggccggcacctacctgtgcctgctggaaaagttcttcccagatgtgattaagatccactggcaggaaaagaagtccaacaccatcctgggcagccaggaaggcaacaccatgaagaccaacgacacctacatgaagttcagctggctgaccgtgcccgagaagtccctggacaaagaacacagatgcatcgtgcggcacgaaaacaacaagaacggcgtggaccaggaaatcatcttcccacccatcaagaccgatgtgattacaatggaccccaaggacaactgctccaaggacgccaacgataccctgctgctccagctgaccaacaccagcgcctactacatgtacttgttgctgctgctgaagtccgtggtgtacttcgccatcatcacatgctgcctgctgcggagaaccgccttctgctgcaacggcgagaagtctagggccaagcgatctggatctggagcaacaaacttctcactactcaaacaagcaggtgacgtggaggagaatcccgggcctactagcatggccttaccagtgaccgccttgctcctgccgctggccttgctgctccacgccgccaggccggacatccagatgacacagagccctagcagcctgtctgccagcgtgggagacagagtgaccatcacatgcaaggccagccaggatgtgggcacagccgtggattggtatcagcagaagcctggcaaggcccctaagctgctgatctcttgggccagcacaagacacacaggcgtgcccagcagattttctggcagcggctctggcaccgacttcaccctgacaatatccagcctccagcctgaggacttcgccacctacttttgccagcagtacaacagctaccctctgaccttcggccagggcaccaaggtggaaatcaagagaacagttggcggaggcggaagtggaggcggaggatctggcggcggaggctctcaagttcagctggttcagagcggagccgaagtgaagaaacctggcgagagcgtgaaggtgtcctgcaaagccagcggctacacctttaccgagtacaccatccactgggtccgacaggctccaggacaaggactggaatggatgggcaacatcaaccccaacaacggcggcaccacctacaaccagaaattcgaggatcgcgtgacaatcaccgccgacaagagcaccagcaccgcctacatggaactgagcagcctgagaagcgaggacaccgccgtgtactattgtgccagaggctggaacttcgactactggggccagggaaccaccgtgacagtctcttctacgcgtgagcagaaactgatctcggaagaggatgggagcggcagccagcctcacaccaagcccagcgtgttcgtgatgaagaacggcaccaacgtggcctgcctcgtgaaagagttctaccccaaggacatcaggatcaacctggtgtccagcaagaagatcaccgagttcgaccccgccatcgtgatctcccccagcggcaagtacaacgccgtgaagctggggaagtacgaggacagcaacagcgtgacctgctccgtgcagcacgacaacaagaccgtgcacagcaccgactttgaagtgaaaaccgactccaccgaccacgtgaagcccaaagagacagagaacaccaagcagcccagcaagagctgccacaagcccaaggccatcgtgcacaccgagaaagtgaacatgatgagcctgaccgtgctgggcctgcggatgctgttcgccaaaaccgtggccgtgaacttcctgctgaccgccaagctgttcttcctccgcgccaagagaagcggatctggcgtgaagcagaccctgaatttcgacctgctgaagctggctggcgacgtggaatccaacccaggcccttctagaggccatatgaccgagtacaagcccacggtgcgcctcgccacccgcgacgacgtccccagggccgtacgcaccctcgccgccgcgttcgccgactaccccgccacgcgccacaccgtcgatccggaccgccacatcgagcgggtcaccgagctgcaagaactcttcctcacgcgcgtcgggctcgacatcggcaaggtgtgggtcgcggacgacggcgccgcggtggcggtctggaccacgccggagagcgtcgaagcgggggcggtgttcgccgagatcggcccgcgcatggccgagttgagcggttcccggctggccgcgcagcaacagatggaaggcctcctggcgccgcaccggcccaaggagcccgcgtggttcctggccaccgtcggcgtctcgcccgaccaccagggcaagggtctgggcagcgccgtcgtgctccccggagtggaggcggccgagcgcgccggggtgcccgccttcctggagacctccgcgccccgcaacctccccttctacgagcggctcggcttcaccgtcaccgccgacgtcgaggtgcccgaaggaccgcgcacctggtgcatgacccgcaagcccggtgcctga

SEQ ID NO: 9844 - DNA, 3087 bp, Artificial Sequence
  Synthetic Polynucloetide
atggccttaccagtgaccgccttgctcctgccgctggccttgctgctccacgccgccaggccggacatccagatgacacagagccctagcagcctgtctgccagcgtgggagacagagtgaccatcacatgcaaggccagccaggatgtgggcacagccgtggattggtatcagcagaagcctggcaaggcccctaagctgctgatctcttgggccagcacaagacacacaggcgtgcccagcagattttctggcagcggctctggcaccgacttcaccctgacaatatccagcctccagcctgaggacttcgccacctacttttgccagcagtacaacagctaccctctgaccttcggccagggcaccaaggtggaaatcaagagaacagttggacagcctaaggccaatcctaccgtgacactgttccctccaagcagcgaagaactccaggccaacaaggccacacttgtgtgcctgatctccgacttctaccctggggctgtgacagtggcttggaaggccgatggatctcctgtgaaagccggcgtggaaaccaccaagccatccaagcagagcaacaacaaatacgccgccagctcctacctgagcctgacacctgagcagtggaagtcccacagatcctacagctgccaagtgacccacgaaggcagcaccgtggaaaagacagtggcccctacagagtgcagcggatcccagagcttcggcctgctggaccccaagctgtgctacctgctggatggcatcctgttcatctacggcgtgatcctgaccgccctgttcctgagagtgaagttcagcagaagcgccgacgcccctgcctaccagcagggacagaaccaactgtacaacgagctgaacctgggcagacgggaagagtacgacgtgctggacaagcggagaggcagggaccctgagatgggcggaaagccccagcggagaaagaacccccaggaaggactgtataacgaactccagaaagacaagatggccgaagcctacagcgagatcggcatgaagggcgagcggagaagaggcaagggccacgatggcctgtaccagggcctgagcaccgccaccaaggacacctatgacgccctgcacatgcaggccctgcctccaagaagggccaagcgatctggatctggagcaacaaacttctcactactcaaacaagcaggtgacgtggaggagaatcccgggcctactagtatggactggatttggcgcatccttttccttgtcggcgctgctaccggcgcgcattccttcgaacaagttcagctggttcagagcggagccgaagtgaagaaacctggcgagagcgtgaaggtgtcctgcaaagccagcggctacacctttaccgagtacaccatccactgggtccgacaggctccaggacaaggactggaatggatgggcaacatcaaccccaacaacggcggcaccacctacaaccagaaattcgaggatcgcgtgacaatcaccgccgacaagagcaccagcaccgcctacatggaactgagcagcctgagaagcgaggacaccgccgtgtactattgtgccagaggctggaacttcgactactggggccagggaaccaccgtgacagtctcttctgcctctacaaagggaccctccgtgtttcctctggctcccagcagcaagtctacaagcggaggaacagccgctctgggctgcctggtcaaggattactttcccgagcctgtgaccgtgtcctggaatagcggagcactgacaagcggcgtgcacacctttccagccgtgctgcaaagcagcggcctgtactctctgagcagcgtggtcacagtgcctagctctagcctgggcacccagacctacatctgcaatgtgaaccacaagcctagcaacaccaaggtggacaagagagtggaacccaagagctgtggtacccagagttttgggttgttggaccctaaattgtgctatctgttggacggaatcctgttcatttacggagtgatcctgaccgcattgttcctgcgggttaagttttccagatccgcagacgcacccgcttaccaacaagggcagaaccaactctacaatgaacttaatttggggcggagggaagagtacgacgttctggacaaaaggaggggacgagatcccgagatgggcggaaagcctcagcgaaggaagaatccgcaagaggggctttataacgaactccagaaagataaaatggcagaagcctatagtgagattgggatgaagggagaaaggaggaggggtaaaggtcacgatgggttgtaccaaggattgagcacagccactaaagatacctatgatgcgctccacatgcaggccctgccgccaagacgcgccaagagaagcggatctggcgtgaagcagaccctgaatttcgacctgctgaagctggctggcgacgtggaatccaacccaggcccttctagaggccatatgaccgagtacaagcccacggtgcgcctcgccacccgcgacgacgtccccagggccgtacgcaccctcgccgccgcgttcgccgactaccccgccacgcgccacaccgtcgatccggaccgccacatcgagcgggtcaccgagctgcaagaactcttcctcacgcgcgtcgggctcgacatcggcaaggtgtgggtcgcggacgacggcgccgcggtggcggtctggaccacgccggagagcgtcgaagcgggggcggtgttcgccgagatcggcccgcgcatggccgagttgagcggttcccggctggccgcgcagcaacagatggaaggcctcctggcgccgcaccggcccaaggagcccgcgtggttcctggccaccgtcggcgtctcgcccgaccaccagggcaagggtctgggcagcgccgtcgtgctccccggagtggaggcggccgagcgcgccggggtgcccgccttcctggagacctccgcgccccgcaacctccccttctacgagcggctcggcttcaccgtcaccgccgacgtcgaggtgcccgaaggaccgcgcacctggtgcatgacccgcaagcccggtgcctga

SEQ ID NO: 9845 - DNA, 2442 bp, Artificial Sequence
  Synthetic Polynucloetide
atggccttaccagtgaccgccttgctcctgccgctggccttgctgctccacgccgccaggccggacatccagatgacacagagccctagcagcctgtctgccagcgtgggagacagagtgaccatcacatgcaaggccagccaggatgtgggcacagccgtggattggtatcagcagaagcctggcaaggcccctaagctgctgatctcttgggccagcacaagacacacaggcgtgcccagcagattttctggcagcggctctggcaccgacttcaccctgacaatatccagcctccagcctgaggacttcgccacctacttttgccagcagtacaacagctaccctctgaccttcggccagggcaccaaggtggaaatcaagagaacagttctcgaggacctgaagaacgtgttcccacctgaggtggccgtgttcgagcctagcgaggccgagatcagccacacccagaaagccaccctcgtgtgcctggctaccggcttctaccccgaccatgtggaactgtcttggtgggtcaacggcaaagaggtgcacagcggcgtgtctaccgacccccagccactgaaagaacagcccgccctgaacgacagccggtactgcctgagcagcagactgagagtgtccgccaccttctggcagaacccccggaaccacttcagatgccaggtgcagttctacggcctgagcgagaacgacgagtggacccaggacagagccaagcccgtgacccagatcgtgtctgccgaagcctggggcagagccgattgcggatcccagagcttcggcctgctggaccccaagctgtgctacctgctggatggcatcctgttcatctacggcgtgatcctgaccgccctgttcctgagagtgaagttcagcagaagcgccgacgcccctgcctaccagcagggacagaaccaactgtacaacgagctgaacctgggcagacgggaagagtacgacgtgctggacaagcggagaggcagggaccctgagatgggcggaaagccccagcggagaaagaacccccaggaaggactgtataacgaactccagaaagacaagatggccgaagcctacagcgagatcggcatgaagggcgagcggagaagaggcaagggccacgatggcctgtaccagggcctgagcaccgccaccaaggacacctatgacgccctgcacatgcaggccctgcctccaagaagggccaagcgatctggatctggagcaacaaacttctcactactcaaacaagcaggtgacgtggaggagaatcccgggcctactagtatggactggatttggcgcatccttttccttgtcggcgctgctaccggcgcgcattccttcgaacaagttcagctggttcagagcggagccgaagtgaagaaacctggcgagagcgtgaaggtgtcctgcaaagccagcggctacacctttaccgagtacaccatccactgggtccgacaggctccaggacaaggactggaatggatgggcaacatcaaccccaacaacggcggcaccacctacaaccagaaattcgaggatcgcgtgacaatcaccgccgacaagagcaccagcaccgcctacatggaactgagcagcctgagaagcgaggacaccgccgtgtactattgtgccagaggctggaacttcgactactggggccagggaaccaccgtgacagtctcttctacgcgtatccagaaccctgatcctgccgtgtaccagctgcgggatagcaagagcagcgacaagagcgtgtgtctgttcaccgacttcgacagccagaccaacgtgtcccagagcaaggactccgacgtgtacatcaccgataagaccgtgctggacatgcggagcatggacttcaagagcaactccgccgtggcctggtccaacaagtccgatttcgcctgcgccaacgccttcaacaacagcattatccccgaggacacattcttcccaagccccgagagcagctgcggtacccagagttttgggttgttggaccctaaattgtgctatctgttggacggaatcctgttcatttacggagtgatcctgaccgcattgttcctgcgggttaagttttccagatccgcagacgcacccgcttaccaacaagggcagaaccaactctacaatgaacttaatttggggcggagggaagagtacgacgttctggacaaaaggaggggacgagatcccgagatgggcggaaagcctcagcgaaggaagaatccgcaagaggggctttataacgaactccagaaagataaaatggcagaagcctatagtgagattgggatgaagggagaaaggaggaggggtaaaggtcacgatgggttgtaccaaggattgagcacagccactaaagatacctatgatgcgctccacatgcaggccctgccgccaaga

SEQ ID NO: 9846 - DNA, 2442 bp, Artificial Sequence
  Synthetic Polynucloetide
atggccttaccagtgaccgccttgctcctgccgctggccttgctgctccacgccgccaggccggacatccagatgacacagagccctagcagcctgtctgccagcgtgggagacagagtgaccatcacatgcaaggccagccaggatgtgggcacagccgtggattggtatcagcagaagcctggcaaggcccctaagctgctgatctcttgggccagcacaagacacacaggcgtgcccagcagattttctggcagcggctctggcaccgacttcaccctgacaatatccagcctccagcctgaggacttcgccacctacttttgccagcagtacaacagctaccctctgaccttcggccagggcaccaaggtggaaatcaagagaacagttctcgaggacctgaagaacgtgttcccacctgaggtggccgtgttcgagcctagcaaggccgagatcgcccacacccagaaagccaccctcgtgtgcctggctaccggcttctaccccgaccatgtggaactgtcttggtgggtcaacggcaaagaggtgcacagcggcgtgtgtaccgacccccagccactgaaagaacagcccgccctgaacgacagccggtactgcctgagcagcagactgagagtgtccgccaccttctggcagaacccccggaaccacttcagatgccaggtgcagttctacggcctgagcgagaacgacgagtggacccaggacagagccaagcccgtgacccagatcgtgtctgccgaagcctggggcagagccgattgcggatcccagagcttcggcctgctggaccccaagctgtgctacctgctggatggcatcctgttcatctacggcgtgatcctgaccgccctgttcctgagagtgaagttcagcagaagcgccgacgcccctgcctaccagcagggacagaaccaactgtacaacgagctgaacctgggcagacgggaagagtacgacgtgctggacaagcggagaggcagggaccctgagatgggcggaaagccccagcggagaaagaacccccaggaaggactgtataacgaactccagaaagacaagatggccgaagcctacagcgagatcggcatgaagggcgagcggagaagaggcaagggccacgatggcctgtaccagggcctgagcaccgccaccaaggacacctatgacgccctgcacatgcaggccctgcctccaagaagggccaagcgatctggatctggagcaacaaacttctcactactcaaacaagcaggtgacgtggaggagaatcccgggcctactagtatggactggatttggcgcatccttttccttgtcggcgctgctaccggcgcgcattccttcgaacaagttcagctggttcagagcggagccgaagtgaagaaacctggcgagagcgtgaaggtgtcctgcaaagccagcggctacacctttaccgagtacaccatccactgggtccgacaggctccaggacaaggactggaatggatgggcaacatcaaccccaacaacggcggcaccacctacaaccagaaattcgaggatcgcgtgacaatcaccgccgacaagagcaccagcaccgcctacatggaactgagcagcctgagaagcgaggacaccgccgtgtactattgtgccagaggctggaacttcgactactggggccagggaaccaccgtgacagtctcttctacgcgtatccagaaccctgatcctgccgtgtaccagctgcgggatagcaagagcagcgacaagagcgtgtgtctgttcaccgacttcgacagccagaccaacgtgtcccagagcaaggactccgacgtgtacatcaccgataagtgcgtgctggacatgcggagcatggacttcaagagcaactccgccgtggcctggtccaacaagtccgatttcgcctgcgccaacgccttcaacaacagcattatccccgaggacacattcttcccaagcagcgacgtgccctgcggtacccagagttttgggttgttggaccctaaattgtgctatctgttggacggaatcctgttcatttacggagtgatcctgaccgcattgttcctgcgggttaagttttccagatccgcagacgcacccgcttaccaacaagggcagaaccaactctacaatgaacttaatttggggcggagggaagagtacgacgttctggacaaaaggaggggacgagatcccgagatgggcggaaagcctcagcgaaggaagaatccgcaagaggggctttataacgaactccagaaagataaaatggcagaagcctatagtgagattgggatgaagggagaaaggaggaggggtaaaggtcacgatgggttgtaccaaggattgagcacagccactaaagatacctatgatgcgctccacatgcaggccctgccgccaaga

SEQ ID NO: 9847 - DNA, 2655 bp, Artificial Sequence
  Synthetic Polynucloetide
atggccttaccagtgaccgccttgctcctgccgctggccttgctgctccacgccgccaggccggacatccagatgacacagagccctagcagcctgtctgccagcgtgggagacagagtgaccatcacatgcaaggccagccaggatgtgggcacagccgtggattggtatcagcagaagcctggcaaggcccctaagctgctgatctcttgggccagcacaagacacacaggcgtgcccagcagattttctggcagcggctctggcaccgacttcaccctgacaatatccagcctccagcctgaggacttcgccacctacttttgccagcagtacaacagctaccctctgaccttcggccagggcaccaaggtggaaatcaagagaacagttctcgaggggaaaccaattcccaaccctcttctgggactggattcaaccggcagcggcgaggacctgaagaacgtgttcccacctgaggtggccgtgttcgagcctagcgaggccgagatcagccacacccagaaagccaccctcgtgtgcctggctaccggcttctaccccgaccatgtggaactgtcttggtgggtcaacggcaaagaggtgcacagcggcgtgtctaccgacccccagccactgaaagaacagcccgccctgaacgacagccggtactgcctgagcagcagactgagagtgtccgccaccttctggcagaacccccggaaccacttcagatgccaggtgcagttctacggcctgagcgagaacgacgagtggacccaggacagagccaagcccgtgacccagatcgtgtctgccgaagcctggggcagagccgattgcggatcccagagcttcggcctgctggaccccaagctgtgctacctgctggatggcatcctgttcatctacggcgtgatcctgaccgccctgttcctgagagtgaagttcagcagaagcgccgacgcccctgcctaccagcagggacagaaccaactgtacaacgagctgaacctgggcagacgggaagagtacgacgtgctggacaagcggagaggcagggaccctgagatgggcggaaagccccagcggagaaagaacccccaggaaggactgtataacgaactccagaaagacaagatggccgaagcctacagcgagatcggcatgaagggcgagcggagaagaggcaagggccacgatggcctgtaccagggcctgagcaccgccaccaaggacacctatgacgccctgcacatgcaggccctgcctccaagaagggccaagcgatctggatctggagcaacaaacttctcactactcaaacaagcaggtgacgtggaggagaatcccgggcctactagtatggactggatttggcgcatccttttccttgtcggcgctgctaccggcgcgcattccttcgaacaagttcagctggttcagagcggagccgaagtgaagaaacctggcgagagcgtgaaggtgtcctgcaaagccagcggctacacctttaccgagtacaccatccactgggtccgacaggctccaggacaaggactggaatggatgggcaacatcaaccccaacaacggcggcaccacctacaaccagaaattcgaggatcgcgtgacaatcaccgccgacaagagcaccagcaccgcctacatggaactgagcagcctgagaagcgaggacaccgccgtgtactattgtgccagaggctggaacttcgactactggggccagggaaccaccgtgacagtctcttctacgcgtgagcagaaactgatctcggaagaggatgggagcggcatccagaaccctgatcctgccgtgtaccagctgcgggatagcaagagcagcgacaagagcgtgtgtctgttcaccgacttcgacagccagaccaacgtgtcccagagcaaggactccgacgtgtacatcaccgataagaccgtgctggacatgcggagcatggacttcaagagcaactccgccgtggcctggtccaacaagtccgatttcgcctgcgccaacgccttcaacaacagcattatccccgaggacacattcttcccaagccccgagagcagctgcggtacccagagttttgggttgttggaccctaaattgtgctatctgttggacggaatcctgttcatttacggagtgatcctgaccgcattgttcctgaggagcaagcggtcacggctgctccacagcgattacatgaatatgacaccacgaagaccgggtcctactcgcaaacactaccaaccctacgcacctccccgcgactttgcagcgtaccgatctcgggttaagttttccagatccgcagacgcacccgcttaccaacaagggcagaaccaactctacaatgaacttaatttggggcggagggaagagtacgacgttctggacaaaaggaggggacgagatcccgagatgggcggaaagcctcagcgaaggaagaatccgcaagaggggctttataacgaactccagaaagataaaatggcagaagcctatagtgagattgggatgaagggagaaaggaggaggggtaaaggtcacgatgggttgtaccaaggattgagcacagccactaaagatacctatgatgcgctccacatgcaggccctgccgccaaga

SEQ ID NO: 9848 - DNA, 2778 bp, Artificial Sequence
  Synthetic Polynucloetide
atggccttaccagtgaccgccttgctcctgccgctggccttgctgctccacgccgccaggccggacatccagatgacacagagccctagcagcctgtctgccagcgtgggagacagagtgaccatcacatgcaaggccagccaggatgtgggcacagccgtggattggtatcagcagaagcctggcaaggcccctaagctgctgatctcttgggccagcacaagacacacaggcgtgcccagcagattttctggcagcggctctggcaccgacttcaccctgacaatatccagcctccagcctgaggacttcgccacctacttttgccagcagtacaacagctaccctctgaccttcggccagggcaccaaggtggaaatcaagagaacagttctcgaggggaaaccaattcccaaccctcttctgggactggattcaaccggcagcggcgaggacctgaagaacgtgttcccacctgaggtggccgtgttcgagcctagcgaggccgagatcagccacacccagaaagccaccctcgtgtgcctggctaccggcttctaccccgaccatgtggaactgtcttggtgggtcaacggcaaagaggtgcacagcggcgtgtctaccgacccccagccactgaaagaacagcccgccctgaacgacagccggtactgcctgagcagcagactgagagtgtccgccaccttctggcagaacccccggaaccacttcagatgccaggtgcagttctacggcctgagcgagaacgacgagtggacccaggacagagccaagcccgtgacccagatcgtgtctgccgaagcctggggcagagccgattgcggatcccagagcttcggcctgctggaccccaagctgtgctacctgctggatggcatcctgttcatctacggcgtgatcctgaccgccctgttcctgaggagtaagaggagcaggctcctgcacagtgactacatgaacatgactccacgccgccccggacccacccgcaagcattaccagccctatgccccaccacgcgacttcgcagcctatcgctccagagtgaagttcagcagaagcgccgacgcccctgcctaccagcagggacagaaccaactgtacaacgagctgaacctgggcagacgggaagagtacgacgtgctggacaagcggagaggcagggaccctgagatgggcggaaagccccagcggagaaagaacccccaggaaggactgtataacgaactccagaaagacaagatggccgaagcctacagcgagatcggcatgaagggcgagcggagaagaggcaagggccacgatggcctgtaccagggcctgagcaccgccaccaaggacacctatgacgccctgcacatgcaggccctgcctccaagaagggccaagcgatctggatctggagcaacaaacttctcactactcaaacaagcaggtgacgtggaggagaatcccgggcctactagtatggactggatttggcgcatccttttccttgtcggcgctgctaccggcgcgcattccttcgaacaagttcagctggttcagagcggagccgaagtgaagaaacctggcgagagcgtgaaggtgtcctgcaaagccagcggctacacctttaccgagtacaccatccactgggtccgacaggctccaggacaaggactggaatggatgggcaacatcaaccccaacaacggcggcaccacctacaaccagaaattcgaggatcgcgtgacaatcaccgccgacaagagcaccagcaccgcctacatggaactgagcagcctgagaagcgaggacaccgccgtgtactattgtgccagaggctggaacttcgactactggggccagggaaccaccgtgacagtctcttctacgcgtgagcagaaactgatctcggaagaggatgggagcggcatccagaaccctgatcctgccgtgtaccagctgcgggatagcaagagcagcgacaagagcgtgtgtctgttcaccgacttcgacagccagaccaacgtgtcccagagcaaggactccgacgtgtacatcaccgataagaccgtgctggacatgcggagcatggacttcaagagcaactccgccgtggcctggtccaacaagtccgatttcgcctgcgccaacgccttcaacaacagcattatccccgaggacacattcttcccaagccccgagagcagctgcggtacccagagttttgggttgttggaccctaaattgtgctatctgttggacggaatcctgttcatttacggagtgatcctgaccgcattgttcctgaggagcaagcggtcacggctgctccacagcgattacatgaatatgacaccacgaagaccgggtcctactcgcaaacactaccaaccctacgcacctccccgcgactttgcagcgtaccgatctcgggttaagttttccagatccgcagacgcacccgcttaccaacaagggcagaaccaactctacaatgaacttaatttggggcggagggaagagtacgacgttctggacaaaaggaggggacgagatcccgagatgggcggaaagcctcagcgaaggaagaatccgcaagaggggctttataacgaactccagaaagataaaatggcagaagcctatagtgagattgggatgaagggagaaaggaggaggggtaaaggtcacgatgggttgtaccaaggattgagcacagccactaaagatacctatgatgcgctccacatgcaggccctgccgccaaga

SEQ ID NO: 9849 - DNA, 2661 bp, Artificial Sequence
  Synthetic Polynucloetide
atggccttaccagtgaccgccttgctcctgccgctggccttgctgctccacgccgccaggccggacatccagatgacacagagccctagcagcctgtctgccagcgtgggagacagagtgaccatcacatgcaaggccagccaggatgtgggcacagccgtggattggtatcagcagaagcctggcaaggcccctaagctgctgatctcttgggccagcacaagacacacaggcgtgcccagcagattttctggcagcggctctggcaccgacttcaccctgacaatatccagcctccagcctgaggacttcgccacctacttttgccagcagtacaacagctaccctctgaccttcggccagggcaccaaggtggaaatcaagagaacagttctcgaggggaaaccaattcccaaccctcttctgggactggattcaaccggcagcggcgaggacctgaagaacgtgttcccacctgaggtggccgtgttcgagcctagcgaggccgagatcagccacacccagaaagccaccctcgtgtgcctggctaccggcttctaccccgaccatgtggaactgtcttggtgggtcaacggcaaagaggtgcacagcggcgtgtctaccgacccccagccactgaaagaacagcccgccctgaacgacagccggtactgcctgagcagcagactgagagtgtccgccaccttctggcagaacccccggaaccacttcagatgccaggtgcagttctacggcctgagcgagaacgacgagtggacccaggacagagccaagcccgtgacccagatcgtgtctgccgaagcctggggcagagccgattgcggatcccagagcttcggcctgctggaccccaagctgtgctacctgctggatggcatcctgttcatctacggcgtgatcctgaccgccctgttcctgagagtgaagttcagcagaagcgccgacgcccctgcctaccagcagggacagaaccaactgtacaacgagctgaacctgggcagacgggaagagtacgacgtgctggacaagcggagaggcagggaccctgagatgggcggaaagccccagcggagaaagaacccccaggaaggactgtataacgaactccagaaagacaagatggccgaagcctacagcgagatcggcatgaagggcgagcggagaagaggcaagggccacgatggcctgtaccagggcctgagcaccgccaccaaggacacctatgacgccctgcacatgcaggccctgcctccaagaagggccaagcgatctggatctggagcaacaaacttctcactactcaaacaagcaggtgacgtggaggagaatcccgggcctactagtatggactggatttggcgcatccttttccttgtcggcgctgctaccggcgcgcattccttcgaacaagttcagctggttcagagcggagccgaagtgaagaaacctggcgagagcgtgaaggtgtcctgcaaagccagcggctacacctttaccgagtacaccatccactgggtccgacaggctccaggacaaggactggaatggatgggcaacatcaaccccaacaacggcggcaccacctacaaccagaaattcgaggatcgcgtgacaatcaccgccgacaagagcaccagcaccgcctacatggaactgagcagcctgagaagcgaggacaccgccgtgtactattgtgccagaggctggaacttcgactactggggccagggaaccaccgtgacagtctcttctacgcgtgagcagaaactgatctcggaagaggatctggggagcggcatccagaaccctgatcctgccgtgtaccagctgcgggatagcaagagcagcgacaagagcgtgtgtctgttcaccgacttcgacagccagaccaacgtgtcccagagcaaggactccgacgtgtacatcaccgataagaccgtgctggacatgcggagcatggacttcaagagcaactccgccgtggcctggtccaacaagtccgatttcgcctgcgccaacgccttcaacaacagcattatccccgaggacacattcttcccaagccccgagagcagctgcggtacccagagttttgggttgttggaccctaaattgtgctatctgttggacggaatcctgttcatttacggagtgatcctgaccgcattgttcctgaagagaggccggaagaagctgctgtacatcttcaagcagcctttcatgcggcccgtgcagaccacccaggaagaggacggctgctcctgccggttccccgaggaagaagaaggcggctgcgagctgcgggttaagttttccagatccgcagacgcacccgcttaccaacaagggcagaaccaactctacaatgaacttaatttggggcggagggaagagtacgacgttctggacaaaaggaggggacgagatcccgagatgggcggaaagcctcagcgaaggaagaatccgcaagaggggctttataacgaactccagaaagataaaatggcagaagcctatagtgagattgggatgaagggagaaaggaggaggggtaaaggtcacgatgggttgtaccaaggattgagcacagccactaaagatacctatgatgcgctccacatgcaggccctgccgccaaga

SEQ ID NO: 9850 - DNA, 2787 bp, Artificial Sequence
  Synthetic Polynucloetide
atggccttaccagtgaccgccttgctcctgccgctggccttgctgctccacgccgccaggccggacatccagatgacacagagccctagcagcctgtctgccagcgtgggagacagagtgaccatcacatgcaaggccagccaggatgtgggcacagccgtggattggtatcagcagaagcctggcaaggcccctaagctgctgatctcttgggccagcacaagacacacaggcgtgcccagcagattttctggcagcggctctggcaccgacttcaccctgacaatatccagcctccagcctgaggacttcgccacctacttttgccagcagtacaacagctaccctctgaccttcggccagggcaccaaggtggaaatcaagagaacagttctcgaggggaaaccaattcccaaccctcttctgggactggattcaaccggcagcggcgaggacctgaagaacgtgttcccacctgaggtggccgtgttcgagcctagcgaggccgagatcagccacacccagaaagccaccctcgtgtgcctggctaccggcttctaccccgaccatgtggaactgtcttggtgggtcaacggcaaagaggtgcacagcggcgtgtctaccgacccccagccactgaaagaacagcccgccctgaacgacagccggtactgcctgagcagcagactgagagtgtccgccaccttctggcagaacccccggaaccacttcagatgccaggtgcagttctacggcctgagcgagaacgacgagtggacccaggacagagccaagcccgtgacccagatcgtgtctgccgaagcctggggcagagccgattgcggatcccagagcttcggcctgctggaccccaagctgtgctacctgctggatggcatcctgttcatctacggcgtgatcctgaccgccctgttcctgaaacggggcagaaagaaactcctgtatatattcaaacaaccatttatgagaccagtacaaactactcaagaggaagatggctgtagctgccgatttccagaagaagaagaaggaggatgtgaactgagagtgaagttcagcagaagcgccgacgcccctgcctaccagcagggacagaaccaactgtacaacgagctgaacctgggcagacgggaagagtacgacgtgctggacaagcggagaggcagggaccctgagatgggcggaaagccccagcggagaaagaacccccaggaaggactgtataacgaactccagaaagacaagatggccgaagcctacagcgagatcggcatgaagggcgagcggagaagaggcaagggccacgatggcctgtaccagggcctgagcaccgccaccaaggacacctatgacgccctgcacatgcaggccctgcctccaagaagggccaagcgatctggatctggagcaacaaacttctcactactcaaacaagcaggtgacgtggaggagaatcccgggcctactagtatggactggatttggcgcatccttttccttgtcggcgctgctaccggcgcgcattccttcgaacaagttcagctggttcagagcggagccgaagtgaagaaacctggcgagagcgtgaaggtgtcctgcaaagccagcggctacacctttaccgagtacaccatccactgggtccgacaggctccaggacaaggactggaatggatgggcaacatcaaccccaacaacggcggcaccacctacaaccagaaattcgaggatcgcgtgacaatcaccgccgacaagagcaccagcaccgcctacatggaactgagcagcctgagaagcgaggacaccgccgtgtactattgtgccagaggctggaacttcgactactggggccagggaaccaccgtgacagtctcttctacgcgtgagcagaaactgatctcggaagaggatctggggagcggcatccagaaccctgatcctgccgtgtaccagctgcgggatagcaagagcagcgacaagagcgtgtgtctgttcaccgacttcgacagccagaccaacgtgtcccagagcaaggactccgacgtgtacatcaccgataagaccgtgctggacatgcggagcatggacttcaagagcaactccgccgtggcctggtccaacaagtccgatttcgcctgcgccaacgccttcaacaacagcattatccccgaggacacattcttcccaagccccgagagcagctgcggtacccagagttttgggttgttggaccctaaattgtgctatctgttggacggaatcctgttcatttacggagtgatcctgaccgcattgttcctgaagagaggccggaagaagctgctgtacatcttcaagcagcctttcatgcggcccgtgcagaccacccaggaagaggacggctgctcctgccggttccccgaggaagaagaaggcggctgcgagctgcgggttaagttttccagatccgcagacgcacccgcttaccaacaagggcagaaccaactctacaatgaacttaatttggggcggagggaagagtacgacgttctggacaaaaggaggggacgagatcccgagatgggcggaaagcctcagcgaaggaagaatccgcaagaggggctttataacgaactccagaaagataaaatggcagaagcctatagtgagattgggatgaagggagaaaggaggaggggtaaaggtcacgatgggttgtaccaaggattgagcacagccactaaagatacctatgatgcgctccacatgcaggccctgccgccaaga

SEQ ID NO: 9851 - DNA, 2460 bp, Artificial Sequence
  Synthetic Polynucloetide
atggccttaccagtgaccgccttgctcctgccgctggccttgctgctccacgccgccaggccggacatccagatgacacagagccctagcagcctgtctgccagcgtgggagacagagtgaccatcacatgcaaggccagccaggatgtgggcacagccgtggattggtatcagcagaagcctggcaaggcccctaagctgctgatctcttgggccagcacaagacacacaggcgtgcccagcagattttctggcagcggctctggcaccgacttcaccctgacaatatccagcctccagcctgaggacttcgccacctacttttgccagcagtacaacagctaccctctgaccttcggccagggcaccaaggtggaaatcaagagaacagttctcgagcagagcttcggcctgctggaccccaagctgtgctacctgctggatggcatcctgttcatctacggcgtgatcctgaccgccctgttcctgagagtgaagttcagcagaagcgccgacgcccctgcctaccagcagggacagaaccaactgtacaacgagctgaacctgggcagacgggaagagtacgacgtgctggacaagcggagaggcagggaccctgagatgggcggaaagccccagcggagaaagaacccccaggaaggactgtataacgaactccagaaagacaagatggccgaagcctacagcgagatcggcatgaagggcgagcggagaagaggcaagggccacgatggcctgtaccagggcctgagcaccgccaccaaggacacctatgacgccctgcacatgcaggccctgcctccaagaagggccaagcgatctggatctggagcaacaaacttctcactactcaaacaagcaggtgacgtggaggagaatcccgggcctactagtatggactggatttggcgcatccttttccttgtcggcgctgctaccggcgcgcattccttcgaacaagttcagctggttcagagcggagccgaagtgaagaaacctggcgagagcgtgaaggtgtcctgcaaagccagcggctacacctttaccgagtacaccatccactgggtccgacaggctccaggacaaggactggaatggatgggcaacatcaaccccaacaacggcggcaccacctacaaccagaaattcgaggatcgcgtgacaatcaccgccgacaagagcaccagcaccgcctacatggaactgagcagcctgagaagcgaggacaccgccgtgtactattgtgccagaggctggaacttcgactactggggccagggaaccaccgtgacagtctcttctacgcgtcagagttttgggttgttggaccctaaattgtgctatctgttggacggaatcctgttcatttacggagtgatcctgaccgcattgttcctgcgggttaagttttccagatccgcagacgcacccgcttaccaacaagggcagaaccaactctacaatgaacttaatttggggcggagggaagagtacgacgttctggacaaaaggaggggacgagatcccgagatgggcggaaagcctcagcgaaggaagaatccgcaagaggggctttataacgaactccagaaagataaaatggcagaagcctatagtgagattgggatgaagggagaaaggaggaggggtaaaggtcacgatgggttgtaccaaggattgagcacagccactaaagatacctatgatgcgctccacatgcaggccctgccgccaagacgcgccaagagaagcggatctggcgtgaagcagaccctgaatttcgacctgctgaagctggctggcgacgtggaatccaacccaggcccttctagaggccatatgaccgagtacaagcccacggtgcgcctcgccacccgcgacgacgtccccagggccgtacgcaccctcgccgccgcgttcgccgactaccccgccacgcgccacaccgtcgatccggaccgccacatcgagcgggtcaccgagctgcaagaactcttcctcacgcgcgtcgggctcgacatcggcaaggtgtgggtcgcggacgacggcgccgcggtggcggtctggaccacgccggagagcgtcgaagcgggggcggtgttcgccgagatcggcccgcgcatggccgagttgagcggttcccggctggccgcgcagcaacagatggaaggcctcctggcgccgcaccggcccaaggagcccgcgtggttcctggccaccgtcggcgtctcgcccgaccaccagggcaagggtctgggcagcgccgtcgtgctccccggagtggaggcggccgagcgcgccggggtgcccgccttcctggagacctccgcgccccgcaacctccccttctacgagcggctcggcttcaccgtcaccgccgacgtcgaggtgcccgaaggaccgcgcacctggtgcatgacccgcaagcccggtgcctga

SEQ ID NO: 9852 - DNA, 1932 bp, Artificial Sequence
  Synthetic Polynucloetide
atggccttaccagtgaccgccttgctcctgccgctggccttgctgctccacgccgccaggccggacatccagatgacacagagccctagcagcctgtctgccagcgtgggagacagagtgaccatcacatgcaaggccagccaggatgtgggcacagccgtggattggtatcagcagaagcctggcaaggcccctaagctgctgatctcttgggccagcacaagacacacaggcgtgcccagcagattttctggcagcggctctggcaccgacttcaccctgacaatatccagcctccagcctgaggacttcgccacctacttttgccagcagtacaacagctaccctctgaccttcggccagggcaccaaggtggaaatcaagagaacagttctcgagggacagcctaaggccaatcctaccgtgacactgttccctccaagcagcgaagaactccaggccaacaaggccacacttgtgtgcctgatctccgacttctaccctggggctgtgacagtggcttggaaggccgatggatctcctgtgaaagccggcgtggaaaccaccaagccatccaagcagagcaacaacaaatacgccgccagctcctacctgagcctgacacctgagcagtggaagtcccacagatcctacagctgccaagtgacccacgaaggcagcaccgtggaaaagacagtggcccctacagagtgcagccccatcaagaccgatgtgattacaatggaccccaaggacaactgctccaaggacgccaacgataccctgctgctccagctgaccaacaccagcgcctactacatgtacttgttgctgctgctgaagtccgtggtgtacttcgccatcatcacatgctgcctgctgcggagaaccgccttctgctgcaacggcgagaagtctagggccaagcgatctggatctggagcaacaaacttctcactactcaaacaagcaggtgacgtggaggagaatcccgggcctactagtatggactggatttggcgcatccttttccttgtcggcgctgctaccggcgcgcattccttcgaacaagttcagctggttcagagcggagccgaagtgaagaaacctggcgagagcgtgaaggtgtcctgcaaagccagcggctacacctttaccgagtacaccatccactgggtccgacaggctccaggacaaggactggaatggatgggcaacatcaaccccaacaacggcggcaccacctacaaccagaaattcgaggatcgcgtgacaatcaccgccgacaagagcaccagcaccgcctacatggaactgagcagcctgagaagcgaggacaccgccgtgtactattgtgccagaggctggaacttcgactactggggccagggaaccaccgtgacagtctcttctacgcgtgcctctacaaagggaccctccgtgtttcctctggctcccagcagcaagtctacaagcggaggaacagccgctctgggctgcctggtcaaggattactttcccgagcctgtgaccgtgtcctggaatagcggagcactgacaagcggcgtgcacacctttccagccgtgctgcaaagcagcggcctgtactctctgagcagcgtggtcacagtgcctagctctagcctgggcacccagacctacatctgcaatgtgaaccacaagcctagcaacaccaaggtggacaagagagtggaacccaagagctgtgaagtgaaaaccgactccaccgaccacgtgaagcccaaagagacagagaacaccaagcagcccagcaagagctgccacaagcccaaggccatcgtgcacaccgagaaagtgaacatgatgagcctgaccgtgctgggcctgcggatgctgttcgccaaaaccgtggccgtgaacttcctgctgaccgccaagctgttcttcctc

SEQ ID NO: 9853 - DNA, 1866 bp, Artificial Sequence
  Synthetic Polynucloetide
atggccttaccagtgaccgccttgctcctgccgctggccttgctgctccacgccgccaggccggacatccagatgacacagagccctagcagcctgtctgccagcgtgggagacagagtgaccatcacatgcaaggccagccaggatgtgggcacagccgtggattggtatcagcagaagcctggcaaggcccctaagctgctgatctcttgggccagcacaagacacacaggcgtgcccagcagattttctggcagcggctctggcaccgacttcaccctgacaatatccagcctccagcctgaggacttcgccacctacttttgccagcagtacaacagctaccctctgaccttcggccagggcaccaaggtggaaatcaagagaacagttctcgagggacagcctaaggccaatcctaccgtgacactgttccctccaagcagcgaagaactccaggccaacaaggccacacttgtgtgcctgatctccgacttctaccctggggctgtgacagtggcttggaaggccgatggatctcctgtgaaagccggcgtggaaaccaccaagccatccaagcagagcaacaacaaatacgccgccagctcctacctgagcctgacacctgagcagtggaagtcccacagatcctacagctgccaagtgacccacgaaggcagcaccgtggaaaagacagtggcccctacagagtgcagcggcagagccgattgcggcatcaccagcgccagctaccaccagggcgtgctgagcgccaccatcctgtacgagatcctgctgggcaaggccaccctgtacgccgtgctggtgtctgccctggtgctgatggctatggtcaagcggaaggacagccggggaagggccaagcgatctggatctggagcaacaaacttctcactactcaaacaagcaggtgacgtggaggagaatcccgggcctactagtatggactggatttggcgcatccttttccttgtcggcgctgctaccggcgcgcattccttcgaacaagttcagctggttcagagcggagccgaagtgaagaaacctggcgagagcgtgaaggtgtcctgcaaagccagcggctacacctttaccgagtacaccatccactgggtccgacaggctccaggacaaggactggaatggatgggcaacatcaaccccaacaacggcggcaccacctacaaccagaaattcgaggatcgcgtgacaatcaccgccgacaagagcaccagcaccgcctacatggaactgagcagcctgagaagcgaggacaccgccgtgtactattgtgccagaggctggaacttcgactactggggccagggaaccaccgtgacagtctcttctacgcgtgcctctacaaagggaccctccgtgtttcctctggctcccagcagcaagtctacaagcggaggaacagccgctctgggctgcctggtcaaggattactttcccgagcctgtgaccgtgtcctggaatagcggagcactgacaagcggcgtgcacacctttccagccgtgctgcaaagcagcggcctgtactctctgagcagcgtggtcacagtgcctagctctagcctgggcacccagacctacatctgcaatgtgaaccacaagcctagcaacaccaaggtggacaagagagtggaacccaagagctgtatccccgaggacacattcttcccaagcagcgacgtgccctgcgacgtgaagctggtggaaaagagcttcgagacagacaccaacctgaacttccagaacctgagcgtgatcggcttcagaatcctgctgctgaaagtggccggctttaacctgctgatgaccctgcggctgtggtccagc

SEQ ID NO: 9854 - DNA, 1866 bp, Artificial Sequence
  Synthetic Polynucloetide
atggccttaccagtgaccgccttgctcctgccgctggccttgctgctccacgccgccaggccggacatccagatgacacagagccctagcagcctgtctgccagcgtgggagacagagtgaccatcacatgcaaggccagccaggatgtgggcacagccgtggattggtatcagcagaagcctggcaaggcccctaagctgctgatctcttgggccagcacaagacacacaggcgtgcccagcagattttctggcagcggctctggcaccgacttcaccctgacaatatccagcctccagcctgaggacttcgccacctacttttgccagcagtacaacagctaccctctgaccttcggccagggcaccaaggtggaaatcaagagaacagttctcgagggacagcctaaggccaatcctaccgtgacactgttccctccaagcagcgaagaactccaggccaacaaggccacacttgtgtgcctgatctccgacttctaccctggggctgtgacagtggcttggaaggccgatggatctcctgtgaaagccggcgtggaaaccaccaagccatccaagcagagcaacaacaaatacgccgccagctcctacctgagcctgacacctgagcagtggaagtcccacagatcctacagctgccaagtgacccacgaaggcagcaccgtggaaaagacagtggcccctacagagtgcagcggcagagccgattgcggctttaccagcgagagctaccagcagggcgtgctgagcgccaccatcctgtacgagatcctgctgggcaaggccaccctgtacgccgtgctggtgtctgccctggtgctgatggctatggtcaagcggaaggacagccggggaagggccaagcgatctggatctggagcaacaaacttctcactactcaaacaagcaggtgacgtggaggagaatcccgggcctactagtatggactggatttggcgcatccttttccttgtcggcgctgctaccggcgcgcattccttcgaacaagttcagctggttcagagcggagccgaagtgaagaaacctggcgagagcgtgaaggtgtcctgcaaagccagcggctacacctttaccgagtacaccatccactgggtccgacaggctccaggacaaggactggaatggatgggcaacatcaaccccaacaacggcggcaccacctacaaccagaaattcgaggatcgcgtgacaatcaccgccgacaagagcaccagcaccgcctacatggaactgagcagcctgagaagcgaggacaccgccgtgtactattgtgccagaggctggaacttcgactactggggccagggaaccaccgtgacagtctcttctacgcgtgcctctacaaagggaccctccgtgtttcctctggctcccagcagcaagtctacaagcggaggaacagccgctctgggctgcctggtcaaggattactttcccgagcctgtgaccgtgtcctggaatagcggagcactgacaagcggcgtgcacacctttccagccgtgctgcaaagcagcggcctgtactctctgagcagcgtggtcacagtgcctagctctagcctgggcacccagacctacatctgcaatgtgaaccacaagcctagcaacaccaaggtggacaagagagtggaacccaagagctgtatccccgaggacacattcttcccaagccccgagagcagctgcgacgtgaagctggtggaaaagagcttcgagacagacaccaacctgaacttccagaacctgagcgtgatcggcttcagaatcctgctgctgaaagtggccggctttaacctgctgatgaccctgcggctgtggtccagc

SEQ ID NO: 9855 - DNA, 1344 bp, Artificial Sequence
  Synthetic Polynucloetide
atggccttaccagtgaccgccttgctcctgccgctggccttgctgctccacgccgccaggccggacatccagatgacacagagccctagcagcctgtctgccagcgtgggagacagagtgaccatcacatgcaaggccagccaggatgtgggcacagccgtggattggtatcagcagaagcctggcaaggcccctaagctgctgatctcttgggccagcacaagacacacaggcgtgcccagcagattttctggcagcggctctggcaccgacttcaccctgacaatatccagcctccagcctgaggacttcgccacctacttttgccagcagtacaacagctaccctctgaccttcggccagggcaccaaggtggaaatcaagagaacagttggcggaggcggaagtggaggcggaggatctggcggcggaggctctcaagttcagctggttcagagcggagccgaagtgaagaaacctggcgagagcgtgaaggtgtcctgcaaagccagcggctacacctttaccgagtacaccatccactgggtccgacaggctccaggacaaggactggaatggatgggcaacatcaaccccaacaacggcggcaccacctacaaccagaaattcgaggatcgcgtgacaatcaccgccgacaagagcaccagcaccgcctacatggaactgagcagcctgagaagcgaggacaccgccgtgtactattgtgccagaggctggaacttcgactactggggccagggaaccaccgtgacagtctcttctacgcgtgacggtaacgaggagatgggaggaatcactcaaaccccttacaaagtctcaatttcaggaacaactgttatccttacatgtccccagtatcctggcagcgagatcctttggcagcataacgacaagaatatagggggagatgaagacgataagaatatcggatctgacgaggatcacttgagcctgaaagagttctccgagcttgaacaaagcggatattatgtgtgctatccgcgcgggtcaaagccggaagacgctaacttttacctttatctccgagccagagtgtgcgaaaattgcatggaaatggacgttatgtccgttgctacaatagttatcgtagatatatgcatcacgggtggactgcttctgctggtttattattggtccaagaatagaaaggccaaagctaaacccgtgaccagaggcgctggcgcaggcggaaggcaaaggggacaaaacaaagaacggccaccaccagtgccaaatccagattatgagcctattcggaaaggacagagggacctgtactctggcctgaatcagagaagaatc

SEQ ID NO: 9856 - DNA, 1239 bp, Artificial Sequence
  Synthetic Polynucloetide
atggccttaccagtgaccgccttgctcctgccgctggccttgctgctccacgccgccaggccggacatccagatgacacagagccctagcagcctgtctgccagcgtgggagacagagtgaccatcacatgcaaggccagccaggatgtgggcacagccgtggattggtatcagcagaagcctggcaaggcccctaagctgctgatctcttgggccagcacaagacacacaggcgtgcccagcagattttctggcagcggctctggcaccgacttcaccctgacaatatccagcctccagcctgaggacttcgccacctacttttgccagcagtacaacagctaccctctgaccttcggccagggcaccaaggtggaaatcaagagaacagttggcggaggcggaagtggaggcggaggatctggcggcggaggctctcaagttcagctggttcagagcggagccgaagtgaagaaacctggcgagagcgtgaaggtgtcctgcaaagccagcggctacacctttaccgagtacaccatccactgggtccgacaggctccaggacaaggactggaatggatgggcaacatcaaccccaacaacggcggcaccacctacaaccagaaattcgaggatcgcgtgacaatcaccgccgacaagagcaccagcaccgcctacatggaactgagcagcctgagaagcgaggacaccgccgtgtactattgtgccagaggctggaacttcgactactggggccagggaaccaccgtgacagtctcttctacgcgtttcaagatccccatcgaggaactggaagatcgggtgttcgtgaactgcaacacctctatcacctgggtggaaggcaccgtgggaacactgctgagcgacatcaccagactggacctcggcaagcggattctggaccctcggggcatctacagatgcaacggcaccgacatctacaaggacaaagaaagcaccgtgcaggtccactacagaatgtgccagtcctgcgtggaactggaccctgctacagtggccggcatcatcgtgaccgatgtgatcgctactctgctgctggctctgggagtgttctgcttcgccggacacgaaacaggcagactgtctggcgctgccgatacacaggccctgctgagaaacgaccaagtgtatcagcccctgcgcgacagagatgatgcccagtattctcacctcggcggcaactgggctagaaacaag

SEQ ID NO: 9857 - DNA, 1269 bp, Artificial Sequence
  Synthetic Polynucloetide
atggccttaccagtgaccgccttgctcctgccgctggccttgctgctccacgccgccaggccggacatccagatgacacagagccctagcagcctgtctgccagcgtgggagacagagtgaccatcacatgcaaggccagccaggatgtgggcacagccgtggattggtatcagcagaagcctggcaaggcccctaagctgctgatctcttgggccagcacaagacacacaggcgtgcccagcagattttctggcagcggctctggcaccgacttcaccctgacaatatccagcctccagcctgaggacttcgccacctacttttgccagcagtacaacagctaccctctgaccttcggccagggcaccaaggtggaaatcaagagaacagttggcggaggcggaagtggaggcggaggatctggcggcggaggctctcaagttcagctggttcagagcggagccgaagtgaagaaacctggcgagagcgtgaaggtgtcctgcaaagccagcggctacacctttaccgagtacaccatccactgggtccgacaggctccaggacaaggactggaatggatgggcaacatcaaccccaacaacggcggcaccacctacaaccagaaattcgaggatcgcgtgacaatcaccgccgacaagagcaccagcaccgcctacatggaactgagcagcctgagaagcgaggacaccgccgtgtactattgtgccagaggctggaacttcgactactggggccagggaaccaccgtgacagtctcttctacgcgtcagagcatcaagggcaaccacctggtcaaggtgtacgactaccaagaggacggcagcgtgctgctgacatgtgatgccgaggccaagaacatcacctggtttaaggacggcaagatgatcggcttcctgaccgaggacaagaagaagtggaacctgggcagcaacgctaaggaccccagaggcatgtatcagtgcaagggcagccagaacaagagcaagcccctccaggtgtactaccggatgtgccagaactgcatcgagctgaacgccgctaccatcagcggctttctgttcgccgagatcgtgtccatcttcgtgctggccgtgggcgtgtactttatcgctggacaggatggcgtgcggcagagcagagcttccgataagcaaaccctgctgcctaacgaccagctgtaccagcctctgaaggacagagaggacgaccagtacagccacctccagggcaatcagctgagaagaaac

SEQ ID NO: 9858 - DNA, 1218 bp, Artificial Sequence
  Synthetic Polynucloetide
atggccttaccagtgaccgccttgctcctgccgctggccttgctgctccacgccgccaggccggacatccagatgacacagagccctagcagcctgtctgccagcgtgggagacagagtgaccatcacatgcaaggccagccaggatgtgggcacagccgtggattggtatcagcagaagcctggcaaggcccctaagctgctgatctcttgggccagcacaagacacacaggcgtgcccagcagattttctggcagcggctctggcaccgacttcaccctgacaatatccagcctccagcctgaggacttcgccacctacttttgccagcagtacaacagctaccctctgaccttcggccagggcaccaaggtggaaatcaagagaacagttggcggaggcggaagtggaggcggaggatctggcggcggaggctctcaagttcagctggttcagagcggagccgaagtgaagaaacctggcgagagcgtgaaggtgtcctgcaaagccagcggctacacctttaccgagtacaccatccactgggtccgacaggctccaggacaaggactggaatggatgggcaacatcaaccccaacaacggcggcaccacctacaaccagaaattcgaggatcgcgtgacaatcaccgccgacaagagcaccagcaccgcctacatggaactgagcagcctgagaagcgaggacaccgccgtgtactattgtgccagaggctggaacttcgactactggggccagggaaccaccgtgacagtctcttctacgcgtcagagttttgggttgttggaccctaaattgtgctatctgttggacggaatcctgttcatttacggagtgatcctgaccgcattgttcctgcgggttaagttttccagatccgcagacgcacccgcttaccaacaagggcagaaccaactctacaatgaacttaatttggggcggagggaagagtacgacgttctggacaaaaggaggggacgagatcccgagatgggcggaaagcctcagcgaaggaagaatccgcaagaggggctttataacgaactccagaaagataaaatggcagaagcctatagtgagattgggatgaagggagaaaggaggaggggtaaaggtcacgatgggttgtaccaaggattgagcacagccactaaagatacctatgatgcgctccacatgcaggccctgccgccaaga

SEQ ID NO: 9859 - DNA, 1344 bp, Artificial Sequence
  Synthetic Polynucloetide
atggccttaccagtgaccgccttgctcctgccgctggccttgctgctccacgccgccaggccgcaagttcagctggttcagagcggagccgaagtgaagaaacctggcgagagcgtgaaggtgtcctgcaaagccagcggctacacctttaccgagtacaccatccactgggtccgacaggctccaggacaaggactggaatggatgggcaacatcaaccccaacaacggcggcaccacctacaaccagaaattcgaggatcgcgtgacaatcaccgccgacaagagcaccagcaccgcctacatggaactgagcagcctgagaagcgaggacaccgccgtgtactattgtgccagaggctggaacttcgactactggggccagggaaccaccgtgacagtctcttctggcggaggcggaagtggaggcggaggatctggcggcggaggctctgacatccagatgacacagagccctagcagcctgtctgccagcgtgggagacagagtgaccatcacatgcaaggccagccaggatgtgggcacagccgtggattggtatcagcagaagcctggcaaggcccctaagctgctgatctcttgggccagcacaagacacacaggcgtgcccagcagattttctggcagcggctctggcaccgacttcaccctgacaatatccagcctccagcctgaggacttcgccacctacttttgccagcagtacaacagctaccctctgaccttcggccagggcaccaaggtggaaatcaagagaacagttacgcgtgacggtaacgaggagatgggaggaatcactcaaaccccttacaaagtctcaatttcaggaacaactgttatccttacatgtccccagtatcctggcagcgagatcctttggcagcataacgacaagaatatagggggagatgaagacgataagaatatcggatctgacgaggatcacttgagcctgaaagagttctccgagcttgaacaaagcggatattatgtgtgctatccgcgcgggtcaaagccggaagacgctaacttttacctttatctccgagccagagtgtgcgaaaattgcatggaaatggacgttatgtccgttgctacaatagttatcgtagatatatgcatcacgggtggactgcttctgctggtttattattggtccaagaatagaaaggccaaagctaaacccgtgaccagaggcgctggcgcaggcggaaggcaaaggggacaaaacaaagaacggccaccaccagtgccaaatccagattatgagcctattcggaaaggacagagggacctgtactctggcctgaatcagagaagaatc

SEQ ID NO: 9860 - DNA, 1239 bp, Artificial Sequence
  Synthetic Polynucloetide
atggccttaccagtgaccgccttgctcctgccgctggccttgctgctccacgccgccaggccgcaagttcagctggttcagagcggagccgaagtgaagaaacctggcgagagcgtgaaggtgtcctgcaaagccagcggctacacctttaccgagtacaccatccactgggtccgacaggctccaggacaaggactggaatggatgggcaacatcaaccccaacaacggcggcaccacctacaaccagaaattcgaggatcgcgtgacaatcaccgccgacaagagcaccagcaccgcctacatggaactgagcagcctgagaagcgaggacaccgccgtgtactattgtgccagaggctggaacttcgactactggggccagggaaccaccgtgacagtctcttctggcggaggcggaagtggaggcggaggatctggcggcggaggctctgacatccagatgacacagagccctagcagcctgtctgccagcgtgggagacagagtgaccatcacatgcaaggccagccaggatgtgggcacagccgtggattggtatcagcagaagcctggcaaggcccctaagctgctgatctcttgggccagcacaagacacacaggcgtgcccagcagattttctggcagcggctctggcaccgacttcaccctgacaatatccagcctccagcctgaggacttcgccacctacttttgccagcagtacaacagctaccctctgaccttcggccagggcaccaaggtggaaatcaagagaacagttacgcgtttcaagatccccatcgaggaactggaagatcgggtgttcgtgaactgcaacacctctatcacctgggtggaaggcaccgtgggaacactgctgagcgacatcaccagactggacctcggcaagcggattctggaccctcggggcatctacagatgcaacggcaccgacatctacaaggacaaagaaagcaccgtgcaggtccactacagaatgtgccagtcctgcgtggaactggaccctgctacagtggccggcatcatcgtgaccgatgtgatcgctactctgctgctggctctgggagtgttctgcttcgccggacacgaaacaggcagactgtctggcgctgccgatacacaggccctgctgagaaacgaccaagtgtatcagcccctgcgcgacagagatgatgcccagtattctcacctcggcggcaactgggctagaaacaag

SEQ ID NO: 9861 - DNA, 1269 bp, Artificial Sequence
  Synthetic Polynucloetide
atggccttaccagtgaccgccttgctcctgccgctggccttgctgctccacgccgccaggccgcaagttcagctggttcagagcggagccgaagtgaagaaacctggcgagagcgtgaaggtgtcctgcaaagccagcggctacacctttaccgagtacaccatccactgggtccgacaggctccaggacaaggactggaatggatgggcaacatcaaccccaacaacggcggcaccacctacaaccagaaattcgaggatcgcgtgacaatcaccgccgacaagagcaccagcaccgcctacatggaactgagcagcctgagaagcgaggacaccgccgtgtactattgtgccagaggctggaacttcgactactggggccagggaaccaccgtgacagtctcttctggcggaggcggaagtggaggcggaggatctggcggcggaggctctgacatccagatgacacagagccctagcagcctgtctgccagcgtgggagacagagtgaccatcacatgcaaggccagccaggatgtgggcacagccgtggattggtatcagcagaagcctggcaaggcccctaagctgctgatctcttgggccagcacaagacacacaggcgtgcccagcagattttctggcagcggctctggcaccgacttcaccctgacaatatccagcctccagcctgaggacttcgccacctacttttgccagcagtacaacagctaccctctgaccttcggccagggcaccaaggtggaaatcaagagaacagttacgcgtcagagcatcaagggcaaccacctggtcaaggtgtacgactaccaagaggacggcagcgtgctgctgacatgtgatgccgaggccaagaacatcacctggtttaaggacggcaagatgatcggcttcctgaccgaggacaagaagaagtggaacctgggcagcaacgctaaggaccccagaggcatgtatcagtgcaagggcagccagaacaagagcaagcccctccaggtgtactaccggatgtgccagaactgcatcgagctgaacgccgctaccatcagcggctttctgttcgccgagatcgtgtccatcttcgtgctggccgtgggcgtgtactttatcgctggacaggatggcgtgcggcagagcagagcttccgataagcaaaccctgctgcctaacgaccagctgtaccagcctctgaaggacagagaggacgaccagtacagccacctccagggcaatcagctgagaagaaac

SEQ ID NO: 9862 - DNA, 1218 bp, Artificial Sequence
  Synthetic Polynucloetide
atggccttaccagtgaccgccttgctcctgccgctggccttgctgctccacgccgccaggccgcaagttcagctggttcagagcggagccgaagtgaagaaacctggcgagagcgtgaaggtgtcctgcaaagccagcggctacacctttaccgagtacaccatccactgggtccgacaggctccaggacaaggactggaatggatgggcaacatcaaccccaacaacggcggcaccacctacaaccagaaattcgaggatcgcgtgacaatcaccgccgacaagagcaccagcaccgcctacatggaactgagcagcctgagaagcgaggacaccgccgtgtactattgtgccagaggctggaacttcgactactggggccagggaaccaccgtgacagtctcttctggcggaggcggaagtggaggcggaggatctggcggcggaggctctgacatccagatgacacagagccctagcagcctgtctgccagcgtgggagacagagtgaccatcacatgcaaggccagccaggatgtgggcacagccgtggattggtatcagcagaagcctggcaaggcccctaagctgctgatctcttgggccagcacaagacacacaggcgtgcccagcagattttctggcagcggctctggcaccgacttcaccctgacaatatccagcctccagcctgaggacttcgccacctacttttgccagcagtacaacagctaccctctgaccttcggccagggcaccaaggtggaaatcaagagaacagttacgcgtcagagttttgggttgttggaccctaaattgtgctatctgttggacggaatcctgttcatttacggagtgatcctgaccgcattgttcctgcgggttaagttttccagatccgcagacgcacccgcttaccaacaagggcagaaccaactctacaatgaacttaatttggggcggagggaagagtacgacgttctggacaaaaggaggggacgagatcccgagatgggcggaaagcctcagcgaaggaagaatccgcaagaggggctttataacgaactccagaaagataaaatggcagaagcctatagtgagattgggatgaagggagaaaggaggaggggtaaaggtcacgatgggttgtaccaaggattgagcacagccactaaagatacctatgatgcgctccacatgcaggccctgccgccaaga

SEQ ID NO: 9863 - DNA, 1920 bp, Artificial Sequence
  Synthetic Polynucloetide
atggccttaccagtgaccgccttgctcctgccgctggccttgctgctccacgccgccaggccggacatccagatgacacagagccctagcagcctgtctgccagcgtgggagacagagtgaccatcacatgcaaggccagccaggatgtgggcacagccgtggattggtatcagcagaagcctggcaaggcccctaagctgctgatctcttgggccagcacaagacacacaggcgtgcccagcagattttctggcagcggctctggcaccgacttcaccctgacaatatccagcctccagcctgaggacttcgccacctacttttgccagcagtacaacagctaccctctgaccttcggccagggcaccaaggtggaaatcaagagaacagttggcggaggcggaagtggaggcggaggatctggcggcggaggctctcaagttcagctggttcagagcggagccgaagtgaagaaacctggcgagagcgtgaaggtgtcctgcaaagccagcggctacacctttaccgagtacaccatccactgggtccgacaggctccaggacaaggactggaatggatgggcaacatcaaccccaacaacggcggcaccacctacaaccagaaattcgaggatcgcgtgacaatcaccgccgacaagagcaccagcaccgcctacatggaactgagcagcctgagaagcgaggacaccgccgtgtactattgtgccagaggctggaacttcgactactggggccagggaaccaccgtgacagtctcttctacgcgtgggagcggcatccagaaccctgatcctgccgtgtaccagctgcgggatagcaagagcagcgacaagagcgtgtgtctgttcaccgacttcgacagccagaccaacgtgtcccagagcaaggactccgacgtgtacatcaccgataagaccgtgctggacatgcggagcatggacttcaagagcaactccgccgtggcctggtccaacaagtccgatttcgcctgcgccaacgccttcaacaacagcattatccccgaggacacattcttcccaagccccgagagcagctgcgacgtgaagctggtggaaaagagcttcgagacagacaccaacctgaacttccagaacctgagcgtgatcggcttcagaatcctgctgctgaaagtggccggctttaacctgctgatgaccctgcggctgtggtccagccgcgccaagagaagcggatctggcgtgaagcagaccctgaatttcgacctgctgaagctggctggcgacgtggaatccaacccaggcccttctagaggccatatgaccgagtacaagcccacggtgcgcctcgccacccgcgacgacgtccccagggccgtacgcaccctcgccgccgcgttcgccgactaccccgccacgcgccacaccgtcgatccggaccgccacatcgagcgggtcaccgagctgcaagaactcttcctcacgcgcgtcgggctcgacatcggcaaggtgtgggtcgcggacgacggcgccgcggtggcggtctggaccacgccggagagcgtcgaagcgggggcggtgttcgccgagatcggcccgcgcatggccgagttgagcggttcccggctggccgcgcagcaacagatggaaggcctcctggcgccgcaccggcccaaggagcccgcgtggttcctggccaccgtcggcgtctcgcccgaccaccagggcaagggtctgggcagcgccgtcgtgctccccggagtggaggcggccgagcgcgccggggtgcccgccttcctggagacctccgcgccccgcaacctccccttctacgagcggctcggcttcaccgtcaccgccgacgtcgaggtgcccgaaggaccgcgcacctggtgcatgacccgcaagcccggtgcctga

SEQ ID NO: 9864 - DNA, 2016 bp, Artificial Sequence
  Synthetic Polynucloetide
atggccttaccagtgaccgccttgctcctgccgctggccttgctgctccacgccgccaggccggacatccagatgacacagagccctagcagcctgtctgccagcgtgggagacagagtgaccatcacatgcaaggccagccaggatgtgggcacagccgtggattggtatcagcagaagcctggcaaggcccctaagctgctgatctcttgggccagcacaagacacacaggcgtgcccagcagattttctggcagcggctctggcaccgacttcaccctgacaatatccagcctccagcctgaggacttcgccacctacttttgccagcagtacaacagctaccctctgaccttcggccagggcaccaaggtggaaatcaagagaacagttggcggaggcggaagtggaggcggaggatctggcggcggaggctctcaagttcagctggttcagagcggagccgaagtgaagaaacctggcgagagcgtgaaggtgtcctgcaaagccagcggctacacctttaccgagtacaccatccactgggtccgacaggctccaggacaaggactggaatggatgggcaacatcaaccccaacaacggcggcaccacctacaaccagaaattcgaggatcgcgtgacaatcaccgccgacaagagcaccagcaccgcctacatggaactgagcagcctgagaagcgaggacaccgccgtgtactattgtgccagaggctggaacttcgactactggggccagggaaccaccgtgacagtctcttctctcgaggacctgaagaacgtgttcccacctgaggtggccgtgttcgagcctagcgaggccgagatcagccacacccagaaagccaccctcgtgtgcctggctaccggcttctaccccgaccatgtggaactgtcttggtgggtcaacggcaaagaggtgcacagcggcgtgtctaccgacccccagccactgaaagaacagcccgccctgaacgacagccggtactgcctgagcagcagactgagagtgtccgccaccttctggcagaacccccggaaccacttcagatgccaggtgcagttctacggcctgagcgagaacgacgagtggacccaggacagagccaagcccgtgacccagatcgtgtctgccgaagcctggggcagagccgattgcggctttaccagcgagagctaccagcagggcgtgctgagcgccaccatcctgtacgagatcctgctgggcaaggccaccctgtacgccgtgctggtgtctgccctggtgctgatggctatggtcaagcggaaggacagccggggaagggccaagcgatctggatctggagcaacaaacttctcactactcaaacaagcaggtgacgtggaggagaatcccgggcctactagaggccatatgaccgagtacaagcccacggtgcgcctcgccacccgcgacgacgtccccagggccgtacgcaccctcgccgccgcgttcgccgactaccccgccacgcgccacaccgtcgatccggaccgccacatcgagcgggtcaccgagctgcaagaactcttcctcacgcgcgtcgggctcgacatcggcaaggtgtgggtcgcggacgacggcgccgcggtggcggtctggaccacgccggagagcgtcgaagcgggggcggtgttcgccgagatcggcccgcgcatggccgagttgagcggttcccggctggccgcgcagcaacagatggaaggcctcctggcgccgcaccggcccaaggagcccgcgtggttcctggccaccgtcggcgtctcgcccgaccaccagggcaagggtctgggcagcgccgtcgtgctccccggagtggaggcggccgagcgcgccggggtgcccgccttcctggagacctccgcgccccgcaacctccccttctacgagcggctcggcttcaccgtcaccgccgacgtcgaggtgcccgaaggaccgcgcacctggtgcatgacccgcaagcccggtgcctga

SEQ ID NO: 9865 - DNA, 2166 bp, Artificial Sequence
  Synthetic Polynucloetide
atggccttaccagtgaccgccttgctcctgccgctggccttgctgctccacgccgccaggccggacatccagatgacacagagccctagcagcctgtctgccagcgtgggagacagagtgaccatcacatgcaaggccagccaggatgtgggcacagccgtggattggtatcagcagaagcctggcaaggcccctaagctgctgatctcttgggccagcacaagacacacaggcgtgcccagcagattttctggcagcggctctggcaccgacttcaccctgacaatatccagcctccagcctgaggacttcgccacctacttttgccagcagtacaacagctaccctctgaccttcggccagggcaccaaggtggaaatcaagagaacagttggcggaggcggaagtggaggcggaggatctggcggcggaggctctcaagttcagctggttcagagcggagccgaagtgaagaaacctggcgagagcgtgaaggtgtcctgcaaagccagcggctacacctttaccgagtacaccatccactgggtccgacaggctccaggacaaggactggaatggatgggcaacatcaaccccaacaacggcggcaccacctacaaccagaaattcgaggatcgcgtgacaatcaccgccgacaagagcaccagcaccgcctacatggaactgagcagcctgagaagcgaggacaccgccgtgtactattgtgccagaggctggaacttcgactactggggccagggaaccaccgtgacagtctcttctacgcgtgagcagaaactgatctcggaagaggatctggggagcggcaccccattcccttctctggcccctcccatcatgctgctggtggacggcaagcagcagatggtggtcgtgtgcctggtgctggatgtggccccacctggactggacagccccatctggtttagcgccggcaatggctctgccctggacgcctttacctacggcccaagccctgccaccgatggcacctggacaaatctggcccacctgagcctgcccagcgaggaactggcttcttgggagcctctcgtgtgccacacaggacctggcgctgagggacacagcagatccacccagcctatgcacctgtctggcgaggccagcaccgccagaacctgtcctcaggaacctctgagaggcacccctggcggagcactgtggctgggagtgctgagactgctgctgttcaagctgctgctgtttgacctgctgctgacctgctcctgtctgtgcgatcctgccggccctctgccttctcctgccaccaccacaagactgagagccctgggcagccacagactgcaccctgccacagagacaggcggcagagaggccacaagcagccctagaccccagcccagagacagaagatggggcgataccccccctggcagaaagcctggatctccagtccgcgccaagagaagcggatctggcgtgaagcagaccctgaatttcgacctgctgaagctggctggcgacgtggaatccaacccaggcccttctagatctagaggccatatgaccgagtacaagcccacggtgcgcctcgccacccgcgacgacgtccccagggccgtacgcaccctcgccgccgcgttcgccgactaccccgccacgcgccacaccgtcgatccggaccgccacatcgagcgggtcaccgagctgcaagaactcttcctcacgcgcgtcgggctcgacatcggcaaggtgtgggtcgcggacgacggcgccgcggtggcggtctggaccacgccggagagcgtcgaagcgggggcggtgttcgccgagatcggcccgcgcatggccgagttgagcggttcccggctggccgcgcagcaacagatggaaggcctcctggcgccgcaccggcccaaggagcccgcgtggttcctggccaccgtcggcgtctcgcccgaccaccagggcaagggtctgggcagcgccgtcgtgctccccggagtggaggcggccgagcgcgccggggtgcccgccttcctggagacctccgcgccccgcaacctccccttctacgagcggctcggcttcaccgtcaccgccgacgtcgaggtgcccgaaggaccgcgcacctggtgcatgacccgcaagcccggtgcctga

SEQ ID NO: 9866 - DNA, 1626 bp, Artificial Sequence
  Synthetic Polynucloetide
atggccttaccagtgaccgccttgctcctgccgctggccttgctgctccacgccgccaggccggacatccagatgacacagagccctagcagcctgtctgccagcgtgggagacagagtgaccatcacatgcaaggccagccaggatgtgggcacagccgtggattggtatcagcagaagcctggcaaggcccctaagctgctgatctcttgggccagcacaagacacacaggcgtgcccagcagattttctggcagcggctctggcaccgacttcaccctgacaatatccagcctccagcctgaggacttcgccacctacttttgccagcagtacaacagctaccctctgaccttcggccagggcaccaaggtggaaatcaagagaacagttctcgaggacctgaagaacgtgttcccacctgaggtggccgtgttcgagcctagcgaggccgagatcagccacacccagaaagccaccctcgtgtgcctggctaccggcttctaccccgaccatgtggaactgtcttggtgggtcaacggcaaagaggtgcacagcggcgtgtctaccgacccccagccactgaaagaacagcccgccctgaacgacagccggtactgcctgagcagcagactgagagtgtccgccaccttctggcagaacccccggaaccacttcagatgccaggtgcagttctacggcctgagcgagaacgacgagtggacccaggacagagccaagcccgtgacccagatcgtgtctgccgaagcctggggcagagccgattgcggctttaccagcgagagctaccagcagggcgtgctgagcgccaccatcctgtacgagatcctgctgggcaaggccaccctgtacgccgtgctggtgtctgccctggtgctgatggctatggtcaagcggaaggacagccggggaagggccaagcgatctggatctggagcaacaaacttctcactactcaaacaagcaggtgacgtggaggagaatcccgggcctactagaggccatatgaccgagtacaagcccacggtgcgcctcgccacccgcgacgacgtccccagggccgtacgcaccctcgccgccgcgttcgccgactaccccgccacgcgccacaccgtcgatccggaccgccacatcgagcgggtcaccgagctgcaagaactcttcctcacgcgcgtcgggctcgacatcggcaaggtgtgggtcgcggacgacggcgccgcggtggcggtctggaccacgccggagagcgtcgaagcgggggcggtgttcgccgagatcggcccgcgcatggccgagttgagcggttcccggctggccgcgcagcaacagatggaaggcctcctggcgccgcaccggcccaaggagcccgcgtggttcctggccaccgtcggcgtctcgcccgaccaccagggcaagggtctgggcagcgccgtcgtgctccccggagtggaggcggccgagcgcgccggggtgcccgccttcctggagacctccgcgccccgcaacctccccttctacgagcggctcggcttcaccgtcaccgccgacgtcgaggtgcccgaaggaccgcgcacctggtgcatgacccgcaagcccggtgcctga

SEQ ID NO: 9867 - DNA, 933 bp, Artificial Sequence
  Synthetic Polynucloetide
atggccttaccagtgaccgccttgctcctgccgctggccttgctgctccacgccgccaggccggacatccagatgacacagagccctagcagcctgtctgccagcgtgggagacagagtgaccatcacatgcaaggccagccaggatgtgggcacagccgtggattggtatcagcagaagcctggcaaggcccctaagctgctgatctcttgggccagcacaagacacacaggcgtgcccagcagattttctggcagcggctctggcaccgacttcaccctgacaatatccagcctccagcctgaggacttcgccacctacttttgccagcagtacaacagctaccctctgaccttcggccagggcaccaaggtggaaatcaagagaacagttctcgaggacctgaagaacgtgttcccacctgaggtggccgtgttcgagcctagcgaggccgagatcagccacacccagaaagccaccctcgtgtgcctggctaccggcttctaccccgaccatgtggaactgtcttggtgggtcaacggcaaagaggtgcacagcggcgtgtctaccgacccccagccactgaaagaacagcccgccctgaacgacagccggtactgcctgagcagcagactgagagtgtccgccaccttctggcagaacccccggaaccacttcagatgccaggtgcagttctacggcctgagcgagaacgacgagtggacccaggacagagccaagcccgtgacccagatcgtgtctgccgaagcctggggcagagccgattgcggctttaccagcgagagctaccagcagggcgtgctgagcgccaccatcctgtacgagatcctgctgggcaaggccaccctgtacgccgtgctggtgtctgccctggtgctgatggctatggtcaagcggaaggacagccgggga

SEQ ID NO: 9868 - DNA, 1335 bp, Artificial Sequence
  Synthetic Polynucloetide
atggactggatttggcgcatccttttccttgtcggcgctgctaccggcgcgcattccttcgaacaagttcagctggttcagagcggagccgaagtgaagaaacctggcgagagcgtgaaggtgtcctgcaaagccagcggctacacctttaccgagtacaccatccactgggtccgacaggctccaggacaaggactggaatggatgggcaacatcaaccccaacaacggcggcaccacctacaaccagaaattcgaggatcgcgtgacaatcaccgccgacaagagcaccagcaccgcctacatggaactgagcagcctgagaagcgaggacaccgccgtgtactattgtgccagaggctggaacttcgactactggggccagggaaccaccgtgacagtctcttctacgcgtatccagaaccctgatcctgccgtgtaccagctgcgggatagcaagagcagcgacaagagcgtgtgtctgttcaccgacttcgacagccagaccaacgtgtcccagagcaaggactccgacgtgtacatcaccgataagaccgtgctggacatgcggagcatggacttcaagagcaactccgccgtggcctggtccaacaagtccgatttcgcctgcgccaacgccttcaacaacagcattatccccgaggacacattcttcccaagccccgagagcagctgcgacgtgaagctggtggaaaagagcttcgagacagacaccaacctgaacttccagaacctgagcgtgatcggcttcagaatcctgctgctgaaagtggccggctttaacctgctgatgaccctgcggctgtggtccagccgcgccaagagaagcggatctggcgtgaagcagaccctgaatttcgacctgctgaagctggctggcgacgtggaatccaacccaggcccttctagaggccatatggccaagcctttgtctcaagaagaatccaccctcattgaaagagcaacggctacaatcaacagcatccccatctctgaagactacagcgtcgccagcgcagctctctctagcgacggccgcatcttcactggtgtcaatgtatatcattttactgggggaccttgtgcagaactcgtggtgctgggcactgctgctgctgcggcagctggcaacctgacttgtatcgtcgcgatcggaaatgagaacaggggcatcttgagcccctgcggacggtgccgacaggtgcttctcgatctgcatcctgggatcaaagccatagtgaaggacagtgatggacagccgacggcagttgggattcgtgaattgctgccctctggttatgtgtgggagggctga

SEQ ID NO: 9869 - DNA, 834 bp, Artificial Sequence
  Synthetic Polynucloetide
atggactggatttggcgcatccttttccttgtcggcgctgctaccggcgcgcattccttcgaacaagttcagctggttcagagcggagccgaagtgaagaaacctggcgagagcgtgaaggtgtcctgcaaagccagcggctacacctttaccgagtacaccatccactgggtccgacaggctccaggacaaggactggaatggatgggcaacatcaaccccaacaacggcggcaccacctacaaccagaaattcgaggatcgcgtgacaatcaccgccgacaagagcaccagcaccgcctacatggaactgagcagcctgagaagcgaggacaccgccgtgtactattgtgccagaggctggaacttcgactactggggccagggaaccaccgtgacagtctcttctacgcgtatccagaaccctgatcctgccgtgtaccagctgcgggatagcaagagcagcgacaagagcgtgtgtctgttcaccgacttcgacagccagaccaacgtgtcccagagcaaggactccgacgtgtacatcaccgataagaccgtgctggacatgcggagcatggacttcaagagcaactccgccgtggcctggtccaacaagtccgatttcgcctgcgccaacgccttcaacaacagcattatccccgaggacacattcttcccaagccccgagagcagctgcgacgtgaagctggtggaaaagagcttcgagacagacaccaacctgaacttccagaacctgagcgtgatcggcttcagaatcctgctgctgaaagtggccggctttaacctgctgatgaccctgcggctgtggtccagc

SEQ ID NO: 9870 - DNA, 1680 bp, Artificial Sequence
  Synthetic Polynucloetide
atggccttaccagtgaccgccttgctcctgccgctggccttgctgctccacgccgccaggccggacatccagatgacacagagccctagcagcctgtctgccagcgtgggagacagagtgaccatcacatgcaaggccagccaggatgtgggcacagccgtggattggtatcagcagaagcctggcaaggcccctaagctgctgatctcttgggccagcacaagacacacaggcgtgcccagcagattttctggcagcggctctggcaccgacttcaccctgacaatatccagcctccagcctgaggacttcgccacctacttttgccagcagtacaacagctaccctctgaccttcggccagggcaccaaggtggaaatcaagagaacagttctcgaggggaaaccaattcccaaccctcttctgggactggattcaaccggcagcggcgaggacctgaagaacgtgttcccacctgaggtggccgtgttcgagcctagcgaggccgagatcagccacacccagaaagccaccctcgtgtgcctggctaccggcttctaccccgaccatgtggaactgtcttggtgggtcaacggcaaagaggtgcacagcggcgtgtgtaccgacccccagccactgaaagaacagcccgccctgaacgacagccggtactgcctgagcagcagactgagagtgtccgccaccttctggcagaacccccggaaccacttcagatgccaggtgcagttctacggcctgagcgagaacgacgagtggacccaggacagagccaagcccgtgacccagatcgtgtctgccgaagcctggggcagagccgattgcggctttaccagcgagagctaccagcagggcgtgctgagcgccaccatcctgtacgagatcctgctgggcaaggccaccctgtacgccgtgctggtgtctgccctggtgctgatggctatggtcaagcggaaggacagccggggaagggccaagcgatctggatctggagcaacaaacttctcactactcaaacaagcaggtgacgtggaggagaatcccgggcctactagaggccatatgaccgagtacaagcccacggtgcgcctcgccacccgcgacgacgtccccagggccgtacgcaccctcgccgccgcgttcgccgactaccccgccacgcgccacaccgtcgatccggaccgccacatcgagcgggtcaccgagctgcaagaactcttcctcacgcgcgtcgggctcgacatcggcaaggtgtgggtcgcggacgacggcgccgcggtggcggtctggaccacgccggagagcgtcgaagcgggggcggtgttcgccgagatcggcccgcgcatggccgagttgagcggttcccggctggccgcgcagcaacagatggaaggcctcctggcgccgcaccggcccaaggagcccgcgtggttcctggccaccgtcggcgtctcgcccgaccaccagggcaagggtctgggcagcgccgtcgtgctccccggagtggaggcggccgagcgcgccggggtgcccgccttcctggagacctccgcgccccgcaacctccccttctacgagcggctcggcttcaccgtcaccgccgacgtcgaggtgcccgaaggaccgcgcacctggtgcatgacccgcaagcccggtgcctga

SEQ ID NO: 9871 - DNA, 990 bp, Artificial Sequence
  Synthetic Polynucloetide
atggccttaccagtgaccgccttgctcctgccgctggccttgctgctccacgccgccaggccggacatccagatgacacagagccctagcagcctgtctgccagcgtgggagacagagtgaccatcacatgcaaggccagccaggatgtgggcacagccgtggattggtatcagcagaagcctggcaaggcccctaagctgctgatctcttgggccagcacaagacacacaggcgtgcccagcagattttctggcagcggctctggcaccgacttcaccctgacaatatccagcctccagcctgaggacttcgccacctacttttgccagcagtacaacagctaccctctgaccttcggccagggcaccaaggtggaaatcaagagaacagttctcgaggggaaaccaattcccaaccctcttctgggactggattcaaccggcagcggcgaggacctgaagaacgtgttcccacctgaggtggccgtgttcgagcctagcgaggccgagatcagccacacccagaaagccaccctcgtgtgcctggctaccggcttctaccccgaccatgtggaactgtcttggtgggtcaacggcaaagaggtgcacagcggcgtgtgtaccgacccccagccactgaaagaacagcccgccctgaacgacagccggtactgcctgagcagcagactgagagtgtccgccaccttctggcagaacccccggaaccacttcagatgccaggtgcagttctacggcctgagcgagaacgacgagtggacccaggacagagccaagcccgtgacccagatcgtgtctgccgaagcctggggcagagccgattgcggctttaccagcgagagctaccagcagggcgtgctgagcgccaccatcctgtacgagatcctgctgggcaaggccaccctgtacgccgtgctggtgtctgccctggtgctgatggctatggtcaagcggaaggacagccggggatga

SEQ ID NO: 9872 - DNA, 1371 bp, Artificial Sequence
  Synthetic Polynucloetide
atggactggatttggcgcatccttttccttgtcggcgctgctaccggcgcgcattccttcgaacaagttcagctggttcagagcggagccgaagtgaagaaacctggcgagagcgtgaaggtgtcctgcaaagccagcggctacacctttaccgagtacaccatccactgggtccgacaggctccaggacaaggactggaatggatgggcaacatcaaccccaacaacggcggcaccacctacaaccagaaattcgaggatcgcgtgacaatcaccgccgacaagagcaccagcaccgcctacatggaactgagcagcctgagaagcgaggacaccgccgtgtactattgtgccagaggctggaacttcgactactggggccagggaaccaccgtgacagtctcttctacgcgtgagcagaaactgatctcggaagaggatgggagcggcatccagaaccctgatcctgccgtgtaccagctgcgggatagcaagagcagcgacaagagcgtgtgtctgttcaccgacttcgacagccagaccaacgtgtcccagagcaaggactccgacgtgtacatcaccgataagtgcgtgctggacatgcggagcatggacttcaagagcaactccgccgtggcctggtccaacaagtccgatttcgcctgcgccaacgccttcaacaacagcattatccccgaggacacattcttcccaagccccgagagcagctgcgacgtgaagctggtggaaaagagcttcgagacagacaccaacctgaacttccagaacctgagcgtgatcggcttcagaatcctgctgctgaaagtggccggctttaacctgctgatgaccctgcggctgtggtccagccgcgccaagagaagcggatctggcgtgaagcagaccctgaatttcgacctgctgaagctggctggcgacgtggaatccaacccaggcccttctagaggccatatggccaagcctttgtctcaagaagaatccaccctcattgaaagagcaacggctacaatcaacagcatccccatctctgaagactacagcgtcgccagcgcagctctctctagcgacggccgcatcttcactggtgtcaatgtatatcattttactgggggaccttgtgcagaactcgtggtgctgggcactgctgctgctgcggcagctggcaacctgacttgtatcgtcgcgatcggaaatgagaacaggggcatcttgagcccctgcggacggtgccgacaggtgcttctcgatctgcatcctgggatcaaagccatagtgaaggacagtgatggacagccgacggcagttgggattcgtgaattgctgccctctggttatgtgtgggagggctga

SEQ ID NO: 9873 - DNA, 873 bp, Artificial Sequence
  Synthetic Polynucloetide
atggactggatttggcgcatccttttccttgtcggcgctgctaccggcgcgcattccttcgaacaagttcagctggttcagagcggagccgaagtgaagaaacctggcgagagcgtgaaggtgtcctgcaaagccagcggctacacctttaccgagtacaccatccactgggtccgacaggctccaggacaaggactggaatggatgggcaacatcaaccccaacaacggcggcaccacctacaaccagaaattcgaggatcgcgtgacaatcaccgccgacaagagcaccagcaccgcctacatggaactgagcagcctgagaagcgaggacaccgccgtgtactattgtgccagaggctggaacttcgactactggggccagggaaccaccgtgacagtctcttctacgcgtgagcagaaactgatctcggaagaggatgggagcggcatccagaaccctgatcctgccgtgtaccagctgcgggatagcaagagcagcgacaagagcgtgtgtctgttcaccgacttcgacagccagaccaacgtgtcccagagcaaggactccgacgtgtacatcaccgataagtgcgtgctggacatgcggagcatggacttcaagagcaactccgccgtggcctggtccaacaagtccgatttcgcctgcgccaacgccttcaacaacagcattatccccgaggacacattcttcccaagccccgagagcagctgcgacgtgaagctggtggaaaagagcttcgagacagacaccaacctgaacttccagaacctgagcgtgatcggcttcagaatcctgctgctgaaagtggccggctttaacctgctgatgaccctgcggctgtggtccagctga

SEQ ID NO: 9874 - DNA, 1920 bp, Artificial Sequence
  Synthetic Polynucloetide
atggccttaccagtgaccgccttgctcctgccgctggccttgctgctccacgccgccaggccggacatccagatgacacagagccctagcagcctgtctgccagcgtgggagacagagtgaccatcacatgcaaggccagccaggatgtgggcacagccgtggattggtatcagcagaagcctggcaaggcccctaagctgctgatctcttgggccagcacaagacacacaggcgtgcccagcagattttctggcagcggctctggcaccgacttcaccctgacaatatccagcctccagcctgaggacttcgccacctacttttgccagcagtacaacagctaccctctgaccttcggccagggcaccaaggtggaaatcaagagaacagttggcggaggcggaagtggaggcggaggatctggcggcggaggctctcaagttcagctggttcagagcggagccgaagtgaagaaacctggcgagagcgtgaaggtgtcctgcaaagccagcggctacacctttaccgagtacaccatccactgggtccgacaggctccaggacaaggactggaatggatgggcaacatcaaccccaacaacggcggcaccacctacaaccagaaattcgaggatcgcgtgacaatcaccgccgacaagagcaccagcaccgcctacatggaactgagcagcctgagaagcgaggacaccgccgtgtactattgtgccagaggctggaacttcgactactggggccagggaaccaccgtgacagtctcttctacgcgtgggagcggcatccagaaccctgatcctgccgtgtaccagctgcgggatagcaagagcagcgacaagagcgtgtgtctgttcaccgacttcgacagccagaccaacgtgtcccagagcaaggactccgacgtgtacatcaccgataagaccgtgctggacatgcggagcatggacttcaagagcaactccgccgtggcctggtccaacaagtccgatttcgcctgcgccaacgccttcaacaacagcattatccccgaggacacattcttcccaagcagcgacgtgccctgcgacgtgaagctggtggaaaagagcttcgagacagacaccaacctgaacttccagaacctgagcgtgatcggcttcagaatcctgctgctgaaagtggccggctttaacctgctgatgaccctgcggctgtggtccagccgcgccaagagaagcggatctggcgtgaagcagaccctgaatttcgacctgctgaagctggctggcgacgtggaatccaacccaggcccttctagaggccatatgaccgagtacaagcccacggtgcgcctcgccacccgcgacgacgtccccagggccgtacgcaccctcgccgccgcgttcgccgactaccccgccacgcgccacaccgtcgatccggaccgccacatcgagcgggtcaccgagctgcaagaactcttcctcacgcgcgtcgggctcgacatcggcaaggtgtgggtcgcggacgacggcgccgcggtggcggtctggaccacgccggagagcgtcgaagcgggggcggtgttcgccgagatcggcccgcgcatggccgagttgagcggttcccggctggccgcgcagcaacagatggaaggcctcctggcgccgcaccggcccaaggagcccgcgtggttcctggccaccgtcggcgtctcgcccgaccaccagggcaagggtctgggcagcgccgtcgtgctccccggagtggaggcggccgagcgcgccggggtgcccgccttcctggagacctccgcgccccgcaacctccccttctacgagcggctcggcttcaccgtcaccgccgacgtcgaggtgcccgaaggaccgcgcacctggtgcatgacccgcaagcccggtgcctga

SEQ ID NO: 9875 - DNA, 2016 bp, Artificial Sequence
  Synthetic Polynucloetide
atggccttaccagtgaccgccttgctcctgccgctggccttgctgctccacgccgccaggccggacatccagatgacacagagccctagcagcctgtctgccagcgtgggagacagagtgaccatcacatgcaaggccagccaggatgtgggcacagccgtggattggtatcagcagaagcctggcaaggcccctaagctgctgatctcttgggccagcacaagacacacaggcgtgcccagcagattttctggcagcggctctggcaccgacttcaccctgacaatatccagcctccagcctgaggacttcgccacctacttttgccagcagtacaacagctaccctctgaccttcggccagggcaccaaggtggaaatcaagagaacagttggcggaggcggaagtggaggcggaggatctggcggcggaggctctcaagttcagctggttcagagcggagccgaagtgaagaaacctggcgagagcgtgaaggtgtcctgcaaagccagcggctacacctttaccgagtacaccatccactgggtccgacaggctccaggacaaggactggaatggatgggcaacatcaaccccaacaacggcggcaccacctacaaccagaaattcgaggatcgcgtgacaatcaccgccgacaagagcaccagcaccgcctacatggaactgagcagcctgagaagcgaggacaccgccgtgtactattgtgccagaggctggaacttcgactactggggccagggaaccaccgtgacagtctcttctctcgaggacctgaagaacgtgttcccacctgaggtggccgtgttcgagcctagcaaggccgagatcgcccacacccagaaagccaccctcgtgtgcctggctaccggcttctaccccgaccatgtggaactgtcttggtgggtcaacggcaaagaggtgcacagcggcgtgtctaccgacccccagccactgaaagaacagcccgccctgaacgacagccggtactgcctgagcagcagactgagagtgtccgccaccttctggcagaacccccggaaccacttcagatgccaggtgcagttctacggcctgagcgagaacgacgagtggacccaggacagagccaagcccgtgacccagatcgtgtctgccgaagcctggggcagagccgattgcggcatcaccagcgccagctaccaccagggcgtgctgagcgccaccatcctgtacgagatcctgctgggcaaggccaccctgtacgccgtgctggtgtctgccctggtgctgatggctatggtcaagcggaaggacagccggggaagggccaagcgatctggatctggagcaacaaacttctcactactcaaacaagcaggtgacgtggaggagaatcccgggcctactagaggccatatgaccgagtacaagcccacggtgcgcctcgccacccgcgacgacgtccccagggccgtacgcaccctcgccgccgcgttcgccgactaccccgccacgcgccacaccgtcgatccggaccgccacatcgagcgggtcaccgagctgcaagaactcttcctcacgcgcgtcgggctcgacatcggcaaggtgtgggtcgcggacgacggcgccgcggtggcggtctggaccacgccggagagcgtcgaagcgggggcggtgttcgccgagatcggcccgcgcatggccgagttgagcggttcccggctggccgcgcagcaacagatggaaggcctcctggcgccgcaccggcccaaggagcccgcgtggttcctggccaccgtcggcgtctcgcccgaccaccagggcaagggtctgggcagcgccgtcgtgctccccggagtggaggcggccgagcgcgccggggtgcccgccttcctggagacctccgcgccccgcaacctccccttctacgagcggctcggcttcaccgtcaccgccgacgtcgaggtgcccgaaggaccgcgcacctggtgcatgacccgcaagcccggtgcctga

SEQ ID NO: 9876 - DNA, 2085 bp, Artificial Sequence
  Synthetic Polynucloetide
atggccttaccagtgaccgccttgctcctgccgctggccttgctgctccacgccgccaggccggacatccagatgacacagagccctagcagcctgtctgccagcgtgggagacagagtgaccatcacatgcaaggccagccaggatgtgggcacagccgtggattggtatcagcagaagcctggcaaggcccctaagctgctgatctcttgggccagcacaagacacacaggcgtgcccagcagattttctggcagcggctctggcaccgacttcaccctgacaatatccagcctccagcctgaggacttcgccacctacttttgccagcagtacaacagctaccctctgaccttcggccagggcaccaaggtggaaatcaagagaacagttggcggaggcggaagtggaggcggaggatctggcggcggaggctctcaagttcagctggttcagagcggagccgaagtgaagaaacctggcgagagcgtgaaggtgtcctgcaaagccagcggctacacctttaccgagtacaccatccactgggtccgacaggctccaggacaaggactggaatggatgggcaacatcaaccccaacaacggcggcaccacctacaaccagaaattcgaggatcgcgtgacaatcaccgccgacaagagcaccagcaccgcctacatggaactgagcagcctgagaagcgaggacaccgccgtgtactattgtgccagaggctggaacttcgactactggggccagggaaccaccgtgacagtctcttctacgcgtgggtctggaggcggaggcagcggcggaggcgggagcggcgacggtaacgaggagatgggaggaatcactcaaaccccttacaaagtctcaatttcaggaacaactgttatccttacatgtccccagtatcctggcagcgagatcctttggcagcataacgacaagaatatagggggagatgaagacgataagaatatcggatctgacgaggatcacttgagcctgaaagagttctccgagcttgaacaaagcggatattatgtgtgctatccgcgcgggtcaaagccggaagacgctaacttttacctttatctccgagccagagtgtgcgaaaattgcatggaaatggacgttatgtccgttgctacaatagttatcgtagatatatgcatcacgggtggactgcttctgctggtttattattggtccaagaatagaaaggccaaagctaaacccgtgaccagaggcgctggcgcaggcggaaggcaaaggggacaaaacaaagaacggccaccaccagtgccaaatccagattatgagcctattcggaaaggacagagggacctgtactctggcctgaatcagagaagaatccgcgccaagagaagcggatctggcgtgaagcagaccctgaatttcgacctgctgaagctggctggcgacgtggaatccaacccaggcccttctagaggccatatgaccgagtacaagcccacggtgcgcctcgccacccgcgacgacgtccccagggccgtacgcaccctcgccgccgcgttcgccgactaccccgccacgcgccacaccgtcgatccggaccgccacatcgagcgggtcaccgagctgcaagaactcttcctcacgcgcgtcgggctcgacatcggcaaggtgtgggtcgcggacgacggcgccgcggtggcggtctggaccacgccggagagcgtcgaagcgggggcggtgttcgccgagatcggcccgcgcatggccgagttgagcggttcccggctggccgcgcagcaacagatggaaggcctcctggcgccgcaccggcccaaggagcccgcgtggttcctggccaccgtcggcgtctcgcccgaccaccagggcaagggtctgggcagcgccgtcgtgctccccggagtggaggcggccgagcgcgccggggtgcccgccttcctggagacctccgcgccccgcaacctccccttctacgagcggctcggcttcaccgtcaccgccgacgtcgaggtgcccgaaggaccgcgcacctggtgcatgacccgcaagcccggtgcctga

SEQ ID NO: 9877 - DNA, 1980 bp, Artificial Sequence
  Synthetic Polynucloetide
atggccttaccagtgaccgccttgctcctgccgctggccttgctgctccacgccgccaggccggacatccagatgacacagagccctagcagcctgtctgccagcgtgggagacagagtgaccatcacatgcaaggccagccaggatgtgggcacagccgtggattggtatcagcagaagcctggcaaggcccctaagctgctgatctcttgggccagcacaagacacacaggcgtgcccagcagattttctggcagcggctctggcaccgacttcaccctgacaatatccagcctccagcctgaggacttcgccacctacttttgccagcagtacaacagctaccctctgaccttcggccagggcaccaaggtggaaatcaagagaacagttggcggaggcggaagtggaggcggaggatctggcggcggaggctctcaagttcagctggttcagagcggagccgaagtgaagaaacctggcgagagcgtgaaggtgtcctgcaaagccagcggctacacctttaccgagtacaccatccactgggtccgacaggctccaggacaaggactggaatggatgggcaacatcaaccccaacaacggcggcaccacctacaaccagaaattcgaggatcgcgtgacaatcaccgccgacaagagcaccagcaccgcctacatggaactgagcagcctgagaagcgaggacaccgccgtgtactattgtgccagaggctggaacttcgactactggggccagggaaccaccgtgacagtctcttctacgcgtgggtctggaggcggaggcagcggcggaggcgggagcggcttcaagatccccatcgaggaactggaagatcgggtgttcgtgaactgcaacacctctatcacctgggtggaaggcaccgtgggaacactgctgagcgacatcaccagactggacctcggcaagcggattctggaccctcggggcatctacagatgcaacggcaccgacatctacaaggacaaagaaagcaccgtgcaggtccactacagaatgtgccagtcctgcgtggaactggaccctgctacagtggccggcatcatcgtgaccgatgtgatcgctactctgctgctggctctgggagtgttctgcttcgccggacacgaaacaggcagactgtctggcgctgccgatacacaggccctgctgagaaacgaccaagtgtatcagcccctgcgcgacagagatgatgcccagtattctcacctcggcggcaactgggctagaaacaagcgcgccaagagaagcggatctggcgtgaagcagaccctgaatttcgacctgctgaagctggctggcgacgtggaatccaacccaggcccttctagaggccatatgaccgagtacaagcccacggtgcgcctcgccacccgcgacgacgtccccagggccgtacgcaccctcgccgccgcgttcgccgactaccccgccacgcgccacaccgtcgatccggaccgccacatcgagcgggtcaccgagctgcaagaactcttcctcacgcgcgtcgggctcgacatcggcaaggtgtgggtcgcggacgacggcgccgcggtggcggtctggaccacgccggagagcgtcgaagcgggggcggtgttcgccgagatcggcccgcgcatggccgagttgagcggttcccggctggccgcgcagcaacagatggaaggcctcctggcgccgcaccggcccaaggagcccgcgtggttcctggccaccgtcggcgtctcgcccgaccaccagggcaagggtctgggcagcgccgtcgtgctccccggagtggaggcggccgagcgcgccggggtgcccgccttcctggagacctccgcgccccgcaacctccccttctacgagcggctcggcttcaccgtcaccgccgacgtcgaggtgcccgaaggaccgcgcacctggtgcatgacccgcaagcccggtgcctga

SEQ ID NO: 9878 - DNA, 2010 bp, Artificial Sequence
  Synthetic Polynucloetide
atggccttaccagtgaccgccttgctcctgccgctggccttgctgctccacgccgccaggccggacatccagatgacacagagccctagcagcctgtctgccagcgtgggagacagagtgaccatcacatgcaaggccagccaggatgtgggcacagccgtggattggtatcagcagaagcctggcaaggcccctaagctgctgatctcttgggccagcacaagacacacaggcgtgcccagcagattttctggcagcggctctggcaccgacttcaccctgacaatatccagcctccagcctgaggacttcgccacctacttttgccagcagtacaacagctaccctctgaccttcggccagggcaccaaggtggaaatcaagagaacagttggcggaggcggaagtggaggcggaggatctggcggcggaggctctcaagttcagctggttcagagcggagccgaagtgaagaaacctggcgagagcgtgaaggtgtcctgcaaagccagcggctacacctttaccgagtacaccatccactgggtccgacaggctccaggacaaggactggaatggatgggcaacatcaaccccaacaacggcggcaccacctacaaccagaaattcgaggatcgcgtgacaatcaccgccgacaagagcaccagcaccgcctacatggaactgagcagcctgagaagcgaggacaccgccgtgtactattgtgccagaggctggaacttcgactactggggccagggaaccaccgtgacagtctcttctacgcgtgggtctggaggcggaggcagcggcggaggcgggagcggccagagcatcaagggcaaccacctggtcaaggtgtacgactaccaagaggacggcagcgtgctgctgacatgtgatgccgaggccaagaacatcacctggtttaaggacggcaagatgatcggcttcctgaccgaggacaagaagaagtggaacctgggcagcaacgctaaggaccccagaggcatgtatcagtgcaagggcagccagaacaagagcaagcccctccaggtgtactaccggatgtgccagaactgcatcgagctgaacgccgctaccatcagcggctttctgttcgccgagatcgtgtccatcttcgtgctggccgtgggcgtgtactttatcgctggacaggatggcgtgcggcagagcagagcttccgataagcaaaccctgctgcctaacgaccagctgtaccagcctctgaaggacagagaggacgaccagtacagccacctccagggcaatcagctgagaagaaaccgcgccaagagaagcggatctggcgtgaagcagaccctgaatttcgacctgctgaagctggctggcgacgtggaatccaacccaggcccttctagaggccatatgaccgagtacaagcccacggtgcgcctcgccacccgcgacgacgtccccagggccgtacgcaccctcgccgccgcgttcgccgactaccccgccacgcgccacaccgtcgatccggaccgccacatcgagcgggtcaccgagctgcaagaactcttcctcacgcgcgtcgggctcgacatcggcaaggtgtgggtcgcggacgacggcgccgcggtggcggtctggaccacgccggagagcgtcgaagcgggggcggtgttcgccgagatcggcccgcgcatggccgagttgagcggttcccggctggccgcgcagcaacagatggaaggcctcctggcgccgcaccggcccaaggagcccgcgtggttcctggccaccgtcggcgtctcgcccgaccaccagggcaagggtctgggcagcgccgtcgtgctccccggagtggaggcggccgagcgcgccggggtgcccgccttcctggagacctccgcgccccgcaacctccccttctacgagcggctcggcttcaccgtcaccgccgacgtcgaggtgcccgaaggaccgcgcacctggtgcatgacccgcaagcccggtgcctga

SEQ ID NO: 9879 - DNA, 1959 bp, Artificial Sequence
  Synthetic Polynucloetide
atggccttaccagtgaccgccttgctcctgccgctggccttgctgctccacgccgccaggccggacatccagatgacacagagccctagcagcctgtctgccagcgtgggagacagagtgaccatcacatgcaaggccagccaggatgtgggcacagccgtggattggtatcagcagaagcctggcaaggcccctaagctgctgatctcttgggccagcacaagacacacaggcgtgcccagcagattttctggcagcggctctggcaccgacttcaccctgacaatatccagcctccagcctgaggacttcgccacctacttttgccagcagtacaacagctaccctctgaccttcggccagggcaccaaggtggaaatcaagagaacagttggcggaggcggaagtggaggcggaggatctggcggcggaggctctcaagttcagctggttcagagcggagccgaagtgaagaaacctggcgagagcgtgaaggtgtcctgcaaagccagcggctacacctttaccgagtacaccatccactgggtccgacaggctccaggacaaggactggaatggatgggcaacatcaaccccaacaacggcggcaccacctacaaccagaaattcgaggatcgcgtgacaatcaccgccgacaagagcaccagcaccgcctacatggaactgagcagcctgagaagcgaggacaccgccgtgtactattgtgccagaggctggaacttcgactactggggccagggaaccaccgtgacagtctcttctacgcgtgggtctggaggcggaggcagcggcggaggcgggagcggccagagttttgggttgttggaccctaaattgtgctatctgttggacggaatcctgttcatttacggagtgatcctgaccgcattgttcctgcgggttaagttttccagatccgcagacgcacccgcttaccaacaagggcagaaccaactctacaatgaacttaatttggggcggagggaagagtacgacgttctggacaaaaggaggggacgagatcccgagatgggcggaaagcctcagcgaaggaagaatccgcaagaggggctttataacgaactccagaaagataaaatggcagaagcctatagtgagattgggatgaagggagaaaggaggaggggtaaaggtcacgatgggttgtaccaaggattgagcacagccactaaagatacctatgatgcgctccacatgcaggccctgccgccaagacgcgccaagagaagcggatctggcgtgaagcagaccctgaatttcgacctgctgaagctggctggcgacgtggaatccaacccaggcccttctagaggccatatgaccgagtacaagcccacggtgcgcctcgccacccgcgacgacgtccccagggccgtacgcaccctcgccgccgcgttcgccgactaccccgccacgcgccacaccgtcgatccggaccgccacatcgagcgggtcaccgagctgcaagaactcttcctcacgcgcgtcgggctcgacatcggcaaggtgtgggtcgcggacgacggcgccgcggtggcggtctggaccacgccggagagcgtcgaagcgggggcggtgttcgccgagatcggcccgcgcatggccgagttgagcggttcccggctggccgcgcagcaacagatggaaggcctcctggcgccgcaccggcccaaggagcccgcgtggttcctggccaccgtcggcgtctcgcccgaccaccagggcaagggtctgggcagcgccgtcgtgctccccggagtggaggcggccgagcgcgccggggtgcccgccttcctggagacctccgcgccccgcaacctccccttctacgagcggctcggcttcaccgtcaccgccgacgtcgaggtgcccgaaggaccgcgcacctggtgcatgacccgcaagcccggtgcctga

SEQ ID NO: 9880 - DNA, 2259 bp, Artificial Sequence
  Synthetic Polynucloetide
atggccttaccagtgaccgccttgctcctgccgctggccttgctgctccacgccgccaggccggaagtgcagctggttgaatctggcggaggactggttcagcctggcggatctctgagactgtcttgtgccgccagcggcttcagcttcagcgacttttggatgagctgggtccgacaggcccctggcaaaggacttgaatgggtcgccacaatcagccaggccggcagcgagaaggactacgtggactctgtgaagggcagattcaccatcagccgggacaacgccaagaagtccctgtacctccagatgaacagcctgagagccgaggacaccgccgtgtactattgtgcctctggcgtgtacagcttcgactacagaggccagggcaccctggtcacagtctcttctggtaccggcggaggcggatctggcggcggaggtagcggtggcggaggatctgaattcgacatccagatgacacagagccctagcagcctgtctgccagcgtgggagacagagtgaccatcacatgcaaggccagccaggatgtgggcacagccgtggattggtatcagcagaagcctggcaaggcccctaagctgctgatctcttgggccagcacaagacacacaggcgtgcccagcagattttctggcagcggctctggcaccgacttcaccctgacaatatccagcctccagcctgaggacttcgccacctacttttgccagcagtacaacagctaccctctgaccttcggccagggcaccaaggtggaaatcaagagaacagttctcgaggacctgaagaacgtgttcccacctgaggtggccgtgttcgagcctagcgaggccgagatcagccacacccagaaagccaccctcgtgtgcctggctaccggcttctaccccgaccatgtggaactgtcttggtgggtcaacggcaaagaggtgcacagcggcgtgtgtaccgacccccagccactgaaagaacagcccgccctgaacgacagccggtactgcctgagcagcagactgagagtgtccgccaccttctggcagaacccccggaaccacttcagatgccaggtgcagttctacggcctgagcgagaacgacgagtggacccaggacagagccaagcccgtgacccagatcgtgtctgccgaagcctggggcagagccgattgcggctttaccagcgagagctaccagcagggcgtgctgagcgccaccatcctgtacgagatcctgctgggcaaggccaccctgtacgccgtgctggtgtctgccctggtgctgatggctatggtcaagcggaaggacagccggggaagggccaagcgatctggatctggagcaacaaacttctcactactcaaacaagcaggtgacgtggaggagaatcccgggcctactagtatggactggatttggcgcatccttttccttgtcggcgctgctaccggcgcgcattccttcgaacaagttcagctggttcagagcggagccgaagtgaagaaacctggcgagagcgtgaaggtgtcctgcaaagccagcggctacacctttaccgagtacaccatccactgggtccgacaggctccaggacaaggactggaatggatgggcaacatcaaccccaacaacggcggcaccacctacaaccagaaattcgaggatcgcgtgacaatcaccgccgacaagagcaccagcaccgcctacatggaactgagcagcctgagaagcgaggacaccgccgtgtactattgtgccagaggctggaacttcgactactggggccagggaaccaccgtgacagtctcttctacgcgtatccagaaccctgatcctgccgtgtaccagctgcgggatagcaagagcagcgacaagagcgtgtgtctgttcaccgacttcgacagccagaccaacgtgtcccagagcaaggactccgacgtgtacatcaccgataagtgcgtgctggacatgcggagcatggacttcaagagcaactccgccgtggcctggtccaacaagtccgatttcgcctgcgccaacgccttcaacaacagcattatccccgaggacacattcttcccaagccccgagagcagctgcgacgtgaagctggtggaaaagagcttcgagacagacaccaacctgaacttccagaacctgagcgtgatcggcttcagaatcctgctgctgaaagtggccggctttaacctgctgatgaccctgcggctgtggtccagc

SEQ ID NO: 9881 - DNA, 2271 bp, Artificial Sequence
  Synthetic Polynucloetide
atggccttaccagtgaccgccttgctcctgccgctggccttgctgctccacgccgccaggccggaagtgcagctggttgaatctggcggaggactggttcagcctggcggatctctgagactgtcttgtgccgccagcggcttcagcttcagcgacttttggatgagctgggtccgacaggcccctggcaaaggacttgaatgggtcgccacaatcagccaggccggcagcgagaaggactacgtggactctgtgaagggcagattcaccatcagccgggacaacgccaagaagtccctgtacctccagatgaacagcctgagagccgaggacaccgccgtgtactattgtgcctctggcgtgtacagcttcgactacagaggccagggcaccctggtcacagtctcttctggtaccggcggaggcggatctggcggcggaggtagcggtggcggaggatctgaattcgacatccagatgacacagagccctagcagcctgtctgccagcgtgggagacagagtgaccatcacatgcaaggccagccaggatgtgggcacagccgtggattggtatcagcagaagcctggcaaggcccctaagctgctgatctcttgggccagcacaagacacacaggcgtgcccagcagattttctggcagcggctctggcaccgacttcaccctgacaatatccagcctccagcctgaggacttcgccacctacttttgccagcagtacaacagctaccctctgaccttcggccagggcaccaaggtggaaatcaagagaacagttctcgagatccagaaccctgatcctgccgtgtaccagctgcgggatagcaagagcagcgacaagagcgtgtgtctgttcaccgacttcgacagccagaccaacgtgtcccagagcaaggactccgacgtgtacatcaccgataagtgcgtgctggacatgcggagcatggacttcaagagcaactccgccgtggcctggtccaacaagtccgatttcgcctgcgccaacgccttcaacaacagcattatccccgaggacacattcttcccaagccccgagagcagctgcgacgtgaagctggtggaaaagagcttcgagacagacaccaacctgaacttccagaacctgagcgtgatcggcttcagaatcctgctgctgaaagtggccggctttaacctgctgatgaccctgcggctgtggtccagccgcgccaagagaagcggatctggcgtgaagcagaccctgaatttcgacctgctgaagctggctggcgacgtggaatccaacccaggccctactagtatggactggatttggcgcatccttttccttgtcggcgctgctaccggcgcgcattccttcgaacaagttcagctggttcagagcggagccgaagtgaagaaacctggcgagagcgtgaaggtgtcctgcaaagccagcggctacacctttaccgagtacaccatccactgggtccgacaggctccaggacaaggactggaatggatgggcaacatcaaccccaacaacggcggcaccacctacaaccagaaattcgaggatcgcgtgacaatcaccgccgacaagagcaccagcaccgcctacatggaactgagcagcctgagaagcgaggacaccgccgtgtactattgtgccagaggctggaacttcgactactggggccagggaaccaccgtgacagtctcttctacgcgtgaggacctgaagaacgtgttcccacctgaggtggccgtgttcgagcctagcgaggccgagatcagccacacccagaaagccaccctcgtgtgcctggctaccggcttctaccccgaccatgtggaactgtcttggtgggtcaacggcaaagaggtgcacagcggcgtgtgtaccgacccccagccactgaaagaacagcccgccctgaacgacagccggtactgcctgagcagcagactgagagtgtccgccaccttctggcagaacccccggaaccacttcagatgccaggtgcagttctacggcctgagcgagaacgacgagtggacccaggacagagccaagcccgtgacccagatcgtgtctgccgaagcctggggcagagccgattgcggctttaccagcgagagctaccagcagggcgtgctgagcgccaccatcctgtacgagatcctgctgggcaaggccaccctgtacgccgtgctggtgtctgccctggtgctgatggctatggtcaagcggaaggacagccgggga

SEQ ID NO: 9882 - DNA, 2847 bp, Artificial Sequence
  Synthetic Polynucloetide
atggccttaccagtgaccgccttgctcctgccgctggccttgctgctccacgccgccaggccggaagtgcagctggttgaatctggcggaggactggttcagcctggcggatctctgagactgtcttgtgccgccagcggcttcagcttcagcgacttttggatgagctgggtccgacaggcccctggcaaaggacttgaatgggtcgccacaatcagccaggccggcagcgagaaggactacgtggactctgtgaagggcagattcaccatcagccgggacaacgccaagaagtccctgtacctccagatgaacagcctgagagccgaggacaccgccgtgtactattgtgcctctggcgtgtacagcttcgactacagaggccagggcaccctggtcacagtctcttctggtaccggcggaggcggatctggcggcggaggtagcggtggcggaggatctgaattcgacatccagatgacacagagccctagcagcctgtctgccagcgtgggagacagagtgaccatcacatgcaaggccagccaggatgtgggcacagccgtggattggtatcagcagaagcctggcaaggcccctaagctgctgatctcttgggccagcacaagacacacaggcgtgcccagcagattttctggcagcggctctggcaccgacttcaccctgacaatatccagcctccagcctgaggacttcgccacctacttttgccagcagtacaacagctaccctctgaccttcggccagggcaccaaggtggaaatcaagagaacagttctcgaggacctgaagaacgtgttcccacctgaggtggccgtgttcgagcctagcgaggccgagatcagccacacccagaaagccaccctcgtgtgcctggctaccggcttctaccccgaccatgtggaactgtcttggtgggtcaacggcaaagaggtgcacagcggcgtgtctaccgacccccagccactgaaagaacagcccgccctgaacgacagccggtactgcctgagcagcagactgagagtgtccgccaccttctggcagaacccccggaaccacttcagatgccaggtgcagttctacggcctgagcgagaacgacgagtggacccaggacagagccaagcccgtgacccagatcgtgtctgccgaagcctggggcagagccgattgcggatcccagagcttcggcctgctggaccccaagctgtgctacctgctggatggcatcctgttcatctacggcgtgatcctgaccgccctgttcctgagagtgaagttcagcagaagcgccgacgcccctgcctaccagcagggacagaaccaactgtacaacgagctgaacctgggcagacgggaagagtacgacgtgctggacaagcggagaggcagggaccctgagatgggcggaaagccccagcggagaaagaacccccaggaaggactgtataacgaactccagaaagacaagatggccgaagcctacagcgagatcggcatgaagggcgagcggagaagaggcaagggccacgatggcctgtaccagggcctgagcaccgccaccaaggacacctatgacgccctgcacatgcaggccctgcctccaagaagggccaagcgatctggatctggagcaacaaacttctcactactcaaacaagcaggtgacgtggaggagaatcccgggcctactagtatggactggatttggcgcatccttttccttgtcggcgctgctaccggcgcgcattccttcgaacaagttcagctggttcagagcggagccgaagtgaagaaacctggcgagagcgtgaaggtgtcctgcaaagccagcggctacacctttaccgagtacaccatccactgggtccgacaggctccaggacaaggactggaatggatgggcaacatcaaccccaacaacggcggcaccacctacaaccagaaattcgaggatcgcgtgacaatcaccgccgacaagagcaccagcaccgcctacatggaactgagcagcctgagaagcgaggacaccgccgtgtactattgtgccagaggctggaacttcgactactggggccagggaaccaccgtgacagtctcttctacgcgtatccagaaccctgatcctgccgtgtaccagctgcgggatagcaagagcagcgacaagagcgtgtgtctgttcaccgacttcgacagccagaccaacgtgtcccagagcaaggactccgacgtgtacatcaccgataagaccgtgctggacatgcggagcatggacttcaagagcaactccgccgtggcctggtccaacaagtccgatttcgcctgcgccaacgccttcaacaacagcattatccccgaggacacattcttcccaagccccgagagcagctgcggtacccagagttttgggttgttggaccctaaattgtgctatctgttggacggaatcctgttcatttacggagtgatcctgaccgcattgttcctgcgggttaagttttccagatccgcagacgcacccgcttaccaacaagggcagaaccaactctacaatgaacttaatttggggcggagggaagagtacgacgttctggacaaaaggaggggacgagatcccgagatgggcggaaagcctcagcgaaggaagaatccgcaagaggggctttataacgaactccagaaagataaaatggcagaagcctatagtgagattgggatgaagggagaaaggaggaggggtaaaggtcacgatgggttgtaccaaggattgagcacagccactaaagatacctatgatgcgctccacatgcaggccctgccgccaaga

SEQ ID NO: 9883 - DNA, 2337 bp, Artificial Sequence
  Synthetic Polynucloetide
atggccttaccagtgaccgccttgctcctgccgctggccttgctgctccacgccgccaggccggaagtgcagctggttgaatctggcggaggactggttcagcctggcggatctctgagactgtcttgtgccgccagcggcttcagcttcagcgacttttggatgagctgggtccgacaggcccctggcaaaggacttgaatgggtcgccacaatcagccaggccggcagcgagaaggactacgtggactctgtgaagggcagattcaccatcagccgggacaacgccaagaagtccctgtacctccagatgaacagcctgagagccgaggacaccgccgtgtactattgtgcctctggcgtgtacagcttcgactacagaggccagggcaccctggtcacagtctcttctggtaccggcggaggcggatctggcggcggaggtagcggtggcggaggatctgaattcgacatccagatgacacagagccctagcagcctgtctgccagcgtgggagacagagtgaccatcacatgcaaggccagccaggatgtgggcacagccgtggattggtatcagcagaagcctggcaaggcccctaagctgctgatctcttgggccagcacaagacacacaggcgtgcccagcagattttctggcagcggctctggcaccgacttcaccctgacaatatccagcctccagcctgaggacttcgccacctacttttgccagcagtacaacagctaccctctgaccttcggccagggcaccaaggtggaaatcaagagaacagttctcgagggacagcctaaggccaatcctaccgtgacactgttccctccaagcagcgaagaactccaggccaacaaggccacacttgtgtgcctgatctccgacttctaccctggggctgtgacagtggcttggaaggccgatggatctcctgtgaaagccggcgtggaaaccaccaagccatccaagcagagcaacaacaaatacgccgccagctcctacctgagcctgacacctgagcagtggaagtcccacagatcctacagctgccaagtgacccacgaaggcagcaccgtggaaaagacagtggcccctacagagtgcagccccatcaagaccgatgtgattacaatggaccccaaggacaactgctccaaggacgccaacgataccctgctgctccagctgaccaacaccagcgcctactacatgtacttgttgctgctgctgaagtccgtggtgtacttcgccatcatcacatgctgcctgctgcggagaaccgccttctgctgcaacggcgagaagtctagggccaagcgatctggatctggagcaacaaacttctcactactcaaacaagcaggtgacgtggaggagaatcccgggcctactagtatggactggatttggcgcatccttttccttgtcggcgctgctaccggcgcgcattccttcgaacaagttcagctggttcagagcggagccgaagtgaagaaacctggcgagagcgtgaaggtgtcctgcaaagccagcggctacacctttaccgagtacaccatccactgggtccgacaggctccaggacaaggactggaatggatgggcaacatcaaccccaacaacggcggcaccacctacaaccagaaattcgaggatcgcgtgacaatcaccgccgacaagagcaccagcaccgcctacatggaactgagcagcctgagaagcgaggacaccgccgtgtactattgtgccagaggctggaacttcgactactggggccagggaaccaccgtgacagtctcttctacgcgtgcctctacaaagggaccctccgtgtttcctctggctcccagcagcaagtctacaagcggaggaacagccgctctgggctgcctggtcaaggattactttcccgagcctgtgaccgtgtcctggaatagcggagcactgacaagcggcgtgcacacctttccagccgtgctgcaaagcagcggcctgtactctctgagcagcgtggtcacagtgcctagctctagcctgggcacccagacctacatctgcaatgtgaaccacaagcctagcaacaccaaggtggacaagagagtggaacccaagagctgtgaagtgaaaaccgactccaccgaccacgtgaagcccaaagagacagagaacaccaagcagcccagcaagagctgccacaagcccaaggccatcgtgcacaccgagaaagtgaacatgatgagcctgaccgtgctgggcctgcggatgctgttcgccaaaaccgtggccgtgaacttcctgctgaccgccaagctgttcttcctc

SEQ ID NO: 9884 - DNA, 2280 bp, Artificial Sequence
  Synthetic Polynucloetide
atggccttaccagtgaccgccttgctcctgccgctggccttgctgctccacgccgccaggccggaagtgcagctggttgaatctggcggaggactggttcagcctggcggatctctgagactgtcttgtgccgccagcggcttcagcttcagcgacttttggatgagctgggtccgacaggcccctggcaaaggacttgaatgggtcgccacaatcagccaggccggcagcgagaaggactacgtggactctgtgaagggcagattcaccatcagccgggacaacgccaagaagtccctgtacctccagatgaacagcctgagagccgaggacaccgccgtgtactattgtgcctctggcgtgtacagcttcgactacagaggccagggcaccctggtcacagtctcttctggtaccggcggaggcggatctggcggcggaggtagcggtggcggaggatctgaattcgacatccagatgacacagagccctagcagcctgtctgccagcgtgggagacagagtgaccatcacatgcaaggccagccaggatgtgggcacagccgtggattggtatcagcagaagcctggcaaggcccctaagctgctgatctcttgggccagcacaagacacacaggcgtgcccagcagattttctggcagcggctctggcaccgacttcaccctgacaatatccagcctccagcctgaggacttcgccacctacttttgccagcagtacaacagctaccctctgaccttcggccagggcaccaaggtggaaatcaagagaacagttctcgagggacagcctaaggccaatcctaccgtgacactgttccctccaagcagcgaagaactccaggccaacaaggccacacttgtgtgcctgatctccgacttctaccctggggctgtgacagtggcttggaaggccgatggatctcctgtgaaagccggcgtggaaaccaccaagccatccaagcagagcaacaacaaatacgccgccagctcctacctgagcctgacacctgagcagtggaagtcccacagatcctacagctgccaagtgacccacgaaggcagcaccgtggaaaagacagtggcccctacagagtgcagcggcagagccgattgcggctttaccagcgagagctaccagcagggcgtgctgagcgccaccatcctgtacgagatcctgctgggcaaggccaccctgtacgccgtgctggtgtctgccctggtgctgatggctatggtcaagcggaaggacagccggggacgcgccaagagaagcggatctggcgtgaagcagaccctgaatttcgacctgctgaagctggctggcgacgtggaatccaacccaggccctactagtatggactggatttggcgcatccttttccttgtcggcgctgctaccggcgcgcattccttcgaacaagttcagctggttcagagcggagccgaagtgaagaaacctggcgagagcgtgaaggtgtcctgcaaagccagcggctacacctttaccgagtacaccatccactgggtccgacaggctccaggacaaggactggaatggatgggcaacatcaaccccaacaacggcggcaccacctacaaccagaaattcgaggatcgcgtgacaatcaccgccgacaagagcaccagcaccgcctacatggaactgagcagcctgagaagcgaggacaccgccgtgtactattgtgccagaggctggaacttcgactactggggccagggaaccaccgtgacagtctcttctacgcgtgcctctacaaagggaccctccgtgtttcctctggctcccagcagcaagtctacaagcggaggaacagccgctctgggctgcctggtcaaggattactttcccgagcctgtgaccgtgtcctggaatagcggagcactgacaagcggcgtgcacacctttccagccgtgctgcaaagcagcggcctgtactctctgagcagcgtggtcacagtgcctagctctagcctgggcacccagacctacatctgcaatgtgaaccacaagcctagcaacaccaaggtggacaagagagtggaacccaagagctgtatccccgaggacacattcttcccaagccccgagagcagctgcgacgtgaagctggtggaaaagagcttcgagacagacaccaacctgaacttccagaacctgagcgtgatcggcttcagaatcctgctgctgaaagtggccggctttaacctgctgatgaccctgcggctgtggtccagc

SEQ ID NO: 9885 - DNA, 2682 bp, Artificial Sequence
  Synthetic Polynucloetide
atggccttaccagtgaccgccttgctcctgccgctggccttgctgctccacgccgccaggccggaagtgcagctggttgaatctggcggaggactggttcagcctggcggatctctgagactgtcttgtgccgccagcggcttcagcttcagcgacttttggatgagctgggtccgacaggcccctggcaaaggacttgaatgggtcgccacaatcagccaggccggcagcgagaaggactacgtggactctgtgaagggcagattcaccatcagccgggacaacgccaagaagtccctgtacctccagatgaacagcctgagagccgaggacaccgccgtgtactattgtgcctctggcgtgtacagcttcgactacagaggccagggcaccctggtcacagtctcttctggtaccggcggaggcggatctggcggcggaggtagcggtggcggaggatctgaattcgacatccagatgacacagagccctagcagcctgtctgccagcgtgggagacagagtgaccatcacatgcaaggccagccaggatgtgggcacagccgtggattggtatcagcagaagcctggcaaggcccctaagctgctgatctcttgggccagcacaagacacacaggcgtgcccagcagattttctggcagcggctctggcaccgacttcaccctgacaatatccagcctccagcctgaggacttcgccacctacttttgccagcagtacaacagctaccctctgaccttcggccagggcaccaaggtggaaatcaagagaacagttctcgagatccagaaccctgatcctgccgtgtaccagctgcgggatagcaagagcagcgacaagagcgtgtgtctgttcaccgacttcgacagccagaccaacgtgtcccagagcaaggactccgacgtgtacatcaccgataagtgcgtgctggacatgcggagcatggacttcaagagcaactccgccgtggcctggtccaacaagtccgatttcgcctgcgccaacgccttcaacaacagcattatccccgaggacacattcttcccaagccccgagagcagctgcgacgtgaagctggtggaaaagagcttcgagacagacaccaacctgaacttccagaacctgagcgtgatcggcttcagaatcctgctgctgaaagtggccggctttaacctgctgatgaccctgcggctgtggtccagccgcgccaagagaagcggatctggcgtgaagcagaccctgaatttcgacctgctgaagctggctggcgacgtggaatccaacccaggccctactagtatggactggatttggcgcatccttttccttgtcggcgctgctaccggcgcgcattccgggccccagctccagctgcaagagtctggacctggcctggtcaagcctagcgagacactgagcctgacctgtaccgtgtccggcgatagcatcagcagcggcgattactactggggctggatcagacagcctcctggcaaaggactggaatggatcggccacatctactacagcggcgtgacctactacaaccccagcctgaagtccagagtgaccatcagcgtggacaccagccggaaccagttctccctgaagctgtctagcgtgacagccgccgataccgccgtgtactactgcaccagagaggacagcagcaactggcggagtagaggccagggaacactggtcacagttagctctggatccggcggaggcggaagtggaggcggaggatctggcggcggaggctctttcgaacaagttcagctggttcagagcggagccgaagtgaagaaacctggcgagagcgtgaaggtgtcctgcaaagccagcggctacacctttaccgagtacaccatccactgggtccgacaggctccaggacaaggactggaatggatgggcaacatcaaccccaacaacggcggcaccacctacaaccagaaattcgaggatcgcgtgacaatcaccgccgacaagagcaccagcaccgcctacatggaactgagcagcctgagaagcgaggacaccgccgtgtactattgtgccagaggctggaacttcgactactggggccagggaaccaccgtgacagtctcttctacgcgtgaggacctgaagaacgtgttcccacctgaggtggccgtgttcgagcctagcgaggccgagatcagccacacccagaaagccaccctcgtgtgcctggctaccggcttctaccccgaccatgtggaactgtcttggtgggtcaacggcaaagaggtgcacagcggcgtgtgtaccgacccccagccactgaaagaacagcccgccctgaacgacagccggtactgcctgagcagcagactgagagtgtccgccaccttctggcagaacccccggaaccacttcagatgccaggtgcagttctacggcctgagcgagaacgacgagtggacccaggacagagccaagcccgtgacccagatcgtgtctgccgaagcctggggcagagccgattgcggctttaccagcgagagctaccagcagggcgtgctgagcgccaccatcctgtacgagatcctgctgggcaaggccaccctgtacgccgtgctggtgtctgccctggtgctgatggctatggtcaagcggaaggacagccgggga

SEQ ID NO: 9886 - DNA, 3258 bp, Artificial Sequence
  Synthetic Polynucloetide
atggccttaccagtgaccgccttgctcctgccgctggccttgctgctccacgccgccaggccggaagtgcagctggttgaatctggcggaggactggttcagcctggcggatctctgagactgtcttgtgccgccagcggcttcagcttcagcgacttttggatgagctgggtccgacaggcccctggcaaaggacttgaatgggtcgccacaatcagccaggccggcagcgagaaggactacgtggactctgtgaagggcagattcaccatcagccgggacaacgccaagaagtccctgtacctccagatgaacagcctgagagccgaggacaccgccgtgtactattgtgcctctggcgtgtacagcttcgactacagaggccagggcaccctggtcacagtctcttctggtaccggcggaggcggatctggcggcggaggtagcggtggcggaggatctgaattcgacatccagatgacacagagccctagcagcctgtctgccagcgtgggagacagagtgaccatcacatgcaaggccagccaggatgtgggcacagccgtggattggtatcagcagaagcctggcaaggcccctaagctgctgatctcttgggccagcacaagacacacaggcgtgcccagcagattttctggcagcggctctggcaccgacttcaccctgacaatatccagcctccagcctgaggacttcgccacctacttttgccagcagtacaacagctaccctctgaccttcggccagggcaccaaggtggaaatcaagagaacagttctcgaggacctgaagaacgtgttcccacctgaggtggccgtgttcgagcctagcgaggccgagatcagccacacccagaaagccaccctcgtgtgcctggctaccggcttctaccccgaccatgtggaactgtcttggtgggtcaacggcaaagaggtgcacagcggcgtgtctaccgacccccagccactgaaagaacagcccgccctgaacgacagccggtactgcctgagcagcagactgagagtgtccgccaccttctggcagaacccccggaaccacttcagatgccaggtgcagttctacggcctgagcgagaacgacgagtggacccaggacagagccaagcccgtgacccagatcgtgtctgccgaagcctggggcagagccgattgcggatcccagagcttcggcctgctggaccccaagctgtgctacctgctggatggcatcctgttcatctacggcgtgatcctgaccgccctgttcctgagagtgaagttcagcagaagcgccgacgcccctgcctaccagcagggacagaaccaactgtacaacgagctgaacctgggcagacgggaagagtacgacgtgctggacaagcggagaggcagggaccctgagatgggcggaaagccccagcggagaaagaacccccaggaaggactgtataacgaactccagaaagacaagatggccgaagcctacagcgagatcggcatgaagggcgagcggagaagaggcaagggccacgatggcctgtaccagggcctgagcaccgccaccaaggacacctatgacgccctgcacatgcaggccctgcctccaagaagggccaagcgatctggatctggagcaacaaacttctcactactcaaacaagcaggtgacgtggaggagaatcccgggcctactagtatggactggatttggcgcatccttttccttgtcggcgctgctaccggcgcgcattccgggccccagctccagctgcaagagtctggacctggcctggtcaagcctagcgagacactgagcctgacctgtaccgtgtccggcgatagcatcagcagcggcgattactactggggctggatcagacagcctcctggcaaaggactggaatggatcggccacatctactacagcggcgtgacctactacaaccccagcctgaagtccagagtgaccatcagcgtggacaccagccggaaccagttctccctgaagctgtctagcgtgacagccgccgataccgccgtgtactactgcaccagagaggacagcagcaactggcggagtagaggccagggaacactggtcacagttagctctggatccggcggaggcggaagtggaggcggaggatctggcggcggaggctctttcgaacaagttcagctggttcagagcggagccgaagtgaagaaacctggcgagagcgtgaaggtgtcctgcaaagccagcggctacacctttaccgagtacaccatccactgggtccgacaggctccaggacaaggactggaatggatgggcaacatcaaccccaacaacggcggcaccacctacaaccagaaattcgaggatcgcgtgacaatcaccgccgacaagagcaccagcaccgcctacatggaactgagcagcctgagaagcgaggacaccgccgtgtactattgtgccagaggctggaacttcgactactggggccagggaaccaccgtgacagtctcttctacgcgtatccagaaccctgatcctgccgtgtaccagctgcgggatagcaagagcagcgacaagagcgtgtgtctgttcaccgacttcgacagccagaccaacgtgtcccagagcaaggactccgacgtgtacatcaccgataagaccgtgctggacatgcggagcatggacttcaagagcaactccgccgtggcctggtccaacaagtccgatttcgcctgcgccaacgccttcaacaacagcattatccccgaggacacattcttcccaagccccgagagcagctgcggtacccagagttttgggttgttggaccctaaattgtgctatctgttggacggaatcctgttcatttacggagtgatcctgaccgcattgttcctgcgggttaagttttccagatccgcagacgcacccgcttaccaacaagggcagaaccaactctacaatgaacttaatttggggcggagggaagagtacgacgttctggacaaaaggaggggacgagatcccgagatgggcggaaagcctcagcgaaggaagaatccgcaagaggggctttataacgaactccagaaagataaaatggcagaagcctatagtgagattgggatgaagggagaaaggaggaggggtaaaggtcacgatgggttgtaccaaggattgagcacagccactaaagatacctatgatgcgctccacatgcaggccctgccgccaaga

SEQ ID NO: 9887 - DNA, 2748 bp, Artificial Sequence
  Synthetic Polynucloetide
atggccttaccagtgaccgccttgctcctgccgctggccttgctgctccacgccgccaggccggaagtgcagctggttgaatctggcggaggactggttcagcctggcggatctctgagactgtcttgtgccgccagcggcttcagcttcagcgacttttggatgagctgggtccgacaggcccctggcaaaggacttgaatgggtcgccacaatcagccaggccggcagcgagaaggactacgtggactctgtgaagggcagattcaccatcagccgggacaacgccaagaagtccctgtacctccagatgaacagcctgagagccgaggacaccgccgtgtactattgtgcctctggcgtgtacagcttcgactacagaggccagggcaccctggtcacagtctcttctggtaccggcggaggcggatctggcggcggaggtagcggtggcggaggatctgaattcgacatccagatgacacagagccctagcagcctgtctgccagcgtgggagacagagtgaccatcacatgcaaggccagccaggatgtgggcacagccgtggattggtatcagcagaagcctggcaaggcccctaagctgctgatctcttgggccagcacaagacacacaggcgtgcccagcagattttctggcagcggctctggcaccgacttcaccctgacaatatccagcctccagcctgaggacttcgccacctacttttgccagcagtacaacagctaccctctgaccttcggccagggcaccaaggtggaaatcaagagaacagttctcgagggacagcctaaggccaatcctaccgtgacactgttccctccaagcagcgaagaactccaggccaacaaggccacacttgtgtgcctgatctccgacttctaccctggggctgtgacagtggcttggaaggccgatggatctcctgtgaaagccggcgtggaaaccaccaagccatccaagcagagcaacaacaaatacgccgccagctcctacctgagcctgacacctgagcagtggaagtcccacagatcctacagctgccaagtgacccacgaaggcagcaccgtggaaaagacagtggcccctacagagtgcagccccatcaagaccgatgtgattacaatggaccccaaggacaactgctccaaggacgccaacgataccctgctgctccagctgaccaacaccagcgcctactacatgtacttgttgctgctgctgaagtccgtggtgtacttcgccatcatcacatgctgcctgctgcggagaaccgccttctgctgcaacggcgagaagtctagggccaagcgatctggatctggagcaacaaacttctcactactcaaacaagcaggtgacgtggaggagaatcccgggcctactagtatggactggatttggcgcatccttttccttgtcggcgctgctaccggcgcgcattccgggccccagctccagctgcaagagtctggacctggcctggtcaagcctagcgagacactgagcctgacctgtaccgtgtccggcgatagcatcagcagcggcgattactactggggctggatcagacagcctcctggcaaaggactggaatggatcggccacatctactacagcggcgtgacctactacaaccccagcctgaagtccagagtgaccatcagcgtggacaccagccggaaccagttctccctgaagctgtctagcgtgacagccgccgataccgccgtgtactactgcaccagagaggacagcagcaactggcggagtagaggccagggaacactggtcacagttagctctggatccggcggaggcggaagtggaggcggaggatctggcggcggaggctctttcgaacaagttcagctggttcagagcggagccgaagtgaagaaacctggcgagagcgtgaaggtgtcctgcaaagccagcggctacacctttaccgagtacaccatccactgggtccgacaggctccaggacaaggactggaatggatgggcaacatcaaccccaacaacggcggcaccacctacaaccagaaattcgaggatcgcgtgacaatcaccgccgacaagagcaccagcaccgcctacatggaactgagcagcctgagaagcgaggacaccgccgtgtactattgtgccagaggctggaacttcgactactggggccagggaaccaccgtgacagtctcttctacgcgtgcctctacaaagggaccctccgtgtttcctctggctcccagcagcaagtctacaagcggaggaacagccgctctgggctgcctggtcaaggattactttcccgagcctgtgaccgtgtcctggaatagcggagcactgacaagcggcgtgcacacctttccagccgtgctgcaaagcagcggcctgtactctctgagcagcgtggtcacagtgcctagctctagcctgggcacccagacctacatctgcaatgtgaaccacaagcctagcaacaccaaggtggacaagagagtggaacccaagagctgtgaagtgaaaaccgactccaccgaccacgtgaagcccaaagagacagagaacaccaagcagcccagcaagagctgccacaagcccaaggccatcgtgcacaccgagaaagtgaacatgatgagcctgaccgtgctgggcctgcggatgctgttcgccaaaaccgtggccgtgaacttcctgctgaccgccaagctgttcttcctc

SEQ ID NO: 9888 - DNA, 2691 bp, Artificial Sequence
  Synthetic Polynucloetide
atggccttaccagtgaccgccttgctcctgccgctggccttgctgctccacgccgccaggccggaagtgcagctggttgaatctggcggaggactggttcagcctggcggatctctgagactgtcttgtgccgccagcggcttcagcttcagcgacttttggatgagctgggtccgacaggcccctggcaaaggacttgaatgggtcgccacaatcagccaggccggcagcgagaaggactacgtggactctgtgaagggcagattcaccatcagccgggacaacgccaagaagtccctgtacctccagatgaacagcctgagagccgaggacaccgccgtgtactattgtgcctctggcgtgtacagcttcgactacagaggccagggcaccctggtcacagtctcttctggtaccggcggaggcggatctggcggcggaggtagcggtggcggaggatctgaattcgacatccagatgacacagagccctagcagcctgtctgccagcgtgggagacagagtgaccatcacatgcaaggccagccaggatgtgggcacagccgtggattggtatcagcagaagcctggcaaggcccctaagctgctgatctcttgggccagcacaagacacacaggcgtgcccagcagattttctggcagcggctctggcaccgacttcaccctgacaatatccagcctccagcctgaggacttcgccacctacttttgccagcagtacaacagctaccctctgaccttcggccagggcaccaaggtggaaatcaagagaacagttctcgagggacagcctaaggccaatcctaccgtgacactgttccctccaagcagcgaagaactccaggccaacaaggccacacttgtgtgcctgatctccgacttctaccctggggctgtgacagtggcttggaaggccgatggatctcctgtgaaagccggcgtggaaaccaccaagccatccaagcagagcaacaacaaatacgccgccagctcctacctgagcctgacacctgagcagtggaagtcccacagatcctacagctgccaagtgacccacgaaggcagcaccgtggaaaagacagtggcccctacagagtgcagcggcagagccgattgcggctttaccagcgagagctaccagcagggcgtgctgagcgccaccatcctgtacgagatcctgctgggcaaggccaccctgtacgccgtgctggtgtctgccctggtgctgatggctatggtcaagcggaaggacagccggggacgcgccaagagaagcggatctggcgtgaagcagaccctgaatttcgacctgctgaagctggctggcgacgtggaatccaacccaggccctactagtatggactggatttggcgcatccttttccttgtcggcgctgctaccggcgcgcattccgggccccagctccagctgcaagagtctggacctggcctggtcaagcctagcgagacactgagcctgacctgtaccgtgtccggcgatagcatcagcagcggcgattactactggggctggatcagacagcctcctggcaaaggactggaatggatcggccacatctactacagcggcgtgacctactacaaccccagcctgaagtccagagtgaccatcagcgtggacaccagccggaaccagttctccctgaagctgtctagcgtgacagccgccgataccgccgtgtactactgcaccagagaggacagcagcaactggcggagtagaggccagggaacactggtcacagttagctctggatccggcggaggcggaagtggaggcggaggatctggcggcggaggctctttcgaacaagttcagctggttcagagcggagccgaagtgaagaaacctggcgagagcgtgaaggtgtcctgcaaagccagcggctacacctttaccgagtacaccatccactgggtccgacaggctccaggacaaggactggaatggatgggcaacatcaaccccaacaacggcggcaccacctacaaccagaaattcgaggatcgcgtgacaatcaccgccgacaagagcaccagcaccgcctacatggaactgagcagcctgagaagcgaggacaccgccgtgtactattgtgccagaggctggaacttcgactactggggccagggaaccaccgtgacagtctcttctacgcgtgcctctacaaagggaccctccgtgtttcctctggctcccagcagcaagtctacaagcggaggaacagccgctctgggctgcctggtcaaggattactttcccgagcctgtgaccgtgtcctggaatagcggagcactgacaagcggcgtgcacacctttccagccgtgctgcaaagcagcggcctgtactctctgagcagcgtggtcacagtgcctagctctagcctgggcacccagacctacatctgcaatgtgaaccacaagcctagcaacaccaaggtggacaagagagtggaacccaagagctgtatccccgaggacacattcttcccaagccccgagagcagctgcgacgtgaagctggtggaaaagagcttcgagacagacaccaacctgaacttccagaacctgagcgtgatcggcttcagaatcctgctgctgaaagtggccggctttaacctgctgatgaccctgcggctgtggtccagc

SEQ ID NO: 9889 - DNA, 2262 bp, Artificial Sequence
  Synthetic Polynucloetide
atggccttaccagtgaccgccttgctcctgccgctggccttgctgctccacgccgccaggccggaagtgcaggttttggagtctggcggaggactggttcagcctggcggatctctgagactgtcttgtgccgccagcggcttcaccttcagcaactttgccatgagctgggtccgacaggcccctggcaaaggacttgaatgggtgtccacaatcagcggcagcgccggcacaacagattacgccgattctgtgaagggcagattcaccatcagccgggacaacagcaagaaaaccctgtacctccagatgaacagcctgcgcgtggaagataccgccgtgtactactgtgccgatggcagaggccccttcttcgattatcgcggccagggcacactggtcaccgtttcttctggtaccggcggaggcggatctggcggcggaggtagcggtggcggaggatctgaattcgacatccagatgacacagagccctagcagcctgtctgccagcgtgggagacagagtgaccatcacatgcaaggccagccaggatgtgggcacagccgtggattggtatcagcagaagcctggcaaggcccctaagctgctgatctcttgggccagcacaagacacacaggcgtgcccagcagattttctggcagcggctctggcaccgacttcaccctgacaatatccagcctccagcctgaggacttcgccacctacttttgccagcagtacaacagctaccctctgaccttcggccagggcaccaaggtggaaatcaagagaacagttctcgaggacctgaagaacgtgttcccacctgaggtggccgtgttcgagcctagcgaggccgagatcagccacacccagaaagccaccctcgtgtgcctggctaccggcttctaccccgaccatgtggaactgtcttggtgggtcaacggcaaagaggtgcacagcggcgtgtgtaccgacccccagccactgaaagaacagcccgccctgaacgacagccggtactgcctgagcagcagactgagagtgtccgccaccttctggcagaacccccggaaccacttcagatgccaggtgcagttctacggcctgagcgagaacgacgagtggacccaggacagagccaagcccgtgacccagatcgtgtctgccgaagcctggggcagagccgattgcggctttaccagcgagagctaccagcagggcgtgctgagcgccaccatcctgtacgagatcctgctgggcaaggccaccctgtacgccgtgctggtgtctgccctggtgctgatggctatggtcaagcggaaggacagccggggaagggccaagcgatctggatctggagcaacaaacttctcactactcaaacaagcaggtgacgtggaggagaatcccgggcctactagtatggactggatttggcgcatccttttccttgtcggcgctgctaccggcgcgcattccttcgaacaagttcagctggttcagagcggagccgaagtgaagaaacctggcgagagcgtgaaggtgtcctgcaaagccagcggctacacctttaccgagtacaccatccactgggtccgacaggctccaggacaaggactggaatggatgggcaacatcaaccccaacaacggcggcaccacctacaaccagaaattcgaggatcgcgtgacaatcaccgccgacaagagcaccagcaccgcctacatggaactgagcagcctgagaagcgaggacaccgccgtgtactattgtgccagaggctggaacttcgactactggggccagggaaccaccgtgacagtctcttctacgcgtatccagaaccctgatcctgccgtgtaccagctgcgggatagcaagagcagcgacaagagcgtgtgtctgttcaccgacttcgacagccagaccaacgtgtcccagagcaaggactccgacgtgtacatcaccgataagtgcgtgctggacatgcggagcatggacttcaagagcaactccgccgtggcctggtccaacaagtccgatttcgcctgcgccaacgccttcaacaacagcattatccccgaggacacattcttcccaagccccgagagcagctgcgacgtgaagctggtggaaaagagcttcgagacagacaccaacctgaacttccagaacctgagcgtgatcggcttcagaatcctgctgctgaaagtggccggctttaacctgctgatgaccctgcggctgtggtccagc

SEQ ID NO: 9890 - DNA, 2265 bp, Artificial Sequence
  Synthetic Polynucloetide
atggccttaccagtgaccgccttgctcctgccgctggccttgctgctccacgccgccaggccggacatccagatgacacagagccctagcagcctgtctgccagcgtgggagacagagtgaccatcacatgcaaggccagccaggatgtgggcacagccgtggattggtatcagcagaagcctggcaaggcccctaagctgctgatctcttgggccagcacaagacacacaggcgtgcccagcagattttctggcagcggctctggcaccgacttcaccctgacaatatccagcctccagcctgaggacttcgccacctacttttgccagcagtacaacagctaccctctgaccttcggccagggcaccaaggtggaaatcaagagaacagttctcgaggacctgaagaacgtgttcccacctgaggtggccgtgttcgagcctagcgaggccgagatcagccacacccagaaagccaccctcgtgtgcctggctaccggcttctaccccgaccatgtggaactgtcttggtgggtcaacggcaaagaggtgcacagcggcgtgtgtaccgacccccagccactgaaagaacagcccgccctgaacgacagccggtactgcctgagcagcagactgagagtgtccgccaccttctggcagaacccccggaaccacttcagatgccaggtgcagttctacggcctgagcgagaacgacgagtggacccaggacagagccaagcccgtgacccagatcgtgtctgccgaagcctggggcagagccgattgcggctttaccagcgagagctaccagcagggcgtgctgagcgccaccatcctgtacgagatcctgctgggcaaggccaccctgtacgccgtgctggtgtctgccctggtgctgatggctatggtcaagcggaaggacagccggggaagggccaagcgatctggatctggagcaacaaacttctcactactcaaacaagcaggtgacgtggaggagaatcccgggcctactagtatggactggatttggcgcatccttttccttgtcggcgctgctaccggcgcccattccgggcccgaagtgcagctggttgaatctggcggaggactggttcaggctggcggatctctgagactgtcttgtgccgccagcggcagaacctttagcatgggctggtttagacaggcccctggcaaagagagagagttcgtcgccgccatcacatactctggcggcagcccttactacgccgactctgtgaagggcagattcaccatcagccgggacaacgccaagaacaccgtgtacctccagatgaacagcctgaagcctgaggacaccgccgtgtactactgcgccgccaatccaacatacggcagcgactggaacgccgagaattggggccagggaacccaagtgacagtgtctagcggatccggcggcggaggatctggcggaggcggatctgggggcggaggctctttcgaacaagttcagctggttcagagcggagccgaagtgaagaaacctggcgagagcgtgaaggtgtcctgcaaagccagcggctacacctttaccgagtacaccatccactgggtccgacaggctccaggacaaggactggaatggatgggcaacatcaaccccaacaacggcggcaccacctacaaccagaaattcgaggatcgcgtgacaatcaccgccgacaagagcaccagcaccgcctacatggaactgagcagcctgagaagcgaggacaccgccgtgtactattgtgccagaggctggaacttcgactactggggccagggaaccaccgtgacagtctcttctacgcgtatccagaaccctgatcctgccgtgtaccagctgcgggatagcaagagcagcgacaagagcgtgtgtctgttcaccgacttcgacagccagaccaacgtgtcccagagcaaggactccgacgtgtacatcaccgataagtgcgtgctggacatgcggagcatggacttcaagagcaactccgccgtggcctggtccaacaagtccgatttcgcctgcgccaacgccttcaacaacagcattatccccgaggacacattcttcccaagccccgagagcagctgcgacgtgaagctggtggaaaagagcttcgagacagacaccaacctgaacttccagaacctgagcgtgatcggcttcagaatcctgctgctgaaagtggccggctttaacctgctgatgaccctgcggctgtggtccagc

SEQ ID NO: 9891 - DNA, 2646 bp, Artificial Sequence
  Synthetic Polynucloetide
atggccttaccagtgaccgccttgctcctgccgctggccttgctgctccacgccgccaggccggacatccagatgacacagagccctagcagcctgtctgccagcgtgggagacagagtgaccatcacatgcaaggccagccaggatgtgggcacagccgtggattggtatcagcagaagcctggcaaggcccctaagctgctgatctcttgggccagcacaagacacacaggcgtgcccagcagattttctggcagcggctctggcaccgacttcaccctgacaatatccagcctccagcctgaggacttcgccacctacttttgccagcagtacaacagctaccctctgaccttcggccagggcaccaaggtggaaatcaagagaacagttctcgaggacctgaagaacgtgttcccacctgaggtggccgtgttcgagcctagcgaggccgagatcagccacacccagaaagccaccctcgtgtgcctggctaccggcttctaccccgaccatgtggaactgtcttggtgggtcaacggcaaagaggtgcacagcggcgtgtgtaccgacccccagccactgaaagaacagcccgccctgaacgacagccggtactgcctgagcagcagactgagagtgtccgccaccttctggcagaacccccggaaccacttcagatgccaggtgcagttctacggcctgagcgagaacgacgagtggacccaggacagagccaagcccgtgacccagatcgtgtctgccgaagcctggggcagagccgattgcggctttaccagcgagagctaccagcagggcgtgctgagcgccaccatcctgtacgagatcctgctgggcaaggccaccctgtacgccgtgctggtgtctgccctggtgctgatggctatggtcaagcggaaggacagccggggaagggccaagcgatctggatctggagcaacaaacttctcactactcaaacaagcaggtgacgtggaggagaatcccgggcctactagtatggactggatttggcgcatccttttccttgtcggcgctgctaccggcgcccattcccaactgcaactgcaagagtctggccctggcctggtcaagccttctgaaaccctgagcctgacctgtaccgtgtccggcggctctatcagcagcggcgattactactggggctggatcagacagcctccaggcaagggactcgaatggatcggcagcatcagctacagcggctccacctactacaacccaagcctgaagtccagagtgaccatcagcgtggacaccagcagaaaccagttctccctgaagctgagcagcgtgacagccgccgatacagccgtgtattattgcaccagagaggacagcagcaactggcggagtagaggacagggcacactggtcacagtgtcctcttctggaggcggtggaagcggtggaggaggatctgaagtgcagctggttgaatctggcggaggactggttcaggctggcggatctctgagactgtcttgtgccgccagcggcagaacctttagcatgggctggtttagacaggcccctggcaaagagagagagttcgtcgccgccatcacatactctggcggcagcccttactacgccgactctgtgaagggcagattcaccatcagccgggacaacgccaagaacaccgtgtacctccagatgaacagcctgaagcctgaggacaccgccgtgtactactgcgccgccaatccaacatacggcagcgactggaacgccgagaattggggccagggaacccaagtgacagtgtctagcggatccggcggcggaggatctggcggaggcggatctgggggcggaggctctttcgaacaagttcagctggttcagagcggagccgaagtgaagaaacctggcgagagcgtgaaggtgtcctgcaaagccagcggctacacctttaccgagtacaccatccactgggtccgacaggctccaggacaaggactggaatggatgggcaacatcaaccccaacaacggcggcaccacctacaaccagaaattcgaggatcgcgtgacaatcaccgccgacaagagcaccagcaccgcctacatggaactgagcagcctgagaagcgaggacaccgccgtgtactattgtgccagaggctggaacttcgactactggggccagggaaccaccgtgacagtctcttctacgcgtatccagaaccctgatcctgccgtgtaccagctgcgggatagcaagagcagcgacaagagcgtgtgtctgttcaccgacttcgacagccagaccaacgtgtcccagagcaaggactccgacgtgtacatcaccgataagtgcgtgctggacatgcggagcatggacttcaagagcaactccgccgtggcctggtccaacaagtccgatttcgcctgcgccaacgccttcaacaacagcattatccccgaggacacattcttcccaagccccgagagcagctgcgacgtgaagctggtggaaaagagcttcgagacagacaccaacctgaacttccagaacctgagcgtgatcggcttcagaatcctgctgctgaaagtggccggctttaacctgctgatgaccctgcggctgtggtccagc

SEQ ID NO: 9892 - DNA, 2673 bp, Artificial Sequence
  Synthetic Polynucloetide
atggccttaccagtgaccgccttgctcctgccgctggccttgctgctccacgccgccaggccggaagtgcaggttttggagtctggcggaggactggttcagcctggcggatctctgagactgtcttgtgccgccagcggcttcaccttcagcaactttgccatgagctgggtccgacaggcccctggcaaaggacttgaatgggtgtccacaatcagcggcagcgccggcacaacagattacgccgattctgtgaagggcagattcaccatcagccgggacaacagcaagaaaaccctgtacctccagatgaacagcctgcgcgtggaagataccgccgtgtactactgtgccgatggcagaggccccttcttcgattatcgcggccagggcacactggtcaccgtttcttctggtaccggcggaggcggatctggcggcggaggtagcggtggcggaggatctgaattcgacatccagatgacacagagccctagcagcctgtctgccagcgtgggagacagagtgaccatcacatgcaaggccagccaggatgtgggcacagccgtggattggtatcagcagaagcctggcaaggcccctaagctgctgatctcttgggccagcacaagacacacaggcgtgcccagcagattttctggcagcggctctggcaccgacttcaccctgacaatatccagcctccagcctgaggacttcgccacctacttttgccagcagtacaacagctaccctctgaccttcggccagggcaccaaggtggaaatcaagagaacagttctcgaggacctgaagaacgtgttcccacctgaggtggccgtgttcgagcctagcgaggccgagatcagccacacccagaaagccaccctcgtgtgcctggctaccggcttctaccccgaccatgtggaactgtcttggtgggtcaacggcaaagaggtgcacagcggcgtgtgtaccgacccccagccactgaaagaacagcccgccctgaacgacagccggtactgcctgagcagcagactgagagtgtccgccaccttctggcagaacccccggaaccacttcagatgccaggtgcagttctacggcctgagcgagaacgacgagtggacccaggacagagccaagcccgtgacccagatcgtgtctgccgaagcctggggcagagccgattgcggctttaccagcgagagctaccagcagggcgtgctgagcgccaccatcctgtacgagatcctgctgggcaaggccaccctgtacgccgtgctggtgtctgccctggtgctgatggctatggtcaagcggaaggacagccggggaagggccaagcgatctggatctggagcaacaaacttctcactactcaaacaagcaggtgacgtggaggagaatcccgggcctactagtatggactggatttggcgcatccttttccttgtcggcgctgctaccggcgcccattccgggcccgaagtgcagctggttgaatctggcggaggactggttcaggctggcggatctctgagactgtcttgtgccgccagcggcagaacctttagcatgggctggtttagacaggcccctggcaaagagagagagttcgtcgccgccatcacatacagcggcggcagcccttactacgcctcttctgtcagaggccggttcaccatcagccgggacaacgccaagaacaccgtgtacctccagatgaacagcctgaagccagaggacaccgccgtgtactactgtgccgccaatccaacctacggcagcgactggaatgccgagaattggggccagggcacccaagtgacagtgtctagtggatccggcggcggaggatctggcggaggcggatctgggggcggaggctctttcgaacaagttcagctggttcagagcggagccgaagtgaagaaacctggcgagagcgtgaaggtgtcctgcaaagccagcggctacacctttaccgagtacaccatccactgggtccgacaggctccaggacaaggactggaatggatgggcaacatcaaccccaacaacggcggcaccacctacaaccagaaattcgaggatcgcgtgacaatcaccgccgacaagagcaccagcaccgcctacatggaactgagcagcctgagaagcgaggacaccgccgtgtactattgtgccagaggctggaacttcgactactggggccagggaaccaccgtgacagtctcttctacgcgtatccagaaccctgatcctgccgtgtaccagctgcgggatagcaagagcagcgacaagagcgtgtgtctgttcaccgacttcgacagccagaccaacgtgtcccagagcaaggactccgacgtgtacatcaccgataagtgcgtgctggacatgcggagcatggacttcaagagcaactccgccgtggcctggtccaacaagtccgatttcgcctgcgccaacgccttcaacaacagcattatccccgaggacacattcttcccaagccccgagagcagctgcgacgtgaagctggtggaaaagagcttcgagacagacaccaacctgaacttccagaacctgagcgtgatcggcttcagaatcctgctgctgaaagtggccggctttaacctgctgatgaccctgcggctgtggtccagc

SEQ ID NO: 9893 - DNA, 2163 bp, Artificial Sequence
  Synthetic Polynucloetide
atggccttaccagtgaccgccttgctcctgccgctggccttgctgctccacgccgccaggccggacatccagatgacacagagccctagcagcctgtctgccagcgtgggagacagagtgaccatcacatgcaaggccagccaggatgtgggcacagccgtggattggtatcagcagaagcctggcaaggcccctaagctgctgatctactgggccagcacaagacacacaggcgtgcccagcagattttctggcagcggctctggcaccgacttcaccctgacaatatccagcctccagcctgaggacttcgccacctactactgccagcagtacaacagctaccctctgaccttcggccagggcaccaaggtggaaatcaaaagaggcggaggcggaagtggaggcggaggatctggcggcggaggctctgaagttcagctgcaacagtctggccccgagctggttaagcctggaacaagcgtgcggatctcctgcaagaccagcggctacaccttcaccgagtacaccatccactgggtcaagcagagccacggcaagagcctggaatggatcggcaacatcaaccccaacaacggcggcaccacctacaaccagaagttcgaggacaaggccacactgaccgtggacaagagcagcagcaccgcctacatggaactgagaagcctgaccagcgaggacagcgccgtgtactattgtgccgccggatggaacttcgactactggggccagggaacaaccctgaccgttagctctacgcgtgagcagaaactgatctcggaagaggatctggcgaagcccaccacgacgccagcgccgcgaccaccaacaccggcgcccaccatcgcgtcgcagcccctgtccctgcgcccagaggcgtgccggccagcggcggggggcgcagtgcacacgagggggctggacttcgcctgtgacatctacatctgggcgcccttggccgggacttgtggggtccttctcctgtcactggttatcaccctttactgcaaacggggcagaaagaaactcctgtatatattcaaacaaccatttatgagaccagtacaaactactcaagaggaagatggctgtagctgccgatttccagaagaagaagaaggaggatgtgaactgagagtgaagttcagcaggagcgcagacgcccccgcgtaccagcagggccagaaccagctctataacgagctgaatctaggacgaagagaggagtacgatgttttggacaagagacgtggccgggaccctgagatggggggaaagccgagaaggaagaaccctcaggaaggcctgtacaatgaactgcagaaagataagatggcggaggcctacagtgagattgggatgaaaggcgagcgccggaggggcaaggggcacgatggcctttaccagggtctcagtacagccaccaaggacacctacgacgcccttcacatgcaggccctgccccctcgctctagtggctccggcgagggcagaggaagtctactaacctgcggagatgtggaagaaaatcctggcccacatatgaccgagtacaagcccacggtgcgcctcgccacccgcgacgacgtccccagggccgtacgcaccctcgccgccgcgttcgccgactaccccgccacgcgccacaccgtcgatccggaccgccacatcgagcgggtcaccgagctgcaagaactcttcctcacgcgcgtcgggctcgacatcggcaaggtgtgggtcgcggacgacggcgccgcggtggcggtctggaccacgccggagagcgtcgaagcgggggcggtgttcgccgagatcggcccgcgcatggccgagttgagcggttcccggctggccgcgcagcaacagatggaaggcctcctggcgccgcaccggcccaaggagcccgcgtggttcctggccaccgtcggcgtctcgcccgaccaccagggcaagggtctgggcagcgccgtcgtgctccccggagtggaggcggccgagcgcgccggggtgcccgccttcctggagacctccgcgccccgcaacctccccttctacgagcggctcggcttcaccgtcaccgccgacgtcgaggtgcccgaaggaccgcgcacctggtgcatgacccgcaagcccggtgcctga

SEQ ID NO: 9894 - DNA, 2145 bp, Artificial Sequence
  Synthetic Polynucloetide
atggccttaccagtgaccgccttgctcctgccgctggccttgctgctccacgccgccaggccggacatccagatgacacagagccctagcagcctgtctgccagcgtgggagacagagtgaccatcacatgcaaggccagccaggatgtgggcacagccgtggattggtatcagcagaagcctggcaaggcccctaagctgctgatctactgggccagcacaagacacacaggcgtgcccagcagattttctggcagcggctctggcaccgacttcaccctgacaatatccagcctccagcctgaggacttcgccacctactactgccagcagtacaacagctaccctctgaccttcggccagggcaccaaggtggaaatcaaaagaggcggaggcggaagtggaggcggaggatctggcggcggaggctctgaagttcagctgcaacagtctggccccgagctggttaagcctggaacaagcgtgcggatctcctgcaagaccagcggctacaccttcaccgagtacaccatccactgggtcaagcagagccacggcaagagcctggaatggatcggcaacatcaaccccaacaacggcggcaccacctacaaccagaagttcgaggacaaggccacactgaccgtggacaagagcagcagcaccgcctacatggaactgagaagcctgaccagcgaggacagcgccgtgtactattgtgccgccggatggaacttcgactactggggccagggaacaaccctgaccgttagctctacgcgtgagcagaaactgatctcggaagaggatctgaaaattgaagttatgtatcctcctccttacctagacaatgagaagagcaatggaaccattatccatgtgaaagggaaacacctttgtccaagtcccctatttcccggaccttctaagcccttttgggtgctggtggtggttgggggagtcctggcttgctatagcttgctagtaacagtggcctttattattttctgggtgaggagtaagaggagcaggctcctgcacagtgactacatgaacatgactccacgccgccccggacccacccgcaagcattaccagccctatgccccaccacgcgacttcgcagcctatcgctccagagtgaagttcagcaggagcgcagacgcccccgcgtaccagcagggccagaaccagctctataacgagctcaatctaggacgaagagaggagtacgatgttttggacaagagacgtggccgggaccctgagatggggggaaagccgagaaggaagaaccctcaggaaggcctgtacaatgaactgcagaaagataagatggcggaggcctacagtgagattgggatgaaaggcgagcgccggaggggcaaggggcacgatggcctttaccagggtctcagtacagccaccaaggacacctacgacgcccttcacatgcaggccctgccccctcgctctagtggctccggcgagggcagaggaagtctactaacctgcggagatgtggaagaaaatcctggcccacatatgaccgagtacaagcccacggtgcgcctcgccacccgcgacgacgtccccagggccgtacgcaccctcgccgccgcgttcgccgactaccccgccacgcgccacaccgtcgatccggaccgccacatcgagcgggtcaccgagctgcaagaactcttcctcacgcgcgtcgggctcgacatcggcaaggtgtgggtcgcggacgacggcgccgcggtggcggtctggaccacgccggagagcgtcgaagcgggggcggtgttcgccgagatcggcccgcgcatggccgagttgagcggttcccggctggccgcgcagcaacagatggaaggcctcctggcgccgcaccggcccaaggagcccgcgtggttcctggccaccgtcggcgtctcgcccgaccaccagggcaagggtctgggcagcgccgtcgtgctccccggagtggaggcggccgagcgcgccggggtgcccgccttcctggagacctccgcgccccgcaacctccccttctacgagcggctcggcttcaccgtcaccgccgacgtcgaggtgcccgaaggaccgcgcacctggtgcatgacccgcaagcccggtgcctga

SEQ ID NO: 9895 - DNA, 1473 bp, Artificial Sequence
  Synthetic Polynucloetide
atggccttaccagtgaccgccttgctcctgccgctggccttgctgctccacgccgccaggccggacatccagatgacacagagccctagcagcctgtctgccagcgtgggagacagagtgaccatcacatgcaaggccagccaggatgtgggcacagccgtggattggtatcagcagaagcctggcaaggcccctaagctgctgatctactgggccagcacaagacacacaggcgtgcccagcagattttctggcagcggctctggcaccgacttcaccctgacaatatccagcctccagcctgaggacttcgccacctactactgccagcagtacaacagctaccctctgaccttcggccagggcaccaaggtggaaatcaaaagaggcggaggcggaagtggaggcggaggatctggcggcggaggctctgaagttcagctgcaacagtctggccccgagctggttaagcctggaacaagcgtgcggatctcctgcaagaccagcggctacaccttcaccgagtacaccatccactgggtcaagcagagccacggcaagagcctggaatggatcggcaacatcaaccccaacaacggcggcaccacctacaaccagaagttcgaggacaaggccacactgaccgtggacaagagcagcagcaccgcctacatggaactgagaagcctgaccagcgaggacagcgccgtgtactattgtgccgccggatggaacttcgactactggggccagggaacaaccctgaccgttagctctacgcgtgagcagaaactgatctcggaagaggatctgaaaattgaagttatgtatcctcctccttacctagacaatgagaagagcaatggaaccattatccatgtgaaagggaaacacctttgtccaagtcccctatttcccggaccttctaagcccttttgggtgctggtggtggttgggggagtcctggcttgctatagcttgctagtaacagtggcctttattattttctgggtgaggagtaagaggagcaggctcctgcacagtgactacatgaacatgactccacgccgccccggacccacccgcaagcattaccagccctatgccccaccacgcgacttcgcagcctatcgctccagagtgaagttcagcaggagcgcagacgcccccgcgtaccagcagggccagaaccagctctataacgagctcaatctaggacgaagagaggagtacgatgttttggacaagagacgtggccgggaccctgagatggggggaaagccgagaaggaagaaccctcaggaaggcctgtacaatgaactgcagaaagataagatggcggaggcctacagtgagattgggatgaaaggcgagcgccggaggggcaaggggcacgatggcctttaccagggtctcagtacagccaccaaggacacctacgacgcccttcacatgcaggccctgccccctcgc

SEQ ID NO: 9896 - DNA, 1494 bp, Artificial Sequence
  Synthetic Polynucloetide
atggccttaccagtgaccgccttgctcctgccgctggccttgctgctccacgccgccaggccggacatccagatgacacagagccctagcagcctgtctgccagcgtgggagacagagtgaccatcacatgcaaggccagccaggatgtgggcacagccgtggattggtatcagcagaagcctggcaaggcccctaagctgctgatctactgggccagcacaagacacacaggcgtgcccagcagattttctggcagcggctctggcaccgacttcaccctgacaatatccagcctccagcctgaggacttcgccacctactactgccagcagtacaacagctaccctctgaccttcggccagggcaccaaggtggaaatcaaaagaggcggaggcggaagtggaggcggaggatctggcggcggaggctctgaagttcagctgcaacagtctggccccgagctggttaagcctggaacaagcgtgcggatctcctgcaagaccagcggctacaccttcaccgagtacaccatccactgggtcaagcagagccacggcaagagcctggaatggatcggcaacatcaaccccaacaacggcggcaccacctacaaccagaagttcgaggacaaggccacactgaccgtggacaagagcagcagcaccgcctacatggaactgagaagcctgaccagcgaggacagcgccgtgtactattgtgccgccggatggaacttcgactactggggccagggaacaaccctgaccgttagctctacgcgtgagcagaaactgatctcggaagaggatctggcgaagcccaccacgacgccagcgccgcgaccaccaacaccggcgcccaccatcgcgtcgcagcccctgtccctgcgcccagaggcgtgccggccagcggcggggggcgcagtgcacacgagggggctggacttcgcctgtgacatctacatctgggcgcccttggccgggacttgtggggtccttctcctgtcactggttatcaccctttactgcaaacggggcagaaagaaactcctgtatatattcaaacaaccatttatgagaccagtacaaactactcaagaggaagatggctgtagctgccgatttccagaagaagaagaaggaggatgtgaactgagagtgaagttcagcaggagcgcagacgcccccgcgtaccagcagggccagaaccagctctataacgagctgaatctaggacgaagagaggagtacgatgttttggacaagagacgtggccgggaccctgagatggggggaaagccgagaaggaagaaccctcaggaaggcctgtacaatgaactgcagaaagataagatggcggaggcctacagtgagattgggatgaaaggcgagcgccggaggggcaaggggcacgatggcctttaccagggtctcagtacagccaccaaggacacctacgacgcccttcacatgcaggccctgccccctcgctga

SEQ ID NO: 9897 - DNA, 1494 bp, Artificial Sequence
  Synthetic Polynucloetide
atggccttaccagtgaccgccttgctcctgccgctggccttgctgctccacgccgccaggccggaagttcagctgcaacagtctggccccgagctggttaagcctggaacaagcgtgcggatctcctgcaagaccagcggctacaccttcaccgagtacaccatccactgggtcaagcagagccacggcaagagcctggaatggatcggcaacatcaaccccaacaacggcggcaccacctacaaccagaagttcgaggacaaggccacactgaccgtggacaagagcagcagcaccgcctacatggaactgagaagcctgaccagcgaggacagcgccgtgtactattgtgccgccggatggaacttcgactactggggccagggaacaaccctgaccgttagctctggcggaggcggaagtggaggcggaggatctggcggcggaggctctgacatccagatgacacagagccctagcagcctgtctgccagcgtgggagacagagtgaccatcacatgcaaggccagccaggatgtgggcacagccgtggattggtatcagcagaagcctggcaaggcccctaagctgctgatctactgggccagcacaagacacacaggcgtgcccagcagattttctggcagcggctctggcaccgacttcaccctgacaatatccagcctccagcctgaggacttcgccacctactactgccagcagtacaacagctaccctctgaccttcggccagggcaccaaggtggaaatcaaaagaacgcgtgagcagaaactgatctcggaagaggatctggcgaagcccaccacgacgccagcgccgcgaccaccaacaccggcgcccaccatcgcgtcgcagcccctgtccctgcgcccagaggcgtgccggccagcggcggggggcgcagtgcacacgagggggctggacttcgcctgtgacatctacatctgggcgcccttggccgggacttgtggggtccttctcctgtcactggttatcaccctttactgcaaacggggcagaaagaaactcctgtatatattcaaacaaccatttatgagaccagtacaaactactcaagaggaagatggctgtagctgccgatttccagaagaagaagaaggaggatgtgaactgagagtgaagttcagcaggagcgcagacgcccccgcgtaccagcagggccagaaccagctctataacgagctgaatctaggacgaagagaggagtacgatgttttggacaagagacgtggccgggaccctgagatggggggaaagccgagaaggaagaaccctcaggaaggcctgtacaatgaactgcagaaagataagatggcggaggcctacagtgagattgggatgaaaggcgagcgccggaggggcaaggggcacgatggcctttaccagggtctcagtacagccaccaaggacacctacgacgcccttcacatgcaggccctgccccctcgctga

SEQ ID NO: 9898 - DNA, 2733 bp, Artificial Sequence
  Synthetic Polynucloetide
atggccttaccagtgaccgccttgctcctgccgctggccttgctgctccacgccgccaggccggacatccagatgacacagagccctagcagcctgtctgccagcgtgggagacagagtgaccatcacatgcaaggccagccaggatgtgggcacagccgtggattggtatcagcagaagcctggcaaggcccctaagctgctgatctactgggccagcacaagacacacaggcgtgcccagcagattttctggcagcggctctggcaccgacttcaccctgacaatatccagcctccagcctgaggacttcgccacctactactgccagcagtacaacagctaccctctgaccttcggccagggcaccaaggtggaaatcaaaagaggcggaggcggaagtggaggcggaggatctggcggcggaggctctgaagttcagctgcaacagtctggccccgagctggttaagcctggaacaagcgtgcggatctcctgcaagaccagcggctacaccttcaccgagtacaccatccactgggtcaagcagagccacggcaagagcctggaatggatcggcaacatcaaccccaacaacggcggcaccacctacaaccagaagttcgaggacaaggccacactgaccgtggacaagagcagcagcaccgcctacatggaactgagaagcctgaccagcgaggacagcgccgtgtactattgtgccgccggatggaacttcgactactggggccagggaacaaccctgaccgttagctctacgcgtgagcagaaactgatctcggaagaggatctggcgaagcccaccacgacgccagcgccgcgaccaccaacaccggcgcccaccatcgcgtcgcagcccctgtccctgcgcccagaggcgtgccggccagcggcggggggcgcagtgcacacgagggggctggacttcgcctgtgacatctacatctgggcgcccttggccgggacttgtggggtccttctcctgtcactggttatcaccctttactgcgggcgcgccagagtgaagttcagcaggagcgcagacgcccccgcgtaccagcagggccagaaccagctctataacgagctgaatctaggacgaagagaggagtacgatgttttggacaagagacgtggccgggaccctgagatggggggaaagccgagaaggaagaaccctcaggaaggcctgtacaatgaactgcagaaagataagatggcggaggcctacagtgagattgggatgaaaggcgagcgccggaggggcaaggggcacgatggcctttaccagggtctcagtacagccaccaaggacacctacgacgcccttcacatgcaggccctgccccctcgctctagaggatctggagcaacaaacttctcactactcaaacaagcaggtgacgtggaggagaatcccgggcctgggatccacatggccacttacgaggttctctgtgaggtggcgcggaaactgggcacggatgacagggaagtggtattgttcctcctaaacgtgttcatacctcaacccacactggcccaattaattggagctcttagagctttaaaggaggagggcaggttaacgtttcccctgttagcggaatgtctgtttcgtgcaggtcgcagagacctcttgcgcgacctgcttcacttagacccgcgttttttagagcgccacctagcgggcacaatgagttatttcagcccttatcagctcactgttctccacgtagacggggagctgtgtgcgagggatattaggtctttgatatttttaagcaaggacactatagggtctcgcagcacaccacagacattcttacactgggtgtactgtatggaaaacttagacctactgggtcccactgacgtggatgccctaatgtcaatgcttagatctttgtcaagagtagacctacagcgccaagtgcaaaccctaatgggccttcacctttccggcccatcacactcccaacactatcgccatacaccactcgagaccgatttctacgactacaaggacgacgatgacaagactagtggctccggcgagggcagaggaagtctactaacctgcggagatgtggaagaaaatcctggcccacatatgaccgagtacaagcccacggtgcgcctcgccacccgcgacgacgtccccagggccgtacgcaccctcgccgccgcgttcgccgactaccccgccacgcgccacaccgtcgatccggaccgccacatcgagcgggtcaccgagctgcaagaactcttcctcacgcgcgtcgggctcgacatcggcaaggtgtgggtcgcggacgacggcgccgcggtggcggtctggaccacgccggagagcgtcgaagcgggggcggtgttcgccgagatcggcccgcgcatggccgagttgagcggttcccggctggccgcgcagcaacagatggaaggcctcctggcgccgcaccggcccaaggagcccgcgtggttcctggccaccgtcggcgtctcgcccgaccaccagggcaagggtctgggcagcgccgtcgtgctccccggagtggaggcggccgagcgcgccggggtgcccgccttcctggagacctccgcgccccgcaacctccccttctacgagcggctcggcttcaccgtcaccgccgacgtcgaggtgcccgaaggaccgcgcacctggtgcatgacccgcaagcccggtgcctga

SEQ ID NO: 9899 - DNA, 2553 bp, Artificial Sequence
  Synthetic Polynucloetide
atggccttaccagtgaccgccttgctcctgccgctggccttgctgctccacgccgccaggccggacatccagatgacacagagccctagcagcctgtctgccagcgtgggagacagagtgaccatcacatgcaaggccagccaggatgtgggcacagccgtggattggtatcagcagaagcctggcaaggcccctaagctgctgatctactgggccagcacaagacacacaggcgtgcccagcagattttctggcagcggctctggcaccgacttcaccctgacaatatccagcctccagcctgaggacttcgccacctactactgccagcagtacaacagctaccctctgaccttcggccagggcaccaaggtggaaatcaaaagactcgagatccagaaccctgatcctgccgtgtaccagctgcgggatagcaagagcagcgacaagagcgtgtgtctgttcaccgacttcgacagccagaccaacgtgtcccagagcaaggactccgacgtgtacatcaccgataagtgcgtgctggacatgcggagcatggacttcaagagcaactccgccgtggcctggtccaacaagtccgatttcgcctgcgccaacgccttcaacaacagcattatccccgaggacacattcttcccaagcagcgacgtgccctgcgacgtgaagctggtggaaaagagcttcgagacagacaccaacctgaacttccagaacctgagcgtgatcggcttcagaatcctgctgctgaaagtggccggctttaacctgctgatgaccctgcggctgtggtccagccgcgccaagagaagcggatctggcgtgaagcagaccctgaatttcgacctgctgaagctggctggcgacgtggaatccaacccaggccctactagtatggactggatttggcgcatccttttccttgtcggcgctgctaccggcgcgcattccttcgaagaagttcagctgcaacagtctggccccgagctggttaagcctggaacaagcgtgcggatctcctgcaagaccagcggctacaccttcaccgagtacaccatccactgggtcaagcagagccacggcaagagcctggaatggatcggcaacatcaaccccaacaacggcggcaccacctacaaccagaagttcgaggacaaggccacactgaccgtggacaagagcagcagcaccgcctacatggaactgagaagcctgaccagcgaggacagcgccgtgtactattgtgccgccggatggaacttcgactactggggccagggaacaaccctgaccgttagctctacgcgtgaggacctgaagaacgtgttcccacctgaggtggccgtgttcgagcctagcaaggccgagatcgcccacacccagaaagccaccctcgtgtgcctggctaccggcttctaccccgaccatgtggaactgtcttggtgggtcaacggcaaagaggtgcacagcggcgtgtgtaccgacccccagccactgaaagaacagcccgccctgaacgacagccggtactgcctgagcagcagactgagagtgtccgccaccttctggcagaacccccggaaccacttcagatgccaggtgcagttctacggcctgagcgagaacgacgagtggacccaggacagagccaagcccgtgacccagatcgtgtctgccgaagcctggggcagagccgattgcggcatcaccagcgccagctaccaccagggcgtgctgagcgccaccatcctgtacgagatcctgctgggcaaggccaccctgtacgccgtgctggtgtctgccctggtgctgatggctatggtcaagcggaaggacagccggggaagggccaagcgatctggatctggagcaacaaacttctcactactcaaacaagcaggtgacgtggaggagaatcccgggccttctagaggccatatgaccgagtacaagcccacggtgcgcctcgccacccgcgacgacgtccccagggccgtacgcaccctcgccgccgcgttcgccgactaccccgccacgcgccacaccgtcgatccggaccgccacatcgagcgggtcaccgagctgcaagaactcttcctcacgcgcgtcgggctcgacatcggcaaggtgtgggtcgcggacgacggcgccgcggtggcggtctggaccacgccggagagcgtcgaagcgggggcggtgttcgccgagatcggcccgcgcatggccgagttgagcggttcccggctggccgcgcagcaacagatggaaggcctcctggcgccgcaccggcccaaggagcccgcgtggttcctggccaccgtcggcgtctcgcccgaccaccagggcaagggtctgggcagcgccgtcgtgctccccggagtggaggcggccgagcgcgccggggtgcccgccttcctggagacctccgcgccccgcaacctccccttctacgagcggctcggcttcaccgtcaccgccgacgtcgaggtgcccgaaggaccgcgcacctggtgcatgacccgcaagcccggtgcctga

SEQ ID NO: 9900 - DNA, 2550 bp, Artificial Sequence
  Synthetic Polynucloetide
atggccttaccagtgaccgccttgctcctgccgctggccttgctgctccacgccgccaggccggacatccagatgacacagagccctagcagcctgtctgccagcgtgggagacagagtgaccatcacatgcaaggccagccaggatgtgggcacagccgtggattggtatcagcagaagcctggcaaggcccctaagctgctgatctactgggccagcacaagacacacaggcgtgcccagcagattttctggcagcggctctggcaccgacttcaccctgacaatatccagcctccagcctgaggacttcgccacctactactgccagcagtacaacagctaccctctgaccttcggccagggcaccaaggtggaaatcaaaagactcgaggacctgaagaacgtgttcccacctgaggtggccgtgttcgagcctagcaaggccgagatcgcccacacccagaaagccaccctcgtgtgcctggctaccggcttctaccccgaccatgtggaactgtcttggtgggtcaacggcaaagaggtgcacagcggcgtgtgtaccgacccccagccactgaaagaacagcccgccctgaacgacagccggtactgcctgagcagcagactgagagtgtccgccaccttctggcagaacccccggaaccacttcagatgccaggtgcagttctacggcctgagcgagaacgacgagtggacccaggacagagccaagcccgtgacccagatcgtgtctgccgaagcctggggcagagccgattgcggcatcaccagcgccagctaccaccagggcgtgctgagcgccaccatcctgtacgagatcctgctgggcaaggccaccctgtacgccgtgctggtgtctgccctggtgctgatggctatggtcaagcggaaggacagccggggaagggccaagcgatctggatctggagcaacaaacttctcactactcaaacaagcaggtgacgtggaggagaatcccgggcctactagtatggactggatttggcgcatccttttccttgtcggcgctgctaccggcgcgcattccttcgaagaagttcagctgcaacagtctggccccgagctggttaagcctggaacaagcgtgcggatctcctgcaagaccagcggctacaccttcaccgagtacaccatccactgggtcaagcagagccacggcaagagcctggaatggatcggcaacatcaaccccaacaacggcggcaccacctacaaccagaagttcgaggacaaggccacactgaccgtggacaagagcagcagcaccgcctacatggaactgagaagcctgaccagcgaggacagcgccgtgtactattgtgccgccggatggaacttcgactactggggccagggaacaaccctgaccgttagctctacgcgtatccagaaccctgatcctgccgtgtaccagctgcgggatagcaagagcagcgacaagagcgtgtgtctgttcaccgacttcgacagccagaccaacgtgtcccagagcaaggactccgacgtgtacatcaccgataagtgcgtgctggacatgcggagcatggacttcaagagcaactccgccgtggcctggtccaacaagtccgatttcgcctgcgccaacgccttcaacaacagcattatccccgaggacacattcttcccaagcagcgacgtgccctgcgacgtgaagctggtggaaaagagcttcgagacagacaccaacctgaacttccagaacctgagcgtgatcggcttcagaatcctgctgctgaaagtggccggctttaacctgctgatgaccctgcggctgtggtccagccgcgccaagagaagcggatctggcgtgaagcagaccctgaatttcgacctgctgaagctggctggcgacgtggaatccaacccaggcccttctagaggccatatgaccgagtacaagcccacggtgcgcctcgccacccgcgacgacgtccccagggccgtacgcaccctcgccgccgcgttcgccgactaccccgccacgcgccacaccgtcgatccggaccgccacatcgagcgggtcaccgagctgcaagaactcttcctcacgcgcgtcgggctcgacatcggcaaggtgtgggtcgcggacgacggcgccgcggtggcggtctggaccacgccggagagcgtcgaagcgggggcggtgttcgccgagatcggcccgcgcatggccgagttgagcggttcccggctggccgcgcagcaacagatggaaggcctcctggcgccgcaccggcccaaggagcccgcgtggttcctggccaccgtcggcgtctcgcccgaccaccagggcaagggtctgggcagcgccgtcgtgctccccggagtggaggcggccgagcgcgccggggtgcccgccttcctggagacctccgcgccccgcaacctccccttctacgagcggctcggcttcaccgtcaccgccgacgtcgaggtgcccgaaggaccgcgcacctggtgcatgacccgcaagcccggtgcctga

SEQ ID NO: 9901 - DNA, 1848 bp, Artificial Sequence
  Synthetic Polynucloetide
atggccttaccagtgaccgccttgctcctgccgctggccttgctgctccacgccgccaggccggacatccagatgacacagagccctagcagcctgtctgccagcgtgggagacagagtgaccatcacatgcaaggccagccaggatgtgggcacagccgtggattggtatcagcagaagcctggcaaggcccctaagctgctgatctactgggccagcacaagacacacaggcgtgcccagcagattttctggcagcggctctggcaccgacttcaccctgacaatatccagcctccagcctgaggacttcgccacctactactgccagcagtacaacagctaccctctgaccttcggccagggcaccaaggtggaaatcaaaagactcgaggacctgaagaacgtgttcccacctgaggtggccgtgttcgagcctagcgaggccgagatcagccacacccagaaagccaccctcgtgtgcctggctaccggcttctaccccgaccatgtggaactgtcttggtgggtcaacggcaaagaggtgcacagcggcgtgtgtaccgacccccagccactgaaagaacagcccgccctgaacgacagccggtactgcctgagcagcagactgagagtgtccgccaccttctggcagaacccccggaaccacttcagatgccaggtgcagttctacggcctgagcgagaacgacgagtggacccaggacagagccaagcccgtgacccagatcgtgtctgccgaagcctggggcagagccgattgcggctttaccagcgagagctaccagcagggcgtgctgagcgccaccatcctgtacgagatcctgctgggcaaggccaccctgtacgccgtgctggtgtctgccctggtgctgatggctatggtcaagcggaaggacagccggggaagggccaagcgatctggatctggagcaacaaacttctcactactcaaacaagcaggtgacgtggaggagaatcccgggcctactagtatggactggatttggcgcatccttttccttgtcggcgctgctaccggcgcgcattccttcgaagaagttcagctgcaacagtctggccccgagctggttaagcctggaacaagcgtgcggatctcctgcaagaccagcggctacaccttcaccgagtacaccatccactgggtcaagcagagccacggcaagagcctggaatggatcggcaacatcaaccccaacaacggcggcaccacctacaaccagaagttcgaggacaaggccacactgaccgtggacaagagcagcagcaccgcctacatggaactgagaagcctgaccagcgaggacagcgccgtgtactattgtgccgccggatggaacttcgactactggggccagggaacaaccctgaccgttagctctacgcgtatccagaaccctgatcctgccgtgtaccagctgcgggatagcaagagcagcgacaagagcgtgtgtctgttcaccgacttcgacagccagaccaacgtgtcccagagcaaggactccgacgtgtacatcaccgataagtgcgtgctggacatgcggagcatggacttcaagagcaactccgccgtggcctggtccaacaagtccgatttcgcctgcgccaacgccttcaacaacagcattatccccgaggacacattcttcccaagccccgagagcagctgcgacgtgaagctggtggaaaagagcttcgagacagacaccaacctgaacttccagaacctgagcgtgatcggcttcagaatcctgctgctgaaagtggccggctttaacctgctgatgaccctgcggctgtggtccagc

SEQ ID NO: 9902 - DNA, 2523 bp, Artificial Sequence
  Synthetic Polynucloetide
atggccttaccagtgaccgccttgctcctgccgctggccttgctgctccacgccgccaggccggacatccagatgacacagagccctagcagcctgtctgccagcgtgggagacagagtgaccatcacatgcaaggccagccaggatgtgggcacagccgtggattggtatcagcagaagcctggcaaggcccctaagctgctgatctactgggccagcacaagacacacaggcgtgcccagcagattttctggcagcggctctggcaccgacttcaccctgacaatatccagcctccagcctgaggacttcgccacctactactgccagcagtacaacagctaccctctgaccttcggccagggcaccaaggtggaaatcaaaagactcgaggacctgaagaacgtgttcccacctgaggtggccgtgttcgagcctagcgaggccgagatcagccacacccagaaagccaccctcgtgtgcctggctaccggcttctaccccgaccatgtggaactgtcttggtgggtcaacggcaaagaggtgcacagcggcgtgtgtaccgacccccagccactgaaagaacagcccgccctgaacgacagccggtactgcctgagcagcagactgagagtgtccgccaccttctggcagaacccccggaaccacttcagatgccaggtgcagttctacggcctgagcgagaacgacgagtggacccaggacagagccaagcccgtgacccagatcgtgtctgccgaagcctggggcagagccgattgcggctttaccagcgagagctaccagcagggcgtgctgagcgccaccatcctgtacgagatcctgctgggcaaggccaccctgtacgccgtgctggtgtctgccctggtgctgatggctatggtcaagcggaaggacagccggggaagggccaagcgatctggatctggagcaacaaacttctcactactcaaacaagcaggtgacgtggaggagaatcccgggcctactagtatggactggatttggcgcatccttttccttgtcggcgctgctaccggcgcgcattccttcgaagaagttcagctgcaacagtctggccccgagctggttaagcctggaacaagcgtgcggatctcctgcaagaccagcggctacaccttcaccgagtacaccatccactgggtcaagcagagccacggcaagagcctggaatggatcggcaacatcaaccccaacaacggcggcaccacctacaaccagaagttcgaggacaaggccacactgaccgtggacaagagcagcagcaccgcctacatggaactgagaagcctgaccagcgaggacagcgccgtgtactattgtgccgccggatggaacttcgactactggggccagggaacaaccctgaccgttagctctacgcgtatccagaaccctgatcctgccgtgtaccagctgcgggatagcaagagcagcgacaagagcgtgtgtctgttcaccgacttcgacagccagaccaacgtgtcccagagcaaggactccgacgtgtacatcaccgataagtgcgtgctggacatgcggagcatggacttcaagagcaactccgccgtggcctggtccaacaagtccgatttcgcctgcgccaacgccttcaacaacagcattatccccgaggacacattcttcccaagccccgagagcagctgcgacgtgaagctggtggaaaagagcttcgagacagacaccaacctgaacttccagaacctgagcgtgatcggcttcagaatcctgctgctgaaagtggccggctttaacctgctgatgaccctgcggctgtggtccagccgcgccaagagaagcggatctggcgtgaagcagaccctgaatttcgacctgctgaagctggctggcgacgtggaatccaacccaggcccttctagaggcgggatccacaccatggctacctacgaggtgctgtgcgaggtggcaagaaagctgggcaccgacgacagagaagtggtgctgttcctgctgaacgtgttcatccctcagcctacactggcccagctgatcggtgcactgagagccctgaaagaggaaggccggctgacctttcctctgctggccgaatgcctgttcagagccggaagaagggatctgctgcgggacctgctgcatctggaccccagatttctggaaagacacctggccggcaccatgagctacttcagcccttaccagctgaccgtgctgcacgttgacggcgaactgtgcgccagagatattcggagcctgatcttcctgagcaaggacaccatcggcagccggtctacccctcagacatttctgcactgggtgtactgcatggaaaacctggacctgctcggccccacagatgtggatgccctgatgtccatgctgagaagcctgagcagagtggacctccagagacaggtgcagacactgatgggactgcacctgagcggacctagccacagccagcactacagacacacccct

SEQ ID NO: 9903 - DNA, 1860 bp, Artificial Sequence
  Synthetic Polynucloetide
atggccttaccagtgaccgccttgctcctgccgctggccttgctgctccacgccgccaggccggacatccagatgacacagagccctagcagcctgtctgccagcgtgggagacagagtgaccatcacatgcaaggccagccaggatgtgggcacagccgtggattggtatcagcagaagcctggcaaggcccctaagctgctgatctactgggccagcacaagacacacaggcgtgcccagcagattttctggcagcggctctggcaccgacttcaccctgacaatatccagcctccagcctgaggacttcgccacctactactgccagcagtacaacagctaccctctgaccttcggccagggcaccaaggtggaaatcaaaagactcgagatccagaaccctgatcctgccgtgtaccagctgcgggatagcaagagcagcgacaagagcgtgtgtctgttcaccgacttcgacagccagaccaacgtgtcccagagcaaggactccgacgtgtacatcaccgataagtgcgtgctggacatgcggagcatggacttcaagagcaactccgccgtggcctggtccaacaagtccgatttcgcctgcgccaacgccttcaacaacagcattatccccgaggacacattcttcccaagccccgagagcagctgcgacgtgaagctggtggaaaagagcttcgagacagacaccaacctgaacttccagaacctgagcgtgatcggcttcagaatcctgctgctgaaagtggccggctttaacctgctgatgaccctgcggctgtggtccagccgcgccaagagaagcggatctggcgtgaagcagaccctgaatttcgacctgctgaagctggctggcgacgtggaatccaacccaggccctactagtatggactggatttggcgcatccttttccttgtcggcgctgctaccggcgcgcattccttcgaagaagttcagctgcaacagtctggccccgagctggttaagcctggaacaagcgtgcggatctcctgcaagaccagcggctacaccttcaccgagtacaccatccactgggtcaagcagagccacggcaagagcctggaatggatcggcaacatcaaccccaacaacggcggcaccacctacaaccagaagttcgaggacaaggccacactgaccgtggacaagagcagcagcaccgcctacatggaactgagaagcctgaccagcgaggacagcgccgtgtactattgtgccgccggatggaacttcgactactggggccagggaacaaccctgaccgttagctctacgcgtgaggacctgaagaacgtgttcccacctgaggtggccgtgttcgagcctagcgaggccgagatcagccacacccagaaagccaccctcgtgtgcctggctaccggcttctaccccgaccatgtggaactgtcttggtgggtcaacggcaaagaggtgcacagcggcgtgtgtaccgacccccagccactgaaagaacagcccgccctgaacgacagccggtactgcctgagcagcagactgagagtgtccgccaccttctggcagaacccccggaaccacttcagatgccaggtgcagttctacggcctgagcgagaacgacgagtggacccaggacagagccaagcccgtgacccagatcgtgtctgccgaagcctggggcagagccgattgcggctttaccagcgagagctaccagcagggcgtgctgagcgccaccatcctgtacgagatcctgctgggcaaggccaccctgtacgccgtgctggtgtctgccctggtgctgatggctatggtcaagcggaaggacagccgggga

SEQ ID NO: 9904 - DNA, 2526 bp, Artificial Sequence
  Synthetic Polynucloetide
atggccttaccagtgaccgccttgctcctgccgctggccttgctgctccacgccgccaggccggacatccagatgacacagagccctagcagcctgtctgccagcgtgggagacagagtgaccatcacatgcaaggccagccaggatgtgggcacagccgtggattggtatcagcagaagcctggcaaggcccctaagctgctgatctactgggccagcacaagacacacaggcgtgcccagcagattttctggcagcggctctggcaccgacttcaccctgacaatatccagcctccagcctgaggacttcgccacctactactgccagcagtacaacagctaccctctgaccttcggccagggcaccaaggtggaaatcaaaagactcgagatccagaaccctgatcctgccgtgtaccagctgcgggatagcaagagcagcgacaagagcgtgtgtctgttcaccgacttcgacagccagaccaacgtgtcccagagcaaggactccgacgtgtacatcaccgataagtgcgtgctggacatgcggagcatggacttcaagagcaactccgccgtggcctggtccaacaagtccgatttcgcctgcgccaacgccttcaacaacagcattatccccgaggacacattcttcccaagccccgagagcagctgcgacgtgaagctggtggaaaagagcttcgagacagacaccaacctgaacttccagaacctgagcgtgatcggcttcagaatcctgctgctgaaagtggccggctttaacctgctgatgaccctgcggctgtggtccagccgcgccaagagaagcggatctggcgtgaagcagaccctgaatttcgacctgctgaagctggctggcgacgtggaatccaacccaggccctactagtatggactggatttggcgcatccttttccttgtcggcgctgctaccggcgcgcattccttcgaagaagttcagctgcaacagtctggccccgagctggttaagcctggaacaagcgtgcggatctcctgcaagaccagcggctacaccttcaccgagtacaccatccactgggtcaagcagagccacggcaagagcctggaatggatcggcaacatcaaccccaacaacggcggcaccacctacaaccagaagttcgaggacaaggccacactgaccgtggacaagagcagcagcaccgcctacatggaactgagaagcctgaccagcgaggacagcgccgtgtactattgtgccgccggatggaacttcgactactggggccagggaacaaccctgaccgttagctctacgcgtgaggacctgaagaacgtgttcccacctgaggtggccgtgttcgagcctagcgaggccgagatcagccacacccagaaagccaccctcgtgtgcctggctaccggcttctaccccgaccatgtggaactgtcttggtgggtcaacggcaaagaggtgcacagcggcgtgtgtaccgacccccagccactgaaagaacagcccgccctgaacgacagccggtactgcctgagcagcagactgagagtgtccgccaccttctggcagaacccccggaaccacttcagatgccaggtgcagttctacggcctgagcgagaacgacgagtggacccaggacagagccaagcccgtgacccagatcgtgtctgccgaagcctggggcagagccgattgcggctttaccagcgagagctaccagcagggcgtgctgagcgccaccatcctgtacgagatcctgctgggcaaggccaccctgtacgccgtgctggtgtctgccctggtgctgatggctatggtcaagcggaaggacagccggggaagggccaagcgatctggatctggagcaacaaacttctcactactcaaacaagcaggtgacgtggaggagaatcccgggccttctagaggcgggatccacaccatggctacctacgaggtgctgtgcgaggtggcaagaaagctgggcaccgacgacagagaagtggtgctgttcctgctgaacgtgttcatccctcagcctacactggcccagctgatcggtgcactgagagccctgaaagaggaaggccggctgacctttcctctgctggccgaatgcctgttcagagccggaagaagggatctgctgcgggacctgctgcatctggaccccagatttctggaaagacacctggccggcaccatgagctacttcagcccttaccagctgaccgtgctgcacgttgacggcgaactgtgcgccagagatattcggagcctgatcttcctgagcaaggacaccatcggcagccggtctacccctcagacatttctgcactgggtgtactgcatggaaaacctggacctgctcggccccacagatgtggatgccctgatgtccatgctgagaagcctgagcagagtggacctccagagacaggtgcagacactgatgggactgcacctgagcggacctagccacagccagcactacagacacacccct

SEQ ID NO: 9905 - DNA, 2685 bp, Artificial Sequence
  Synthetic Polynucloetide
atggccttaccagtgaccgccttgctcctgccgctggccttgctgctccacgccgccaggccgctcgaggggaaaccaattcccaaccctcttctgggactggattcaaccggcagcggcgaggacctgaagaacgtgttcccacctgaggtggccgtgttcgagcctagcaaggccgagatcgcccacacccagaaagccaccctcgtgtgcctggctaccggcttctaccccgaccatgtggaactgtcttggtgggtcaacggcaaagaggtgcacagcggcgtgtgtaccgacccccagccactgaaagaacagcccgccctgaacgacagccggtactgcctgagcagcagactgagagtgtccgccaccttctggcagaacccccggaaccacttcagatgccaggtgcagttctacggcctgagcgagaacgacgagtggacccaggacagagccaagcccgtgacccagatcgtgtctgccgaagcctggggcagagccgattgcggcatcaccagcgccagctaccaccagggcgtgctgagcgccaccatcctgtacgagatcctgctgggcaaggccaccctgtacgccgtgctggtgtctgccctggtgctgatggctatggtcaagcggaaggacagccggggaagggccaagcgatctggatctggagcaacaaacttctcactactcaaacaagcaggtgacgtggaggagaatcccgggcctactagcatggccttaccagtgaccgccttgctcctgccgctggccttgctgctccacgccgccaggccggacatccagatgacacagagccctagcagcctgtctgccagcgtgggagacagagtgaccatcacatgcaaggccagccaggatgtgggcacagccgtggattggtatcagcagaagcctggcaaggcccctaagctgctgatctactgggccagcacaagacacacaggcgtgcccagcagattttctggcagcggctctggcaccgacttcaccctgacaatatccagcctccagcctgaggacttcgccacctactactgccagcagtacaacagctaccctctgaccttcggccagggcaccaaggtggaaatcaaaagaggcggaggcggaagtggaggcggaggatctggcggcggaggctctgaagttcagctgcaacagtctggccccgagctggttaagcctggaacaagcgtgcggatctcctgcaagaccagcggctacaccttcaccgagtacaccatccactgggtcaagcagagccacggcaagagcctggaatggatcggcaacatcaaccccaacaacggcggcaccacctacaaccagaagttcgaggacaaggccacactgaccgtggacaagagcagcagcaccgcctacatggaactgagaagcctgaccagcgaggacagcgccgtgtactattgtgccgccggatggaacttcgactactggggccagggaacaaccctgaccgttagctctacgcgtgagcagaaactgatctcggaagaggatgggagcggcatccagaaccctgatcctgccgtgtaccagctgcgggatagcaagagcagcgacaagagcgtgtgtctgttcaccgacttcgacagccagaccaacgtgtcccagagcaaggactccgacgtgtacatcaccgataagtgcgtgctggacatgcggagcatggacttcaagagcaactccgccgtggcctggtccaacaagtccgatttcgcctgcgccaacgccttcaacaacagcattatccccgaggacacattcttcccaagcagcgacgtgccctgcgacgtgaagctggtggaaaagagcttcgagacagacaccaacctgaacttccagaacctgagcgtgatcggcttcagaatcctgctgctgaaagtggccggctttaacctgctgatgaccctgcggctgtggtccagccgcgccaagagaagcggatctggcgtgaagcagaccctgaatttcgacctgctgaagctggctggcgacgtggaatccaacccaggcccttctagaggccatatgaccgagtacaagcccacggtgcgcctcgccacccgcgacgacgtccccagggccgtacgcaccctcgccgccgcgttcgccgactaccccgccacgcgccacaccgtcgatccggaccgccacatcgagcgggtcaccgagctgcaagaactcttcctcacgcgcgtcgggctcgacatcggcaaggtgtgggtcgcggacgacggcgccgcggtggcggtctggaccacgccggagagcgtcgaagcgggggcggtgttcgccgagatcggcccgcgcatggccgagttgagcggttcccggctggccgcgcagcaacagatggaaggcctcctggcgccgcaccggcccaaggagcccgcgtggttcctggccaccgtcggcgtctcgcccgaccaccagggcaagggtctgggcagcgccgtcgtgctccccggagtggaggcggccgagcgcgccggggtgcccgccttcctggagacctccgcgccccgcaacctccccttctacgagcggctcggcttcaccgtcaccgccgacgtcgaggtgcccgaaggaccgcgcacctggtgcatgacccgcaagcccggtgcctga

SEQ ID NO: 9906 - DNA, 2688 bp, Artificial Sequence
  Synthetic Polynucloetide
atggccttaccagtgaccgccttgctcctgccgctggccttgctgctccacgccgccaggccgctcgagcagaaactgatctcggaagaggatctgggctccggcgatcgccctgatcctgccgtgtaccagctgcgggatagcaagagcagcgacaagagcgtgtgtctgttcaccgacttcgacagccagaccaacgtgtcccagagcaaggactccgacgtgtacatcaccgataagtgcgtgctggacatgcggagcatggacttcaagagcaactccgccgtggcctggtccaacaagtccgatttcgcctgcgccaacgccttcaacaacagcattatccccgaggacacattcttcccaagccccgagagcagctgcgacgtgaagctggtggaaaagagcttcgagacagacaccaacctgaacttccagaacctgagcgtgatcggcttcagaatcctgctgctgaaagtggccggctttaacctgctgatgaccctgcggctgtggtccagctctagtcgcgccaagagaagcggatctggcgtgaagcagaccctgaatttcgacctgctgaagctggctggcgacgtggaatccaacccaggccccactagcatggccttaccagtgaccgccttgctcctgccgctggccttgctgctccacgccgccaggccggacatccagatgacacagagccctagcagcctgtctgccagcgtgggagacagagtgaccatcacatgcaaggccagccaggatgtgggcacagccgtggattggtatcagcagaagcctggcaaggcccctaagctgctgatctactgggccagcacaagacacacaggcgtgcccagcagattttctggcagcggctctggcaccgacttcaccctgacaatatccagcctccagcctgaggacttcgccacctactactgccagcagtacaacagctaccctctgaccttcggccagggcaccaaggtggaaatcaaaagaggcggaggcggaagtggaggcggaggatctggcggcggaggctctgaagttcagctgcaacagtctggccccgagctggttaagcctggaacaagcgtgcggatctcctgcaagaccagcggctacaccttcaccgagtacaccatccactgggtcaagcagagccacggcaagagcctggaatggatcggcaacatcaaccccaacaacggcggcaccacctacaaccagaagttcgaggacaaggccacactgaccgtggacaagagcagcagcaccgcctacatggaactgagaagcctgaccagcgaggacagcgccgtgtactattgtgccgccggatggaacttcgactactggggccagggaacaaccctgaccgttagctctacgcgtgggaaaccaattcccaaccctcttctgggactggattcaaccggcagcggcgaggacctgaagaacgtgttcccacctgaggtggccgtgttcgagcctagcgaggccgagatcagccacacccagaaagccaccctcgtgtgcctggctaccggcttctaccccgaccatgtggaactgtcttggtgggtcaacggcaaagaggtgcacagcggcgtgtgtaccgacccccagccactgaaagaacagcccgccctgaacgacagccggtactgcctgagcagcagactgagagtgtccgccaccttctggcagaacccccggaaccacttcagatgccaggtgcagttctacggcctgagcgagaacgacgagtggacccaggacagagccaagcccgtgacccagatcgtgtctgccgaagcctggggcagagccgattgcggctttaccagcgagagctaccagcagggcgtgctgagcgccaccatcctgtacgagatcctgctgggcaaggccaccctgtacgccgtgctggtgtctgccctggtgctgatggctatggtcaagcggaaggacagccggggaagggccaagcgatctggatctggagcaacaaacttctcactactcaaacaagcaggtgacgtggaggagaatcccgggccttctagaggccatatgaccgagtacaagcccacggtgcgcctcgccacccgcgacgacgtccccagggccgtacgcaccctcgccgccgcgttcgccgactaccccgccacgcgccacaccgtcgatccggaccgccacatcgagcgggtcaccgagctgcaagaactcttcctcacgcgcgtcgggctcgacatcggcaaggtgtgggtcgcggacgacggcgccgcggtggcggtctggaccacgccggagagcgtcgaagcgggggcggtgttcgccgagatcggcccgcgcatggccgagttgagcggttcccggctggccgcgcagcaacagatggaaggcctcctggcgccgcaccggcccaaggagcccgcgtggttcctggccaccgtcggcgtctcgcccgaccaccagggcaagggtctgggcagcgccgtcgtgctccccggagtggaggcggccgagcgcgccggggtgcccgccttcctggagacctccgcgccccgcaacctccccttctacgagcggctcggcttcaccgtcaccgccgacgtcgaggtgcccgaaggaccgcgcacctggtgcatgacccgcaagcccggtgcctga

SEQ ID NO: 9907 - DNA, 2550 bp, Artificial Sequence
  Synthetic Polynucloetide
atggccttaccagtgaccgccttgctcctgccgctggccttgctgctccacgccgccaggccggacatccagatgacacagagccctagcagcctgtctgccagcgtgggagacagagtgaccatcacatgcaaggccagccaggatgtgggcacagccgtggattggtatcagcagaagcctggcaaggcccctaagctgctgatctactgggccagcacaagacacacaggcgtgcccagcagattttctggcagcggctctggcaccgacttcaccctgacaatatccagcctccagcctgaggacttcgccacctactactgccagcagtacaacagctaccctctgaccttcggccagggcaccaaggtggaaatcaaaagactcgaggacctgaagaacgtgttcccacctgaggtggccgtgttcgagcctagcgaggccgagatcagccacacccagaaagccaccctcgtgtgcctggctaccggcttctaccccgaccatgtggaactgtcttggtgggtcaacggcaaagaggtgcacagcggcgtgtctaccgacccccagccactgaaagaacagcccgccctgaacgacagccggtactgcctgagcagcagactgagagtgtccgccaccttctggcagaacccccggaaccacttcagatgccaggtgcagttctacggcctgagcgagaacgacgagtggacccaggacagagccaagcccgtgacccagatcgtgtctgccgaagcctggggcagagccgattgcggctttaccagcgagagctaccagcagggcgtgctgagcgccaccatcctgtacgagatcctgctgggcaaggccaccctgtacgccgtgctggtgtctgccctggtgctgatggctatggtcaagcggaaggacagccggggaagggccaagcgatctggatctggagcaacaaacttctcactactcaaacaagcaggtgacgtggaggagaatcccgggcctactagtatggactggatttggcgcatccttttccttgtcggcgctgctaccggcgcgcattccttcgaagaagttcagctgcaacagtctggccccgagctggttaagcctggaacaagcgtgcggatctcctgcaagaccagcggctacaccttcaccgagtacaccatccactgggtcaagcagagccacggcaagagcctggaatggatcggcaacatcaaccccaacaacggcggcaccacctacaaccagaagttcgaggacaaggccacactgaccgtggacaagagcagcagcaccgcctacatggaactgagaagcctgaccagcgaggacagcgccgtgtactattgtgccgccggatggaacttcgactactggggccagggaacaaccctgaccgttagctctacgcgtatccagaaccctgatcctgccgtgtaccagctgcgggatagcaagagcagcgacaagagcgtgtgtctgttcaccgacttcgacagccagaccaacgtgtcccagagcaaggactccgacgtgtacatcaccgataagaccgtgctggacatgcggagcatggacttcaagagcaactccgccgtggcctggtccaacaagtccgatttcgcctgcgccaacgccttcaacaacagcattatccccgaggacacattcttcccaagccccgagagcagctgcgacgtgaagctggtggaaaagagcttcgagacagacaccaacctgaacttccagaacctgagcgtgatcggcttcagaatcctgctgctgaaagtggccggctttaacctgctgatgaccctgcggctgtggtccagccgcgccaagagaagcggatctggcgtgaagcagaccctgaatttcgacctgctgaagctggctggcgacgtggaatccaacccaggcccttctagaggccatatgaccgagtacaagcccacggtgcgcctcgccacccgcgacgacgtccccagggccgtacgcaccctcgccgccgcgttcgccgactaccccgccacgcgccacaccgtcgatccggaccgccacatcgagcgggtcaccgagctgcaagaactcttcctcacgcgcgtcgggctcgacatcggcaaggtgtgggtcgcggacgacggcgccgcggtggcggtctggaccacgccggagagcgtcgaagcgggggcggtgttcgccgagatcggcccgcgcatggccgagttgagcggttcccggctggccgcgcagcaacagatggaaggcctcctggcgccgcaccggcccaaggagcccgcgtggttcctggccaccgtcggcgtctcgcccgaccaccagggcaagggtctgggcagcgccgtcgtgctccccggagtggaggcggccgagcgcgccggggtgcccgccttcctggagacctccgcgccccgcaacctccccttctacgagcggctcggcttcaccgtcaccgccgacgtcgaggtgcccgaaggaccgcgcacctggtgcatgacccgcaagcccggtgcctga

SEQ ID NO: 9908 - DNA, 2796 bp, Artificial Sequence
  Synthetic Polynucloetide
atggccttaccagtgaccgccttgctcctgccgctggccttgctgctccacgccgccaggccggacatccagatgacacagagccctagcagcctgtctgccagcgtgggagacagagtgaccatcacatgcaaggccagccaggatgtgggcacagccgtggattggtatcagcagaagcctggcaaggcccctaagctgctgatctactgggccagcacaagacacacaggcgtgcccagcagattttctggcagcggctctggcaccgacttcaccctgacaatatccagcctccagcctgaggacttcgccacctactactgccagcagtacaacagctaccctctgaccttcggccagggcaccaaggtggaaatcaaaagactcgaggacctgaagaacgtgttcccacctgaggtggccgtgttcgagcctagcgaggccgagatcagccacacccagaaagccaccctcgtgtgcctggctaccggcttctaccccgaccatgtggaactgtcttggtgggtcaacggcaaagaggtgcacagcggcgtgtctaccgacccccagccactgaaagaacagcccgccctgaacgacagccggtactgcctgagcagcagactgagagtgtccgccaccttctggcagaacccccggaaccacttcagatgccaggtgcagttctacggcctgagcgagaacgacgagtggacccaggacagagccaagcccgtgacccagatcgtgtctgccgaagcctggggcagagccgattgcggctttaccagcgagagctaccagcagggcgtgctgagcgccaccatcctgtacgagatcctgctgggcaaggccaccctgtacgccgtgctggtgtctgccctggtgctgatggctatggtcaagcggaaggacagccggggaagggccaagcgatctggatctggagcaacaaacttctcactactcaaacaagcaggtgacgtggaggagaatcccgggcctactagtatggactggatttggcgcatccttttccttgtcggcgctgctaccggcgcgcattccttcgaagaagttcagctgcaacagtctggccccgagctggttaagcctggaacaagcgtgcggatctcctgcaagaccagcggctacaccttcaccgagtacaccatccactgggtcaagcagagccacggcaagagcctggaatggatcggcaacatcaaccccaacaacggcggcaccacctacaaccagaagttcgaggacaaggccacactgaccgtggacaagagcagcagcaccgcctacatggaactgagaagcctgaccagcgaggacagcgccgtgtactattgtgccgccggatggaacttcgactactggggccagggaacaaccctgaccgttagctctacgcgtgagcagaaactgatctcggaagaggatgggagcggcaccccattcccttctctggcccctcccatcatgctgctggtggacggcaagcagcagatggtggtcgtgtgcctggtgctggatgtggccccacctggactggacagccccatctggtttagcgccggcaatggctctgccctggacgcctttacctacggcccaagccctgccaccgatggcacctggacaaatctggcccacctgagcctgcccagcgaggaactggcttcttgggagcctctcgtgtgccacacaggacctggcgctgagggacacagcagatccacccagcctatgcacctgtctggcgaggccagcaccgccagaacctgtcctcaggaacctctgagaggcacccctggcggagcactgtggctgggagtgctgagactgctgctgttcaagctgctgctgtttgacctgctgctgacctgctcctgtctgtgcgatcctgccggccctctgccttctcctgccaccaccacaagactgagagccctgggcagccacagactgcaccctgccacagagacaggcggcagagaggccacaagcagccctagaccccagcccagagacagaagatggggcgataccccccctggcagaaagcctggatctccagtccgcgccaagagaagcggatctggcgtgaagcagaccctgaatttcgacctgctgaagctggctggcgacgtggaatccaacccaggcccttctagaggccatatgaccgagtacaagcccacggtgcgcctcgccacccgcgacgacgtccccagggccgtacgcaccctcgccgccgcgttcgccgactaccccgccacgcgccacaccgtcgatccggaccgccacatcgagcgggtcaccgagctgcaagaactcttcctcacgcgcgtcgggctcgacatcggcaaggtgtgggtcgcggacgacggcgccgcggtggcggtctggaccacgccggagagcgtcgaagcgggggcggtgttcgccgagatcggcccgcgcatggccgagttgagcggttcccggctggccgcgcagcaacagatggaaggcctcctggcgccgcaccggcccaaggagcccgcgtggttcctggccaccgtcggcgtctcgcccgaccaccagggcaagggtctgggcagcgccgtcgtgctccccggagtggaggcggccgagcgcgccggggtgcccgccttcctggagacctccgcgccccgcaacctccccttctacgagcggctcggcttcaccgtcaccgccgacgtcgaggtgcccgaaggaccgcgcacctggtgcatgacccgcaagcccggtgcctga

SEQ ID NO: 9909 - DNA, 2850 bp, Artificial Sequence
  Synthetic Polynucloetide
atggccttaccagtgaccgccttgctcctgccgctggccttgctgctccacgccgccaggccgctcgaggacctgaagaacgtgttcccacctgaggtggccgtgttcgagcctagcgaggccgagatcagccacacccagaaagccaccctcgtgtgcctggctaccggcttctaccccgaccatgtggaactgtcttggtgggtcaacggcaaagaggtgcacagcggcgtgtctaccgacccccagccactgaaagaacagcccgccctgaacgacagccggtactgcctgagcagcagactgagagtgtccgccaccttctggcagaacccccggaaccacttcagatgccaggtgcagttctacggcctgagcgagaacgacgagtggacccaggacagagccaagcccgtgacccagatcgtgtctgccgaagcctggggcagagccgattgcggctttaccagcgagagctaccagcagggcgtgctgagcgccaccatcctgtacgagatcctgctgggcaaggccaccctgtacgccgtgctggtgtctgccctggtgctgatggctatggtcaagcggaaggacagccggggaagggccaagcgatctggatctggagcaacaaacttctcactactcaaacaagcaggtgacgtggaggagaatcccgggcctactagcatggccttaccagtgaccgccttgctcctgccgctggccttgctgctccacgccgccaggccggacatccagatgacacagagccctagcagcctgtctgccagcgtgggagacagagtgaccatcacatgcaaggccagccaggatgtgggcacagccgtggattggtatcagcagaagcctggcaaggcccctaagctgctgatctactgggccagcacaagacacacaggcgtgcccagcagattttctggcagcggctctggcaccgacttcaccctgacaatatccagcctccagcctgaggacttcgccacctactactgccagcagtacaacagctaccctctgaccttcggccagggcaccaaggtggaaatcaaaagaggcggaggcggaagtggaggcggaggatctggcggcggaggctctgaagttcagctgcaacagtctggccccgagctggttaagcctggaacaagcgtgcggatctcctgcaagaccagcggctacaccttcaccgagtacaccatccactgggtcaagcagagccacggcaagagcctggaatggatcggcaacatcaaccccaacaacggcggcaccacctacaaccagaagttcgaggacaaggccacactgaccgtggacaagagcagcagcaccgcctacatggaactgagaagcctgaccagcgaggacagcgccgtgtactattgtgccgccggatggaacttcgactactggggccagggaacaaccctgaccgttagctctacgcgtgagcagaaactgatctcggaagaggatctggggagcggcaccccattcccttctctggcccctcccatcatgctgctggtggacggcaagcagcagatggtggtcgtgtgcctggtgctggatgtggccccacctggactggacagccccatctggtttagcgccggcaatggctctgccctggacgcctttacctacggcccaagccctgccaccgatggcacctggacaaatctggcccacctgagcctgcccagcgaggaactggcttcttgggagcctctcgtgtgccacacaggacctggcgctgagggacacagcagatccacccagcctatgcacctgtctggcgaggccagcaccgccagaacctgtcctcaggaacctctgagaggcacccctggcggagcactgtggctgggagtgctgagactgctgctgttcaagctgctgctgtttgacctgctgctgacctgctcctgtctgtgcgatcctgccggccctctgccttctcctgccaccaccacaagactgagagccctgggcagccacagactgcaccctgccacagagacaggcggcagagaggccacaagcagccctagaccccagcccagagacagaagatggggcgataccccccctggcagaaagcctggatctccagtccgcgccaagagaagcggatctggcgtgaagcagaccctgaatttcgacctgctgaagctggctggcgacgtggaatccaacccaggcccttctagatctagaggccatatgaccgagtacaagcccacggtgcgcctcgccacccgcgacgacgtccccagggccgtacgcaccctcgccgccgcgttcgccgactaccccgccacgcgccacaccgtcgatccggaccgccacatcgagcgggtcaccgagctgcaagaactcttcctcacgcgcgtcgggctcgacatcggcaaggtgtgggtcgcggacgacggcgccgcggtggcggtctggaccacgccggagagcgtcgaagcgggggcggtgttcgccgagatcggcccgcgcatggccgagttgagcggttcccggctggccgcgcagcaacagatggaaggcctcctggcgccgcaccggcccaaggagcccgcgtggttcctggccaccgtcggcgtctcgcccgaccaccagggcaagggtctgggcagcgccgtcgtgctccccggagtggaggcggccgagcgcgccggggtgcccgccttcctggagacctccgcgccccgcaacctccccttctacgagcggctcggcttcaccgtcaccgccgacgtcgaggtgcccgaaggaccgcgcacctggtgcatgacccgcaagcccggtgcctga

SEQ ID NO: 9910 - DNA, 2661 bp, Artificial Sequence
  Synthetic Polynucloetide
atggccttaccagtgaccgccttgctcctgccgctggccttgctgctccacgccgccaggccggacatccagatgacacagagccctagcagcctgtctgccagcgtgggagacagagtgaccatcacatgcaaggccagccaggatgtgggcacagccgtggattggtatcagcagaagcctggcaaggcccctaagctgctgatctactgggccagcacaagacacacaggcgtgcccagcagattttctggcagcggctctggcaccgacttcaccctgacaatatccagcctccagcctgaggacttcgccacctactactgccagcagtacaacagctaccctctgaccttcggccagggcaccaaggtggaaatcaaaagactcgaggggaaaccaattcccaaccctcttctgggactggattcaaccggcagcggcgacaagcagctggacgccgacgtgtcccccaagcctaccatcttcctgccctctatcgccgagacaaagctccagaaggccggcacctacctgtgcctgctggaaaagttcttcccagatgtgattaagatccactggcaggaaaagaagtccaacaccatcctgggcagccaggaaggcaacaccatgaagaccaacgacacctacatgaagttcagctggctgaccgtgcccgagaagtccctggacaaagaacacagatgcatcgtgcggcacgaaaacaacaagaacggcgtggaccaggaaatcatcttcccacccatcaagaccgatgtgattacaatggaccccaaggacaactgctccaaggacgccaacgataccctgctgctccagctgaccaacaccagcgcctactacatgtacttgttgctgctgctgaagtccgtggtgtacttcgccatcatcacatgctgcctgctgcggagaaccgccttctgctgcaacggcgagaagtctagggccaagcgatctggatctggagcaacaaacttctcactactcaaacaagcaggtgacgtggaggagaatcccgggcctactagtatggactggatttggcgcatccttttccttgtcggcgctgctaccggcgcgcattccttcgaagaagttcagctgcaacagtctggccccgagctggttaagcctggaacaagcgtgcggatctcctgcaagaccagcggctacaccttcaccgagtacaccatccactgggtcaagcagagccacggcaagagcctggaatggatcggcaacatcaaccccaacaacggcggcaccacctacaaccagaagttcgaggacaaggccacactgaccgtggacaagagcagcagcaccgcctacatggaactgagaagcctgaccagcgaggacagcgccgtgtactattgtgccgccggatggaacttcgactactggggccagggaacaaccctgaccgttagctctacgcgtgagcagaaactgatctcggaagaggatgggagcggcagccagcctcacaccaagcccagcgtgttcgtgatgaagaacggcaccaacgtggcctgcctcgtgaaagagttctaccccaaggacatcaggatcaacctggtgtccagcaagaagatcaccgagttcgaccccgccatcgtgatctcccccagcggcaagtacaacgccgtgaagctggggaagtacgaggacagcaacagcgtgacctgctccgtgcagcacgacaacaagaccgtgcacagcaccgactttgaagtgaaaaccgactccaccgaccacgtgaagcccaaagagacagagaacaccaagcagcccagcaagagctgccacaagcccaaggccatcgtgcacaccgagaaagtgaacatgatgagcctgaccgtgctgggcctgcggatgctgttcgccaaaaccgtggccgtgaacttcctgctgaccgccaagctgttcttcctccgcgccaagagaagcggatctggcgtgaagcagaccctgaatttcgacctgctgaagctggctggcgacgtggaatccaacccaggcccttctagaggccatatgaccgagtacaagcccacggtgcgcctcgccacccgcgacgacgtccccagggccgtacgcaccctcgccgccgcgttcgccgactaccccgccacgcgccacaccgtcgatccggaccgccacatcgagcgggtcaccgagctgcaagaactcttcctcacgcgcgtcgggctcgacatcggcaaggtgtgggtcgcggacgacggcgccgcggtggcggtctggaccacgccggagagcgtcgaagcgggggcggtgttcgccgagatcggcccgcgcatggccgagttgagcggttcccggctggccgcgcagcaacagatggaaggcctcctggcgccgcaccggcccaaggagcccgcgtggttcctggccaccgtcggcgtctcgcccgaccaccagggcaagggtctgggcagcgccgtcgtgctccccggagtggaggcggccgagcgcgccggggtgcccgccttcctggagacctccgcgccccgcaacctccccttctacgagcggctcggcttcaccgtcaccgccgacgtcgaggtgcccgaaggaccgcgcacctggtgcatgacccgcaagcccggtgcctga

SEQ ID NO: 9911 - DNA, 1872 bp, Artificial Sequence
  Synthetic Polynucloetide
atggccttaccagtgaccgccttgctcctgccgctggccttgctgctccacgccgccaggccggacatccagatgacacagagccctagcagcctgtctgccagcgtgggagacagagtgaccatcacatgcaaggccagccaggatgtgggcacagccgtggattggtatcagcagaagcctggcaaggcccctaagctgctgatctactgggccagcacaagacacacaggcgtgcccagcagattttctggcagcggctctggcaccgacttcaccctgacaatatccagcctccagcctgaggacttcgccacctactactgccagcagtacaacagctaccctctgaccttcggccagggcaccaaggtggaaatcaaaagactcgagagccagcctcacaccaagcccagcgtgttcgtgatgaagaacggcaccaacgtggcctgcctcgtgaaagagttctaccccaaggacatcaggatcaacctggtgtccagcaagaagatcaccgagttcgaccccgccatcgtgatctcccccagcggcaagtacaacgccgtgaagctggggaagtacgaggacagcaacagcgtgacctgctccgtgcagcacgacaacaagaccgtgcacagcaccgactttgaagtgaaaaccgactccaccgaccacgtgaagcccaaagagacagagaacaccaagcagcccagcaagagctgccacaagcccaaggccatcgtgcacaccgagaaagtgaacatgatgagcctgaccgtgctgggcctgcggatgctgttcgccaaaaccgtggccgtgaacttcctgctgaccgccaagctgttcttcctcagggccaagcgatctggatctggagcaacaaacttctcactactcaaacaagcaggtgacgtggaggagaatcccgggcctactagtatggactggatttggcgcatccttttccttgtcggcgctgctaccggcgcgcattccttcgaagaagttcagctgcaacagtctggccccgagctggttaagcctggaacaagcgtgcggatctcctgcaagaccagcggctacaccttcaccgagtacaccatccactgggtcaagcagagccacggcaagagcctggaatggatcggcaacatcaaccccaacaacggcggcaccacctacaaccagaagttcgaggacaaggccacactgaccgtggacaagagcagcagcaccgcctacatggaactgagaagcctgaccagcgaggacagcgccgtgtactattgtgccgccggatggaacttcgactactggggccagggaacaaccctgaccgttagctctacgcgtgacaagcagctggacgccgacgtgtcccccaagcctaccatcttcctgccctctatcgccgagacaaagctccagaaggccggcacctacctgtgcctgctggaaaagttcttcccagatgtgattaagatccactggcaggaaaagaagtccaacaccatcctgggcagccaggaaggcaacaccatgaagaccaacgacacctacatgaagttcagctggctgaccgtgcccgagaagtccctggacaaagaacacagatgcatcgtgcggcacgaaaacaacaagaacggcgtggaccaggaaatcatcttcccacccatcaagaccgatgtgattacaatggaccccaaggacaactgctccaaggacgccaacgataccctgctgctccagctgaccaacaccagcgcctactacatgtacttgttgctgctgctgaagtccgtggtgtacttcgccatcatcacatgctgcctgctgcggagaaccgccttctgctgcaacggcgagaagtct

SEQ ID NO: 9912 - DNA, 2706 bp, Artificial Sequence
  Synthetic Polynucloetide
atggccttaccagtgaccgccttgctcctgccgctggccttgctgctccacgccgccaggccgctcgaggggaaaccaattcccaaccctcttctgggactggattcaaccggcagcggcgacaagcagctggacgccgacgtgtcccccaagcctaccatcttcctgccctctatcgccgagacaaagctccagaaggccggcacctacctgtgcctgctggaaaagttcttcccagatgtgattaagatccactggcaggaaaagaagtccaacaccatcctgggcagccaggaaggcaacaccatgaagaccaacgacacctacatgaagttcagctggctgaccgtgcccgagaagtccctggacaaagaacacagatgcatcgtgcggcacgaaaacaacaagaacggcgtggaccaggaaatcatcttcccacccatcaagaccgatgtgattacaatggaccccaaggacaactgctccaaggacgccaacgataccctgctgctccagctgaccaacaccagcgcctactacatgtacttgttgctgctgctgaagtccgtggtgtacttcgccatcatcacatgctgcctgctgcggagaaccgccttctgctgcaacggcgagaagtctagggccaagcgatctggatctggagcaacaaacttctcactactcaaacaagcaggtgacgtggaggagaatcccgggcctactagcatggccttaccagtgaccgccttgctcctgccgctggccttgctgctccacgccgccaggccggacatccagatgacacagagccctagcagcctgtctgccagcgtgggagacagagtgaccatcacatgcaaggccagccaggatgtgggcacagccgtggattggtatcagcagaagcctggcaaggcccctaagctgctgatctactgggccagcacaagacacacaggcgtgcccagcagattttctggcagcggctctggcaccgacttcaccctgacaatatccagcctccagcctgaggacttcgccacctactactgccagcagtacaacagctaccctctgaccttcggccagggcaccaaggtggaaatcaaaagaggcggaggcggaagtggaggcggaggatctggcggcggaggctctgaagttcagctgcaacagtctggccccgagctggttaagcctggaacaagcgtgcggatctcctgcaagaccagcggctacaccttcaccgagtacaccatccactgggtcaagcagagccacggcaagagcctggaatggatcggcaacatcaaccccaacaacggcggcaccacctacaaccagaagttcgaggacaaggccacactgaccgtggacaagagcagcagcaccgcctacatggaactgagaagcctgaccagcgaggacagcgccgtgtactattgtgccgccggatggaacttcgactactggggccagggaacaaccctgaccgttagctctacgcgtgagcagaaactgatctcggaagaggatgggagcggcagccagcctcacaccaagcccagcgtgttcgtgatgaagaacggcaccaacgtggcctgcctcgtgaaagagttctaccccaaggacatcaggatcaacctggtgtccagcaagaagatcaccgagttcgaccccgccatcgtgatctcccccagcggcaagtacaacgccgtgaagctggggaagtacgaggacagcaacagcgtgacctgctccgtgcagcacgacaacaagaccgtgcacagcaccgactttgaagtgaaaaccgactccaccgaccacgtgaagcccaaagagacagagaacaccaagcagcccagcaagagctgccacaagcccaaggccatcgtgcacaccgagaaagtgaacatgatgagcctgaccgtgctgggcctgcggatgctgttcgccaaaaccgtggccgtgaacttcctgctgaccgccaagctgttcttcctccgcgccaagagaagcggatctggcgtgaagcagaccctgaatttcgacctgctgaagctggctggcgacgtggaatccaacccaggcccttctagaggccatatgaccgagtacaagcccacggtgcgcctcgccacccgcgacgacgtccccagggccgtacgcaccctcgccgccgcgttcgccgactaccccgccacgcgccacaccgtcgatccggaccgccacatcgagcgggtcaccgagctgcaagaactcttcctcacgcgcgtcgggctcgacatcggcaaggtgtgggtcgcggacgacggcgccgcggtggcggtctggaccacgccggagagcgtcgaagcgggggcggtgttcgccgagatcggcccgcgcatggccgagttgagcggttcccggctggccgcgcagcaacagatggaaggcctcctggcgccgcaccggcccaaggagcccgcgtggttcctggccaccgtcggcgtctcgcccgaccaccagggcaagggtctgggcagcgccgtcgtgctccccggagtggaggcggccgagcgcgccggggtgcccgccttcctggagacctccgcgccccgcaacctccccttctacgagcggctcggcttcaccgtcaccgccgacgtcgaggtgcccgaaggaccgcgcacctggtgcatgacccgcaagcccggtgcctga

SEQ ID NO: 9913 - DNA, 3081 bp, Artificial Sequence
  Synthetic Polynucloetide
atggccttaccagtgaccgccttgctcctgccgctggccttgctgctccacgccgccaggccggacatccagatgacacagagccctagcagcctgtctgccagcgtgggagacagagtgaccatcacatgcaaggccagccaggatgtgggcacagccgtggattggtatcagcagaagcctggcaaggcccctaagctgctgatctactgggccagcacaagacacacaggcgtgcccagcagattttctggcagcggctctggcaccgacttcaccctgacaatatccagcctccagcctgaggacttcgccacctactactgccagcagtacaacagctaccctctgaccttcggccagggcaccaaggtggaaatcaaaagaggacagcctaaggccaatcctaccgtgacactgttccctccaagcagcgaagaactccaggccaacaaggccacacttgtgtgcctgatctccgacttctaccctggggctgtgacagtggcttggaaggccgatggatctcctgtgaaagccggcgtggaaaccaccaagccatccaagcagagcaacaacaaatacgccgccagctcctacctgagcctgacacctgagcagtggaagtcccacagatcctacagctgccaagtgacccacgaaggcagcaccgtggaaaagacagtggcccctacagagtgcagcggatcccagagcttcggcctgctggaccccaagctgtgctacctgctggatggcatcctgttcatctacggcgtgatcctgaccgccctgttcctgagagtgaagttcagcagaagcgccgacgcccctgcctaccagcagggacagaaccaactgtacaacgagctgaacctgggcagacgggaagagtacgacgtgctggacaagcggagaggcagggaccctgagatgggcggaaagccccagcggagaaagaacccccaggaaggactgtataacgaactccagaaagacaagatggccgaagcctacagcgagatcggcatgaagggcgagcggagaagaggcaagggccacgatggcctgtaccagggcctgagcaccgccaccaaggacacctatgacgccctgcacatgcaggccctgcctccaagaagggccaagcgatctggatctggagcaacaaacttctcactactcaaacaagcaggtgacgtggaggagaatcccgggcctactagtatggactggatttggcgcatccttttccttgtcggcgctgctaccggcgcgcattccttcgaagaagttcagctgcaacagtctggccccgagctggttaagcctggaacaagcgtgcggatctcctgcaagaccagcggctacaccttcaccgagtacaccatccactgggtcaagcagagccacggcaagagcctggaatggatcggcaacatcaaccccaacaacggcggcaccacctacaaccagaagttcgaggacaaggccacactgaccgtggacaagagcagcagcaccgcctacatggaactgagaagcctgaccagcgaggacagcgccgtgtactattgtgccgccggatggaacttcgactactggggccagggaacaaccctgaccgttagctctgcctctacaaagggaccctccgtgtttcctctggctcccagcagcaagtctacaagcggaggaacagccgctctgggctgcctggtcaaggattactttcccgagcctgtgaccgtgtcctggaatagcggagcactgacaagcggcgtgcacacctttccagccgtgctgcaaagcagcggcctgtactctctgagcagcgtggtcacagtgcctagctctagcctgggcacccagacctacatctgcaatgtgaaccacaagcctagcaacaccaaggtggacaagagagtggaacccaagagctgtggtacccagagttttgggttgttggaccctaaattgtgctatctgttggacggaatcctgttcatttacggagtgatcctgaccgcattgttcctgcgggttaagttttccagatccgcagacgcacccgcttaccaacaagggcagaaccaactctacaatgaacttaatttggggcggagggaagagtacgacgttctggacaaaaggaggggacgagatcccgagatgggcggaaagcctcagcgaaggaagaatccgcaagaggggctttataacgaactccagaaagataaaatggcagaagcctatagtgagattgggatgaagggagaaaggaggaggggtaaaggtcacgatgggttgtaccaaggattgagcacagccactaaagatacctatgatgcgctccacatgcaggccctgccgccaagacgcgccaagagaagcggatctggcgtgaagcagaccctgaatttcgacctgctgaagctggctggcgacgtggaatccaacccaggcccttctagaggccatatgaccgagtacaagcccacggtgcgcctcgccacccgcgacgacgtccccagggccgtacgcaccctcgccgccgcgttcgccgactaccccgccacgcgccacaccgtcgatccggaccgccacatcgagcgggtcaccgagctgcaagaactcttcctcacgcgcgtcgggctcgacatcggcaaggtgtgggtcgcggacgacggcgccgcggtggcggtctggaccacgccggagagcgtcgaagcgggggcggtgttcgccgagatcggcccgcgcatggccgagttgagcggttcccggctggccgcgcagcaacagatggaaggcctcctggcgccgcaccggcccaaggagcccgcgtggttcctggccaccgtcggcgtctcgcccgaccaccagggcaagggtctgggcagcgccgtcgtgctccccggagtggaggcggccgagcgcgccggggtgcccgccttcctggagacctccgcgccccgcaacctccccttctacgagcggctcggcttcaccgtcaccgccgacgtcgaggtgcccgaaggaccgcgcacctggtgcatgacccgcaagcccggtgcctga

SEQ ID NO: 9914 - DNA, 2436 bp, Artificial Sequence
  Synthetic Polynucloetide
atggccttaccagtgaccgccttgctcctgccgctggccttgctgctccacgccgccaggccggacatccagatgacacagagccctagcagcctgtctgccagcgtgggagacagagtgaccatcacatgcaaggccagccaggatgtgggcacagccgtggattggtatcagcagaagcctggcaaggcccctaagctgctgatctactgggccagcacaagacacacaggcgtgcccagcagattttctggcagcggctctggcaccgacttcaccctgacaatatccagcctccagcctgaggacttcgccacctactactgccagcagtacaacagctaccctctgaccttcggccagggcaccaaggtggaaatcaaaagactcgaggacctgaagaacgtgttcccacctgaggtggccgtgttcgagcctagcgaggccgagatcagccacacccagaaagccaccctcgtgtgcctggctaccggcttctaccccgaccatgtggaactgtcttggtgggtcaacggcaaagaggtgcacagcggcgtgtctaccgacccccagccactgaaagaacagcccgccctgaacgacagccggtactgcctgagcagcagactgagagtgtccgccaccttctggcagaacccccggaaccacttcagatgccaggtgcagttctacggcctgagcgagaacgacgagtggacccaggacagagccaagcccgtgacccagatcgtgtctgccgaagcctggggcagagccgattgcggatcccagagcttcggcctgctggaccccaagctgtgctacctgctggatggcatcctgttcatctacggcgtgatcctgaccgccctgttcctgagagtgaagttcagcagaagcgccgacgcccctgcctaccagcagggacagaaccaactgtacaacgagctgaacctgggcagacgggaagagtacgacgtgctggacaagcggagaggcagggaccctgagatgggcggaaagccccagcggagaaagaacccccaggaaggactgtataacgaactccagaaagacaagatggccgaagcctacagcgagatcggcatgaagggcgagcggagaagaggcaagggccacgatggcctgtaccagggcctgagcaccgccaccaaggacacctatgacgccctgcacatgcaggccctgcctccaagaagggccaagcgatctggatctggagcaacaaacttctcactactcaaacaagcaggtgacgtggaggagaatcccgggcctactagtatggactggatttggcgcatccttttccttgtcggcgctgctaccggcgcgcattccttcgaagaagttcagctgcaacagtctggccccgagctggttaagcctggaacaagcgtgcggatctcctgcaagaccagcggctacaccttcaccgagtacaccatccactgggtcaagcagagccacggcaagagcctggaatggatcggcaacatcaaccccaacaacggcggcaccacctacaaccagaagttcgaggacaaggccacactgaccgtggacaagagcagcagcaccgcctacatggaactgagaagcctgaccagcgaggacagcgccgtgtactattgtgccgccggatggaacttcgactactggggccagggaacaaccctgaccgttagctctacgcgtatccagaaccctgatcctgccgtgtaccagctgcgggatagcaagagcagcgacaagagcgtgtgtctgttcaccgacttcgacagccagaccaacgtgtcccagagcaaggactccgacgtgtacatcaccgataagaccgtgctggacatgcggagcatggacttcaagagcaactccgccgtggcctggtccaacaagtccgatttcgcctgcgccaacgccttcaacaacagcattatccccgaggacacattcttcccaagccccgagagcagctgcggtacccagagttttgggttgttggaccctaaattgtgctatctgttggacggaatcctgttcatttacggagtgatcctgaccgcattgttcctgcgggttaagttttccagatccgcagacgcacccgcttaccaacaagggcagaaccaactctacaatgaacttaatttggggcggagggaagagtacgacgttctggacaaaaggaggggacgagatcccgagatgggcggaaagcctcagcgaaggaagaatccgcaagaggggctttataacgaactccagaaagataaaatggcagaagcctatagtgagattgggatgaagggagaaaggaggaggggtaaaggtcacgatgggttgtaccaaggattgagcacagccactaaagatacctatgatgcgctccacatgcaggccctgccgccaaga

SEQ ID NO: 9915 - DNA, 2436 bp, Artificial Sequence
  Synthetic Polynucloetide
atggccttaccagtgaccgccttgctcctgccgctggccttgctgctccacgccgccaggccggacatccagatgacacagagccctagcagcctgtctgccagcgtgggagacagagtgaccatcacatgcaaggccagccaggatgtgggcacagccgtggattggtatcagcagaagcctggcaaggcccctaagctgctgatctactgggccagcacaagacacacaggcgtgcccagcagattttctggcagcggctctggcaccgacttcaccctgacaatatccagcctccagcctgaggacttcgccacctactactgccagcagtacaacagctaccctctgaccttcggccagggcaccaaggtggaaatcaaaagactcgaggacctgaagaacgtgttcccacctgaggtggccgtgttcgagcctagcaaggccgagatcgcccacacccagaaagccaccctcgtgtgcctggctaccggcttctaccccgaccatgtggaactgtcttggtgggtcaacggcaaagaggtgcacagcggcgtgtgtaccgacccccagccactgaaagaacagcccgccctgaacgacagccggtactgcctgagcagcagactgagagtgtccgccaccttctggcagaacccccggaaccacttcagatgccaggtgcagttctacggcctgagcgagaacgacgagtggacccaggacagagccaagcccgtgacccagatcgtgtctgccgaagcctggggcagagccgattgcggatcccagagcttcggcctgctggaccccaagctgtgctacctgctggatggcatcctgttcatctacggcgtgatcctgaccgccctgttcctgagagtgaagttcagcagaagcgccgacgcccctgcctaccagcagggacagaaccaactgtacaacgagctgaacctgggcagacgggaagagtacgacgtgctggacaagcggagaggcagggaccctgagatgggcggaaagccccagcggagaaagaacccccaggaaggactgtataacgaactccagaaagacaagatggccgaagcctacagcgagatcggcatgaagggcgagcggagaagaggcaagggccacgatggcctgtaccagggcctgagcaccgccaccaaggacacctatgacgccctgcacatgcaggccctgcctccaagaagggccaagcgatctggatctggagcaacaaacttctcactactcaaacaagcaggtgacgtggaggagaatcccgggcctactagtatggactggatttggcgcatccttttccttgtcggcgctgctaccggcgcgcattccttcgaagaagttcagctgcaacagtctggccccgagctggttaagcctggaacaagcgtgcggatctcctgcaagaccagcggctacaccttcaccgagtacaccatccactgggtcaagcagagccacggcaagagcctggaatggatcggcaacatcaaccccaacaacggcggcaccacctacaaccagaagttcgaggacaaggccacactgaccgtggacaagagcagcagcaccgcctacatggaactgagaagcctgaccagcgaggacagcgccgtgtactattgtgccgccggatggaacttcgactactggggccagggaacaaccctgaccgttagctctacgcgtatccagaaccctgatcctgccgtgtaccagctgcgggatagcaagagcagcgacaagagcgtgtgtctgttcaccgacttcgacagccagaccaacgtgtcccagagcaaggactccgacgtgtacatcaccgataagtgcgtgctggacatgcggagcatggacttcaagagcaactccgccgtggcctggtccaacaagtccgatttcgcctgcgccaacgccttcaacaacagcattatccccgaggacacattcttcccaagcagcgacgtgccctgcggtacccagagttttgggttgttggaccctaaattgtgctatctgttggacggaatcctgttcatttacggagtgatcctgaccgcattgttcctgcgggttaagttttccagatccgcagacgcacccgcttaccaacaagggcagaaccaactctacaatgaacttaatttggggcggagggaagagtacgacgttctggacaaaaggaggggacgagatcccgagatgggcggaaagcctcagcgaaggaagaatccgcaagaggggctttataacgaactccagaaagataaaatggcagaagcctatagtgagattgggatgaagggagaaaggaggaggggtaaaggtcacgatgggttgtaccaaggattgagcacagccactaaagatacctatgatgcgctccacatgcaggccctgccgccaaga

SEQ ID NO: 9916 - DNA, 2649 bp, Artificial Sequence
  Synthetic Polynucloetide
atggccttaccagtgaccgccttgctcctgccgctggccttgctgctccacgccgccaggccggacatccagatgacacagagccctagcagcctgtctgccagcgtgggagacagagtgaccatcacatgcaaggccagccaggatgtgggcacagccgtggattggtatcagcagaagcctggcaaggcccctaagctgctgatctactgggccagcacaagacacacaggcgtgcccagcagattttctggcagcggctctggcaccgacttcaccctgacaatatccagcctccagcctgaggacttcgccacctactactgccagcagtacaacagctaccctctgaccttcggccagggcaccaaggtggaaatcaaaagactcgaggggaaaccaattcccaaccctcttctgggactggattcaaccggcagcggcgaggacctgaagaacgtgttcccacctgaggtggccgtgttcgagcctagcgaggccgagatcagccacacccagaaagccaccctcgtgtgcctggctaccggcttctaccccgaccatgtggaactgtcttggtgggtcaacggcaaagaggtgcacagcggcgtgtctaccgacccccagccactgaaagaacagcccgccctgaacgacagccggtactgcctgagcagcagactgagagtgtccgccaccttctggcagaacccccggaaccacttcagatgccaggtgcagttctacggcctgagcgagaacgacgagtggacccaggacagagccaagcccgtgacccagatcgtgtctgccgaagcctggggcagagccgattgcggatcccagagcttcggcctgctggaccccaagctgtgctacctgctggatggcatcctgttcatctacggcgtgatcctgaccgccctgttcctgagagtgaagttcagcagaagcgccgacgcccctgcctaccagcagggacagaaccaactgtacaacgagctgaacctgggcagacgggaagagtacgacgtgctggacaagcggagaggcagggaccctgagatgggcggaaagccccagcggagaaagaacccccaggaaggactgtataacgaactccagaaagacaagatggccgaagcctacagcgagatcggcatgaagggcgagcggagaagaggcaagggccacgatggcctgtaccagggcctgagcaccgccaccaaggacacctatgacgccctgcacatgcaggccctgcctccaagaagggccaagcgatctggatctggagcaacaaacttctcactactcaaacaagcaggtgacgtggaggagaatcccgggcctactagtatggactggatttggcgcatccttttccttgtcggcgctgctaccggcgcgcattccttcgaagaagttcagctgcaacagtctggccccgagctggttaagcctggaacaagcgtgcggatctcctgcaagaccagcggctacaccttcaccgagtacaccatccactgggtcaagcagagccacggcaagagcctggaatggatcggcaacatcaaccccaacaacggcggcaccacctacaaccagaagttcgaggacaaggccacactgaccgtggacaagagcagcagcaccgcctacatggaactgagaagcctgaccagcgaggacagcgccgtgtactattgtgccgccggatggaacttcgactactggggccagggaacaaccctgaccgttagctctacgcgtgagcagaaactgatctcggaagaggatgggagcggcatccagaaccctgatcctgccgtgtaccagctgcgggatagcaagagcagcgacaagagcgtgtgtctgttcaccgacttcgacagccagaccaacgtgtcccagagcaaggactccgacgtgtacatcaccgataagaccgtgctggacatgcggagcatggacttcaagagcaactccgccgtggcctggtccaacaagtccgatttcgcctgcgccaacgccttcaacaacagcattatccccgaggacacattcttcccaagccccgagagcagctgcggtacccagagttttgggttgttggaccctaaattgtgctatctgttggacggaatcctgttcatttacggagtgatcctgaccgcattgttcctgaggagcaagcggtcacggctgctccacagcgattacatgaatatgacaccacgaagaccgggtcctactcgcaaacactaccaaccctacgcacctccccgcgactttgcagcgtaccgatctcgggttaagttttccagatccgcagacgcacccgcttaccaacaagggcagaaccaactctacaatgaacttaatttggggcggagggaagagtacgacgttctggacaaaaggaggggacgagatcccgagatgggcggaaagcctcagcgaaggaagaatccgcaagaggggctttataacgaactccagaaagataaaatggcagaagcctatagtgagattgggatgaagggagaaaggaggaggggtaaaggtcacgatgggttgtaccaaggattgagcacagccactaaagatacctatgatgcgctccacatgcaggccctgccgccaaga

SEQ ID NO: 9917 - DNA, 2772 bp, Artificial Sequence
  Synthetic Polynucloetide
atggccttaccagtgaccgccttgctcctgccgctggccttgctgctccacgccgccaggccggacatccagatgacacagagccctagcagcctgtctgccagcgtgggagacagagtgaccatcacatgcaaggccagccaggatgtgggcacagccgtggattggtatcagcagaagcctggcaaggcccctaagctgctgatctactgggccagcacaagacacacaggcgtgcccagcagattttctggcagcggctctggcaccgacttcaccctgacaatatccagcctccagcctgaggacttcgccacctactactgccagcagtacaacagctaccctctgaccttcggccagggcaccaaggtggaaatcaaaagactcgaggggaaaccaattcccaaccctcttctgggactggattcaaccggcagcggcgaggacctgaagaacgtgttcccacctgaggtggccgtgttcgagcctagcgaggccgagatcagccacacccagaaagccaccctcgtgtgcctggctaccggcttctaccccgaccatgtggaactgtcttggtgggtcaacggcaaagaggtgcacagcggcgtgtctaccgacccccagccactgaaagaacagcccgccctgaacgacagccggtactgcctgagcagcagactgagagtgtccgccaccttctggcagaacccccggaaccacttcagatgccaggtgcagttctacggcctgagcgagaacgacgagtggacccaggacagagccaagcccgtgacccagatcgtgtctgccgaagcctggggcagagccgattgcggatcccagagcttcggcctgctggaccccaagctgtgctacctgctggatggcatcctgttcatctacggcgtgatcctgaccgccctgttcctgaggagtaagaggagcaggctcctgcacagtgactacatgaacatgactccacgccgccccggacccacccgcaagcattaccagccctatgccccaccacgcgacttcgcagcctatcgctccagagtgaagttcagcagaagcgccgacgcccctgcctaccagcagggacagaaccaactgtacaacgagctgaacctgggcagacgggaagagtacgacgtgctggacaagcggagaggcagggaccctgagatgggcggaaagccccagcggagaaagaacccccaggaaggactgtataacgaactccagaaagacaagatggccgaagcctacagcgagatcggcatgaagggcgagcggagaagaggcaagggccacgatggcctgtaccagggcctgagcaccgccaccaaggacacctatgacgccctgcacatgcaggccctgcctccaagaagggccaagcgatctggatctggagcaacaaacttctcactactcaaacaagcaggtgacgtggaggagaatcccgggcctactagtatggactggatttggcgcatccttttccttgtcggcgctgctaccggcgcgcattccttcgaagaagttcagctgcaacagtctggccccgagctggttaagcctggaacaagcgtgcggatctcctgcaagaccagcggctacaccttcaccgagtacaccatccactgggtcaagcagagccacggcaagagcctggaatggatcggcaacatcaaccccaacaacggcggcaccacctacaaccagaagttcgaggacaaggccacactgaccgtggacaagagcagcagcaccgcctacatggaactgagaagcctgaccagcgaggacagcgccgtgtactattgtgccgccggatggaacttcgactactggggccagggaacaaccctgaccgttagctctacgcgtgagcagaaactgatctcggaagaggatgggagcggcatccagaaccctgatcctgccgtgtaccagctgcgggatagcaagagcagcgacaagagcgtgtgtctgttcaccgacttcgacagccagaccaacgtgtcccagagcaaggactccgacgtgtacatcaccgataagaccgtgctggacatgcggagcatggacttcaagagcaactccgccgtggcctggtccaacaagtccgatttcgcctgcgccaacgccttcaacaacagcattatccccgaggacacattcttcccaagccccgagagcagctgcggtacccagagttttgggttgttggaccctaaattgtgctatctgttggacggaatcctgttcatttacggagtgatcctgaccgcattgttcctgaggagcaagcggtcacggctgctccacagcgattacatgaatatgacaccacgaagaccgggtcctactcgcaaacactaccaaccctacgcacctccccgcgactttgcagcgtaccgatctcgggttaagttttccagatccgcagacgcacccgcttaccaacaagggcagaaccaactctacaatgaacttaatttggggcggagggaagagtacgacgttctggacaaaaggaggggacgagatcccgagatgggcggaaagcctcagcgaaggaagaatccgcaagaggggctttataacgaactccagaaagataaaatggcagaagcctatagtgagattgggatgaagggagaaaggaggaggggtaaaggtcacgatgggttgtaccaaggattgagcacagccactaaagatacctatgatgcgctccacatgcaggccctgccgccaaga

SEQ ID NO: 9918 - DNA, 2655 bp, Artificial Sequence
  Synthetic Polynucloetide
atggccttaccagtgaccgccttgctcctgccgctggccttgctgctccacgccgccaggccggacatccagatgacacagagccctagcagcctgtctgccagcgtgggagacagagtgaccatcacatgcaaggccagccaggatgtgggcacagccgtggattggtatcagcagaagcctggcaaggcccctaagctgctgatctactgggccagcacaagacacacaggcgtgcccagcagattttctggcagcggctctggcaccgacttcaccctgacaatatccagcctccagcctgaggacttcgccacctactactgccagcagtacaacagctaccctctgaccttcggccagggcaccaaggtggaaatcaaaagactcgaggggaaaccaattcccaaccctcttctgggactggattcaaccggcagcggcgaggacctgaagaacgtgttcccacctgaggtggccgtgttcgagcctagcgaggccgagatcagccacacccagaaagccaccctcgtgtgcctggctaccggcttctaccccgaccatgtggaactgtcttggtgggtcaacggcaaagaggtgcacagcggcgtgtctaccgacccccagccactgaaagaacagcccgccctgaacgacagccggtactgcctgagcagcagactgagagtgtccgccaccttctggcagaacccccggaaccacttcagatgccaggtgcagttctacggcctgagcgagaacgacgagtggacccaggacagagccaagcccgtgacccagatcgtgtctgccgaagcctggggcagagccgattgcggatcccagagcttcggcctgctggaccccaagctgtgctacctgctggatggcatcctgttcatctacggcgtgatcctgaccgccctgttcctgagagtgaagttcagcagaagcgccgacgcccctgcctaccagcagggacagaaccaactgtacaacgagctgaacctgggcagacgggaagagtacgacgtgctggacaagcggagaggcagggaccctgagatgggcggaaagccccagcggagaaagaacccccaggaaggactgtataacgaactccagaaagacaagatggccgaagcctacagcgagatcggcatgaagggcgagcggagaagaggcaagggccacgatggcctgtaccagggcctgagcaccgccaccaaggacacctatgacgccctgcacatgcaggccctgcctccaagaagggccaagcgatctggatctggagcaacaaacttctcactactcaaacaagcaggtgacgtggaggagaatcccgggcctactagtatggactggatttggcgcatccttttccttgtcggcgctgctaccggcgcgcattccttcgaagaagttcagctgcaacagtctggccccgagctggttaagcctggaacaagcgtgcggatctcctgcaagaccagcggctacaccttcaccgagtacaccatccactgggtcaagcagagccacggcaagagcctggaatggatcggcaacatcaaccccaacaacggcggcaccacctacaaccagaagttcgaggacaaggccacactgaccgtggacaagagcagcagcaccgcctacatggaactgagaagcctgaccagcgaggacagcgccgtgtactattgtgccgccggatggaacttcgactactggggccagggaacaaccctgaccgttagctctacgcgtgagcagaaactgatctcggaagaggatctggggagcggcatccagaaccctgatcctgccgtgtaccagctgcgggatagcaagagcagcgacaagagcgtgtgtctgttcaccgacttcgacagccagaccaacgtgtcccagagcaaggactccgacgtgtacatcaccgataagaccgtgctggacatgcggagcatggacttcaagagcaactccgccgtggcctggtccaacaagtccgatttcgcctgcgccaacgccttcaacaacagcattatccccgaggacacattcttcccaagccccgagagcagctgcggtacccagagttttgggttgttggaccctaaattgtgctatctgttggacggaatcctgttcatttacggagtgatcctgaccgcattgttcctgaagagaggccggaagaagctgctgtacatcttcaagcagcctttcatgcggcccgtgcagaccacccaggaagaggacggctgctcctgccggttccccgaggaagaagaaggcggctgcgagctgcgggttaagttttccagatccgcagacgcacccgcttaccaacaagggcagaaccaactctacaatgaacttaatttggggcggagggaagagtacgacgttctggacaaaaggaggggacgagatcccgagatgggcggaaagcctcagcgaaggaagaatccgcaagaggggctttataacgaactccagaaagataaaatggcagaagcctatagtgagattgggatgaagggagaaaggaggaggggtaaaggtcacgatgggttgtaccaaggattgagcacagccactaaagatacctatgatgcgctccacatgcaggccctgccgccaaga

SEQ ID NO: 9919 - DNA, 2781 bp, Artificial Sequence
  Synthetic Polynucloetide
atggccttaccagtgaccgccttgctcctgccgctggccttgctgctccacgccgccaggccggacatccagatgacacagagccctagcagcctgtctgccagcgtgggagacagagtgaccatcacatgcaaggccagccaggatgtgggcacagccgtggattggtatcagcagaagcctggcaaggcccctaagctgctgatctactgggccagcacaagacacacaggcgtgcccagcagattttctggcagcggctctggcaccgacttcaccctgacaatatccagcctccagcctgaggacttcgccacctactactgccagcagtacaacagctaccctctgaccttcggccagggcaccaaggtggaaatcaaaagactcgaggggaaaccaattcccaaccctcttctgggactggattcaaccggcagcggcgaggacctgaagaacgtgttcccacctgaggtggccgtgttcgagcctagcgaggccgagatcagccacacccagaaagccaccctcgtgtgcctggctaccggcttctaccccgaccatgtggaactgtcttggtgggtcaacggcaaagaggtgcacagcggcgtgtctaccgacccccagccactgaaagaacagcccgccctgaacgacagccggtactgcctgagcagcagactgagagtgtccgccaccttctggcagaacccccggaaccacttcagatgccaggtgcagttctacggcctgagcgagaacgacgagtggacccaggacagagccaagcccgtgacccagatcgtgtctgccgaagcctggggcagagccgattgcggatcccagagcttcggcctgctggaccccaagctgtgctacctgctggatggcatcctgttcatctacggcgtgatcctgaccgccctgttcctgaaacggggcagaaagaaactcctgtatatattcaaacaaccatttatgagaccagtacaaactactcaagaggaagatggctgtagctgccgatttccagaagaagaagaaggaggatgtgaactgagagtgaagttcagcagaagcgccgacgcccctgcctaccagcagggacagaaccaactgtacaacgagctgaacctgggcagacgggaagagtacgacgtgctggacaagcggagaggcagggaccctgagatgggcggaaagccccagcggagaaagaacccccaggaaggactgtataacgaactccagaaagacaagatggccgaagcctacagcgagatcggcatgaagggcgagcggagaagaggcaagggccacgatggcctgtaccagggcctgagcaccgccaccaaggacacctatgacgccctgcacatgcaggccctgcctccaagaagggccaagcgatctggatctggagcaacaaacttctcactactcaaacaagcaggtgacgtggaggagaatcccgggcctactagtatggactggatttggcgcatccttttccttgtcggcgctgctaccggcgcgcattccttcgaagaagttcagctgcaacagtctggccccgagctggttaagcctggaacaagcgtgcggatctcctgcaagaccagcggctacaccttcaccgagtacaccatccactgggtcaagcagagccacggcaagagcctggaatggatcggcaacatcaaccccaacaacggcggcaccacctacaaccagaagttcgaggacaaggccacactgaccgtggacaagagcagcagcaccgcctacatggaactgagaagcctgaccagcgaggacagcgccgtgtactattgtgccgccggatggaacttcgactactggggccagggaacaaccctgaccgttagctctacgcgtgagcagaaactgatctcggaagaggatctggggagcggcatccagaaccctgatcctgccgtgtaccagctgcgggatagcaagagcagcgacaagagcgtgtgtctgttcaccgacttcgacagccagaccaacgtgtcccagagcaaggactccgacgtgtacatcaccgataagaccgtgctggacatgcggagcatggacttcaagagcaactccgccgtggcctggtccaacaagtccgatttcgcctgcgccaacgccttcaacaacagcattatccccgaggacacattcttcccaagccccgagagcagctgcggtacccagagttttgggttgttggaccctaaattgtgctatctgttggacggaatcctgttcatttacggagtgatcctgaccgcattgttcctgaagagaggccggaagaagctgctgtacatcttcaagcagcctttcatgcggcccgtgcagaccacccaggaagaggacggctgctcctgccggttccccgaggaagaagaaggcggctgcgagctgcgggttaagttttccagatccgcagacgcacccgcttaccaacaagggcagaaccaactctacaatgaacttaatttggggcggagggaagagtacgacgttctggacaaaaggaggggacgagatcccgagatgggcggaaagcctcagcgaaggaagaatccgcaagaggggctttataacgaactccagaaagataaaatggcagaagcctatagtgagattgggatgaagggagaaaggaggaggggtaaaggtcacgatgggttgtaccaaggattgagcacagccactaaagatacctatgatgcgctccacatgcaggccctgccgccaaga

SEQ ID NO: 9920 - DNA, 2454 bp, Artificial Sequence
  Synthetic Polynucloetide
atggccttaccagtgaccgccttgctcctgccgctggccttgctgctccacgccgccaggccggacatccagatgacacagagccctagcagcctgtctgccagcgtgggagacagagtgaccatcacatgcaaggccagccaggatgtgggcacagccgtggattggtatcagcagaagcctggcaaggcccctaagctgctgatctactgggccagcacaagacacacaggcgtgcccagcagattttctggcagcggctctggcaccgacttcaccctgacaatatccagcctccagcctgaggacttcgccacctactactgccagcagtacaacagctaccctctgaccttcggccagggcaccaaggtggaaatcaaaagactcgagcagagcttcggcctgctggaccccaagctgtgctacctgctggatggcatcctgttcatctacggcgtgatcctgaccgccctgttcctgagagtgaagttcagcagaagcgccgacgcccctgcctaccagcagggacagaaccaactgtacaacgagctgaacctgggcagacgggaagagtacgacgtgctggacaagcggagaggcagggaccctgagatgggcggaaagccccagcggagaaagaacccccaggaaggactgtataacgaactccagaaagacaagatggccgaagcctacagcgagatcggcatgaagggcgagcggagaagaggcaagggccacgatggcctgtaccagggcctgagcaccgccaccaaggacacctatgacgccctgcacatgcaggccctgcctccaagaagggccaagcgatctggatctggagcaacaaacttctcactactcaaacaagcaggtgacgtggaggagaatcccgggcctactagtatggactggatttggcgcatccttttccttgtcggcgctgctaccggcgcgcattccttcgaagaagttcagctgcaacagtctggccccgagctggttaagcctggaacaagcgtgcggatctcctgcaagaccagcggctacaccttcaccgagtacaccatccactgggtcaagcagagccacggcaagagcctggaatggatcggcaacatcaaccccaacaacggcggcaccacctacaaccagaagttcgaggacaaggccacactgaccgtggacaagagcagcagcaccgcctacatggaactgagaagcctgaccagcgaggacagcgccgtgtactattgtgccgccggatggaacttcgactactggggccagggaacaaccctgaccgttagctctacgcgtcagagttttgggttgttggaccctaaattgtgctatctgttggacggaatcctgttcatttacggagtgatcctgaccgcattgttcctgcgggttaagttttccagatccgcagacgcacccgcttaccaacaagggcagaaccaactctacaatgaacttaatttggggcggagggaagagtacgacgttctggacaaaaggaggggacgagatcccgagatgggcggaaagcctcagcgaaggaagaatccgcaagaggggctttataacgaactccagaaagataaaatggcagaagcctatagtgagattgggatgaagggagaaaggaggaggggtaaaggtcacgatgggttgtaccaaggattgagcacagccactaaagatacctatgatgcgctccacatgcaggccctgccgccaagacgcgccaagagaagcggatctggcgtgaagcagaccctgaatttcgacctgctgaagctggctggcgacgtggaatccaacccaggcccttctagaggccatatgaccgagtacaagcccacggtgcgcctcgccacccgcgacgacgtccccagggccgtacgcaccctcgccgccgcgttcgccgactaccccgccacgcgccacaccgtcgatccggaccgccacatcgagcgggtcaccgagctgcaagaactcttcctcacgcgcgtcgggctcgacatcggcaaggtgtgggtcgcggacgacggcgccgcggtggcggtctggaccacgccggagagcgtcgaagcgggggcggtgttcgccgagatcggcccgcgcatggccgagttgagcggttcccggctggccgcgcagcaacagatggaaggcctcctggcgccgcaccggcccaaggagcccgcgtggttcctggccaccgtcggcgtctcgcccgaccaccagggcaagggtctgggcagcgccgtcgtgctccccggagtggaggcggccgagcgcgccggggtgcccgccttcctggagacctccgcgccccgcaacctccccttctacgagcggctcggcttcaccgtcaccgccgacgtcgaggtgcccgaaggaccgcgcacctggtgcatgacccgcaagcccggtgcctga

SEQ ID NO: 9921 - DNA, 1926 bp, Artificial Sequence
  Synthetic Polynucloetide
atggccttaccagtgaccgccttgctcctgccgctggccttgctgctccacgccgccaggccggacatccagatgacacagagccctagcagcctgtctgccagcgtgggagacagagtgaccatcacatgcaaggccagccaggatgtgggcacagccgtggattggtatcagcagaagcctggcaaggcccctaagctgctgatctactgggccagcacaagacacacaggcgtgcccagcagattttctggcagcggctctggcaccgacttcaccctgacaatatccagcctccagcctgaggacttcgccacctactactgccagcagtacaacagctaccctctgaccttcggccagggcaccaaggtggaaatcaaaagactcgagggacagcctaaggccaatcctaccgtgacactgttccctccaagcagcgaagaactccaggccaacaaggccacacttgtgtgcctgatctccgacttctaccctggggctgtgacagtggcttggaaggccgatggatctcctgtgaaagccggcgtggaaaccaccaagccatccaagcagagcaacaacaaatacgccgccagctcctacctgagcctgacacctgagcagtggaagtcccacagatcctacagctgccaagtgacccacgaaggcagcaccgtggaaaagacagtggcccctacagagtgcagccccatcaagaccgatgtgattacaatggaccccaaggacaactgctccaaggacgccaacgataccctgctgctccagctgaccaacaccagcgcctactacatgtacttgttgctgctgctgaagtccgtggtgtacttcgccatcatcacatgctgcctgctgcggagaaccgccttctgctgcaacggcgagaagtctagggccaagcgatctggatctggagcaacaaacttctcactactcaaacaagcaggtgacgtggaggagaatcccgggcctactagtatggactggatttggcgcatccttttccttgtcggcgctgctaccggcgcgcattccttcgaagaagttcagctgcaacagtctggccccgagctggttaagcctggaacaagcgtgcggatctcctgcaagaccagcggctacaccttcaccgagtacaccatccactgggtcaagcagagccacggcaagagcctggaatggatcggcaacatcaaccccaacaacggcggcaccacctacaaccagaagttcgaggacaaggccacactgaccgtggacaagagcagcagcaccgcctacatggaactgagaagcctgaccagcgaggacagcgccgtgtactattgtgccgccggatggaacttcgactactggggccagggaacaaccctgaccgttagctctacgcgtgcctctacaaagggaccctccgtgtttcctctggctcccagcagcaagtctacaagcggaggaacagccgctctgggctgcctggtcaaggattactttcccgagcctgtgaccgtgtcctggaatagcggagcactgacaagcggcgtgcacacctttccagccgtgctgcaaagcagcggcctgtactctctgagcagcgtggtcacagtgcctagctctagcctgggcacccagacctacatctgcaatgtgaaccacaagcctagcaacaccaaggtggacaagagagtggaacccaagagctgtgaagtgaaaaccgactccaccgaccacgtgaagcccaaagagacagagaacaccaagcagcccagcaagagctgccacaagcccaaggccatcgtgcacaccgagaaagtgaacatgatgagcctgaccgtgctgggcctgcggatgctgttcgccaaaaccgtggccgtgaacttcctgctgaccgccaagctgttcttcctc

SEQ ID NO: 9922 - DNA, 1860 bp, Artificial Sequence
  Synthetic Polynucloetide
atggccttaccagtgaccgccttgctcctgccgctggccttgctgctccacgccgccaggccggacatccagatgacacagagccctagcagcctgtctgccagcgtgggagacagagtgaccatcacatgcaaggccagccaggatgtgggcacagccgtggattggtatcagcagaagcctggcaaggcccctaagctgctgatctactgggccagcacaagacacacaggcgtgcccagcagattttctggcagcggctctggcaccgacttcaccctgacaatatccagcctccagcctgaggacttcgccacctactactgccagcagtacaacagctaccctctgaccttcggccagggcaccaaggtggaaatcaaaagactcgagggacagcctaaggccaatcctaccgtgacactgttccctccaagcagcgaagaactccaggccaacaaggccacacttgtgtgcctgatctccgacttctaccctggggctgtgacagtggcttggaaggccgatggatctcctgtgaaagccggcgtggaaaccaccaagccatccaagcagagcaacaacaaatacgccgccagctcctacctgagcctgacacctgagcagtggaagtcccacagatcctacagctgccaagtgacccacgaaggcagcaccgtggaaaagacagtggcccctacagagtgcagcggcagagccgattgcggcatcaccagcgccagctaccaccagggcgtgctgagcgccaccatcctgtacgagatcctgctgggcaaggccaccctgtacgccgtgctggtgtctgccctggtgctgatggctatggtcaagcggaaggacagccggggaagggccaagcgatctggatctggagcaacaaacttctcactactcaaacaagcaggtgacgtggaggagaatcccgggcctactagtatggactggatttggcgcatccttttccttgtcggcgctgctaccggcgcgcattccttcgaagaagttcagctgcaacagtctggccccgagctggttaagcctggaacaagcgtgcggatctcctgcaagaccagcggctacaccttcaccgagtacaccatccactgggtcaagcagagccacggcaagagcctggaatggatcggcaacatcaaccccaacaacggcggcaccacctacaaccagaagttcgaggacaaggccacactgaccgtggacaagagcagcagcaccgcctacatggaactgagaagcctgaccagcgaggacagcgccgtgtactattgtgccgccggatggaacttcgactactggggccagggaacaaccctgaccgttagctctacgcgtgcctctacaaagggaccctccgtgtttcctctggctcccagcagcaagtctacaagcggaggaacagccgctctgggctgcctggtcaaggattactttcccgagcctgtgaccgtgtcctggaatagcggagcactgacaagcggcgtgcacacctttccagccgtgctgcaaagcagcggcctgtactctctgagcagcgtggtcacagtgcctagctctagcctgggcacccagacctacatctgcaatgtgaaccacaagcctagcaacaccaaggtggacaagagagtggaacccaagagctgtatccccgaggacacattcttcccaagcagcgacgtgccctgcgacgtgaagctggtggaaaagagcttcgagacagacaccaacctgaacttccagaacctgagcgtgatcggcttcagaatcctgctgctgaaagtggccggctttaacctgctgatgaccctgcggctgtggtccagc

SEQ ID NO: 9923 - DNA, 1860 bp, Artificial Sequence
  Synthetic Polynucloetide
atggccttaccagtgaccgccttgctcctgccgctggccttgctgctccacgccgccaggccggacatccagatgacacagagccctagcagcctgtctgccagcgtgggagacagagtgaccatcacatgcaaggccagccaggatgtgggcacagccgtggattggtatcagcagaagcctggcaaggcccctaagctgctgatctactgggccagcacaagacacacaggcgtgcccagcagattttctggcagcggctctggcaccgacttcaccctgacaatatccagcctccagcctgaggacttcgccacctactactgccagcagtacaacagctaccctctgaccttcggccagggcaccaaggtggaaatcaaaagactcgagggacagcctaaggccaatcctaccgtgacactgttccctccaagcagcgaagaactccaggccaacaaggccacacttgtgtgcctgatctccgacttctaccctggggctgtgacagtggcttggaaggccgatggatctcctgtgaaagccggcgtggaaaccaccaagccatccaagcagagcaacaacaaatacgccgccagctcctacctgagcctgacacctgagcagtggaagtcccacagatcctacagctgccaagtgacccacgaaggcagcaccgtggaaaagacagtggcccctacagagtgcagcggcagagccgattgcggctttaccagcgagagctaccagcagggcgtgctgagcgccaccatcctgtacgagatcctgctgggcaaggccaccctgtacgccgtgctggtgtctgccctggtgctgatggctatggtcaagcggaaggacagccggggaagggccaagcgatctggatctggagcaacaaacttctcactactcaaacaagcaggtgacgtggaggagaatcccgggcctactagtatggactggatttggcgcatccttttccttgtcggcgctgctaccggcgcgcattccttcgaagaagttcagctgcaacagtctggccccgagctggttaagcctggaacaagcgtgcggatctcctgcaagaccagcggctacaccttcaccgagtacaccatccactgggtcaagcagagccacggcaagagcctggaatggatcggcaacatcaaccccaacaacggcggcaccacctacaaccagaagttcgaggacaaggccacactgaccgtggacaagagcagcagcaccgcctacatggaactgagaagcctgaccagcgaggacagcgccgtgtactattgtgccgccggatggaacttcgactactggggccagggaacaaccctgaccgttagctctacgcgtgcctctacaaagggaccctccgtgtttcctctggctcccagcagcaagtctacaagcggaggaacagccgctctgggctgcctggtcaaggattactttcccgagcctgtgaccgtgtcctggaatagcggagcactgacaagcggcgtgcacacctttccagccgtgctgcaaagcagcggcctgtactctctgagcagcgtggtcacagtgcctagctctagcctgggcacccagacctacatctgcaatgtgaaccacaagcctagcaacaccaaggtggacaagagagtggaacccaagagctgtatccccgaggacacattcttcccaagccccgagagcagctgcgacgtgaagctggtggaaaagagcttcgagacagacaccaacctgaacttccagaacctgagcgtgatcggcttcagaatcctgctgctgaaagtggccggctttaacctgctgatgaccctgcggctgtggtccagc

SEQ ID NO: 9924 - DNA, 1338 bp, Artificial Sequence
  Synthetic Polynucloetide
atggccttaccagtgaccgccttgctcctgccgctggccttgctgctccacgccgccaggccggacatccagatgacacagagccctagcagcctgtctgccagcgtgggagacagagtgaccatcacatgcaaggccagccaggatgtgggcacagccgtggattggtatcagcagaagcctggcaaggcccctaagctgctgatctactgggccagcacaagacacacaggcgtgcccagcagattttctggcagcggctctggcaccgacttcaccctgacaatatccagcctccagcctgaggacttcgccacctactactgccagcagtacaacagctaccctctgaccttcggccagggcaccaaggtggaaatcaaaagaggcggaggcggaagtggaggcggaggatctggcggcggaggctctgaagttcagctgcaacagtctggccccgagctggttaagcctggaacaagcgtgcggatctcctgcaagaccagcggctacaccttcaccgagtacaccatccactgggtcaagcagagccacggcaagagcctggaatggatcggcaacatcaaccccaacaacggcggcaccacctacaaccagaagttcgaggacaaggccacactgaccgtggacaagagcagcagcaccgcctacatggaactgagaagcctgaccagcgaggacagcgccgtgtactattgtgccgccggatggaacttcgactactggggccagggaacaaccctgaccgttagctctacgcgtgacggtaacgaggagatgggaggaatcactcaaaccccttacaaagtctcaatttcaggaacaactgttatccttacatgtccccagtatcctggcagcgagatcctttggcagcataacgacaagaatatagggggagatgaagacgataagaatatcggatctgacgaggatcacttgagcctgaaagagttctccgagcttgaacaaagcggatattatgtgtgctatccgcgcgggtcaaagccggaagacgctaacttttacctttatctccgagccagagtgtgcgaaaattgcatggaaatggacgttatgtccgttgctacaatagttatcgtagatatatgcatcacgggtggactgcttctgctggtttattattggtccaagaatagaaaggccaaagctaaacccgtgaccagaggcgctggcgcaggcggaaggcaaaggggacaaaacaaagaacggccaccaccagtgccaaatccagattatgagcctattcggaaaggacagagggacctgtactctggcctgaatcagagaagaatc

SEQ ID NO: 9925 - DNA, 1233 bp, Artificial Sequence
  Synthetic Polynucloetide
atggccttaccagtgaccgccttgctcctgccgctggccttgctgctccacgccgccaggccggacatccagatgacacagagccctagcagcctgtctgccagcgtgggagacagagtgaccatcacatgcaaggccagccaggatgtgggcacagccgtggattggtatcagcagaagcctggcaaggcccctaagctgctgatctactgggccagcacaagacacacaggcgtgcccagcagattttctggcagcggctctggcaccgacttcaccctgacaatatccagcctccagcctgaggacttcgccacctactactgccagcagtacaacagctaccctctgaccttcggccagggcaccaaggtggaaatcaaaagaggcggaggcggaagtggaggcggaggatctggcggcggaggctctgaagttcagctgcaacagtctggccccgagctggttaagcctggaacaagcgtgcggatctcctgcaagaccagcggctacaccttcaccgagtacaccatccactgggtcaagcagagccacggcaagagcctggaatggatcggcaacatcaaccccaacaacggcggcaccacctacaaccagaagttcgaggacaaggccacactgaccgtggacaagagcagcagcaccgcctacatggaactgagaagcctgaccagcgaggacagcgccgtgtactattgtgccgccggatggaacttcgactactggggccagggaacaaccctgaccgttagctctacgcgtttcaagatccccatcgaggaactggaagatcgggtgttcgtgaactgcaacacctctatcacctgggtggaaggcaccgtgggaacactgctgagcgacatcaccagactggacctcggcaagcggattctggaccctcggggcatctacagatgcaacggcaccgacatctacaaggacaaagaaagcaccgtgcaggtccactacagaatgtgccagtcctgcgtggaactggaccctgctacagtggccggcatcatcgtgaccgatgtgatcgctactctgctgctggctctgggagtgttctgcttcgccggacacgaaacaggcagactgtctggcgctgccgatacacaggccctgctgagaaacgaccaagtgtatcagcccctgcgcgacagagatgatgcccagtattctcacctcggcggcaactgggctagaaacaag

SEQ ID NO: 9926 - DNA, 1263 bp, Artificial Sequence
  Synthetic Polynucloetide
atggccttaccagtgaccgccttgctcctgccgctggccttgctgctccacgccgccaggccggacatccagatgacacagagccctagcagcctgtctgccagcgtgggagacagagtgaccatcacatgcaaggccagccaggatgtgggcacagccgtggattggtatcagcagaagcctggcaaggcccctaagctgctgatctactgggccagcacaagacacacaggcgtgcccagcagattttctggcagcggctctggcaccgacttcaccctgacaatatccagcctccagcctgaggacttcgccacctactactgccagcagtacaacagctaccctctgaccttcggccagggcaccaaggtggaaatcaaaagaggcggaggcggaagtggaggcggaggatctggcggcggaggctctgaagttcagctgcaacagtctggccccgagctggttaagcctggaacaagcgtgcggatctcctgcaagaccagcggctacaccttcaccgagtacaccatccactgggtcaagcagagccacggcaagagcctggaatggatcggcaacatcaaccccaacaacggcggcaccacctacaaccagaagttcgaggacaaggccacactgaccgtggacaagagcagcagcaccgcctacatggaactgagaagcctgaccagcgaggacagcgccgtgtactattgtgccgccggatggaacttcgactactggggccagggaacaaccctgaccgttagctctacgcgtcagagcatcaagggcaaccacctggtcaaggtgtacgactaccaagaggacggcagcgtgctgctgacatgtgatgccgaggccaagaacatcacctggtttaaggacggcaagatgatcggcttcctgaccgaggacaagaagaagtggaacctgggcagcaacgctaaggaccccagaggcatgtatcagtgcaagggcagccagaacaagagcaagcccctccaggtgtactaccggatgtgccagaactgcatcgagctgaacgccgctaccatcagcggctttctgttcgccgagatcgtgtccatcttcgtgctggccgtgggcgtgtactttatcgctggacaggatggcgtgcggcagagcagagcttccgataagcaaaccctgctgcctaacgaccagctgtaccagcctctgaaggacagagaggacgaccagtacagccacctccagggcaatcagctgagaagaaac

SEQ ID NO: 9927 - DNA, 1212 bp, Artificial Sequence
  Synthetic Polynucloetide
atggccttaccagtgaccgccttgctcctgccgctggccttgctgctccacgccgccaggccggacatccagatgacacagagccctagcagcctgtctgccagcgtgggagacagagtgaccatcacatgcaaggccagccaggatgtgggcacagccgtggattggtatcagcagaagcctggcaaggcccctaagctgctgatctactgggccagcacaagacacacaggcgtgcccagcagattttctggcagcggctctggcaccgacttcaccctgacaatatccagcctccagcctgaggacttcgccacctactactgccagcagtacaacagctaccctctgaccttcggccagggcaccaaggtggaaatcaaaagaggcggaggcggaagtggaggcggaggatctggcggcggaggctctgaagttcagctgcaacagtctggccccgagctggttaagcctggaacaagcgtgcggatctcctgcaagaccagcggctacaccttcaccgagtacaccatccactgggtcaagcagagccacggcaagagcctggaatggatcggcaacatcaaccccaacaacggcggcaccacctacaaccagaagttcgaggacaaggccacactgaccgtggacaagagcagcagcaccgcctacatggaactgagaagcctgaccagcgaggacagcgccgtgtactattgtgccgccggatggaacttcgactactggggccagggaacaaccctgaccgttagctctacgcgtcagagttttgggttgttggaccctaaattgtgctatctgttggacggaatcctgttcatttacggagtgatcctgaccgcattgttcctgcgggttaagttttccagatccgcagacgcacccgcttaccaacaagggcagaaccaactctacaatgaacttaatttggggcggagggaagagtacgacgttctggacaaaaggaggggacgagatcccgagatgggcggaaagcctcagcgaaggaagaatccgcaagaggggctttataacgaactccagaaagataaaatggcagaagcctatagtgagattgggatgaagggagaaaggaggaggggtaaaggtcacgatgggttgtaccaaggattgagcacagccactaaagatacctatgatgcgctccacatgcaggccctgccgccaaga

SEQ ID NO: 9928 - DNA, 1338 bp, Artificial Sequence
  Synthetic Polynucloetide
atggccttaccagtgaccgccttgctcctgccgctggccttgctgctccacgccgccaggccggaagttcagctgcaacagtctggccccgagctggttaagcctggaacaagcgtgcggatctcctgcaagaccagcggctacaccttcaccgagtacaccatccactgggtcaagcagagccacggcaagagcctggaatggatcggcaacatcaaccccaacaacggcggcaccacctacaaccagaagttcgaggacaaggccacactgaccgtggacaagagcagcagcaccgcctacatggaactgagaagcctgaccagcgaggacagcgccgtgtactattgtgccgccggatggaacttcgactactggggccagggaacaaccctgaccgttagctctggcggaggcggaagtggaggcggaggatctggcggcggaggctctgacatccagatgacacagagccctagcagcctgtctgccagcgtgggagacagagtgaccatcacatgcaaggccagccaggatgtgggcacagccgtggattggtatcagcagaagcctggcaaggcccctaagctgctgatctactgggccagcacaagacacacaggcgtgcccagcagattttctggcagcggctctggcaccgacttcaccctgacaatatccagcctccagcctgaggacttcgccacctactactgccagcagtacaacagctaccctctgaccttcggccagggcaccaaggtggaaatcaaaagaacgcgtgacggtaacgaggagatgggaggaatcactcaaaccccttacaaagtctcaatttcaggaacaactgttatccttacatgtccccagtatcctggcagcgagatcctttggcagcataacgacaagaatatagggggagatgaagacgataagaatatcggatctgacgaggatcacttgagcctgaaagagttctccgagcttgaacaaagcggatattatgtgtgctatccgcgcgggtcaaagccggaagacgctaacttttacctttatctccgagccagagtgtgcgaaaattgcatggaaatggacgttatgtccgttgctacaatagttatcgtagatatatgcatcacgggtggactgcttctgctggtttattattggtccaagaatagaaaggccaaagctaaacccgtgaccagaggcgctggcgcaggcggaaggcaaaggggacaaaacaaagaacggccaccaccagtgccaaatccagattatgagcctattcggaaaggacagagggacctgtactctggcctgaatcagagaagaatc

SEQ ID NO: 9929 - DNA, 1233 bp, Artificial Sequence
  Synthetic Polynucloetide
atggccttaccagtgaccgccttgctcctgccgctggccttgctgctccacgccgccaggccggaagttcagctgcaacagtctggccccgagctggttaagcctggaacaagcgtgcggatctcctgcaagaccagcggctacaccttcaccgagtacaccatccactgggtcaagcagagccacggcaagagcctggaatggatcggcaacatcaaccccaacaacggcggcaccacctacaaccagaagttcgaggacaaggccacactgaccgtggacaagagcagcagcaccgcctacatggaactgagaagcctgaccagcgaggacagcgccgtgtactattgtgccgccggatggaacttcgactactggggccagggaacaaccctgaccgttagctctggcggaggcggaagtggaggcggaggatctggcggcggaggctctgacatccagatgacacagagccctagcagcctgtctgccagcgtgggagacagagtgaccatcacatgcaaggccagccaggatgtgggcacagccgtggattggtatcagcagaagcctggcaaggcccctaagctgctgatctactgggccagcacaagacacacaggcgtgcccagcagattttctggcagcggctctggcaccgacttcaccctgacaatatccagcctccagcctgaggacttcgccacctactactgccagcagtacaacagctaccctctgaccttcggccagggcaccaaggtggaaatcaaaagaacgcgtttcaagatccccatcgaggaactggaagatcgggtgttcgtgaactgcaacacctctatcacctgggtggaaggcaccgtgggaacactgctgagcgacatcaccagactggacctcggcaagcggattctggaccctcggggcatctacagatgcaacggcaccgacatctacaaggacaaagaaagcaccgtgcaggtccactacagaatgtgccagtcctgcgtggaactggaccctgctacagtggccggcatcatcgtgaccgatgtgatcgctactctgctgctggctctgggagtgttctgcttcgccggacacgaaacaggcagactgtctggcgctgccgatacacaggccctgctgagaaacgaccaagtgtatcagcccctgcgcgacagagatgatgcccagtattctcacctcggcggcaactgggctagaaacaag

SEQ ID NO: 9930 - DNA, 1263 bp, Artificial Sequence
  Synthetic Polynucloetide
atggccttaccagtgaccgccttgctcctgccgctggccttgctgctccacgccgccaggccggaagttcagctgcaacagtctggccccgagctggttaagcctggaacaagcgtgcggatctcctgcaagaccagcggctacaccttcaccgagtacaccatccactgggtcaagcagagccacggcaagagcctggaatggatcggcaacatcaaccccaacaacggcggcaccacctacaaccagaagttcgaggacaaggccacactgaccgtggacaagagcagcagcaccgcctacatggaactgagaagcctgaccagcgaggacagcgccgtgtactattgtgccgccggatggaacttcgactactggggccagggaacaaccctgaccgttagctctggcggaggcggaagtggaggcggaggatctggcggcggaggctctgacatccagatgacacagagccctagcagcctgtctgccagcgtgggagacagagtgaccatcacatgcaaggccagccaggatgtgggcacagccgtggattggtatcagcagaagcctggcaaggcccctaagctgctgatctactgggccagcacaagacacacaggcgtgcccagcagattttctggcagcggctctggcaccgacttcaccctgacaatatccagcctccagcctgaggacttcgccacctactactgccagcagtacaacagctaccctctgaccttcggccagggcaccaaggtggaaatcaaaagaacgcgtcagagcatcaagggcaaccacctggtcaaggtgtacgactaccaagaggacggcagcgtgctgctgacatgtgatgccgaggccaagaacatcacctggtttaaggacggcaagatgatcggcttcctgaccgaggacaagaagaagtggaacctgggcagcaacgctaaggaccccagaggcatgtatcagtgcaagggcagccagaacaagagcaagcccctccaggtgtactaccggatgtgccagaactgcatcgagctgaacgccgctaccatcagcggctttctgttcgccgagatcgtgtccatcttcgtgctggccgtgggcgtgtactttatcgctggacaggatggcgtgcggcagagcagagcttccgataagcaaaccctgctgcctaacgaccagctgtaccagcctctgaaggacagagaggacgaccagtacagccacctccagggcaatcagctgagaagaaac

SEQ ID NO: 9931 - DNA, 1212 bp, Artificial Sequence
  Synthetic Polynucloetide
atggccttaccagtgaccgccttgctcctgccgctggccttgctgctccacgccgccaggccggaagttcagctgcaacagtctggccccgagctggttaagcctggaacaagcgtgcggatctcctgcaagaccagcggctacaccttcaccgagtacaccatccactgggtcaagcagagccacggcaagagcctggaatggatcggcaacatcaaccccaacaacggcggcaccacctacaaccagaagttcgaggacaaggccacactgaccgtggacaagagcagcagcaccgcctacatggaactgagaagcctgaccagcgaggacagcgccgtgtactattgtgccgccggatggaacttcgactactggggccagggaacaaccctgaccgttagctctggcggaggcggaagtggaggcggaggatctggcggcggaggctctgacatccagatgacacagagccctagcagcctgtctgccagcgtgggagacagagtgaccatcacatgcaaggccagccaggatgtgggcacagccgtggattggtatcagcagaagcctggcaaggcccctaagctgctgatctactgggccagcacaagacacacaggcgtgcccagcagattttctggcagcggctctggcaccgacttcaccctgacaatatccagcctccagcctgaggacttcgccacctactactgccagcagtacaacagctaccctctgaccttcggccagggcaccaaggtggaaatcaaaagaacgcgtcagagttttgggttgttggaccctaaattgtgctatctgttggacggaatcctgttcatttacggagtgatcctgaccgcattgttcctgcgggttaagttttccagatccgcagacgcacccgcttaccaacaagggcagaaccaactctacaatgaacttaatttggggcggagggaagagtacgacgttctggacaaaaggaggggacgagatcccgagatgggcggaaagcctcagcgaaggaagaatccgcaagaggggctttataacgaactccagaaagataaaatggcagaagcctatagtgagattgggatgaagggagaaaggaggaggggtaaaggtcacgatgggttgtaccaaggattgagcacagccactaaagatacctatgatgcgctccacatgcaggccctgccgccaaga

SEQ ID NO: 9932 - DNA, 1914 bp, Artificial Sequence
  Synthetic Polynucloetide
atggccttaccagtgaccgccttgctcctgccgctggccttgctgctccacgccgccaggccggacatccagatgacacagagccctagcagcctgtctgccagcgtgggagacagagtgaccatcacatgcaaggccagccaggatgtgggcacagccgtggattggtatcagcagaagcctggcaaggcccctaagctgctgatctactgggccagcacaagacacacaggcgtgcccagcagattttctggcagcggctctggcaccgacttcaccctgacaatatccagcctccagcctgaggacttcgccacctactactgccagcagtacaacagctaccctctgaccttcggccagggcaccaaggtggaaatcaaaagaggcggaggcggaagtggaggcggaggatctggcggcggaggctctgaagttcagctgcaacagtctggccccgagctggttaagcctggaacaagcgtgcggatctcctgcaagaccagcggctacaccttcaccgagtacaccatccactgggtcaagcagagccacggcaagagcctggaatggatcggcaacatcaaccccaacaacggcggcaccacctacaaccagaagttcgaggacaaggccacactgaccgtggacaagagcagcagcaccgcctacatggaactgagaagcctgaccagcgaggacagcgccgtgtactattgtgccgccggatggaacttcgactactggggccagggaacaaccctgaccgttagctctacgcgtgggagcggcatccagaaccctgatcctgccgtgtaccagctgcgggatagcaagagcagcgacaagagcgtgtgtctgttcaccgacttcgacagccagaccaacgtgtcccagagcaaggactccgacgtgtacatcaccgataagaccgtgctggacatgcggagcatggacttcaagagcaactccgccgtggcctggtccaacaagtccgatttcgcctgcgccaacgccttcaacaacagcattatccccgaggacacattcttcccaagccccgagagcagctgcgacgtgaagctggtggaaaagagcttcgagacagacaccaacctgaacttccagaacctgagcgtgatcggcttcagaatcctgctgctgaaagtggccggctttaacctgctgatgaccctgcggctgtggtccagccgcgccaagagaagcggatctggcgtgaagcagaccctgaatttcgacctgctgaagctggctggcgacgtggaatccaacccaggcccttctagaggccatatgaccgagtacaagcccacggtgcgcctcgccacccgcgacgacgtccccagggccgtacgcaccctcgccgccgcgttcgccgactaccccgccacgcgccacaccgtcgatccggaccgccacatcgagcgggtcaccgagctgcaagaactcttcctcacgcgcgtcgggctcgacatcggcaaggtgtgggtcgcggacgacggcgccgcggtggcggtctggaccacgccggagagcgtcgaagcgggggcggtgttcgccgagatcggcccgcgcatggccgagttgagcggttcccggctggccgcgcagcaacagatggaaggcctcctggcgccgcaccggcccaaggagcccgcgtggttcctggccaccgtcggcgtctcgcccgaccaccagggcaagggtctgggcagcgccgtcgtgctccccggagtggaggcggccgagcgcgccggggtgcccgccttcctggagacctccgcgccccgcaacctccccttctacgagcggctcggcttcaccgtcaccgccgacgtcgaggtgcccgaaggaccgcgcacctggtgcatgacccgcaagcccggtgcctga

SEQ ID NO: 9933 - DNA, 2010 bp, Artificial Sequence
  Synthetic Polynucloetide
atggccttaccagtgaccgccttgctcctgccgctggccttgctgctccacgccgccaggccggacatccagatgacacagagccctagcagcctgtctgccagcgtgggagacagagtgaccatcacatgcaaggccagccaggatgtgggcacagccgtggattggtatcagcagaagcctggcaaggcccctaagctgctgatctactgggccagcacaagacacacaggcgtgcccagcagattttctggcagcggctctggcaccgacttcaccctgacaatatccagcctccagcctgaggacttcgccacctactactgccagcagtacaacagctaccctctgaccttcggccagggcaccaaggtggaaatcaaaagaggcggaggcggaagtggaggcggaggatctggcggcggaggctctgaagttcagctgcaacagtctggccccgagctggttaagcctggaacaagcgtgcggatctcctgcaagaccagcggctacaccttcaccgagtacaccatccactgggtcaagcagagccacggcaagagcctggaatggatcggcaacatcaaccccaacaacggcggcaccacctacaaccagaagttcgaggacaaggccacactgaccgtggacaagagcagcagcaccgcctacatggaactgagaagcctgaccagcgaggacagcgccgtgtactattgtgccgccggatggaacttcgactactggggccagggaacaaccctgaccgttagctctctcgaggacctgaagaacgtgttcccacctgaggtggccgtgttcgagcctagcgaggccgagatcagccacacccagaaagccaccctcgtgtgcctggctaccggcttctaccccgaccatgtggaactgtcttggtgggtcaacggcaaagaggtgcacagcggcgtgtctaccgacccccagccactgaaagaacagcccgccctgaacgacagccggtactgcctgagcagcagactgagagtgtccgccaccttctggcagaacccccggaaccacttcagatgccaggtgcagttctacggcctgagcgagaacgacgagtggacccaggacagagccaagcccgtgacccagatcgtgtctgccgaagcctggggcagagccgattgcggctttaccagcgagagctaccagcagggcgtgctgagcgccaccatcctgtacgagatcctgctgggcaaggccaccctgtacgccgtgctggtgtctgccctggtgctgatggctatggtcaagcggaaggacagccggggaagggccaagcgatctggatctggagcaacaaacttctcactactcaaacaagcaggtgacgtggaggagaatcccgggcctactagaggccatatgaccgagtacaagcccacggtgcgcctcgccacccgcgacgacgtccccagggccgtacgcaccctcgccgccgcgttcgccgactaccccgccacgcgccacaccgtcgatccggaccgccacatcgagcgggtcaccgagctgcaagaactcttcctcacgcgcgtcgggctcgacatcggcaaggtgtgggtcgcggacgacggcgccgcggtggcggtctggaccacgccggagagcgtcgaagcgggggcggtgttcgccgagatcggcccgcgcatggccgagttgagcggttcccggctggccgcgcagcaacagatggaaggcctcctggcgccgcaccggcccaaggagcccgcgtggttcctggccaccgtcggcgtctcgcccgaccaccagggcaagggtctgggcagcgccgtcgtgctccccggagtggaggcggccgagcgcgccggggtgcccgccttcctggagacctccgcgccccgcaacctccccttctacgagcggctcggcttcaccgtcaccgccgacgtcgaggtgcccgaaggaccgcgcacctggtgcatgacccgcaagcccggtgcctga

SEQ ID NO: 9934 - DNA, 2160 bp, Artificial Sequence
  Synthetic Polynucloetide
atggccttaccagtgaccgccttgctcctgccgctggccttgctgctccacgccgccaggccggacatccagatgacacagagccctagcagcctgtctgccagcgtgggagacagagtgaccatcacatgcaaggccagccaggatgtgggcacagccgtggattggtatcagcagaagcctggcaaggcccctaagctgctgatctactgggccagcacaagacacacaggcgtgcccagcagattttctggcagcggctctggcaccgacttcaccctgacaatatccagcctccagcctgaggacttcgccacctactactgccagcagtacaacagctaccctctgaccttcggccagggcaccaaggtggaaatcaaaagaggcggaggcggaagtggaggcggaggatctggcggcggaggctctgaagttcagctgcaacagtctggccccgagctggttaagcctggaacaagcgtgcggatctcctgcaagaccagcggctacaccttcaccgagtacaccatccactgggtcaagcagagccacggcaagagcctggaatggatcggcaacatcaaccccaacaacggcggcaccacctacaaccagaagttcgaggacaaggccacactgaccgtggacaagagcagcagcaccgcctacatggaactgagaagcctgaccagcgaggacagcgccgtgtactattgtgccgccggatggaacttcgactactggggccagggaacaaccctgaccgttagctctacgcgtgagcagaaactgatctcggaagaggatctggggagcggcaccccattcccttctctggcccctcccatcatgctgctggtggacggcaagcagcagatggtggtcgtgtgcctggtgctggatgtggccccacctggactggacagccccatctggtttagcgccggcaatggctctgccctggacgcctttacctacggcccaagccctgccaccgatggcacctggacaaatctggcccacctgagcctgcccagcgaggaactggcttcttgggagcctctcgtgtgccacacaggacctggcgctgagggacacagcagatccacccagcctatgcacctgtctggcgaggccagcaccgccagaacctgtcctcaggaacctctgagaggcacccctggcggagcactgtggctgggagtgctgagactgctgctgttcaagctgctgctgtttgacctgctgctgacctgctcctgtctgtgcgatcctgccggccctctgccttctcctgccaccaccacaagactgagagccctgggcagccacagactgcaccctgccacagagacaggcggcagagaggccacaagcagccctagaccccagcccagagacagaagatggggcgataccccccctggcagaaagcctggatctccagtccgcgccaagagaagcggatctggcgtgaagcagaccctgaatttcgacctgctgaagctggctggcgacgtggaatccaacccaggcccttctagatctagaggccatatgaccgagtacaagcccacggtgcgcctcgccacccgcgacgacgtccccagggccgtacgcaccctcgccgccgcgttcgccgactaccccgccacgcgccacaccgtcgatccggaccgccacatcgagcgggtcaccgagctgcaagaactcttcctcacgcgcgtcgggctcgacatcggcaaggtgtgggtcgcggacgacggcgccgcggtggcggtctggaccacgccggagagcgtcgaagcgggggcggtgttcgccgagatcggcccgcgcatggccgagttgagcggttcccggctggccgcgcagcaacagatggaaggcctcctggcgccgcaccggcccaaggagcccgcgtggttcctggccaccgtcggcgtctcgcccgaccaccagggcaagggtctgggcagcgccgtcgtgctccccggagtggaggcggccgagcgcgccggggtgcccgccttcctggagacctccgcgccccgcaacctccccttctacgagcggctcggcttcaccgtcaccgccgacgtcgaggtgcccgaaggaccgcgcacctggtgcatgacccgcaagcccggtgcctga

SEQ ID NO: 9935 - DNA, 1620 bp, Artificial Sequence; identical to SEQ ID NO: 9797
  Synthetic Polynucloetide

SEQ ID NO: 9936 - DNA, 927 bp, Artificial Sequence; identical to SEQ ID NO: 9798
  Synthetic Polynucloetide

SEQ ID NO: 9937 - DNA, 1335 bp, Artificial Sequence; identical to SEQ ID NO: 9730
  Synthetic Polynucloetide

SEQ ID NO: 9938 - DNA, 834 bp, Artificial Sequence; identical to SEQ ID NO: 9731
  Synthetic Polynucloetide

SEQ ID NO: 9939 - DNA, 1674 bp, Artificial Sequence; identical to SEQ ID NO: 9801
  Synthetic Polynucloetide

SEQ ID NO: 9940 - DNA, 984 bp, Artificial Sequence; identical to SEQ ID NO: 9802
  Synthetic Polynucloetide

SEQ ID NO: 9941 - DNA, 1371 bp, Artificial Sequence; identical to SEQ ID NO: 9734
  Synthetic Polynucloetide

SEQ ID NO: 9942 - DNA, 873 bp, Artificial Sequence; identical to SEQ ID NO: 9735
  Synthetic Polynucloetide

SEQ ID NO: 9943 - DNA, 1914 bp, Artificial Sequence
  Synthetic Polynucloetide
atggccttaccagtgaccgccttgctcctgccgctggccttgctgctccacgccgccaggccggacatccagatgacacagagccctagcagcctgtctgccagcgtgggagacagagtgaccatcacatgcaaggccagccaggatgtgggcacagccgtggattggtatcagcagaagcctggcaaggcccctaagctgctgatctactgggccagcacaagacacacaggcgtgcccagcagattttctggcagcggctctggcaccgacttcaccctgacaatatccagcctccagcctgaggacttcgccacctactactgccagcagtacaacagctaccctctgaccttcggccagggcaccaaggtggaaatcaaaagaggcggaggcggaagtggaggcggaggatctggcggcggaggctctgaagttcagctgcaacagtctggccccgagctggttaagcctggaacaagcgtgcggatctcctgcaagaccagcggctacaccttcaccgagtacaccatccactgggtcaagcagagccacggcaagagcctggaatggatcggcaacatcaaccccaacaacggcggcaccacctacaaccagaagttcgaggacaaggccacactgaccgtggacaagagcagcagcaccgcctacatggaactgagaagcctgaccagcgaggacagcgccgtgtactattgtgccgccggatggaacttcgactactggggccagggaacaaccctgaccgttagctctacgcgtgggagcggcatccagaaccctgatcctgccgtgtaccagctgcgggatagcaagagcagcgacaagagcgtgtgtctgttcaccgacttcgacagccagaccaacgtgtcccagagcaaggactccgacgtgtacatcaccgataagaccgtgctggacatgcggagcatggacttcaagagcaactccgccgtggcctggtccaacaagtccgatttcgcctgcgccaacgccttcaacaacagcattatccccgaggacacattcttcccaagcagcgacgtgccctgcgacgtgaagctggtggaaaagagcttcgagacagacaccaacctgaacttccagaacctgagcgtgatcggcttcagaatcctgctgctgaaagtggccggctttaacctgctgatgaccctgcggctgtggtccagccgcgccaagagaagcggatctggcgtgaagcagaccctgaatttcgacctgctgaagctggctggcgacgtggaatccaacccaggcccttctagaggccatatgaccgagtacaagcccacggtgcgcctcgccacccgcgacgacgtccccagggccgtacgcaccctcgccgccgcgttcgccgactaccccgccacgcgccacaccgtcgatccggaccgccacatcgagcgggtcaccgagctgcaagaactcttcctcacgcgcgtcgggctcgacatcggcaaggtgtgggtcgcggacgacggcgccgcggtggcggtctggaccacgccggagagcgtcgaagcgggggcggtgttcgccgagatcggcccgcgcatggccgagttgagcggttcccggctggccgcgcagcaacagatggaaggcctcctggcgccgcaccggcccaaggagcccgcgtggttcctggccaccgtcggcgtctcgcccgaccaccagggcaagggtctgggcagcgccgtcgtgctccccggagtggaggcggccgagcgcgccggggtgcccgccttcctggagacctccgcgccccgcaacctccccttctacgagcggctcggcttcaccgtcaccgccgacgtcgaggtgcccgaaggaccgcgcacctggtgcatgacccgcaagcccggtgcctga

SEQ ID NO: 9944 - DNA, 2010 bp, Artificial Sequence
  Synthetic Polynucloetide
atggccttaccagtgaccgccttgctcctgccgctggccttgctgctccacgccgccaggccggacatccagatgacacagagccctagcagcctgtctgccagcgtgggagacagagtgaccatcacatgcaaggccagccaggatgtgggcacagccgtggattggtatcagcagaagcctggcaaggcccctaagctgctgatctactgggccagcacaagacacacaggcgtgcccagcagattttctggcagcggctctggcaccgacttcaccctgacaatatccagcctccagcctgaggacttcgccacctactactgccagcagtacaacagctaccctctgaccttcggccagggcaccaaggtggaaatcaaaagaggcggaggcggaagtggaggcggaggatctggcggcggaggctctgaagttcagctgcaacagtctggccccgagctggttaagcctggaacaagcgtgcggatctcctgcaagaccagcggctacaccttcaccgagtacaccatccactgggtcaagcagagccacggcaagagcctggaatggatcggcaacatcaaccccaacaacggcggcaccacctacaaccagaagttcgaggacaaggccacactgaccgtggacaagagcagcagcaccgcctacatggaactgagaagcctgaccagcgaggacagcgccgtgtactattgtgccgccggatggaacttcgactactggggccagggaacaaccctgaccgttagctctctcgaggacctgaagaacgtgttcccacctgaggtggccgtgttcgagcctagcaaggccgagatcgcccacacccagaaagccaccctcgtgtgcctggctaccggcttctaccccgaccatgtggaactgtcttggtgggtcaacggcaaagaggtgcacagcggcgtgtctaccgacccccagccactgaaagaacagcccgccctgaacgacagccggtactgcctgagcagcagactgagagtgtccgccaccttctggcagaacccccggaaccacttcagatgccaggtgcagttctacggcctgagcgagaacgacgagtggacccaggacagagccaagcccgtgacccagatcgtgtctgccgaagcctggggcagagccgattgcggcatcaccagcgccagctaccaccagggcgtgctgagcgccaccatcctgtacgagatcctgctgggcaaggccaccctgtacgccgtgctggtgtctgccctggtgctgatggctatggtcaagcggaaggacagccggggaagggccaagcgatctggatctggagcaacaaacttctcactactcaaacaagcaggtgacgtggaggagaatcccgggcctactagaggccatatgaccgagtacaagcccacggtgcgcctcgccacccgcgacgacgtccccagggccgtacgcaccctcgccgccgcgttcgccgactaccccgccacgcgccacaccgtcgatccggaccgccacatcgagcgggtcaccgagctgcaagaactcttcctcacgcgcgtcgggctcgacatcggcaaggtgtgggtcgcggacgacggcgccgcggtggcggtctggaccacgccggagagcgtcgaagcgggggcggtgttcgccgagatcggcccgcgcatggccgagttgagcggttcccggctggccgcgcagcaacagatggaaggcctcctggcgccgcaccggcccaaggagcccgcgtggttcctggccaccgtcggcgtctcgcccgaccaccagggcaagggtctgggcagcgccgtcgtgctccccggagtggaggcggccgagcgcgccggggtgcccgccttcctggagacctccgcgccccgcaacctccccttctacgagcggctcggcttcaccgtcaccgccgacgtcgaggtgcccgaaggaccgcgcacctggtgcatgacccgcaagcccggtgcctga

SEQ ID NO: 9945 - DNA, 2079 bp, Artificial Sequence
  Synthetic Polynucloetide
atggccttaccagtgaccgccttgctcctgccgctggccttgctgctccacgccgccaggccggacatccagatgacacagagccctagcagcctgtctgccagcgtgggagacagagtgaccatcacatgcaaggccagccaggatgtgggcacagccgtggattggtatcagcagaagcctggcaaggcccctaagctgctgatctactgggccagcacaagacacacaggcgtgcccagcagattttctggcagcggctctggcaccgacttcaccctgacaatatccagcctccagcctgaggacttcgccacctactactgccagcagtacaacagctaccctctgaccttcggccagggcaccaaggtggaaatcaaaagaggcggaggcggaagtggaggcggaggatctggcggcggaggctctgaagttcagctgcaacagtctggccccgagctggttaagcctggaacaagcgtgcggatctcctgcaagaccagcggctacaccttcaccgagtacaccatccactgggtcaagcagagccacggcaagagcctggaatggatcggcaacatcaaccccaacaacggcggcaccacctacaaccagaagttcgaggacaaggccacactgaccgtggacaagagcagcagcaccgcctacatggaactgagaagcctgaccagcgaggacagcgccgtgtactattgtgccgccggatggaacttcgactactggggccagggaacaaccctgaccgttagctctacgcgtgggtctggaggcggaggcagcggcggaggcgggagcggcgacggtaacgaggagatgggaggaatcactcaaaccccttacaaagtctcaatttcaggaacaactgttatccttacatgtccccagtatcctggcagcgagatcctttggcagcataacgacaagaatatagggggagatgaagacgataagaatatcggatctgacgaggatcacttgagcctgaaagagttctccgagcttgaacaaagcggatattatgtgtgctatccgcgcgggtcaaagccggaagacgctaacttttacctttatctccgagccagagtgtgcgaaaattgcatggaaatggacgttatgtccgttgctacaatagttatcgtagatatatgcatcacgggtggactgcttctgctggtttattattggtccaagaatagaaaggccaaagctaaacccgtgaccagaggcgctggcgcaggcggaaggcaaaggggacaaaacaaagaacggccaccaccagtgccaaatccagattatgagcctattcggaaaggacagagggacctgtactctggcctgaatcagagaagaatccgcgccaagagaagcggatctggcgtgaagcagaccctgaatttcgacctgctgaagctggctggcgacgtggaatccaacccaggcccttctagaggccatatgaccgagtacaagcccacggtgcgcctcgccacccgcgacgacgtccccagggccgtacgcaccctcgccgccgcgttcgccgactaccccgccacgcgccacaccgtcgatccggaccgccacatcgagcgggtcaccgagctgcaagaactcttcctcacgcgcgtcgggctcgacatcggcaaggtgtgggtcgcggacgacggcgccgcggtggcggtctggaccacgccggagagcgtcgaagcgggggcggtgttcgccgagatcggcccgcgcatggccgagttgagcggttcccggctggccgcgcagcaacagatggaaggcctcctggcgccgcaccggcccaaggagcccgcgtggttcctggccaccgtcggcgtctcgcccgaccaccagggcaagggtctgggcagcgccgtcgtgctccccggagtggaggcggccgagcgcgccggggtgcccgccttcctggagacctccgcgccccgcaacctccccttctacgagcggctcggcttcaccgtcaccgccgacgtcgaggtgcccgaaggaccgcgcacctggtgcatgacccgcaagcccggtgcctga

SEQ ID NO: 9946 - DNA, 1974 bp, Artificial Sequence
  Synthetic Polynucloetide
atggccttaccagtgaccgccttgctcctgccgctggccttgctgctccacgccgccaggccggacatccagatgacacagagccctagcagcctgtctgccagcgtgggagacagagtgaccatcacatgcaaggccagccaggatgtgggcacagccgtggattggtatcagcagaagcctggcaaggcccctaagctgctgatctactgggccagcacaagacacacaggcgtgcccagcagattttctggcagcggctctggcaccgacttcaccctgacaatatccagcctccagcctgaggacttcgccacctactactgccagcagtacaacagctaccctctgaccttcggccagggcaccaaggtggaaatcaaaagaggcggaggcggaagtggaggcggaggatctggcggcggaggctctgaagttcagctgcaacagtctggccccgagctggttaagcctggaacaagcgtgcggatctcctgcaagaccagcggctacaccttcaccgagtacaccatccactgggtcaagcagagccacggcaagagcctggaatggatcggcaacatcaaccccaacaacggcggcaccacctacaaccagaagttcgaggacaaggccacactgaccgtggacaagagcagcagcaccgcctacatggaactgagaagcctgaccagcgaggacagcgccgtgtactattgtgccgccggatggaacttcgactactggggccagggaacaaccctgaccgttagctctacgcgtgggtctggaggcggaggcagcggcggaggcgggagcggcttcaagatccccatcgaggaactggaagatcgggtgttcgtgaactgcaacacctctatcacctgggtggaaggcaccgtgggaacactgctgagcgacatcaccagactggacctcggcaagcggattctggaccctcggggcatctacagatgcaacggcaccgacatctacaaggacaaagaaagcaccgtgcaggtccactacagaatgtgccagtcctgcgtggaactggaccctgctacagtggccggcatcatcgtgaccgatgtgatcgctactctgctgctggctctgggagtgttctgcttcgccggacacgaaacaggcagactgtctggcgctgccgatacacaggccctgctgagaaacgaccaagtgtatcagcccctgcgcgacagagatgatgcccagtattctcacctcggcggcaactgggctagaaacaagcgcgccaagagaagcggatctggcgtgaagcagaccctgaatttcgacctgctgaagctggctggcgacgtggaatccaacccaggcccttctagaggccatatgaccgagtacaagcccacggtgcgcctcgccacccgcgacgacgtccccagggccgtacgcaccctcgccgccgcgttcgccgactaccccgccacgcgccacaccgtcgatccggaccgccacatcgagcgggtcaccgagctgcaagaactcttcctcacgcgcgtcgggctcgacatcggcaaggtgtgggtcgcggacgacggcgccgcggtggcggtctggaccacgccggagagcgtcgaagcgggggcggtgttcgccgagatcggcccgcgcatggccgagttgagcggttcccggctggccgcgcagcaacagatggaaggcctcctggcgccgcaccggcccaaggagcccgcgtggttcctggccaccgtcggcgtctcgcccgaccaccagggcaagggtctgggcagcgccgtcgtgctccccggagtggaggcggccgagcgcgccggggtgcccgccttcctggagacctccgcgccccgcaacctccccttctacgagcggctcggcttcaccgtcaccgccgacgtcgaggtgcccgaaggaccgcgcacctggtgcatgacccgcaagcccggtgcctga

SEQ ID NO: 9947 - DNA, 2004 bp, Artificial Sequence
  Synthetic Polynucloetide
atggccttaccagtgaccgccttgctcctgccgctggccttgctgctccacgccgccaggccggacatccagatgacacagagccctagcagcctgtctgccagcgtgggagacagagtgaccatcacatgcaaggccagccaggatgtgggcacagccgtggattggtatcagcagaagcctggcaaggcccctaagctgctgatctactgggccagcacaagacacacaggcgtgcccagcagattttctggcagcggctctggcaccgacttcaccctgacaatatccagcctccagcctgaggacttcgccacctactactgccagcagtacaacagctaccctctgaccttcggccagggcaccaaggtggaaatcaaaagaggcggaggcggaagtggaggcggaggatctggcggcggaggctctgaagttcagctgcaacagtctggccccgagctggttaagcctggaacaagcgtgcggatctcctgcaagaccagcggctacaccttcaccgagtacaccatccactgggtcaagcagagccacggcaagagcctggaatggatcggcaacatcaaccccaacaacggcggcaccacctacaaccagaagttcgaggacaaggccacactgaccgtggacaagagcagcagcaccgcctacatggaactgagaagcctgaccagcgaggacagcgccgtgtactattgtgccgccggatggaacttcgactactggggccagggaacaaccctgaccgttagctctacgcgtgggtctggaggcggaggcagcggcggaggcgggagcggccagagcatcaagggcaaccacctggtcaaggtgtacgactaccaagaggacggcagcgtgctgctgacatgtgatgccgaggccaagaacatcacctggtttaaggacggcaagatgatcggcttcctgaccgaggacaagaagaagtggaacctgggcagcaacgctaaggaccccagaggcatgtatcagtgcaagggcagccagaacaagagcaagcccctccaggtgtactaccggatgtgccagaactgcatcgagctgaacgccgctaccatcagcggctttctgttcgccgagatcgtgtccatcttcgtgctggccgtgggcgtgtactttatcgctggacaggatggcgtgcggcagagcagagcttccgataagcaaaccctgctgcctaacgaccagctgtaccagcctctgaaggacagagaggacgaccagtacagccacctccagggcaatcagctgagaagaaaccgcgccaagagaagcggatctggcgtgaagcagaccctgaatttcgacctgctgaagctggctggcgacgtggaatccaacccaggcccttctagaggccatatgaccgagtacaagcccacggtgcgcctcgccacccgcgacgacgtccccagggccgtacgcaccctcgccgccgcgttcgccgactaccccgccacgcgccacaccgtcgatccggaccgccacatcgagcgggtcaccgagctgcaagaactcttcctcacgcgcgtcgggctcgacatcggcaaggtgtgggtcgcggacgacggcgccgcggtggcggtctggaccacgccggagagcgtcgaagcgggggcggtgttcgccgagatcggcccgcgcatggccgagttgagcggttcccggctggccgcgcagcaacagatggaaggcctcctggcgccgcaccggcccaaggagcccgcgtggttcctggccaccgtcggcgtctcgcccgaccaccagggcaagggtctgggcagcgccgtcgtgctccccggagtggaggcggccgagcgcgccggggtgcccgccttcctggagacctccgcgccccgcaacctccccttctacgagcggctcggcttcaccgtcaccgccgacgtcgaggtgcccgaaggaccgcgcacctggtgcatgacccgcaagcccggtgcctga

SEQ ID NO: 9948 - DNA, 1953 bp, Artificial Sequence
  Synthetic Polynucloetide
atggccttaccagtgaccgccttgctcctgccgctggccttgctgctccacgccgccaggccggacatccagatgacacagagccctagcagcctgtctgccagcgtgggagacagagtgaccatcacatgcaaggccagccaggatgtgggcacagccgtggattggtatcagcagaagcctggcaaggcccctaagctgctgatctactgggccagcacaagacacacaggcgtgcccagcagattttctggcagcggctctggcaccgacttcaccctgacaatatccagcctccagcctgaggacttcgccacctactactgccagcagtacaacagctaccctctgaccttcggccagggcaccaaggtggaaatcaaaagaggcggaggcggaagtggaggcggaggatctggcggcggaggctctgaagttcagctgcaacagtctggccccgagctggttaagcctggaacaagcgtgcggatctcctgcaagaccagcggctacaccttcaccgagtacaccatccactgggtcaagcagagccacggcaagagcctggaatggatcggcaacatcaaccccaacaacggcggcaccacctacaaccagaagttcgaggacaaggccacactgaccgtggacaagagcagcagcaccgcctacatggaactgagaagcctgaccagcgaggacagcgccgtgtactattgtgccgccggatggaacttcgactactggggccagggaacaaccctgaccgttagctctacgcgtgggtctggaggcggaggcagcggcggaggcgggagcggccagagttttgggttgttggaccctaaattgtgctatctgttggacggaatcctgttcatttacggagtgatcctgaccgcattgttcctgcgggttaagttttccagatccgcagacgcacccgcttaccaacaagggcagaaccaactctacaatgaacttaatttggggcggagggaagagtacgacgttctggacaaaaggaggggacgagatcccgagatgggcggaaagcctcagcgaaggaagaatccgcaagaggggctttataacgaactccagaaagataaaatggcagaagcctatagtgagattgggatgaagggagaaaggaggaggggtaaaggtcacgatgggttgtaccaaggattgagcacagccactaaagatacctatgatgcgctccacatgcaggccctgccgccaagacgcgccaagagaagcggatctggcgtgaagcagaccctgaatttcgacctgctgaagctggctggcgacgtggaatccaacccaggcccttctagaggccatatgaccgagtacaagcccacggtgcgcctcgccacccgcgacgacgtccccagggccgtacgcaccctcgccgccgcgttcgccgactaccccgccacgcgccacaccgtcgatccggaccgccacatcgagcgggtcaccgagctgcaagaactcttcctcacgcgcgtcgggctcgacatcggcaaggtgtgggtcgcggacgacggcgccgcggtggcggtctggaccacgccggagagcgtcgaagcgggggcggtgttcgccgagatcggcccgcgcatggccgagttgagcggttcccggctggccgcgcagcaacagatggaaggcctcctggcgccgcaccggcccaaggagcccgcgtggttcctggccaccgtcggcgtctcgcccgaccaccagggcaagggtctgggcagcgccgtcgtgctccccggagtggaggcggccgagcgcgccggggtgcccgccttcctggagacctccgcgccccgcaacctccccttctacgagcggctcggcttcaccgtcaccgccgacgtcgaggtgcccgaaggaccgcgcacctggtgcatgacccgcaagcccggtgcctga

SEQ ID NO: 9949 - DNA, 2253 bp, Artificial Sequence
  Synthetic Polynucloetide
atggccttaccagtgaccgccttgctcctgccgctggccttgctgctccacgccgccaggccggaagtgcagctggttgaatctggcggaggactggttcagcctggcggatctctgagactgtcttgtgccgccagcggcttcagcttcagcgacttttggatgagctgggtccgacaggcccctggcaaaggacttgaatgggtcgccacaatcagccaggccggcagcgagaaggactacgtggactctgtgaagggcagattcaccatcagccgggacaacgccaagaagtccctgtacctccagatgaacagcctgagagccgaggacaccgccgtgtactattgtgcctctggcgtgtacagcttcgactacagaggccagggcaccctggtcacagtctcttctggtaccggcggaggcggatctggcggcggaggtagcggtggcggaggatctgaattcgacatccagatgacacagagccctagcagcctgtctgccagcgtgggagacagagtgaccatcacatgcaaggccagccaggatgtgggcacagccgtggattggtatcagcagaagcctggcaaggcccctaagctgctgatctactgggccagcacaagacacacaggcgtgcccagcagattttctggcagcggctctggcaccgacttcaccctgacaatatccagcctccagcctgaggacttcgccacctactactgccagcagtacaacagctaccctctgaccttcggccagggcaccaaggtggaaatcaaaagactcgaggacctgaagaacgtgttcccacctgaggtggccgtgttcgagcctagcgaggccgagatcagccacacccagaaagccaccctcgtgtgcctggctaccggcttctaccccgaccatgtggaactgtcttggtgggtcaacggcaaagaggtgcacagcggcgtgtgtaccgacccccagccactgaaagaacagcccgccctgaacgacagccggtactgcctgagcagcagactgagagtgtccgccaccttctggcagaacccccggaaccacttcagatgccaggtgcagttctacggcctgagcgagaacgacgagtggacccaggacagagccaagcccgtgacccagatcgtgtctgccgaagcctggggcagagccgattgcggctttaccagcgagagctaccagcagggcgtgctgagcgccaccatcctgtacgagatcctgctgggcaaggccaccctgtacgccgtgctggtgtctgccctggtgctgatggctatggtcaagcggaaggacagccggggaagggccaagcgatctggatctggagcaacaaacttctcactactcaaacaagcaggtgacgtggaggagaatcccgggcctactagtatggactggatttggcgcatccttttccttgtcggcgctgctaccggcgcgcattccttcgaagaagttcagctgcaacagtctggccccgagctggttaagcctggaacaagcgtgcggatctcctgcaagaccagcggctacaccttcaccgagtacaccatccactgggtcaagcagagccacggcaagagcctggaatggatcggcaacatcaaccccaacaacggcggcaccacctacaaccagaagttcgaggacaaggccacactgaccgtggacaagagcagcagcaccgcctacatggaactgagaagcctgaccagcgaggacagcgccgtgtactattgtgccgccggatggaacttcgactactggggccagggaacaaccctgaccgttagctctacgcgtatccagaaccctgatcctgccgtgtaccagctgcgggatagcaagagcagcgacaagagcgtgtgtctgttcaccgacttcgacagccagaccaacgtgtcccagagcaaggactccgacgtgtacatcaccgataagtgcgtgctggacatgcggagcatggacttcaagagcaactccgccgtggcctggtccaacaagtccgatttcgcctgcgccaacgccttcaacaacagcattatccccgaggacacattcttcccaagccccgagagcagctgcgacgtgaagctggtggaaaagagcttcgagacagacaccaacctgaacttccagaacctgagcgtgatcggcttcagaatcctgctgctgaaagtggccggctttaacctgctgatgaccctgcggctgtggtccagc

SEQ ID NO: 9950 - DNA, 2265 bp, Artificial Sequence
  Synthetic Polynucloetide
atggccttaccagtgaccgccttgctcctgccgctggccttgctgctccacgccgccaggccggaagtgcagctggttgaatctggcggaggactggttcagcctggcggatctctgagactgtcttgtgccgccagcggcttcagcttcagcgacttttggatgagctgggtccgacaggcccctggcaaaggacttgaatgggtcgccacaatcagccaggccggcagcgagaaggactacgtggactctgtgaagggcagattcaccatcagccgggacaacgccaagaagtccctgtacctccagatgaacagcctgagagccgaggacaccgccgtgtactattgtgcctctggcgtgtacagcttcgactacagaggccagggcaccctggtcacagtctcttctggtaccggcggaggcggatctggcggcggaggtagcggtggcggaggatctgaattcgacatccagatgacacagagccctagcagcctgtctgccagcgtgggagacagagtgaccatcacatgcaaggccagccaggatgtgggcacagccgtggattggtatcagcagaagcctggcaaggcccctaagctgctgatctactgggccagcacaagacacacaggcgtgcccagcagattttctggcagcggctctggcaccgacttcaccctgacaatatccagcctccagcctgaggacttcgccacctactactgccagcagtacaacagctaccctctgaccttcggccagggcaccaaggtggaaatcaaaagactcgagatccagaaccctgatcctgccgtgtaccagctgcgggatagcaagagcagcgacaagagcgtgtgtctgttcaccgacttcgacagccagaccaacgtgtcccagagcaaggactccgacgtgtacatcaccgataagtgcgtgctggacatgcggagcatggacttcaagagcaactccgccgtggcctggtccaacaagtccgatttcgcctgcgccaacgccttcaacaacagcattatccccgaggacacattcttcccaagccccgagagcagctgcgacgtgaagctggtggaaaagagcttcgagacagacaccaacctgaacttccagaacctgagcgtgatcggcttcagaatcctgctgctgaaagtggccggctttaacctgctgatgaccctgcggctgtggtccagccgcgccaagagaagcggatctggcgtgaagcagaccctgaatttcgacctgctgaagctggctggcgacgtggaatccaacccaggccctactagtatggactggatttggcgcatccttttccttgtcggcgctgctaccggcgcgcattccttcgaagaagttcagctgcaacagtctggccccgagctggttaagcctggaacaagcgtgcggatctcctgcaagaccagcggctacaccttcaccgagtacaccatccactgggtcaagcagagccacggcaagagcctggaatggatcggcaacatcaaccccaacaacggcggcaccacctacaaccagaagttcgaggacaaggccacactgaccgtggacaagagcagcagcaccgcctacatggaactgagaagcctgaccagcgaggacagcgccgtgtactattgtgccgccggatggaacttcgactactggggccagggaacaaccctgaccgttagctctacgcgtgaggacctgaagaacgtgttcccacctgaggtggccgtgttcgagcctagcgaggccgagatcagccacacccagaaagccaccctcgtgtgcctggctaccggcttctaccccgaccatgtggaactgtcttggtgggtcaacggcaaagaggtgcacagcggcgtgtgtaccgacccccagccactgaaagaacagcccgccctgaacgacagccggtactgcctgagcagcagactgagagtgtccgccaccttctggcagaacccccggaaccacttcagatgccaggtgcagttctacggcctgagcgagaacgacgagtggacccaggacagagccaagcccgtgacccagatcgtgtctgccgaagcctggggcagagccgattgcggctttaccagcgagagctaccagcagggcgtgctgagcgccaccatcctgtacgagatcctgctgggcaaggccaccctgtacgccgtgctggtgtctgccctggtgctgatggctatggtcaagcggaaggacagccgggga

SEQ ID NO: 9951 - DNA, 2841 bp, Artificial Sequence
  Synthetic Polynucloetide
atggccttaccagtgaccgccttgctcctgccgctggccttgctgctccacgccgccaggccggaagtgcagctggttgaatctggcggaggactggttcagcctggcggatctctgagactgtcttgtgccgccagcggcttcagcttcagcgacttttggatgagctgggtccgacaggcccctggcaaaggacttgaatgggtcgccacaatcagccaggccggcagcgagaaggactacgtggactctgtgaagggcagattcaccatcagccgggacaacgccaagaagtccctgtacctccagatgaacagcctgagagccgaggacaccgccgtgtactattgtgcctctggcgtgtacagcttcgactacagaggccagggcaccctggtcacagtctcttctggtaccggcggaggcggatctggcggcggaggtagcggtggcggaggatctgaattcgacatccagatgacacagagccctagcagcctgtctgccagcgtgggagacagagtgaccatcacatgcaaggccagccaggatgtgggcacagccgtggattggtatcagcagaagcctggcaaggcccctaagctgctgatctactgggccagcacaagacacacaggcgtgcccagcagattttctggcagcggctctggcaccgacttcaccctgacaatatccagcctccagcctgaggacttcgccacctactactgccagcagtacaacagctaccctctgaccttcggccagggcaccaaggtggaaatcaaaagactcgaggacctgaagaacgtgttcccacctgaggtggccgtgttcgagcctagcgaggccgagatcagccacacccagaaagccaccctcgtgtgcctggctaccggcttctaccccgaccatgtggaactgtcttggtgggtcaacggcaaagaggtgcacagcggcgtgtctaccgacccccagccactgaaagaacagcccgccctgaacgacagccggtactgcctgagcagcagactgagagtgtccgccaccttctggcagaacccccggaaccacttcagatgccaggtgcagttctacggcctgagcgagaacgacgagtggacccaggacagagccaagcccgtgacccagatcgtgtctgccgaagcctggggcagagccgattgcggatcccagagcttcggcctgctggaccccaagctgtgctacctgctggatggcatcctgttcatctacggcgtgatcctgaccgccctgttcctgagagtgaagttcagcagaagcgccgacgcccctgcctaccagcagggacagaaccaactgtacaacgagctgaacctgggcagacgggaagagtacgacgtgctggacaagcggagaggcagggaccctgagatgggcggaaagccccagcggagaaagaacccccaggaaggactgtataacgaactccagaaagacaagatggccgaagcctacagcgagatcggcatgaagggcgagcggagaagaggcaagggccacgatggcctgtaccagggcctgagcaccgccaccaaggacacctatgacgccctgcacatgcaggccctgcctccaagaagggccaagcgatctggatctggagcaacaaacttctcactactcaaacaagcaggtgacgtggaggagaatcccgggcctactagtatggactggatttggcgcatccttttccttgtcggcgctgctaccggcgcgcattccttcgaagaagttcagctgcaacagtctggccccgagctggttaagcctggaacaagcgtgcggatctcctgcaagaccagcggctacaccttcaccgagtacaccatccactgggtcaagcagagccacggcaagagcctggaatggatcggcaacatcaaccccaacaacggcggcaccacctacaaccagaagttcgaggacaaggccacactgaccgtggacaagagcagcagcaccgcctacatggaactgagaagcctgaccagcgaggacagcgccgtgtactattgtgccgccggatggaacttcgactactggggccagggaacaaccctgaccgttagctctacgcgtatccagaaccctgatcctgccgtgtaccagctgcgggatagcaagagcagcgacaagagcgtgtgtctgttcaccgacttcgacagccagaccaacgtgtcccagagcaaggactccgacgtgtacatcaccgataagaccgtgctggacatgcggagcatggacttcaagagcaactccgccgtggcctggtccaacaagtccgatttcgcctgcgccaacgccttcaacaacagcattatccccgaggacacattcttcccaagccccgagagcagctgcggtacccagagttttgggttgttggaccctaaattgtgctatctgttggacggaatcctgttcatttacggagtgatcctgaccgcattgttcctgcgggttaagttttccagatccgcagacgcacccgcttaccaacaagggcagaaccaactctacaatgaacttaatttggggcggagggaagagtacgacgttctggacaaaaggaggggacgagatcccgagatgggcggaaagcctcagcgaaggaagaatccgcaagaggggctttataacgaactccagaaagataaaatggcagaagcctatagtgagattgggatgaagggagaaaggaggaggggtaaaggtcacgatgggttgtaccaaggattgagcacagccactaaagatacctatgatgcgctccacatgcaggccctgccgccaaga

SEQ ID NO: 9952 - DNA, 2331 bp, Artificial Sequence
  Synthetic Polynucloetide
atggccttaccagtgaccgccttgctcctgccgctggccttgctgctccacgccgccaggccggaagtgcagctggttgaatctggcggaggactggttcagcctggcggatctctgagactgtcttgtgccgccagcggcttcagcttcagcgacttttggatgagctgggtccgacaggcccctggcaaaggacttgaatgggtcgccacaatcagccaggccggcagcgagaaggactacgtggactctgtgaagggcagattcaccatcagccgggacaacgccaagaagtccctgtacctccagatgaacagcctgagagccgaggacaccgccgtgtactattgtgcctctggcgtgtacagcttcgactacagaggccagggcaccctggtcacagtctcttctggtaccggcggaggcggatctggcggcggaggtagcggtggcggaggatctgaattcgacatccagatgacacagagccctagcagcctgtctgccagcgtgggagacagagtgaccatcacatgcaaggccagccaggatgtgggcacagccgtggattggtatcagcagaagcctggcaaggcccctaagctgctgatctactgggccagcacaagacacacaggcgtgcccagcagattttctggcagcggctctggcaccgacttcaccctgacaatatccagcctccagcctgaggacttcgccacctactactgccagcagtacaacagctaccctctgaccttcggccagggcaccaaggtggaaatcaaaagactcgagggacagcctaaggccaatcctaccgtgacactgttccctccaagcagcgaagaactccaggccaacaaggccacacttgtgtgcctgatctccgacttctaccctggggctgtgacagtggcttggaaggccgatggatctcctgtgaaagccggcgtggaaaccaccaagccatccaagcagagcaacaacaaatacgccgccagctcctacctgagcctgacacctgagcagtggaagtcccacagatcctacagctgccaagtgacccacgaaggcagcaccgtggaaaagacagtggcccctacagagtgcagccccatcaagaccgatgtgattacaatggaccccaaggacaactgctccaaggacgccaacgataccctgctgctccagctgaccaacaccagcgcctactacatgtacttgttgctgctgctgaagtccgtggtgtacttcgccatcatcacatgctgcctgctgcggagaaccgccttctgctgcaacggcgagaagtctagggccaagcgatctggatctggagcaacaaacttctcactactcaaacaagcaggtgacgtggaggagaatcccgggcctactagtatggactggatttggcgcatccttttccttgtcggcgctgctaccggcgcgcattccttcgaagaagttcagctgcaacagtctggccccgagctggttaagcctggaacaagcgtgcggatctcctgcaagaccagcggctacaccttcaccgagtacaccatccactgggtcaagcagagccacggcaagagcctggaatggatcggcaacatcaaccccaacaacggcggcaccacctacaaccagaagttcgaggacaaggccacactgaccgtggacaagagcagcagcaccgcctacatggaactgagaagcctgaccagcgaggacagcgccgtgtactattgtgccgccggatggaacttcgactactggggccagggaacaaccctgaccgttagctctacgcgtgcctctacaaagggaccctccgtgtttcctctggctcccagcagcaagtctacaagcggaggaacagccgctctgggctgcctggtcaaggattactttcccgagcctgtgaccgtgtcctggaatagcggagcactgacaagcggcgtgcacacctttccagccgtgctgcaaagcagcggcctgtactctctgagcagcgtggtcacagtgcctagctctagcctgggcacccagacctacatctgcaatgtgaaccacaagcctagcaacaccaaggtggacaagagagtggaacccaagagctgtgaagtgaaaaccgactccaccgaccacgtgaagcccaaagagacagagaacaccaagcagcccagcaagagctgccacaagcccaaggccatcgtgcacaccgagaaagtgaacatgatgagcctgaccgtgctgggcctgcggatgctgttcgccaaaaccgtggccgtgaacttcctgctgaccgccaagctgttcttcctc

SEQ ID NO: 9953 - DNA, 2274 bp, Artificial Sequence
  Synthetic Polynucloetide
atggccttaccagtgaccgccttgctcctgccgctggccttgctgctccacgccgccaggccggaagtgcagctggttgaatctggcggaggactggttcagcctggcggatctctgagactgtcttgtgccgccagcggcttcagcttcagcgacttttggatgagctgggtccgacaggcccctggcaaaggacttgaatgggtcgccacaatcagccaggccggcagcgagaaggactacgtggactctgtgaagggcagattcaccatcagccgggacaacgccaagaagtccctgtacctccagatgaacagcctgagagccgaggacaccgccgtgtactattgtgcctctggcgtgtacagcttcgactacagaggccagggcaccctggtcacagtctcttctggtaccggcggaggcggatctggcggcggaggtagcggtggcggaggatctgaattcgacatccagatgacacagagccctagcagcctgtctgccagcgtgggagacagagtgaccatcacatgcaaggccagccaggatgtgggcacagccgtggattggtatcagcagaagcctggcaaggcccctaagctgctgatctactgggccagcacaagacacacaggcgtgcccagcagattttctggcagcggctctggcaccgacttcaccctgacaatatccagcctccagcctgaggacttcgccacctactactgccagcagtacaacagctaccctctgaccttcggccagggcaccaaggtggaaatcaaaagactcgagggacagcctaaggccaatcctaccgtgacactgttccctccaagcagcgaagaactccaggccaacaaggccacacttgtgtgcctgatctccgacttctaccctggggctgtgacagtggcttggaaggccgatggatctcctgtgaaagccggcgtggaaaccaccaagccatccaagcagagcaacaacaaatacgccgccagctcctacctgagcctgacacctgagcagtggaagtcccacagatcctacagctgccaagtgacccacgaaggcagcaccgtggaaaagacagtggcccctacagagtgcagcggcagagccgattgcggctttaccagcgagagctaccagcagggcgtgctgagcgccaccatcctgtacgagatcctgctgggcaaggccaccctgtacgccgtgctggtgtctgccctggtgctgatggctatggtcaagcggaaggacagccggggacgcgccaagagaagcggatctggcgtgaagcagaccctgaatttcgacctgctgaagctggctggcgacgtggaatccaacccaggccctactagtatggactggatttggcgcatccttttccttgtcggcgctgctaccggcgcgcattccttcgaagaagttcagctgcaacagtctggccccgagctggttaagcctggaacaagcgtgcggatctcctgcaagaccagcggctacaccttcaccgagtacaccatccactgggtcaagcagagccacggcaagagcctggaatggatcggcaacatcaaccccaacaacggcggcaccacctacaaccagaagttcgaggacaaggccacactgaccgtggacaagagcagcagcaccgcctacatggaactgagaagcctgaccagcgaggacagcgccgtgtactattgtgccgccggatggaacttcgactactggggccagggaacaaccctgaccgttagctctacgcgtgcctctacaaagggaccctccgtgtttcctctggctcccagcagcaagtctacaagcggaggaacagccgctctgggctgcctggtcaaggattactttcccgagcctgtgaccgtgtcctggaatagcggagcactgacaagcggcgtgcacacctttccagccgtgctgcaaagcagcggcctgtactctctgagcagcgtggtcacagtgcctagctctagcctgggcacccagacctacatctgcaatgtgaaccacaagcctagcaacaccaaggtggacaagagagtggaacccaagagctgtatccccgaggacacattcttcccaagccccgagagcagctgcgacgtgaagctggtggaaaagagcttcgagacagacaccaacctgaacttccagaacctgagcgtgatcggcttcagaatcctgctgctgaaagtggccggctttaacctgctgatgaccctgcggctgtggtccagc

SEQ ID NO: 9954 - DNA, 2676 bp, Artificial Sequence
  Synthetic Polynucloetide
atggccttaccagtgaccgccttgctcctgccgctggccttgctgctccacgccgccaggccggaagtgcagctggttgaatctggcggaggactggttcagcctggcggatctctgagactgtcttgtgccgccagcggcttcagcttcagcgacttttggatgagctgggtccgacaggcccctggcaaaggacttgaatgggtcgccacaatcagccaggccggcagcgagaaggactacgtggactctgtgaagggcagattcaccatcagccgggacaacgccaagaagtccctgtacctccagatgaacagcctgagagccgaggacaccgccgtgtactattgtgcctctggcgtgtacagcttcgactacagaggccagggcaccctggtcacagtctcttctggtaccggcggaggcggatctggcggcggaggtagcggtggcggaggatctgaattcgacatccagatgacacagagccctagcagcctgtctgccagcgtgggagacagagtgaccatcacatgcaaggccagccaggatgtgggcacagccgtggattggtatcagcagaagcctggcaaggcccctaagctgctgatctactgggccagcacaagacacacaggcgtgcccagcagattttctggcagcggctctggcaccgacttcaccctgacaatatccagcctccagcctgaggacttcgccacctactactgccagcagtacaacagctaccctctgaccttcggccagggcaccaaggtggaaatcaaaagactcgagatccagaaccctgatcctgccgtgtaccagctgcgggatagcaagagcagcgacaagagcgtgtgtctgttcaccgacttcgacagccagaccaacgtgtcccagagcaaggactccgacgtgtacatcaccgataagtgcgtgctggacatgcggagcatggacttcaagagcaactccgccgtggcctggtccaacaagtccgatttcgcctgcgccaacgccttcaacaacagcattatccccgaggacacattcttcccaagccccgagagcagctgcgacgtgaagctggtggaaaagagcttcgagacagacaccaacctgaacttccagaacctgagcgtgatcggcttcagaatcctgctgctgaaagtggccggctttaacctgctgatgaccctgcggctgtggtccagccgcgccaagagaagcggatctggcgtgaagcagaccctgaatttcgacctgctgaagctggctggcgacgtggaatccaacccaggccctactagtatggactggatttggcgcatccttttccttgtcggcgctgctaccggcgcgcattccgggccccagctccagctgcaagagtctggacctggcctggtcaagcctagcgagacactgagcctgacctgtaccgtgtccggcgatagcatcagcagcggcgattactactggggctggatcagacagcctcctggcaaaggactggaatggatcggccacatctactacagcggcgtgacctactacaaccccagcctgaagtccagagtgaccatcagcgtggacaccagccggaaccagttctccctgaagctgtctagcgtgacagccgccgataccgccgtgtactactgcaccagagaggacagcagcaactggcggagtagaggccagggaacactggtcacagttagctctggatccggcggaggcggaagtggaggcggaggatctggcggcggaggctctttcgaagaagttcagctgcaacagtctggccccgagctggttaagcctggaacaagcgtgcggatctcctgcaagaccagcggctacaccttcaccgagtacaccatccactgggtcaagcagagccacggcaagagcctggaatggatcggcaacatcaaccccaacaacggcggcaccacctacaaccagaagttcgaggacaaggccacactgaccgtggacaagagcagcagcaccgcctacatggaactgagaagcctgaccagcgaggacagcgccgtgtactattgtgccgccggatggaacttcgactactggggccagggaacaaccctgaccgttagctctacgcgtgaggacctgaagaacgtgttcccacctgaggtggccgtgttcgagcctagcgaggccgagatcagccacacccagaaagccaccctcgtgtgcctggctaccggcttctaccccgaccatgtggaactgtcttggtgggtcaacggcaaagaggtgcacagcggcgtgtgtaccgacccccagccactgaaagaacagcccgccctgaacgacagccggtactgcctgagcagcagactgagagtgtccgccaccttctggcagaacccccggaaccacttcagatgccaggtgcagttctacggcctgagcgagaacgacgagtggacccaggacagagccaagcccgtgacccagatcgtgtctgccgaagcctggggcagagccgattgcggctttaccagcgagagctaccagcagggcgtgctgagcgccaccatcctgtacgagatcctgctgggcaaggccaccctgtacgccgtgctggtgtctgccctggtgctgatggctatggtcaagcggaaggacagccgggga

SEQ ID NO: 9955 - DNA, 3252 bp, Artificial Sequence
  Synthetic Polynucloetide
atggccttaccagtgaccgccttgctcctgccgctggccttgctgctccacgccgccaggccggaagtgcagctggttgaatctggcggaggactggttcagcctggcggatctctgagactgtcttgtgccgccagcggcttcagcttcagcgacttttggatgagctgggtccgacaggcccctggcaaaggacttgaatgggtcgccacaatcagccaggccggcagcgagaaggactacgtggactctgtgaagggcagattcaccatcagccgggacaacgccaagaagtccctgtacctccagatgaacagcctgagagccgaggacaccgccgtgtactattgtgcctctggcgtgtacagcttcgactacagaggccagggcaccctggtcacagtctcttctggtaccggcggaggcggatctggcggcggaggtagcggtggcggaggatctgaattcgacatccagatgacacagagccctagcagcctgtctgccagcgtgggagacagagtgaccatcacatgcaaggccagccaggatgtgggcacagccgtggattggtatcagcagaagcctggcaaggcccctaagctgctgatctactgggccagcacaagacacacaggcgtgcccagcagattttctggcagcggctctggcaccgacttcaccctgacaatatccagcctccagcctgaggacttcgccacctactactgccagcagtacaacagctaccctctgaccttcggccagggcaccaaggtggaaatcaaaagactcgaggacctgaagaacgtgttcccacctgaggtggccgtgttcgagcctagcgaggccgagatcagccacacccagaaagccaccctcgtgtgcctggctaccggcttctaccccgaccatgtggaactgtcttggtgggtcaacggcaaagaggtgcacagcggcgtgtctaccgacccccagccactgaaagaacagcccgccctgaacgacagccggtactgcctgagcagcagactgagagtgtccgccaccttctggcagaacccccggaaccacttcagatgccaggtgcagttctacggcctgagcgagaacgacgagtggacccaggacagagccaagcccgtgacccagatcgtgtctgccgaagcctggggcagagccgattgcggatcccagagcttcggcctgctggaccccaagctgtgctacctgctggatggcatcctgttcatctacggcgtgatcctgaccgccctgttcctgagagtgaagttcagcagaagcgccgacgcccctgcctaccagcagggacagaaccaactgtacaacgagctgaacctgggcagacgggaagagtacgacgtgctggacaagcggagaggcagggaccctgagatgggcggaaagccccagcggagaaagaacccccaggaaggactgtataacgaactccagaaagacaagatggccgaagcctacagcgagatcggcatgaagggcgagcggagaagaggcaagggccacgatggcctgtaccagggcctgagcaccgccaccaaggacacctatgacgccctgcacatgcaggccctgcctccaagaagggccaagcgatctggatctggagcaacaaacttctcactactcaaacaagcaggtgacgtggaggagaatcccgggcctactagtatggactggatttggcgcatccttttccttgtcggcgctgctaccggcgcgcattccgggccccagctccagctgcaagagtctggacctggcctggtcaagcctagcgagacactgagcctgacctgtaccgtgtccggcgatagcatcagcagcggcgattactactggggctggatcagacagcctcctggcaaaggactggaatggatcggccacatctactacagcggcgtgacctactacaaccccagcctgaagtccagagtgaccatcagcgtggacaccagccggaaccagttctccctgaagctgtctagcgtgacagccgccgataccgccgtgtactactgcaccagagaggacagcagcaactggcggagtagaggccagggaacactggtcacagttagctctggatccggcggaggcggaagtggaggcggaggatctggcggcggaggctctttcgaagaagttcagctgcaacagtctggccccgagctggttaagcctggaacaagcgtgcggatctcctgcaagaccagcggctacaccttcaccgagtacaccatccactgggtcaagcagagccacggcaagagcctggaatggatcggcaacatcaaccccaacaacggcggcaccacctacaaccagaagttcgaggacaaggccacactgaccgtggacaagagcagcagcaccgcctacatggaactgagaagcctgaccagcgaggacagcgccgtgtactattgtgccgccggatggaacttcgactactggggccagggaacaaccctgaccgttagctctacgcgtatccagaaccctgatcctgccgtgtaccagctgcgggatagcaagagcagcgacaagagcgtgtgtctgttcaccgacttcgacagccagaccaacgtgtcccagagcaaggactccgacgtgtacatcaccgataagaccgtgctggacatgcggagcatggacttcaagagcaactccgccgtggcctggtccaacaagtccgatttcgcctgcgccaacgccttcaacaacagcattatccccgaggacacattcttcccaagccccgagagcagctgcggtacccagagttttgggttgttggaccctaaattgtgctatctgttggacggaatcctgttcatttacggagtgatcctgaccgcattgttcctgcgggttaagttttccagatccgcagacgcacccgcttaccaacaagggcagaaccaactctacaatgaacttaatttggggcggagggaagagtacgacgttctggacaaaaggaggggacgagatcccgagatgggcggaaagcctcagcgaaggaagaatccgcaagaggggctttataacgaactccagaaagataaaatggcagaagcctatagtgagattgggatgaagggagaaaggaggaggggtaaaggtcacgatgggttgtaccaaggattgagcacagccactaaagatacctatgatgcgctccacatgcaggccctgccgccaaga

SEQ ID NO: 9956 - DNA, 2742 bp, Artificial Sequence
  Synthetic Polynucloetide
atggccttaccagtgaccgccttgctcctgccgctggccttgctgctccacgccgccaggccggaagtgcagctggttgaatctggcggaggactggttcagcctggcggatctctgagactgtcttgtgccgccagcggcttcagcttcagcgacttttggatgagctgggtccgacaggcccctggcaaaggacttgaatgggtcgccacaatcagccaggccggcagcgagaaggactacgtggactctgtgaagggcagattcaccatcagccgggacaacgccaagaagtccctgtacctccagatgaacagcctgagagccgaggacaccgccgtgtactattgtgcctctggcgtgtacagcttcgactacagaggccagggcaccctggtcacagtctcttctggtaccggcggaggcggatctggcggcggaggtagcggtggcggaggatctgaattcgacatccagatgacacagagccctagcagcctgtctgccagcgtgggagacagagtgaccatcacatgcaaggccagccaggatgtgggcacagccgtggattggtatcagcagaagcctggcaaggcccctaagctgctgatctactgggccagcacaagacacacaggcgtgcccagcagattttctggcagcggctctggcaccgacttcaccctgacaatatccagcctccagcctgaggacttcgccacctactactgccagcagtacaacagctaccctctgaccttcggccagggcaccaaggtggaaatcaaaagactcgagggacagcctaaggccaatcctaccgtgacactgttccctccaagcagcgaagaactccaggccaacaaggccacacttgtgtgcctgatctccgacttctaccctggggctgtgacagtggcttggaaggccgatggatctcctgtgaaagccggcgtggaaaccaccaagccatccaagcagagcaacaacaaatacgccgccagctcctacctgagcctgacacctgagcagtggaagtcccacagatcctacagctgccaagtgacccacgaaggcagcaccgtggaaaagacagtggcccctacagagtgcagccccatcaagaccgatgtgattacaatggaccccaaggacaactgctccaaggacgccaacgataccctgctgctccagctgaccaacaccagcgcctactacatgtacttgttgctgctgctgaagtccgtggtgtacttcgccatcatcacatgctgcctgctgcggagaaccgccttctgctgcaacggcgagaagtctagggccaagcgatctggatctggagcaacaaacttctcactactcaaacaagcaggtgacgtggaggagaatcccgggcctactagtatggactggatttggcgcatccttttccttgtcggcgctgctaccggcgcgcattccgggccccagctccagctgcaagagtctggacctggcctggtcaagcctagcgagacactgagcctgacctgtaccgtgtccggcgatagcatcagcagcggcgattactactggggctggatcagacagcctcctggcaaaggactggaatggatcggccacatctactacagcggcgtgacctactacaaccccagcctgaagtccagagtgaccatcagcgtggacaccagccggaaccagttctccctgaagctgtctagcgtgacagccgccgataccgccgtgtactactgcaccagagaggacagcagcaactggcggagtagaggccagggaacactggtcacagttagctctggatccggcggaggcggaagtggaggcggaggatctggcggcggaggctctttcgaagaagttcagctgcaacagtctggccccgagctggttaagcctggaacaagcgtgcggatctcctgcaagaccagcggctacaccttcaccgagtacaccatccactgggtcaagcagagccacggcaagagcctggaatggatcggcaacatcaaccccaacaacggcggcaccacctacaaccagaagttcgaggacaaggccacactgaccgtggacaagagcagcagcaccgcctacatggaactgagaagcctgaccagcgaggacagcgccgtgtactattgtgccgccggatggaacttcgactactggggccagggaacaaccctgaccgttagctctacgcgtgcctctacaaagggaccctccgtgtttcctctggctcccagcagcaagtctacaagcggaggaacagccgctctgggctgcctggtcaaggattactttcccgagcctgtgaccgtgtcctggaatagcggagcactgacaagcggcgtgcacacctttccagccgtgctgcaaagcagcggcctgtactctctgagcagcgtggtcacagtgcctagctctagcctgggcacccagacctacatctgcaatgtgaaccacaagcctagcaacaccaaggtggacaagagagtggaacccaagagctgtgaagtgaaaaccgactccaccgaccacgtgaagcccaaagagacagagaacaccaagcagcccagcaagagctgccacaagcccaaggccatcgtgcacaccgagaaagtgaacatgatgagcctgaccgtgctgggcctgcggatgctgttcgccaaaaccgtggccgtgaacttcctgctgaccgccaagctgttcttcctc

SEQ ID NO: 9957 - DNA, 2685 bp, Artificial Sequence
  Synthetic Polynucloetide
atggccttaccagtgaccgccttgctcctgccgctggccttgctgctccacgccgccaggccggaagtgcagctggttgaatctggcggaggactggttcagcctggcggatctctgagactgtcttgtgccgccagcggcttcagcttcagcgacttttggatgagctgggtccgacaggcccctggcaaaggacttgaatgggtcgccacaatcagccaggccggcagcgagaaggactacgtggactctgtgaagggcagattcaccatcagccgggacaacgccaagaagtccctgtacctccagatgaacagcctgagagccgaggacaccgccgtgtactattgtgcctctggcgtgtacagcttcgactacagaggccagggcaccctggtcacagtctcttctggtaccggcggaggcggatctggcggcggaggtagcggtggcggaggatctgaattcgacatccagatgacacagagccctagcagcctgtctgccagcgtgggagacagagtgaccatcacatgcaaggccagccaggatgtgggcacagccgtggattggtatcagcagaagcctggcaaggcccctaagctgctgatctactgggccagcacaagacacacaggcgtgcccagcagattttctggcagcggctctggcaccgacttcaccctgacaatatccagcctccagcctgaggacttcgccacctactactgccagcagtacaacagctaccctctgaccttcggccagggcaccaaggtggaaatcaaaagactcgagggacagcctaaggccaatcctaccgtgacactgttccctccaagcagcgaagaactccaggccaacaaggccacacttgtgtgcctgatctccgacttctaccctggggctgtgacagtggcttggaaggccgatggatctcctgtgaaagccggcgtggaaaccaccaagccatccaagcagagcaacaacaaatacgccgccagctcctacctgagcctgacacctgagcagtggaagtcccacagatcctacagctgccaagtgacccacgaaggcagcaccgtggaaaagacagtggcccctacagagtgcagcggcagagccgattgcggctttaccagcgagagctaccagcagggcgtgctgagcgccaccatcctgtacgagatcctgctgggcaaggccaccctgtacgccgtgctggtgtctgccctggtgctgatggctatggtcaagcggaaggacagccggggacgcgccaagagaagcggatctggcgtgaagcagaccctgaatttcgacctgctgaagctggctggcgacgtggaatccaacccaggccctactagtatggactggatttggcgcatccttttccttgtcggcgctgctaccggcgcgcattccgggccccagctccagctgcaagagtctggacctggcctggtcaagcctagcgagacactgagcctgacctgtaccgtgtccggcgatagcatcagcagcggcgattactactggggctggatcagacagcctcctggcaaaggactggaatggatcggccacatctactacagcggcgtgacctactacaaccccagcctgaagtccagagtgaccatcagcgtggacaccagccggaaccagttctccctgaagctgtctagcgtgacagccgccgataccgccgtgtactactgcaccagagaggacagcagcaactggcggagtagaggccagggaacactggtcacagttagctctggatccggcggaggcggaagtggaggcggaggatctggcggcggaggctctttcgaagaagttcagctgcaacagtctggccccgagctggttaagcctggaacaagcgtgcggatctcctgcaagaccagcggctacaccttcaccgagtacaccatccactgggtcaagcagagccacggcaagagcctggaatggatcggcaacatcaaccccaacaacggcggcaccacctacaaccagaagttcgaggacaaggccacactgaccgtggacaagagcagcagcaccgcctacatggaactgagaagcctgaccagcgaggacagcgccgtgtactattgtgccgccggatggaacttcgactactggggccagggaacaaccctgaccgttagctctacgcgtgcctctacaaagggaccctccgtgtttcctctggctcccagcagcaagtctacaagcggaggaacagccgctctgggctgcctggtcaaggattactttcccgagcctgtgaccgtgtcctggaatagcggagcactgacaagcggcgtgcacacctttccagccgtgctgcaaagcagcggcctgtactctctgagcagcgtggtcacagtgcctagctctagcctgggcacccagacctacatctgcaatgtgaaccacaagcctagcaacaccaaggtggacaagagagtggaacccaagagctgtatccccgaggacacattcttcccaagccccgagagcagctgcgacgtgaagctggtggaaaagagcttcgagacagacaccaacctgaacttccagaacctgagcgtgatcggcttcagaatcctgctgctgaaagtggccggctttaacctgctgatgaccctgcggctgtggtccagc

SEQ ID NO: 9958 - DNA, 2256 bp, Artificial Sequence
  Synthetic Polynucloetide
atggccttaccagtgaccgccttgctcctgccgctggccttgctgctccacgccgccaggccggaagtgcaggttttggagtctggcggaggactggttcagcctggcggatctctgagactgtcttgtgccgccagcggcttcaccttcagcaactttgccatgagctgggtccgacaggcccctggcaaaggacttgaatgggtgtccacaatcagcggcagcgccggcacaacagattacgccgattctgtgaagggcagattcaccatcagccgggacaacagcaagaaaaccctgtacctccagatgaacagcctgcgcgtggaagataccgccgtgtactactgtgccgatggcagaggccccttcttcgattatcgcggccagggcacactggtcaccgtttcttctggtaccggcggaggcggatctggcggcggaggtagcggtggcggaggatctgaattcgacatccagatgacacagagccctagcagcctgtctgccagcgtgggagacagagtgaccatcacatgcaaggccagccaggatgtgggcacagccgtggattggtatcagcagaagcctggcaaggcccctaagctgctgatctactgggccagcacaagacacacaggcgtgcccagcagattttctggcagcggctctggcaccgacttcaccctgacaatatccagcctccagcctgaggacttcgccacctactactgccagcagtacaacagctaccctctgaccttcggccagggcaccaaggtggaaatcaaaagactcgaggacctgaagaacgtgttcccacctgaggtggccgtgttcgagcctagcgaggccgagatcagccacacccagaaagccaccctcgtgtgcctggctaccggcttctaccccgaccatgtggaactgtcttggtgggtcaacggcaaagaggtgcacagcggcgtgtgtaccgacccccagccactgaaagaacagcccgccctgaacgacagccggtactgcctgagcagcagactgagagtgtccgccaccttctggcagaacccccggaaccacttcagatgccaggtgcagttctacggcctgagcgagaacgacgagtggacccaggacagagccaagcccgtgacccagatcgtgtctgccgaagcctggggcagagccgattgcggctttaccagcgagagctaccagcagggcgtgctgagcgccaccatcctgtacgagatcctgctgggcaaggccaccctgtacgccgtgctggtgtctgccctggtgctgatggctatggtcaagcggaaggacagccggggaagggccaagcgatctggatctggagcaacaaacttctcactactcaaacaagcaggtgacgtggaggagaatcccgggcctactagtatggactggatttggcgcatccttttccttgtcggcgctgctaccggcgcgcattccttcgaagaagttcagctgcaacagtctggccccgagctggttaagcctggaacaagcgtgcggatctcctgcaagaccagcggctacaccttcaccgagtacaccatccactgggtcaagcagagccacggcaagagcctggaatggatcggcaacatcaaccccaacaacggcggcaccacctacaaccagaagttcgaggacaaggccacactgaccgtggacaagagcagcagcaccgcctacatggaactgagaagcctgaccagcgaggacagcgccgtgtactattgtgccgccggatggaacttcgactactggggccagggaacaaccctgaccgttagctctacgcgtatccagaaccctgatcctgccgtgtaccagctgcgggatagcaagagcagcgacaagagcgtgtgtctgttcaccgacttcgacagccagaccaacgtgtcccagagcaaggactccgacgtgtacatcaccgataagtgcgtgctggacatgcggagcatggacttcaagagcaactccgccgtggcctggtccaacaagtccgatttcgcctgcgccaacgccttcaacaacagcattatccccgaggacacattcttcccaagccccgagagcagctgcgacgtgaagctggtggaaaagagcttcgagacagacaccaacctgaacttccagaacctgagcgtgatcggcttcagaatcctgctgctgaaagtggccggctttaacctgctgatgaccctgcggctgtggtccagc

SEQ ID NO: 9959 - DNA, 2259 bp, Artificial Sequence
  Synthetic Polynucloetide
atggccttaccagtgaccgccttgctcctgccgctggccttgctgctccacgccgccaggccggacatccagatgacacagagccctagcagcctgtctgccagcgtgggagacagagtgaccatcacatgcaaggccagccaggatgtgggcacagccgtggattggtatcagcagaagcctggcaaggcccctaagctgctgatctactgggccagcacaagacacacaggcgtgcccagcagattttctggcagcggctctggcaccgacttcaccctgacaatatccagcctccagcctgaggacttcgccacctactactgccagcagtacaacagctaccctctgaccttcggccagggcaccaaggtggaaatcaaaagactcgaggacctgaagaacgtgttcccacctgaggtggccgtgttcgagcctagcgaggccgagatcagccacacccagaaagccaccctcgtgtgcctggctaccggcttctaccccgaccatgtggaactgtcttggtgggtcaacggcaaagaggtgcacagcggcgtgtgtaccgacccccagccactgaaagaacagcccgccctgaacgacagccggtactgcctgagcagcagactgagagtgtccgccaccttctggcagaacccccggaaccacttcagatgccaggtgcagttctacggcctgagcgagaacgacgagtggacccaggacagagccaagcccgtgacccagatcgtgtctgccgaagcctggggcagagccgattgcggctttaccagcgagagctaccagcagggcgtgctgagcgccaccatcctgtacgagatcctgctgggcaaggccaccctgtacgccgtgctggtgtctgccctggtgctgatggctatggtcaagcggaaggacagccggggaagggccaagcgatctggatctggagcaacaaacttctcactactcaaacaagcaggtgacgtggaggagaatcccgggcctactagtatggactggatttggcgcatccttttccttgtcggcgctgctaccggcgcccattccgggcccgaagtgcagctggttgaatctggcggaggactggttcaggctggcggatctctgagactgtcttgtgccgccagcggcagaacctttagcatgggctggtttagacaggcccctggcaaagagagagagttcgtcgccgccatcacatactctggcggcagcccttactacgccgactctgtgaagggcagattcaccatcagccgggacaacgccaagaacaccgtgtacctccagatgaacagcctgaagcctgaggacaccgccgtgtactactgcgccgccaatccaacatacggcagcgactggaacgccgagaattggggccagggaacccaagtgacagtgtctagcggatccggcggcggaggatctggcggaggcggatctgggggcggaggctctttcgaagaagttcagctgcaacagtctggccccgagctggttaagcctggaacaagcgtgcggatctcctgcaagaccagcggctacaccttcaccgagtacaccatccactgggtcaagcagagccacggcaagagcctggaatggatcggcaacatcaaccccaacaacggcggcaccacctacaaccagaagttcgaggacaaggccacactgaccgtggacaagagcagcagcaccgcctacatggaactgagaagcctgaccagcgaggacagcgccgtgtactattgtgccgccggatggaacttcgactactggggccagggaacaaccctgaccgttagctctacgcgtatccagaaccctgatcctgccgtgtaccagctgcgggatagcaagagcagcgacaagagcgtgtgtctgttcaccgacttcgacagccagaccaacgtgtcccagagcaaggactccgacgtgtacatcaccgataagtgcgtgctggacatgcggagcatggacttcaagagcaactccgccgtggcctggtccaacaagtccgatttcgcctgcgccaacgccttcaacaacagcattatccccgaggacacattcttcccaagccccgagagcagctgcgacgtgaagctggtggaaaagagcttcgagacagacaccaacctgaacttccagaacctgagcgtgatcggcttcagaatcctgctgctgaaagtggccggctttaacctgctgatgaccctgcggctgtggtccagc

SEQ ID NO: 9960 - DNA, 2640 bp, Artificial Sequence
  Synthetic Polynucloetide
atggccttaccagtgaccgccttgctcctgccgctggccttgctgctccacgccgccaggccggacatccagatgacacagagccctagcagcctgtctgccagcgtgggagacagagtgaccatcacatgcaaggccagccaggatgtgggcacagccgtggattggtatcagcagaagcctggcaaggcccctaagctgctgatctactgggccagcacaagacacacaggcgtgcccagcagattttctggcagcggctctggcaccgacttcaccctgacaatatccagcctccagcctgaggacttcgccacctactactgccagcagtacaacagctaccctctgaccttcggccagggcaccaaggtggaaatcaaaagactcgaggacctgaagaacgtgttcccacctgaggtggccgtgttcgagcctagcgaggccgagatcagccacacccagaaagccaccctcgtgtgcctggctaccggcttctaccccgaccatgtggaactgtcttggtgggtcaacggcaaagaggtgcacagcggcgtgtgtaccgacccccagccactgaaagaacagcccgccctgaacgacagccggtactgcctgagcagcagactgagagtgtccgccaccttctggcagaacccccggaaccacttcagatgccaggtgcagttctacggcctgagcgagaacgacgagtggacccaggacagagccaagcccgtgacccagatcgtgtctgccgaagcctggggcagagccgattgcggctttaccagcgagagctaccagcagggcgtgctgagcgccaccatcctgtacgagatcctgctgggcaaggccaccctgtacgccgtgctggtgtctgccctggtgctgatggctatggtcaagcggaaggacagccggggaagggccaagcgatctggatctggagcaacaaacttctcactactcaaacaagcaggtgacgtggaggagaatcccgggcctactagtatggactggatttggcgcatccttttccttgtcggcgctgctaccggcgcccattcccaactgcaactgcaagagtctggccctggcctggtcaagccttctgaaaccctgagcctgacctgtaccgtgtccggcggctctatcagcagcggcgattactactggggctggatcagacagcctccaggcaagggactcgaatggatcggcagcatcagctacagcggctccacctactacaacccaagcctgaagtccagagtgaccatcagcgtggacaccagcagaaaccagttctccctgaagctgagcagcgtgacagccgccgatacagccgtgtattattgcaccagagaggacagcagcaactggcggagtagaggacagggcacactggtcacagtgtcctcttctggaggcggtggaagcggtggaggaggatctgaagtgcagctggttgaatctggcggaggactggttcaggctggcggatctctgagactgtcttgtgccgccagcggcagaacctttagcatgggctggtttagacaggcccctggcaaagagagagagttcgtcgccgccatcacatactctggcggcagcccttactacgccgactctgtgaagggcagattcaccatcagccgggacaacgccaagaacaccgtgtacctccagatgaacagcctgaagcctgaggacaccgccgtgtactactgcgccgccaatccaacatacggcagcgactggaacgccgagaattggggccagggaacccaagtgacagtgtctagcggatccggcggcggaggatctggcggaggcggatctgggggcggaggctctttcgaagaagttcagctgcaacagtctggccccgagctggttaagcctggaacaagcgtgcggatctcctgcaagaccagcggctacaccttcaccgagtacaccatccactgggtcaagcagagccacggcaagagcctggaatggatcggcaacatcaaccccaacaacggcggcaccacctacaaccagaagttcgaggacaaggccacactgaccgtggacaagagcagcagcaccgcctacatggaactgagaagcctgaccagcgaggacagcgccgtgtactattgtgccgccggatggaacttcgactactggggccagggaacaaccctgaccgttagctctacgcgtatccagaaccctgatcctgccgtgtaccagctgcgggatagcaagagcagcgacaagagcgtgtgtctgttcaccgacttcgacagccagaccaacgtgtcccagagcaaggactccgacgtgtacatcaccgataagtgcgtgctggacatgcggagcatggacttcaagagcaactccgccgtggcctggtccaacaagtccgatttcgcctgcgccaacgccttcaacaacagcattatccccgaggacacattcttcccaagccccgagagcagctgcgacgtgaagctggtggaaaagagcttcgagacagacaccaacctgaacttccagaacctgagcgtgatcggcttcagaatcctgctgctgaaagtggccggctttaacctgctgatgaccctgcggctgtggtccagc

SEQ ID NO: 9961 - DNA, 2667 bp, Artificial Sequence
  Synthetic Polynucloetide
atggccttaccagtgaccgccttgctcctgccgctggccttgctgctccacgccgccaggccggaagtgcaggttttggagtctggcggaggactggttcagcctggcggatctctgagactgtcttgtgccgccagcggcttcaccttcagcaactttgccatgagctgggtccgacaggcccctggcaaaggacttgaatgggtgtccacaatcagcggcagcgccggcacaacagattacgccgattctgtgaagggcagattcaccatcagccgggacaacagcaagaaaaccctgtacctccagatgaacagcctgcgcgtggaagataccgccgtgtactactgtgccgatggcagaggccccttcttcgattatcgcggccagggcacactggtcaccgtttcttctggtaccggcggaggcggatctggcggcggaggtagcggtggcggaggatctgaattcgacatccagatgacacagagccctagcagcctgtctgccagcgtgggagacagagtgaccatcacatgcaaggccagccaggatgtgggcacagccgtggattggtatcagcagaagcctggcaaggcccctaagctgctgatctactgggccagcacaagacacacaggcgtgcccagcagattttctggcagcggctctggcaccgacttcaccctgacaatatccagcctccagcctgaggacttcgccacctactactgccagcagtacaacagctaccctctgaccttcggccagggcaccaaggtggaaatcaaaagactcgaggacctgaagaacgtgttcccacctgaggtggccgtgttcgagcctagcgaggccgagatcagccacacccagaaagccaccctcgtgtgcctggctaccggcttctaccccgaccatgtggaactgtcttggtgggtcaacggcaaagaggtgcacagcggcgtgtgtaccgacccccagccactgaaagaacagcccgccctgaacgacagccggtactgcctgagcagcagactgagagtgtccgccaccttctggcagaacccccggaaccacttcagatgccaggtgcagttctacggcctgagcgagaacgacgagtggacccaggacagagccaagcccgtgacccagatcgtgtctgccgaagcctggggcagagccgattgcggctttaccagcgagagctaccagcagggcgtgctgagcgccaccatcctgtacgagatcctgctgggcaaggccaccctgtacgccgtgctggtgtctgccctggtgctgatggctatggtcaagcggaaggacagccggggaagggccaagcgatctggatctggagcaacaaacttctcactactcaaacaagcaggtgacgtggaggagaatcccgggcctactagtatggactggatttggcgcatccttttccttgtcggcgctgctaccggcgcccattccgggcccgaagtgcagctggttgaatctggcggaggactggttcaggctggcggatctctgagactgtcttgtgccgccagcggcagaacctttagcatgggctggtttagacaggcccctggcaaagagagagagttcgtcgccgccatcacatacagcggcggcagcccttactacgcctcttctgtcagaggccggttcaccatcagccgggacaacgccaagaacaccgtgtacctccagatgaacagcctgaagccagaggacaccgccgtgtactactgtgccgccaatccaacctacggcagcgactggaatgccgagaattggggccagggcacccaagtgacagtgtctagtggatccggcggcggaggatctggcggaggcggatctgggggcggaggctctttcgaagaagttcagctgcaacagtctggccccgagctggttaagcctggaacaagcgtgcggatctcctgcaagaccagcggctacaccttcaccgagtacaccatccactgggtcaagcagagccacggcaagagcctggaatggatcggcaacatcaaccccaacaacggcggcaccacctacaaccagaagttcgaggacaaggccacactgaccgtggacaagagcagcagcaccgcctacatggaactgagaagcctgaccagcgaggacagcgccgtgtactattgtgccgccggatggaacttcgactactggggccagggaacaaccctgaccgttagctctacgcgtatccagaaccctgatcctgccgtgtaccagctgcgggatagcaagagcagcgacaagagcgtgtgtctgttcaccgacttcgacagccagaccaacgtgtcccagagcaaggactccgacgtgtacatcaccgataagtgcgtgctggacatgcggagcatggacttcaagagcaactccgccgtggcctggtccaacaagtccgatttcgcctgcgccaacgccttcaacaacagcattatccccgaggacacattcttcccaagccccgagagcagctgcgacgtgaagctggtggaaaagagcttcgagacagacaccaacctgaacttccagaacctgagcgtgatcggcttcagaatcctgctgctgaaagtggccggctttaacctgctgatgaccctgcggctgtggtccagc

SEQ ID NO: 9962 - DNA, 2163 bp, Artificial Sequence
  Synthetic Polynucloetide
atggccttaccagtgaccgccttgctcctgccgctggccttgctgctccacgccgccaggccggacatcgtgatgacccagagccacaagttcatgagcaccagcgtgggcgacagagtgtccatcatctgcaaggccagccaggatgtgggcacagccgtggattggtatcagcagaagcctggacagagccccaagctgctgatctactgggccagcacaagacacaccggcgtgcccgatagattcacaggctctggcagcggcaccgatttcaccctggccatcacaaacgtgcagagcgaggacctggccgactacttctgccagcagtacaacagctaccctctgacctttggagccggcaccaagctggaaatcaagagaggcggaggcggaagtggaggcggaggatctggcggcggaggctctgaagtgcagctggttgaatcaggtggcggcctggttcaacctggcggatctctgagactgagctgtgccgccagcggctacacctttaccgagtacacaatccactgggtccgacaggcccctggcaaaggacttgagtgggtcgccaacatcaaccccaacaatggcggcaccacctacaaccagaagttcgaggacagattcaccatcagccgggacaacagcaagaacaccctgtacctccagatgaactccctgagagccgaggacaccgccgtgtactattgtgccagaggctggaacttcgactactggggccagggaacactggtcaccgttagctctacgcgtgagcagaaactgatctcggaagaggatctggcgaagcccaccacgacgccagcgccgcgaccaccaacaccggcgcccaccatcgcgtcgcagcccctgtccctgcgcccagaggcgtgccggccagcggcggggggcgcagtgcacacgagggggctggacttcgcctgtgacatctacatctgggcgcccttggccgggacttgtggggtccttctcctgtcactggttatcaccctttactgcaaacggggcagaaagaaactcctgtatatattcaaacaaccatttatgagaccagtacaaactactcaagaggaagatggctgtagctgccgatttccagaagaagaagaaggaggatgtgaactgagagtgaagttcagcaggagcgcagacgcccccgcgtaccagcagggccagaaccagctctataacgagctgaatctaggacgaagagaggagtacgatgttttggacaagagacgtggccgggaccctgagatggggggaaagccgagaaggaagaaccctcaggaaggcctgtacaatgaactgcagaaagataagatggcggaggcctacagtgagattgggatgaaaggcgagcgccggaggggcaaggggcacgatggcctttaccagggtctcagtacagccaccaaggacacctacgacgcccttcacatgcaggccctgccccctcgctctagtggctccggcgagggcagaggaagtctactaacctgcggagatgtggaagaaaatcctggcccacatatgaccgagtacaagcccacggtgcgcctcgccacccgcgacgacgtccccagggccgtacgcaccctcgccgccgcgttcgccgactaccccgccacgcgccacaccgtcgatccggaccgccacatcgagcgggtcaccgagctgcaagaactcttcctcacgcgcgtcgggctcgacatcggcaaggtgtgggtcgcggacgacggcgccgcggtggcggtctggaccacgccggagagcgtcgaagcgggggcggtgttcgccgagatcggcccgcgcatggccgagttgagcggttcccggctggccgcgcagcaacagatggaaggcctcctggcgccgcaccggcccaaggagcccgcgtggttcctggccaccgtcggcgtctcgcccgaccaccagggcaagggtctgggcagcgccgtcgtgctccccggagtggaggcggccgagcgcgccggggtgcccgccttcctggagacctccgcgccccgcaacctccccttctacgagcggctcggcttcaccgtcaccgccgacgtcgaggtgcccgaaggaccgcgcacctggtgcatgacccgcaagcccggtgcctga

SEQ ID NO: 9963 - DNA, 2145 bp, Artificial Sequence
  Synthetic Polynucloetide
atggccttaccagtgaccgccttgctcctgccgctggccttgctgctccacgccgccaggccggacatcgtgatgacccagagccacaagttcatgagcaccagcgtgggcgacagagtgtccatcatctgcaaggccagccaggatgtgggcacagccgtggattggtatcagcagaagcctggacagagccccaagctgctgatctactgggccagcacaagacacaccggcgtgcccgatagattcacaggctctggcagcggcaccgatttcaccctggccatcacaaacgtgcagagcgaggacctggccgactacttctgccagcagtacaacagctaccctctgacctttggagccggcaccaagctggaaatcaagagaggcggaggcggaagtggaggcggaggatctggcggcggaggctctgaagtgcagctggttgaatcaggtggcggcctggttcaacctggcggatctctgagactgagctgtgccgccagcggctacacctttaccgagtacacaatccactgggtccgacaggcccctggcaaaggacttgagtgggtcgccaacatcaaccccaacaatggcggcaccacctacaaccagaagttcgaggacagattcaccatcagccgggacaacagcaagaacaccctgtacctccagatgaactccctgagagccgaggacaccgccgtgtactattgtgccagaggctggaacttcgactactggggccagggaacactggtcaccgttagctctacgcgtgagcagaaactgatctcggaagaggatctgaaaattgaagttatgtatcctcctccttacctagacaatgagaagagcaatggaaccattatccatgtgaaagggaaacacctttgtccaagtcccctatttcccggaccttctaagcccttttgggtgctggtggtggttgggggagtcctggcttgctatagcttgctagtaacagtggcctttattattttctgggtgaggagtaagaggagcaggctcctgcacagtgactacatgaacatgactccacgccgccccggacccacccgcaagcattaccagccctatgccccaccacgcgacttcgcagcctatcgctccagagtgaagttcagcaggagcgcagacgcccccgcgtaccagcagggccagaaccagctctataacgagctcaatctaggacgaagagaggagtacgatgttttggacaagagacgtggccgggaccctgagatggggggaaagccgagaaggaagaaccctcaggaaggcctgtacaatgaactgcagaaagataagatggcggaggcctacagtgagattgggatgaaaggcgagcgccggaggggcaaggggcacgatggcctttaccagggtctcagtacagccaccaaggacacctacgacgcccttcacatgcaggccctgccccctcgctctagtggctccggcgagggcagaggaagtctactaacctgcggagatgtggaagaaaatcctggcccacatatgaccgagtacaagcccacggtgcgcctcgccacccgcgacgacgtccccagggccgtacgcaccctcgccgccgcgttcgccgactaccccgccacgcgccacaccgtcgatccggaccgccacatcgagcgggtcaccgagctgcaagaactcttcctcacgcgcgtcgggctcgacatcggcaaggtgtgggtcgcggacgacggcgccgcggtggcggtctggaccacgccggagagcgtcgaagcgggggcggtgttcgccgagatcggcccgcgcatggccgagttgagcggttcccggctggccgcgcagcaacagatggaaggcctcctggcgccgcaccggcccaaggagcccgcgtggttcctggccaccgtcggcgtctcgcccgaccaccagggcaagggtctgggcagcgccgtcgtgctccccggagtggaggcggccgagcgcgccggggtgcccgccttcctggagacctccgcgccccgcaacctccccttctacgagcggctcggcttcaccgtcaccgccgacgtcgaggtgcccgaaggaccgcgcacctggtgcatgacccgcaagcccggtgcctga

SEQ ID NO: 9964 - DNA, 1473 bp, Artificial Sequence
  Synthetic Polynucloetide
atggccttaccagtgaccgccttgctcctgccgctggccttgctgctccacgccgccaggccggacatcgtgatgacccagagccacaagttcatgagcaccagcgtgggcgacagagtgtccatcatctgcaaggccagccaggatgtgggcacagccgtggattggtatcagcagaagcctggacagagccccaagctgctgatctactgggccagcacaagacacaccggcgtgcccgatagattcacaggctctggcagcggcaccgatttcaccctggccatcacaaacgtgcagagcgaggacctggccgactacttctgccagcagtacaacagctaccctctgacctttggagccggcaccaagctggaaatcaagagaggcggaggcggaagtggaggcggaggatctggcggcggaggctctgaagtgcagctggttgaatcaggtggcggcctggttcaacctggcggatctctgagactgagctgtgccgccagcggctacacctttaccgagtacacaatccactgggtccgacaggcccctggcaaaggacttgagtgggtcgccaacatcaaccccaacaatggcggcaccacctacaaccagaagttcgaggacagattcaccatcagccgggacaacagcaagaacaccctgtacctccagatgaactccctgagagccgaggacaccgccgtgtactattgtgccagaggctggaacttcgactactggggccagggaacactggtcaccgttagctctacgcgtgagcagaaactgatctcggaagaggatctgaaaattgaagttatgtatcctcctccttacctagacaatgagaagagcaatggaaccattatccatgtgaaagggaaacacctttgtccaagtcccctatttcccggaccttctaagcccttttgggtgctggtggtggttgggggagtcctggcttgctatagcttgctagtaacagtggcctttattattttctgggtgaggagtaagaggagcaggctcctgcacagtgactacatgaacatgactccacgccgccccggacccacccgcaagcattaccagccctatgccccaccacgcgacttcgcagcctatcgctccagagtgaagttcagcaggagcgcagacgcccccgcgtaccagcagggccagaaccagctctataacgagctcaatctaggacgaagagaggagtacgatgttttggacaagagacgtggccgggaccctgagatggggggaaagccgagaaggaagaaccctcaggaaggcctgtacaatgaactgcagaaagataagatggcggaggcctacagtgagattgggatgaaaggcgagcgccggaggggcaaggggcacgatggcctttaccagggtctcagtacagccaccaaggacacctacgacgcccttcacatgcaggccctgccccctcgc

SEQ ID NO: 9965 - DNA, 1494 bp, Artificial Sequence
  Synthetic Polynucloetide
atggccttaccagtgaccgccttgctcctgccgctggccttgctgctccacgccgccaggccggacatcgtgatgacccagagccacaagttcatgagcaccagcgtgggcgacagagtgtccatcatctgcaaggccagccaggatgtgggcacagccgtggattggtatcagcagaagcctggacagagccccaagctgctgatctactgggccagcacaagacacaccggcgtgcccgatagattcacaggctctggcagcggcaccgatttcaccctggccatcacaaacgtgcagagcgaggacctggccgactacttctgccagcagtacaacagctaccctctgacctttggagccggcaccaagctggaaatcaagagaggcggaggcggaagtggaggcggaggatctggcggcggaggctctgaagtgcagctggttgaatcaggtggcggcctggttcaacctggcggatctctgagactgagctgtgccgccagcggctacacctttaccgagtacacaatccactgggtccgacaggcccctggcaaaggacttgagtgggtcgccaacatcaaccccaacaatggcggcaccacctacaaccagaagttcgaggacagattcaccatcagccgggacaacagcaagaacaccctgtacctccagatgaactccctgagagccgaggacaccgccgtgtactattgtgccagaggctggaacttcgactactggggccagggaacactggtcaccgttagctctacgcgtgagcagaaactgatctcggaagaggatctggcgaagcccaccacgacgccagcgccgcgaccaccaacaccggcgcccaccatcgcgtcgcagcccctgtccctgcgcccagaggcgtgccggccagcggcggggggcgcagtgcacacgagggggctggacttcgcctgtgacatctacatctgggcgcccttggccgggacttgtggggtccttctcctgtcactggttatcaccctttactgcaaacggggcagaaagaaactcctgtatatattcaaacaaccatttatgagaccagtacaaactactcaagaggaagatggctgtagctgccgatttccagaagaagaagaaggaggatgtgaactgagagtgaagttcagcaggagcgcagacgcccccgcgtaccagcagggccagaaccagctctataacgagctgaatctaggacgaagagaggagtacgatgttttggacaagagacgtggccgggaccctgagatggggggaaagccgagaaggaagaaccctcaggaaggcctgtacaatgaactgcagaaagataagatggcggaggcctacagtgagattgggatgaaaggcgagcgccggaggggcaaggggcacgatggcctttaccagggtctcagtacagccaccaaggacacctacgacgcccttcacatgcaggccctgccccctcgctga

SEQ ID NO: 9966 - DNA, 1494 bp, Artificial Sequence
  Synthetic Polynucloetide
atggccttaccagtgaccgccttgctcctgccgctggccttgctgctccacgccgccaggccggaagtgcagctggttgaatcaggtggcggcctggttcaacctggcggatctctgagactgagctgtgccgccagcggctacacctttaccgagtacacaatccactgggtccgacaggcccctggcaaaggacttgagtgggtcgccaacatcaaccccaacaatggcggcaccacctacaaccagaagttcgaggacagattcaccatcagccgggacaacagcaagaacaccctgtacctccagatgaactccctgagagccgaggacaccgccgtgtactattgtgccagaggctggaacttcgactactggggccagggaacactggtcaccgttagctctggcggaggcggaagtggaggcggaggatctggcggcggaggctctgacatcgtgatgacccagagccacaagttcatgagcaccagcgtgggcgacagagtgtccatcatctgcaaggccagccaggatgtgggcacagccgtggattggtatcagcagaagcctggacagagccccaagctgctgatctactgggccagcacaagacacaccggcgtgcccgatagattcacaggctctggcagcggcaccgatttcaccctggccatcacaaacgtgcagagcgaggacctggccgactacttctgccagcagtacaacagctaccctctgacctttggagccggcaccaagctggaaatcaagagaacgcgtgagcagaaactgatctcggaagaggatctggcgaagcccaccacgacgccagcgccgcgaccaccaacaccggcgcccaccatcgcgtcgcagcccctgtccctgcgcccagaggcgtgccggccagcggcggggggcgcagtgcacacgagggggctggacttcgcctgtgacatctacatctgggcgcccttggccgggacttgtggggtccttctcctgtcactggttatcaccctttactgcaaacggggcagaaagaaactcctgtatatattcaaacaaccatttatgagaccagtacaaactactcaagaggaagatggctgtagctgccgatttccagaagaagaagaaggaggatgtgaactgagagtgaagttcagcaggagcgcagacgcccccgcgtaccagcagggccagaaccagctctataacgagctgaatctaggacgaagagaggagtacgatgttttggacaagagacgtggccgggaccctgagatggggggaaagccgagaaggaagaaccctcaggaaggcctgtacaatgaactgcagaaagataagatggcggaggcctacagtgagattgggatgaaaggcgagcgccggaggggcaaggggcacgatggcctttaccagggtctcagtacagccaccaaggacacctacgacgcccttcacatgcaggccctgccccctcgctga

SEQ ID NO: 9967 - DNA, 2733 bp, Artificial Sequence
  Synthetic Polynucloetide
atggccttaccagtgaccgccttgctcctgccgctggccttgctgctccacgccgccaggccggacatcgtgatgacccagagccacaagttcatgagcaccagcgtgggcgacagagtgtccatcatctgcaaggccagccaggatgtgggcacagccgtggattggtatcagcagaagcctggacagagccccaagctgctgatctactgggccagcacaagacacaccggcgtgcccgatagattcacaggctctggcagcggcaccgatttcaccctggccatcacaaacgtgcagagcgaggacctggccgactacttctgccagcagtacaacagctaccctctgacctttggagccggcaccaagctggaaatcaagagaggcggaggcggaagtggaggcggaggatctggcggcggaggctctgaagtgcagctggttgaatcaggtggcggcctggttcaacctggcggatctctgagactgagctgtgccgccagcggctacacctttaccgagtacacaatccactgggtccgacaggcccctggcaaaggacttgagtgggtcgccaacatcaaccccaacaatggcggcaccacctacaaccagaagttcgaggacagattcaccatcagccgggacaacagcaagaacaccctgtacctccagatgaactccctgagagccgaggacaccgccgtgtactattgtgccagaggctggaacttcgactactggggccagggaacactggtcaccgttagctctacgcgtgagcagaaactgatctcggaagaggatctggcgaagcccaccacgacgccagcgccgcgaccaccaacaccggcgcccaccatcgcgtcgcagcccctgtccctgcgcccagaggcgtgccggccagcggcggggggcgcagtgcacacgagggggctggacttcgcctgtgacatctacatctgggcgcccttggccgggacttgtggggtccttctcctgtcactggttatcaccctttactgcgggcgcgccagagtgaagttcagcaggagcgcagacgcccccgcgtaccagcagggccagaaccagctctataacgagctgaatctaggacgaagagaggagtacgatgttttggacaagagacgtggccgggaccctgagatggggggaaagccgagaaggaagaaccctcaggaaggcctgtacaatgaactgcagaaagataagatggcggaggcctacagtgagattgggatgaaaggcgagcgccggaggggcaaggggcacgatggcctttaccagggtctcagtacagccaccaaggacacctacgacgcccttcacatgcaggccctgccccctcgctctagaggatctggagcaacaaacttctcactactcaaacaagcaggtgacgtggaggagaatcccgggcctgggatccacatggccacttacgaggttctctgtgaggtggcgcggaaactgggcacggatgacagggaagtggtattgttcctcctaaacgtgttcatacctcaacccacactggcccaattaattggagctcttagagctttaaaggaggagggcaggttaacgtttcccctgttagcggaatgtctgtttcgtgcaggtcgcagagacctcttgcgcgacctgcttcacttagacccgcgttttttagagcgccacctagcgggcacaatgagttatttcagcccttatcagctcactgttctccacgtagacggggagctgtgtgcgagggatattaggtctttgatatttttaagcaaggacactatagggtctcgcagcacaccacagacattcttacactgggtgtactgtatggaaaacttagacctactgggtcccactgacgtggatgccctaatgtcaatgcttagatctttgtcaagagtagacctacagcgccaagtgcaaaccctaatgggccttcacctttccggcccatcacactcccaacactatcgccatacaccactcgagaccgatttctacgactacaaggacgacgatgacaagactagtggctccggcgagggcagaggaagtctactaacctgcggagatgtggaagaaaatcctggcccacatatgaccgagtacaagcccacggtgcgcctcgccacccgcgacgacgtccccagggccgtacgcaccctcgccgccgcgttcgccgactaccccgccacgcgccacaccgtcgatccggaccgccacatcgagcgggtcaccgagctgcaagaactcttcctcacgcgcgtcgggctcgacatcggcaaggtgtgggtcgcggacgacggcgccgcggtggcggtctggaccacgccggagagcgtcgaagcgggggcggtgttcgccgagatcggcccgcgcatggccgagttgagcggttcccggctggccgcgcagcaacagatggaaggcctcctggcgccgcaccggcccaaggagcccgcgtggttcctggccaccgtcggcgtctcgcccgaccaccagggcaagggtctgggcagcgccgtcgtgctccccggagtggaggcggccgagcgcgccggggtgcccgccttcctggagacctccgcgccccgcaacctccccttctacgagcggctcggcttcaccgtcaccgccgacgtcgaggtgcccgaaggaccgcgcacctggtgcatgacccgcaagcccggtgcctga

SEQ ID NO: 9968 - DNA, 2553 bp, Artificial Sequence
  Synthetic Polynucloetide
atggccttaccagtgaccgccttgctcctgccgctggccttgctgctccacgccgccaggccggacatcgtgatgacccagagccacaagttcatgagcaccagcgtgggcgacagagtgtccatcatctgcaaggccagccaggatgtgggcacagccgtggattggtatcagcagaagcctggacagagccccaagctgctgatctactgggccagcacaagacacaccggcgtgcccgatagattcacaggctctggcagcggcaccgatttcaccctggccatcacaaacgtgcagagcgaggacctggccgactacttctgccagcagtacaacagctaccctctgacctttggagccggcaccaagctggaaatcaagagactcgagatccagaaccctgatcctgccgtgtaccagctgcgggatagcaagagcagcgacaagagcgtgtgtctgttcaccgacttcgacagccagaccaacgtgtcccagagcaaggactccgacgtgtacatcaccgataagtgcgtgctggacatgcggagcatggacttcaagagcaactccgccgtggcctggtccaacaagtccgatttcgcctgcgccaacgccttcaacaacagcattatccccgaggacacattcttcccaagcagcgacgtgccctgcgacgtgaagctggtggaaaagagcttcgagacagacaccaacctgaacttccagaacctgagcgtgatcggcttcagaatcctgctgctgaaagtggccggctttaacctgctgatgaccctgcggctgtggtccagccgcgccaagagaagcggatctggcgtgaagcagaccctgaatttcgacctgctgaagctggctggcgacgtggaatccaacccaggccctactagtatggactggatttggcgcatccttttccttgtcggcgctgctaccggcgcgcattccttcgaagaagtgcagctggttgaatcaggtggcggcctggttcaacctggcggatctctgagactgagctgtgccgccagcggctacacctttaccgagtacacaatccactgggtccgacaggcccctggcaaaggacttgagtgggtcgccaacatcaaccccaacaatggcggcaccacctacaaccagaagttcgaggacagattcaccatcagccgggacaacagcaagaacaccctgtacctccagatgaactccctgagagccgaggacaccgccgtgtactattgtgccagaggctggaacttcgactactggggccagggaacactggtcaccgttagctctacgcgtgaggacctgaagaacgtgttcccacctgaggtggccgtgttcgagcctagcaaggccgagatcgcccacacccagaaagccaccctcgtgtgcctggctaccggcttctaccccgaccatgtggaactgtcttggtgggtcaacggcaaagaggtgcacagcggcgtgtgtaccgacccccagccactgaaagaacagcccgccctgaacgacagccggtactgcctgagcagcagactgagagtgtccgccaccttctggcagaacccccggaaccacttcagatgccaggtgcagttctacggcctgagcgagaacgacgagtggacccaggacagagccaagcccgtgacccagatcgtgtctgccgaagcctggggcagagccgattgcggcatcaccagcgccagctaccaccagggcgtgctgagcgccaccatcctgtacgagatcctgctgggcaaggccaccctgtacgccgtgctggtgtctgccctggtgctgatggctatggtcaagcggaaggacagccggggaagggccaagcgatctggatctggagcaacaaacttctcactactcaaacaagcaggtgacgtggaggagaatcccgggccttctagaggccatatgaccgagtacaagcccacggtgcgcctcgccacccgcgacgacgtccccagggccgtacgcaccctcgccgccgcgttcgccgactaccccgccacgcgccacaccgtcgatccggaccgccacatcgagcgggtcaccgagctgcaagaactcttcctcacgcgcgtcgggctcgacatcggcaaggtgtgggtcgcggacgacggcgccgcggtggcggtctggaccacgccggagagcgtcgaagcgggggcggtgttcgccgagatcggcccgcgcatggccgagttgagcggttcccggctggccgcgcagcaacagatggaaggcctcctggcgccgcaccggcccaaggagcccgcgtggttcctggccaccgtcggcgtctcgcccgaccaccagggcaagggtctgggcagcgccgtcgtgctccccggagtggaggcggccgagcgcgccggggtgcccgccttcctggagacctccgcgccccgcaacctccccttctacgagcggctcggcttcaccgtcaccgccgacgtcgaggtgcccgaaggaccgcgcacctggtgcatgacccgcaagcccggtgcctga

SEQ ID NO: 9969 - DNA, 2550 bp, Artificial Sequence
  Synthetic Polynucloetide
atggccttaccagtgaccgccttgctcctgccgctggccttgctgctccacgccgccaggccggacatcgtgatgacccagagccacaagttcatgagcaccagcgtgggcgacagagtgtccatcatctgcaaggccagccaggatgtgggcacagccgtggattggtatcagcagaagcctggacagagccccaagctgctgatctactgggccagcacaagacacaccggcgtgcccgatagattcacaggctctggcagcggcaccgatttcaccctggccatcacaaacgtgcagagcgaggacctggccgactacttctgccagcagtacaacagctaccctctgacctttggagccggcaccaagctggaaatcaagagactcgaggacctgaagaacgtgttcccacctgaggtggccgtgttcgagcctagcaaggccgagatcgcccacacccagaaagccaccctcgtgtgcctggctaccggcttctaccccgaccatgtggaactgtcttggtgggtcaacggcaaagaggtgcacagcggcgtgtgtaccgacccccagccactgaaagaacagcccgccctgaacgacagccggtactgcctgagcagcagactgagagtgtccgccaccttctggcagaacccccggaaccacttcagatgccaggtgcagttctacggcctgagcgagaacgacgagtggacccaggacagagccaagcccgtgacccagatcgtgtctgccgaagcctggggcagagccgattgcggcatcaccagcgccagctaccaccagggcgtgctgagcgccaccatcctgtacgagatcctgctgggcaaggccaccctgtacgccgtgctggtgtctgccctggtgctgatggctatggtcaagcggaaggacagccggggaagggccaagcgatctggatctggagcaacaaacttctcactactcaaacaagcaggtgacgtggaggagaatcccgggcctactagtatggactggatttggcgcatccttttccttgtcggcgctgctaccggcgcgcattccttcgaagaagtgcagctggttgaatcaggtggcggcctggttcaacctggcggatctctgagactgagctgtgccgccagcggctacacctttaccgagtacacaatccactgggtccgacaggcccctggcaaaggacttgagtgggtcgccaacatcaaccccaacaatggcggcaccacctacaaccagaagttcgaggacagattcaccatcagccgggacaacagcaagaacaccctgtacctccagatgaactccctgagagccgaggacaccgccgtgtactattgtgccagaggctggaacttcgactactggggccagggaacactggtcaccgttagctctacgcgtatccagaaccctgatcctgccgtgtaccagctgcgggatagcaagagcagcgacaagagcgtgtgtctgttcaccgacttcgacagccagaccaacgtgtcccagagcaaggactccgacgtgtacatcaccgataagtgcgtgctggacatgcggagcatggacttcaagagcaactccgccgtggcctggtccaacaagtccgatttcgcctgcgccaacgccttcaacaacagcattatccccgaggacacattcttcccaagcagcgacgtgccctgcgacgtgaagctggtggaaaagagcttcgagacagacaccaacctgaacttccagaacctgagcgtgatcggcttcagaatcctgctgctgaaagtggccggctttaacctgctgatgaccctgcggctgtggtccagccgcgccaagagaagcggatctggcgtgaagcagaccctgaatttcgacctgctgaagctggctggcgacgtggaatccaacccaggcccttctagaggccatatgaccgagtacaagcccacggtgcgcctcgccacccgcgacgacgtccccagggccgtacgcaccctcgccgccgcgttcgccgactaccccgccacgcgccacaccgtcgatccggaccgccacatcgagcgggtcaccgagctgcaagaactcttcctcacgcgcgtcgggctcgacatcggcaaggtgtgggtcgcggacgacggcgccgcggtggcggtctggaccacgccggagagcgtcgaagcgggggcggtgttcgccgagatcggcccgcgcatggccgagttgagcggttcccggctggccgcgcagcaacagatggaaggcctcctggcgccgcaccggcccaaggagcccgcgtggttcctggccaccgtcggcgtctcgcccgaccaccagggcaagggtctgggcagcgccgtcgtgctccccggagtggaggcggccgagcgcgccggggtgcccgccttcctggagacctccgcgccccgcaacctccccttctacgagcggctcggcttcaccgtcaccgccgacgtcgaggtgcccgaaggaccgcgcacctggtgcatgacccgcaagcccggtgcctga

SEQ ID NO: 9970 - DNA, 1848 bp, Artificial Sequence
  Synthetic Polynucloetide
atggccttaccagtgaccgccttgctcctgccgctggccttgctgctccacgccgccaggccggacatcgtgatgacccagagccacaagttcatgagcaccagcgtgggcgacagagtgtccatcatctgcaaggccagccaggatgtgggcacagccgtggattggtatcagcagaagcctggacagagccccaagctgctgatctactgggccagcacaagacacaccggcgtgcccgatagattcacaggctctggcagcggcaccgatttcaccctggccatcacaaacgtgcagagcgaggacctggccgactacttctgccagcagtacaacagctaccctctgacctttggagccggcaccaagctggaaatcaagagactcgaggacctgaagaacgtgttcccacctgaggtggccgtgttcgagcctagcgaggccgagatcagccacacccagaaagccaccctcgtgtgcctggctaccggcttctaccccgaccatgtggaactgtcttggtgggtcaacggcaaagaggtgcacagcggcgtgtgtaccgacccccagccactgaaagaacagcccgccctgaacgacagccggtactgcctgagcagcagactgagagtgtccgccaccttctggcagaacccccggaaccacttcagatgccaggtgcagttctacggcctgagcgagaacgacgagtggacccaggacagagccaagcccgtgacccagatcgtgtctgccgaagcctggggcagagccgattgcggctttaccagcgagagctaccagcagggcgtgctgagcgccaccatcctgtacgagatcctgctgggcaaggccaccctgtacgccgtgctggtgtctgccctggtgctgatggctatggtcaagcggaaggacagccggggaagggccaagcgatctggatctggagcaacaaacttctcactactcaaacaagcaggtgacgtggaggagaatcccgggcctactagtatggactggatttggcgcatccttttccttgtcggcgctgctaccggcgcgcattccttcgaagaagtgcagctggttgaatcaggtggcggcctggttcaacctggcggatctctgagactgagctgtgccgccagcggctacacctttaccgagtacacaatccactgggtccgacaggcccctggcaaaggacttgagtgggtcgccaacatcaaccccaacaatggcggcaccacctacaaccagaagttcgaggacagattcaccatcagccgggacaacagcaagaacaccctgtacctccagatgaactccctgagagccgaggacaccgccgtgtactattgtgccagaggctggaacttcgactactggggccagggaacactggtcaccgttagctctacgcgtatccagaaccctgatcctgccgtgtaccagctgcgggatagcaagagcagcgacaagagcgtgtgtctgttcaccgacttcgacagccagaccaacgtgtcccagagcaaggactccgacgtgtacatcaccgataagtgcgtgctggacatgcggagcatggacttcaagagcaactccgccgtggcctggtccaacaagtccgatttcgcctgcgccaacgccttcaacaacagcattatccccgaggacacattcttcccaagccccgagagcagctgcgacgtgaagctggtggaaaagagcttcgagacagacaccaacctgaacttccagaacctgagcgtgatcggcttcagaatcctgctgctgaaagtggccggctttaacctgctgatgaccctgcggctgtggtccagc

SEQ ID NO: 9971 - DNA, 2523 bp, Artificial Sequence
  Synthetic Polynucloetide
atggccttaccagtgaccgccttgctcctgccgctggccttgctgctccacgccgccaggccggacatcgtgatgacccagagccacaagttcatgagcaccagcgtgggcgacagagtgtccatcatctgcaaggccagccaggatgtgggcacagccgtggattggtatcagcagaagcctggacagagccccaagctgctgatctactgggccagcacaagacacaccggcgtgcccgatagattcacaggctctggcagcggcaccgatttcaccctggccatcacaaacgtgcagagcgaggacctggccgactacttctgccagcagtacaacagctaccctctgacctttggagccggcaccaagctggaaatcaagagactcgaggacctgaagaacgtgttcccacctgaggtggccgtgttcgagcctagcgaggccgagatcagccacacccagaaagccaccctcgtgtgcctggctaccggcttctaccccgaccatgtggaactgtcttggtgggtcaacggcaaagaggtgcacagcggcgtgtgtaccgacccccagccactgaaagaacagcccgccctgaacgacagccggtactgcctgagcagcagactgagagtgtccgccaccttctggcagaacccccggaaccacttcagatgccaggtgcagttctacggcctgagcgagaacgacgagtggacccaggacagagccaagcccgtgacccagatcgtgtctgccgaagcctggggcagagccgattgcggctttaccagcgagagctaccagcagggcgtgctgagcgccaccatcctgtacgagatcctgctgggcaaggccaccctgtacgccgtgctggtgtctgccctggtgctgatggctatggtcaagcggaaggacagccggggaagggccaagcgatctggatctggagcaacaaacttctcactactcaaacaagcaggtgacgtggaggagaatcccgggcctactagtatggactggatttggcgcatccttttccttgtcggcgctgctaccggcgcgcattccttcgaagaagtgcagctggttgaatcaggtggcggcctggttcaacctggcggatctctgagactgagctgtgccgccagcggctacacctttaccgagtacacaatccactgggtccgacaggcccctggcaaaggacttgagtgggtcgccaacatcaaccccaacaatggcggcaccacctacaaccagaagttcgaggacagattcaccatcagccgggacaacagcaagaacaccctgtacctccagatgaactccctgagagccgaggacaccgccgtgtactattgtgccagaggctggaacttcgactactggggccagggaacactggtcaccgttagctctacgcgtatccagaaccctgatcctgccgtgtaccagctgcgggatagcaagagcagcgacaagagcgtgtgtctgttcaccgacttcgacagccagaccaacgtgtcccagagcaaggactccgacgtgtacatcaccgataagtgcgtgctggacatgcggagcatggacttcaagagcaactccgccgtggcctggtccaacaagtccgatttcgcctgcgccaacgccttcaacaacagcattatccccgaggacacattcttcccaagccccgagagcagctgcgacgtgaagctggtggaaaagagcttcgagacagacaccaacctgaacttccagaacctgagcgtgatcggcttcagaatcctgctgctgaaagtggccggctttaacctgctgatgaccctgcggctgtggtccagccgcgccaagagaagcggatctggcgtgaagcagaccctgaatttcgacctgctgaagctggctggcgacgtggaatccaacccaggcccttctagaggcgggatccacaccatggctacctacgaggtgctgtgcgaggtggcaagaaagctgggcaccgacgacagagaagtggtgctgttcctgctgaacgtgttcatccctcagcctacactggcccagctgatcggtgcactgagagccctgaaagaggaaggccggctgacctttcctctgctggccgaatgcctgttcagagccggaagaagggatctgctgcgggacctgctgcatctggaccccagatttctggaaagacacctggccggcaccatgagctacttcagcccttaccagctgaccgtgctgcacgttgacggcgaactgtgcgccagagatattcggagcctgatcttcctgagcaaggacaccatcggcagccggtctacccctcagacatttctgcactgggtgtactgcatggaaaacctggacctgctcggccccacagatgtggatgccctgatgtccatgctgagaagcctgagcagagtggacctccagagacaggtgcagacactgatgggactgcacctgagcggacctagccacagccagcactacagacacacccct

SEQ ID NO: 9972 - DNA, 1860 bp, Artificial Sequence
  Synthetic Polynucloetide
atggccttaccagtgaccgccttgctcctgccgctggccttgctgctccacgccgccaggccggacatcgtgatgacccagagccacaagttcatgagcaccagcgtgggcgacagagtgtccatcatctgcaaggccagccaggatgtgggcacagccgtggattggtatcagcagaagcctggacagagccccaagctgctgatctactgggccagcacaagacacaccggcgtgcccgatagattcacaggctctggcagcggcaccgatttcaccctggccatcacaaacgtgcagagcgaggacctggccgactacttctgccagcagtacaacagctaccctctgacctttggagccggcaccaagctggaaatcaagagactcgagatccagaaccctgatcctgccgtgtaccagctgcgggatagcaagagcagcgacaagagcgtgtgtctgttcaccgacttcgacagccagaccaacgtgtcccagagcaaggactccgacgtgtacatcaccgataagtgcgtgctggacatgcggagcatggacttcaagagcaactccgccgtggcctggtccaacaagtccgatttcgcctgcgccaacgccttcaacaacagcattatccccgaggacacattcttcccaagccccgagagcagctgcgacgtgaagctggtggaaaagagcttcgagacagacaccaacctgaacttccagaacctgagcgtgatcggcttcagaatcctgctgctgaaagtggccggctttaacctgctgatgaccctgcggctgtggtccagccgcgccaagagaagcggatctggcgtgaagcagaccctgaatttcgacctgctgaagctggctggcgacgtggaatccaacccaggccctactagtatggactggatttggcgcatccttttccttgtcggcgctgctaccggcgcgcattccttcgaagaagtgcagctggttgaatcaggtggcggcctggttcaacctggcggatctctgagactgagctgtgccgccagcggctacacctttaccgagtacacaatccactgggtccgacaggcccctggcaaaggacttgagtgggtcgccaacatcaaccccaacaatggcggcaccacctacaaccagaagttcgaggacagattcaccatcagccgggacaacagcaagaacaccctgtacctccagatgaactccctgagagccgaggacaccgccgtgtactattgtgccagaggctggaacttcgactactggggccagggaacactggtcaccgttagctctacgcgtgaggacctgaagaacgtgttcccacctgaggtggccgtgttcgagcctagcgaggccgagatcagccacacccagaaagccaccctcgtgtgcctggctaccggcttctaccccgaccatgtggaactgtcttggtgggtcaacggcaaagaggtgcacagcggcgtgtgtaccgacccccagccactgaaagaacagcccgccctgaacgacagccggtactgcctgagcagcagactgagagtgtccgccaccttctggcagaacccccggaaccacttcagatgccaggtgcagttctacggcctgagcgagaacgacgagtggacccaggacagagccaagcccgtgacccagatcgtgtctgccgaagcctggggcagagccgattgcggctttaccagcgagagctaccagcagggcgtgctgagcgccaccatcctgtacgagatcctgctgggcaaggccaccctgtacgccgtgctggtgtctgccctggtgctgatggctatggtcaagcggaaggacagccgggga

SEQ ID NO: 9973 - DNA, 2526 bp, Artificial Sequence
  Synthetic Polynucloetide
atggccttaccagtgaccgccttgctcctgccgctggccttgctgctccacgccgccaggccggacatcgtgatgacccagagccacaagttcatgagcaccagcgtgggcgacagagtgtccatcatctgcaaggccagccaggatgtgggcacagccgtggattggtatcagcagaagcctggacagagccccaagctgctgatctactgggccagcacaagacacaccggcgtgcccgatagattcacaggctctggcagcggcaccgatttcaccctggccatcacaaacgtgcagagcgaggacctggccgactacttctgccagcagtacaacagctaccctctgacctttggagccggcaccaagctggaaatcaagagactcgagatccagaaccctgatcctgccgtgtaccagctgcgggatagcaagagcagcgacaagagcgtgtgtctgttcaccgacttcgacagccagaccaacgtgtcccagagcaaggactccgacgtgtacatcaccgataagtgcgtgctggacatgcggagcatggacttcaagagcaactccgccgtggcctggtccaacaagtccgatttcgcctgcgccaacgccttcaacaacagcattatccccgaggacacattcttcccaagccccgagagcagctgcgacgtgaagctggtggaaaagagcttcgagacagacaccaacctgaacttccagaacctgagcgtgatcggcttcagaatcctgctgctgaaagtggccggctttaacctgctgatgaccctgcggctgtggtccagccgcgccaagagaagcggatctggcgtgaagcagaccctgaatttcgacctgctgaagctggctggcgacgtggaatccaacccaggccctactagtatggactggatttggcgcatccttttccttgtcggcgctgctaccggcgcgcattccttcgaagaagtgcagctggttgaatcaggtggcggcctggttcaacctggcggatctctgagactgagctgtgccgccagcggctacacctttaccgagtacacaatccactgggtccgacaggcccctggcaaaggacttgagtgggtcgccaacatcaaccccaacaatggcggcaccacctacaaccagaagttcgaggacagattcaccatcagccgggacaacagcaagaacaccctgtacctccagatgaactccctgagagccgaggacaccgccgtgtactattgtgccagaggctggaacttcgactactggggccagggaacactggtcaccgttagctctacgcgtgaggacctgaagaacgtgttcccacctgaggtggccgtgttcgagcctagcgaggccgagatcagccacacccagaaagccaccctcgtgtgcctggctaccggcttctaccccgaccatgtggaactgtcttggtgggtcaacggcaaagaggtgcacagcggcgtgtgtaccgacccccagccactgaaagaacagcccgccctgaacgacagccggtactgcctgagcagcagactgagagtgtccgccaccttctggcagaacccccggaaccacttcagatgccaggtgcagttctacggcctgagcgagaacgacgagtggacccaggacagagccaagcccgtgacccagatcgtgtctgccgaagcctggggcagagccgattgcggctttaccagcgagagctaccagcagggcgtgctgagcgccaccatcctgtacgagatcctgctgggcaaggccaccctgtacgccgtgctggtgtctgccctggtgctgatggctatggtcaagcggaaggacagccggggaagggccaagcgatctggatctggagcaacaaacttctcactactcaaacaagcaggtgacgtggaggagaatcccgggccttctagaggcgggatccacaccatggctacctacgaggtgctgtgcgaggtggcaagaaagctgggcaccgacgacagagaagtggtgctgttcctgctgaacgtgttcatccctcagcctacactggcccagctgatcggtgcactgagagccctgaaagaggaaggccggctgacctttcctctgctggccgaatgcctgttcagagccggaagaagggatctgctgcgggacctgctgcatctggaccccagatttctggaaagacacctggccggcaccatgagctacttcagcccttaccagctgaccgtgctgcacgttgacggcgaactgtgcgccagagatattcggagcctgatcttcctgagcaaggacaccatcggcagccggtctacccctcagacatttctgcactgggtgtactgcatggaaaacctggacctgctcggccccacagatgtggatgccctgatgtccatgctgagaagcctgagcagagtggacctccagagacaggtgcagacactgatgggactgcacctgagcggacctagccacagccagcactacagacacacccct

SEQ ID NO: 9974 - DNA, 2685 bp, Artificial Sequence
  Synthetic Polynucloetide
atggccttaccagtgaccgccttgctcctgccgctggccttgctgctccacgccgccaggccgctcgaggggaaaccaattcccaaccctcttctgggactggattcaaccggcagcggcgaggacctgaagaacgtgttcccacctgaggtggccgtgttcgagcctagcaaggccgagatcgcccacacccagaaagccaccctcgtgtgcctggctaccggcttctaccccgaccatgtggaactgtcttggtgggtcaacggcaaagaggtgcacagcggcgtgtgtaccgacccccagccactgaaagaacagcccgccctgaacgacagccggtactgcctgagcagcagactgagagtgtccgccaccttctggcagaacccccggaaccacttcagatgccaggtgcagttctacggcctgagcgagaacgacgagtggacccaggacagagccaagcccgtgacccagatcgtgtctgccgaagcctggggcagagccgattgcggcatcaccagcgccagctaccaccagggcgtgctgagcgccaccatcctgtacgagatcctgctgggcaaggccaccctgtacgccgtgctggtgtctgccctggtgctgatggctatggtcaagcggaaggacagccggggaagggccaagcgatctggatctggagcaacaaacttctcactactcaaacaagcaggtgacgtggaggagaatcccgggcctactagcatggccttaccagtgaccgccttgctcctgccgctggccttgctgctccacgccgccaggccggacatcgtgatgacccagagccacaagttcatgagcaccagcgtgggcgacagagtgtccatcatctgcaaggccagccaggatgtgggcacagccgtggattggtatcagcagaagcctggacagagccccaagctgctgatctactgggccagcacaagacacaccggcgtgcccgatagattcacaggctctggcagcggcaccgatttcaccctggccatcacaaacgtgcagagcgaggacctggccgactacttctgccagcagtacaacagctaccctctgacctttggagccggcaccaagctggaaatcaagagaggcggaggcggaagtggaggcggaggatctggcggcggaggctctgaagtgcagctggttgaatcaggtggcggcctggttcaacctggcggatctctgagactgagctgtgccgccagcggctacacctttaccgagtacacaatccactgggtccgacaggcccctggcaaaggacttgagtgggtcgccaacatcaaccccaacaatggcggcaccacctacaaccagaagttcgaggacagattcaccatcagccgggacaacagcaagaacaccctgtacctccagatgaactccctgagagccgaggacaccgccgtgtactattgtgccagaggctggaacttcgactactggggccagggaacactggtcaccgttagctctacgcgtgagcagaaactgatctcggaagaggatgggagcggcatccagaaccctgatcctgccgtgtaccagctgcgggatagcaagagcagcgacaagagcgtgtgtctgttcaccgacttcgacagccagaccaacgtgtcccagagcaaggactccgacgtgtacatcaccgataagtgcgtgctggacatgcggagcatggacttcaagagcaactccgccgtggcctggtccaacaagtccgatttcgcctgcgccaacgccttcaacaacagcattatccccgaggacacattcttcccaagcagcgacgtgccctgcgacgtgaagctggtggaaaagagcttcgagacagacaccaacctgaacttccagaacctgagcgtgatcggcttcagaatcctgctgctgaaagtggccggctttaacctgctgatgaccctgcggctgtggtccagccgcgccaagagaagcggatctggcgtgaagcagaccctgaatttcgacctgctgaagctggctggcgacgtggaatccaacccaggcccttctagaggccatatgaccgagtacaagcccacggtgcgcctcgccacccgcgacgacgtccccagggccgtacgcaccctcgccgccgcgttcgccgactaccccgccacgcgccacaccgtcgatccggaccgccacatcgagcgggtcaccgagctgcaagaactcttcctcacgcgcgtcgggctcgacatcggcaaggtgtgggtcgcggacgacggcgccgcggtggcggtctggaccacgccggagagcgtcgaagcgggggcggtgttcgccgagatcggcccgcgcatggccgagttgagcggttcccggctggccgcgcagcaacagatggaaggcctcctggcgccgcaccggcccaaggagcccgcgtggttcctggccaccgtcggcgtctcgcccgaccaccagggcaagggtctgggcagcgccgtcgtgctccccggagtggaggcggccgagcgcgccggggtgcccgccttcctggagacctccgcgccccgcaacctccccttctacgagcggctcggcttcaccgtcaccgccgacgtcgaggtgcccgaaggaccgcgcacctggtgcatgacccgcaagcccggtgcctga

SEQ ID NO: 9975 - DNA, 2688 bp, Artificial Sequence
  Synthetic Polynucloetide
atggccttaccagtgaccgccttgctcctgccgctggccttgctgctccacgccgccaggccgctcgagcagaaactgatctcggaagaggatctgggctccggcgatcgccctgatcctgccgtgtaccagctgcgggatagcaagagcagcgacaagagcgtgtgtctgttcaccgacttcgacagccagaccaacgtgtcccagagcaaggactccgacgtgtacatcaccgataagtgcgtgctggacatgcggagcatggacttcaagagcaactccgccgtggcctggtccaacaagtccgatttcgcctgcgccaacgccttcaacaacagcattatccccgaggacacattcttcccaagccccgagagcagctgcgacgtgaagctggtggaaaagagcttcgagacagacaccaacctgaacttccagaacctgagcgtgatcggcttcagaatcctgctgctgaaagtggccggctttaacctgctgatgaccctgcggctgtggtccagctctagtcgcgccaagagaagcggatctggcgtgaagcagaccctgaatttcgacctgctgaagctggctggcgacgtggaatccaacccaggccccactagcatggccttaccagtgaccgccttgctcctgccgctggccttgctgctccacgccgccaggccggacatcgtgatgacccagagccacaagttcatgagcaccagcgtgggcgacagagtgtccatcatctgcaaggccagccaggatgtgggcacagccgtggattggtatcagcagaagcctggacagagccccaagctgctgatctactgggccagcacaagacacaccggcgtgcccgatagattcacaggctctggcagcggcaccgatttcaccctggccatcacaaacgtgcagagcgaggacctggccgactacttctgccagcagtacaacagctaccctctgacctttggagccggcaccaagctggaaatcaagagaggcggaggcggaagtggaggcggaggatctggcggcggaggctctgaagtgcagctggttgaatcaggtggcggcctggttcaacctggcggatctctgagactgagctgtgccgccagcggctacacctttaccgagtacacaatccactgggtccgacaggcccctggcaaaggacttgagtgggtcgccaacatcaaccccaacaatggcggcaccacctacaaccagaagttcgaggacagattcaccatcagccgggacaacagcaagaacaccctgtacctccagatgaactccctgagagccgaggacaccgccgtgtactattgtgccagaggctggaacttcgactactggggccagggaacactggtcaccgttagctctacgcgtgggaaaccaattcccaaccctcttctgggactggattcaaccggcagcggcgaggacctgaagaacgtgttcccacctgaggtggccgtgttcgagcctagcgaggccgagatcagccacacccagaaagccaccctcgtgtgcctggctaccggcttctaccccgaccatgtggaactgtcttggtgggtcaacggcaaagaggtgcacagcggcgtgtgtaccgacccccagccactgaaagaacagcccgccctgaacgacagccggtactgcctgagcagcagactgagagtgtccgccaccttctggcagaacccccggaaccacttcagatgccaggtgcagttctacggcctgagcgagaacgacgagtggacccaggacagagccaagcccgtgacccagatcgtgtctgccgaagcctggggcagagccgattgcggctttaccagcgagagctaccagcagggcgtgctgagcgccaccatcctgtacgagatcctgctgggcaaggccaccctgtacgccgtgctggtgtctgccctggtgctgatggctatggtcaagcggaaggacagccggggaagggccaagcgatctggatctggagcaacaaacttctcactactcaaacaagcaggtgacgtggaggagaatcccgggccttctagaggccatatgaccgagtacaagcccacggtgcgcctcgccacccgcgacgacgtccccagggccgtacgcaccctcgccgccgcgttcgccgactaccccgccacgcgccacaccgtcgatccggaccgccacatcgagcgggtcaccgagctgcaagaactcttcctcacgcgcgtcgggctcgacatcggcaaggtgtgggtcgcggacgacggcgccgcggtggcggtctggaccacgccggagagcgtcgaagcgggggcggtgttcgccgagatcggcccgcgcatggccgagttgagcggttcccggctggccgcgcagcaacagatggaaggcctcctggcgccgcaccggcccaaggagcccgcgtggttcctggccaccgtcggcgtctcgcccgaccaccagggcaagggtctgggcagcgccgtcgtgctccccggagtggaggcggccgagcgcgccggggtgcccgccttcctggagacctccgcgccccgcaacctccccttctacgagcggctcggcttcaccgtcaccgccgacgtcgaggtgcccgaaggaccgcgcacctggtgcatgacccgcaagcccggtgcctga

SEQ ID NO: 9976 - DNA, 2550 bp, Artificial Sequence
  Synthetic Polynucloetide
atggccttaccagtgaccgccttgctcctgccgctggccttgctgctccacgccgccaggccggacatcgtgatgacccagagccacaagttcatgagcaccagcgtgggcgacagagtgtccatcatctgcaaggccagccaggatgtgggcacagccgtggattggtatcagcagaagcctggacagagccccaagctgctgatctactgggccagcacaagacacaccggcgtgcccgatagattcacaggctctggcagcggcaccgatttcaccctggccatcacaaacgtgcagagcgaggacctggccgactacttctgccagcagtacaacagctaccctctgacctttggagccggcaccaagctggaaatcaagagactcgaggacctgaagaacgtgttcccacctgaggtggccgtgttcgagcctagcgaggccgagatcagccacacccagaaagccaccctcgtgtgcctggctaccggcttctaccccgaccatgtggaactgtcttggtgggtcaacggcaaagaggtgcacagcggcgtgtctaccgacccccagccactgaaagaacagcccgccctgaacgacagccggtactgcctgagcagcagactgagagtgtccgccaccttctggcagaacccccggaaccacttcagatgccaggtgcagttctacggcctgagcgagaacgacgagtggacccaggacagagccaagcccgtgacccagatcgtgtctgccgaagcctggggcagagccgattgcggctttaccagcgagagctaccagcagggcgtgctgagcgccaccatcctgtacgagatcctgctgggcaaggccaccctgtacgccgtgctggtgtctgccctggtgctgatggctatggtcaagcggaaggacagccggggaagggccaagcgatctggatctggagcaacaaacttctcactactcaaacaagcaggtgacgtggaggagaatcccgggcctactagtatggactggatttggcgcatccttttccttgtcggcgctgctaccggcgcgcattccttcgaagaagtgcagctggttgaatcaggtggcggcctggttcaacctggcggatctctgagactgagctgtgccgccagcggctacacctttaccgagtacacaatccactgggtccgacaggcccctggcaaaggacttgagtgggtcgccaacatcaaccccaacaatggcggcaccacctacaaccagaagttcgaggacagattcaccatcagccgggacaacagcaagaacaccctgtacctccagatgaactccctgagagccgaggacaccgccgtgtactattgtgccagaggctggaacttcgactactggggccagggaacactggtcaccgttagctctacgcgtatccagaaccctgatcctgccgtgtaccagctgcgggatagcaagagcagcgacaagagcgtgtgtctgttcaccgacttcgacagccagaccaacgtgtcccagagcaaggactccgacgtgtacatcaccgataagaccgtgctggacatgcggagcatggacttcaagagcaactccgccgtggcctggtccaacaagtccgatttcgcctgcgccaacgccttcaacaacagcattatccccgaggacacattcttcccaagccccgagagcagctgcgacgtgaagctggtggaaaagagcttcgagacagacaccaacctgaacttccagaacctgagcgtgatcggcttcagaatcctgctgctgaaagtggccggctttaacctgctgatgaccctgcggctgtggtccagccgcgccaagagaagcggatctggcgtgaagcagaccctgaatttcgacctgctgaagctggctggcgacgtggaatccaacccaggcccttctagaggccatatgaccgagtacaagcccacggtgcgcctcgccacccgcgacgacgtccccagggccgtacgcaccctcgccgccgcgttcgccgactaccccgccacgcgccacaccgtcgatccggaccgccacatcgagcgggtcaccgagctgcaagaactcttcctcacgcgcgtcgggctcgacatcggcaaggtgtgggtcgcggacgacggcgccgcggtggcggtctggaccacgccggagagcgtcgaagcgggggcggtgttcgccgagatcggcccgcgcatggccgagttgagcggttcccggctggccgcgcagcaacagatggaaggcctcctggcgccgcaccggcccaaggagcccgcgtggttcctggccaccgtcggcgtctcgcccgaccaccagggcaagggtctgggcagcgccgtcgtgctccccggagtggaggcggccgagcgcgccggggtgcccgccttcctggagacctccgcgccccgcaacctccccttctacgagcggctcggcttcaccgtcaccgccgacgtcgaggtgcccgaaggaccgcgcacctggtgcatgacccgcaagcccggtgcctga

SEQ ID NO: 9977 - DNA, 2796 bp, Artificial Sequence
  Synthetic Polynucloetide
atggccttaccagtgaccgccttgctcctgccgctggccttgctgctccacgccgccaggccggacatcgtgatgacccagagccacaagttcatgagcaccagcgtgggcgacagagtgtccatcatctgcaaggccagccaggatgtgggcacagccgtggattggtatcagcagaagcctggacagagccccaagctgctgatctactgggccagcacaagacacaccggcgtgcccgatagattcacaggctctggcagcggcaccgatttcaccctggccatcacaaacgtgcagagcgaggacctggccgactacttctgccagcagtacaacagctaccctctgacctttggagccggcaccaagctggaaatcaagagactcgaggacctgaagaacgtgttcccacctgaggtggccgtgttcgagcctagcgaggccgagatcagccacacccagaaagccaccctcgtgtgcctggctaccggcttctaccccgaccatgtggaactgtcttggtgggtcaacggcaaagaggtgcacagcggcgtgtctaccgacccccagccactgaaagaacagcccgccctgaacgacagccggtactgcctgagcagcagactgagagtgtccgccaccttctggcagaacccccggaaccacttcagatgccaggtgcagttctacggcctgagcgagaacgacgagtggacccaggacagagccaagcccgtgacccagatcgtgtctgccgaagcctggggcagagccgattgcggctttaccagcgagagctaccagcagggcgtgctgagcgccaccatcctgtacgagatcctgctgggcaaggccaccctgtacgccgtgctggtgtctgccctggtgctgatggctatggtcaagcggaaggacagccggggaagggccaagcgatctggatctggagcaacaaacttctcactactcaaacaagcaggtgacgtggaggagaatcccgggcctactagtatggactggatttggcgcatccttttccttgtcggcgctgctaccggcgcgcattccttcgaagaagtgcagctggttgaatcaggtggcggcctggttcaacctggcggatctctgagactgagctgtgccgccagcggctacacctttaccgagtacacaatccactgggtccgacaggcccctggcaaaggacttgagtgggtcgccaacatcaaccccaacaatggcggcaccacctacaaccagaagttcgaggacagattcaccatcagccgggacaacagcaagaacaccctgtacctccagatgaactccctgagagccgaggacaccgccgtgtactattgtgccagaggctggaacttcgactactggggccagggaacactggtcaccgttagctctacgcgtgagcagaaactgatctcggaagaggatgggagcggcaccccattcccttctctggcccctcccatcatgctgctggtggacggcaagcagcagatggtggtcgtgtgcctggtgctggatgtggccccacctggactggacagccccatctggtttagcgccggcaatggctctgccctggacgcctttacctacggcccaagccctgccaccgatggcacctggacaaatctggcccacctgagcctgcccagcgaggaactggcttcttgggagcctctcgtgtgccacacaggacctggcgctgagggacacagcagatccacccagcctatgcacctgtctggcgaggccagcaccgccagaacctgtcctcaggaacctctgagaggcacccctggcggagcactgtggctgggagtgctgagactgctgctgttcaagctgctgctgtttgacctgctgctgacctgctcctgtctgtgcgatcctgccggccctctgccttctcctgccaccaccacaagactgagagccctgggcagccacagactgcaccctgccacagagacaggcggcagagaggccacaagcagccctagaccccagcccagagacagaagatggggcgataccccccctggcagaaagcctggatctccagtccgcgccaagagaagcggatctggcgtgaagcagaccctgaatttcgacctgctgaagctggctggcgacgtggaatccaacccaggcccttctagaggccatatgaccgagtacaagcccacggtgcgcctcgccacccgcgacgacgtccccagggccgtacgcaccctcgccgccgcgttcgccgactaccccgccacgcgccacaccgtcgatccggaccgccacatcgagcgggtcaccgagctgcaagaactcttcctcacgcgcgtcgggctcgacatcggcaaggtgtgggtcgcggacgacggcgccgcggtggcggtctggaccacgccggagagcgtcgaagcgggggcggtgttcgccgagatcggcccgcgcatggccgagttgagcggttcccggctggccgcgcagcaacagatggaaggcctcctggcgccgcaccggcccaaggagcccgcgtggttcctggccaccgtcggcgtctcgcccgaccaccagggcaagggtctgggcagcgccgtcgtgctccccggagtggaggcggccgagcgcgccggggtgcccgccttcctggagacctccgcgccccgcaacctccccttctacgagcggctcggcttcaccgtcaccgccgacgtcgaggtgcccgaaggaccgcgcacctggtgcatgacccgcaagcccggtgcctga

SEQ ID NO: 9978 - DNA, 2850 bp, Artificial Sequence
  Synthetic Polynucloetide
atggccttaccagtgaccgccttgctcctgccgctggccttgctgctccacgccgccaggccgctcgaggacctgaagaacgtgttcccacctgaggtggccgtgttcgagcctagcgaggccgagatcagccacacccagaaagccaccctcgtgtgcctggctaccggcttctaccccgaccatgtggaactgtcttggtgggtcaacggcaaagaggtgcacagcggcgtgtctaccgacccccagccactgaaagaacagcccgccctgaacgacagccggtactgcctgagcagcagactgagagtgtccgccaccttctggcagaacccccggaaccacttcagatgccaggtgcagttctacggcctgagcgagaacgacgagtggacccaggacagagccaagcccgtgacccagatcgtgtctgccgaagcctggggcagagccgattgcggctttaccagcgagagctaccagcagggcgtgctgagcgccaccatcctgtacgagatcctgctgggcaaggccaccctgtacgccgtgctggtgtctgccctggtgctgatggctatggtcaagcggaaggacagccggggaagggccaagcgatctggatctggagcaacaaacttctcactactcaaacaagcaggtgacgtggaggagaatcccgggcctactagcatggccttaccagtgaccgccttgctcctgccgctggccttgctgctccacgccgccaggccggacatcgtgatgacccagagccacaagttcatgagcaccagcgtgggcgacagagtgtccatcatctgcaaggccagccaggatgtgggcacagccgtggattggtatcagcagaagcctggacagagccccaagctgctgatctactgggccagcacaagacacaccggcgtgcccgatagattcacaggctctggcagcggcaccgatttcaccctggccatcacaaacgtgcagagcgaggacctggccgactacttctgccagcagtacaacagctaccctctgacctttggagccggcaccaagctggaaatcaagagaggcggaggcggaagtggaggcggaggatctggcggcggaggctctgaagtgcagctggttgaatcaggtggcggcctggttcaacctggcggatctctgagactgagctgtgccgccagcggctacacctttaccgagtacacaatccactgggtccgacaggcccctggcaaaggacttgagtgggtcgccaacatcaaccccaacaatggcggcaccacctacaaccagaagttcgaggacagattcaccatcagccgggacaacagcaagaacaccctgtacctccagatgaactccctgagagccgaggacaccgccgtgtactattgtgccagaggctggaacttcgactactggggccagggaacactggtcaccgttagctctacgcgtgagcagaaactgatctcggaagaggatctggggagcggcaccccattcccttctctggcccctcccatcatgctgctggtggacggcaagcagcagatggtggtcgtgtgcctggtgctggatgtggccccacctggactggacagccccatctggtttagcgccggcaatggctctgccctggacgcctttacctacggcccaagccctgccaccgatggcacctggacaaatctggcccacctgagcctgcccagcgaggaactggcttcttgggagcctctcgtgtgccacacaggacctggcgctgagggacacagcagatccacccagcctatgcacctgtctggcgaggccagcaccgccagaacctgtcctcaggaacctctgagaggcacccctggcggagcactgtggctgggagtgctgagactgctgctgttcaagctgctgctgtttgacctgctgctgacctgctcctgtctgtgcgatcctgccggccctctgccttctcctgccaccaccacaagactgagagccctgggcagccacagactgcaccctgccacagagacaggcggcagagaggccacaagcagccctagaccccagcccagagacagaagatggggcgataccccccctggcagaaagcctggatctccagtccgcgccaagagaagcggatctggcgtgaagcagaccctgaatttcgacctgctgaagctggctggcgacgtggaatccaacccaggcccttctagatctagaggccatatgaccgagtacaagcccacggtgcgcctcgccacccgcgacgacgtccccagggccgtacgcaccctcgccgccgcgttcgccgactaccccgccacgcgccacaccgtcgatccggaccgccacatcgagcgggtcaccgagctgcaagaactcttcctcacgcgcgtcgggctcgacatcggcaaggtgtgggtcgcggacgacggcgccgcggtggcggtctggaccacgccggagagcgtcgaagcgggggcggtgttcgccgagatcggcccgcgcatggccgagttgagcggttcccggctggccgcgcagcaacagatggaaggcctcctggcgccgcaccggcccaaggagcccgcgtggttcctggccaccgtcggcgtctcgcccgaccaccagggcaagggtctgggcagcgccgtcgtgctccccggagtggaggcggccgagcgcgccggggtgcccgccttcctggagacctccgcgccccgcaacctccccttctacgagcggctcggcttcaccgtcaccgccgacgtcgaggtgcccgaaggaccgcgcacctggtgcatgacccgcaagcccggtgcctga

SEQ ID NO: 9979 - DNA, 2661 bp, Artificial Sequence
  Synthetic Polynucloetide
atggccttaccagtgaccgccttgctcctgccgctggccttgctgctccacgccgccaggccggacatcgtgatgacccagagccacaagttcatgagcaccagcgtgggcgacagagtgtccatcatctgcaaggccagccaggatgtgggcacagccgtggattggtatcagcagaagcctggacagagccccaagctgctgatctactgggccagcacaagacacaccggcgtgcccgatagattcacaggctctggcagcggcaccgatttcaccctggccatcacaaacgtgcagagcgaggacctggccgactacttctgccagcagtacaacagctaccctctgacctttggagccggcaccaagctggaaatcaagagactcgaggggaaaccaattcccaaccctcttctgggactggattcaaccggcagcggcgacaagcagctggacgccgacgtgtcccccaagcctaccatcttcctgccctctatcgccgagacaaagctccagaaggccggcacctacctgtgcctgctggaaaagttcttcccagatgtgattaagatccactggcaggaaaagaagtccaacaccatcctgggcagccaggaaggcaacaccatgaagaccaacgacacctacatgaagttcagctggctgaccgtgcccgagaagtccctggacaaagaacacagatgcatcgtgcggcacgaaaacaacaagaacggcgtggaccaggaaatcatcttcccacccatcaagaccgatgtgattacaatggaccccaaggacaactgctccaaggacgccaacgataccctgctgctccagctgaccaacaccagcgcctactacatgtacttgttgctgctgctgaagtccgtggtgtacttcgccatcatcacatgctgcctgctgcggagaaccgccttctgctgcaacggcgagaagtctagggccaagcgatctggatctggagcaacaaacttctcactactcaaacaagcaggtgacgtggaggagaatcccgggcctactagtatggactggatttggcgcatccttttccttgtcggcgctgctaccggcgcgcattccttcgaagaagtgcagctggttgaatcaggtggcggcctggttcaacctggcggatctctgagactgagctgtgccgccagcggctacacctttaccgagtacacaatccactgggtccgacaggcccctggcaaaggacttgagtgggtcgccaacatcaaccccaacaatggcggcaccacctacaaccagaagttcgaggacagattcaccatcagccgggacaacagcaagaacaccctgtacctccagatgaactccctgagagccgaggacaccgccgtgtactattgtgccagaggctggaacttcgactactggggccagggaacactggtcaccgttagctctacgcgtgagcagaaactgatctcggaagaggatgggagcggcagccagcctcacaccaagcccagcgtgttcgtgatgaagaacggcaccaacgtggcctgcctcgtgaaagagttctaccccaaggacatcaggatcaacctggtgtccagcaagaagatcaccgagttcgaccccgccatcgtgatctcccccagcggcaagtacaacgccgtgaagctggggaagtacgaggacagcaacagcgtgacctgctccgtgcagcacgacaacaagaccgtgcacagcaccgactttgaagtgaaaaccgactccaccgaccacgtgaagcccaaagagacagagaacaccaagcagcccagcaagagctgccacaagcccaaggccatcgtgcacaccgagaaagtgaacatgatgagcctgaccgtgctgggcctgcggatgctgttcgccaaaaccgtggccgtgaacttcctgctgaccgccaagctgttcttcctccgcgccaagagaagcggatctggcgtgaagcagaccctgaatttcgacctgctgaagctggctggcgacgtggaatccaacccaggcccttctagaggccatatgaccgagtacaagcccacggtgcgcctcgccacccgcgacgacgtccccagggccgtacgcaccctcgccgccgcgttcgccgactaccccgccacgcgccacaccgtcgatccggaccgccacatcgagcgggtcaccgagctgcaagaactcttcctcacgcgcgtcgggctcgacatcggcaaggtgtgggtcgcggacgacggcgccgcggtggcggtctggaccacgccggagagcgtcgaagcgggggcggtgttcgccgagatcggcccgcgcatggccgagttgagcggttcccggctggccgcgcagcaacagatggaaggcctcctggcgccgcaccggcccaaggagcccgcgtggttcctggccaccgtcggcgtctcgcccgaccaccagggcaagggtctgggcagcgccgtcgtgctccccggagtggaggcggccgagcgcgccggggtgcccgccttcctggagacctccgcgccccgcaacctccccttctacgagcggctcggcttcaccgtcaccgccgacgtcgaggtgcccgaaggaccgcgcacctggtgcatgacccgcaagcccggtgcctga

SEQ ID NO: 9980 - DNA, 1872 bp, Artificial Sequence
  Synthetic Polynucloetide
atggccttaccagtgaccgccttgctcctgccgctggccttgctgctccacgccgccaggccggacatcgtgatgacccagagccacaagttcatgagcaccagcgtgggcgacagagtgtccatcatctgcaaggccagccaggatgtgggcacagccgtggattggtatcagcagaagcctggacagagccccaagctgctgatctactgggccagcacaagacacaccggcgtgcccgatagattcacaggctctggcagcggcaccgatttcaccctggccatcacaaacgtgcagagcgaggacctggccgactacttctgccagcagtacaacagctaccctctgacctttggagccggcaccaagctggaaatcaagagactcgagagccagcctcacaccaagcccagcgtgttcgtgatgaagaacggcaccaacgtggcctgcctcgtgaaagagttctaccccaaggacatcaggatcaacctggtgtccagcaagaagatcaccgagttcgaccccgccatcgtgatctcccccagcggcaagtacaacgccgtgaagctggggaagtacgaggacagcaacagcgtgacctgctccgtgcagcacgacaacaagaccgtgcacagcaccgactttgaagtgaaaaccgactccaccgaccacgtgaagcccaaagagacagagaacaccaagcagcccagcaagagctgccacaagcccaaggccatcgtgcacaccgagaaagtgaacatgatgagcctgaccgtgctgggcctgcggatgctgttcgccaaaaccgtggccgtgaacttcctgctgaccgccaagctgttcttcctcagggccaagcgatctggatctggagcaacaaacttctcactactcaaacaagcaggtgacgtggaggagaatcccgggcctactagtatggactggatttggcgcatccttttccttgtcggcgctgctaccggcgcgcattccttcgaagaagtgcagctggttgaatcaggtggcggcctggttcaacctggcggatctctgagactgagctgtgccgccagcggctacacctttaccgagtacacaatccactgggtccgacaggcccctggcaaaggacttgagtgggtcgccaacatcaaccccaacaatggcggcaccacctacaaccagaagttcgaggacagattcaccatcagccgggacaacagcaagaacaccctgtacctccagatgaactccctgagagccgaggacaccgccgtgtactattgtgccagaggctggaacttcgactactggggccagggaacactggtcaccgttagctctacgcgtgacaagcagctggacgccgacgtgtcccccaagcctaccatcttcctgccctctatcgccgagacaaagctccagaaggccggcacctacctgtgcctgctggaaaagttcttcccagatgtgattaagatccactggcaggaaaagaagtccaacaccatcctgggcagccaggaaggcaacaccatgaagaccaacgacacctacatgaagttcagctggctgaccgtgcccgagaagtccctggacaaagaacacagatgcatcgtgcggcacgaaaacaacaagaacggcgtggaccaggaaatcatcttcccacccatcaagaccgatgtgattacaatggaccccaaggacaactgctccaaggacgccaacgataccctgctgctccagctgaccaacaccagcgcctactacatgtacttgttgctgctgctgaagtccgtggtgtacttcgccatcatcacatgctgcctgctgcggagaaccgccttctgctgcaacggcgagaagtct

SEQ ID NO: 9981 - DNA, 2706 bp, Artificial Sequence
  Synthetic Polynucloetide
atggccttaccagtgaccgccttgctcctgccgctggccttgctgctccacgccgccaggccgctcgaggggaaaccaattcccaaccctcttctgggactggattcaaccggcagcggcgacaagcagctggacgccgacgtgtcccccaagcctaccatcttcctgccctctatcgccgagacaaagctccagaaggccggcacctacctgtgcctgctggaaaagttcttcccagatgtgattaagatccactggcaggaaaagaagtccaacaccatcctgggcagccaggaaggcaacaccatgaagaccaacgacacctacatgaagttcagctggctgaccgtgcccgagaagtccctggacaaagaacacagatgcatcgtgcggcacgaaaacaacaagaacggcgtggaccaggaaatcatcttcccacccatcaagaccgatgtgattacaatggaccccaaggacaactgctccaaggacgccaacgataccctgctgctccagctgaccaacaccagcgcctactacatgtacttgttgctgctgctgaagtccgtggtgtacttcgccatcatcacatgctgcctgctgcggagaaccgccttctgctgcaacggcgagaagtctagggccaagcgatctggatctggagcaacaaacttctcactactcaaacaagcaggtgacgtggaggagaatcccgggcctactagcatggccttaccagtgaccgccttgctcctgccgctggccttgctgctccacgccgccaggccggacatcgtgatgacccagagccacaagttcatgagcaccagcgtgggcgacagagtgtccatcatctgcaaggccagccaggatgtgggcacagccgtggattggtatcagcagaagcctggacagagccccaagctgctgatctactgggccagcacaagacacaccggcgtgcccgatagattcacaggctctggcagcggcaccgatttcaccctggccatcacaaacgtgcagagcgaggacctggccgactacttctgccagcagtacaacagctaccctctgacctttggagccggcaccaagctggaaatcaagagaggcggaggcggaagtggaggcggaggatctggcggcggaggctctgaagtgcagctggttgaatcaggtggcggcctggttcaacctggcggatctctgagactgagctgtgccgccagcggctacacctttaccgagtacacaatccactgggtccgacaggcccctggcaaaggacttgagtgggtcgccaacatcaaccccaacaatggcggcaccacctacaaccagaagttcgaggacagattcaccatcagccgggacaacagcaagaacaccctgtacctccagatgaactccctgagagccgaggacaccgccgtgtactattgtgccagaggctggaacttcgactactggggccagggaacactggtcaccgttagctctacgcgtgagcagaaactgatctcggaagaggatgggagcggcagccagcctcacaccaagcccagcgtgttcgtgatgaagaacggcaccaacgtggcctgcctcgtgaaagagttctaccccaaggacatcaggatcaacctggtgtccagcaagaagatcaccgagttcgaccccgccatcgtgatctcccccagcggcaagtacaacgccgtgaagctggggaagtacgaggacagcaacagcgtgacctgctccgtgcagcacgacaacaagaccgtgcacagcaccgactttgaagtgaaaaccgactccaccgaccacgtgaagcccaaagagacagagaacaccaagcagcccagcaagagctgccacaagcccaaggccatcgtgcacaccgagaaagtgaacatgatgagcctgaccgtgctgggcctgcggatgctgttcgccaaaaccgtggccgtgaacttcctgctgaccgccaagctgttcttcctccgcgccaagagaagcggatctggcgtgaagcagaccctgaatttcgacctgctgaagctggctggcgacgtggaatccaacccaggcccttctagaggccatatgaccgagtacaagcccacggtgcgcctcgccacccgcgacgacgtccccagggccgtacgcaccctcgccgccgcgttcgccgactaccccgccacgcgccacaccgtcgatccggaccgccacatcgagcgggtcaccgagctgcaagaactcttcctcacgcgcgtcgggctcgacatcggcaaggtgtgggtcgcggacgacggcgccgcggtggcggtctggaccacgccggagagcgtcgaagcgggggcggtgttcgccgagatcggcccgcgcatggccgagttgagcggttcccggctggccgcgcagcaacagatggaaggcctcctggcgccgcaccggcccaaggagcccgcgtggttcctggccaccgtcggcgtctcgcccgaccaccagggcaagggtctgggcagcgccgtcgtgctccccggagtggaggcggccgagcgcgccggggtgcccgccttcctggagacctccgcgccccgcaacctccccttctacgagcggctcggcttcaccgtcaccgccgacgtcgaggtgcccgaaggaccgcgcacctggtgcatgacccgcaagcccggtgcctga

SEQ ID NO: 9982 - DNA, 3081 bp, Artificial Sequence
  Synthetic Polynucloetide
atggccttaccagtgaccgccttgctcctgccgctggccttgctgctccacgccgccaggccggacatcgtgatgacccagagccacaagttcatgagcaccagcgtgggcgacagagtgtccatcatctgcaaggccagccaggatgtgggcacagccgtggattggtatcagcagaagcctggacagagccccaagctgctgatctactgggccagcacaagacacaccggcgtgcccgatagattcacaggctctggcagcggcaccgatttcaccctggccatcacaaacgtgcagagcgaggacctggccgactacttctgccagcagtacaacagctaccctctgacctttggagccggcaccaagctggaaatcaagagaggacagcctaaggccaatcctaccgtgacactgttccctccaagcagcgaagaactccaggccaacaaggccacacttgtgtgcctgatctccgacttctaccctggggctgtgacagtggcttggaaggccgatggatctcctgtgaaagccggcgtggaaaccaccaagccatccaagcagagcaacaacaaatacgccgccagctcctacctgagcctgacacctgagcagtggaagtcccacagatcctacagctgccaagtgacccacgaaggcagcaccgtggaaaagacagtggcccctacagagtgcagcggatcccagagcttcggcctgctggaccccaagctgtgctacctgctggatggcatcctgttcatctacggcgtgatcctgaccgccctgttcctgagagtgaagttcagcagaagcgccgacgcccctgcctaccagcagggacagaaccaactgtacaacgagctgaacctgggcagacgggaagagtacgacgtgctggacaagcggagaggcagggaccctgagatgggcggaaagccccagcggagaaagaacccccaggaaggactgtataacgaactccagaaagacaagatggccgaagcctacagcgagatcggcatgaagggcgagcggagaagaggcaagggccacgatggcctgtaccagggcctgagcaccgccaccaaggacacctatgacgccctgcacatgcaggccctgcctccaagaagggccaagcgatctggatctggagcaacaaacttctcactactcaaacaagcaggtgacgtggaggagaatcccgggcctactagtatggactggatttggcgcatccttttccttgtcggcgctgctaccggcgcgcattccttcgaagaagtgcagctggttgaatcaggtggcggcctggttcaacctggcggatctctgagactgagctgtgccgccagcggctacacctttaccgagtacacaatccactgggtccgacaggcccctggcaaaggacttgagtgggtcgccaacatcaaccccaacaatggcggcaccacctacaaccagaagttcgaggacagattcaccatcagccgggacaacagcaagaacaccctgtacctccagatgaactccctgagagccgaggacaccgccgtgtactattgtgccagaggctggaacttcgactactggggccagggaacactggtcaccgttagctctgcctctacaaagggaccctccgtgtttcctctggctcccagcagcaagtctacaagcggaggaacagccgctctgggctgcctggtcaaggattactttcccgagcctgtgaccgtgtcctggaatagcggagcactgacaagcggcgtgcacacctttccagccgtgctgcaaagcagcggcctgtactctctgagcagcgtggtcacagtgcctagctctagcctgggcacccagacctacatctgcaatgtgaaccacaagcctagcaacaccaaggtggacaagagagtggaacccaagagctgtggtacccagagttttgggttgttggaccctaaattgtgctatctgttggacggaatcctgttcatttacggagtgatcctgaccgcattgttcctgcgggttaagttttccagatccgcagacgcacccgcttaccaacaagggcagaaccaactctacaatgaacttaatttggggcggagggaagagtacgacgttctggacaaaaggaggggacgagatcccgagatgggcggaaagcctcagcgaaggaagaatccgcaagaggggctttataacgaactccagaaagataaaatggcagaagcctatagtgagattgggatgaagggagaaaggaggaggggtaaaggtcacgatgggttgtaccaaggattgagcacagccactaaagatacctatgatgcgctccacatgcaggccctgccgccaagacgcgccaagagaagcggatctggcgtgaagcagaccctgaatttcgacctgctgaagctggctggcgacgtggaatccaacccaggcccttctagaggccatatgaccgagtacaagcccacggtgcgcctcgccacccgcgacgacgtccccagggccgtacgcaccctcgccgccgcgttcgccgactaccccgccacgcgccacaccgtcgatccggaccgccacatcgagcgggtcaccgagctgcaagaactcttcctcacgcgcgtcgggctcgacatcggcaaggtgtgggtcgcggacgacggcgccgcggtggcggtctggaccacgccggagagcgtcgaagcgggggcggtgttcgccgagatcggcccgcgcatggccgagttgagcggttcccggctggccgcgcagcaacagatggaaggcctcctggcgccgcaccggcccaaggagcccgcgtggttcctggccaccgtcggcgtctcgcccgaccaccagggcaagggtctgggcagcgccgtcgtgctccccggagtggaggcggccgagcgcgccggggtgcccgccttcctggagacctccgcgccccgcaacctccccttctacgagcggctcggcttcaccgtcaccgccgacgtcgaggtgcccgaaggaccgcgcacctggtgcatgacccgcaagcccggtgcctga

SEQ ID NO: 9983 - DNA, 2436 bp, Artificial Sequence
  Synthetic Polynucloetide
atggccttaccagtgaccgccttgctcctgccgctggccttgctgctccacgccgccaggccggacatcgtgatgacccagagccacaagttcatgagcaccagcgtgggcgacagagtgtccatcatctgcaaggccagccaggatgtgggcacagccgtggattggtatcagcagaagcctggacagagccccaagctgctgatctactgggccagcacaagacacaccggcgtgcccgatagattcacaggctctggcagcggcaccgatttcaccctggccatcacaaacgtgcagagcgaggacctggccgactacttctgccagcagtacaacagctaccctctgacctttggagccggcaccaagctggaaatcaagagactcgaggacctgaagaacgtgttcccacctgaggtggccgtgttcgagcctagcgaggccgagatcagccacacccagaaagccaccctcgtgtgcctggctaccggcttctaccccgaccatgtggaactgtcttggtgggtcaacggcaaagaggtgcacagcggcgtgtctaccgacccccagccactgaaagaacagcccgccctgaacgacagccggtactgcctgagcagcagactgagagtgtccgccaccttctggcagaacccccggaaccacttcagatgccaggtgcagttctacggcctgagcgagaacgacgagtggacccaggacagagccaagcccgtgacccagatcgtgtctgccgaagcctggggcagagccgattgcggatcccagagcttcggcctgctggaccccaagctgtgctacctgctggatggcatcctgttcatctacggcgtgatcctgaccgccctgttcctgagagtgaagttcagcagaagcgccgacgcccctgcctaccagcagggacagaaccaactgtacaacgagctgaacctgggcagacgggaagagtacgacgtgctggacaagcggagaggcagggaccctgagatgggcggaaagccccagcggagaaagaacccccaggaaggactgtataacgaactccagaaagacaagatggccgaagcctacagcgagatcggcatgaagggcgagcggagaagaggcaagggccacgatggcctgtaccagggcctgagcaccgccaccaaggacacctatgacgccctgcacatgcaggccctgcctccaagaagggccaagcgatctggatctggagcaacaaacttctcactactcaaacaagcaggtgacgtggaggagaatcccgggcctactagtatggactggatttggcgcatccttttccttgtcggcgctgctaccggcgcgcattccttcgaagaagtgcagctggttgaatcaggtggcggcctggttcaacctggcggatctctgagactgagctgtgccgccagcggctacacctttaccgagtacacaatccactgggtccgacaggcccctggcaaaggacttgagtgggtcgccaacatcaaccccaacaatggcggcaccacctacaaccagaagttcgaggacagattcaccatcagccgggacaacagcaagaacaccctgtacctccagatgaactccctgagagccgaggacaccgccgtgtactattgtgccagaggctggaacttcgactactggggccagggaacactggtcaccgttagctctacgcgtatccagaaccctgatcctgccgtgtaccagctgcgggatagcaagagcagcgacaagagcgtgtgtctgttcaccgacttcgacagccagaccaacgtgtcccagagcaaggactccgacgtgtacatcaccgataagaccgtgctggacatgcggagcatggacttcaagagcaactccgccgtggcctggtccaacaagtccgatttcgcctgcgccaacgccttcaacaacagcattatccccgaggacacattcttcccaagccccgagagcagctgcggtacccagagttttgggttgttggaccctaaattgtgctatctgttggacggaatcctgttcatttacggagtgatcctgaccgcattgttcctgcgggttaagttttccagatccgcagacgcacccgcttaccaacaagggcagaaccaactctacaatgaacttaatttggggcggagggaagagtacgacgttctggacaaaaggaggggacgagatcccgagatgggcggaaagcctcagcgaaggaagaatccgcaagaggggctttataacgaactccagaaagataaaatggcagaagcctatagtgagattgggatgaagggagaaaggaggaggggtaaaggtcacgatgggttgtaccaaggattgagcacagccactaaagatacctatgatgcgctccacatgcaggccctgccgccaaga

SEQ ID NO: 9984 - DNA, 2436 bp, Artificial Sequence
  Synthetic Polynucloetide
atggccttaccagtgaccgccttgctcctgccgctggccttgctgctccacgccgccaggccggacatcgtgatgacccagagccacaagttcatgagcaccagcgtgggcgacagagtgtccatcatctgcaaggccagccaggatgtgggcacagccgtggattggtatcagcagaagcctggacagagccccaagctgctgatctactgggccagcacaagacacaccggcgtgcccgatagattcacaggctctggcagcggcaccgatttcaccctggccatcacaaacgtgcagagcgaggacctggccgactacttctgccagcagtacaacagctaccctctgacctttggagccggcaccaagctggaaatcaagagactcgaggacctgaagaacgtgttcccacctgaggtggccgtgttcgagcctagcaaggccgagatcgcccacacccagaaagccaccctcgtgtgcctggctaccggcttctaccccgaccatgtggaactgtcttggtgggtcaacggcaaagaggtgcacagcggcgtgtgtaccgacccccagccactgaaagaacagcccgccctgaacgacagccggtactgcctgagcagcagactgagagtgtccgccaccttctggcagaacccccggaaccacttcagatgccaggtgcagttctacggcctgagcgagaacgacgagtggacccaggacagagccaagcccgtgacccagatcgtgtctgccgaagcctggggcagagccgattgcggatcccagagcttcggcctgctggaccccaagctgtgctacctgctggatggcatcctgttcatctacggcgtgatcctgaccgccctgttcctgagagtgaagttcagcagaagcgccgacgcccctgcctaccagcagggacagaaccaactgtacaacgagctgaacctgggcagacgggaagagtacgacgtgctggacaagcggagaggcagggaccctgagatgggcggaaagccccagcggagaaagaacccccaggaaggactgtataacgaactccagaaagacaagatggccgaagcctacagcgagatcggcatgaagggcgagcggagaagaggcaagggccacgatggcctgtaccagggcctgagcaccgccaccaaggacacctatgacgccctgcacatgcaggccctgcctccaagaagggccaagcgatctggatctggagcaacaaacttctcactactcaaacaagcaggtgacgtggaggagaatcccgggcctactagtatggactggatttggcgcatccttttccttgtcggcgctgctaccggcgcgcattccttcgaagaagtgcagctggttgaatcaggtggcggcctggttcaacctggcggatctctgagactgagctgtgccgccagcggctacacctttaccgagtacacaatccactgggtccgacaggcccctggcaaaggacttgagtgggtcgccaacatcaaccccaacaatggcggcaccacctacaaccagaagttcgaggacagattcaccatcagccgggacaacagcaagaacaccctgtacctccagatgaactccctgagagccgaggacaccgccgtgtactattgtgccagaggctggaacttcgactactggggccagggaacactggtcaccgttagctctacgcgtatccagaaccctgatcctgccgtgtaccagctgcgggatagcaagagcagcgacaagagcgtgtgtctgttcaccgacttcgacagccagaccaacgtgtcccagagcaaggactccgacgtgtacatcaccgataagtgcgtgctggacatgcggagcatggacttcaagagcaactccgccgtggcctggtccaacaagtccgatttcgcctgcgccaacgccttcaacaacagcattatccccgaggacacattcttcccaagcagcgacgtgccctgcggtacccagagttttgggttgttggaccctaaattgtgctatctgttggacggaatcctgttcatttacggagtgatcctgaccgcattgttcctgcgggttaagttttccagatccgcagacgcacccgcttaccaacaagggcagaaccaactctacaatgaacttaatttggggcggagggaagagtacgacgttctggacaaaaggaggggacgagatcccgagatgggcggaaagcctcagcgaaggaagaatccgcaagaggggctttataacgaactccagaaagataaaatggcagaagcctatagtgagattgggatgaagggagaaaggaggaggggtaaaggtcacgatgggttgtaccaaggattgagcacagccactaaagatacctatgatgcgctccacatgcaggccctgccgccaaga

SEQ ID NO: 9985 - DNA, 2649 bp, Artificial Sequence
  Synthetic Polynucloetide
atggccttaccagtgaccgccttgctcctgccgctggccttgctgctccacgccgccaggccggacatcgtgatgacccagagccacaagttcatgagcaccagcgtgggcgacagagtgtccatcatctgcaaggccagccaggatgtgggcacagccgtggattggtatcagcagaagcctggacagagccccaagctgctgatctactgggccagcacaagacacaccggcgtgcccgatagattcacaggctctggcagcggcaccgatttcaccctggccatcacaaacgtgcagagcgaggacctggccgactacttctgccagcagtacaacagctaccctctgacctttggagccggcaccaagctggaaatcaagagactcgaggggaaaccaattcccaaccctcttctgggactggattcaaccggcagcggcgaggacctgaagaacgtgttcccacctgaggtggccgtgttcgagcctagcgaggccgagatcagccacacccagaaagccaccctcgtgtgcctggctaccggcttctaccccgaccatgtggaactgtcttggtgggtcaacggcaaagaggtgcacagcggcgtgtctaccgacccccagccactgaaagaacagcccgccctgaacgacagccggtactgcctgagcagcagactgagagtgtccgccaccttctggcagaacccccggaaccacttcagatgccaggtgcagttctacggcctgagcgagaacgacgagtggacccaggacagagccaagcccgtgacccagatcgtgtctgccgaagcctggggcagagccgattgcggatcccagagcttcggcctgctggaccccaagctgtgctacctgctggatggcatcctgttcatctacggcgtgatcctgaccgccctgttcctgagagtgaagttcagcagaagcgccgacgcccctgcctaccagcagggacagaaccaactgtacaacgagctgaacctgggcagacgggaagagtacgacgtgctggacaagcggagaggcagggaccctgagatgggcggaaagccccagcggagaaagaacccccaggaaggactgtataacgaactccagaaagacaagatggccgaagcctacagcgagatcggcatgaagggcgagcggagaagaggcaagggccacgatggcctgtaccagggcctgagcaccgccaccaaggacacctatgacgccctgcacatgcaggccctgcctccaagaagggccaagcgatctggatctggagcaacaaacttctcactactcaaacaagcaggtgacgtggaggagaatcccgggcctactagtatggactggatttggcgcatccttttccttgtcggcgctgctaccggcgcgcattccttcgaagaagtgcagctggttgaatcaggtggcggcctggttcaacctggcggatctctgagactgagctgtgccgccagcggctacacctttaccgagtacacaatccactgggtccgacaggcccctggcaaaggacttgagtgggtcgccaacatcaaccccaacaatggcggcaccacctacaaccagaagttcgaggacagattcaccatcagccgggacaacagcaagaacaccctgtacctccagatgaactccctgagagccgaggacaccgccgtgtactattgtgccagaggctggaacttcgactactggggccagggaacactggtcaccgttagctctacgcgtgagcagaaactgatctcggaagaggatgggagcggcatccagaaccctgatcctgccgtgtaccagctgcgggatagcaagagcagcgacaagagcgtgtgtctgttcaccgacttcgacagccagaccaacgtgtcccagagcaaggactccgacgtgtacatcaccgataagaccgtgctggacatgcggagcatggacttcaagagcaactccgccgtggcctggtccaacaagtccgatttcgcctgcgccaacgccttcaacaacagcattatccccgaggacacattcttcccaagccccgagagcagctgcggtacccagagttttgggttgttggaccctaaattgtgctatctgttggacggaatcctgttcatttacggagtgatcctgaccgcattgttcctgaggagcaagcggtcacggctgctccacagcgattacatgaatatgacaccacgaagaccgggtcctactcgcaaacactaccaaccctacgcacctccccgcgactttgcagcgtaccgatctcgggttaagttttccagatccgcagacgcacccgcttaccaacaagggcagaaccaactctacaatgaacttaatttggggcggagggaagagtacgacgttctggacaaaaggaggggacgagatcccgagatgggcggaaagcctcagcgaaggaagaatccgcaagaggggctttataacgaactccagaaagataaaatggcagaagcctatagtgagattgggatgaagggagaaaggaggaggggtaaaggtcacgatgggttgtaccaaggattgagcacagccactaaagatacctatgatgcgctccacatgcaggccctgccgccaaga

SEQ ID NO: 9986 - DNA, 2772 bp, Artificial Sequence
  Synthetic Polynucloetide
atggccttaccagtgaccgccttgctcctgccgctggccttgctgctccacgccgccaggccggacatcgtgatgacccagagccacaagttcatgagcaccagcgtgggcgacagagtgtccatcatctgcaaggccagccaggatgtgggcacagccgtggattggtatcagcagaagcctggacagagccccaagctgctgatctactgggccagcacaagacacaccggcgtgcccgatagattcacaggctctggcagcggcaccgatttcaccctggccatcacaaacgtgcagagcgaggacctggccgactacttctgccagcagtacaacagctaccctctgacctttggagccggcaccaagctggaaatcaagagactcgaggggaaaccaattcccaaccctcttctgggactggattcaaccggcagcggcgaggacctgaagaacgtgttcccacctgaggtggccgtgttcgagcctagcgaggccgagatcagccacacccagaaagccaccctcgtgtgcctggctaccggcttctaccccgaccatgtggaactgtcttggtgggtcaacggcaaagaggtgcacagcggcgtgtctaccgacccccagccactgaaagaacagcccgccctgaacgacagccggtactgcctgagcagcagactgagagtgtccgccaccttctggcagaacccccggaaccacttcagatgccaggtgcagttctacggcctgagcgagaacgacgagtggacccaggacagagccaagcccgtgacccagatcgtgtctgccgaagcctggggcagagccgattgcggatcccagagcttcggcctgctggaccccaagctgtgctacctgctggatggcatcctgttcatctacggcgtgatcctgaccgccctgttcctgaggagtaagaggagcaggctcctgcacagtgactacatgaacatgactccacgccgccccggacccacccgcaagcattaccagccctatgccccaccacgcgacttcgcagcctatcgctccagagtgaagttcagcagaagcgccgacgcccctgcctaccagcagggacagaaccaactgtacaacgagctgaacctgggcagacgggaagagtacgacgtgctggacaagcggagaggcagggaccctgagatgggcggaaagccccagcggagaaagaacccccaggaaggactgtataacgaactccagaaagacaagatggccgaagcctacagcgagatcggcatgaagggcgagcggagaagaggcaagggccacgatggcctgtaccagggcctgagcaccgccaccaaggacacctatgacgccctgcacatgcaggccctgcctccaagaagggccaagcgatctggatctggagcaacaaacttctcactactcaaacaagcaggtgacgtggaggagaatcccgggcctactagtatggactggatttggcgcatccttttccttgtcggcgctgctaccggcgcgcattccttcgaagaagtgcagctggttgaatcaggtggcggcctggttcaacctggcggatctctgagactgagctgtgccgccagcggctacacctttaccgagtacacaatccactgggtccgacaggcccctggcaaaggacttgagtgggtcgccaacatcaaccccaacaatggcggcaccacctacaaccagaagttcgaggacagattcaccatcagccgggacaacagcaagaacaccctgtacctccagatgaactccctgagagccgaggacaccgccgtgtactattgtgccagaggctggaacttcgactactggggccagggaacactggtcaccgttagctctacgcgtgagcagaaactgatctcggaagaggatgggagcggcatccagaaccctgatcctgccgtgtaccagctgcgggatagcaagagcagcgacaagagcgtgtgtctgttcaccgacttcgacagccagaccaacgtgtcccagagcaaggactccgacgtgtacatcaccgataagaccgtgctggacatgcggagcatggacttcaagagcaactccgccgtggcctggtccaacaagtccgatttcgcctgcgccaacgccttcaacaacagcattatccccgaggacacattcttcccaagccccgagagcagctgcggtacccagagttttgggttgttggaccctaaattgtgctatctgttggacggaatcctgttcatttacggagtgatcctgaccgcattgttcctgaggagcaagcggtcacggctgctccacagcgattacatgaatatgacaccacgaagaccgggtcctactcgcaaacactaccaaccctacgcacctccccgcgactttgcagcgtaccgatctcgggttaagttttccagatccgcagacgcacccgcttaccaacaagggcagaaccaactctacaatgaacttaatttggggcggagggaagagtacgacgttctggacaaaaggaggggacgagatcccgagatgggcggaaagcctcagcgaaggaagaatccgcaagaggggctttataacgaactccagaaagataaaatggcagaagcctatagtgagattgggatgaagggagaaaggaggaggggtaaaggtcacgatgggttgtaccaaggattgagcacagccactaaagatacctatgatgcgctccacatgcaggccctgccgccaaga

SEQ ID NO: 9987 - DNA, 2655 bp, Artificial Sequence
  Synthetic Polynucloetide
atggccttaccagtgaccgccttgctcctgccgctggccttgctgctccacgccgccaggccggacatcgtgatgacccagagccacaagttcatgagcaccagcgtgggcgacagagtgtccatcatctgcaaggccagccaggatgtgggcacagccgtggattggtatcagcagaagcctggacagagccccaagctgctgatctactgggccagcacaagacacaccggcgtgcccgatagattcacaggctctggcagcggcaccgatttcaccctggccatcacaaacgtgcagagcgaggacctggccgactacttctgccagcagtacaacagctaccctctgacctttggagccggcaccaagctggaaatcaagagactcgaggggaaaccaattcccaaccctcttctgggactggattcaaccggcagcggcgaggacctgaagaacgtgttcccacctgaggtggccgtgttcgagcctagcgaggccgagatcagccacacccagaaagccaccctcgtgtgcctggctaccggcttctaccccgaccatgtggaactgtcttggtgggtcaacggcaaagaggtgcacagcggcgtgtctaccgacccccagccactgaaagaacagcccgccctgaacgacagccggtactgcctgagcagcagactgagagtgtccgccaccttctggcagaacccccggaaccacttcagatgccaggtgcagttctacggcctgagcgagaacgacgagtggacccaggacagagccaagcccgtgacccagatcgtgtctgccgaagcctggggcagagccgattgcggatcccagagcttcggcctgctggaccccaagctgtgctacctgctggatggcatcctgttcatctacggcgtgatcctgaccgccctgttcctgagagtgaagttcagcagaagcgccgacgcccctgcctaccagcagggacagaaccaactgtacaacgagctgaacctgggcagacgggaagagtacgacgtgctggacaagcggagaggcagggaccctgagatgggcggaaagccccagcggagaaagaacccccaggaaggactgtataacgaactccagaaagacaagatggccgaagcctacagcgagatcggcatgaagggcgagcggagaagaggcaagggccacgatggcctgtaccagggcctgagcaccgccaccaaggacacctatgacgccctgcacatgcaggccctgcctccaagaagggccaagcgatctggatctggagcaacaaacttctcactactcaaacaagcaggtgacgtggaggagaatcccgggcctactagtatggactggatttggcgcatccttttccttgtcggcgctgctaccggcgcgcattccttcgaagaagtgcagctggttgaatcaggtggcggcctggttcaacctggcggatctctgagactgagctgtgccgccagcggctacacctttaccgagtacacaatccactgggtccgacaggcccctggcaaaggacttgagtgggtcgccaacatcaaccccaacaatggcggcaccacctacaaccagaagttcgaggacagattcaccatcagccgggacaacagcaagaacaccctgtacctccagatgaactccctgagagccgaggacaccgccgtgtactattgtgccagaggctggaacttcgactactggggccagggaacactggtcaccgttagctctacgcgtgagcagaaactgatctcggaagaggatctggggagcggcatccagaaccctgatcctgccgtgtaccagctgcgggatagcaagagcagcgacaagagcgtgtgtctgttcaccgacttcgacagccagaccaacgtgtcccagagcaaggactccgacgtgtacatcaccgataagaccgtgctggacatgcggagcatggacttcaagagcaactccgccgtggcctggtccaacaagtccgatttcgcctgcgccaacgccttcaacaacagcattatccccgaggacacattcttcccaagccccgagagcagctgcggtacccagagttttgggttgttggaccctaaattgtgctatctgttggacggaatcctgttcatttacggagtgatcctgaccgcattgttcctgaagagaggccggaagaagctgctgtacatcttcaagcagcctttcatgcggcccgtgcagaccacccaggaagaggacggctgctcctgccggttccccgaggaagaagaaggcggctgcgagctgcgggttaagttttccagatccgcagacgcacccgcttaccaacaagggcagaaccaactctacaatgaacttaatttggggcggagggaagagtacgacgttctggacaaaaggaggggacgagatcccgagatgggcggaaagcctcagcgaaggaagaatccgcaagaggggctttataacgaactccagaaagataaaatggcagaagcctatagtgagattgggatgaagggagaaaggaggaggggtaaaggtcacgatgggttgtaccaaggattgagcacagccactaaagatacctatgatgcgctccacatgcaggccctgccgccaaga

SEQ ID NO: 9988 - DNA, 2781 bp, Artificial Sequence
  Synthetic Polynucloetide
atggccttaccagtgaccgccttgctcctgccgctggccttgctgctccacgccgccaggccggacatcgtgatgacccagagccacaagttcatgagcaccagcgtgggcgacagagtgtccatcatctgcaaggccagccaggatgtgggcacagccgtggattggtatcagcagaagcctggacagagccccaagctgctgatctactgggccagcacaagacacaccggcgtgcccgatagattcacaggctctggcagcggcaccgatttcaccctggccatcacaaacgtgcagagcgaggacctggccgactacttctgccagcagtacaacagctaccctctgacctttggagccggcaccaagctggaaatcaagagactcgaggggaaaccaattcccaaccctcttctgggactggattcaaccggcagcggcgaggacctgaagaacgtgttcccacctgaggtggccgtgttcgagcctagcgaggccgagatcagccacacccagaaagccaccctcgtgtgcctggctaccggcttctaccccgaccatgtggaactgtcttggtgggtcaacggcaaagaggtgcacagcggcgtgtctaccgacccccagccactgaaagaacagcccgccctgaacgacagccggtactgcctgagcagcagactgagagtgtccgccaccttctggcagaacccccggaaccacttcagatgccaggtgcagttctacggcctgagcgagaacgacgagtggacccaggacagagccaagcccgtgacccagatcgtgtctgccgaagcctggggcagagccgattgcggatcccagagcttcggcctgctggaccccaagctgtgctacctgctggatggcatcctgttcatctacggcgtgatcctgaccgccctgttcctgaaacggggcagaaagaaactcctgtatatattcaaacaaccatttatgagaccagtacaaactactcaagaggaagatggctgtagctgccgatttccagaagaagaagaaggaggatgtgaactgagagtgaagttcagcagaagcgccgacgcccctgcctaccagcagggacagaaccaactgtacaacgagctgaacctgggcagacgggaagagtacgacgtgctggacaagcggagaggcagggaccctgagatgggcggaaagccccagcggagaaagaacccccaggaaggactgtataacgaactccagaaagacaagatggccgaagcctacagcgagatcggcatgaagggcgagcggagaagaggcaagggccacgatggcctgtaccagggcctgagcaccgccaccaaggacacctatgacgccctgcacatgcaggccctgcctccaagaagggccaagcgatctggatctggagcaacaaacttctcactactcaaacaagcaggtgacgtggaggagaatcccgggcctactagtatggactggatttggcgcatccttttccttgtcggcgctgctaccggcgcgcattccttcgaagaagtgcagctggttgaatcaggtggcggcctggttcaacctggcggatctctgagactgagctgtgccgccagcggctacacctttaccgagtacacaatccactgggtccgacaggcccctggcaaaggacttgagtgggtcgccaacatcaaccccaacaatggcggcaccacctacaaccagaagttcgaggacagattcaccatcagccgggacaacagcaagaacaccctgtacctccagatgaactccctgagagccgaggacaccgccgtgtactattgtgccagaggctggaacttcgactactggggccagggaacactggtcaccgttagctctacgcgtgagcagaaactgatctcggaagaggatctggggagcggcatccagaaccctgatcctgccgtgtaccagctgcgggatagcaagagcagcgacaagagcgtgtgtctgttcaccgacttcgacagccagaccaacgtgtcccagagcaaggactccgacgtgtacatcaccgataagaccgtgctggacatgcggagcatggacttcaagagcaactccgccgtggcctggtccaacaagtccgatttcgcctgcgccaacgccttcaacaacagcattatccccgaggacacattcttcccaagccccgagagcagctgcggtacccagagttttgggttgttggaccctaaattgtgctatctgttggacggaatcctgttcatttacggagtgatcctgaccgcattgttcctgaagagaggccggaagaagctgctgtacatcttcaagcagcctttcatgcggcccgtgcagaccacccaggaagaggacggctgctcctgccggttccccgaggaagaagaaggcggctgcgagctgcgggttaagttttccagatccgcagacgcacccgcttaccaacaagggcagaaccaactctacaatgaacttaatttggggcggagggaagagtacgacgttctggacaaaaggaggggacgagatcccgagatgggcggaaagcctcagcgaaggaagaatccgcaagaggggctttataacgaactccagaaagataaaatggcagaagcctatagtgagattgggatgaagggagaaaggaggaggggtaaaggtcacgatgggttgtaccaaggattgagcacagccactaaagatacctatgatgcgctccacatgcaggccctgccgccaaga

SEQ ID NO: 9989 - DNA, 2454 bp, Artificial Sequence
  Synthetic Polynucloetide
atggccttaccagtgaccgccttgctcctgccgctggccttgctgctccacgccgccaggccggacatcgtgatgacccagagccacaagttcatgagcaccagcgtgggcgacagagtgtccatcatctgcaaggccagccaggatgtgggcacagccgtggattggtatcagcagaagcctggacagagccccaagctgctgatctactgggccagcacaagacacaccggcgtgcccgatagattcacaggctctggcagcggcaccgatttcaccctggccatcacaaacgtgcagagcgaggacctggccgactacttctgccagcagtacaacagctaccctctgacctttggagccggcaccaagctggaaatcaagagactcgagcagagcttcggcctgctggaccccaagctgtgctacctgctggatggcatcctgttcatctacggcgtgatcctgaccgccctgttcctgagagtgaagttcagcagaagcgccgacgcccctgcctaccagcagggacagaaccaactgtacaacgagctgaacctgggcagacgggaagagtacgacgtgctggacaagcggagaggcagggaccctgagatgggcggaaagccccagcggagaaagaacccccaggaaggactgtataacgaactccagaaagacaagatggccgaagcctacagcgagatcggcatgaagggcgagcggagaagaggcaagggccacgatggcctgtaccagggcctgagcaccgccaccaaggacacctatgacgccctgcacatgcaggccctgcctccaagaagggccaagcgatctggatctggagcaacaaacttctcactactcaaacaagcaggtgacgtggaggagaatcccgggcctactagtatggactggatttggcgcatccttttccttgtcggcgctgctaccggcgcgcattccttcgaagaagtgcagctggttgaatcaggtggcggcctggttcaacctggcggatctctgagactgagctgtgccgccagcggctacacctttaccgagtacacaatccactgggtccgacaggcccctggcaaaggacttgagtgggtcgccaacatcaaccccaacaatggcggcaccacctacaaccagaagttcgaggacagattcaccatcagccgggacaacagcaagaacaccctgtacctccagatgaactccctgagagccgaggacaccgccgtgtactattgtgccagaggctggaacttcgactactggggccagggaacactggtcaccgttagctctacgcgtcagagttttgggttgttggaccctaaattgtgctatctgttggacggaatcctgttcatttacggagtgatcctgaccgcattgttcctgcgggttaagttttccagatccgcagacgcacccgcttaccaacaagggcagaaccaactctacaatgaacttaatttggggcggagggaagagtacgacgttctggacaaaaggaggggacgagatcccgagatgggcggaaagcctcagcgaaggaagaatccgcaagaggggctttataacgaactccagaaagataaaatggcagaagcctatagtgagattgggatgaagggagaaaggaggaggggtaaaggtcacgatgggttgtaccaaggattgagcacagccactaaagatacctatgatgcgctccacatgcaggccctgccgccaagacgcgccaagagaagcggatctggcgtgaagcagaccctgaatttcgacctgctgaagctggctggcgacgtggaatccaacccaggcccttctagaggccatatgaccgagtacaagcccacggtgcgcctcgccacccgcgacgacgtccccagggccgtacgcaccctcgccgccgcgttcgccgactaccccgccacgcgccacaccgtcgatccggaccgccacatcgagcgggtcaccgagctgcaagaactcttcctcacgcgcgtcgggctcgacatcggcaaggtgtgggtcgcggacgacggcgccgcggtggcggtctggaccacgccggagagcgtcgaagcgggggcggtgttcgccgagatcggcccgcgcatggccgagttgagcggttcccggctggccgcgcagcaacagatggaaggcctcctggcgccgcaccggcccaaggagcccgcgtggttcctggccaccgtcggcgtctcgcccgaccaccagggcaagggtctgggcagcgccgtcgtgctccccggagtggaggcggccgagcgcgccggggtgcccgccttcctggagacctccgcgccccgcaacctccccttctacgagcggctcggcttcaccgtcaccgccgacgtcgaggtgcccgaaggaccgcgcacctggtgcatgacccgcaagcccggtgcctga

SEQ ID NO: 9990 - DNA, 1926 bp, Artificial Sequence
  Synthetic Polynucloetide
atggccttaccagtgaccgccttgctcctgccgctggccttgctgctccacgccgccaggccggacatcgtgatgacccagagccacaagttcatgagcaccagcgtgggcgacagagtgtccatcatctgcaaggccagccaggatgtgggcacagccgtggattggtatcagcagaagcctggacagagccccaagctgctgatctactgggccagcacaagacacaccggcgtgcccgatagattcacaggctctggcagcggcaccgatttcaccctggccatcacaaacgtgcagagcgaggacctggccgactacttctgccagcagtacaacagctaccctctgacctttggagccggcaccaagctggaaatcaagagactcgagggacagcctaaggccaatcctaccgtgacactgttccctccaagcagcgaagaactccaggccaacaaggccacacttgtgtgcctgatctccgacttctaccctggggctgtgacagtggcttggaaggccgatggatctcctgtgaaagccggcgtggaaaccaccaagccatccaagcagagcaacaacaaatacgccgccagctcctacctgagcctgacacctgagcagtggaagtcccacagatcctacagctgccaagtgacccacgaaggcagcaccgtggaaaagacagtggcccctacagagtgcagccccatcaagaccgatgtgattacaatggaccccaaggacaactgctccaaggacgccaacgataccctgctgctccagctgaccaacaccagcgcctactacatgtacttgttgctgctgctgaagtccgtggtgtacttcgccatcatcacatgctgcctgctgcggagaaccgccttctgctgcaacggcgagaagtctagggccaagcgatctggatctggagcaacaaacttctcactactcaaacaagcaggtgacgtggaggagaatcccgggcctactagtatggactggatttggcgcatccttttccttgtcggcgctgctaccggcgcgcattccttcgaagaagtgcagctggttgaatcaggtggcggcctggttcaacctggcggatctctgagactgagctgtgccgccagcggctacacctttaccgagtacacaatccactgggtccgacaggcccctggcaaaggacttgagtgggtcgccaacatcaaccccaacaatggcggcaccacctacaaccagaagttcgaggacagattcaccatcagccgggacaacagcaagaacaccctgtacctccagatgaactccctgagagccgaggacaccgccgtgtactattgtgccagaggctggaacttcgactactggggccagggaacactggtcaccgttagctctacgcgtgcctctacaaagggaccctccgtgtttcctctggctcccagcagcaagtctacaagcggaggaacagccgctctgggctgcctggtcaaggattactttcccgagcctgtgaccgtgtcctggaatagcggagcactgacaagcggcgtgcacacctttccagccgtgctgcaaagcagcggcctgtactctctgagcagcgtggtcacagtgcctagctctagcctgggcacccagacctacatctgcaatgtgaaccacaagcctagcaacaccaaggtggacaagagagtggaacccaagagctgtgaagtgaaaaccgactccaccgaccacgtgaagcccaaagagacagagaacaccaagcagcccagcaagagctgccacaagcccaaggccatcgtgcacaccgagaaagtgaacatgatgagcctgaccgtgctgggcctgcggatgctgttcgccaaaaccgtggccgtgaacttcctgctgaccgccaagctgttcttcctc

SEQ ID NO: 9991 - DNA, 1860 bp, Artificial Sequence
  Synthetic Polynucloetide
atggccttaccagtgaccgccttgctcctgccgctggccttgctgctccacgccgccaggccggacatcgtgatgacccagagccacaagttcatgagcaccagcgtgggcgacagagtgtccatcatctgcaaggccagccaggatgtgggcacagccgtggattggtatcagcagaagcctggacagagccccaagctgctgatctactgggccagcacaagacacaccggcgtgcccgatagattcacaggctctggcagcggcaccgatttcaccctggccatcacaaacgtgcagagcgaggacctggccgactacttctgccagcagtacaacagctaccctctgacctttggagccggcaccaagctggaaatcaagagactcgagggacagcctaaggccaatcctaccgtgacactgttccctccaagcagcgaagaactccaggccaacaaggccacacttgtgtgcctgatctccgacttctaccctggggctgtgacagtggcttggaaggccgatggatctcctgtgaaagccggcgtggaaaccaccaagccatccaagcagagcaacaacaaatacgccgccagctcctacctgagcctgacacctgagcagtggaagtcccacagatcctacagctgccaagtgacccacgaaggcagcaccgtggaaaagacagtggcccctacagagtgcagcggcagagccgattgcggcatcaccagcgccagctaccaccagggcgtgctgagcgccaccatcctgtacgagatcctgctgggcaaggccaccctgtacgccgtgctggtgtctgccctggtgctgatggctatggtcaagcggaaggacagccggggaagggccaagcgatctggatctggagcaacaaacttctcactactcaaacaagcaggtgacgtggaggagaatcccgggcctactagtatggactggatttggcgcatccttttccttgtcggcgctgctaccggcgcgcattccttcgaagaagtgcagctggttgaatcaggtggcggcctggttcaacctggcggatctctgagactgagctgtgccgccagcggctacacctttaccgagtacacaatccactgggtccgacaggcccctggcaaaggacttgagtgggtcgccaacatcaaccccaacaatggcggcaccacctacaaccagaagttcgaggacagattcaccatcagccgggacaacagcaagaacaccctgtacctccagatgaactccctgagagccgaggacaccgccgtgtactattgtgccagaggctggaacttcgactactggggccagggaacactggtcaccgttagctctacgcgtgcctctacaaagggaccctccgtgtttcctctggctcccagcagcaagtctacaagcggaggaacagccgctctgggctgcctggtcaaggattactttcccgagcctgtgaccgtgtcctggaatagcggagcactgacaagcggcgtgcacacctttccagccgtgctgcaaagcagcggcctgtactctctgagcagcgtggtcacagtgcctagctctagcctgggcacccagacctacatctgcaatgtgaaccacaagcctagcaacaccaaggtggacaagagagtggaacccaagagctgtatccccgaggacacattcttcccaagcagcgacgtgccctgcgacgtgaagctggtggaaaagagcttcgagacagacaccaacctgaacttccagaacctgagcgtgatcggcttcagaatcctgctgctgaaagtggccggctttaacctgctgatgaccctgcggctgtggtccagc

SEQ ID NO: 9992 - DNA, 1860 bp, Artificial Sequence
  Synthetic Polynucloetide
atggccttaccagtgaccgccttgctcctgccgctggccttgctgctccacgccgccaggccggacatcgtgatgacccagagccacaagttcatgagcaccagcgtgggcgacagagtgtccatcatctgcaaggccagccaggatgtgggcacagccgtggattggtatcagcagaagcctggacagagccccaagctgctgatctactgggccagcacaagacacaccggcgtgcccgatagattcacaggctctggcagcggcaccgatttcaccctggccatcacaaacgtgcagagcgaggacctggccgactacttctgccagcagtacaacagctaccctctgacctttggagccggcaccaagctggaaatcaagagactcgagggacagcctaaggccaatcctaccgtgacactgttccctccaagcagcgaagaactccaggccaacaaggccacacttgtgtgcctgatctccgacttctaccctggggctgtgacagtggcttggaaggccgatggatctcctgtgaaagccggcgtggaaaccaccaagccatccaagcagagcaacaacaaatacgccgccagctcctacctgagcctgacacctgagcagtggaagtcccacagatcctacagctgccaagtgacccacgaaggcagcaccgtggaaaagacagtggcccctacagagtgcagcggcagagccgattgcggctttaccagcgagagctaccagcagggcgtgctgagcgccaccatcctgtacgagatcctgctgggcaaggccaccctgtacgccgtgctggtgtctgccctggtgctgatggctatggtcaagcggaaggacagccggggaagggccaagcgatctggatctggagcaacaaacttctcactactcaaacaagcaggtgacgtggaggagaatcccgggcctactagtatggactggatttggcgcatccttttccttgtcggcgctgctaccggcgcgcattccttcgaagaagtgcagctggttgaatcaggtggcggcctggttcaacctggcggatctctgagactgagctgtgccgccagcggctacacctttaccgagtacacaatccactgggtccgacaggcccctggcaaaggacttgagtgggtcgccaacatcaaccccaacaatggcggcaccacctacaaccagaagttcgaggacagattcaccatcagccgggacaacagcaagaacaccctgtacctccagatgaactccctgagagccgaggacaccgccgtgtactattgtgccagaggctggaacttcgactactggggccagggaacactggtcaccgttagctctacgcgtgcctctacaaagggaccctccgtgtttcctctggctcccagcagcaagtctacaagcggaggaacagccgctctgggctgcctggtcaaggattactttcccgagcctgtgaccgtgtcctggaatagcggagcactgacaagcggcgtgcacacctttccagccgtgctgcaaagcagcggcctgtactctctgagcagcgtggtcacagtgcctagctctagcctgggcacccagacctacatctgcaatgtgaaccacaagcctagcaacaccaaggtggacaagagagtggaacccaagagctgtatccccgaggacacattcttcccaagccccgagagcagctgcgacgtgaagctggtggaaaagagcttcgagacagacaccaacctgaacttccagaacctgagcgtgatcggcttcagaatcctgctgctgaaagtggccggctttaacctgctgatgaccctgcggctgtggtccagc

SEQ ID NO: 9993 - DNA, 1338 bp, Artificial Sequence
  Synthetic Polynucloetide
atggccttaccagtgaccgccttgctcctgccgctggccttgctgctccacgccgccaggccggacatcgtgatgacccagagccacaagttcatgagcaccagcgtgggcgacagagtgtccatcatctgcaaggccagccaggatgtgggcacagccgtggattggtatcagcagaagcctggacagagccccaagctgctgatctactgggccagcacaagacacaccggcgtgcccgatagattcacaggctctggcagcggcaccgatttcaccctggccatcacaaacgtgcagagcgaggacctggccgactacttctgccagcagtacaacagctaccctctgacctttggagccggcaccaagctggaaatcaagagaggcggaggcggaagtggaggcggaggatctggcggcggaggctctgaagtgcagctggttgaatcaggtggcggcctggttcaacctggcggatctctgagactgagctgtgccgccagcggctacacctttaccgagtacacaatccactgggtccgacaggcccctggcaaaggacttgagtgggtcgccaacatcaaccccaacaatggcggcaccacctacaaccagaagttcgaggacagattcaccatcagccgggacaacagcaagaacaccctgtacctccagatgaactccctgagagccgaggacaccgccgtgtactattgtgccagaggctggaacttcgactactggggccagggaacactggtcaccgttagctctacgcgtgacggtaacgaggagatgggaggaatcactcaaaccccttacaaagtctcaatttcaggaacaactgttatccttacatgtccccagtatcctggcagcgagatcctttggcagcataacgacaagaatatagggggagatgaagacgataagaatatcggatctgacgaggatcacttgagcctgaaagagttctccgagcttgaacaaagcggatattatgtgtgctatccgcgcgggtcaaagccggaagacgctaacttttacctttatctccgagccagagtgtgcgaaaattgcatggaaatggacgttatgtccgttgctacaatagttatcgtagatatatgcatcacgggtggactgcttctgctggtttattattggtccaagaatagaaaggccaaagctaaacccgtgaccagaggcgctggcgcaggcggaaggcaaaggggacaaaacaaagaacggccaccaccagtgccaaatccagattatgagcctattcggaaaggacagagggacctgtactctggcctgaatcagagaagaatc

SEQ ID NO: 9994 - DNA, 1233 bp, Artificial Sequence
  Synthetic Polynucloetide
atggccttaccagtgaccgccttgctcctgccgctggccttgctgctccacgccgccaggccggacatcgtgatgacccagagccacaagttcatgagcaccagcgtgggcgacagagtgtccatcatctgcaaggccagccaggatgtgggcacagccgtggattggtatcagcagaagcctggacagagccccaagctgctgatctactgggccagcacaagacacaccggcgtgcccgatagattcacaggctctggcagcggcaccgatttcaccctggccatcacaaacgtgcagagcgaggacctggccgactacttctgccagcagtacaacagctaccctctgacctttggagccggcaccaagctggaaatcaagagaggcggaggcggaagtggaggcggaggatctggcggcggaggctctgaagtgcagctggttgaatcaggtggcggcctggttcaacctggcggatctctgagactgagctgtgccgccagcggctacacctttaccgagtacacaatccactgggtccgacaggcccctggcaaaggacttgagtgggtcgccaacatcaaccccaacaatggcggcaccacctacaaccagaagttcgaggacagattcaccatcagccgggacaacagcaagaacaccctgtacctccagatgaactccctgagagccgaggacaccgccgtgtactattgtgccagaggctggaacttcgactactggggccagggaacactggtcaccgttagctctacgcgtttcaagatccccatcgaggaactggaagatcgggtgttcgtgaactgcaacacctctatcacctgggtggaaggcaccgtgggaacactgctgagcgacatcaccagactggacctcggcaagcggattctggaccctcggggcatctacagatgcaacggcaccgacatctacaaggacaaagaaagcaccgtgcaggtccactacagaatgtgccagtcctgcgtggaactggaccctgctacagtggccggcatcatcgtgaccgatgtgatcgctactctgctgctggctctgggagtgttctgcttcgccggacacgaaacaggcagactgtctggcgctgccgatacacaggccctgctgagaaacgaccaagtgtatcagcccctgcgcgacagagatgatgcccagtattctcacctcggcggcaactgggctagaaacaag

SEQ ID NO: 9995 - DNA, 1263 bp, Artificial Sequence
  Synthetic Polynucloetide
atggccttaccagtgaccgccttgctcctgccgctggccttgctgctccacgccgccaggccggacatcgtgatgacccagagccacaagttcatgagcaccagcgtgggcgacagagtgtccatcatctgcaaggccagccaggatgtgggcacagccgtggattggtatcagcagaagcctggacagagccccaagctgctgatctactgggccagcacaagacacaccggcgtgcccgatagattcacaggctctggcagcggcaccgatttcaccctggccatcacaaacgtgcagagcgaggacctggccgactacttctgccagcagtacaacagctaccctctgacctttggagccggcaccaagctggaaatcaagagaggcggaggcggaagtggaggcggaggatctggcggcggaggctctgaagtgcagctggttgaatcaggtggcggcctggttcaacctggcggatctctgagactgagctgtgccgccagcggctacacctttaccgagtacacaatccactgggtccgacaggcccctggcaaaggacttgagtgggtcgccaacatcaaccccaacaatggcggcaccacctacaaccagaagttcgaggacagattcaccatcagccgggacaacagcaagaacaccctgtacctccagatgaactccctgagagccgaggacaccgccgtgtactattgtgccagaggctggaacttcgactactggggccagggaacactggtcaccgttagctctacgcgtcagagcatcaagggcaaccacctggtcaaggtgtacgactaccaagaggacggcagcgtgctgctgacatgtgatgccgaggccaagaacatcacctggtttaaggacggcaagatgatcggcttcctgaccgaggacaagaagaagtggaacctgggcagcaacgctaaggaccccagaggcatgtatcagtgcaagggcagccagaacaagagcaagcccctccaggtgtactaccggatgtgccagaactgcatcgagctgaacgccgctaccatcagcggctttctgttcgccgagatcgtgtccatcttcgtgctggccgtgggcgtgtactttatcgctggacaggatggcgtgcggcagagcagagcttccgataagcaaaccctgctgcctaacgaccagctgtaccagcctctgaaggacagagaggacgaccagtacagccacctccagggcaatcagctgagaagaaac

SEQ ID NO: 9996 - DNA, 1212 bp, Artificial Sequence
  Synthetic Polynucloetide
atggccttaccagtgaccgccttgctcctgccgctggccttgctgctccacgccgccaggccggacatcgtgatgacccagagccacaagttcatgagcaccagcgtgggcgacagagtgtccatcatctgcaaggccagccaggatgtgggcacagccgtggattggtatcagcagaagcctggacagagccccaagctgctgatctactgggccagcacaagacacaccggcgtgcccgatagattcacaggctctggcagcggcaccgatttcaccctggccatcacaaacgtgcagagcgaggacctggccgactacttctgccagcagtacaacagctaccctctgacctttggagccggcaccaagctggaaatcaagagaggcggaggcggaagtggaggcggaggatctggcggcggaggctctgaagtgcagctggttgaatcaggtggcggcctggttcaacctggcggatctctgagactgagctgtgccgccagcggctacacctttaccgagtacacaatccactgggtccgacaggcccctggcaaaggacttgagtgggtcgccaacatcaaccccaacaatggcggcaccacctacaaccagaagttcgaggacagattcaccatcagccgggacaacagcaagaacaccctgtacctccagatgaactccctgagagccgaggacaccgccgtgtactattgtgccagaggctggaacttcgactactggggccagggaacactggtcaccgttagctctacgcgtcagagttttgggttgttggaccctaaattgtgctatctgttggacggaatcctgttcatttacggagtgatcctgaccgcattgttcctgcgggttaagttttccagatccgcagacgcacccgcttaccaacaagggcagaaccaactctacaatgaacttaatttggggcggagggaagagtacgacgttctggacaaaaggaggggacgagatcccgagatgggcggaaagcctcagcgaaggaagaatccgcaagaggggctttataacgaactccagaaagataaaatggcagaagcctatagtgagattgggatgaagggagaaaggaggaggggtaaaggtcacgatgggttgtaccaaggattgagcacagccactaaagatacctatgatgcgctccacatgcaggccctgccgccaaga

SEQ ID NO: 9997 - DNA, 1338 bp, Artificial Sequence
  Synthetic Polynucloetide
atggccttaccagtgaccgccttgctcctgccgctggccttgctgctccacgccgccaggccggaagtgcagctggttgaatcaggtggcggcctggttcaacctggcggatctctgagactgagctgtgccgccagcggctacacctttaccgagtacacaatccactgggtccgacaggcccctggcaaaggacttgagtgggtcgccaacatcaaccccaacaatggcggcaccacctacaaccagaagttcgaggacagattcaccatcagccgggacaacagcaagaacaccctgtacctccagatgaactccctgagagccgaggacaccgccgtgtactattgtgccagaggctggaacttcgactactggggccagggaacactggtcaccgttagctctggcggaggcggaagtggaggcggaggatctggcggcggaggctctgacatcgtgatgacccagagccacaagttcatgagcaccagcgtgggcgacagagtgtccatcatctgcaaggccagccaggatgtgggcacagccgtggattggtatcagcagaagcctggacagagccccaagctgctgatctactgggccagcacaagacacaccggcgtgcccgatagattcacaggctctggcagcggcaccgatttcaccctggccatcacaaacgtgcagagcgaggacctggccgactacttctgccagcagtacaacagctaccctctgacctttggagccggcaccaagctggaaatcaagagaacgcgtgacggtaacgaggagatgggaggaatcactcaaaccccttacaaagtctcaatttcaggaacaactgttatccttacatgtccccagtatcctggcagcgagatcctttggcagcataacgacaagaatatagggggagatgaagacgataagaatatcggatctgacgaggatcacttgagcctgaaagagttctccgagcttgaacaaagcggatattatgtgtgctatccgcgcgggtcaaagccggaagacgctaacttttacctttatctccgagccagagtgtgcgaaaattgcatggaaatggacgttatgtccgttgctacaatagttatcgtagatatatgcatcacgggtggactgcttctgctggtttattattggtccaagaatagaaaggccaaagctaaacccgtgaccagaggcgctggcgcaggcggaaggcaaaggggacaaaacaaagaacggccaccaccagtgccaaatccagattatgagcctattcggaaaggacagagggacctgtactctggcctgaatcagagaagaatc

SEQ ID NO: 9998 - DNA, 1233 bp, Artificial Sequence
  Synthetic Polynucloetide
atggccttaccagtgaccgccttgctcctgccgctggccttgctgctccacgccgccaggccggaagtgcagctggttgaatcaggtggcggcctggttcaacctggcggatctctgagactgagctgtgccgccagcggctacacctttaccgagtacacaatccactgggtccgacaggcccctggcaaaggacttgagtgggtcgccaacatcaaccccaacaatggcggcaccacctacaaccagaagttcgaggacagattcaccatcagccgggacaacagcaagaacaccctgtacctccagatgaactccctgagagccgaggacaccgccgtgtactattgtgccagaggctggaacttcgactactggggccagggaacactggtcaccgttagctctggcggaggcggaagtggaggcggaggatctggcggcggaggctctgacatcgtgatgacccagagccacaagttcatgagcaccagcgtgggcgacagagtgtccatcatctgcaaggccagccaggatgtgggcacagccgtggattggtatcagcagaagcctggacagagccccaagctgctgatctactgggccagcacaagacacaccggcgtgcccgatagattcacaggctctggcagcggcaccgatttcaccctggccatcacaaacgtgcagagcgaggacctggccgactacttctgccagcagtacaacagctaccctctgacctttggagccggcaccaagctggaaatcaagagaacgcgtttcaagatccccatcgaggaactggaagatcgggtgttcgtgaactgcaacacctctatcacctgggtggaaggcaccgtgggaacactgctgagcgacatcaccagactggacctcggcaagcggattctggaccctcggggcatctacagatgcaacggcaccgacatctacaaggacaaagaaagcaccgtgcaggtccactacagaatgtgccagtcctgcgtggaactggaccctgctacagtggccggcatcatcgtgaccgatgtgatcgctactctgctgctggctctgggagtgttctgcttcgccggacacgaaacaggcagactgtctggcgctgccgatacacaggccctgctgagaaacgaccaagtgtatcagcccctgcgcgacagagatgatgcccagtattctcacctcggcggcaactgggctagaaacaag

SEQ ID NO: 9999 - DNA, 1263 bp, Artificial Sequence
  Synthetic Polynucloetide
atggccttaccagtgaccgccttgctcctgccgctggccttgctgctccacgccgccaggccggaagtgcagctggttgaatcaggtggcggcctggttcaacctggcggatctctgagactgagctgtgccgccagcggctacacctttaccgagtacacaatccactgggtccgacaggcccctggcaaaggacttgagtgggtcgccaacatcaaccccaacaatggcggcaccacctacaaccagaagttcgaggacagattcaccatcagccgggacaacagcaagaacaccctgtacctccagatgaactccctgagagccgaggacaccgccgtgtactattgtgccagaggctggaacttcgactactggggccagggaacactggtcaccgttagctctggcggaggcggaagtggaggcggaggatctggcggcggaggctctgacatcgtgatgacccagagccacaagttcatgagcaccagcgtgggcgacagagtgtccatcatctgcaaggccagccaggatgtgggcacagccgtggattggtatcagcagaagcctggacagagccccaagctgctgatctactgggccagcacaagacacaccggcgtgcccgatagattcacaggctctggcagcggcaccgatttcaccctggccatcacaaacgtgcagagcgaggacctggccgactacttctgccagcagtacaacagctaccctctgacctttggagccggcaccaagctggaaatcaagagaacgcgtcagagcatcaagggcaaccacctggtcaaggtgtacgactaccaagaggacggcagcgtgctgctgacatgtgatgccgaggccaagaacatcacctggtttaaggacggcaagatgatcggcttcctgaccgaggacaagaagaagtggaacctgggcagcaacgctaaggaccccagaggcatgtatcagtgcaagggcagccagaacaagagcaagcccctccaggtgtactaccggatgtgccagaactgcatcgagctgaacgccgctaccatcagcggctttctgttcgccgagatcgtgtccatcttcgtgctggccgtgggcgtgtactttatcgctggacaggatggcgtgcggcagagcagagcttccgataagcaaaccctgctgcctaacgaccagctgtaccagcctctgaaggacagagaggacgaccagtacagccacctccagggcaatcagctgagaagaaac

SEQ ID NO: 10000 - DNA, 1212 bp, Artificial Sequence
  Synthetic Polynucloetide
atggccttaccagtgaccgccttgctcctgccgctggccttgctgctccacgccgccaggccggaagtgcagctggttgaatcaggtggcggcctggttcaacctggcggatctctgagactgagctgtgccgccagcggctacacctttaccgagtacacaatccactgggtccgacaggcccctggcaaaggacttgagtgggtcgccaacatcaaccccaacaatggcggcaccacctacaaccagaagttcgaggacagattcaccatcagccgggacaacagcaagaacaccctgtacctccagatgaactccctgagagccgaggacaccgccgtgtactattgtgccagaggctggaacttcgactactggggccagggaacactggtcaccgttagctctggcggaggcggaagtggaggcggaggatctggcggcggaggctctgacatcgtgatgacccagagccacaagttcatgagcaccagcgtgggcgacagagtgtccatcatctgcaaggccagccaggatgtgggcacagccgtggattggtatcagcagaagcctggacagagccccaagctgctgatctactgggccagcacaagacacaccggcgtgcccgatagattcacaggctctggcagcggcaccgatttcaccctggccatcacaaacgtgcagagcgaggacctggccgactacttctgccagcagtacaacagctaccctctgacctttggagccggcaccaagctggaaatcaagagaacgcgtcagagttttgggttgttggaccctaaattgtgctatctgttggacggaatcctgttcatttacggagtgatcctgaccgcattgttcctgcgggttaagttttccagatccgcagacgcacccgcttaccaacaagggcagaaccaactctacaatgaacttaatttggggcggagggaagagtacgacgttctggacaaaaggaggggacgagatcccgagatgggcggaaagcctcagcgaaggaagaatccgcaagaggggctttataacgaactccagaaagataaaatggcagaagcctatagtgagattgggatgaagggagaaaggaggaggggtaaaggtcacgatgggttgtaccaaggattgagcacagccactaaagatacctatgatgcgctccacatgcaggccctgccgccaaga

SEQ ID NO: 10001 - DNA, 1914 bp, Artificial Sequence
  Synthetic Polynucloetide
atggccttaccagtgaccgccttgctcctgccgctggccttgctgctccacgccgccaggccggacatcgtgatgacccagagccacaagttcatgagcaccagcgtgggcgacagagtgtccatcatctgcaaggccagccaggatgtgggcacagccgtggattggtatcagcagaagcctggacagagccccaagctgctgatctactgggccagcacaagacacaccggcgtgcccgatagattcacaggctctggcagcggcaccgatttcaccctggccatcacaaacgtgcagagcgaggacctggccgactacttctgccagcagtacaacagctaccctctgacctttggagccggcaccaagctggaaatcaagagaggcggaggcggaagtggaggcggaggatctggcggcggaggctctgaagtgcagctggttgaatcaggtggcggcctggttcaacctggcggatctctgagactgagctgtgccgccagcggctacacctttaccgagtacacaatccactgggtccgacaggcccctggcaaaggacttgagtgggtcgccaacatcaaccccaacaatggcggcaccacctacaaccagaagttcgaggacagattcaccatcagccgggacaacagcaagaacaccctgtacctccagatgaactccctgagagccgaggacaccgccgtgtactattgtgccagaggctggaacttcgactactggggccagggaacactggtcaccgttagctctacgcgtgggagcggcatccagaaccctgatcctgccgtgtaccagctgcgggatagcaagagcagcgacaagagcgtgtgtctgttcaccgacttcgacagccagaccaacgtgtcccagagcaaggactccgacgtgtacatcaccgataagaccgtgctggacatgcggagcatggacttcaagagcaactccgccgtggcctggtccaacaagtccgatttcgcctgcgccaacgccttcaacaacagcattatccccgaggacacattcttcccaagccccgagagcagctgcgacgtgaagctggtggaaaagagcttcgagacagacaccaacctgaacttccagaacctgagcgtgatcggcttcagaatcctgctgctgaaagtggccggctttaacctgctgatgaccctgcggctgtggtccagccgcgccaagagaagcggatctggcgtgaagcagaccctgaatttcgacctgctgaagctggctggcgacgtggaatccaacccaggcccttctagaggccatatgaccgagtacaagcccacggtgcgcctcgccacccgcgacgacgtccccagggccgtacgcaccctcgccgccgcgttcgccgactaccccgccacgcgccacaccgtcgatccggaccgccacatcgagcgggtcaccgagctgcaagaactcttcctcacgcgcgtcgggctcgacatcggcaaggtgtgggtcgcggacgacggcgccgcggtggcggtctggaccacgccggagagcgtcgaagcgggggcggtgttcgccgagatcggcccgcgcatggccgagttgagcggttcccggctggccgcgcagcaacagatggaaggcctcctggcgccgcaccggcccaaggagcccgcgtggttcctggccaccgtcggcgtctcgcccgaccaccagggcaagggtctgggcagcgccgtcgtgctccccggagtggaggcggccgagcgcgccggggtgcccgccttcctggagacctccgcgccccgcaacctccccttctacgagcggctcggcttcaccgtcaccgccgacgtcgaggtgcccgaaggaccgcgcacctggtgcatgacccgcaagcccggtgcctga

SEQ ID NO: 10002 - DNA, 2010 bp, Artificial Sequence
  Synthetic Polynucloetide
atggccttaccagtgaccgccttgctcctgccgctggccttgctgctccacgccgccaggccggacatcgtgatgacccagagccacaagttcatgagcaccagcgtgggcgacagagtgtccatcatctgcaaggccagccaggatgtgggcacagccgtggattggtatcagcagaagcctggacagagccccaagctgctgatctactgggccagcacaagacacaccggcgtgcccgatagattcacaggctctggcagcggcaccgatttcaccctggccatcacaaacgtgcagagcgaggacctggccgactacttctgccagcagtacaacagctaccctctgacctttggagccggcaccaagctggaaatcaagagaggcggaggcggaagtggaggcggaggatctggcggcggaggctctgaagtgcagctggttgaatcaggtggcggcctggttcaacctggcggatctctgagactgagctgtgccgccagcggctacacctttaccgagtacacaatccactgggtccgacaggcccctggcaaaggacttgagtgggtcgccaacatcaaccccaacaatggcggcaccacctacaaccagaagttcgaggacagattcaccatcagccgggacaacagcaagaacaccctgtacctccagatgaactccctgagagccgaggacaccgccgtgtactattgtgccagaggctggaacttcgactactggggccagggaacactggtcaccgttagctctctcgaggacctgaagaacgtgttcccacctgaggtggccgtgttcgagcctagcgaggccgagatcagccacacccagaaagccaccctcgtgtgcctggctaccggcttctaccccgaccatgtggaactgtcttggtgggtcaacggcaaagaggtgcacagcggcgtgtctaccgacccccagccactgaaagaacagcccgccctgaacgacagccggtactgcctgagcagcagactgagagtgtccgccaccttctggcagaacccccggaaccacttcagatgccaggtgcagttctacggcctgagcgagaacgacgagtggacccaggacagagccaagcccgtgacccagatcgtgtctgccgaagcctggggcagagccgattgcggctttaccagcgagagctaccagcagggcgtgctgagcgccaccatcctgtacgagatcctgctgggcaaggccaccctgtacgccgtgctggtgtctgccctggtgctgatggctatggtcaagcggaaggacagccggggaagggccaagcgatctggatctggagcaacaaacttctcactactcaaacaagcaggtgacgtggaggagaatcccgggcctactagaggccatatgaccgagtacaagcccacggtgcgcctcgccacccgcgacgacgtccccagggccgtacgcaccctcgccgccgcgttcgccgactaccccgccacgcgccacaccgtcgatccggaccgccacatcgagcgggtcaccgagctgcaagaactcttcctcacgcgcgtcgggctcgacatcggcaaggtgtgggtcgcggacgacggcgccgcggtggcggtctggaccacgccggagagcgtcgaagcgggggcggtgttcgccgagatcggcccgcgcatggccgagttgagcggttcccggctggccgcgcagcaacagatggaaggcctcctggcgccgcaccggcccaaggagcccgcgtggttcctggccaccgtcggcgtctcgcccgaccaccagggcaagggtctgggcagcgccgtcgtgctccccggagtggaggcggccgagcgcgccggggtgcccgccttcctggagacctccgcgccccgcaacctccccttctacgagcggctcggcttcaccgtcaccgccgacgtcgaggtgcccgaaggaccgcgcacctggtgcatgacccgcaagcccggtgcctga

SEQ ID NO: 10003 - DNA, 2160 bp, Artificial Sequence
  Synthetic Polynucloetide
atggccttaccagtgaccgccttgctcctgccgctggccttgctgctccacgccgccaggccggacatcgtgatgacccagagccacaagttcatgagcaccagcgtgggcgacagagtgtccatcatctgcaaggccagccaggatgtgggcacagccgtggattggtatcagcagaagcctggacagagccccaagctgctgatctactgggccagcacaagacacaccggcgtgcccgatagattcacaggctctggcagcggcaccgatttcaccctggccatcacaaacgtgcagagcgaggacctggccgactacttctgccagcagtacaacagctaccctctgacctttggagccggcaccaagctggaaatcaagagaggcggaggcggaagtggaggcggaggatctggcggcggaggctctgaagtgcagctggttgaatcaggtggcggcctggttcaacctggcggatctctgagactgagctgtgccgccagcggctacacctttaccgagtacacaatccactgggtccgacaggcccctggcaaaggacttgagtgggtcgccaacatcaaccccaacaatggcggcaccacctacaaccagaagttcgaggacagattcaccatcagccgggacaacagcaagaacaccctgtacctccagatgaactccctgagagccgaggacaccgccgtgtactattgtgccagaggctggaacttcgactactggggccagggaacactggtcaccgttagctctacgcgtgagcagaaactgatctcggaagaggatctggggagcggcaccccattcccttctctggcccctcccatcatgctgctggtggacggcaagcagcagatggtggtcgtgtgcctggtgctggatgtggccccacctggactggacagccccatctggtttagcgccggcaatggctctgccctggacgcctttacctacggcccaagccctgccaccgatggcacctggacaaatctggcccacctgagcctgcccagcgaggaactggcttcttgggagcctctcgtgtgccacacaggacctggcgctgagggacacagcagatccacccagcctatgcacctgtctggcgaggccagcaccgccagaacctgtcctcaggaacctctgagaggcacccctggcggagcactgtggctgggagtgctgagactgctgctgttcaagctgctgctgtttgacctgctgctgacctgctcctgtctgtgcgatcctgccggccctctgccttctcctgccaccaccacaagactgagagccctgggcagccacagactgcaccctgccacagagacaggcggcagagaggccacaagcagccctagaccccagcccagagacagaagatggggcgataccccccctggcagaaagcctggatctccagtccgcgccaagagaagcggatctggcgtgaagcagaccctgaatttcgacctgctgaagctggctggcgacgtggaatccaacccaggcccttctagatctagaggccatatgaccgagtacaagcccacggtgcgcctcgccacccgcgacgacgtccccagggccgtacgcaccctcgccgccgcgttcgccgactaccccgccacgcgccacaccgtcgatccggaccgccacatcgagcgggtcaccgagctgcaagaactcttcctcacgcgcgtcgggctcgacatcggcaaggtgtgggtcgcggacgacggcgccgcggtggcggtctggaccacgccggagagcgtcgaagcgggggcggtgttcgccgagatcggcccgcgcatggccgagttgagcggttcccggctggccgcgcagcaacagatggaaggcctcctggcgccgcaccggcccaaggagcccgcgtggttcctggccaccgtcggcgtctcgcccgaccaccagggcaagggtctgggcagcgccgtcgtgctccccggagtggaggcggccgagcgcgccggggtgcccgccttcctggagacctccgcgccccgcaacctccccttctacgagcggctcggcttcaccgtcaccgccgacgtcgaggtgcccgaaggaccgcgcacctggtgcatgacccgcaagcccggtgcctga

SEQ ID NO: 10004 - DNA, 1620 bp, Artificial Sequence; identical to SEQ ID NO: 9728
  Synthetic Polynucloetide

SEQ ID NO: 10005 - DNA, 927 bp, Artificial Sequence; identical to SEQ ID NO: 9729
  Synthetic Polynucloetide

SEQ ID NO: 10006 - DNA, 1335 bp, Artificial Sequence; identical to SEQ ID NO: 9799
  Synthetic Polynucloetide

SEQ ID NO: 10007 - DNA, 834 bp, Artificial Sequence; identical to SEQ ID NO: 9800
  Synthetic Polynucloetide

SEQ ID NO: 10008 - DNA, 1674 bp, Artificial Sequence; identical to SEQ ID NO: 9732
  Synthetic Polynucloetide

SEQ ID NO: 10009 - DNA, 984 bp, Artificial Sequence; identical to SEQ ID NO: 9733
  Synthetic Polynucloetide

SEQ ID NO: 10010 - DNA, 1371 bp, Artificial Sequence; identical to SEQ ID NO: 9803
  Synthetic Polynucloetide

SEQ ID NO: 10011 - DNA, 873 bp, Artificial Sequence; identical to SEQ ID NO: 9804
  Synthetic Polynucloetide

SEQ ID NO: 10012 - DNA, 1914 bp, Artificial Sequence
  Synthetic Polynucloetide
atggccttaccagtgaccgccttgctcctgccgctggccttgctgctccacgccgccaggccggacatcgtgatgacccagagccacaagttcatgagcaccagcgtgggcgacagagtgtccatcatctgcaaggccagccaggatgtgggcacagccgtggattggtatcagcagaagcctggacagagccccaagctgctgatctactgggccagcacaagacacaccggcgtgcccgatagattcacaggctctggcagcggcaccgatttcaccctggccatcacaaacgtgcagagcgaggacctggccgactacttctgccagcagtacaacagctaccctctgacctttggagccggcaccaagctggaaatcaagagaggcggaggcggaagtggaggcggaggatctggcggcggaggctctgaagtgcagctggttgaatcaggtggcggcctggttcaacctggcggatctctgagactgagctgtgccgccagcggctacacctttaccgagtacacaatccactgggtccgacaggcccctggcaaaggacttgagtgggtcgccaacatcaaccccaacaatggcggcaccacctacaaccagaagttcgaggacagattcaccatcagccgggacaacagcaagaacaccctgtacctccagatgaactccctgagagccgaggacaccgccgtgtactattgtgccagaggctggaacttcgactactggggccagggaacactggtcaccgttagctctacgcgtgggagcggcatccagaaccctgatcctgccgtgtaccagctgcgggatagcaagagcagcgacaagagcgtgtgtctgttcaccgacttcgacagccagaccaacgtgtcccagagcaaggactccgacgtgtacatcaccgataagaccgtgctggacatgcggagcatggacttcaagagcaactccgccgtggcctggtccaacaagtccgatttcgcctgcgccaacgccttcaacaacagcattatccccgaggacacattcttcccaagcagcgacgtgccctgcgacgtgaagctggtggaaaagagcttcgagacagacaccaacctgaacttccagaacctgagcgtgatcggcttcagaatcctgctgctgaaagtggccggctttaacctgctgatgaccctgcggctgtggtccagccgcgccaagagaagcggatctggcgtgaagcagaccctgaatttcgacctgctgaagctggctggcgacgtggaatccaacccaggcccttctagaggccatatgaccgagtacaagcccacggtgcgcctcgccacccgcgacgacgtccccagggccgtacgcaccctcgccgccgcgttcgccgactaccccgccacgcgccacaccgtcgatccggaccgccacatcgagcgggtcaccgagctgcaagaactcttcctcacgcgcgtcgggctcgacatcggcaaggtgtgggtcgcggacgacggcgccgcggtggcggtctggaccacgccggagagcgtcgaagcgggggcggtgttcgccgagatcggcccgcgcatggccgagttgagcggttcccggctggccgcgcagcaacagatggaaggcctcctggcgccgcaccggcccaaggagcccgcgtggttcctggccaccgtcggcgtctcgcccgaccaccagggcaagggtctgggcagcgccgtcgtgctccccggagtggaggcggccgagcgcgccggggtgcccgccttcctggagacctccgcgccccgcaacctccccttctacgagcggctcggcttcaccgtcaccgccgacgtcgaggtgcccgaaggaccgcgcacctggtgcatgacccgcaagcccggtgcctga

SEQ ID NO: 10013 - DNA, 2010 bp, Artificial Sequence
  Synthetic Polynucloetide
atggccttaccagtgaccgccttgctcctgccgctggccttgctgctccacgccgccaggccggacatcgtgatgacccagagccacaagttcatgagcaccagcgtgggcgacagagtgtccatcatctgcaaggccagccaggatgtgggcacagccgtggattggtatcagcagaagcctggacagagccccaagctgctgatctactgggccagcacaagacacaccggcgtgcccgatagattcacaggctctggcagcggcaccgatttcaccctggccatcacaaacgtgcagagcgaggacctggccgactacttctgccagcagtacaacagctaccctctgacctttggagccggcaccaagctggaaatcaagagaggcggaggcggaagtggaggcggaggatctggcggcggaggctctgaagtgcagctggttgaatcaggtggcggcctggttcaacctggcggatctctgagactgagctgtgccgccagcggctacacctttaccgagtacacaatccactgggtccgacaggcccctggcaaaggacttgagtgggtcgccaacatcaaccccaacaatggcggcaccacctacaaccagaagttcgaggacagattcaccatcagccgggacaacagcaagaacaccctgtacctccagatgaactccctgagagccgaggacaccgccgtgtactattgtgccagaggctggaacttcgactactggggccagggaacactggtcaccgttagctctctcgaggacctgaagaacgtgttcccacctgaggtggccgtgttcgagcctagcaaggccgagatcgcccacacccagaaagccaccctcgtgtgcctggctaccggcttctaccccgaccatgtggaactgtcttggtgggtcaacggcaaagaggtgcacagcggcgtgtctaccgacccccagccactgaaagaacagcccgccctgaacgacagccggtactgcctgagcagcagactgagagtgtccgccaccttctggcagaacccccggaaccacttcagatgccaggtgcagttctacggcctgagcgagaacgacgagtggacccaggacagagccaagcccgtgacccagatcgtgtctgccgaagcctggggcagagccgattgcggcatcaccagcgccagctaccaccagggcgtgctgagcgccaccatcctgtacgagatcctgctgggcaaggccaccctgtacgccgtgctggtgtctgccctggtgctgatggctatggtcaagcggaaggacagccggggaagggccaagcgatctggatctggagcaacaaacttctcactactcaaacaagcaggtgacgtggaggagaatcccgggcctactagaggccatatgaccgagtacaagcccacggtgcgcctcgccacccgcgacgacgtccccagggccgtacgcaccctcgccgccgcgttcgccgactaccccgccacgcgccacaccgtcgatccggaccgccacatcgagcgggtcaccgagctgcaagaactcttcctcacgcgcgtcgggctcgacatcggcaaggtgtgggtcgcggacgacggcgccgcggtggcggtctggaccacgccggagagcgtcgaagcgggggcggtgttcgccgagatcggcccgcgcatggccgagttgagcggttcccggctggccgcgcagcaacagatggaaggcctcctggcgccgcaccggcccaaggagcccgcgtggttcctggccaccgtcggcgtctcgcccgaccaccagggcaagggtctgggcagcgccgtcgtgctccccggagtggaggcggccgagcgcgccggggtgcccgccttcctggagacctccgcgccccgcaacctccccttctacgagcggctcggcttcaccgtcaccgccgacgtcgaggtgcccgaaggaccgcgcacctggtgcatgacccgcaagcccggtgcctga

SEQ ID NO: 10014 - DNA, 2079 bp, Artificial Sequence
  Synthetic Polynucloetide
atggccttaccagtgaccgccttgctcctgccgctggccttgctgctccacgccgccaggccggacatcgtgatgacccagagccacaagttcatgagcaccagcgtgggcgacagagtgtccatcatctgcaaggccagccaggatgtgggcacagccgtggattggtatcagcagaagcctggacagagccccaagctgctgatctactgggccagcacaagacacaccggcgtgcccgatagattcacaggctctggcagcggcaccgatttcaccctggccatcacaaacgtgcagagcgaggacctggccgactacttctgccagcagtacaacagctaccctctgacctttggagccggcaccaagctggaaatcaagagaggcggaggcggaagtggaggcggaggatctggcggcggaggctctgaagtgcagctggttgaatcaggtggcggcctggttcaacctggcggatctctgagactgagctgtgccgccagcggctacacctttaccgagtacacaatccactgggtccgacaggcccctggcaaaggacttgagtgggtcgccaacatcaaccccaacaatggcggcaccacctacaaccagaagttcgaggacagattcaccatcagccgggacaacagcaagaacaccctgtacctccagatgaactccctgagagccgaggacaccgccgtgtactattgtgccagaggctggaacttcgactactggggccagggaacactggtcaccgttagctctacgcgtgggtctggaggcggaggcagcggcggaggcgggagcggcgacggtaacgaggagatgggaggaatcactcaaaccccttacaaagtctcaatttcaggaacaactgttatccttacatgtccccagtatcctggcagcgagatcctttggcagcataacgacaagaatatagggggagatgaagacgataagaatatcggatctgacgaggatcacttgagcctgaaagagttctccgagcttgaacaaagcggatattatgtgtgctatccgcgcgggtcaaagccggaagacgctaacttttacctttatctccgagccagagtgtgcgaaaattgcatggaaatggacgttatgtccgttgctacaatagttatcgtagatatatgcatcacgggtggactgcttctgctggtttattattggtccaagaatagaaaggccaaagctaaacccgtgaccagaggcgctggcgcaggcggaaggcaaaggggacaaaacaaagaacggccaccaccagtgccaaatccagattatgagcctattcggaaaggacagagggacctgtactctggcctgaatcagagaagaatccgcgccaagagaagcggatctggcgtgaagcagaccctgaatttcgacctgctgaagctggctggcgacgtggaatccaacccaggcccttctagaggccatatgaccgagtacaagcccacggtgcgcctcgccacccgcgacgacgtccccagggccgtacgcaccctcgccgccgcgttcgccgactaccccgccacgcgccacaccgtcgatccggaccgccacatcgagcgggtcaccgagctgcaagaactcttcctcacgcgcgtcgggctcgacatcggcaaggtgtgggtcgcggacgacggcgccgcggtggcggtctggaccacgccggagagcgtcgaagcgggggcggtgttcgccgagatcggcccgcgcatggccgagttgagcggttcccggctggccgcgcagcaacagatggaaggcctcctggcgccgcaccggcccaaggagcccgcgtggttcctggccaccgtcggcgtctcgcccgaccaccagggcaagggtctgggcagcgccgtcgtgctccccggagtggaggcggccgagcgcgccggggtgcccgccttcctggagacctccgcgccccgcaacctccccttctacgagcggctcggcttcaccgtcaccgccgacgtcgaggtgcccgaaggaccgcgcacctggtgcatgacccgcaagcccggtgcctga

SEQ ID NO: 10015 - DNA, 1974 bp, Artificial Sequence
  Synthetic Polynucloetide
atggccttaccagtgaccgccttgctcctgccgctggccttgctgctccacgccgccaggccggacatcgtgatgacccagagccacaagttcatgagcaccagcgtgggcgacagagtgtccatcatctgcaaggccagccaggatgtgggcacagccgtggattggtatcagcagaagcctggacagagccccaagctgctgatctactgggccagcacaagacacaccggcgtgcccgatagattcacaggctctggcagcggcaccgatttcaccctggccatcacaaacgtgcagagcgaggacctggccgactacttctgccagcagtacaacagctaccctctgacctttggagccggcaccaagctggaaatcaagagaggcggaggcggaagtggaggcggaggatctggcggcggaggctctgaagtgcagctggttgaatcaggtggcggcctggttcaacctggcggatctctgagactgagctgtgccgccagcggctacacctttaccgagtacacaatccactgggtccgacaggcccctggcaaaggacttgagtgggtcgccaacatcaaccccaacaatggcggcaccacctacaaccagaagttcgaggacagattcaccatcagccgggacaacagcaagaacaccctgtacctccagatgaactccctgagagccgaggacaccgccgtgtactattgtgccagaggctggaacttcgactactggggccagggaacactggtcaccgttagctctacgcgtgggtctggaggcggaggcagcggcggaggcgggagcggcttcaagatccccatcgaggaactggaagatcgggtgttcgtgaactgcaacacctctatcacctgggtggaaggcaccgtgggaacactgctgagcgacatcaccagactggacctcggcaagcggattctggaccctcggggcatctacagatgcaacggcaccgacatctacaaggacaaagaaagcaccgtgcaggtccactacagaatgtgccagtcctgcgtggaactggaccctgctacagtggccggcatcatcgtgaccgatgtgatcgctactctgctgctggctctgggagtgttctgcttcgccggacacgaaacaggcagactgtctggcgctgccgatacacaggccctgctgagaaacgaccaagtgtatcagcccctgcgcgacagagatgatgcccagtattctcacctcggcggcaactgggctagaaacaagcgcgccaagagaagcggatctggcgtgaagcagaccctgaatttcgacctgctgaagctggctggcgacgtggaatccaacccaggcccttctagaggccatatgaccgagtacaagcccacggtgcgcctcgccacccgcgacgacgtccccagggccgtacgcaccctcgccgccgcgttcgccgactaccccgccacgcgccacaccgtcgatccggaccgccacatcgagcgggtcaccgagctgcaagaactcttcctcacgcgcgtcgggctcgacatcggcaaggtgtgggtcgcggacgacggcgccgcggtggcggtctggaccacgccggagagcgtcgaagcgggggcggtgttcgccgagatcggcccgcgcatggccgagttgagcggttcccggctggccgcgcagcaacagatggaaggcctcctggcgccgcaccggcccaaggagcccgcgtggttcctggccaccgtcggcgtctcgcccgaccaccagggcaagggtctgggcagcgccgtcgtgctccccggagtggaggcggccgagcgcgccggggtgcccgccttcctggagacctccgcgccccgcaacctccccttctacgagcggctcggcttcaccgtcaccgccgacgtcgaggtgcccgaaggaccgcgcacctggtgcatgacccgcaagcccggtgcctga

SEQ ID NO: 10016 - DNA, 2004 bp, Artificial Sequence
  Synthetic Polynucloetide
atggccttaccagtgaccgccttgctcctgccgctggccttgctgctccacgccgccaggccggacatcgtgatgacccagagccacaagttcatgagcaccagcgtgggcgacagagtgtccatcatctgcaaggccagccaggatgtgggcacagccgtggattggtatcagcagaagcctggacagagccccaagctgctgatctactgggccagcacaagacacaccggcgtgcccgatagattcacaggctctggcagcggcaccgatttcaccctggccatcacaaacgtgcagagcgaggacctggccgactacttctgccagcagtacaacagctaccctctgacctttggagccggcaccaagctggaaatcaagagaggcggaggcggaagtggaggcggaggatctggcggcggaggctctgaagtgcagctggttgaatcaggtggcggcctggttcaacctggcggatctctgagactgagctgtgccgccagcggctacacctttaccgagtacacaatccactgggtccgacaggcccctggcaaaggacttgagtgggtcgccaacatcaaccccaacaatggcggcaccacctacaaccagaagttcgaggacagattcaccatcagccgggacaacagcaagaacaccctgtacctccagatgaactccctgagagccgaggacaccgccgtgtactattgtgccagaggctggaacttcgactactggggccagggaacactggtcaccgttagctctacgcgtgggtctggaggcggaggcagcggcggaggcgggagcggccagagcatcaagggcaaccacctggtcaaggtgtacgactaccaagaggacggcagcgtgctgctgacatgtgatgccgaggccaagaacatcacctggtttaaggacggcaagatgatcggcttcctgaccgaggacaagaagaagtggaacctgggcagcaacgctaaggaccccagaggcatgtatcagtgcaagggcagccagaacaagagcaagcccctccaggtgtactaccggatgtgccagaactgcatcgagctgaacgccgctaccatcagcggctttctgttcgccgagatcgtgtccatcttcgtgctggccgtgggcgtgtactttatcgctggacaggatggcgtgcggcagagcagagcttccgataagcaaaccctgctgcctaacgaccagctgtaccagcctctgaaggacagagaggacgaccagtacagccacctccagggcaatcagctgagaagaaaccgcgccaagagaagcggatctggcgtgaagcagaccctgaatttcgacctgctgaagctggctggcgacgtggaatccaacccaggcccttctagaggccatatgaccgagtacaagcccacggtgcgcctcgccacccgcgacgacgtccccagggccgtacgcaccctcgccgccgcgttcgccgactaccccgccacgcgccacaccgtcgatccggaccgccacatcgagcgggtcaccgagctgcaagaactcttcctcacgcgcgtcgggctcgacatcggcaaggtgtgggtcgcggacgacggcgccgcggtggcggtctggaccacgccggagagcgtcgaagcgggggcggtgttcgccgagatcggcccgcgcatggccgagttgagcggttcccggctggccgcgcagcaacagatggaaggcctcctggcgccgcaccggcccaaggagcccgcgtggttcctggccaccgtcggcgtctcgcccgaccaccagggcaagggtctgggcagcgccgtcgtgctccccggagtggaggcggccgagcgcgccggggtgcccgccttcctggagacctccgcgccccgcaacctccccttctacgagcggctcggcttcaccgtcaccgccgacgtcgaggtgcccgaaggaccgcgcacctggtgcatgacccgcaagcccggtgcctga

SEQ ID NO: 10017 - DNA, 1953 bp, Artificial Sequence
  Synthetic Polynucloetide
atggccttaccagtgaccgccttgctcctgccgctggccttgctgctccacgccgccaggccggacatcgtgatgacccagagccacaagttcatgagcaccagcgtgggcgacagagtgtccatcatctgcaaggccagccaggatgtgggcacagccgtggattggtatcagcagaagcctggacagagccccaagctgctgatctactgggccagcacaagacacaccggcgtgcccgatagattcacaggctctggcagcggcaccgatttcaccctggccatcacaaacgtgcagagcgaggacctggccgactacttctgccagcagtacaacagctaccctctgacctttggagccggcaccaagctggaaatcaagagaggcggaggcggaagtggaggcggaggatctggcggcggaggctctgaagtgcagctggttgaatcaggtggcggcctggttcaacctggcggatctctgagactgagctgtgccgccagcggctacacctttaccgagtacacaatccactgggtccgacaggcccctggcaaaggacttgagtgggtcgccaacatcaaccccaacaatggcggcaccacctacaaccagaagttcgaggacagattcaccatcagccgggacaacagcaagaacaccctgtacctccagatgaactccctgagagccgaggacaccgccgtgtactattgtgccagaggctggaacttcgactactggggccagggaacactggtcaccgttagctctacgcgtgggtctggaggcggaggcagcggcggaggcgggagcggccagagttttgggttgttggaccctaaattgtgctatctgttggacggaatcctgttcatttacggagtgatcctgaccgcattgttcctgcgggttaagttttccagatccgcagacgcacccgcttaccaacaagggcagaaccaactctacaatgaacttaatttggggcggagggaagagtacgacgttctggacaaaaggaggggacgagatcccgagatgggcggaaagcctcagcgaaggaagaatccgcaagaggggctttataacgaactccagaaagataaaatggcagaagcctatagtgagattgggatgaagggagaaaggaggaggggtaaaggtcacgatgggttgtaccaaggattgagcacagccactaaagatacctatgatgcgctccacatgcaggccctgccgccaagacgcgccaagagaagcggatctggcgtgaagcagaccctgaatttcgacctgctgaagctggctggcgacgtggaatccaacccaggcccttctagaggccatatgaccgagtacaagcccacggtgcgcctcgccacccgcgacgacgtccccagggccgtacgcaccctcgccgccgcgttcgccgactaccccgccacgcgccacaccgtcgatccggaccgccacatcgagcgggtcaccgagctgcaagaactcttcctcacgcgcgtcgggctcgacatcggcaaggtgtgggtcgcggacgacggcgccgcggtggcggtctggaccacgccggagagcgtcgaagcgggggcggtgttcgccgagatcggcccgcgcatggccgagttgagcggttcccggctggccgcgcagcaacagatggaaggcctcctggcgccgcaccggcccaaggagcccgcgtggttcctggccaccgtcggcgtctcgcccgaccaccagggcaagggtctgggcagcgccgtcgtgctccccggagtggaggcggccgagcgcgccggggtgcccgccttcctggagacctccgcgccccgcaacctccccttctacgagcggctcggcttcaccgtcaccgccgacgtcgaggtgcccgaaggaccgcgcacctggtgcatgacccgcaagcccggtgcctga

SEQ ID NO: 10018 - DNA, 2253 bp, Artificial Sequence
  Synthetic Polynucloetide
atggccttaccagtgaccgccttgctcctgccgctggccttgctgctccacgccgccaggccggaagtgcagctggttgaatctggcggaggactggttcagcctggcggatctctgagactgtcttgtgccgccagcggcttcagcttcagcgacttttggatgagctgggtccgacaggcccctggcaaaggacttgaatgggtcgccacaatcagccaggccggcagcgagaaggactacgtggactctgtgaagggcagattcaccatcagccgggacaacgccaagaagtccctgtacctccagatgaacagcctgagagccgaggacaccgccgtgtactattgtgcctctggcgtgtacagcttcgactacagaggccagggcaccctggtcacagtctcttctggtaccggcggaggcggatctggcggcggaggtagcggtggcggaggatctgaattcgacatcgtgatgacccagagccacaagttcatgagcaccagcgtgggcgacagagtgtccatcatctgcaaggccagccaggatgtgggcacagccgtggattggtatcagcagaagcctggacagagccccaagctgctgatctactgggccagcacaagacacaccggcgtgcccgatagattcacaggctctggcagcggcaccgatttcaccctggccatcacaaacgtgcagagcgaggacctggccgactacttctgccagcagtacaacagctaccctctgacctttggagccggcaccaagctggaaatcaagagactcgaggacctgaagaacgtgttcccacctgaggtggccgtgttcgagcctagcgaggccgagatcagccacacccagaaagccaccctcgtgtgcctggctaccggcttctaccccgaccatgtggaactgtcttggtgggtcaacggcaaagaggtgcacagcggcgtgtgtaccgacccccagccactgaaagaacagcccgccctgaacgacagccggtactgcctgagcagcagactgagagtgtccgccaccttctggcagaacccccggaaccacttcagatgccaggtgcagttctacggcctgagcgagaacgacgagtggacccaggacagagccaagcccgtgacccagatcgtgtctgccgaagcctggggcagagccgattgcggctttaccagcgagagctaccagcagggcgtgctgagcgccaccatcctgtacgagatcctgctgggcaaggccaccctgtacgccgtgctggtgtctgccctggtgctgatggctatggtcaagcggaaggacagccggggaagggccaagcgatctggatctggagcaacaaacttctcactactcaaacaagcaggtgacgtggaggagaatcccgggcctactagtatggactggatttggcgcatccttttccttgtcggcgctgctaccggcgcgcattccttcgaagaagtgcagctggttgaatcaggtggcggcctggttcaacctggcggatctctgagactgagctgtgccgccagcggctacacctttaccgagtacacaatccactgggtccgacaggcccctggcaaaggacttgagtgggtcgccaacatcaaccccaacaatggcggcaccacctacaaccagaagttcgaggacagattcaccatcagccgggacaacagcaagaacaccctgtacctccagatgaactccctgagagccgaggacaccgccgtgtactattgtgccagaggctggaacttcgactactggggccagggaacactggtcaccgttagctctacgcgtatccagaaccctgatcctgccgtgtaccagctgcgggatagcaagagcagcgacaagagcgtgtgtctgttcaccgacttcgacagccagaccaacgtgtcccagagcaaggactccgacgtgtacatcaccgataagtgcgtgctggacatgcggagcatggacttcaagagcaactccgccgtggcctggtccaacaagtccgatttcgcctgcgccaacgccttcaacaacagcattatccccgaggacacattcttcccaagccccgagagcagctgcgacgtgaagctggtggaaaagagcttcgagacagacaccaacctgaacttccagaacctgagcgtgatcggcttcagaatcctgctgctgaaagtggccggctttaacctgctgatgaccctgcggctgtggtccagc

SEQ ID NO: 10019 - DNA, 2265 bp, Artificial Sequence
  Synthetic Polynucloetide
atggccttaccagtgaccgccttgctcctgccgctggccttgctgctccacgccgccaggccggaagtgcagctggttgaatctggcggaggactggttcagcctggcggatctctgagactgtcttgtgccgccagcggcttcagcttcagcgacttttggatgagctgggtccgacaggcccctggcaaaggacttgaatgggtcgccacaatcagccaggccggcagcgagaaggactacgtggactctgtgaagggcagattcaccatcagccgggacaacgccaagaagtccctgtacctccagatgaacagcctgagagccgaggacaccgccgtgtactattgtgcctctggcgtgtacagcttcgactacagaggccagggcaccctggtcacagtctcttctggtaccggcggaggcggatctggcggcggaggtagcggtggcggaggatctgaattcgacatcgtgatgacccagagccacaagttcatgagcaccagcgtgggcgacagagtgtccatcatctgcaaggccagccaggatgtgggcacagccgtggattggtatcagcagaagcctggacagagccccaagctgctgatctactgggccagcacaagacacaccggcgtgcccgatagattcacaggctctggcagcggcaccgatttcaccctggccatcacaaacgtgcagagcgaggacctggccgactacttctgccagcagtacaacagctaccctctgacctttggagccggcaccaagctggaaatcaagagactcgagatccagaaccctgatcctgccgtgtaccagctgcgggatagcaagagcagcgacaagagcgtgtgtctgttcaccgacttcgacagccagaccaacgtgtcccagagcaaggactccgacgtgtacatcaccgataagtgcgtgctggacatgcggagcatggacttcaagagcaactccgccgtggcctggtccaacaagtccgatttcgcctgcgccaacgccttcaacaacagcattatccccgaggacacattcttcccaagccccgagagcagctgcgacgtgaagctggtggaaaagagcttcgagacagacaccaacctgaacttccagaacctgagcgtgatcggcttcagaatcctgctgctgaaagtggccggctttaacctgctgatgaccctgcggctgtggtccagccgcgccaagagaagcggatctggcgtgaagcagaccctgaatttcgacctgctgaagctggctggcgacgtggaatccaacccaggccctactagtatggactggatttggcgcatccttttccttgtcggcgctgctaccggcgcgcattccttcgaagaagtgcagctggttgaatcaggtggcggcctggttcaacctggcggatctctgagactgagctgtgccgccagcggctacacctttaccgagtacacaatccactgggtccgacaggcccctggcaaaggacttgagtgggtcgccaacatcaaccccaacaatggcggcaccacctacaaccagaagttcgaggacagattcaccatcagccgggacaacagcaagaacaccctgtacctccagatgaactccctgagagccgaggacaccgccgtgtactattgtgccagaggctggaacttcgactactggggccagggaacactggtcaccgttagctctacgcgtgaggacctgaagaacgtgttcccacctgaggtggccgtgttcgagcctagcgaggccgagatcagccacacccagaaagccaccctcgtgtgcctggctaccggcttctaccccgaccatgtggaactgtcttggtgggtcaacggcaaagaggtgcacagcggcgtgtgtaccgacccccagccactgaaagaacagcccgccctgaacgacagccggtactgcctgagcagcagactgagagtgtccgccaccttctggcagaacccccggaaccacttcagatgccaggtgcagttctacggcctgagcgagaacgacgagtggacccaggacagagccaagcccgtgacccagatcgtgtctgccgaagcctggggcagagccgattgcggctttaccagcgagagctaccagcagggcgtgctgagcgccaccatcctgtacgagatcctgctgggcaaggccaccctgtacgccgtgctggtgtctgccctggtgctgatggctatggtcaagcggaaggacagccgggga

SEQ ID NO: 10020 - DNA, 2841 bp, Artificial Sequence
  Synthetic Polynucloetide
atggccttaccagtgaccgccttgctcctgccgctggccttgctgctccacgccgccaggccggaagtgcagctggttgaatctggcggaggactggttcagcctggcggatctctgagactgtcttgtgccgccagcggcttcagcttcagcgacttttggatgagctgggtccgacaggcccctggcaaaggacttgaatgggtcgccacaatcagccaggccggcagcgagaaggactacgtggactctgtgaagggcagattcaccatcagccgggacaacgccaagaagtccctgtacctccagatgaacagcctgagagccgaggacaccgccgtgtactattgtgcctctggcgtgtacagcttcgactacagaggccagggcaccctggtcacagtctcttctggtaccggcggaggcggatctggcggcggaggtagcggtggcggaggatctgaattcgacatcgtgatgacccagagccacaagttcatgagcaccagcgtgggcgacagagtgtccatcatctgcaaggccagccaggatgtgggcacagccgtggattggtatcagcagaagcctggacagagccccaagctgctgatctactgggccagcacaagacacaccggcgtgcccgatagattcacaggctctggcagcggcaccgatttcaccctggccatcacaaacgtgcagagcgaggacctggccgactacttctgccagcagtacaacagctaccctctgacctttggagccggcaccaagctggaaatcaagagactcgaggacctgaagaacgtgttcccacctgaggtggccgtgttcgagcctagcgaggccgagatcagccacacccagaaagccaccctcgtgtgcctggctaccggcttctaccccgaccatgtggaactgtcttggtgggtcaacggcaaagaggtgcacagcggcgtgtctaccgacccccagccactgaaagaacagcccgccctgaacgacagccggtactgcctgagcagcagactgagagtgtccgccaccttctggcagaacccccggaaccacttcagatgccaggtgcagttctacggcctgagcgagaacgacgagtggacccaggacagagccaagcccgtgacccagatcgtgtctgccgaagcctggggcagagccgattgcggatcccagagcttcggcctgctggaccccaagctgtgctacctgctggatggcatcctgttcatctacggcgtgatcctgaccgccctgttcctgagagtgaagttcagcagaagcgccgacgcccctgcctaccagcagggacagaaccaactgtacaacgagctgaacctgggcagacgggaagagtacgacgtgctggacaagcggagaggcagggaccctgagatgggcggaaagccccagcggagaaagaacccccaggaaggactgtataacgaactccagaaagacaagatggccgaagcctacagcgagatcggcatgaagggcgagcggagaagaggcaagggccacgatggcctgtaccagggcctgagcaccgccaccaaggacacctatgacgccctgcacatgcaggccctgcctccaagaagggccaagcgatctggatctggagcaacaaacttctcactactcaaacaagcaggtgacgtggaggagaatcccgggcctactagtatggactggatttggcgcatccttttccttgtcggcgctgctaccggcgcgcattccttcgaagaagtgcagctggttgaatcaggtggcggcctggttcaacctggcggatctctgagactgagctgtgccgccagcggctacacctttaccgagtacacaatccactgggtccgacaggcccctggcaaaggacttgagtgggtcgccaacatcaaccccaacaatggcggcaccacctacaaccagaagttcgaggacagattcaccatcagccgggacaacagcaagaacaccctgtacctccagatgaactccctgagagccgaggacaccgccgtgtactattgtgccagaggctggaacttcgactactggggccagggaacactggtcaccgttagctctacgcgtatccagaaccctgatcctgccgtgtaccagctgcgggatagcaagagcagcgacaagagcgtgtgtctgttcaccgacttcgacagccagaccaacgtgtcccagagcaaggactccgacgtgtacatcaccgataagaccgtgctggacatgcggagcatggacttcaagagcaactccgccgtggcctggtccaacaagtccgatttcgcctgcgccaacgccttcaacaacagcattatccccgaggacacattcttcccaagccccgagagcagctgcggtacccagagttttgggttgttggaccctaaattgtgctatctgttggacggaatcctgttcatttacggagtgatcctgaccgcattgttcctgcgggttaagttttccagatccgcagacgcacccgcttaccaacaagggcagaaccaactctacaatgaacttaatttggggcggagggaagagtacgacgttctggacaaaaggaggggacgagatcccgagatgggcggaaagcctcagcgaaggaagaatccgcaagaggggctttataacgaactccagaaagataaaatggcagaagcctatagtgagattgggatgaagggagaaaggaggaggggtaaaggtcacgatgggttgtaccaaggattgagcacagccactaaagatacctatgatgcgctccacatgcaggccctgccgccaaga

SEQ ID NO: 10021 - DNA, 2331 bp, Artificial Sequence
  Synthetic Polynucloetide
atggccttaccagtgaccgccttgctcctgccgctggccttgctgctccacgccgccaggccggaagtgcagctggttgaatctggcggaggactggttcagcctggcggatctctgagactgtcttgtgccgccagcggcttcagcttcagcgacttttggatgagctgggtccgacaggcccctggcaaaggacttgaatgggtcgccacaatcagccaggccggcagcgagaaggactacgtggactctgtgaagggcagattcaccatcagccgggacaacgccaagaagtccctgtacctccagatgaacagcctgagagccgaggacaccgccgtgtactattgtgcctctggcgtgtacagcttcgactacagaggccagggcaccctggtcacagtctcttctggtaccggcggaggcggatctggcggcggaggtagcggtggcggaggatctgaattcgacatcgtgatgacccagagccacaagttcatgagcaccagcgtgggcgacagagtgtccatcatctgcaaggccagccaggatgtgggcacagccgtggattggtatcagcagaagcctggacagagccccaagctgctgatctactgggccagcacaagacacaccggcgtgcccgatagattcacaggctctggcagcggcaccgatttcaccctggccatcacaaacgtgcagagcgaggacctggccgactacttctgccagcagtacaacagctaccctctgacctttggagccggcaccaagctggaaatcaagagactcgagggacagcctaaggccaatcctaccgtgacactgttccctccaagcagcgaagaactccaggccaacaaggccacacttgtgtgcctgatctccgacttctaccctggggctgtgacagtggcttggaaggccgatggatctcctgtgaaagccggcgtggaaaccaccaagccatccaagcagagcaacaacaaatacgccgccagctcctacctgagcctgacacctgagcagtggaagtcccacagatcctacagctgccaagtgacccacgaaggcagcaccgtggaaaagacagtggcccctacagagtgcagccccatcaagaccgatgtgattacaatggaccccaaggacaactgctccaaggacgccaacgataccctgctgctccagctgaccaacaccagcgcctactacatgtacttgttgctgctgctgaagtccgtggtgtacttcgccatcatcacatgctgcctgctgcggagaaccgccttctgctgcaacggcgagaagtctagggccaagcgatctggatctggagcaacaaacttctcactactcaaacaagcaggtgacgtggaggagaatcccgggcctactagtatggactggatttggcgcatccttttccttgtcggcgctgctaccggcgcgcattccttcgaagaagtgcagctggttgaatcaggtggcggcctggttcaacctggcggatctctgagactgagctgtgccgccagcggctacacctttaccgagtacacaatccactgggtccgacaggcccctggcaaaggacttgagtgggtcgccaacatcaaccccaacaatggcggcaccacctacaaccagaagttcgaggacagattcaccatcagccgggacaacagcaagaacaccctgtacctccagatgaactccctgagagccgaggacaccgccgtgtactattgtgccagaggctggaacttcgactactggggccagggaacactggtcaccgttagctctacgcgtgcctctacaaagggaccctccgtgtttcctctggctcccagcagcaagtctacaagcggaggaacagccgctctgggctgcctggtcaaggattactttcccgagcctgtgaccgtgtcctggaatagcggagcactgacaagcggcgtgcacacctttccagccgtgctgcaaagcagcggcctgtactctctgagcagcgtggtcacagtgcctagctctagcctgggcacccagacctacatctgcaatgtgaaccacaagcctagcaacaccaaggtggacaagagagtggaacccaagagctgtgaagtgaaaaccgactccaccgaccacgtgaagcccaaagagacagagaacaccaagcagcccagcaagagctgccacaagcccaaggccatcgtgcacaccgagaaagtgaacatgatgagcctgaccgtgctgggcctgcggatgctgttcgccaaaaccgtggccgtgaacttcctgctgaccgccaagctgttcttcctc

SEQ ID NO: 10022 - DNA, 2274 bp, Artificial Sequence
  Synthetic Polynucloetide
atggccttaccagtgaccgccttgctcctgccgctggccttgctgctccacgccgccaggccggaagtgcagctggttgaatctggcggaggactggttcagcctggcggatctctgagactgtcttgtgccgccagcggcttcagcttcagcgacttttggatgagctgggtccgacaggcccctggcaaaggacttgaatgggtcgccacaatcagccaggccggcagcgagaaggactacgtggactctgtgaagggcagattcaccatcagccgggacaacgccaagaagtccctgtacctccagatgaacagcctgagagccgaggacaccgccgtgtactattgtgcctctggcgtgtacagcttcgactacagaggccagggcaccctggtcacagtctcttctggtaccggcggaggcggatctggcggcggaggtagcggtggcggaggatctgaattcgacatcgtgatgacccagagccacaagttcatgagcaccagcgtgggcgacagagtgtccatcatctgcaaggccagccaggatgtgggcacagccgtggattggtatcagcagaagcctggacagagccccaagctgctgatctactgggccagcacaagacacaccggcgtgcccgatagattcacaggctctggcagcggcaccgatttcaccctggccatcacaaacgtgcagagcgaggacctggccgactacttctgccagcagtacaacagctaccctctgacctttggagccggcaccaagctggaaatcaagagactcgagggacagcctaaggccaatcctaccgtgacactgttccctccaagcagcgaagaactccaggccaacaaggccacacttgtgtgcctgatctccgacttctaccctggggctgtgacagtggcttggaaggccgatggatctcctgtgaaagccggcgtggaaaccaccaagccatccaagcagagcaacaacaaatacgccgccagctcctacctgagcctgacacctgagcagtggaagtcccacagatcctacagctgccaagtgacccacgaaggcagcaccgtggaaaagacagtggcccctacagagtgcagcggcagagccgattgcggctttaccagcgagagctaccagcagggcgtgctgagcgccaccatcctgtacgagatcctgctgggcaaggccaccctgtacgccgtgctggtgtctgccctggtgctgatggctatggtcaagcggaaggacagccggggacgcgccaagagaagcggatctggcgtgaagcagaccctgaatttcgacctgctgaagctggctggcgacgtggaatccaacccaggccctactagtatggactggatttggcgcatccttttccttgtcggcgctgctaccggcgcgcattccttcgaagaagtgcagctggttgaatcaggtggcggcctggttcaacctggcggatctctgagactgagctgtgccgccagcggctacacctttaccgagtacacaatccactgggtccgacaggcccctggcaaaggacttgagtgggtcgccaacatcaaccccaacaatggcggcaccacctacaaccagaagttcgaggacagattcaccatcagccgggacaacagcaagaacaccctgtacctccagatgaactccctgagagccgaggacaccgccgtgtactattgtgccagaggctggaacttcgactactggggccagggaacactggtcaccgttagctctacgcgtgcctctacaaagggaccctccgtgtttcctctggctcccagcagcaagtctacaagcggaggaacagccgctctgggctgcctggtcaaggattactttcccgagcctgtgaccgtgtcctggaatagcggagcactgacaagcggcgtgcacacctttccagccgtgctgcaaagcagcggcctgtactctctgagcagcgtggtcacagtgcctagctctagcctgggcacccagacctacatctgcaatgtgaaccacaagcctagcaacaccaaggtggacaagagagtggaacccaagagctgtatccccgaggacacattcttcccaagccccgagagcagctgcgacgtgaagctggtggaaaagagcttcgagacagacaccaacctgaacttccagaacctgagcgtgatcggcttcagaatcctgctgctgaaagtggccggctttaacctgctgatgaccctgcggctgtggtccagc

SEQ ID NO: 10023 - DNA, 2676 bp, Artificial Sequence
  Synthetic Polynucloetide
atggccttaccagtgaccgccttgctcctgccgctggccttgctgctccacgccgccaggccggaagtgcagctggttgaatctggcggaggactggttcagcctggcggatctctgagactgtcttgtgccgccagcggcttcagcttcagcgacttttggatgagctgggtccgacaggcccctggcaaaggacttgaatgggtcgccacaatcagccaggccggcagcgagaaggactacgtggactctgtgaagggcagattcaccatcagccgggacaacgccaagaagtccctgtacctccagatgaacagcctgagagccgaggacaccgccgtgtactattgtgcctctggcgtgtacagcttcgactacagaggccagggcaccctggtcacagtctcttctggtaccggcggaggcggatctggcggcggaggtagcggtggcggaggatctgaattcgacatcgtgatgacccagagccacaagttcatgagcaccagcgtgggcgacagagtgtccatcatctgcaaggccagccaggatgtgggcacagccgtggattggtatcagcagaagcctggacagagccccaagctgctgatctactgggccagcacaagacacaccggcgtgcccgatagattcacaggctctggcagcggcaccgatttcaccctggccatcacaaacgtgcagagcgaggacctggccgactacttctgccagcagtacaacagctaccctctgacctttggagccggcaccaagctggaaatcaagagactcgagatccagaaccctgatcctgccgtgtaccagctgcgggatagcaagagcagcgacaagagcgtgtgtctgttcaccgacttcgacagccagaccaacgtgtcccagagcaaggactccgacgtgtacatcaccgataagtgcgtgctggacatgcggagcatggacttcaagagcaactccgccgtggcctggtccaacaagtccgatttcgcctgcgccaacgccttcaacaacagcattatccccgaggacacattcttcccaagccccgagagcagctgcgacgtgaagctggtggaaaagagcttcgagacagacaccaacctgaacttccagaacctgagcgtgatcggcttcagaatcctgctgctgaaagtggccggctttaacctgctgatgaccctgcggctgtggtccagccgcgccaagagaagcggatctggcgtgaagcagaccctgaatttcgacctgctgaagctggctggcgacgtggaatccaacccaggccctactagtatggactggatttggcgcatccttttccttgtcggcgctgctaccggcgcgcattccgggccccagctccagctgcaagagtctggacctggcctggtcaagcctagcgagacactgagcctgacctgtaccgtgtccggcgatagcatcagcagcggcgattactactggggctggatcagacagcctcctggcaaaggactggaatggatcggccacatctactacagcggcgtgacctactacaaccccagcctgaagtccagagtgaccatcagcgtggacaccagccggaaccagttctccctgaagctgtctagcgtgacagccgccgataccgccgtgtactactgcaccagagaggacagcagcaactggcggagtagaggccagggaacactggtcacagttagctctggatccggcggaggcggaagtggaggcggaggatctggcggcggaggctctttcgaagaagtgcagctggttgaatcaggtggcggcctggttcaacctggcggatctctgagactgagctgtgccgccagcggctacacctttaccgagtacacaatccactgggtccgacaggcccctggcaaaggacttgagtgggtcgccaacatcaaccccaacaatggcggcaccacctacaaccagaagttcgaggacagattcaccatcagccgggacaacagcaagaacaccctgtacctccagatgaactccctgagagccgaggacaccgccgtgtactattgtgccagaggctggaacttcgactactggggccagggaacactggtcaccgttagctctacgcgtgaggacctgaagaacgtgttcccacctgaggtggccgtgttcgagcctagcgaggccgagatcagccacacccagaaagccaccctcgtgtgcctggctaccggcttctaccccgaccatgtggaactgtcttggtgggtcaacggcaaagaggtgcacagcggcgtgtgtaccgacccccagccactgaaagaacagcccgccctgaacgacagccggtactgcctgagcagcagactgagagtgtccgccaccttctggcagaacccccggaaccacttcagatgccaggtgcagttctacggcctgagcgagaacgacgagtggacccaggacagagccaagcccgtgacccagatcgtgtctgccgaagcctggggcagagccgattgcggctttaccagcgagagctaccagcagggcgtgctgagcgccaccatcctgtacgagatcctgctgggcaaggccaccctgtacgccgtgctggtgtctgccctggtgctgatggctatggtcaagcggaaggacagccgggga

SEQ ID NO: 10024 - DNA, 3252 bp, Artificial Sequence
  Synthetic Polynucloetide
atggccttaccagtgaccgccttgctcctgccgctggccttgctgctccacgccgccaggccggaagtgcagctggttgaatctggcggaggactggttcagcctggcggatctctgagactgtcttgtgccgccagcggcttcagcttcagcgacttttggatgagctgggtccgacaggcccctggcaaaggacttgaatgggtcgccacaatcagccaggccggcagcgagaaggactacgtggactctgtgaagggcagattcaccatcagccgggacaacgccaagaagtccctgtacctccagatgaacagcctgagagccgaggacaccgccgtgtactattgtgcctctggcgtgtacagcttcgactacagaggccagggcaccctggtcacagtctcttctggtaccggcggaggcggatctggcggcggaggtagcggtggcggaggatctgaattcgacatcgtgatgacccagagccacaagttcatgagcaccagcgtgggcgacagagtgtccatcatctgcaaggccagccaggatgtgggcacagccgtggattggtatcagcagaagcctggacagagccccaagctgctgatctactgggccagcacaagacacaccggcgtgcccgatagattcacaggctctggcagcggcaccgatttcaccctggccatcacaaacgtgcagagcgaggacctggccgactacttctgccagcagtacaacagctaccctctgacctttggagccggcaccaagctggaaatcaagagactcgaggacctgaagaacgtgttcccacctgaggtggccgtgttcgagcctagcgaggccgagatcagccacacccagaaagccaccctcgtgtgcctggctaccggcttctaccccgaccatgtggaactgtcttggtgggtcaacggcaaagaggtgcacagcggcgtgtctaccgacccccagccactgaaagaacagcccgccctgaacgacagccggtactgcctgagcagcagactgagagtgtccgccaccttctggcagaacccccggaaccacttcagatgccaggtgcagttctacggcctgagcgagaacgacgagtggacccaggacagagccaagcccgtgacccagatcgtgtctgccgaagcctggggcagagccgattgcggatcccagagcttcggcctgctggaccccaagctgtgctacctgctggatggcatcctgttcatctacggcgtgatcctgaccgccctgttcctgagagtgaagttcagcagaagcgccgacgcccctgcctaccagcagggacagaaccaactgtacaacgagctgaacctgggcagacgggaagagtacgacgtgctggacaagcggagaggcagggaccctgagatgggcggaaagccccagcggagaaagaacccccaggaaggactgtataacgaactccagaaagacaagatggccgaagcctacagcgagatcggcatgaagggcgagcggagaagaggcaagggccacgatggcctgtaccagggcctgagcaccgccaccaaggacacctatgacgccctgcacatgcaggccctgcctccaagaagggccaagcgatctggatctggagcaacaaacttctcactactcaaacaagcaggtgacgtggaggagaatcccgggcctactagtatggactggatttggcgcatccttttccttgtcggcgctgctaccggcgcgcattccgggccccagctccagctgcaagagtctggacctggcctggtcaagcctagcgagacactgagcctgacctgtaccgtgtccggcgatagcatcagcagcggcgattactactggggctggatcagacagcctcctggcaaaggactggaatggatcggccacatctactacagcggcgtgacctactacaaccccagcctgaagtccagagtgaccatcagcgtggacaccagccggaaccagttctccctgaagctgtctagcgtgacagccgccgataccgccgtgtactactgcaccagagaggacagcagcaactggcggagtagaggccagggaacactggtcacagttagctctggatccggcggaggcggaagtggaggcggaggatctggcggcggaggctctttcgaagaagtgcagctggttgaatcaggtggcggcctggttcaacctggcggatctctgagactgagctgtgccgccagcggctacacctttaccgagtacacaatccactgggtccgacaggcccctggcaaaggacttgagtgggtcgccaacatcaaccccaacaatggcggcaccacctacaaccagaagttcgaggacagattcaccatcagccgggacaacagcaagaacaccctgtacctccagatgaactccctgagagccgaggacaccgccgtgtactattgtgccagaggctggaacttcgactactggggccagggaacactggtcaccgttagctctacgcgtatccagaaccctgatcctgccgtgtaccagctgcgggatagcaagagcagcgacaagagcgtgtgtctgttcaccgacttcgacagccagaccaacgtgtcccagagcaaggactccgacgtgtacatcaccgataagaccgtgctggacatgcggagcatggacttcaagagcaactccgccgtggcctggtccaacaagtccgatttcgcctgcgccaacgccttcaacaacagcattatccccgaggacacattcttcccaagccccgagagcagctgcggtacccagagttttgggttgttggaccctaaattgtgctatctgttggacggaatcctgttcatttacggagtgatcctgaccgcattgttcctgcgggttaagttttccagatccgcagacgcacccgcttaccaacaagggcagaaccaactctacaatgaacttaatttggggcggagggaagagtacgacgttctggacaaaaggaggggacgagatcccgagatgggcggaaagcctcagcgaaggaagaatccgcaagaggggctttataacgaactccagaaagataaaatggcagaagcctatagtgagattgggatgaagggagaaaggaggaggggtaaaggtcacgatgggttgtaccaaggattgagcacagccactaaagatacctatgatgcgctccacatgcaggccctgccgccaaga

SEQ ID NO: 10025 - DNA, 2742 bp, Artificial Sequence
  Synthetic Polynucloetide
atggccttaccagtgaccgccttgctcctgccgctggccttgctgctccacgccgccaggccggaagtgcagctggttgaatctggcggaggactggttcagcctggcggatctctgagactgtcttgtgccgccagcggcttcagcttcagcgacttttggatgagctgggtccgacaggcccctggcaaaggacttgaatgggtcgccacaatcagccaggccggcagcgagaaggactacgtggactctgtgaagggcagattcaccatcagccgggacaacgccaagaagtccctgtacctccagatgaacagcctgagagccgaggacaccgccgtgtactattgtgcctctggcgtgtacagcttcgactacagaggccagggcaccctggtcacagtctcttctggtaccggcggaggcggatctggcggcggaggtagcggtggcggaggatctgaattcgacatcgtgatgacccagagccacaagttcatgagcaccagcgtgggcgacagagtgtccatcatctgcaaggccagccaggatgtgggcacagccgtggattggtatcagcagaagcctggacagagccccaagctgctgatctactgggccagcacaagacacaccggcgtgcccgatagattcacaggctctggcagcggcaccgatttcaccctggccatcacaaacgtgcagagcgaggacctggccgactacttctgccagcagtacaacagctaccctctgacctttggagccggcaccaagctggaaatcaagagactcgagggacagcctaaggccaatcctaccgtgacactgttccctccaagcagcgaagaactccaggccaacaaggccacacttgtgtgcctgatctccgacttctaccctggggctgtgacagtggcttggaaggccgatggatctcctgtgaaagccggcgtggaaaccaccaagccatccaagcagagcaacaacaaatacgccgccagctcctacctgagcctgacacctgagcagtggaagtcccacagatcctacagctgccaagtgacccacgaaggcagcaccgtggaaaagacagtggcccctacagagtgcagccccatcaagaccgatgtgattacaatggaccccaaggacaactgctccaaggacgccaacgataccctgctgctccagctgaccaacaccagcgcctactacatgtacttgttgctgctgctgaagtccgtggtgtacttcgccatcatcacatgctgcctgctgcggagaaccgccttctgctgcaacggcgagaagtctagggccaagcgatctggatctggagcaacaaacttctcactactcaaacaagcaggtgacgtggaggagaatcccgggcctactagtatggactggatttggcgcatccttttccttgtcggcgctgctaccggcgcgcattccgggccccagctccagctgcaagagtctggacctggcctggtcaagcctagcgagacactgagcctgacctgtaccgtgtccggcgatagcatcagcagcggcgattactactggggctggatcagacagcctcctggcaaaggactggaatggatcggccacatctactacagcggcgtgacctactacaaccccagcctgaagtccagagtgaccatcagcgtggacaccagccggaaccagttctccctgaagctgtctagcgtgacagccgccgataccgccgtgtactactgcaccagagaggacagcagcaactggcggagtagaggccagggaacactggtcacagttagctctggatccggcggaggcggaagtggaggcggaggatctggcggcggaggctctttcgaagaagtgcagctggttgaatcaggtggcggcctggttcaacctggcggatctctgagactgagctgtgccgccagcggctacacctttaccgagtacacaatccactgggtccgacaggcccctggcaaaggacttgagtgggtcgccaacatcaaccccaacaatggcggcaccacctacaaccagaagttcgaggacagattcaccatcagccgggacaacagcaagaacaccctgtacctccagatgaactccctgagagccgaggacaccgccgtgtactattgtgccagaggctggaacttcgactactggggccagggaacactggtcaccgttagctctacgcgtgcctctacaaagggaccctccgtgtttcctctggctcccagcagcaagtctacaagcggaggaacagccgctctgggctgcctggtcaaggattactttcccgagcctgtgaccgtgtcctggaatagcggagcactgacaagcggcgtgcacacctttccagccgtgctgcaaagcagcggcctgtactctctgagcagcgtggtcacagtgcctagctctagcctgggcacccagacctacatctgcaatgtgaaccacaagcctagcaacaccaaggtggacaagagagtggaacccaagagctgtgaagtgaaaaccgactccaccgaccacgtgaagcccaaagagacagagaacaccaagcagcccagcaagagctgccacaagcccaaggccatcgtgcacaccgagaaagtgaacatgatgagcctgaccgtgctgggcctgcggatgctgttcgccaaaaccgtggccgtgaacttcctgctgaccgccaagctgttcttcctc

SEQ ID NO: 10026 - DNA, 2685 bp, Artificial Sequence
  Synthetic Polynucloetide
atggccttaccagtgaccgccttgctcctgccgctggccttgctgctccacgccgccaggccggaagtgcagctggttgaatctggcggaggactggttcagcctggcggatctctgagactgtcttgtgccgccagcggcttcagcttcagcgacttttggatgagctgggtccgacaggcccctggcaaaggacttgaatgggtcgccacaatcagccaggccggcagcgagaaggactacgtggactctgtgaagggcagattcaccatcagccgggacaacgccaagaagtccctgtacctccagatgaacagcctgagagccgaggacaccgccgtgtactattgtgcctctggcgtgtacagcttcgactacagaggccagggcaccctggtcacagtctcttctggtaccggcggaggcggatctggcggcggaggtagcggtggcggaggatctgaattcgacatcgtgatgacccagagccacaagttcatgagcaccagcgtgggcgacagagtgtccatcatctgcaaggccagccaggatgtgggcacagccgtggattggtatcagcagaagcctggacagagccccaagctgctgatctactgggccagcacaagacacaccggcgtgcccgatagattcacaggctctggcagcggcaccgatttcaccctggccatcacaaacgtgcagagcgaggacctggccgactacttctgccagcagtacaacagctaccctctgacctttggagccggcaccaagctggaaatcaagagactcgagggacagcctaaggccaatcctaccgtgacactgttccctccaagcagcgaagaactccaggccaacaaggccacacttgtgtgcctgatctccgacttctaccctggggctgtgacagtggcttggaaggccgatggatctcctgtgaaagccggcgtggaaaccaccaagccatccaagcagagcaacaacaaatacgccgccagctcctacctgagcctgacacctgagcagtggaagtcccacagatcctacagctgccaagtgacccacgaaggcagcaccgtggaaaagacagtggcccctacagagtgcagcggcagagccgattgcggctttaccagcgagagctaccagcagggcgtgctgagcgccaccatcctgtacgagatcctgctgggcaaggccaccctgtacgccgtgctggtgtctgccctggtgctgatggctatggtcaagcggaaggacagccggggacgcgccaagagaagcggatctggcgtgaagcagaccctgaatttcgacctgctgaagctggctggcgacgtggaatccaacccaggccctactagtatggactggatttggcgcatccttttccttgtcggcgctgctaccggcgcgcattccgggccccagctccagctgcaagagtctggacctggcctggtcaagcctagcgagacactgagcctgacctgtaccgtgtccggcgatagcatcagcagcggcgattactactggggctggatcagacagcctcctggcaaaggactggaatggatcggccacatctactacagcggcgtgacctactacaaccccagcctgaagtccagagtgaccatcagcgtggacaccagccggaaccagttctccctgaagctgtctagcgtgacagccgccgataccgccgtgtactactgcaccagagaggacagcagcaactggcggagtagaggccagggaacactggtcacagttagctctggatccggcggaggcggaagtggaggcggaggatctggcggcggaggctctttcgaagaagtgcagctggttgaatcaggtggcggcctggttcaacctggcggatctctgagactgagctgtgccgccagcggctacacctttaccgagtacacaatccactgggtccgacaggcccctggcaaaggacttgagtgggtcgccaacatcaaccccaacaatggcggcaccacctacaaccagaagttcgaggacagattcaccatcagccgggacaacagcaagaacaccctgtacctccagatgaactccctgagagccgaggacaccgccgtgtactattgtgccagaggctggaacttcgactactggggccagggaacactggtcaccgttagctctacgcgtgcctctacaaagggaccctccgtgtttcctctggctcccagcagcaagtctacaagcggaggaacagccgctctgggctgcctggtcaaggattactttcccgagcctgtgaccgtgtcctggaatagcggagcactgacaagcggcgtgcacacctttccagccgtgctgcaaagcagcggcctgtactctctgagcagcgtggtcacagtgcctagctctagcctgggcacccagacctacatctgcaatgtgaaccacaagcctagcaacaccaaggtggacaagagagtggaacccaagagctgtatccccgaggacacattcttcccaagccccgagagcagctgcgacgtgaagctggtggaaaagagcttcgagacagacaccaacctgaacttccagaacctgagcgtgatcggcttcagaatcctgctgctgaaagtggccggctttaacctgctgatgaccctgcggctgtggtccagc

SEQ ID NO: 10027 - DNA, 2256 bp, Artificial Sequence
  Synthetic Polynucloetide
atggccttaccagtgaccgccttgctcctgccgctggccttgctgctccacgccgccaggccggaagtgcaggttttggagtctggcggaggactggttcagcctggcggatctctgagactgtcttgtgccgccagcggcttcaccttcagcaactttgccatgagctgggtccgacaggcccctggcaaaggacttgaatgggtgtccacaatcagcggcagcgccggcacaacagattacgccgattctgtgaagggcagattcaccatcagccgggacaacagcaagaaaaccctgtacctccagatgaacagcctgcgcgtggaagataccgccgtgtactactgtgccgatggcagaggccccttcttcgattatcgcggccagggcacactggtcaccgtttcttctggtaccggcggaggcggatctggcggcggaggtagcggtggcggaggatctgaattcgacatcgtgatgacccagagccacaagttcatgagcaccagcgtgggcgacagagtgtccatcatctgcaaggccagccaggatgtgggcacagccgtggattggtatcagcagaagcctggacagagccccaagctgctgatctactgggccagcacaagacacaccggcgtgcccgatagattcacaggctctggcagcggcaccgatttcaccctggccatcacaaacgtgcagagcgaggacctggccgactacttctgccagcagtacaacagctaccctctgacctttggagccggcaccaagctggaaatcaagagactcgaggacctgaagaacgtgttcccacctgaggtggccgtgttcgagcctagcgaggccgagatcagccacacccagaaagccaccctcgtgtgcctggctaccggcttctaccccgaccatgtggaactgtcttggtgggtcaacggcaaagaggtgcacagcggcgtgtgtaccgacccccagccactgaaagaacagcccgccctgaacgacagccggtactgcctgagcagcagactgagagtgtccgccaccttctggcagaacccccggaaccacttcagatgccaggtgcagttctacggcctgagcgagaacgacgagtggacccaggacagagccaagcccgtgacccagatcgtgtctgccgaagcctggggcagagccgattgcggctttaccagcgagagctaccagcagggcgtgctgagcgccaccatcctgtacgagatcctgctgggcaaggccaccctgtacgccgtgctggtgtctgccctggtgctgatggctatggtcaagcggaaggacagccggggaagggccaagcgatctggatctggagcaacaaacttctcactactcaaacaagcaggtgacgtggaggagaatcccgggcctactagtatggactggatttggcgcatccttttccttgtcggcgctgctaccggcgcgcattccttcgaagaagtgcagctggttgaatcaggtggcggcctggttcaacctggcggatctctgagactgagctgtgccgccagcggctacacctttaccgagtacacaatccactgggtccgacaggcccctggcaaaggacttgagtgggtcgccaacatcaaccccaacaatggcggcaccacctacaaccagaagttcgaggacagattcaccatcagccgggacaacagcaagaacaccctgtacctccagatgaactccctgagagccgaggacaccgccgtgtactattgtgccagaggctggaacttcgactactggggccagggaacactggtcaccgttagctctacgcgtatccagaaccctgatcctgccgtgtaccagctgcgggatagcaagagcagcgacaagagcgtgtgtctgttcaccgacttcgacagccagaccaacgtgtcccagagcaaggactccgacgtgtacatcaccgataagtgcgtgctggacatgcggagcatggacttcaagagcaactccgccgtggcctggtccaacaagtccgatttcgcctgcgccaacgccttcaacaacagcattatccccgaggacacattcttcccaagccccgagagcagctgcgacgtgaagctggtggaaaagagcttcgagacagacaccaacctgaacttccagaacctgagcgtgatcggcttcagaatcctgctgctgaaagtggccggctttaacctgctgatgaccctgcggctgtggtccagc

SEQ ID NO: 10028 - DNA, 2259 bp, Artificial Sequence
  Synthetic Polynucloetide
atggccttaccagtgaccgccttgctcctgccgctggccttgctgctccacgccgccaggccggacatcgtgatgacccagagccacaagttcatgagcaccagcgtgggcgacagagtgtccatcatctgcaaggccagccaggatgtgggcacagccgtggattggtatcagcagaagcctggacagagccccaagctgctgatctactgggccagcacaagacacaccggcgtgcccgatagattcacaggctctggcagcggcaccgatttcaccctggccatcacaaacgtgcagagcgaggacctggccgactacttctgccagcagtacaacagctaccctctgacctttggagccggcaccaagctggaaatcaagagactcgaggacctgaagaacgtgttcccacctgaggtggccgtgttcgagcctagcgaggccgagatcagccacacccagaaagccaccctcgtgtgcctggctaccggcttctaccccgaccatgtggaactgtcttggtgggtcaacggcaaagaggtgcacagcggcgtgtgtaccgacccccagccactgaaagaacagcccgccctgaacgacagccggtactgcctgagcagcagactgagagtgtccgccaccttctggcagaacccccggaaccacttcagatgccaggtgcagttctacggcctgagcgagaacgacgagtggacccaggacagagccaagcccgtgacccagatcgtgtctgccgaagcctggggcagagccgattgcggctttaccagcgagagctaccagcagggcgtgctgagcgccaccatcctgtacgagatcctgctgggcaaggccaccctgtacgccgtgctggtgtctgccctggtgctgatggctatggtcaagcggaaggacagccggggaagggccaagcgatctggatctggagcaacaaacttctcactactcaaacaagcaggtgacgtggaggagaatcccgggcctactagtatggactggatttggcgcatccttttccttgtcggcgctgctaccggcgcccattccgggcccgaagtgcagctggttgaatctggcggaggactggttcaggctggcggatctctgagactgtcttgtgccgccagcggcagaacctttagcatgggctggtttagacaggcccctggcaaagagagagagttcgtcgccgccatcacatactctggcggcagcccttactacgccgactctgtgaagggcagattcaccatcagccgggacaacgccaagaacaccgtgtacctccagatgaacagcctgaagcctgaggacaccgccgtgtactactgcgccgccaatccaacatacggcagcgactggaacgccgagaattggggccagggaacccaagtgacagtgtctagcggatccggcggcggaggatctggcggaggcggatctgggggcggaggctctttcgaagaagtgcagctggttgaatcaggtggcggcctggttcaacctggcggatctctgagactgagctgtgccgccagcggctacacctttaccgagtacacaatccactgggtccgacaggcccctggcaaaggacttgagtgggtcgccaacatcaaccccaacaatggcggcaccacctacaaccagaagttcgaggacagattcaccatcagccgggacaacagcaagaacaccctgtacctccagatgaactccctgagagccgaggacaccgccgtgtactattgtgccagaggctggaacttcgactactggggccagggaacactggtcaccgttagctctacgcgtatccagaaccctgatcctgccgtgtaccagctgcgggatagcaagagcagcgacaagagcgtgtgtctgttcaccgacttcgacagccagaccaacgtgtcccagagcaaggactccgacgtgtacatcaccgataagtgcgtgctggacatgcggagcatggacttcaagagcaactccgccgtggcctggtccaacaagtccgatttcgcctgcgccaacgccttcaacaacagcattatccccgaggacacattcttcccaagccccgagagcagctgcgacgtgaagctggtggaaaagagcttcgagacagacaccaacctgaacttccagaacctgagcgtgatcggcttcagaatcctgctgctgaaagtggccggctttaacctgctgatgaccctgcggctgtggtccagc

SEQ ID NO: 10029 - DNA, 2640 bp, Artificial Sequence
  Synthetic Polynucloetide
atggccttaccagtgaccgccttgctcctgccgctggccttgctgctccacgccgccaggccggacatcgtgatgacccagagccacaagttcatgagcaccagcgtgggcgacagagtgtccatcatctgcaaggccagccaggatgtgggcacagccgtggattggtatcagcagaagcctggacagagccccaagctgctgatctactgggccagcacaagacacaccggcgtgcccgatagattcacaggctctggcagcggcaccgatttcaccctggccatcacaaacgtgcagagcgaggacctggccgactacttctgccagcagtacaacagctaccctctgacctttggagccggcaccaagctggaaatcaagagactcgaggacctgaagaacgtgttcccacctgaggtggccgtgttcgagcctagcgaggccgagatcagccacacccagaaagccaccctcgtgtgcctggctaccggcttctaccccgaccatgtggaactgtcttggtgggtcaacggcaaagaggtgcacagcggcgtgtgtaccgacccccagccactgaaagaacagcccgccctgaacgacagccggtactgcctgagcagcagactgagagtgtccgccaccttctggcagaacccccggaaccacttcagatgccaggtgcagttctacggcctgagcgagaacgacgagtggacccaggacagagccaagcccgtgacccagatcgtgtctgccgaagcctggggcagagccgattgcggctttaccagcgagagctaccagcagggcgtgctgagcgccaccatcctgtacgagatcctgctgggcaaggccaccctgtacgccgtgctggtgtctgccctggtgctgatggctatggtcaagcggaaggacagccggggaagggccaagcgatctggatctggagcaacaaacttctcactactcaaacaagcaggtgacgtggaggagaatcccgggcctactagtatggactggatttggcgcatccttttccttgtcggcgctgctaccggcgcccattcccaactgcaactgcaagagtctggccctggcctggtcaagccttctgaaaccctgagcctgacctgtaccgtgtccggcggctctatcagcagcggcgattactactggggctggatcagacagcctccaggcaagggactcgaatggatcggcagcatcagctacagcggctccacctactacaacccaagcctgaagtccagagtgaccatcagcgtggacaccagcagaaaccagttctccctgaagctgagcagcgtgacagccgccgatacagccgtgtattattgcaccagagaggacagcagcaactggcggagtagaggacagggcacactggtcacagtgtcctcttctggaggcggtggaagcggtggaggaggatctgaagtgcagctggttgaatctggcggaggactggttcaggctggcggatctctgagactgtcttgtgccgccagcggcagaacctttagcatgggctggtttagacaggcccctggcaaagagagagagttcgtcgccgccatcacatactctggcggcagcccttactacgccgactctgtgaagggcagattcaccatcagccgggacaacgccaagaacaccgtgtacctccagatgaacagcctgaagcctgaggacaccgccgtgtactactgcgccgccaatccaacatacggcagcgactggaacgccgagaattggggccagggaacccaagtgacagtgtctagcggatccggcggcggaggatctggcggaggcggatctgggggcggaggctctttcgaagaagtgcagctggttgaatcaggtggcggcctggttcaacctggcggatctctgagactgagctgtgccgccagcggctacacctttaccgagtacacaatccactgggtccgacaggcccctggcaaaggacttgagtgggtcgccaacatcaaccccaacaatggcggcaccacctacaaccagaagttcgaggacagattcaccatcagccgggacaacagcaagaacaccctgtacctccagatgaactccctgagagccgaggacaccgccgtgtactattgtgccagaggctggaacttcgactactggggccagggaacactggtcaccgttagctctacgcgtatccagaaccctgatcctgccgtgtaccagctgcgggatagcaagagcagcgacaagagcgtgtgtctgttcaccgacttcgacagccagaccaacgtgtcccagagcaaggactccgacgtgtacatcaccgataagtgcgtgctggacatgcggagcatggacttcaagagcaactccgccgtggcctggtccaacaagtccgatttcgcctgcgccaacgccttcaacaacagcattatccccgaggacacattcttcccaagccccgagagcagctgcgacgtgaagctggtggaaaagagcttcgagacagacaccaacctgaacttccagaacctgagcgtgatcggcttcagaatcctgctgctgaaagtggccggctttaacctgctgatgaccctgcggctgtggtccagc

SEQ ID NO: 10030 - DNA, 2667 bp, Artificial Sequence
  Synthetic Polynucloetide
atggccttaccagtgaccgccttgctcctgccgctggccttgctgctccacgccgccaggccggaagtgcaggttttggagtctggcggaggactggttcagcctggcggatctctgagactgtcttgtgccgccagcggcttcaccttcagcaactttgccatgagctgggtccgacaggcccctggcaaaggacttgaatgggtgtccacaatcagcggcagcgccggcacaacagattacgccgattctgtgaagggcagattcaccatcagccgggacaacagcaagaaaaccctgtacctccagatgaacagcctgcgcgtggaagataccgccgtgtactactgtgccgatggcagaggccccttcttcgattatcgcggccagggcacactggtcaccgtttcttctggtaccggcggaggcggatctggcggcggaggtagcggtggcggaggatctgaattcgacatcgtgatgacccagagccacaagttcatgagcaccagcgtgggcgacagagtgtccatcatctgcaaggccagccaggatgtgggcacagccgtggattggtatcagcagaagcctggacagagccccaagctgctgatctactgggccagcacaagacacaccggcgtgcccgatagattcacaggctctggcagcggcaccgatttcaccctggccatcacaaacgtgcagagcgaggacctggccgactacttctgccagcagtacaacagctaccctctgacctttggagccggcaccaagctggaaatcaagagactcgaggacctgaagaacgtgttcccacctgaggtggccgtgttcgagcctagcgaggccgagatcagccacacccagaaagccaccctcgtgtgcctggctaccggcttctaccccgaccatgtggaactgtcttggtgggtcaacggcaaagaggtgcacagcggcgtgtgtaccgacccccagccactgaaagaacagcccgccctgaacgacagccggtactgcctgagcagcagactgagagtgtccgccaccttctggcagaacccccggaaccacttcagatgccaggtgcagttctacggcctgagcgagaacgacgagtggacccaggacagagccaagcccgtgacccagatcgtgtctgccgaagcctggggcagagccgattgcggctttaccagcgagagctaccagcagggcgtgctgagcgccaccatcctgtacgagatcctgctgggcaaggccaccctgtacgccgtgctggtgtctgccctggtgctgatggctatggtcaagcggaaggacagccggggaagggccaagcgatctggatctggagcaacaaacttctcactactcaaacaagcaggtgacgtggaggagaatcccgggcctactagtatggactggatttggcgcatccttttccttgtcggcgctgctaccggcgcccattccgggcccgaagtgcagctggttgaatctggcggaggactggttcaggctggcggatctctgagactgtcttgtgccgccagcggcagaacctttagcatgggctggtttagacaggcccctggcaaagagagagagttcgtcgccgccatcacatacagcggcggcagcccttactacgcctcttctgtcagaggccggttcaccatcagccgggacaacgccaagaacaccgtgtacctccagatgaacagcctgaagccagaggacaccgccgtgtactactgtgccgccaatccaacctacggcagcgactggaatgccgagaattggggccagggcacccaagtgacagtgtctagtggatccggcggcggaggatctggcggaggcggatctgggggcggaggctctttcgaagaagtgcagctggttgaatcaggtggcggcctggttcaacctggcggatctctgagactgagctgtgccgccagcggctacacctttaccgagtacacaatccactgggtccgacaggcccctggcaaaggacttgagtgggtcgccaacatcaaccccaacaatggcggcaccacctacaaccagaagttcgaggacagattcaccatcagccgggacaacagcaagaacaccctgtacctccagatgaactccctgagagccgaggacaccgccgtgtactattgtgccagaggctggaacttcgactactggggccagggaacactggtcaccgttagctctacgcgtatccagaaccctgatcctgccgtgtaccagctgcgggatagcaagagcagcgacaagagcgtgtgtctgttcaccgacttcgacagccagaccaacgtgtcccagagcaaggactccgacgtgtacatcaccgataagtgcgtgctggacatgcggagcatggacttcaagagcaactccgccgtggcctggtccaacaagtccgatttcgcctgcgccaacgccttcaacaacagcattatccccgaggacacattcttcccaagccccgagagcagctgcgacgtgaagctggtggaaaagagcttcgagacagacaccaacctgaacttccagaacctgagcgtgatcggcttcagaatcctgctgctgaaagtggccggctttaacctgctgatgaccctgcggctgtggtccagc

SEQ ID NO: 10031 - DNA, 2181 bp, Artificial Sequence
  Synthetic Polynucloetide
atggccttaccagtgaccgccttgctcctgccgctggccttgctgctccacgccgccaggccggagatcgtgctgacacagtctcccgccacactgtcactgtctccaggcgaaagagccacactgagctgtagcgccaccagcagcgtgtcctacatccactggtatcagcagaagcccggacaggcccctagactgctgatctacagcaccagcaatctggcctctggcatccccgccagattttctggctctggaagcggcaccgacttcaccctgacaatcggcagactggaacccgaggacttcgccgtgtactactgccagcagagaagcagcagccccttcacctttggacagggcaccaaggtggaaatcaagagaggcggaggcggaagtggaggcggaggatctggcggcggaggctctgaagtgcagctggttgagtctggcggcggactggttaagcctgagggaagcctgagactgtcttgtgccgccagcggcttcaccttcagcagatacggcatgagctgggtccgacaggctcctggcaaaggactggaatgggtgtccacaatttccggcggaggcacctacatctactaccccgatagcgtgaagggcagattcaccatctccagagacaacgccaagaacagcctgttcctccagatgaactccctgagagccgaggacacagccgtgtattattgcgctcgggacaactacggcagaaactacgactacggcatggactactggggccagggcacactggttaccgttagctctacgcgtgagcagaaactgatctcggaagaggatctggcgaagcccaccacgacgccagcgccgcgaccaccaacaccggcgcccaccatcgcgtcgcagcccctgtccctgcgcccagaggcgtgccggccagcggcggggggcgcagtgcacacgagggggctggacttcgcctgtgacatctacatctgggcgcccttggccgggacttgtggggtccttctcctgtcactggttatcaccctttactgcaaacggggcagaaagaaactcctgtatatattcaaacaaccatttatgagaccagtacaaactactcaagaggaagatggctgtagctgccgatttccagaagaagaagaaggaggatgtgaactgagagtgaagttcagcaggagcgcagacgcccccgcgtaccagcagggccagaaccagctctataacgagctgaatctaggacgaagagaggagtacgatgttttggacaagagacgtggccgggaccctgagatggggggaaagccgagaaggaagaaccctcaggaaggcctgtacaatgaactgcagaaagataagatggcggaggcctacagtgagattgggatgaaaggcgagcgccggaggggcaaggggcacgatggcctttaccagggtctcagtacagccaccaaggacacctacgacgcccttcacatgcaggccctgccccctcgctctagtggctccggcgagggcagaggaagtctactaacctgcggagatgtggaagaaaatcctggcccacatatgaccgagtacaagcccacggtgcgcctcgccacccgcgacgacgtccccagggccgtacgcaccctcgccgccgcgttcgccgactaccccgccacgcgccacaccgtcgatccggaccgccacatcgagcgggtcaccgagctgcaagaactcttcctcacgcgcgtcgggctcgacatcggcaaggtgtgggtcgcggacgacggcgccgcggtggcggtctggaccacgccggagagcgtcgaagcgggggcggtgttcgccgagatcggcccgcgcatggccgagttgagcggttcccggctggccgcgcagcaacagatggaaggcctcctggcgccgcaccggcccaaggagcccgcgtggttcctggccaccgtcggcgtctcgcccgaccaccagggcaagggtctgggcagcgccgtcgtgctccccggagtggaggcggccgagcgcgccggggtgcccgccttcctggagacctccgcgccccgcaacctccccttctacgagcggctcggcttcaccgtcaccgccgacgtcgaggtgcccgaaggaccgcgcacctggtgcatgacccgcaagcccggtgcctga

SEQ ID NO: 10032 - DNA, 2163 bp, Artificial Sequence
  Synthetic Polynucloetide
atggccttaccagtgaccgccttgctcctgccgctggccttgctgctccacgccgccaggccggagatcgtgctgacacagtctcccgccacactgtcactgtctccaggcgaaagagccacactgagctgtagcgccaccagcagcgtgtcctacatccactggtatcagcagaagcccggacaggcccctagactgctgatctacagcaccagcaatctggcctctggcatccccgccagattttctggctctggaagcggcaccgacttcaccctgacaatcggcagactggaacccgaggacttcgccgtgtactactgccagcagagaagcagcagccccttcacctttggacagggcaccaaggtggaaatcaagagaggcggaggcggaagtggaggcggaggatctggcggcggaggctctgaagtgcagctggttgagtctggcggcggactggttaagcctgagggaagcctgagactgtcttgtgccgccagcggcttcaccttcagcagatacggcatgagctgggtccgacaggctcctggcaaaggactggaatgggtgtccacaatttccggcggaggcacctacatctactaccccgatagcgtgaagggcagattcaccatctccagagacaacgccaagaacagcctgttcctccagatgaactccctgagagccgaggacacagccgtgtattattgcgctcgggacaactacggcagaaactacgactacggcatggactactggggccagggcacactggttaccgttagctctacgcgtgagcagaaactgatctcggaagaggatctgaaaattgaagttatgtatcctcctccttacctagacaatgagaagagcaatggaaccattatccatgtgaaagggaaacacctttgtccaagtcccctatttcccggaccttctaagcccttttgggtgctggtggtggttgggggagtcctggcttgctatagcttgctagtaacagtggcctttattattttctgggtgaggagtaagaggagcaggctcctgcacagtgactacatgaacatgactccacgccgccccggacccacccgcaagcattaccagccctatgccccaccacgcgacttcgcagcctatcgctccagagtgaagttcagcaggagcgcagacgcccccgcgtaccagcagggccagaaccagctctataacgagctcaatctaggacgaagagaggagtacgatgttttggacaagagacgtggccgggaccctgagatggggggaaagccgagaaggaagaaccctcaggaaggcctgtacaatgaactgcagaaagataagatggcggaggcctacagtgagattgggatgaaaggcgagcgccggaggggcaaggggcacgatggcctttaccagggtctcagtacagccaccaaggacacctacgacgcccttcacatgcaggccctgccccctcgctctagtggctccggcgagggcagaggaagtctactaacctgcggagatgtggaagaaaatcctggcccacatatgaccgagtacaagcccacggtgcgcctcgccacccgcgacgacgtccccagggccgtacgcaccctcgccgccgcgttcgccgactaccccgccacgcgccacaccgtcgatccggaccgccacatcgagcgggtcaccgagctgcaagaactcttcctcacgcgcgtcgggctcgacatcggcaaggtgtgggtcgcggacgacggcgccgcggtggcggtctggaccacgccggagagcgtcgaagcgggggcggtgttcgccgagatcggcccgcgcatggccgagttgagcggttcccggctggccgcgcagcaacagatggaaggcctcctggcgccgcaccggcccaaggagcccgcgtggttcctggccaccgtcggcgtctcgcccgaccaccagggcaagggtctgggcagcgccgtcgtgctccccggagtggaggcggccgagcgcgccggggtgcccgccttcctggagacctccgcgccccgcaacctccccttctacgagcggctcggcttcaccgtcaccgccgacgtcgaggtgcccgaaggaccgcgcacctggtgcatgacccgcaagcccggtgcctga

SEQ ID NO: 10033 - DNA, 1491 bp, Artificial Sequence
  Synthetic Polynucloetide
atggccttaccagtgaccgccttgctcctgccgctggccttgctgctccacgccgccaggccggagatcgtgctgacacagtctcccgccacactgtcactgtctccaggcgaaagagccacactgagctgtagcgccaccagcagcgtgtcctacatccactggtatcagcagaagcccggacaggcccctagactgctgatctacagcaccagcaatctggcctctggcatccccgccagattttctggctctggaagcggcaccgacttcaccctgacaatcggcagactggaacccgaggacttcgccgtgtactactgccagcagagaagcagcagccccttcacctttggacagggcaccaaggtggaaatcaagagaggcggaggcggaagtggaggcggaggatctggcggcggaggctctgaagtgcagctggttgagtctggcggcggactggttaagcctgagggaagcctgagactgtcttgtgccgccagcggcttcaccttcagcagatacggcatgagctgggtccgacaggctcctggcaaaggactggaatgggtgtccacaatttccggcggaggcacctacatctactaccccgatagcgtgaagggcagattcaccatctccagagacaacgccaagaacagcctgttcctccagatgaactccctgagagccgaggacacagccgtgtattattgcgctcgggacaactacggcagaaactacgactacggcatggactactggggccagggcacactggttaccgttagctctacgcgtgagcagaaactgatctcggaagaggatctgaaaattgaagttatgtatcctcctccttacctagacaatgagaagagcaatggaaccattatccatgtgaaagggaaacacctttgtccaagtcccctatttcccggaccttctaagcccttttgggtgctggtggtggttgggggagtcctggcttgctatagcttgctagtaacagtggcctttattattttctgggtgaggagtaagaggagcaggctcctgcacagtgactacatgaacatgactccacgccgccccggacccacccgcaagcattaccagccctatgccccaccacgcgacttcgcagcctatcgctccagagtgaagttcagcaggagcgcagacgcccccgcgtaccagcagggccagaaccagctctataacgagctcaatctaggacgaagagaggagtacgatgttttggacaagagacgtggccgggaccctgagatggggggaaagccgagaaggaagaaccctcaggaaggcctgtacaatgaactgcagaaagataagatggcggaggcctacagtgagattgggatgaaaggcgagcgccggaggggcaaggggcacgatggcctttaccagggtctcagtacagccaccaaggacacctacgacgcccttcacatgcaggccctgccccctcgc

SEQ ID NO: 10034 - DNA, 1512 bp, Artificial Sequence
  Synthetic Polynucloetide
atggccttaccagtgaccgccttgctcctgccgctggccttgctgctccacgccgccaggccggagatcgtgctgacacagtctcccgccacactgtcactgtctccaggcgaaagagccacactgagctgtagcgccaccagcagcgtgtcctacatccactggtatcagcagaagcccggacaggcccctagactgctgatctacagcaccagcaatctggcctctggcatccccgccagattttctggctctggaagcggcaccgacttcaccctgacaatcggcagactggaacccgaggacttcgccgtgtactactgccagcagagaagcagcagccccttcacctttggacagggcaccaaggtggaaatcaagagaggcggaggcggaagtggaggcggaggatctggcggcggaggctctgaagtgcagctggttgagtctggcggcggactggttaagcctgagggaagcctgagactgtcttgtgccgccagcggcttcaccttcagcagatacggcatgagctgggtccgacaggctcctggcaaaggactggaatgggtgtccacaatttccggcggaggcacctacatctactaccccgatagcgtgaagggcagattcaccatctccagagacaacgccaagaacagcctgttcctccagatgaactccctgagagccgaggacacagccgtgtattattgcgctcgggacaactacggcagaaactacgactacggcatggactactggggccagggcacactggttaccgttagctctacgcgtgagcagaaactgatctcggaagaggatctggcgaagcccaccacgacgccagcgccgcgaccaccaacaccggcgcccaccatcgcgtcgcagcccctgtccctgcgcccagaggcgtgccggccagcggcggggggcgcagtgcacacgagggggctggacttcgcctgtgacatctacatctgggcgcccttggccgggacttgtggggtccttctcctgtcactggttatcaccctttactgcaaacggggcagaaagaaactcctgtatatattcaaacaaccatttatgagaccagtacaaactactcaagaggaagatggctgtagctgccgatttccagaagaagaagaaggaggatgtgaactgagagtgaagttcagcaggagcgcagacgcccccgcgtaccagcagggccagaaccagctctataacgagctgaatctaggacgaagagaggagtacgatgttttggacaagagacgtggccgggaccctgagatggggggaaagccgagaaggaagaaccctcaggaaggcctgtacaatgaactgcagaaagataagatggcggaggcctacagtgagattgggatgaaaggcgagcgccggaggggcaaggggcacgatggcctttaccagggtctcagtacagccaccaaggacacctacgacgcccttcacatgcaggccctgccccctcgctga

SEQ ID NO: 10035 - DNA, 1512 bp, Artificial Sequence
  Synthetic Polynucloetide
atggccttaccagtgaccgccttgctcctgccgctggccttgctgctccacgccgccaggccggaagtgcagctggttgagtctggcggcggactggttaagcctgagggaagcctgagactgtcttgtgccgccagcggcttcaccttcagcagatacggcatgagctgggtccgacaggctcctggcaaaggactggaatgggtgtccacaatttccggcggaggcacctacatctactaccccgatagcgtgaagggcagattcaccatctccagagacaacgccaagaacagcctgttcctccagatgaactccctgagagccgaggacacagccgtgtattattgcgctcgggacaactacggcagaaactacgactacggcatggactactggggccagggcacactggttaccgttagctctggcggaggcggaagtggaggcggaggatctggcggcggaggctctgagatcgtgctgacacagtctcccgccacactgtcactgtctccaggcgaaagagccacactgagctgtagcgccaccagcagcgtgtcctacatccactggtatcagcagaagcccggacaggcccctagactgctgatctacagcaccagcaatctggcctctggcatccccgccagattttctggctctggaagcggcaccgacttcaccctgacaatcggcagactggaacccgaggacttcgccgtgtactactgccagcagagaagcagcagccccttcacctttggacagggcaccaaggtggaaatcaagagaacgcgtgagcagaaactgatctcggaagaggatctggcgaagcccaccacgacgccagcgccgcgaccaccaacaccggcgcccaccatcgcgtcgcagcccctgtccctgcgcccagaggcgtgccggccagcggcggggggcgcagtgcacacgagggggctggacttcgcctgtgacatctacatctgggcgcccttggccgggacttgtggggtccttctcctgtcactggttatcaccctttactgcaaacggggcagaaagaaactcctgtatatattcaaacaaccatttatgagaccagtacaaactactcaagaggaagatggctgtagctgccgatttccagaagaagaagaaggaggatgtgaactgagagtgaagttcagcaggagcgcagacgcccccgcgtaccagcagggccagaaccagctctataacgagctgaatctaggacgaagagaggagtacgatgttttggacaagagacgtggccgggaccctgagatggggggaaagccgagaaggaagaaccctcaggaaggcctgtacaatgaactgcagaaagataagatggcggaggcctacagtgagattgggatgaaaggcgagcgccggaggggcaaggggcacgatggcctttaccagggtctcagtacagccaccaaggacacctacgacgcccttcacatgcaggccctgccccctcgctga

SEQ ID NO: 10036 - DNA, 2751 bp, Artificial Sequence
  Synthetic Polynucloetide
atggccttaccagtgaccgccttgctcctgccgctggccttgctgctccacgccgccaggccggagatcgtgctgacacagtctcccgccacactgtcactgtctccaggcgaaagagccacactgagctgtagcgccaccagcagcgtgtcctacatccactggtatcagcagaagcccggacaggcccctagactgctgatctacagcaccagcaatctggcctctggcatccccgccagattttctggctctggaagcggcaccgacttcaccctgacaatcggcagactggaacccgaggacttcgccgtgtactactgccagcagagaagcagcagccccttcacctttggacagggcaccaaggtggaaatcaagagaggcggaggcggaagtggaggcggaggatctggcggcggaggctctgaagtgcagctggttgagtctggcggcggactggttaagcctgagggaagcctgagactgtcttgtgccgccagcggcttcaccttcagcagatacggcatgagctgggtccgacaggctcctggcaaaggactggaatgggtgtccacaatttccggcggaggcacctacatctactaccccgatagcgtgaagggcagattcaccatctccagagacaacgccaagaacagcctgttcctccagatgaactccctgagagccgaggacacagccgtgtattattgcgctcgggacaactacggcagaaactacgactacggcatggactactggggccagggcacactggttaccgttagctctacgcgtgagcagaaactgatctcggaagaggatctggcgaagcccaccacgacgccagcgccgcgaccaccaacaccggcgcccaccatcgcgtcgcagcccctgtccctgcgcccagaggcgtgccggccagcggcggggggcgcagtgcacacgagggggctggacttcgcctgtgacatctacatctgggcgcccttggccgggacttgtggggtccttctcctgtcactggttatcaccctttactgcgggcgcgccagagtgaagttcagcaggagcgcagacgcccccgcgtaccagcagggccagaaccagctctataacgagctgaatctaggacgaagagaggagtacgatgttttggacaagagacgtggccgggaccctgagatggggggaaagccgagaaggaagaaccctcaggaaggcctgtacaatgaactgcagaaagataagatggcggaggcctacagtgagattgggatgaaaggcgagcgccggaggggcaaggggcacgatggcctttaccagggtctcagtacagccaccaaggacacctacgacgcccttcacatgcaggccctgccccctcgctctagaggatctggagcaacaaacttctcactactcaaacaagcaggtgacgtggaggagaatcccgggcctgggatccacatggccacttacgaggttctctgtgaggtggcgcggaaactgggcacggatgacagggaagtggtattgttcctcctaaacgtgttcatacctcaacccacactggcccaattaattggagctcttagagctttaaaggaggagggcaggttaacgtttcccctgttagcggaatgtctgtttcgtgcaggtcgcagagacctcttgcgcgacctgcttcacttagacccgcgttttttagagcgccacctagcgggcacaatgagttatttcagcccttatcagctcactgttctccacgtagacggggagctgtgtgcgagggatattaggtctttgatatttttaagcaaggacactatagggtctcgcagcacaccacagacattcttacactgggtgtactgtatggaaaacttagacctactgggtcccactgacgtggatgccctaatgtcaatgcttagatctttgtcaagagtagacctacagcgccaagtgcaaaccctaatgggccttcacctttccggcccatcacactcccaacactatcgccatacaccactcgagaccgatttctacgactacaaggacgacgatgacaagactagtggctccggcgagggcagaggaagtctactaacctgcggagatgtggaagaaaatcctggcccacatatgaccgagtacaagcccacggtgcgcctcgccacccgcgacgacgtccccagggccgtacgcaccctcgccgccgcgttcgccgactaccccgccacgcgccacaccgtcgatccggaccgccacatcgagcgggtcaccgagctgcaagaactcttcctcacgcgcgtcgggctcgacatcggcaaggtgtgggtcgcggacgacggcgccgcggtggcggtctggaccacgccggagagcgtcgaagcgggggcggtgttcgccgagatcggcccgcgcatggccgagttgagcggttcccggctggccgcgcagcaacagatggaaggcctcctggcgccgcaccggcccaaggagcccgcgtggttcctggccaccgtcggcgtctcgcccgaccaccagggcaagggtctgggcagcgccgtcgtgctccccggagtggaggcggccgagcgcgccggggtgcccgccttcctggagacctccgcgccccgcaacctccccttctacgagcggctcggcttcaccgtcaccgccgacgtcgaggtgcccgaaggaccgcgcacctggtgcatgacccgcaagcccggtgcctga

SEQ ID NO: 10037 - DNA, 2571 bp, Artificial Sequence
  Synthetic Polynucloetide
atggccttaccagtgaccgccttgctcctgccgctggccttgctgctccacgccgccaggccggagatcgtgctgacacagtctcccgccacactgtcactgtctccaggcgaaagagccacactgagctgtagcgccaccagcagcgtgtcctacatccactggtatcagcagaagcccggacaggcccctagactgctgatctacagcaccagcaatctggcctctggcatccccgccagattttctggctctggaagcggcaccgacttcaccctgacaatcggcagactggaacccgaggacttcgccgtgtactactgccagcagagaagcagcagccccttcacctttggacagggcaccaaggtggaaatcaagagactcgagatccagaaccctgatcctgccgtgtaccagctgcgggatagcaagagcagcgacaagagcgtgtgtctgttcaccgacttcgacagccagaccaacgtgtcccagagcaaggactccgacgtgtacatcaccgataagtgcgtgctggacatgcggagcatggacttcaagagcaactccgccgtggcctggtccaacaagtccgatttcgcctgcgccaacgccttcaacaacagcattatccccgaggacacattcttcccaagcagcgacgtgccctgcgacgtgaagctggtggaaaagagcttcgagacagacaccaacctgaacttccagaacctgagcgtgatcggcttcagaatcctgctgctgaaagtggccggctttaacctgctgatgaccctgcggctgtggtccagccgcgccaagagaagcggatctggcgtgaagcagaccctgaatttcgacctgctgaagctggctggcgacgtggaatccaacccaggccctactagtatggactggatttggcgcatccttttccttgtcggcgctgctaccggcgcgcattccttcgaagaagtgcagctggttgagtctggcggcggactggttaagcctgagggaagcctgagactgtcttgtgccgccagcggcttcaccttcagcagatacggcatgagctgggtccgacaggctcctggcaaaggactggaatgggtgtccacaatttccggcggaggcacctacatctactaccccgatagcgtgaagggcagattcaccatctccagagacaacgccaagaacagcctgttcctccagatgaactccctgagagccgaggacacagccgtgtattattgcgctcgggacaactacggcagaaactacgactacggcatggactactggggccagggcacactggttaccgttagctctacgcgtgaggacctgaagaacgtgttcccacctgaggtggccgtgttcgagcctagcaaggccgagatcgcccacacccagaaagccaccctcgtgtgcctggctaccggcttctaccccgaccatgtggaactgtcttggtgggtcaacggcaaagaggtgcacagcggcgtgtgtaccgacccccagccactgaaagaacagcccgccctgaacgacagccggtactgcctgagcagcagactgagagtgtccgccaccttctggcagaacccccggaaccacttcagatgccaggtgcagttctacggcctgagcgagaacgacgagtggacccaggacagagccaagcccgtgacccagatcgtgtctgccgaagcctggggcagagccgattgcggcatcaccagcgccagctaccaccagggcgtgctgagcgccaccatcctgtacgagatcctgctgggcaaggccaccctgtacgccgtgctggtgtctgccctggtgctgatggctatggtcaagcggaaggacagccggggaagggccaagcgatctggatctggagcaacaaacttctcactactcaaacaagcaggtgacgtggaggagaatcccgggccttctagaggccatatgaccgagtacaagcccacggtgcgcctcgccacccgcgacgacgtccccagggccgtacgcaccctcgccgccgcgttcgccgactaccccgccacgcgccacaccgtcgatccggaccgccacatcgagcgggtcaccgagctgcaagaactcttcctcacgcgcgtcgggctcgacatcggcaaggtgtgggtcgcggacgacggcgccgcggtggcggtctggaccacgccggagagcgtcgaagcgggggcggtgttcgccgagatcggcccgcgcatggccgagttgagcggttcccggctggccgcgcagcaacagatggaaggcctcctggcgccgcaccggcccaaggagcccgcgtggttcctggccaccgtcggcgtctcgcccgaccaccagggcaagggtctgggcagcgccgtcgtgctccccggagtggaggcggccgagcgcgccggggtgcccgccttcctggagacctccgcgccccgcaacctccccttctacgagcggctcggcttcaccgtcaccgccgacgtcgaggtgcccgaaggaccgcgcacctggtgcatgacccgcaagcccggtgcctga

SEQ ID NO: 10038 - DNA, 2568 bp, Artificial Sequence
  Synthetic Polynucloetide
atggccttaccagtgaccgccttgctcctgccgctggccttgctgctccacgccgccaggccggagatcgtgctgacacagtctcccgccacactgtcactgtctccaggcgaaagagccacactgagctgtagcgccaccagcagcgtgtcctacatccactggtatcagcagaagcccggacaggcccctagactgctgatctacagcaccagcaatctggcctctggcatccccgccagattttctggctctggaagcggcaccgacttcaccctgacaatcggcagactggaacccgaggacttcgccgtgtactactgccagcagagaagcagcagccccttcacctttggacagggcaccaaggtggaaatcaagagactcgaggacctgaagaacgtgttcccacctgaggtggccgtgttcgagcctagcaaggccgagatcgcccacacccagaaagccaccctcgtgtgcctggctaccggcttctaccccgaccatgtggaactgtcttggtgggtcaacggcaaagaggtgcacagcggcgtgtgtaccgacccccagccactgaaagaacagcccgccctgaacgacagccggtactgcctgagcagcagactgagagtgtccgccaccttctggcagaacccccggaaccacttcagatgccaggtgcagttctacggcctgagcgagaacgacgagtggacccaggacagagccaagcccgtgacccagatcgtgtctgccgaagcctggggcagagccgattgcggcatcaccagcgccagctaccaccagggcgtgctgagcgccaccatcctgtacgagatcctgctgggcaaggccaccctgtacgccgtgctggtgtctgccctggtgctgatggctatggtcaagcggaaggacagccggggaagggccaagcgatctggatctggagcaacaaacttctcactactcaaacaagcaggtgacgtggaggagaatcccgggcctactagtatggactggatttggcgcatccttttccttgtcggcgctgctaccggcgcgcattccttcgaagaagtgcagctggttgagtctggcggcggactggttaagcctgagggaagcctgagactgtcttgtgccgccagcggcttcaccttcagcagatacggcatgagctgggtccgacaggctcctggcaaaggactggaatgggtgtccacaatttccggcggaggcacctacatctactaccccgatagcgtgaagggcagattcaccatctccagagacaacgccaagaacagcctgttcctccagatgaactccctgagagccgaggacacagccgtgtattattgcgctcgggacaactacggcagaaactacgactacggcatggactactggggccagggcacactggttaccgttagctctacgcgtatccagaaccctgatcctgccgtgtaccagctgcgggatagcaagagcagcgacaagagcgtgtgtctgttcaccgacttcgacagccagaccaacgtgtcccagagcaaggactccgacgtgtacatcaccgataagtgcgtgctggacatgcggagcatggacttcaagagcaactccgccgtggcctggtccaacaagtccgatttcgcctgcgccaacgccttcaacaacagcattatccccgaggacacattcttcccaagcagcgacgtgccctgcgacgtgaagctggtggaaaagagcttcgagacagacaccaacctgaacttccagaacctgagcgtgatcggcttcagaatcctgctgctgaaagtggccggctttaacctgctgatgaccctgcggctgtggtccagccgcgccaagagaagcggatctggcgtgaagcagaccctgaatttcgacctgctgaagctggctggcgacgtggaatccaacccaggcccttctagaggccatatgaccgagtacaagcccacggtgcgcctcgccacccgcgacgacgtccccagggccgtacgcaccctcgccgccgcgttcgccgactaccccgccacgcgccacaccgtcgatccggaccgccacatcgagcgggtcaccgagctgcaagaactcttcctcacgcgcgtcgggctcgacatcggcaaggtgtgggtcgcggacgacggcgccgcggtggcggtctggaccacgccggagagcgtcgaagcgggggcggtgttcgccgagatcggcccgcgcatggccgagttgagcggttcccggctggccgcgcagcaacagatggaaggcctcctggcgccgcaccggcccaaggagcccgcgtggttcctggccaccgtcggcgtctcgcccgaccaccagggcaagggtctgggcagcgccgtcgtgctccccggagtggaggcggccgagcgcgccggggtgcccgccttcctggagacctccgcgccccgcaacctccccttctacgagcggctcggcttcaccgtcaccgccgacgtcgaggtgcccgaaggaccgcgcacctggtgcatgacccgcaagcccggtgcctga

SEQ ID NO: 10039 - DNA, 1866 bp, Artificial Sequence
  Synthetic Polynucloetide
atggccttaccagtgaccgccttgctcctgccgctggccttgctgctccacgccgccaggccggagatcgtgctgacacagtctcccgccacactgtcactgtctccaggcgaaagagccacactgagctgtagcgccaccagcagcgtgtcctacatccactggtatcagcagaagcccggacaggcccctagactgctgatctacagcaccagcaatctggcctctggcatccccgccagattttctggctctggaagcggcaccgacttcaccctgacaatcggcagactggaacccgaggacttcgccgtgtactactgccagcagagaagcagcagccccttcacctttggacagggcaccaaggtggaaatcaagagactcgaggacctgaagaacgtgttcccacctgaggtggccgtgttcgagcctagcgaggccgagatcagccacacccagaaagccaccctcgtgtgcctggctaccggcttctaccccgaccatgtggaactgtcttggtgggtcaacggcaaagaggtgcacagcggcgtgtgtaccgacccccagccactgaaagaacagcccgccctgaacgacagccggtactgcctgagcagcagactgagagtgtccgccaccttctggcagaacccccggaaccacttcagatgccaggtgcagttctacggcctgagcgagaacgacgagtggacccaggacagagccaagcccgtgacccagatcgtgtctgccgaagcctggggcagagccgattgcggctttaccagcgagagctaccagcagggcgtgctgagcgccaccatcctgtacgagatcctgctgggcaaggccaccctgtacgccgtgctggtgtctgccctggtgctgatggctatggtcaagcggaaggacagccggggaagggccaagcgatctggatctggagcaacaaacttctcactactcaaacaagcaggtgacgtggaggagaatcccgggcctactagtatggactggatttggcgcatccttttccttgtcggcgctgctaccggcgcgcattccttcgaagaagtgcagctggttgagtctggcggcggactggttaagcctgagggaagcctgagactgtcttgtgccgccagcggcttcaccttcagcagatacggcatgagctgggtccgacaggctcctggcaaaggactggaatgggtgtccacaatttccggcggaggcacctacatctactaccccgatagcgtgaagggcagattcaccatctccagagacaacgccaagaacagcctgttcctccagatgaactccctgagagccgaggacacagccgtgtattattgcgctcgggacaactacggcagaaactacgactacggcatggactactggggccagggcacactggttaccgttagctctacgcgtatccagaaccctgatcctgccgtgtaccagctgcgggatagcaagagcagcgacaagagcgtgtgtctgttcaccgacttcgacagccagaccaacgtgtcccagagcaaggactccgacgtgtacatcaccgataagtgcgtgctggacatgcggagcatggacttcaagagcaactccgccgtggcctggtccaacaagtccgatttcgcctgcgccaacgccttcaacaacagcattatccccgaggacacattcttcccaagccccgagagcagctgcgacgtgaagctggtggaaaagagcttcgagacagacaccaacctgaacttccagaacctgagcgtgatcggcttcagaatcctgctgctgaaagtggccggctttaacctgctgatgaccctgcggctgtggtccagc

SEQ ID NO: 10040 - DNA, 2541 bp, Artificial Sequence
  Synthetic Polynucloetide
atggccttaccagtgaccgccttgctcctgccgctggccttgctgctccacgccgccaggccggagatcgtgctgacacagtctcccgccacactgtcactgtctccaggcgaaagagccacactgagctgtagcgccaccagcagcgtgtcctacatccactggtatcagcagaagcccggacaggcccctagactgctgatctacagcaccagcaatctggcctctggcatccccgccagattttctggctctggaagcggcaccgacttcaccctgacaatcggcagactggaacccgaggacttcgccgtgtactactgccagcagagaagcagcagccccttcacctttggacagggcaccaaggtggaaatcaagagactcgaggacctgaagaacgtgttcccacctgaggtggccgtgttcgagcctagcgaggccgagatcagccacacccagaaagccaccctcgtgtgcctggctaccggcttctaccccgaccatgtggaactgtcttggtgggtcaacggcaaagaggtgcacagcggcgtgtgtaccgacccccagccactgaaagaacagcccgccctgaacgacagccggtactgcctgagcagcagactgagagtgtccgccaccttctggcagaacccccggaaccacttcagatgccaggtgcagttctacggcctgagcgagaacgacgagtggacccaggacagagccaagcccgtgacccagatcgtgtctgccgaagcctggggcagagccgattgcggctttaccagcgagagctaccagcagggcgtgctgagcgccaccatcctgtacgagatcctgctgggcaaggccaccctgtacgccgtgctggtgtctgccctggtgctgatggctatggtcaagcggaaggacagccggggaagggccaagcgatctggatctggagcaacaaacttctcactactcaaacaagcaggtgacgtggaggagaatcccgggcctactagtatggactggatttggcgcatccttttccttgtcggcgctgctaccggcgcgcattccttcgaagaagtgcagctggttgagtctggcggcggactggttaagcctgagggaagcctgagactgtcttgtgccgccagcggcttcaccttcagcagatacggcatgagctgggtccgacaggctcctggcaaaggactggaatgggtgtccacaatttccggcggaggcacctacatctactaccccgatagcgtgaagggcagattcaccatctccagagacaacgccaagaacagcctgttcctccagatgaactccctgagagccgaggacacagccgtgtattattgcgctcgggacaactacggcagaaactacgactacggcatggactactggggccagggcacactggttaccgttagctctacgcgtatccagaaccctgatcctgccgtgtaccagctgcgggatagcaagagcagcgacaagagcgtgtgtctgttcaccgacttcgacagccagaccaacgtgtcccagagcaaggactccgacgtgtacatcaccgataagtgcgtgctggacatgcggagcatggacttcaagagcaactccgccgtggcctggtccaacaagtccgatttcgcctgcgccaacgccttcaacaacagcattatccccgaggacacattcttcccaagccccgagagcagctgcgacgtgaagctggtggaaaagagcttcgagacagacaccaacctgaacttccagaacctgagcgtgatcggcttcagaatcctgctgctgaaagtggccggctttaacctgctgatgaccctgcggctgtggtccagccgcgccaagagaagcggatctggcgtgaagcagaccctgaatttcgacctgctgaagctggctggcgacgtggaatccaacccaggcccttctagaggcgggatccacaccatggctacctacgaggtgctgtgcgaggtggcaagaaagctgggcaccgacgacagagaagtggtgctgttcctgctgaacgtgttcatccctcagcctacactggcccagctgatcggtgcactgagagccctgaaagaggaaggccggctgacctttcctctgctggccgaatgcctgttcagagccggaagaagggatctgctgcgggacctgctgcatctggaccccagatttctggaaagacacctggccggcaccatgagctacttcagcccttaccagctgaccgtgctgcacgttgacggcgaactgtgcgccagagatattcggagcctgatcttcctgagcaaggacaccatcggcagccggtctacccctcagacatttctgcactgggtgtactgcatggaaaacctggacctgctcggccccacagatgtggatgccctgatgtccatgctgagaagcctgagcagagtggacctccagagacaggtgcagacactgatgggactgcacctgagcggacctagccacagccagcactacagacacacccct

SEQ ID NO: 10041 - DNA, 1878 bp, Artificial Sequence
  Synthetic Polynucloetide
atggccttaccagtgaccgccttgctcctgccgctggccttgctgctccacgccgccaggccggagatcgtgctgacacagtctcccgccacactgtcactgtctccaggcgaaagagccacactgagctgtagcgccaccagcagcgtgtcctacatccactggtatcagcagaagcccggacaggcccctagactgctgatctacagcaccagcaatctggcctctggcatccccgccagattttctggctctggaagcggcaccgacttcaccctgacaatcggcagactggaacccgaggacttcgccgtgtactactgccagcagagaagcagcagccccttcacctttggacagggcaccaaggtggaaatcaagagactcgagatccagaaccctgatcctgccgtgtaccagctgcgggatagcaagagcagcgacaagagcgtgtgtctgttcaccgacttcgacagccagaccaacgtgtcccagagcaaggactccgacgtgtacatcaccgataagtgcgtgctggacatgcggagcatggacttcaagagcaactccgccgtggcctggtccaacaagtccgatttcgcctgcgccaacgccttcaacaacagcattatccccgaggacacattcttcccaagccccgagagcagctgcgacgtgaagctggtggaaaagagcttcgagacagacaccaacctgaacttccagaacctgagcgtgatcggcttcagaatcctgctgctgaaagtggccggctttaacctgctgatgaccctgcggctgtggtccagccgcgccaagagaagcggatctggcgtgaagcagaccctgaatttcgacctgctgaagctggctggcgacgtggaatccaacccaggccctactagtatggactggatttggcgcatccttttccttgtcggcgctgctaccggcgcgcattccttcgaagaagtgcagctggttgagtctggcggcggactggttaagcctgagggaagcctgagactgtcttgtgccgccagcggcttcaccttcagcagatacggcatgagctgggtccgacaggctcctggcaaaggactggaatgggtgtccacaatttccggcggaggcacctacatctactaccccgatagcgtgaagggcagattcaccatctccagagacaacgccaagaacagcctgttcctccagatgaactccctgagagccgaggacacagccgtgtattattgcgctcgggacaactacggcagaaactacgactacggcatggactactggggccagggcacactggttaccgttagctctacgcgtgaggacctgaagaacgtgttcccacctgaggtggccgtgttcgagcctagcgaggccgagatcagccacacccagaaagccaccctcgtgtgcctggctaccggcttctaccccgaccatgtggaactgtcttggtgggtcaacggcaaagaggtgcacagcggcgtgtgtaccgacccccagccactgaaagaacagcccgccctgaacgacagccggtactgcctgagcagcagactgagagtgtccgccaccttctggcagaacccccggaaccacttcagatgccaggtgcagttctacggcctgagcgagaacgacgagtggacccaggacagagccaagcccgtgacccagatcgtgtctgccgaagcctggggcagagccgattgcggctttaccagcgagagctaccagcagggcgtgctgagcgccaccatcctgtacgagatcctgctgggcaaggccaccctgtacgccgtgctggtgtctgccctggtgctgatggctatggtcaagcggaaggacagccgggga

SEQ ID NO: 10042 - DNA, 2544 bp, Artificial Sequence
  Synthetic Polynucloetide
atggccttaccagtgaccgccttgctcctgccgctggccttgctgctccacgccgccaggccggagatcgtgctgacacagtctcccgccacactgtcactgtctccaggcgaaagagccacactgagctgtagcgccaccagcagcgtgtcctacatccactggtatcagcagaagcccggacaggcccctagactgctgatctacagcaccagcaatctggcctctggcatccccgccagattttctggctctggaagcggcaccgacttcaccctgacaatcggcagactggaacccgaggacttcgccgtgtactactgccagcagagaagcagcagccccttcacctttggacagggcaccaaggtggaaatcaagagactcgagatccagaaccctgatcctgccgtgtaccagctgcgggatagcaagagcagcgacaagagcgtgtgtctgttcaccgacttcgacagccagaccaacgtgtcccagagcaaggactccgacgtgtacatcaccgataagtgcgtgctggacatgcggagcatggacttcaagagcaactccgccgtggcctggtccaacaagtccgatttcgcctgcgccaacgccttcaacaacagcattatccccgaggacacattcttcccaagccccgagagcagctgcgacgtgaagctggtggaaaagagcttcgagacagacaccaacctgaacttccagaacctgagcgtgatcggcttcagaatcctgctgctgaaagtggccggctttaacctgctgatgaccctgcggctgtggtccagccgcgccaagagaagcggatctggcgtgaagcagaccctgaatttcgacctgctgaagctggctggcgacgtggaatccaacccaggccctactagtatggactggatttggcgcatccttttccttgtcggcgctgctaccggcgcgcattccttcgaagaagtgcagctggttgagtctggcggcggactggttaagcctgagggaagcctgagactgtcttgtgccgccagcggcttcaccttcagcagatacggcatgagctgggtccgacaggctcctggcaaaggactggaatgggtgtccacaatttccggcggaggcacctacatctactaccccgatagcgtgaagggcagattcaccatctccagagacaacgccaagaacagcctgttcctccagatgaactccctgagagccgaggacacagccgtgtattattgcgctcgggacaactacggcagaaactacgactacggcatggactactggggccagggcacactggttaccgttagctctacgcgtgaggacctgaagaacgtgttcccacctgaggtggccgtgttcgagcctagcgaggccgagatcagccacacccagaaagccaccctcgtgtgcctggctaccggcttctaccccgaccatgtggaactgtcttggtgggtcaacggcaaagaggtgcacagcggcgtgtgtaccgacccccagccactgaaagaacagcccgccctgaacgacagccggtactgcctgagcagcagactgagagtgtccgccaccttctggcagaacccccggaaccacttcagatgccaggtgcagttctacggcctgagcgagaacgacgagtggacccaggacagagccaagcccgtgacccagatcgtgtctgccgaagcctggggcagagccgattgcggctttaccagcgagagctaccagcagggcgtgctgagcgccaccatcctgtacgagatcctgctgggcaaggccaccctgtacgccgtgctggtgtctgccctggtgctgatggctatggtcaagcggaaggacagccggggaagggccaagcgatctggatctggagcaacaaacttctcactactcaaacaagcaggtgacgtggaggagaatcccgggccttctagaggcgggatccacaccatggctacctacgaggtgctgtgcgaggtggcaagaaagctgggcaccgacgacagagaagtggtgctgttcctgctgaacgtgttcatccctcagcctacactggcccagctgatcggtgcactgagagccctgaaagaggaaggccggctgacctttcctctgctggccgaatgcctgttcagagccggaagaagggatctgctgcgggacctgctgcatctggaccccagatttctggaaagacacctggccggcaccatgagctacttcagcccttaccagctgaccgtgctgcacgttgacggcgaactgtgcgccagagatattcggagcctgatcttcctgagcaaggacaccatcggcagccggtctacccctcagacatttctgcactgggtgtactgcatggaaaacctggacctgctcggccccacagatgtggatgccctgatgtccatgctgagaagcctgagcagagtggacctccagagacaggtgcagacactgatgggactgcacctgagcggacctagccacagccagcactacagacacacccct

SEQ ID NO: 10043 - DNA, 2703 bp, Artificial Sequence
  Synthetic Polynucloetide
atggccttaccagtgaccgccttgctcctgccgctggccttgctgctccacgccgccaggccgctcgaggggaaaccaattcccaaccctcttctgggactggattcaaccggcagcggcgaggacctgaagaacgtgttcccacctgaggtggccgtgttcgagcctagcaaggccgagatcgcccacacccagaaagccaccctcgtgtgcctggctaccggcttctaccccgaccatgtggaactgtcttggtgggtcaacggcaaagaggtgcacagcggcgtgtgtaccgacccccagccactgaaagaacagcccgccctgaacgacagccggtactgcctgagcagcagactgagagtgtccgccaccttctggcagaacccccggaaccacttcagatgccaggtgcagttctacggcctgagcgagaacgacgagtggacccaggacagagccaagcccgtgacccagatcgtgtctgccgaagcctggggcagagccgattgcggcatcaccagcgccagctaccaccagggcgtgctgagcgccaccatcctgtacgagatcctgctgggcaaggccaccctgtacgccgtgctggtgtctgccctggtgctgatggctatggtcaagcggaaggacagccggggaagggccaagcgatctggatctggagcaacaaacttctcactactcaaacaagcaggtgacgtggaggagaatcccgggcctactagcatggccttaccagtgaccgccttgctcctgccgctggccttgctgctccacgccgccaggccggagatcgtgctgacacagtctcccgccacactgtcactgtctccaggcgaaagagccacactgagctgtagcgccaccagcagcgtgtcctacatccactggtatcagcagaagcccggacaggcccctagactgctgatctacagcaccagcaatctggcctctggcatccccgccagattttctggctctggaagcggcaccgacttcaccctgacaatcggcagactggaacccgaggacttcgccgtgtactactgccagcagagaagcagcagccccttcacctttggacagggcaccaaggtggaaatcaagagaggcggaggcggaagtggaggcggaggatctggcggcggaggctctgaagtgcagctggttgagtctggcggcggactggttaagcctgagggaagcctgagactgtcttgtgccgccagcggcttcaccttcagcagatacggcatgagctgggtccgacaggctcctggcaaaggactggaatgggtgtccacaatttccggcggaggcacctacatctactaccccgatagcgtgaagggcagattcaccatctccagagacaacgccaagaacagcctgttcctccagatgaactccctgagagccgaggacacagccgtgtattattgcgctcgggacaactacggcagaaactacgactacggcatggactactggggccagggcacactggttaccgttagctctacgcgtgagcagaaactgatctcggaagaggatgggagcggcatccagaaccctgatcctgccgtgtaccagctgcgggatagcaagagcagcgacaagagcgtgtgtctgttcaccgacttcgacagccagaccaacgtgtcccagagcaaggactccgacgtgtacatcaccgataagtgcgtgctggacatgcggagcatggacttcaagagcaactccgccgtggcctggtccaacaagtccgatttcgcctgcgccaacgccttcaacaacagcattatccccgaggacacattcttcccaagcagcgacgtgccctgcgacgtgaagctggtggaaaagagcttcgagacagacaccaacctgaacttccagaacctgagcgtgatcggcttcagaatcctgctgctgaaagtggccggctttaacctgctgatgaccctgcggctgtggtccagccgcgccaagagaagcggatctggcgtgaagcagaccctgaatttcgacctgctgaagctggctggcgacgtggaatccaacccaggcccttctagaggccatatgaccgagtacaagcccacggtgcgcctcgccacccgcgacgacgtccccagggccgtacgcaccctcgccgccgcgttcgccgactaccccgccacgcgccacaccgtcgatccggaccgccacatcgagcgggtcaccgagctgcaagaactcttcctcacgcgcgtcgggctcgacatcggcaaggtgtgggtcgcggacgacggcgccgcggtggcggtctggaccacgccggagagcgtcgaagcgggggcggtgttcgccgagatcggcccgcgcatggccgagttgagcggttcccggctggccgcgcagcaacagatggaaggcctcctggcgccgcaccggcccaaggagcccgcgtggttcctggccaccgtcggcgtctcgcccgaccaccagggcaagggtctgggcagcgccgtcgtgctccccggagtggaggcggccgagcgcgccggggtgcccgccttcctggagacctccgcgccccgcaacctccccttctacgagcggctcggcttcaccgtcaccgccgacgtcgaggtgcccgaaggaccgcgcacctggtgcatgacccgcaagcccggtgcctga

SEQ ID NO: 10044 - DNA, 2706 bp, Artificial Sequence
  Synthetic Polynucloetide
atggccttaccagtgaccgccttgctcctgccgctggccttgctgctccacgccgccaggccgctcgagcagaaactgatctcggaagaggatctgggctccggcgatcgccctgatcctgccgtgtaccagctgcgggatagcaagagcagcgacaagagcgtgtgtctgttcaccgacttcgacagccagaccaacgtgtcccagagcaaggactccgacgtgtacatcaccgataagtgcgtgctggacatgcggagcatggacttcaagagcaactccgccgtggcctggtccaacaagtccgatttcgcctgcgccaacgccttcaacaacagcattatccccgaggacacattcttcccaagccccgagagcagctgcgacgtgaagctggtggaaaagagcttcgagacagacaccaacctgaacttccagaacctgagcgtgatcggcttcagaatcctgctgctgaaagtggccggctttaacctgctgatgaccctgcggctgtggtccagctctagtcgcgccaagagaagcggatctggcgtgaagcagaccctgaatttcgacctgctgaagctggctggcgacgtggaatccaacccaggccccactagcatggccttaccagtgaccgccttgctcctgccgctggccttgctgctccacgccgccaggccggagatcgtgctgacacagtctcccgccacactgtcactgtctccaggcgaaagagccacactgagctgtagcgccaccagcagcgtgtcctacatccactggtatcagcagaagcccggacaggcccctagactgctgatctacagcaccagcaatctggcctctggcatccccgccagattttctggctctggaagcggcaccgacttcaccctgacaatcggcagactggaacccgaggacttcgccgtgtactactgccagcagagaagcagcagccccttcacctttggacagggcaccaaggtggaaatcaagagaggcggaggcggaagtggaggcggaggatctggcggcggaggctctgaagtgcagctggttgagtctggcggcggactggttaagcctgagggaagcctgagactgtcttgtgccgccagcggcttcaccttcagcagatacggcatgagctgggtccgacaggctcctggcaaaggactggaatgggtgtccacaatttccggcggaggcacctacatctactaccccgatagcgtgaagggcagattcaccatctccagagacaacgccaagaacagcctgttcctccagatgaactccctgagagccgaggacacagccgtgtattattgcgctcgggacaactacggcagaaactacgactacggcatggactactggggccagggcacactggttaccgttagctctacgcgtgggaaaccaattcccaaccctcttctgggactggattcaaccggcagcggcgaggacctgaagaacgtgttcccacctgaggtggccgtgttcgagcctagcgaggccgagatcagccacacccagaaagccaccctcgtgtgcctggctaccggcttctaccccgaccatgtggaactgtcttggtgggtcaacggcaaagaggtgcacagcggcgtgtgtaccgacccccagccactgaaagaacagcccgccctgaacgacagccggtactgcctgagcagcagactgagagtgtccgccaccttctggcagaacccccggaaccacttcagatgccaggtgcagttctacggcctgagcgagaacgacgagtggacccaggacagagccaagcccgtgacccagatcgtgtctgccgaagcctggggcagagccgattgcggctttaccagcgagagctaccagcagggcgtgctgagcgccaccatcctgtacgagatcctgctgggcaaggccaccctgtacgccgtgctggtgtctgccctggtgctgatggctatggtcaagcggaaggacagccggggaagggccaagcgatctggatctggagcaacaaacttctcactactcaaacaagcaggtgacgtggaggagaatcccgggccttctagaggccatatgaccgagtacaagcccacggtgcgcctcgccacccgcgacgacgtccccagggccgtacgcaccctcgccgccgcgttcgccgactaccccgccacgcgccacaccgtcgatccggaccgccacatcgagcgggtcaccgagctgcaagaactcttcctcacgcgcgtcgggctcgacatcggcaaggtgtgggtcgcggacgacggcgccgcggtggcggtctggaccacgccggagagcgtcgaagcgggggcggtgttcgccgagatcggcccgcgcatggccgagttgagcggttcccggctggccgcgcagcaacagatggaaggcctcctggcgccgcaccggcccaaggagcccgcgtggttcctggccaccgtcggcgtctcgcccgaccaccagggcaagggtctgggcagcgccgtcgtgctccccggagtggaggcggccgagcgcgccggggtgcccgccttcctggagacctccgcgccccgcaacctccccttctacgagcggctcggcttcaccgtcaccgccgacgtcgaggtgcccgaaggaccgcgcacctggtgcatgacccgcaagcccggtgcctga

SEQ ID NO: 10045 - DNA, 2568 bp, Artificial Sequence
  Synthetic Polynucloetide
atggccttaccagtgaccgccttgctcctgccgctggccttgctgctccacgccgccaggccggagatcgtgctgacacagtctcccgccacactgtcactgtctccaggcgaaagagccacactgagctgtagcgccaccagcagcgtgtcctacatccactggtatcagcagaagcccggacaggcccctagactgctgatctacagcaccagcaatctggcctctggcatccccgccagattttctggctctggaagcggcaccgacttcaccctgacaatcggcagactggaacccgaggacttcgccgtgtactactgccagcagagaagcagcagccccttcacctttggacagggcaccaaggtggaaatcaagagactcgaggacctgaagaacgtgttcccacctgaggtggccgtgttcgagcctagcgaggccgagatcagccacacccagaaagccaccctcgtgtgcctggctaccggcttctaccccgaccatgtggaactgtcttggtgggtcaacggcaaagaggtgcacagcggcgtgtctaccgacccccagccactgaaagaacagcccgccctgaacgacagccggtactgcctgagcagcagactgagagtgtccgccaccttctggcagaacccccggaaccacttcagatgccaggtgcagttctacggcctgagcgagaacgacgagtggacccaggacagagccaagcccgtgacccagatcgtgtctgccgaagcctggggcagagccgattgcggctttaccagcgagagctaccagcagggcgtgctgagcgccaccatcctgtacgagatcctgctgggcaaggccaccctgtacgccgtgctggtgtctgccctggtgctgatggctatggtcaagcggaaggacagccggggaagggccaagcgatctggatctggagcaacaaacttctcactactcaaacaagcaggtgacgtggaggagaatcccgggcctactagtatggactggatttggcgcatccttttccttgtcggcgctgctaccggcgcgcattccttcgaagaagtgcagctggttgagtctggcggcggactggttaagcctgagggaagcctgagactgtcttgtgccgccagcggcttcaccttcagcagatacggcatgagctgggtccgacaggctcctggcaaaggactggaatgggtgtccacaatttccggcggaggcacctacatctactaccccgatagcgtgaagggcagattcaccatctccagagacaacgccaagaacagcctgttcctccagatgaactccctgagagccgaggacacagccgtgtattattgcgctcgggacaactacggcagaaactacgactacggcatggactactggggccagggcacactggttaccgttagctctacgcgtatccagaaccctgatcctgccgtgtaccagctgcgggatagcaagagcagcgacaagagcgtgtgtctgttcaccgacttcgacagccagaccaacgtgtcccagagcaaggactccgacgtgtacatcaccgataagaccgtgctggacatgcggagcatggacttcaagagcaactccgccgtggcctggtccaacaagtccgatttcgcctgcgccaacgccttcaacaacagcattatccccgaggacacattcttcccaagccccgagagcagctgcgacgtgaagctggtggaaaagagcttcgagacagacaccaacctgaacttccagaacctgagcgtgatcggcttcagaatcctgctgctgaaagtggccggctttaacctgctgatgaccctgcggctgtggtccagccgcgccaagagaagcggatctggcgtgaagcagaccctgaatttcgacctgctgaagctggctggcgacgtggaatccaacccaggcccttctagaggccatatgaccgagtacaagcccacggtgcgcctcgccacccgcgacgacgtccccagggccgtacgcaccctcgccgccgcgttcgccgactaccccgccacgcgccacaccgtcgatccggaccgccacatcgagcgggtcaccgagctgcaagaactcttcctcacgcgcgtcgggctcgacatcggcaaggtgtgggtcgcggacgacggcgccgcggtggcggtctggaccacgccggagagcgtcgaagcgggggcggtgttcgccgagatcggcccgcgcatggccgagttgagcggttcccggctggccgcgcagcaacagatggaaggcctcctggcgccgcaccggcccaaggagcccgcgtggttcctggccaccgtcggcgtctcgcccgaccaccagggcaagggtctgggcagcgccgtcgtgctccccggagtggaggcggccgagcgcgccggggtgcccgccttcctggagacctccgcgccccgcaacctccccttctacgagcggctcggcttcaccgtcaccgccgacgtcgaggtgcccgaaggaccgcgcacctggtgcatgacccgcaagcccggtgcctga

SEQ ID NO: 10046 - DNA, 2814 bp, Artificial Sequence
  Synthetic Polynucloetide
atggccttaccagtgaccgccttgctcctgccgctggccttgctgctccacgccgccaggccggagatcgtgctgacacagtctcccgccacactgtcactgtctccaggcgaaagagccacactgagctgtagcgccaccagcagcgtgtcctacatccactggtatcagcagaagcccggacaggcccctagactgctgatctacagcaccagcaatctggcctctggcatccccgccagattttctggctctggaagcggcaccgacttcaccctgacaatcggcagactggaacccgaggacttcgccgtgtactactgccagcagagaagcagcagccccttcacctttggacagggcaccaaggtggaaatcaagagactcgaggacctgaagaacgtgttcccacctgaggtggccgtgttcgagcctagcgaggccgagatcagccacacccagaaagccaccctcgtgtgcctggctaccggcttctaccccgaccatgtggaactgtcttggtgggtcaacggcaaagaggtgcacagcggcgtgtctaccgacccccagccactgaaagaacagcccgccctgaacgacagccggtactgcctgagcagcagactgagagtgtccgccaccttctggcagaacccccggaaccacttcagatgccaggtgcagttctacggcctgagcgagaacgacgagtggacccaggacagagccaagcccgtgacccagatcgtgtctgccgaagcctggggcagagccgattgcggctttaccagcgagagctaccagcagggcgtgctgagcgccaccatcctgtacgagatcctgctgggcaaggccaccctgtacgccgtgctggtgtctgccctggtgctgatggctatggtcaagcggaaggacagccggggaagggccaagcgatctggatctggagcaacaaacttctcactactcaaacaagcaggtgacgtggaggagaatcccgggcctactagtatggactggatttggcgcatccttttccttgtcggcgctgctaccggcgcgcattccttcgaagaagtgcagctggttgagtctggcggcggactggttaagcctgagggaagcctgagactgtcttgtgccgccagcggcttcaccttcagcagatacggcatgagctgggtccgacaggctcctggcaaaggactggaatgggtgtccacaatttccggcggaggcacctacatctactaccccgatagcgtgaagggcagattcaccatctccagagacaacgccaagaacagcctgttcctccagatgaactccctgagagccgaggacacagccgtgtattattgcgctcgggacaactacggcagaaactacgactacggcatggactactggggccagggcacactggttaccgttagctctacgcgtgagcagaaactgatctcggaagaggatgggagcggcaccccattcccttctctggcccctcccatcatgctgctggtggacggcaagcagcagatggtggtcgtgtgcctggtgctggatgtggccccacctggactggacagccccatctggtttagcgccggcaatggctctgccctggacgcctttacctacggcccaagccctgccaccgatggcacctggacaaatctggcccacctgagcctgcccagcgaggaactggcttcttgggagcctctcgtgtgccacacaggacctggcgctgagggacacagcagatccacccagcctatgcacctgtctggcgaggccagcaccgccagaacctgtcctcaggaacctctgagaggcacccctggcggagcactgtggctgggagtgctgagactgctgctgttcaagctgctgctgtttgacctgctgctgacctgctcctgtctgtgcgatcctgccggccctctgccttctcctgccaccaccacaagactgagagccctgggcagccacagactgcaccctgccacagagacaggcggcagagaggccacaagcagccctagaccccagcccagagacagaagatggggcgataccccccctggcagaaagcctggatctccagtccgcgccaagagaagcggatctggcgtgaagcagaccctgaatttcgacctgctgaagctggctggcgacgtggaatccaacccaggcccttctagaggccatatgaccgagtacaagcccacggtgcgcctcgccacccgcgacgacgtccccagggccgtacgcaccctcgccgccgcgttcgccgactaccccgccacgcgccacaccgtcgatccggaccgccacatcgagcgggtcaccgagctgcaagaactcttcctcacgcgcgtcgggctcgacatcggcaaggtgtgggtcgcggacgacggcgccgcggtggcggtctggaccacgccggagagcgtcgaagcgggggcggtgttcgccgagatcggcccgcgcatggccgagttgagcggttcccggctggccgcgcagcaacagatggaaggcctcctggcgccgcaccggcccaaggagcccgcgtggttcctggccaccgtcggcgtctcgcccgaccaccagggcaagggtctgggcagcgccgtcgtgctccccggagtggaggcggccgagcgcgccggggtgcccgccttcctggagacctccgcgccccgcaacctccccttctacgagcggctcggcttcaccgtcaccgccgacgtcgaggtgcccgaaggaccgcgcacctggtgcatgacccgcaagcccggtgcctga

SEQ ID NO: 10047 - DNA, 2868 bp, Artificial Sequence
  Synthetic Polynucloetide
atggccttaccagtgaccgccttgctcctgccgctggccttgctgctccacgccgccaggccgctcgaggacctgaagaacgtgttcccacctgaggtggccgtgttcgagcctagcgaggccgagatcagccacacccagaaagccaccctcgtgtgcctggctaccggcttctaccccgaccatgtggaactgtcttggtgggtcaacggcaaagaggtgcacagcggcgtgtctaccgacccccagccactgaaagaacagcccgccctgaacgacagccggtactgcctgagcagcagactgagagtgtccgccaccttctggcagaacccccggaaccacttcagatgccaggtgcagttctacggcctgagcgagaacgacgagtggacccaggacagagccaagcccgtgacccagatcgtgtctgccgaagcctggggcagagccgattgcggctttaccagcgagagctaccagcagggcgtgctgagcgccaccatcctgtacgagatcctgctgggcaaggccaccctgtacgccgtgctggtgtctgccctggtgctgatggctatggtcaagcggaaggacagccggggaagggccaagcgatctggatctggagcaacaaacttctcactactcaaacaagcaggtgacgtggaggagaatcccgggcctactagcatggccttaccagtgaccgccttgctcctgccgctggccttgctgctccacgccgccaggccggagatcgtgctgacacagtctcccgccacactgtcactgtctccaggcgaaagagccacactgagctgtagcgccaccagcagcgtgtcctacatccactggtatcagcagaagcccggacaggcccctagactgctgatctacagcaccagcaatctggcctctggcatccccgccagattttctggctctggaagcggcaccgacttcaccctgacaatcggcagactggaacccgaggacttcgccgtgtactactgccagcagagaagcagcagccccttcacctttggacagggcaccaaggtggaaatcaagagaggcggaggcggaagtggaggcggaggatctggcggcggaggctctgaagtgcagctggttgagtctggcggcggactggttaagcctgagggaagcctgagactgtcttgtgccgccagcggcttcaccttcagcagatacggcatgagctgggtccgacaggctcctggcaaaggactggaatgggtgtccacaatttccggcggaggcacctacatctactaccccgatagcgtgaagggcagattcaccatctccagagacaacgccaagaacagcctgttcctccagatgaactccctgagagccgaggacacagccgtgtattattgcgctcgggacaactacggcagaaactacgactacggcatggactactggggccagggcacactggttaccgttagctctacgcgtgagcagaaactgatctcggaagaggatctggggagcggcaccccattcccttctctggcccctcccatcatgctgctggtggacggcaagcagcagatggtggtcgtgtgcctggtgctggatgtggccccacctggactggacagccccatctggtttagcgccggcaatggctctgccctggacgcctttacctacggcccaagccctgccaccgatggcacctggacaaatctggcccacctgagcctgcccagcgaggaactggcttcttgggagcctctcgtgtgccacacaggacctggcgctgagggacacagcagatccacccagcctatgcacctgtctggcgaggccagcaccgccagaacctgtcctcaggaacctctgagaggcacccctggcggagcactgtggctgggagtgctgagactgctgctgttcaagctgctgctgtttgacctgctgctgacctgctcctgtctgtgcgatcctgccggccctctgccttctcctgccaccaccacaagactgagagccctgggcagccacagactgcaccctgccacagagacaggcggcagagaggccacaagcagccctagaccccagcccagagacagaagatggggcgataccccccctggcagaaagcctggatctccagtccgcgccaagagaagcggatctggcgtgaagcagaccctgaatttcgacctgctgaagctggctggcgacgtggaatccaacccaggcccttctagatctagaggccatatgaccgagtacaagcccacggtgcgcctcgccacccgcgacgacgtccccagggccgtacgcaccctcgccgccgcgttcgccgactaccccgccacgcgccacaccgtcgatccggaccgccacatcgagcgggtcaccgagctgcaagaactcttcctcacgcgcgtcgggctcgacatcggcaaggtgtgggtcgcggacgacggcgccgcggtggcggtctggaccacgccggagagcgtcgaagcgggggcggtgttcgccgagatcggcccgcgcatggccgagttgagcggttcccggctggccgcgcagcaacagatggaaggcctcctggcgccgcaccggcccaaggagcccgcgtggttcctggccaccgtcggcgtctcgcccgaccaccagggcaagggtctgggcagcgccgtcgtgctccccggagtggaggcggccgagcgcgccggggtgcccgccttcctggagacctccgcgccccgcaacctccccttctacgagcggctcggcttcaccgtcaccgccgacgtcgaggtgcccgaaggaccgcgcacctggtgcatgacccgcaagcccggtgcctga

SEQ ID NO: 10048 - DNA, 2679 bp, Artificial Sequence
  Synthetic Polynucloetide
atggccttaccagtgaccgccttgctcctgccgctggccttgctgctccacgccgccaggccggagatcgtgctgacacagtctcccgccacactgtcactgtctccaggcgaaagagccacactgagctgtagcgccaccagcagcgtgtcctacatccactggtatcagcagaagcccggacaggcccctagactgctgatctacagcaccagcaatctggcctctggcatccccgccagattttctggctctggaagcggcaccgacttcaccctgacaatcggcagactggaacccgaggacttcgccgtgtactactgccagcagagaagcagcagccccttcacctttggacagggcaccaaggtggaaatcaagagactcgaggggaaaccaattcccaaccctcttctgggactggattcaaccggcagcggcgacaagcagctggacgccgacgtgtcccccaagcctaccatcttcctgccctctatcgccgagacaaagctccagaaggccggcacctacctgtgcctgctggaaaagttcttcccagatgtgattaagatccactggcaggaaaagaagtccaacaccatcctgggcagccaggaaggcaacaccatgaagaccaacgacacctacatgaagttcagctggctgaccgtgcccgagaagtccctggacaaagaacacagatgcatcgtgcggcacgaaaacaacaagaacggcgtggaccaggaaatcatcttcccacccatcaagaccgatgtgattacaatggaccccaaggacaactgctccaaggacgccaacgataccctgctgctccagctgaccaacaccagcgcctactacatgtacttgttgctgctgctgaagtccgtggtgtacttcgccatcatcacatgctgcctgctgcggagaaccgccttctgctgcaacggcgagaagtctagggccaagcgatctggatctggagcaacaaacttctcactactcaaacaagcaggtgacgtggaggagaatcccgggcctactagtatggactggatttggcgcatccttttccttgtcggcgctgctaccggcgcgcattccttcgaagaagtgcagctggttgagtctggcggcggactggttaagcctgagggaagcctgagactgtcttgtgccgccagcggcttcaccttcagcagatacggcatgagctgggtccgacaggctcctggcaaaggactggaatgggtgtccacaatttccggcggaggcacctacatctactaccccgatagcgtgaagggcagattcaccatctccagagacaacgccaagaacagcctgttcctccagatgaactccctgagagccgaggacacagccgtgtattattgcgctcgggacaactacggcagaaactacgactacggcatggactactggggccagggcacactggttaccgttagctctacgcgtgagcagaaactgatctcggaagaggatgggagcggcagccagcctcacaccaagcccagcgtgttcgtgatgaagaacggcaccaacgtggcctgcctcgtgaaagagttctaccccaaggacatcaggatcaacctggtgtccagcaagaagatcaccgagttcgaccccgccatcgtgatctcccccagcggcaagtacaacgccgtgaagctggggaagtacgaggacagcaacagcgtgacctgctccgtgcagcacgacaacaagaccgtgcacagcaccgactttgaagtgaaaaccgactccaccgaccacgtgaagcccaaagagacagagaacaccaagcagcccagcaagagctgccacaagcccaaggccatcgtgcacaccgagaaagtgaacatgatgagcctgaccgtgctgggcctgcggatgctgttcgccaaaaccgtggccgtgaacttcctgctgaccgccaagctgttcttcctccgcgccaagagaagcggatctggcgtgaagcagaccctgaatttcgacctgctgaagctggctggcgacgtggaatccaacccaggcccttctagaggccatatgaccgagtacaagcccacggtgcgcctcgccacccgcgacgacgtccccagggccgtacgcaccctcgccgccgcgttcgccgactaccccgccacgcgccacaccgtcgatccggaccgccacatcgagcgggtcaccgagctgcaagaactcttcctcacgcgcgtcgggctcgacatcggcaaggtgtgggtcgcggacgacggcgccgcggtggcggtctggaccacgccggagagcgtcgaagcgggggcggtgttcgccgagatcggcccgcgcatggccgagttgagcggttcccggctggccgcgcagcaacagatggaaggcctcctggcgccgcaccggcccaaggagcccgcgtggttcctggccaccgtcggcgtctcgcccgaccaccagggcaagggtctgggcagcgccgtcgtgctccccggagtggaggcggccgagcgcgccggggtgcccgccttcctggagacctccgcgccccgcaacctccccttctacgagcggctcggcttcaccgtcaccgccgacgtcgaggtgcccgaaggaccgcgcacctggtgcatgacccgcaagcccggtgcctga

SEQ ID NO: 10049 - DNA, 1890 bp, Artificial Sequence
  Synthetic Polynucloetide
atggccttaccagtgaccgccttgctcctgccgctggccttgctgctccacgccgccaggccggagatcgtgctgacacagtctcccgccacactgtcactgtctccaggcgaaagagccacactgagctgtagcgccaccagcagcgtgtcctacatccactggtatcagcagaagcccggacaggcccctagactgctgatctacagcaccagcaatctggcctctggcatccccgccagattttctggctctggaagcggcaccgacttcaccctgacaatcggcagactggaacccgaggacttcgccgtgtactactgccagcagagaagcagcagccccttcacctttggacagggcaccaaggtggaaatcaagagactcgagagccagcctcacaccaagcccagcgtgttcgtgatgaagaacggcaccaacgtggcctgcctcgtgaaagagttctaccccaaggacatcaggatcaacctggtgtccagcaagaagatcaccgagttcgaccccgccatcgtgatctcccccagcggcaagtacaacgccgtgaagctggggaagtacgaggacagcaacagcgtgacctgctccgtgcagcacgacaacaagaccgtgcacagcaccgactttgaagtgaaaaccgactccaccgaccacgtgaagcccaaagagacagagaacaccaagcagcccagcaagagctgccacaagcccaaggccatcgtgcacaccgagaaagtgaacatgatgagcctgaccgtgctgggcctgcggatgctgttcgccaaaaccgtggccgtgaacttcctgctgaccgccaagctgttcttcctcagggccaagcgatctggatctggagcaacaaacttctcactactcaaacaagcaggtgacgtggaggagaatcccgggcctactagtatggactggatttggcgcatccttttccttgtcggcgctgctaccggcgcgcattccttcgaagaagtgcagctggttgagtctggcggcggactggttaagcctgagggaagcctgagactgtcttgtgccgccagcggcttcaccttcagcagatacggcatgagctgggtccgacaggctcctggcaaaggactggaatgggtgtccacaatttccggcggaggcacctacatctactaccccgatagcgtgaagggcagattcaccatctccagagacaacgccaagaacagcctgttcctccagatgaactccctgagagccgaggacacagccgtgtattattgcgctcgggacaactacggcagaaactacgactacggcatggactactggggccagggcacactggttaccgttagctctacgcgtgacaagcagctggacgccgacgtgtcccccaagcctaccatcttcctgccctctatcgccgagacaaagctccagaaggccggcacctacctgtgcctgctggaaaagttcttcccagatgtgattaagatccactggcaggaaaagaagtccaacaccatcctgggcagccaggaaggcaacaccatgaagaccaacgacacctacatgaagttcagctggctgaccgtgcccgagaagtccctggacaaagaacacagatgcatcgtgcggcacgaaaacaacaagaacggcgtggaccaggaaatcatcttcccacccatcaagaccgatgtgattacaatggaccccaaggacaactgctccaaggacgccaacgataccctgctgctccagctgaccaacaccagcgcctactacatgtacttgttgctgctgctgaagtccgtggtgtacttcgccatcatcacatgctgcctgctgcggagaaccgccttctgctgcaacggcgagaagtct

SEQ ID NO: 10050 - DNA, 2724 bp, Artificial Sequence
  Synthetic Polynucloetide
atggccttaccagtgaccgccttgctcctgccgctggccttgctgctccacgccgccaggccgctcgaggggaaaccaattcccaaccctcttctgggactggattcaaccggcagcggcgacaagcagctggacgccgacgtgtcccccaagcctaccatcttcctgccctctatcgccgagacaaagctccagaaggccggcacctacctgtgcctgctggaaaagttcttcccagatgtgattaagatccactggcaggaaaagaagtccaacaccatcctgggcagccaggaaggcaacaccatgaagaccaacgacacctacatgaagttcagctggctgaccgtgcccgagaagtccctggacaaagaacacagatgcatcgtgcggcacgaaaacaacaagaacggcgtggaccaggaaatcatcttcccacccatcaagaccgatgtgattacaatggaccccaaggacaactgctccaaggacgccaacgataccctgctgctccagctgaccaacaccagcgcctactacatgtacttgttgctgctgctgaagtccgtggtgtacttcgccatcatcacatgctgcctgctgcggagaaccgccttctgctgcaacggcgagaagtctagggccaagcgatctggatctggagcaacaaacttctcactactcaaacaagcaggtgacgtggaggagaatcccgggcctactagcatggccttaccagtgaccgccttgctcctgccgctggccttgctgctccacgccgccaggccggagatcgtgctgacacagtctcccgccacactgtcactgtctccaggcgaaagagccacactgagctgtagcgccaccagcagcgtgtcctacatccactggtatcagcagaagcccggacaggcccctagactgctgatctacagcaccagcaatctggcctctggcatccccgccagattttctggctctggaagcggcaccgacttcaccctgacaatcggcagactggaacccgaggacttcgccgtgtactactgccagcagagaagcagcagccccttcacctttggacagggcaccaaggtggaaatcaagagaggcggaggcggaagtggaggcggaggatctggcggcggaggctctgaagtgcagctggttgagtctggcggcggactggttaagcctgagggaagcctgagactgtcttgtgccgccagcggcttcaccttcagcagatacggcatgagctgggtccgacaggctcctggcaaaggactggaatgggtgtccacaatttccggcggaggcacctacatctactaccccgatagcgtgaagggcagattcaccatctccagagacaacgccaagaacagcctgttcctccagatgaactccctgagagccgaggacacagccgtgtattattgcgctcgggacaactacggcagaaactacgactacggcatggactactggggccagggcacactggttaccgttagctctacgcgtgagcagaaactgatctcggaagaggatgggagcggcagccagcctcacaccaagcccagcgtgttcgtgatgaagaacggcaccaacgtggcctgcctcgtgaaagagttctaccccaaggacatcaggatcaacctggtgtccagcaagaagatcaccgagttcgaccccgccatcgtgatctcccccagcggcaagtacaacgccgtgaagctggggaagtacgaggacagcaacagcgtgacctgctccgtgcagcacgacaacaagaccgtgcacagcaccgactttgaagtgaaaaccgactccaccgaccacgtgaagcccaaagagacagagaacaccaagcagcccagcaagagctgccacaagcccaaggccatcgtgcacaccgagaaagtgaacatgatgagcctgaccgtgctgggcctgcggatgctgttcgccaaaaccgtggccgtgaacttcctgctgaccgccaagctgttcttcctccgcgccaagagaagcggatctggcgtgaagcagaccctgaatttcgacctgctgaagctggctggcgacgtggaatccaacccaggcccttctagaggccatatgaccgagtacaagcccacggtgcgcctcgccacccgcgacgacgtccccagggccgtacgcaccctcgccgccgcgttcgccgactaccccgccacgcgccacaccgtcgatccggaccgccacatcgagcgggtcaccgagctgcaagaactcttcctcacgcgcgtcgggctcgacatcggcaaggtgtgggtcgcggacgacggcgccgcggtggcggtctggaccacgccggagagcgtcgaagcgggggcggtgttcgccgagatcggcccgcgcatggccgagttgagcggttcccggctggccgcgcagcaacagatggaaggcctcctggcgccgcaccggcccaaggagcccgcgtggttcctggccaccgtcggcgtctcgcccgaccaccagggcaagggtctgggcagcgccgtcgtgctccccggagtggaggcggccgagcgcgccggggtgcccgccttcctggagacctccgcgccccgcaacctccccttctacgagcggctcggcttcaccgtcaccgccgacgtcgaggtgcccgaaggaccgcgcacctggtgcatgacccgcaagcccggtgcctga

SEQ ID NO: 10051 - DNA, 3099 bp, Artificial Sequence
  Synthetic Polynucloetide
atggccttaccagtgaccgccttgctcctgccgctggccttgctgctccacgccgccaggccggagatcgtgctgacacagtctcccgccacactgtcactgtctccaggcgaaagagccacactgagctgtagcgccaccagcagcgtgtcctacatccactggtatcagcagaagcccggacaggcccctagactgctgatctacagcaccagcaatctggcctctggcatccccgccagattttctggctctggaagcggcaccgacttcaccctgacaatcggcagactggaacccgaggacttcgccgtgtactactgccagcagagaagcagcagccccttcacctttggacagggcaccaaggtggaaatcaagagaggacagcctaaggccaatcctaccgtgacactgttccctccaagcagcgaagaactccaggccaacaaggccacacttgtgtgcctgatctccgacttctaccctggggctgtgacagtggcttggaaggccgatggatctcctgtgaaagccggcgtggaaaccaccaagccatccaagcagagcaacaacaaatacgccgccagctcctacctgagcctgacacctgagcagtggaagtcccacagatcctacagctgccaagtgacccacgaaggcagcaccgtggaaaagacagtggcccctacagagtgcagcggatcccagagcttcggcctgctggaccccaagctgtgctacctgctggatggcatcctgttcatctacggcgtgatcctgaccgccctgttcctgagagtgaagttcagcagaagcgccgacgcccctgcctaccagcagggacagaaccaactgtacaacgagctgaacctgggcagacgggaagagtacgacgtgctggacaagcggagaggcagggaccctgagatgggcggaaagccccagcggagaaagaacccccaggaaggactgtataacgaactccagaaagacaagatggccgaagcctacagcgagatcggcatgaagggcgagcggagaagaggcaagggccacgatggcctgtaccagggcctgagcaccgccaccaaggacacctatgacgccctgcacatgcaggccctgcctccaagaagggccaagcgatctggatctggagcaacaaacttctcactactcaaacaagcaggtgacgtggaggagaatcccgggcctactagtatggactggatttggcgcatccttttccttgtcggcgctgctaccggcgcgcattccttcgaagaagtgcagctggttgagtctggcggcggactggttaagcctgagggaagcctgagactgtcttgtgccgccagcggcttcaccttcagcagatacggcatgagctgggtccgacaggctcctggcaaaggactggaatgggtgtccacaatttccggcggaggcacctacatctactaccccgatagcgtgaagggcagattcaccatctccagagacaacgccaagaacagcctgttcctccagatgaactccctgagagccgaggacacagccgtgtattattgcgctcgggacaactacggcagaaactacgactacggcatggactactggggccagggcacactggttaccgttagctctgcctctacaaagggaccctccgtgtttcctctggctcccagcagcaagtctacaagcggaggaacagccgctctgggctgcctggtcaaggattactttcccgagcctgtgaccgtgtcctggaatagcggagcactgacaagcggcgtgcacacctttccagccgtgctgcaaagcagcggcctgtactctctgagcagcgtggtcacagtgcctagctctagcctgggcacccagacctacatctgcaatgtgaaccacaagcctagcaacaccaaggtggacaagagagtggaacccaagagctgtggtacccagagttttgggttgttggaccctaaattgtgctatctgttggacggaatcctgttcatttacggagtgatcctgaccgcattgttcctgcgggttaagttttccagatccgcagacgcacccgcttaccaacaagggcagaaccaactctacaatgaacttaatttggggcggagggaagagtacgacgttctggacaaaaggaggggacgagatcccgagatgggcggaaagcctcagcgaaggaagaatccgcaagaggggctttataacgaactccagaaagataaaatggcagaagcctatagtgagattgggatgaagggagaaaggaggaggggtaaaggtcacgatgggttgtaccaaggattgagcacagccactaaagatacctatgatgcgctccacatgcaggccctgccgccaagacgcgccaagagaagcggatctggcgtgaagcagaccctgaatttcgacctgctgaagctggctggcgacgtggaatccaacccaggcccttctagaggccatatgaccgagtacaagcccacggtgcgcctcgccacccgcgacgacgtccccagggccgtacgcaccctcgccgccgcgttcgccgactaccccgccacgcgccacaccgtcgatccggaccgccacatcgagcgggtcaccgagctgcaagaactcttcctcacgcgcgtcgggctcgacatcggcaaggtgtgggtcgcggacgacggcgccgcggtggcggtctggaccacgccggagagcgtcgaagcgggggcggtgttcgccgagatcggcccgcgcatggccgagttgagcggttcccggctggccgcgcagcaacagatggaaggcctcctggcgccgcaccggcccaaggagcccgcgtggttcctggccaccgtcggcgtctcgcccgaccaccagggcaagggtctgggcagcgccgtcgtgctccccggagtggaggcggccgagcgcgccggggtgcccgccttcctggagacctccgcgccccgcaacctccccttctacgagcggctcggcttcaccgtcaccgccgacgtcgaggtgcccgaaggaccgcgcacctggtgcatgacccgcaagcccggtgcctga

SEQ ID NO: 10052 - DNA, 2454 bp, Artificial Sequence
  Synthetic Polynucloetide
atggccttaccagtgaccgccttgctcctgccgctggccttgctgctccacgccgccaggccggagatcgtgctgacacagtctcccgccacactgtcactgtctccaggcgaaagagccacactgagctgtagcgccaccagcagcgtgtcctacatccactggtatcagcagaagcccggacaggcccctagactgctgatctacagcaccagcaatctggcctctggcatccccgccagattttctggctctggaagcggcaccgacttcaccctgacaatcggcagactggaacccgaggacttcgccgtgtactactgccagcagagaagcagcagccccttcacctttggacagggcaccaaggtggaaatcaagagactcgaggacctgaagaacgtgttcccacctgaggtggccgtgttcgagcctagcgaggccgagatcagccacacccagaaagccaccctcgtgtgcctggctaccggcttctaccccgaccatgtggaactgtcttggtgggtcaacggcaaagaggtgcacagcggcgtgtctaccgacccccagccactgaaagaacagcccgccctgaacgacagccggtactgcctgagcagcagactgagagtgtccgccaccttctggcagaacccccggaaccacttcagatgccaggtgcagttctacggcctgagcgagaacgacgagtggacccaggacagagccaagcccgtgacccagatcgtgtctgccgaagcctggggcagagccgattgcggatcccagagcttcggcctgctggaccccaagctgtgctacctgctggatggcatcctgttcatctacggcgtgatcctgaccgccctgttcctgagagtgaagttcagcagaagcgccgacgcccctgcctaccagcagggacagaaccaactgtacaacgagctgaacctgggcagacgggaagagtacgacgtgctggacaagcggagaggcagggaccctgagatgggcggaaagccccagcggagaaagaacccccaggaaggactgtataacgaactccagaaagacaagatggccgaagcctacagcgagatcggcatgaagggcgagcggagaagaggcaagggccacgatggcctgtaccagggcctgagcaccgccaccaaggacacctatgacgccctgcacatgcaggccctgcctccaagaagggccaagcgatctggatctggagcaacaaacttctcactactcaaacaagcaggtgacgtggaggagaatcccgggcctactagtatggactggatttggcgcatccttttccttgtcggcgctgctaccggcgcgcattccttcgaagaagtgcagctggttgagtctggcggcggactggttaagcctgagggaagcctgagactgtcttgtgccgccagcggcttcaccttcagcagatacggcatgagctgggtccgacaggctcctggcaaaggactggaatgggtgtccacaatttccggcggaggcacctacatctactaccccgatagcgtgaagggcagattcaccatctccagagacaacgccaagaacagcctgttcctccagatgaactccctgagagccgaggacacagccgtgtattattgcgctcgggacaactacggcagaaactacgactacggcatggactactggggccagggcacactggttaccgttagctctacgcgtatccagaaccctgatcctgccgtgtaccagctgcgggatagcaagagcagcgacaagagcgtgtgtctgttcaccgacttcgacagccagaccaacgtgtcccagagcaaggactccgacgtgtacatcaccgataagaccgtgctggacatgcggagcatggacttcaagagcaactccgccgtggcctggtccaacaagtccgatttcgcctgcgccaacgccttcaacaacagcattatccccgaggacacattcttcccaagccccgagagcagctgcggtacccagagttttgggttgttggaccctaaattgtgctatctgttggacggaatcctgttcatttacggagtgatcctgaccgcattgttcctgcgggttaagttttccagatccgcagacgcacccgcttaccaacaagggcagaaccaactctacaatgaacttaatttggggcggagggaagagtacgacgttctggacaaaaggaggggacgagatcccgagatgggcggaaagcctcagcgaaggaagaatccgcaagaggggctttataacgaactccagaaagataaaatggcagaagcctatagtgagattgggatgaagggagaaaggaggaggggtaaaggtcacgatgggttgtaccaaggattgagcacagccactaaagatacctatgatgcgctccacatgcaggccctgccgccaaga

SEQ ID NO: 10053 - DNA, 2454 bp, Artificial Sequence
  Synthetic Polynucloetide
atggccttaccagtgaccgccttgctcctgccgctggccttgctgctccacgccgccaggccggagatcgtgctgacacagtctcccgccacactgtcactgtctccaggcgaaagagccacactgagctgtagcgccaccagcagcgtgtcctacatccactggtatcagcagaagcccggacaggcccctagactgctgatctacagcaccagcaatctggcctctggcatccccgccagattttctggctctggaagcggcaccgacttcaccctgacaatcggcagactggaacccgaggacttcgccgtgtactactgccagcagagaagcagcagccccttcacctttggacagggcaccaaggtggaaatcaagagactcgaggacctgaagaacgtgttcccacctgaggtggccgtgttcgagcctagcaaggccgagatcgcccacacccagaaagccaccctcgtgtgcctggctaccggcttctaccccgaccatgtggaactgtcttggtgggtcaacggcaaagaggtgcacagcggcgtgtgtaccgacccccagccactgaaagaacagcccgccctgaacgacagccggtactgcctgagcagcagactgagagtgtccgccaccttctggcagaacccccggaaccacttcagatgccaggtgcagttctacggcctgagcgagaacgacgagtggacccaggacagagccaagcccgtgacccagatcgtgtctgccgaagcctggggcagagccgattgcggatcccagagcttcggcctgctggaccccaagctgtgctacctgctggatggcatcctgttcatctacggcgtgatcctgaccgccctgttcctgagagtgaagttcagcagaagcgccgacgcccctgcctaccagcagggacagaaccaactgtacaacgagctgaacctgggcagacgggaagagtacgacgtgctggacaagcggagaggcagggaccctgagatgggcggaaagccccagcggagaaagaacccccaggaaggactgtataacgaactccagaaagacaagatggccgaagcctacagcgagatcggcatgaagggcgagcggagaagaggcaagggccacgatggcctgtaccagggcctgagcaccgccaccaaggacacctatgacgccctgcacatgcaggccctgcctccaagaagggccaagcgatctggatctggagcaacaaacttctcactactcaaacaagcaggtgacgtggaggagaatcccgggcctactagtatggactggatttggcgcatccttttccttgtcggcgctgctaccggcgcgcattccttcgaagaagtgcagctggttgagtctggcggcggactggttaagcctgagggaagcctgagactgtcttgtgccgccagcggcttcaccttcagcagatacggcatgagctgggtccgacaggctcctggcaaaggactggaatgggtgtccacaatttccggcggaggcacctacatctactaccccgatagcgtgaagggcagattcaccatctccagagacaacgccaagaacagcctgttcctccagatgaactccctgagagccgaggacacagccgtgtattattgcgctcgggacaactacggcagaaactacgactacggcatggactactggggccagggcacactggttaccgttagctctacgcgtatccagaaccctgatcctgccgtgtaccagctgcgggatagcaagagcagcgacaagagcgtgtgtctgttcaccgacttcgacagccagaccaacgtgtcccagagcaaggactccgacgtgtacatcaccgataagtgcgtgctggacatgcggagcatggacttcaagagcaactccgccgtggcctggtccaacaagtccgatttcgcctgcgccaacgccttcaacaacagcattatccccgaggacacattcttcccaagcagcgacgtgccctgcggtacccagagttttgggttgttggaccctaaattgtgctatctgttggacggaatcctgttcatttacggagtgatcctgaccgcattgttcctgcgggttaagttttccagatccgcagacgcacccgcttaccaacaagggcagaaccaactctacaatgaacttaatttggggcggagggaagagtacgacgttctggacaaaaggaggggacgagatcccgagatgggcggaaagcctcagcgaaggaagaatccgcaagaggggctttataacgaactccagaaagataaaatggcagaagcctatagtgagattgggatgaagggagaaaggaggaggggtaaaggtcacgatgggttgtaccaaggattgagcacagccactaaagatacctatgatgcgctccacatgcaggccctgccgccaaga

SEQ ID NO: 10054 - DNA, 2667 bp, Artificial Sequence
  Synthetic Polynucloetide
atggccttaccagtgaccgccttgctcctgccgctggccttgctgctccacgccgccaggccggagatcgtgctgacacagtctcccgccacactgtcactgtctccaggcgaaagagccacactgagctgtagcgccaccagcagcgtgtcctacatccactggtatcagcagaagcccggacaggcccctagactgctgatctacagcaccagcaatctggcctctggcatccccgccagattttctggctctggaagcggcaccgacttcaccctgacaatcggcagactggaacccgaggacttcgccgtgtactactgccagcagagaagcagcagccccttcacctttggacagggcaccaaggtggaaatcaagagactcgaggggaaaccaattcccaaccctcttctgggactggattcaaccggcagcggcgaggacctgaagaacgtgttcccacctgaggtggccgtgttcgagcctagcgaggccgagatcagccacacccagaaagccaccctcgtgtgcctggctaccggcttctaccccgaccatgtggaactgtcttggtgggtcaacggcaaagaggtgcacagcggcgtgtctaccgacccccagccactgaaagaacagcccgccctgaacgacagccggtactgcctgagcagcagactgagagtgtccgccaccttctggcagaacccccggaaccacttcagatgccaggtgcagttctacggcctgagcgagaacgacgagtggacccaggacagagccaagcccgtgacccagatcgtgtctgccgaagcctggggcagagccgattgcggatcccagagcttcggcctgctggaccccaagctgtgctacctgctggatggcatcctgttcatctacggcgtgatcctgaccgccctgttcctgagagtgaagttcagcagaagcgccgacgcccctgcctaccagcagggacagaaccaactgtacaacgagctgaacctgggcagacgggaagagtacgacgtgctggacaagcggagaggcagggaccctgagatgggcggaaagccccagcggagaaagaacccccaggaaggactgtataacgaactccagaaagacaagatggccgaagcctacagcgagatcggcatgaagggcgagcggagaagaggcaagggccacgatggcctgtaccagggcctgagcaccgccaccaaggacacctatgacgccctgcacatgcaggccctgcctccaagaagggccaagcgatctggatctggagcaacaaacttctcactactcaaacaagcaggtgacgtggaggagaatcccgggcctactagtatggactggatttggcgcatccttttccttgtcggcgctgctaccggcgcgcattccttcgaagaagtgcagctggttgagtctggcggcggactggttaagcctgagggaagcctgagactgtcttgtgccgccagcggcttcaccttcagcagatacggcatgagctgggtccgacaggctcctggcaaaggactggaatgggtgtccacaatttccggcggaggcacctacatctactaccccgatagcgtgaagggcagattcaccatctccagagacaacgccaagaacagcctgttcctccagatgaactccctgagagccgaggacacagccgtgtattattgcgctcgggacaactacggcagaaactacgactacggcatggactactggggccagggcacactggttaccgttagctctacgcgtgagcagaaactgatctcggaagaggatgggagcggcatccagaaccctgatcctgccgtgtaccagctgcgggatagcaagagcagcgacaagagcgtgtgtctgttcaccgacttcgacagccagaccaacgtgtcccagagcaaggactccgacgtgtacatcaccgataagaccgtgctggacatgcggagcatggacttcaagagcaactccgccgtggcctggtccaacaagtccgatttcgcctgcgccaacgccttcaacaacagcattatccccgaggacacattcttcccaagccccgagagcagctgcggtacccagagttttgggttgttggaccctaaattgtgctatctgttggacggaatcctgttcatttacggagtgatcctgaccgcattgttcctgaggagcaagcggtcacggctgctccacagcgattacatgaatatgacaccacgaagaccgggtcctactcgcaaacactaccaaccctacgcacctccccgcgactttgcagcgtaccgatctcgggttaagttttccagatccgcagacgcacccgcttaccaacaagggcagaaccaactctacaatgaacttaatttggggcggagggaagagtacgacgttctggacaaaaggaggggacgagatcccgagatgggcggaaagcctcagcgaaggaagaatccgcaagaggggctttataacgaactccagaaagataaaatggcagaagcctatagtgagattgggatgaagggagaaaggaggaggggtaaaggtcacgatgggttgtaccaaggattgagcacagccactaaagatacctatgatgcgctccacatgcaggccctgccgccaaga

SEQ ID NO: 10055 - DNA, 2790 bp, Artificial Sequence
  Synthetic Polynucloetide
atggccttaccagtgaccgccttgctcctgccgctggccttgctgctccacgccgccaggccggagatcgtgctgacacagtctcccgccacactgtcactgtctccaggcgaaagagccacactgagctgtagcgccaccagcagcgtgtcctacatccactggtatcagcagaagcccggacaggcccctagactgctgatctacagcaccagcaatctggcctctggcatccccgccagattttctggctctggaagcggcaccgacttcaccctgacaatcggcagactggaacccgaggacttcgccgtgtactactgccagcagagaagcagcagccccttcacctttggacagggcaccaaggtggaaatcaagagactcgaggggaaaccaattcccaaccctcttctgggactggattcaaccggcagcggcgaggacctgaagaacgtgttcccacctgaggtggccgtgttcgagcctagcgaggccgagatcagccacacccagaaagccaccctcgtgtgcctggctaccggcttctaccccgaccatgtggaactgtcttggtgggtcaacggcaaagaggtgcacagcggcgtgtctaccgacccccagccactgaaagaacagcccgccctgaacgacagccggtactgcctgagcagcagactgagagtgtccgccaccttctggcagaacccccggaaccacttcagatgccaggtgcagttctacggcctgagcgagaacgacgagtggacccaggacagagccaagcccgtgacccagatcgtgtctgccgaagcctggggcagagccgattgcggatcccagagcttcggcctgctggaccccaagctgtgctacctgctggatggcatcctgttcatctacggcgtgatcctgaccgccctgttcctgaggagtaagaggagcaggctcctgcacagtgactacatgaacatgactccacgccgccccggacccacccgcaagcattaccagccctatgccccaccacgcgacttcgcagcctatcgctccagagtgaagttcagcagaagcgccgacgcccctgcctaccagcagggacagaaccaactgtacaacgagctgaacctgggcagacgggaagagtacgacgtgctggacaagcggagaggcagggaccctgagatgggcggaaagccccagcggagaaagaacccccaggaaggactgtataacgaactccagaaagacaagatggccgaagcctacagcgagatcggcatgaagggcgagcggagaagaggcaagggccacgatggcctgtaccagggcctgagcaccgccaccaaggacacctatgacgccctgcacatgcaggccctgcctccaagaagggccaagcgatctggatctggagcaacaaacttctcactactcaaacaagcaggtgacgtggaggagaatcccgggcctactagtatggactggatttggcgcatccttttccttgtcggcgctgctaccggcgcgcattccttcgaagaagtgcagctggttgagtctggcggcggactggttaagcctgagggaagcctgagactgtcttgtgccgccagcggcttcaccttcagcagatacggcatgagctgggtccgacaggctcctggcaaaggactggaatgggtgtccacaatttccggcggaggcacctacatctactaccccgatagcgtgaagggcagattcaccatctccagagacaacgccaagaacagcctgttcctccagatgaactccctgagagccgaggacacagccgtgtattattgcgctcgggacaactacggcagaaactacgactacggcatggactactggggccagggcacactggttaccgttagctctacgcgtgagcagaaactgatctcggaagaggatgggagcggcatccagaaccctgatcctgccgtgtaccagctgcgggatagcaagagcagcgacaagagcgtgtgtctgttcaccgacttcgacagccagaccaacgtgtcccagagcaaggactccgacgtgtacatcaccgataagaccgtgctggacatgcggagcatggacttcaagagcaactccgccgtggcctggtccaacaagtccgatttcgcctgcgccaacgccttcaacaacagcattatccccgaggacacattcttcccaagccccgagagcagctgcggtacccagagttttgggttgttggaccctaaattgtgctatctgttggacggaatcctgttcatttacggagtgatcctgaccgcattgttcctgaggagcaagcggtcacggctgctccacagcgattacatgaatatgacaccacgaagaccgggtcctactcgcaaacactaccaaccctacgcacctccccgcgactttgcagcgtaccgatctcgggttaagttttccagatccgcagacgcacccgcttaccaacaagggcagaaccaactctacaatgaacttaatttggggcggagggaagagtacgacgttctggacaaaaggaggggacgagatcccgagatgggcggaaagcctcagcgaaggaagaatccgcaagaggggctttataacgaactccagaaagataaaatggcagaagcctatagtgagattgggatgaagggagaaaggaggaggggtaaaggtcacgatgggttgtaccaaggattgagcacagccactaaagatacctatgatgcgctccacatgcaggccctgccgccaaga

SEQ ID NO: 10056 - DNA, 2673 bp, Artificial Sequence
  Synthetic Polynucloetide
atggccttaccagtgaccgccttgctcctgccgctggccttgctgctccacgccgccaggccggagatcgtgctgacacagtctcccgccacactgtcactgtctccaggcgaaagagccacactgagctgtagcgccaccagcagcgtgtcctacatccactggtatcagcagaagcccggacaggcccctagactgctgatctacagcaccagcaatctggcctctggcatccccgccagattttctggctctggaagcggcaccgacttcaccctgacaatcggcagactggaacccgaggacttcgccgtgtactactgccagcagagaagcagcagccccttcacctttggacagggcaccaaggtggaaatcaagagactcgaggggaaaccaattcccaaccctcttctgggactggattcaaccggcagcggcgaggacctgaagaacgtgttcccacctgaggtggccgtgttcgagcctagcgaggccgagatcagccacacccagaaagccaccctcgtgtgcctggctaccggcttctaccccgaccatgtggaactgtcttggtgggtcaacggcaaagaggtgcacagcggcgtgtctaccgacccccagccactgaaagaacagcccgccctgaacgacagccggtactgcctgagcagcagactgagagtgtccgccaccttctggcagaacccccggaaccacttcagatgccaggtgcagttctacggcctgagcgagaacgacgagtggacccaggacagagccaagcccgtgacccagatcgtgtctgccgaagcctggggcagagccgattgcggatcccagagcttcggcctgctggaccccaagctgtgctacctgctggatggcatcctgttcatctacggcgtgatcctgaccgccctgttcctgagagtgaagttcagcagaagcgccgacgcccctgcctaccagcagggacagaaccaactgtacaacgagctgaacctgggcagacgggaagagtacgacgtgctggacaagcggagaggcagggaccctgagatgggcggaaagccccagcggagaaagaacccccaggaaggactgtataacgaactccagaaagacaagatggccgaagcctacagcgagatcggcatgaagggcgagcggagaagaggcaagggccacgatggcctgtaccagggcctgagcaccgccaccaaggacacctatgacgccctgcacatgcaggccctgcctccaagaagggccaagcgatctggatctggagcaacaaacttctcactactcaaacaagcaggtgacgtggaggagaatcccgggcctactagtatggactggatttggcgcatccttttccttgtcggcgctgctaccggcgcgcattccttcgaagaagtgcagctggttgagtctggcggcggactggttaagcctgagggaagcctgagactgtcttgtgccgccagcggcttcaccttcagcagatacggcatgagctgggtccgacaggctcctggcaaaggactggaatgggtgtccacaatttccggcggaggcacctacatctactaccccgatagcgtgaagggcagattcaccatctccagagacaacgccaagaacagcctgttcctccagatgaactccctgagagccgaggacacagccgtgtattattgcgctcgggacaactacggcagaaactacgactacggcatggactactggggccagggcacactggttaccgttagctctacgcgtgagcagaaactgatctcggaagaggatctggggagcggcatccagaaccctgatcctgccgtgtaccagctgcgggatagcaagagcagcgacaagagcgtgtgtctgttcaccgacttcgacagccagaccaacgtgtcccagagcaaggactccgacgtgtacatcaccgataagaccgtgctggacatgcggagcatggacttcaagagcaactccgccgtggcctggtccaacaagtccgatttcgcctgcgccaacgccttcaacaacagcattatccccgaggacacattcttcccaagccccgagagcagctgcggtacccagagttttgggttgttggaccctaaattgtgctatctgttggacggaatcctgttcatttacggagtgatcctgaccgcattgttcctgaagagaggccggaagaagctgctgtacatcttcaagcagcctttcatgcggcccgtgcagaccacccaggaagaggacggctgctcctgccggttccccgaggaagaagaaggcggctgcgagctgcgggttaagttttccagatccgcagacgcacccgcttaccaacaagggcagaaccaactctacaatgaacttaatttggggcggagggaagagtacgacgttctggacaaaaggaggggacgagatcccgagatgggcggaaagcctcagcgaaggaagaatccgcaagaggggctttataacgaactccagaaagataaaatggcagaagcctatagtgagattgggatgaagggagaaaggaggaggggtaaaggtcacgatgggttgtaccaaggattgagcacagccactaaagatacctatgatgcgctccacatgcaggccctgccgccaaga

SEQ ID NO: 10057 - DNA, 2799 bp, Artificial Sequence
  Synthetic Polynucloetide
atggccttaccagtgaccgccttgctcctgccgctggccttgctgctccacgccgccaggccggagatcgtgctgacacagtctcccgccacactgtcactgtctccaggcgaaagagccacactgagctgtagcgccaccagcagcgtgtcctacatccactggtatcagcagaagcccggacaggcccctagactgctgatctacagcaccagcaatctggcctctggcatccccgccagattttctggctctggaagcggcaccgacttcaccctgacaatcggcagactggaacccgaggacttcgccgtgtactactgccagcagagaagcagcagccccttcacctttggacagggcaccaaggtggaaatcaagagactcgaggggaaaccaattcccaaccctcttctgggactggattcaaccggcagcggcgaggacctgaagaacgtgttcccacctgaggtggccgtgttcgagcctagcgaggccgagatcagccacacccagaaagccaccctcgtgtgcctggctaccggcttctaccccgaccatgtggaactgtcttggtgggtcaacggcaaagaggtgcacagcggcgtgtctaccgacccccagccactgaaagaacagcccgccctgaacgacagccggtactgcctgagcagcagactgagagtgtccgccaccttctggcagaacccccggaaccacttcagatgccaggtgcagttctacggcctgagcgagaacgacgagtggacccaggacagagccaagcccgtgacccagatcgtgtctgccgaagcctggggcagagccgattgcggatcccagagcttcggcctgctggaccccaagctgtgctacctgctggatggcatcctgttcatctacggcgtgatcctgaccgccctgttcctgaaacggggcagaaagaaactcctgtatatattcaaacaaccatttatgagaccagtacaaactactcaagaggaagatggctgtagctgccgatttccagaagaagaagaaggaggatgtgaactgagagtgaagttcagcagaagcgccgacgcccctgcctaccagcagggacagaaccaactgtacaacgagctgaacctgggcagacgggaagagtacgacgtgctggacaagcggagaggcagggaccctgagatgggcggaaagccccagcggagaaagaacccccaggaaggactgtataacgaactccagaaagacaagatggccgaagcctacagcgagatcggcatgaagggcgagcggagaagaggcaagggccacgatggcctgtaccagggcctgagcaccgccaccaaggacacctatgacgccctgcacatgcaggccctgcctccaagaagggccaagcgatctggatctggagcaacaaacttctcactactcaaacaagcaggtgacgtggaggagaatcccgggcctactagtatggactggatttggcgcatccttttccttgtcggcgctgctaccggcgcgcattccttcgaagaagtgcagctggttgagtctggcggcggactggttaagcctgagggaagcctgagactgtcttgtgccgccagcggcttcaccttcagcagatacggcatgagctgggtccgacaggctcctggcaaaggactggaatgggtgtccacaatttccggcggaggcacctacatctactaccccgatagcgtgaagggcagattcaccatctccagagacaacgccaagaacagcctgttcctccagatgaactccctgagagccgaggacacagccgtgtattattgcgctcgggacaactacggcagaaactacgactacggcatggactactggggccagggcacactggttaccgttagctctacgcgtgagcagaaactgatctcggaagaggatctggggagcggcatccagaaccctgatcctgccgtgtaccagctgcgggatagcaagagcagcgacaagagcgtgtgtctgttcaccgacttcgacagccagaccaacgtgtcccagagcaaggactccgacgtgtacatcaccgataagaccgtgctggacatgcggagcatggacttcaagagcaactccgccgtggcctggtccaacaagtccgatttcgcctgcgccaacgccttcaacaacagcattatccccgaggacacattcttcccaagccccgagagcagctgcggtacccagagttttgggttgttggaccctaaattgtgctatctgttggacggaatcctgttcatttacggagtgatcctgaccgcattgttcctgaagagaggccggaagaagctgctgtacatcttcaagcagcctttcatgcggcccgtgcagaccacccaggaagaggacggctgctcctgccggttccccgaggaagaagaaggcggctgcgagctgcgggttaagttttccagatccgcagacgcacccgcttaccaacaagggcagaaccaactctacaatgaacttaatttggggcggagggaagagtacgacgttctggacaaaaggaggggacgagatcccgagatgggcggaaagcctcagcgaaggaagaatccgcaagaggggctttataacgaactccagaaagataaaatggcagaagcctatagtgagattgggatgaagggagaaaggaggaggggtaaaggtcacgatgggttgtaccaaggattgagcacagccactaaagatacctatgatgcgctccacatgcaggccctgccgccaaga

SEQ ID NO: 10058 - DNA, 2472 bp, Artificial Sequence
  Synthetic Polynucloetide
atggccttaccagtgaccgccttgctcctgccgctggccttgctgctccacgccgccaggccggagatcgtgctgacacagtctcccgccacactgtcactgtctccaggcgaaagagccacactgagctgtagcgccaccagcagcgtgtcctacatccactggtatcagcagaagcccggacaggcccctagactgctgatctacagcaccagcaatctggcctctggcatccccgccagattttctggctctggaagcggcaccgacttcaccctgacaatcggcagactggaacccgaggacttcgccgtgtactactgccagcagagaagcagcagccccttcacctttggacagggcaccaaggtggaaatcaagagactcgagcagagcttcggcctgctggaccccaagctgtgctacctgctggatggcatcctgttcatctacggcgtgatcctgaccgccctgttcctgagagtgaagttcagcagaagcgccgacgcccctgcctaccagcagggacagaaccaactgtacaacgagctgaacctgggcagacgggaagagtacgacgtgctggacaagcggagaggcagggaccctgagatgggcggaaagccccagcggagaaagaacccccaggaaggactgtataacgaactccagaaagacaagatggccgaagcctacagcgagatcggcatgaagggcgagcggagaagaggcaagggccacgatggcctgtaccagggcctgagcaccgccaccaaggacacctatgacgccctgcacatgcaggccctgcctccaagaagggccaagcgatctggatctggagcaacaaacttctcactactcaaacaagcaggtgacgtggaggagaatcccgggcctactagtatggactggatttggcgcatccttttccttgtcggcgctgctaccggcgcgcattccttcgaagaagtgcagctggttgagtctggcggcggactggttaagcctgagggaagcctgagactgtcttgtgccgccagcggcttcaccttcagcagatacggcatgagctgggtccgacaggctcctggcaaaggactggaatgggtgtccacaatttccggcggaggcacctacatctactaccccgatagcgtgaagggcagattcaccatctccagagacaacgccaagaacagcctgttcctccagatgaactccctgagagccgaggacacagccgtgtattattgcgctcgggacaactacggcagaaactacgactacggcatggactactggggccagggcacactggttaccgttagctctacgcgtcagagttttgggttgttggaccctaaattgtgctatctgttggacggaatcctgttcatttacggagtgatcctgaccgcattgttcctgcgggttaagttttccagatccgcagacgcacccgcttaccaacaagggcagaaccaactctacaatgaacttaatttggggcggagggaagagtacgacgttctggacaaaaggaggggacgagatcccgagatgggcggaaagcctcagcgaaggaagaatccgcaagaggggctttataacgaactccagaaagataaaatggcagaagcctatagtgagattgggatgaagggagaaaggaggaggggtaaaggtcacgatgggttgtaccaaggattgagcacagccactaaagatacctatgatgcgctccacatgcaggccctgccgccaagacgcgccaagagaagcggatctggcgtgaagcagaccctgaatttcgacctgctgaagctggctggcgacgtggaatccaacccaggcccttctagaggccatatgaccgagtacaagcccacggtgcgcctcgccacccgcgacgacgtccccagggccgtacgcaccctcgccgccgcgttcgccgactaccccgccacgcgccacaccgtcgatccggaccgccacatcgagcgggtcaccgagctgcaagaactcttcctcacgcgcgtcgggctcgacatcggcaaggtgtgggtcgcggacgacggcgccgcggtggcggtctggaccacgccggagagcgtcgaagcgggggcggtgttcgccgagatcggcccgcgcatggccgagttgagcggttcccggctggccgcgcagcaacagatggaaggcctcctggcgccgcaccggcccaaggagcccgcgtggttcctggccaccgtcggcgtctcgcccgaccaccagggcaagggtctgggcagcgccgtcgtgctccccggagtggaggcggccgagcgcgccggggtgcccgccttcctggagacctccgcgccccgcaacctccccttctacgagcggctcggcttcaccgtcaccgccgacgtcgaggtgcccgaaggaccgcgcacctggtgcatgacccgcaagcccggtgcctga

SEQ ID NO: 10059 - DNA, 1944 bp, Artificial Sequence
  Synthetic Polynucloetide
atggccttaccagtgaccgccttgctcctgccgctggccttgctgctccacgccgccaggccggagatcgtgctgacacagtctcccgccacactgtcactgtctccaggcgaaagagccacactgagctgtagcgccaccagcagcgtgtcctacatccactggtatcagcagaagcccggacaggcccctagactgctgatctacagcaccagcaatctggcctctggcatccccgccagattttctggctctggaagcggcaccgacttcaccctgacaatcggcagactggaacccgaggacttcgccgtgtactactgccagcagagaagcagcagccccttcacctttggacagggcaccaaggtggaaatcaagagactcgagggacagcctaaggccaatcctaccgtgacactgttccctccaagcagcgaagaactccaggccaacaaggccacacttgtgtgcctgatctccgacttctaccctggggctgtgacagtggcttggaaggccgatggatctcctgtgaaagccggcgtggaaaccaccaagccatccaagcagagcaacaacaaatacgccgccagctcctacctgagcctgacacctgagcagtggaagtcccacagatcctacagctgccaagtgacccacgaaggcagcaccgtggaaaagacagtggcccctacagagtgcagccccatcaagaccgatgtgattacaatggaccccaaggacaactgctccaaggacgccaacgataccctgctgctccagctgaccaacaccagcgcctactacatgtacttgttgctgctgctgaagtccgtggtgtacttcgccatcatcacatgctgcctgctgcggagaaccgccttctgctgcaacggcgagaagtctagggccaagcgatctggatctggagcaacaaacttctcactactcaaacaagcaggtgacgtggaggagaatcccgggcctactagtatggactggatttggcgcatccttttccttgtcggcgctgctaccggcgcgcattccttcgaagaagtgcagctggttgagtctggcggcggactggttaagcctgagggaagcctgagactgtcttgtgccgccagcggcttcaccttcagcagatacggcatgagctgggtccgacaggctcctggcaaaggactggaatgggtgtccacaatttccggcggaggcacctacatctactaccccgatagcgtgaagggcagattcaccatctccagagacaacgccaagaacagcctgttcctccagatgaactccctgagagccgaggacacagccgtgtattattgcgctcgggacaactacggcagaaactacgactacggcatggactactggggccagggcacactggttaccgttagctctacgcgtgcctctacaaagggaccctccgtgtttcctctggctcccagcagcaagtctacaagcggaggaacagccgctctgggctgcctggtcaaggattactttcccgagcctgtgaccgtgtcctggaatagcggagcactgacaagcggcgtgcacacctttccagccgtgctgcaaagcagcggcctgtactctctgagcagcgtggtcacagtgcctagctctagcctgggcacccagacctacatctgcaatgtgaaccacaagcctagcaacaccaaggtggacaagagagtggaacccaagagctgtgaagtgaaaaccgactccaccgaccacgtgaagcccaaagagacagagaacaccaagcagcccagcaagagctgccacaagcccaaggccatcgtgcacaccgagaaagtgaacatgatgagcctgaccgtgctgggcctgcggatgctgttcgccaaaaccgtggccgtgaacttcctgctgaccgccaagctgttcttcctc

SEQ ID NO: 10060 - DNA, 1878 bp, Artificial Sequence
  Synthetic Polynucloetide
atggccttaccagtgaccgccttgctcctgccgctggccttgctgctccacgccgccaggccggagatcgtgctgacacagtctcccgccacactgtcactgtctccaggcgaaagagccacactgagctgtagcgccaccagcagcgtgtcctacatccactggtatcagcagaagcccggacaggcccctagactgctgatctacagcaccagcaatctggcctctggcatccccgccagattttctggctctggaagcggcaccgacttcaccctgacaatcggcagactggaacccgaggacttcgccgtgtactactgccagcagagaagcagcagccccttcacctttggacagggcaccaaggtggaaatcaagagactcgagggacagcctaaggccaatcctaccgtgacactgttccctccaagcagcgaagaactccaggccaacaaggccacacttgtgtgcctgatctccgacttctaccctggggctgtgacagtggcttggaaggccgatggatctcctgtgaaagccggcgtggaaaccaccaagccatccaagcagagcaacaacaaatacgccgccagctcctacctgagcctgacacctgagcagtggaagtcccacagatcctacagctgccaagtgacccacgaaggcagcaccgtggaaaagacagtggcccctacagagtgcagcggcagagccgattgcggcatcaccagcgccagctaccaccagggcgtgctgagcgccaccatcctgtacgagatcctgctgggcaaggccaccctgtacgccgtgctggtgtctgccctggtgctgatggctatggtcaagcggaaggacagccggggaagggccaagcgatctggatctggagcaacaaacttctcactactcaaacaagcaggtgacgtggaggagaatcccgggcctactagtatggactggatttggcgcatccttttccttgtcggcgctgctaccggcgcgcattccttcgaagaagtgcagctggttgagtctggcggcggactggttaagcctgagggaagcctgagactgtcttgtgccgccagcggcttcaccttcagcagatacggcatgagctgggtccgacaggctcctggcaaaggactggaatgggtgtccacaatttccggcggaggcacctacatctactaccccgatagcgtgaagggcagattcaccatctccagagacaacgccaagaacagcctgttcctccagatgaactccctgagagccgaggacacagccgtgtattattgcgctcgggacaactacggcagaaactacgactacggcatggactactggggccagggcacactggttaccgttagctctacgcgtgcctctacaaagggaccctccgtgtttcctctggctcccagcagcaagtctacaagcggaggaacagccgctctgggctgcctggtcaaggattactttcccgagcctgtgaccgtgtcctggaatagcggagcactgacaagcggcgtgcacacctttccagccgtgctgcaaagcagcggcctgtactctctgagcagcgtggtcacagtgcctagctctagcctgggcacccagacctacatctgcaatgtgaaccacaagcctagcaacaccaaggtggacaagagagtggaacccaagagctgtatccccgaggacacattcttcccaagcagcgacgtgccctgcgacgtgaagctggtggaaaagagcttcgagacagacaccaacctgaacttccagaacctgagcgtgatcggcttcagaatcctgctgctgaaagtggccggctttaacctgctgatgaccctgcggctgtggtccagc

SEQ ID NO: 10061 - DNA, 1878 bp, Artificial Sequence
  Synthetic Polynucloetide
atggccttaccagtgaccgccttgctcctgccgctggccttgctgctccacgccgccaggccggagatcgtgctgacacagtctcccgccacactgtcactgtctccaggcgaaagagccacactgagctgtagcgccaccagcagcgtgtcctacatccactggtatcagcagaagcccggacaggcccctagactgctgatctacagcaccagcaatctggcctctggcatccccgccagattttctggctctggaagcggcaccgacttcaccctgacaatcggcagactggaacccgaggacttcgccgtgtactactgccagcagagaagcagcagccccttcacctttggacagggcaccaaggtggaaatcaagagactcgagggacagcctaaggccaatcctaccgtgacactgttccctccaagcagcgaagaactccaggccaacaaggccacacttgtgtgcctgatctccgacttctaccctggggctgtgacagtggcttggaaggccgatggatctcctgtgaaagccggcgtggaaaccaccaagccatccaagcagagcaacaacaaatacgccgccagctcctacctgagcctgacacctgagcagtggaagtcccacagatcctacagctgccaagtgacccacgaaggcagcaccgtggaaaagacagtggcccctacagagtgcagcggcagagccgattgcggctttaccagcgagagctaccagcagggcgtgctgagcgccaccatcctgtacgagatcctgctgggcaaggccaccctgtacgccgtgctggtgtctgccctggtgctgatggctatggtcaagcggaaggacagccggggaagggccaagcgatctggatctggagcaacaaacttctcactactcaaacaagcaggtgacgtggaggagaatcccgggcctactagtatggactggatttggcgcatccttttccttgtcggcgctgctaccggcgcgcattccttcgaagaagtgcagctggttgagtctggcggcggactggttaagcctgagggaagcctgagactgtcttgtgccgccagcggcttcaccttcagcagatacggcatgagctgggtccgacaggctcctggcaaaggactggaatgggtgtccacaatttccggcggaggcacctacatctactaccccgatagcgtgaagggcagattcaccatctccagagacaacgccaagaacagcctgttcctccagatgaactccctgagagccgaggacacagccgtgtattattgcgctcgggacaactacggcagaaactacgactacggcatggactactggggccagggcacactggttaccgttagctctacgcgtgcctctacaaagggaccctccgtgtttcctctggctcccagcagcaagtctacaagcggaggaacagccgctctgggctgcctggtcaaggattactttcccgagcctgtgaccgtgtcctggaatagcggagcactgacaagcggcgtgcacacctttccagccgtgctgcaaagcagcggcctgtactctctgagcagcgtggtcacagtgcctagctctagcctgggcacccagacctacatctgcaatgtgaaccacaagcctagcaacaccaaggtggacaagagagtggaacccaagagctgtatccccgaggacacattcttcccaagccccgagagcagctgcgacgtgaagctggtggaaaagagcttcgagacagacaccaacctgaacttccagaacctgagcgtgatcggcttcagaatcctgctgctgaaagtggccggctttaacctgctgatgaccctgcggctgtggtccagc

SEQ ID NO: 10062 - DNA, 1356 bp, Artificial Sequence
  Synthetic Polynucloetide
atggccttaccagtgaccgccttgctcctgccgctggccttgctgctccacgccgccaggccggagatcgtgctgacacagtctcccgccacactgtcactgtctccaggcgaaagagccacactgagctgtagcgccaccagcagcgtgtcctacatccactggtatcagcagaagcccggacaggcccctagactgctgatctacagcaccagcaatctggcctctggcatccccgccagattttctggctctggaagcggcaccgacttcaccctgacaatcggcagactggaacccgaggacttcgccgtgtactactgccagcagagaagcagcagccccttcacctttggacagggcaccaaggtggaaatcaagagaggcggaggcggaagtggaggcggaggatctggcggcggaggctctgaagtgcagctggttgagtctggcggcggactggttaagcctgagggaagcctgagactgtcttgtgccgccagcggcttcaccttcagcagatacggcatgagctgggtccgacaggctcctggcaaaggactggaatgggtgtccacaatttccggcggaggcacctacatctactaccccgatagcgtgaagggcagattcaccatctccagagacaacgccaagaacagcctgttcctccagatgaactccctgagagccgaggacacagccgtgtattattgcgctcgggacaactacggcagaaactacgactacggcatggactactggggccagggcacactggttaccgttagctctacgcgtgacggtaacgaggagatgggaggaatcactcaaaccccttacaaagtctcaatttcaggaacaactgttatccttacatgtccccagtatcctggcagcgagatcctttggcagcataacgacaagaatatagggggagatgaagacgataagaatatcggatctgacgaggatcacttgagcctgaaagagttctccgagcttgaacaaagcggatattatgtgtgctatccgcgcgggtcaaagccggaagacgctaacttttacctttatctccgagccagagtgtgcgaaaattgcatggaaatggacgttatgtccgttgctacaatagttatcgtagatatatgcatcacgggtggactgcttctgctggtttattattggtccaagaatagaaaggccaaagctaaacccgtgaccagaggcgctggcgcaggcggaaggcaaaggggacaaaacaaagaacggccaccaccagtgccaaatccagattatgagcctattcggaaaggacagagggacctgtactctggcctgaatcagagaagaatc

SEQ ID NO: 10063 - DNA, 1251 bp, Artificial Sequence
  Synthetic Polynucloetide
atggccttaccagtgaccgccttgctcctgccgctggccttgctgctccacgccgccaggccggagatcgtgctgacacagtctcccgccacactgtcactgtctccaggcgaaagagccacactgagctgtagcgccaccagcagcgtgtcctacatccactggtatcagcagaagcccggacaggcccctagactgctgatctacagcaccagcaatctggcctctggcatccccgccagattttctggctctggaagcggcaccgacttcaccctgacaatcggcagactggaacccgaggacttcgccgtgtactactgccagcagagaagcagcagccccttcacctttggacagggcaccaaggtggaaatcaagagaggcggaggcggaagtggaggcggaggatctggcggcggaggctctgaagtgcagctggttgagtctggcggcggactggttaagcctgagggaagcctgagactgtcttgtgccgccagcggcttcaccttcagcagatacggcatgagctgggtccgacaggctcctggcaaaggactggaatgggtgtccacaatttccggcggaggcacctacatctactaccccgatagcgtgaagggcagattcaccatctccagagacaacgccaagaacagcctgttcctccagatgaactccctgagagccgaggacacagccgtgtattattgcgctcgggacaactacggcagaaactacgactacggcatggactactggggccagggcacactggttaccgttagctctacgcgtttcaagatccccatcgaggaactggaagatcgggtgttcgtgaactgcaacacctctatcacctgggtggaaggcaccgtgggaacactgctgagcgacatcaccagactggacctcggcaagcggattctggaccctcggggcatctacagatgcaacggcaccgacatctacaaggacaaagaaagcaccgtgcaggtccactacagaatgtgccagtcctgcgtggaactggaccctgctacagtggccggcatcatcgtgaccgatgtgatcgctactctgctgctggctctgggagtgttctgcttcgccggacacgaaacaggcagactgtctggcgctgccgatacacaggccctgctgagaaacgaccaagtgtatcagcccctgcgcgacagagatgatgcccagtattctcacctcggcggcaactgggctagaaacaag

SEQ ID NO: 10064 - DNA, 1281 bp, Artificial Sequence
  Synthetic Polynucloetide
atggccttaccagtgaccgccttgctcctgccgctggccttgctgctccacgccgccaggccggagatcgtgctgacacagtctcccgccacactgtcactgtctccaggcgaaagagccacactgagctgtagcgccaccagcagcgtgtcctacatccactggtatcagcagaagcccggacaggcccctagactgctgatctacagcaccagcaatctggcctctggcatccccgccagattttctggctctggaagcggcaccgacttcaccctgacaatcggcagactggaacccgaggacttcgccgtgtactactgccagcagagaagcagcagccccttcacctttggacagggcaccaaggtggaaatcaagagaggcggaggcggaagtggaggcggaggatctggcggcggaggctctgaagtgcagctggttgagtctggcggcggactggttaagcctgagggaagcctgagactgtcttgtgccgccagcggcttcaccttcagcagatacggcatgagctgggtccgacaggctcctggcaaaggactggaatgggtgtccacaatttccggcggaggcacctacatctactaccccgatagcgtgaagggcagattcaccatctccagagacaacgccaagaacagcctgttcctccagatgaactccctgagagccgaggacacagccgtgtattattgcgctcgggacaactacggcagaaactacgactacggcatggactactggggccagggcacactggttaccgttagctctacgcgtcagagcatcaagggcaaccacctggtcaaggtgtacgactaccaagaggacggcagcgtgctgctgacatgtgatgccgaggccaagaacatcacctggtttaaggacggcaagatgatcggcttcctgaccgaggacaagaagaagtggaacctgggcagcaacgctaaggaccccagaggcatgtatcagtgcaagggcagccagaacaagagcaagcccctccaggtgtactaccggatgtgccagaactgcatcgagctgaacgccgctaccatcagcggctttctgttcgccgagatcgtgtccatcttcgtgctggccgtgggcgtgtactttatcgctggacaggatggcgtgcggcagagcagagcttccgataagcaaaccctgctgcctaacgaccagctgtaccagcctctgaaggacagagaggacgaccagtacagccacctccagggcaatcagctgagaagaaac

SEQ ID NO: 10065 - DNA, 1230 bp, Artificial Sequence
  Synthetic Polynucloetide
atggccttaccagtgaccgccttgctcctgccgctggccttgctgctccacgccgccaggccggagatcgtgctgacacagtctcccgccacactgtcactgtctccaggcgaaagagccacactgagctgtagcgccaccagcagcgtgtcctacatccactggtatcagcagaagcccggacaggcccctagactgctgatctacagcaccagcaatctggcctctggcatccccgccagattttctggctctggaagcggcaccgacttcaccctgacaatcggcagactggaacccgaggacttcgccgtgtactactgccagcagagaagcagcagccccttcacctttggacagggcaccaaggtggaaatcaagagaggcggaggcggaagtggaggcggaggatctggcggcggaggctctgaagtgcagctggttgagtctggcggcggactggttaagcctgagggaagcctgagactgtcttgtgccgccagcggcttcaccttcagcagatacggcatgagctgggtccgacaggctcctggcaaaggactggaatgggtgtccacaatttccggcggaggcacctacatctactaccccgatagcgtgaagggcagattcaccatctccagagacaacgccaagaacagcctgttcctccagatgaactccctgagagccgaggacacagccgtgtattattgcgctcgggacaactacggcagaaactacgactacggcatggactactggggccagggcacactggttaccgttagctctacgcgtcagagttttgggttgttggaccctaaattgtgctatctgttggacggaatcctgttcatttacggagtgatcctgaccgcattgttcctgcgggttaagttttccagatccgcagacgcacccgcttaccaacaagggcagaaccaactctacaatgaacttaatttggggcggagggaagagtacgacgttctggacaaaaggaggggacgagatcccgagatgggcggaaagcctcagcgaaggaagaatccgcaagaggggctttataacgaactccagaaagataaaatggcagaagcctatagtgagattgggatgaagggagaaaggaggaggggtaaaggtcacgatgggttgtaccaaggattgagcacagccactaaagatacctatgatgcgctccacatgcaggccctgccgccaaga

SEQ ID NO: 10066 - DNA, 1356 bp, Artificial Sequence
  Synthetic Polynucloetide
atggccttaccagtgaccgccttgctcctgccgctggccttgctgctccacgccgccaggccggaagtgcagctggttgagtctggcggcggactggttaagcctgagggaagcctgagactgtcttgtgccgccagcggcttcaccttcagcagatacggcatgagctgggtccgacaggctcctggcaaaggactggaatgggtgtccacaatttccggcggaggcacctacatctactaccccgatagcgtgaagggcagattcaccatctccagagacaacgccaagaacagcctgttcctccagatgaactccctgagagccgaggacacagccgtgtattattgcgctcgggacaactacggcagaaactacgactacggcatggactactggggccagggcacactggttaccgttagctctggcggaggcggaagtggaggcggaggatctggcggcggaggctctgagatcgtgctgacacagtctcccgccacactgtcactgtctccaggcgaaagagccacactgagctgtagcgccaccagcagcgtgtcctacatccactggtatcagcagaagcccggacaggcccctagactgctgatctacagcaccagcaatctggcctctggcatccccgccagattttctggctctggaagcggcaccgacttcaccctgacaatcggcagactggaacccgaggacttcgccgtgtactactgccagcagagaagcagcagccccttcacctttggacagggcaccaaggtggaaatcaagagaacgcgtgacggtaacgaggagatgggaggaatcactcaaaccccttacaaagtctcaatttcaggaacaactgttatccttacatgtccccagtatcctggcagcgagatcctttggcagcataacgacaagaatatagggggagatgaagacgataagaatatcggatctgacgaggatcacttgagcctgaaagagttctccgagcttgaacaaagcggatattatgtgtgctatccgcgcgggtcaaagccggaagacgctaacttttacctttatctccgagccagagtgtgcgaaaattgcatggaaatggacgttatgtccgttgctacaatagttatcgtagatatatgcatcacgggtggactgcttctgctggtttattattggtccaagaatagaaaggccaaagctaaacccgtgaccagaggcgctggcgcaggcggaaggcaaaggggacaaaacaaagaacggccaccaccagtgccaaatccagattatgagcctattcggaaaggacagagggacctgtactctggcctgaatcagagaagaatc

SEQ ID NO: 10067 - DNA, 1251 bp, Artificial Sequence
  Synthetic Polynucloetide
atggccttaccagtgaccgccttgctcctgccgctggccttgctgctccacgccgccaggccggaagtgcagctggttgagtctggcggcggactggttaagcctgagggaagcctgagactgtcttgtgccgccagcggcttcaccttcagcagatacggcatgagctgggtccgacaggctcctggcaaaggactggaatgggtgtccacaatttccggcggaggcacctacatctactaccccgatagcgtgaagggcagattcaccatctccagagacaacgccaagaacagcctgttcctccagatgaactccctgagagccgaggacacagccgtgtattattgcgctcgggacaactacggcagaaactacgactacggcatggactactggggccagggcacactggttaccgttagctctggcggaggcggaagtggaggcggaggatctggcggcggaggctctgagatcgtgctgacacagtctcccgccacactgtcactgtctccaggcgaaagagccacactgagctgtagcgccaccagcagcgtgtcctacatccactggtatcagcagaagcccggacaggcccctagactgctgatctacagcaccagcaatctggcctctggcatccccgccagattttctggctctggaagcggcaccgacttcaccctgacaatcggcagactggaacccgaggacttcgccgtgtactactgccagcagagaagcagcagccccttcacctttggacagggcaccaaggtggaaatcaagagaacgcgtttcaagatccccatcgaggaactggaagatcgggtgttcgtgaactgcaacacctctatcacctgggtggaaggcaccgtgggaacactgctgagcgacatcaccagactggacctcggcaagcggattctggaccctcggggcatctacagatgcaacggcaccgacatctacaaggacaaagaaagcaccgtgcaggtccactacagaatgtgccagtcctgcgtggaactggaccctgctacagtggccggcatcatcgtgaccgatgtgatcgctactctgctgctggctctgggagtgttctgcttcgccggacacgaaacaggcagactgtctggcgctgccgatacacaggccctgctgagaaacgaccaagtgtatcagcccctgcgcgacagagatgatgcccagtattctcacctcggcggcaactgggctagaaacaag

SEQ ID NO: 10068 - DNA, 1281 bp, Artificial Sequence
  Synthetic Polynucloetide
atggccttaccagtgaccgccttgctcctgccgctggccttgctgctccacgccgccaggccggaagtgcagctggttgagtctggcggcggactggttaagcctgagggaagcctgagactgtcttgtgccgccagcggcttcaccttcagcagatacggcatgagctgggtccgacaggctcctggcaaaggactggaatgggtgtccacaatttccggcggaggcacctacatctactaccccgatagcgtgaagggcagattcaccatctccagagacaacgccaagaacagcctgttcctccagatgaactccctgagagccgaggacacagccgtgtattattgcgctcgggacaactacggcagaaactacgactacggcatggactactggggccagggcacactggttaccgttagctctggcggaggcggaagtggaggcggaggatctggcggcggaggctctgagatcgtgctgacacagtctcccgccacactgtcactgtctccaggcgaaagagccacactgagctgtagcgccaccagcagcgtgtcctacatccactggtatcagcagaagcccggacaggcccctagactgctgatctacagcaccagcaatctggcctctggcatccccgccagattttctggctctggaagcggcaccgacttcaccctgacaatcggcagactggaacccgaggacttcgccgtgtactactgccagcagagaagcagcagccccttcacctttggacagggcaccaaggtggaaatcaagagaacgcgtcagagcatcaagggcaaccacctggtcaaggtgtacgactaccaagaggacggcagcgtgctgctgacatgtgatgccgaggccaagaacatcacctggtttaaggacggcaagatgatcggcttcctgaccgaggacaagaagaagtggaacctgggcagcaacgctaaggaccccagaggcatgtatcagtgcaagggcagccagaacaagagcaagcccctccaggtgtactaccggatgtgccagaactgcatcgagctgaacgccgctaccatcagcggctttctgttcgccgagatcgtgtccatcttcgtgctggccgtgggcgtgtactttatcgctggacaggatggcgtgcggcagagcagagcttccgataagcaaaccctgctgcctaacgaccagctgtaccagcctctgaaggacagagaggacgaccagtacagccacctccagggcaatcagctgagaagaaac

SEQ ID NO: 10069 - DNA, 1230 bp, Artificial Sequence
  Synthetic Polynucloetide
atggccttaccagtgaccgccttgctcctgccgctggccttgctgctccacgccgccaggccggaagtgcagctggttgagtctggcggcggactggttaagcctgagggaagcctgagactgtcttgtgccgccagcggcttcaccttcagcagatacggcatgagctgggtccgacaggctcctggcaaaggactggaatgggtgtccacaatttccggcggaggcacctacatctactaccccgatagcgtgaagggcagattcaccatctccagagacaacgccaagaacagcctgttcctccagatgaactccctgagagccgaggacacagccgtgtattattgcgctcgggacaactacggcagaaactacgactacggcatggactactggggccagggcacactggttaccgttagctctggcggaggcggaagtggaggcggaggatctggcggcggaggctctgagatcgtgctgacacagtctcccgccacactgtcactgtctccaggcgaaagagccacactgagctgtagcgccaccagcagcgtgtcctacatccactggtatcagcagaagcccggacaggcccctagactgctgatctacagcaccagcaatctggcctctggcatccccgccagattttctggctctggaagcggcaccgacttcaccctgacaatcggcagactggaacccgaggacttcgccgtgtactactgccagcagagaagcagcagccccttcacctttggacagggcaccaaggtggaaatcaagagaacgcgtcagagttttgggttgttggaccctaaattgtgctatctgttggacggaatcctgttcatttacggagtgatcctgaccgcattgttcctgcgggttaagttttccagatccgcagacgcacccgcttaccaacaagggcagaaccaactctacaatgaacttaatttggggcggagggaagagtacgacgttctggacaaaaggaggggacgagatcccgagatgggcggaaagcctcagcgaaggaagaatccgcaagaggggctttataacgaactccagaaagataaaatggcagaagcctatagtgagattgggatgaagggagaaaggaggaggggtaaaggtcacgatgggttgtaccaaggattgagcacagccactaaagatacctatgatgcgctccacatgcaggccctgccgccaaga

SEQ ID NO: 10070 - DNA, 1932 bp, Artificial Sequence
  Synthetic Polynucloetide
atggccttaccagtgaccgccttgctcctgccgctggccttgctgctccacgccgccaggccggagatcgtgctgacacagtctcccgccacactgtcactgtctccaggcgaaagagccacactgagctgtagcgccaccagcagcgtgtcctacatccactggtatcagcagaagcccggacaggcccctagactgctgatctacagcaccagcaatctggcctctggcatccccgccagattttctggctctggaagcggcaccgacttcaccctgacaatcggcagactggaacccgaggacttcgccgtgtactactgccagcagagaagcagcagccccttcacctttggacagggcaccaaggtggaaatcaagagaggcggaggcggaagtggaggcggaggatctggcggcggaggctctgaagtgcagctggttgagtctggcggcggactggttaagcctgagggaagcctgagactgtcttgtgccgccagcggcttcaccttcagcagatacggcatgagctgggtccgacaggctcctggcaaaggactggaatgggtgtccacaatttccggcggaggcacctacatctactaccccgatagcgtgaagggcagattcaccatctccagagacaacgccaagaacagcctgttcctccagatgaactccctgagagccgaggacacagccgtgtattattgcgctcgggacaactacggcagaaactacgactacggcatggactactggggccagggcacactggttaccgttagctctacgcgtgggagcggcatccagaaccctgatcctgccgtgtaccagctgcgggatagcaagagcagcgacaagagcgtgtgtctgttcaccgacttcgacagccagaccaacgtgtcccagagcaaggactccgacgtgtacatcaccgataagaccgtgctggacatgcggagcatggacttcaagagcaactccgccgtggcctggtccaacaagtccgatttcgcctgcgccaacgccttcaacaacagcattatccccgaggacacattcttcccaagccccgagagcagctgcgacgtgaagctggtggaaaagagcttcgagacagacaccaacctgaacttccagaacctgagcgtgatcggcttcagaatcctgctgctgaaagtggccggctttaacctgctgatgaccctgcggctgtggtccagccgcgccaagagaagcggatctggcgtgaagcagaccctgaatttcgacctgctgaagctggctggcgacgtggaatccaacccaggcccttctagaggccatatgaccgagtacaagcccacggtgcgcctcgccacccgcgacgacgtccccagggccgtacgcaccctcgccgccgcgttcgccgactaccccgccacgcgccacaccgtcgatccggaccgccacatcgagcgggtcaccgagctgcaagaactcttcctcacgcgcgtcgggctcgacatcggcaaggtgtgggtcgcggacgacggcgccgcggtggcggtctggaccacgccggagagcgtcgaagcgggggcggtgttcgccgagatcggcccgcgcatggccgagttgagcggttcccggctggccgcgcagcaacagatggaaggcctcctggcgccgcaccggcccaaggagcccgcgtggttcctggccaccgtcggcgtctcgcccgaccaccagggcaagggtctgggcagcgccgtcgtgctccccggagtggaggcggccgagcgcgccggggtgcccgccttcctggagacctccgcgccccgcaacctccccttctacgagcggctcggcttcaccgtcaccgccgacgtcgaggtgcccgaaggaccgcgcacctggtgcatgacccgcaagcccggtgcctga

SEQ ID NO: 10071 - DNA, 2028 bp, Artificial Sequence
  Synthetic Polynucloetide
atggccttaccagtgaccgccttgctcctgccgctggccttgctgctccacgccgccaggccggagatcgtgctgacacagtctcccgccacactgtcactgtctccaggcgaaagagccacactgagctgtagcgccaccagcagcgtgtcctacatccactggtatcagcagaagcccggacaggcccctagactgctgatctacagcaccagcaatctggcctctggcatccccgccagattttctggctctggaagcggcaccgacttcaccctgacaatcggcagactggaacccgaggacttcgccgtgtactactgccagcagagaagcagcagccccttcacctttggacagggcaccaaggtggaaatcaagagaggcggaggcggaagtggaggcggaggatctggcggcggaggctctgaagtgcagctggttgagtctggcggcggactggttaagcctgagggaagcctgagactgtcttgtgccgccagcggcttcaccttcagcagatacggcatgagctgggtccgacaggctcctggcaaaggactggaatgggtgtccacaatttccggcggaggcacctacatctactaccccgatagcgtgaagggcagattcaccatctccagagacaacgccaagaacagcctgttcctccagatgaactccctgagagccgaggacacagccgtgtattattgcgctcgggacaactacggcagaaactacgactacggcatggactactggggccagggcacactggttaccgttagctctctcgaggacctgaagaacgtgttcccacctgaggtggccgtgttcgagcctagcgaggccgagatcagccacacccagaaagccaccctcgtgtgcctggctaccggcttctaccccgaccatgtggaactgtcttggtgggtcaacggcaaagaggtgcacagcggcgtgtctaccgacccccagccactgaaagaacagcccgccctgaacgacagccggtactgcctgagcagcagactgagagtgtccgccaccttctggcagaacccccggaaccacttcagatgccaggtgcagttctacggcctgagcgagaacgacgagtggacccaggacagagccaagcccgtgacccagatcgtgtctgccgaagcctggggcagagccgattgcggctttaccagcgagagctaccagcagggcgtgctgagcgccaccatcctgtacgagatcctgctgggcaaggccaccctgtacgccgtgctggtgtctgccctggtgctgatggctatggtcaagcggaaggacagccggggaagggccaagcgatctggatctggagcaacaaacttctcactactcaaacaagcaggtgacgtggaggagaatcccgggcctactagaggccatatgaccgagtacaagcccacggtgcgcctcgccacccgcgacgacgtccccagggccgtacgcaccctcgccgccgcgttcgccgactaccccgccacgcgccacaccgtcgatccggaccgccacatcgagcgggtcaccgagctgcaagaactcttcctcacgcgcgtcgggctcgacatcggcaaggtgtgggtcgcggacgacggcgccgcggtggcggtctggaccacgccggagagcgtcgaagcgggggcggtgttcgccgagatcggcccgcgcatggccgagttgagcggttcccggctggccgcgcagcaacagatggaaggcctcctggcgccgcaccggcccaaggagcccgcgtggttcctggccaccgtcggcgtctcgcccgaccaccagggcaagggtctgggcagcgccgtcgtgctccccggagtggaggcggccgagcgcgccggggtgcccgccttcctggagacctccgcgccccgcaacctccccttctacgagcggctcggcttcaccgtcaccgccgacgtcgaggtgcccgaaggaccgcgcacctggtgcatgacccgcaagcccggtgcctga

SEQ ID NO: 10072 - DNA, 2178 bp, Artificial Sequence
  Synthetic Polynucloetide
atggccttaccagtgaccgccttgctcctgccgctggccttgctgctccacgccgccaggccggagatcgtgctgacacagtctcccgccacactgtcactgtctccaggcgaaagagccacactgagctgtagcgccaccagcagcgtgtcctacatccactggtatcagcagaagcccggacaggcccctagactgctgatctacagcaccagcaatctggcctctggcatccccgccagattttctggctctggaagcggcaccgacttcaccctgacaatcggcagactggaacccgaggacttcgccgtgtactactgccagcagagaagcagcagccccttcacctttggacagggcaccaaggtggaaatcaagagaggcggaggcggaagtggaggcggaggatctggcggcggaggctctgaagtgcagctggttgagtctggcggcggactggttaagcctgagggaagcctgagactgtcttgtgccgccagcggcttcaccttcagcagatacggcatgagctgggtccgacaggctcctggcaaaggactggaatgggtgtccacaatttccggcggaggcacctacatctactaccccgatagcgtgaagggcagattcaccatctccagagacaacgccaagaacagcctgttcctccagatgaactccctgagagccgaggacacagccgtgtattattgcgctcgggacaactacggcagaaactacgactacggcatggactactggggccagggcacactggttaccgttagctctacgcgtgagcagaaactgatctcggaagaggatctggggagcggcaccccattcccttctctggcccctcccatcatgctgctggtggacggcaagcagcagatggtggtcgtgtgcctggtgctggatgtggccccacctggactggacagccccatctggtttagcgccggcaatggctctgccctggacgcctttacctacggcccaagccctgccaccgatggcacctggacaaatctggcccacctgagcctgcccagcgaggaactggcttcttgggagcctctcgtgtgccacacaggacctggcgctgagggacacagcagatccacccagcctatgcacctgtctggcgaggccagcaccgccagaacctgtcctcaggaacctctgagaggcacccctggcggagcactgtggctgggagtgctgagactgctgctgttcaagctgctgctgtttgacctgctgctgacctgctcctgtctgtgcgatcctgccggccctctgccttctcctgccaccaccacaagactgagagccctgggcagccacagactgcaccctgccacagagacaggcggcagagaggccacaagcagccctagaccccagcccagagacagaagatggggcgataccccccctggcagaaagcctggatctccagtccgcgccaagagaagcggatctggcgtgaagcagaccctgaatttcgacctgctgaagctggctggcgacgtggaatccaacccaggcccttctagatctagaggccatatgaccgagtacaagcccacggtgcgcctcgccacccgcgacgacgtccccagggccgtacgcaccctcgccgccgcgttcgccgactaccccgccacgcgccacaccgtcgatccggaccgccacatcgagcgggtcaccgagctgcaagaactcttcctcacgcgcgtcgggctcgacatcggcaaggtgtgggtcgcggacgacggcgccgcggtggcggtctggaccacgccggagagcgtcgaagcgggggcggtgttcgccgagatcggcccgcgcatggccgagttgagcggttcccggctggccgcgcagcaacagatggaaggcctcctggcgccgcaccggcccaaggagcccgcgtggttcctggccaccgtcggcgtctcgcccgaccaccagggcaagggtctgggcagcgccgtcgtgctccccggagtggaggcggccgagcgcgccggggtgcccgccttcctggagacctccgcgccccgcaacctccccttctacgagcggctcggcttcaccgtcaccgccgacgtcgaggtgcccgaaggaccgcgcacctggtgcatgacccgcaagcccggtgcctga

SEQ ID NO: 10073 - DNA, 1617 bp, Artificial Sequence
  Synthetic Polynucloetide
atggccttaccagtgaccgccttgctcctgccgctggccttgctgctccacgccgccaggccggagatcgtgctgacacagtctcccgccacactgtcactgtctccaggcgaaagagccacactgagctgtagcgccaccagcagcgtgtcctacatccactggtatcagcagaagcccggacaggcccctagactgctgatctacagcaccagcaatctggcctctggcatccccgccagattttctggctctggaagcggcaccgacttcaccctgacaatcggcagactggaacccgaggacttcgccgtgtactactgccagcagagaagcagcagccccttcacctttggacagggcaccaaggtggaaatcaagagactcgaggacctgaagaacgtgttcccacctgaggtggccgtgttcgagcctagcgaggccgagatcagccacacccagaaagccaccctcgtgtgcctggctaccggcttctaccccgaccatgtggaactgtcttggtgggtcaacggcaaagaggtgcacagcggcgtgtctaccgacccccagccactgaaagaacagcccgccctgaacgacagccggtactgcctgagcagcagactgagagtgtccgccaccttctggcagaacccccggaaccacttcagatgccaggtgcagttctacggcctgagcgagaacgacgagtggacccaggacagagccaagcccgtgacccagatcgtgtctgccgaagcctggggcagagccgattgcggctttaccagcgagagctaccagcagggcgtgctgagcgccaccatcctgtacgagatcctgctgggcaaggccaccctgtacgccgtgctggtgtctgccctggtgctgatggctatggtcaagcggaaggacagccggggaagggccaagcgatctggatctggagcaacaaacttctcactactcaaacaagcaggtgacgtggaggagaatcccgggcctactagaggccatatgaccgagtacaagcccacggtgcgcctcgccacccgcgacgacgtccccagggccgtacgcaccctcgccgccgcgttcgccgactaccccgccacgcgccacaccgtcgatccggaccgccacatcgagcgggtcaccgagctgcaagaactcttcctcacgcgcgtcgggctcgacatcggcaaggtgtgggtcgcggacgacggcgccgcggtggcggtctggaccacgccggagagcgtcgaagcgggggcggtgttcgccgagatcggcccgcgcatggccgagttgagcggttcccggctggccgcgcagcaacagatggaaggcctcctggcgccgcaccggcccaaggagcccgcgtggttcctggccaccgtcggcgtctcgcccgaccaccagggcaagggtctgggcagcgccgtcgtgctccccggagtggaggcggccgagcgcgccggggtgcccgccttcctggagacctccgcgccccgcaacctccccttctacgagcggctcggcttcaccgtcaccgccgacgtcgaggtgcccgaaggaccgcgcacctggtgcatgacccgcaagcccggtgcctga

SEQ ID NO: 10074 - DNA, 924 bp, Artificial Sequence
  Synthetic Polynucloetide
atggccttaccagtgaccgccttgctcctgccgctggccttgctgctccacgccgccaggccggagatcgtgctgacacagtctcccgccacactgtcactgtctccaggcgaaagagccacactgagctgtagcgccaccagcagcgtgtcctacatccactggtatcagcagaagcccggacaggcccctagactgctgatctacagcaccagcaatctggcctctggcatccccgccagattttctggctctggaagcggcaccgacttcaccctgacaatcggcagactggaacccgaggacttcgccgtgtactactgccagcagagaagcagcagccccttcacctttggacagggcaccaaggtggaaatcaagagactcgaggacctgaagaacgtgttcccacctgaggtggccgtgttcgagcctagcgaggccgagatcagccacacccagaaagccaccctcgtgtgcctggctaccggcttctaccccgaccatgtggaactgtcttggtgggtcaacggcaaagaggtgcacagcggcgtgtctaccgacccccagccactgaaagaacagcccgccctgaacgacagccggtactgcctgagcagcagactgagagtgtccgccaccttctggcagaacccccggaaccacttcagatgccaggtgcagttctacggcctgagcgagaacgacgagtggacccaggacagagccaagcccgtgacccagatcgtgtctgccgaagcctggggcagagccgattgcggctttaccagcgagagctaccagcagggcgtgctgagcgccaccatcctgtacgagatcctgctgggcaaggccaccctgtacgccgtgctggtgtctgccctggtgctgatggctatggtcaagcggaaggacagccgggga

SEQ ID NO: 10075 - DNA, 1356 bp, Artificial Sequence
  Synthetic Polynucloetide
atggactggatttggcgcatccttttccttgtcggcgctgctaccggcgcgcattccttcgaagaagtgcagctggttgagtctggcggcggactggttaagcctgagggaagcctgagactgtcttgtgccgccagcggcttcaccttcagcagatacggcatgagctgggtccgacaggctcctggcaaaggactggaatgggtgtccacaatttccggcggaggcacctacatctactaccccgatagcgtgaagggcagattcaccatctccagagacaacgccaagaacagcctgttcctccagatgaactccctgagagccgaggacacagccgtgtattattgcgctcgggacaactacggcagaaactacgactacggcatggactactggggccagggcacactggttaccgttagctctacgcgtatccagaaccctgatcctgccgtgtaccagctgcgggatagcaagagcagcgacaagagcgtgtgtctgttcaccgacttcgacagccagaccaacgtgtcccagagcaaggactccgacgtgtacatcaccgataagaccgtgctggacatgcggagcatggacttcaagagcaactccgccgtggcctggtccaacaagtccgatttcgcctgcgccaacgccttcaacaacagcattatccccgaggacacattcttcccaagccccgagagcagctgcgacgtgaagctggtggaaaagagcttcgagacagacaccaacctgaacttccagaacctgagcgtgatcggcttcagaatcctgctgctgaaagtggccggctttaacctgctgatgaccctgcggctgtggtccagccgcgccaagagaagcggatctggcgtgaagcagaccctgaatttcgacctgctgaagctggctggcgacgtggaatccaacccaggcccttctagaggccatatggccaagcctttgtctcaagaagaatccaccctcattgaaagagcaacggctacaatcaacagcatccccatctctgaagactacagcgtcgccagcgcagctctctctagcgacggccgcatcttcactggtgtcaatgtatatcattttactgggggaccttgtgcagaactcgtggtgctgggcactgctgctgctgcggcagctggcaacctgacttgtatcgtcgcgatcggaaatgagaacaggggcatcttgagcccctgcggacggtgccgacaggtgcttctcgatctgcatcctgggatcaaagccatagtgaaggacagtgatggacagccgacggcagttgggattcgtgaattgctgccctctggttatgtgtgggagggctga

SEQ ID NO: 10076 - DNA, 855 bp, Artificial Sequence
  Synthetic Polynucloetide
atggactggatttggcgcatccttttccttgtcggcgctgctaccggcgcgcattccttcgaagaagtgcagctggttgagtctggcggcggactggttaagcctgagggaagcctgagactgtcttgtgccgccagcggcttcaccttcagcagatacggcatgagctgggtccgacaggctcctggcaaaggactggaatgggtgtccacaatttccggcggaggcacctacatctactaccccgatagcgtgaagggcagattcaccatctccagagacaacgccaagaacagcctgttcctccagatgaactccctgagagccgaggacacagccgtgtattattgcgctcgggacaactacggcagaaactacgactacggcatggactactggggccagggcacactggttaccgttagctctacgcgtatccagaaccctgatcctgccgtgtaccagctgcgggatagcaagagcagcgacaagagcgtgtgtctgttcaccgacttcgacagccagaccaacgtgtcccagagcaaggactccgacgtgtacatcaccgataagaccgtgctggacatgcggagcatggacttcaagagcaactccgccgtggcctggtccaacaagtccgatttcgcctgcgccaacgccttcaacaacagcattatccccgaggacacattcttcccaagccccgagagcagctgcgacgtgaagctggtggaaaagagcttcgagacagacaccaacctgaacttccagaacctgagcgtgatcggcttcagaatcctgctgctgaaagtggccggctttaacctgctgatgaccctgcggctgtggtccagc

SEQ ID NO: 10077 - DNA, 1671 bp, Artificial Sequence
  Synthetic Polynucloetide
atggccttaccagtgaccgccttgctcctgccgctggccttgctgctccacgccgccaggccggagatcgtgctgacacagtctcccgccacactgtcactgtctccaggcgaaagagccacactgagctgtagcgccaccagcagcgtgtcctacatccactggtatcagcagaagcccggacaggcccctagactgctgatctacagcaccagcaatctggcctctggcatccccgccagattttctggctctggaagcggcaccgacttcaccctgacaatcggcagactggaacccgaggacttcgccgtgtactactgccagcagagaagcagcagccccttcacctttggacagggcaccaaggtggaaatcaagagactcgaggggaaaccaattcccaaccctcttctgggactggattcaaccggcagcggcgaggacctgaagaacgtgttcccacctgaggtggccgtgttcgagcctagcgaggccgagatcagccacacccagaaagccaccctcgtgtgcctggctaccggcttctaccccgaccatgtggaactgtcttggtgggtcaacggcaaagaggtgcacagcggcgtgtgtaccgacccccagccactgaaagaacagcccgccctgaacgacagccggtactgcctgagcagcagactgagagtgtccgccaccttctggcagaacccccggaaccacttcagatgccaggtgcagttctacggcctgagcgagaacgacgagtggacccaggacagagccaagcccgtgacccagatcgtgtctgccgaagcctggggcagagccgattgcggctttaccagcgagagctaccagcagggcgtgctgagcgccaccatcctgtacgagatcctgctgggcaaggccaccctgtacgccgtgctggtgtctgccctggtgctgatggctatggtcaagcggaaggacagccggggaagggccaagcgatctggatctggagcaacaaacttctcactactcaaacaagcaggtgacgtggaggagaatcccgggcctactagaggccatatgaccgagtacaagcccacggtgcgcctcgccacccgcgacgacgtccccagggccgtacgcaccctcgccgccgcgttcgccgactaccccgccacgcgccacaccgtcgatccggaccgccacatcgagcgggtcaccgagctgcaagaactcttcctcacgcgcgtcgggctcgacatcggcaaggtgtgggtcgcggacgacggcgccgcggtggcggtctggaccacgccggagagcgtcgaagcgggggcggtgttcgccgagatcggcccgcgcatggccgagttgagcggttcccggctggccgcgcagcaacagatggaaggcctcctggcgccgcaccggcccaaggagcccgcgtggttcctggccaccgtcggcgtctcgcccgaccaccagggcaagggtctgggcagcgccgtcgtgctccccggagtggaggcggccgagcgcgccggggtgcccgccttcctggagacctccgcgccccgcaacctccccttctacgagcggctcggcttcaccgtcaccgccgacgtcgaggtgcccgaaggaccgcgcacctggtgcatgacccgcaagcccggtgcctga

SEQ ID NO: 10078 - DNA, 981 bp, Artificial Sequence
  Synthetic Polynucloetide
atggccttaccagtgaccgccttgctcctgccgctggccttgctgctccacgccgccaggccggagatcgtgctgacacagtctcccgccacactgtcactgtctccaggcgaaagagccacactgagctgtagcgccaccagcagcgtgtcctacatccactggtatcagcagaagcccggacaggcccctagactgctgatctacagcaccagcaatctggcctctggcatccccgccagattttctggctctggaagcggcaccgacttcaccctgacaatcggcagactggaacccgaggacttcgccgtgtactactgccagcagagaagcagcagccccttcacctttggacagggcaccaaggtggaaatcaagagactcgaggggaaaccaattcccaaccctcttctgggactggattcaaccggcagcggcgaggacctgaagaacgtgttcccacctgaggtggccgtgttcgagcctagcgaggccgagatcagccacacccagaaagccaccctcgtgtgcctggctaccggcttctaccccgaccatgtggaactgtcttggtgggtcaacggcaaagaggtgcacagcggcgtgtgtaccgacccccagccactgaaagaacagcccgccctgaacgacagccggtactgcctgagcagcagactgagagtgtccgccaccttctggcagaacccccggaaccacttcagatgccaggtgcagttctacggcctgagcgagaacgacgagtggacccaggacagagccaagcccgtgacccagatcgtgtctgccgaagcctggggcagagccgattgcggctttaccagcgagagctaccagcagggcgtgctgagcgccaccatcctgtacgagatcctgctgggcaaggccaccctgtacgccgtgctggtgtctgccctggtgctgatggctatggtcaagcggaaggacagccggggatga

SEQ ID NO: 10079 - DNA, 1392 bp, Artificial Sequence
  Synthetic Polynucloetide
atggactggatttggcgcatccttttccttgtcggcgctgctaccggcgcgcattccttcgaagaagtgcagctggttgagtctggcggcggactggttaagcctgagggaagcctgagactgtcttgtgccgccagcggcttcaccttcagcagatacggcatgagctgggtccgacaggctcctggcaaaggactggaatgggtgtccacaatttccggcggaggcacctacatctactaccccgatagcgtgaagggcagattcaccatctccagagacaacgccaagaacagcctgttcctccagatgaactccctgagagccgaggacacagccgtgtattattgcgctcgggacaactacggcagaaactacgactacggcatggactactggggccagggcacactggttaccgttagctctacgcgtgagcagaaactgatctcggaagaggatgggagcggcatccagaaccctgatcctgccgtgtaccagctgcgggatagcaagagcagcgacaagagcgtgtgtctgttcaccgacttcgacagccagaccaacgtgtcccagagcaaggactccgacgtgtacatcaccgataagtgcgtgctggacatgcggagcatggacttcaagagcaactccgccgtggcctggtccaacaagtccgatttcgcctgcgccaacgccttcaacaacagcattatccccgaggacacattcttcccaagccccgagagcagctgcgacgtgaagctggtggaaaagagcttcgagacagacaccaacctgaacttccagaacctgagcgtgatcggcttcagaatcctgctgctgaaagtggccggctttaacctgctgatgaccctgcggctgtggtccagccgcgccaagagaagcggatctggcgtgaagcagaccctgaatttcgacctgctgaagctggctggcgacgtggaatccaacccaggcccttctagaggccatatggccaagcctttgtctcaagaagaatccaccctcattgaaagagcaacggctacaatcaacagcatccccatctctgaagactacagcgtcgccagcgcagctctctctagcgacggccgcatcttcactggtgtcaatgtatatcattttactgggggaccttgtgcagaactcgtggtgctgggcactgctgctgctgcggcagctggcaacctgacttgtatcgtcgcgatcggaaatgagaacaggggcatcttgagcccctgcggacggtgccgacaggtgcttctcgatctgcatcctgggatcaaagccatagtgaaggacagtgatggacagccgacggcagttgggattcgtgaattgctgccctctggttatgtgtgggagggctga

SEQ ID NO: 10080 - DNA, 894 bp, Artificial Sequence
  Synthetic Polynucloetide
atggactggatttggcgcatccttttccttgtcggcgctgctaccggcgcgcattccttcgaagaagtgcagctggttgagtctggcggcggactggttaagcctgagggaagcctgagactgtcttgtgccgccagcggcttcaccttcagcagatacggcatgagctgggtccgacaggctcctggcaaaggactggaatgggtgtccacaatttccggcggaggcacctacatctactaccccgatagcgtgaagggcagattcaccatctccagagacaacgccaagaacagcctgttcctccagatgaactccctgagagccgaggacacagccgtgtattattgcgctcgggacaactacggcagaaactacgactacggcatggactactggggccagggcacactggttaccgttagctctacgcgtgagcagaaactgatctcggaagaggatgggagcggcatccagaaccctgatcctgccgtgtaccagctgcgggatagcaagagcagcgacaagagcgtgtgtctgttcaccgacttcgacagccagaccaacgtgtcccagagcaaggactccgacgtgtacatcaccgataagtgcgtgctggacatgcggagcatggacttcaagagcaactccgccgtggcctggtccaacaagtccgatttcgcctgcgccaacgccttcaacaacagcattatccccgaggacacattcttcccaagccccgagagcagctgcgacgtgaagctggtggaaaagagcttcgagacagacaccaacctgaacttccagaacctgagcgtgatcggcttcagaatcctgctgctgaaagtggccggctttaacctgctgatgaccctgcggctgtggtccagctga

SEQ ID NO: 10081 - DNA, 1932 bp, Artificial Sequence
  Synthetic Polynucloetide
atggccttaccagtgaccgccttgctcctgccgctggccttgctgctccacgccgccaggccggagatcgtgctgacacagtctcccgccacactgtcactgtctccaggcgaaagagccacactgagctgtagcgccaccagcagcgtgtcctacatccactggtatcagcagaagcccggacaggcccctagactgctgatctacagcaccagcaatctggcctctggcatccccgccagattttctggctctggaagcggcaccgacttcaccctgacaatcggcagactggaacccgaggacttcgccgtgtactactgccagcagagaagcagcagccccttcacctttggacagggcaccaaggtggaaatcaagagaggcggaggcggaagtggaggcggaggatctggcggcggaggctctgaagtgcagctggttgagtctggcggcggactggttaagcctgagggaagcctgagactgtcttgtgccgccagcggcttcaccttcagcagatacggcatgagctgggtccgacaggctcctggcaaaggactggaatgggtgtccacaatttccggcggaggcacctacatctactaccccgatagcgtgaagggcagattcaccatctccagagacaacgccaagaacagcctgttcctccagatgaactccctgagagccgaggacacagccgtgtattattgcgctcgggacaactacggcagaaactacgactacggcatggactactggggccagggcacactggttaccgttagctctacgcgtgggagcggcatccagaaccctgatcctgccgtgtaccagctgcgggatagcaagagcagcgacaagagcgtgtgtctgttcaccgacttcgacagccagaccaacgtgtcccagagcaaggactccgacgtgtacatcaccgataagaccgtgctggacatgcggagcatggacttcaagagcaactccgccgtggcctggtccaacaagtccgatttcgcctgcgccaacgccttcaacaacagcattatccccgaggacacattcttcccaagcagcgacgtgccctgcgacgtgaagctggtggaaaagagcttcgagacagacaccaacctgaacttccagaacctgagcgtgatcggcttcagaatcctgctgctgaaagtggccggctttaacctgctgatgaccctgcggctgtggtccagccgcgccaagagaagcggatctggcgtgaagcagaccctgaatttcgacctgctgaagctggctggcgacgtggaatccaacccaggcccttctagaggccatatgaccgagtacaagcccacggtgcgcctcgccacccgcgacgacgtccccagggccgtacgcaccctcgccgccgcgttcgccgactaccccgccacgcgccacaccgtcgatccggaccgccacatcgagcgggtcaccgagctgcaagaactcttcctcacgcgcgtcgggctcgacatcggcaaggtgtgggtcgcggacgacggcgccgcggtggcggtctggaccacgccggagagcgtcgaagcgggggcggtgttcgccgagatcggcccgcgcatggccgagttgagcggttcccggctggccgcgcagcaacagatggaaggcctcctggcgccgcaccggcccaaggagcccgcgtggttcctggccaccgtcggcgtctcgcccgaccaccagggcaagggtctgggcagcgccgtcgtgctccccggagtggaggcggccgagcgcgccggggtgcccgccttcctggagacctccgcgccccgcaacctccccttctacgagcggctcggcttcaccgtcaccgccgacgtcgaggtgcccgaaggaccgcgcacctggtgcatgacccgcaagcccggtgcctga

SEQ ID NO: 10082 - DNA, 2028 bp, Artificial Sequence
  Synthetic Polynucloetide
atggccttaccagtgaccgccttgctcctgccgctggccttgctgctccacgccgccaggccggagatcgtgctgacacagtctcccgccacactgtcactgtctccaggcgaaagagccacactgagctgtagcgccaccagcagcgtgtcctacatccactggtatcagcagaagcccggacaggcccctagactgctgatctacagcaccagcaatctggcctctggcatccccgccagattttctggctctggaagcggcaccgacttcaccctgacaatcggcagactggaacccgaggacttcgccgtgtactactgccagcagagaagcagcagccccttcacctttggacagggcaccaaggtggaaatcaagagaggcggaggcggaagtggaggcggaggatctggcggcggaggctctgaagtgcagctggttgagtctggcggcggactggttaagcctgagggaagcctgagactgtcttgtgccgccagcggcttcaccttcagcagatacggcatgagctgggtccgacaggctcctggcaaaggactggaatgggtgtccacaatttccggcggaggcacctacatctactaccccgatagcgtgaagggcagattcaccatctccagagacaacgccaagaacagcctgttcctccagatgaactccctgagagccgaggacacagccgtgtattattgcgctcgggacaactacggcagaaactacgactacggcatggactactggggccagggcacactggttaccgttagctctctcgaggacctgaagaacgtgttcccacctgaggtggccgtgttcgagcctagcaaggccgagatcgcccacacccagaaagccaccctcgtgtgcctggctaccggcttctaccccgaccatgtggaactgtcttggtgggtcaacggcaaagaggtgcacagcggcgtgtctaccgacccccagccactgaaagaacagcccgccctgaacgacagccggtactgcctgagcagcagactgagagtgtccgccaccttctggcagaacccccggaaccacttcagatgccaggtgcagttctacggcctgagcgagaacgacgagtggacccaggacagagccaagcccgtgacccagatcgtgtctgccgaagcctggggcagagccgattgcggcatcaccagcgccagctaccaccagggcgtgctgagcgccaccatcctgtacgagatcctgctgggcaaggccaccctgtacgccgtgctggtgtctgccctggtgctgatggctatggtcaagcggaaggacagccggggaagggccaagcgatctggatctggagcaacaaacttctcactactcaaacaagcaggtgacgtggaggagaatcccgggcctactagaggccatatgaccgagtacaagcccacggtgcgcctcgccacccgcgacgacgtccccagggccgtacgcaccctcgccgccgcgttcgccgactaccccgccacgcgccacaccgtcgatccggaccgccacatcgagcgggtcaccgagctgcaagaactcttcctcacgcgcgtcgggctcgacatcggcaaggtgtgggtcgcggacgacggcgccgcggtggcggtctggaccacgccggagagcgtcgaagcgggggcggtgttcgccgagatcggcccgcgcatggccgagttgagcggttcccggctggccgcgcagcaacagatggaaggcctcctggcgccgcaccggcccaaggagcccgcgtggttcctggccaccgtcggcgtctcgcccgaccaccagggcaagggtctgggcagcgccgtcgtgctccccggagtggaggcggccgagcgcgccggggtgcccgccttcctggagacctccgcgccccgcaacctccccttctacgagcggctcggcttcaccgtcaccgccgacgtcgaggtgcccgaaggaccgcgcacctggtgcatgacccgcaagcccggtgcctga

SEQ ID NO: 10083 - DNA, 2097 bp, Artificial Sequence
  Synthetic Polynucloetide
atggccttaccagtgaccgccttgctcctgccgctggccttgctgctccacgccgccaggccggagatcgtgctgacacagtctcccgccacactgtcactgtctccaggcgaaagagccacactgagctgtagcgccaccagcagcgtgtcctacatccactggtatcagcagaagcccggacaggcccctagactgctgatctacagcaccagcaatctggcctctggcatccccgccagattttctggctctggaagcggcaccgacttcaccctgacaatcggcagactggaacccgaggacttcgccgtgtactactgccagcagagaagcagcagccccttcacctttggacagggcaccaaggtggaaatcaagagaggcggaggcggaagtggaggcggaggatctggcggcggaggctctgaagtgcagctggttgagtctggcggcggactggttaagcctgagggaagcctgagactgtcttgtgccgccagcggcttcaccttcagcagatacggcatgagctgggtccgacaggctcctggcaaaggactggaatgggtgtccacaatttccggcggaggcacctacatctactaccccgatagcgtgaagggcagattcaccatctccagagacaacgccaagaacagcctgttcctccagatgaactccctgagagccgaggacacagccgtgtattattgcgctcgggacaactacggcagaaactacgactacggcatggactactggggccagggcacactggttaccgttagctctacgcgtgggtctggaggcggaggcagcggcggaggcgggagcggcgacggtaacgaggagatgggaggaatcactcaaaccccttacaaagtctcaatttcaggaacaactgttatccttacatgtccccagtatcctggcagcgagatcctttggcagcataacgacaagaatatagggggagatgaagacgataagaatatcggatctgacgaggatcacttgagcctgaaagagttctccgagcttgaacaaagcggatattatgtgtgctatccgcgcgggtcaaagccggaagacgctaacttttacctttatctccgagccagagtgtgcgaaaattgcatggaaatggacgttatgtccgttgctacaatagttatcgtagatatatgcatcacgggtggactgcttctgctggtttattattggtccaagaatagaaaggccaaagctaaacccgtgaccagaggcgctggcgcaggcggaaggcaaaggggacaaaacaaagaacggccaccaccagtgccaaatccagattatgagcctattcggaaaggacagagggacctgtactctggcctgaatcagagaagaatccgcgccaagagaagcggatctggcgtgaagcagaccctgaatttcgacctgctgaagctggctggcgacgtggaatccaacccaggcccttctagaggccatatgaccgagtacaagcccacggtgcgcctcgccacccgcgacgacgtccccagggccgtacgcaccctcgccgccgcgttcgccgactaccccgccacgcgccacaccgtcgatccggaccgccacatcgagcgggtcaccgagctgcaagaactcttcctcacgcgcgtcgggctcgacatcggcaaggtgtgggtcgcggacgacggcgccgcggtggcggtctggaccacgccggagagcgtcgaagcgggggcggtgttcgccgagatcggcccgcgcatggccgagttgagcggttcccggctggccgcgcagcaacagatggaaggcctcctggcgccgcaccggcccaaggagcccgcgtggttcctggccaccgtcggcgtctcgcccgaccaccagggcaagggtctgggcagcgccgtcgtgctccccggagtggaggcggccgagcgcgccggggtgcccgccttcctggagacctccgcgccccgcaacctccccttctacgagcggctcggcttcaccgtcaccgccgacgtcgaggtgcccgaaggaccgcgcacctggtgcatgacccgcaagcccggtgcctga

SEQ ID NO: 10084 - DNA, 1992 bp, Artificial Sequence
  Synthetic Polynucloetide
atggccttaccagtgaccgccttgctcctgccgctggccttgctgctccacgccgccaggccggagatcgtgctgacacagtctcccgccacactgtcactgtctccaggcgaaagagccacactgagctgtagcgccaccagcagcgtgtcctacatccactggtatcagcagaagcccggacaggcccctagactgctgatctacagcaccagcaatctggcctctggcatccccgccagattttctggctctggaagcggcaccgacttcaccctgacaatcggcagactggaacccgaggacttcgccgtgtactactgccagcagagaagcagcagccccttcacctttggacagggcaccaaggtggaaatcaagagaggcggaggcggaagtggaggcggaggatctggcggcggaggctctgaagtgcagctggttgagtctggcggcggactggttaagcctgagggaagcctgagactgtcttgtgccgccagcggcttcaccttcagcagatacggcatgagctgggtccgacaggctcctggcaaaggactggaatgggtgtccacaatttccggcggaggcacctacatctactaccccgatagcgtgaagggcagattcaccatctccagagacaacgccaagaacagcctgttcctccagatgaactccctgagagccgaggacacagccgtgtattattgcgctcgggacaactacggcagaaactacgactacggcatggactactggggccagggcacactggttaccgttagctctacgcgtgggtctggaggcggaggcagcggcggaggcgggagcggcttcaagatccccatcgaggaactggaagatcgggtgttcgtgaactgcaacacctctatcacctgggtggaaggcaccgtgggaacactgctgagcgacatcaccagactggacctcggcaagcggattctggaccctcggggcatctacagatgcaacggcaccgacatctacaaggacaaagaaagcaccgtgcaggtccactacagaatgtgccagtcctgcgtggaactggaccctgctacagtggccggcatcatcgtgaccgatgtgatcgctactctgctgctggctctgggagtgttctgcttcgccggacacgaaacaggcagactgtctggcgctgccgatacacaggccctgctgagaaacgaccaagtgtatcagcccctgcgcgacagagatgatgcccagtattctcacctcggcggcaactgggctagaaacaagcgcgccaagagaagcggatctggcgtgaagcagaccctgaatttcgacctgctgaagctggctggcgacgtggaatccaacccaggcccttctagaggccatatgaccgagtacaagcccacggtgcgcctcgccacccgcgacgacgtccccagggccgtacgcaccctcgccgccgcgttcgccgactaccccgccacgcgccacaccgtcgatccggaccgccacatcgagcgggtcaccgagctgcaagaactcttcctcacgcgcgtcgggctcgacatcggcaaggtgtgggtcgcggacgacggcgccgcggtggcggtctggaccacgccggagagcgtcgaagcgggggcggtgttcgccgagatcggcccgcgcatggccgagttgagcggttcccggctggccgcgcagcaacagatggaaggcctcctggcgccgcaccggcccaaggagcccgcgtggttcctggccaccgtcggcgtctcgcccgaccaccagggcaagggtctgggcagcgccgtcgtgctccccggagtggaggcggccgagcgcgccggggtgcccgccttcctggagacctccgcgccccgcaacctccccttctacgagcggctcggcttcaccgtcaccgccgacgtcgaggtgcccgaaggaccgcgcacctggtgcatgacccgcaagcccggtgcctga

SEQ ID NO: 10085 - DNA, 2022 bp, Artificial Sequence
  Synthetic Polynucloetide
atggccttaccagtgaccgccttgctcctgccgctggccttgctgctccacgccgccaggccggagatcgtgctgacacagtctcccgccacactgtcactgtctccaggcgaaagagccacactgagctgtagcgccaccagcagcgtgtcctacatccactggtatcagcagaagcccggacaggcccctagactgctgatctacagcaccagcaatctggcctctggcatccccgccagattttctggctctggaagcggcaccgacttcaccctgacaatcggcagactggaacccgaggacttcgccgtgtactactgccagcagagaagcagcagccccttcacctttggacagggcaccaaggtggaaatcaagagaggcggaggcggaagtggaggcggaggatctggcggcggaggctctgaagtgcagctggttgagtctggcggcggactggttaagcctgagggaagcctgagactgtcttgtgccgccagcggcttcaccttcagcagatacggcatgagctgggtccgacaggctcctggcaaaggactggaatgggtgtccacaatttccggcggaggcacctacatctactaccccgatagcgtgaagggcagattcaccatctccagagacaacgccaagaacagcctgttcctccagatgaactccctgagagccgaggacacagccgtgtattattgcgctcgggacaactacggcagaaactacgactacggcatggactactggggccagggcacactggttaccgttagctctacgcgtgggtctggaggcggaggcagcggcggaggcgggagcggccagagcatcaagggcaaccacctggtcaaggtgtacgactaccaagaggacggcagcgtgctgctgacatgtgatgccgaggccaagaacatcacctggtttaaggacggcaagatgatcggcttcctgaccgaggacaagaagaagtggaacctgggcagcaacgctaaggaccccagaggcatgtatcagtgcaagggcagccagaacaagagcaagcccctccaggtgtactaccggatgtgccagaactgcatcgagctgaacgccgctaccatcagcggctttctgttcgccgagatcgtgtccatcttcgtgctggccgtgggcgtgtactttatcgctggacaggatggcgtgcggcagagcagagcttccgataagcaaaccctgctgcctaacgaccagctgtaccagcctctgaaggacagagaggacgaccagtacagccacctccagggcaatcagctgagaagaaaccgcgccaagagaagcggatctggcgtgaagcagaccctgaatttcgacctgctgaagctggctggcgacgtggaatccaacccaggcccttctagaggccatatgaccgagtacaagcccacggtgcgcctcgccacccgcgacgacgtccccagggccgtacgcaccctcgccgccgcgttcgccgactaccccgccacgcgccacaccgtcgatccggaccgccacatcgagcgggtcaccgagctgcaagaactcttcctcacgcgcgtcgggctcgacatcggcaaggtgtgggtcgcggacgacggcgccgcggtggcggtctggaccacgccggagagcgtcgaagcgggggcggtgttcgccgagatcggcccgcgcatggccgagttgagcggttcccggctggccgcgcagcaacagatggaaggcctcctggcgccgcaccggcccaaggagcccgcgtggttcctggccaccgtcggcgtctcgcccgaccaccagggcaagggtctgggcagcgccgtcgtgctccccggagtggaggcggccgagcgcgccggggtgcccgccttcctggagacctccgcgccccgcaacctccccttctacgagcggctcggcttcaccgtcaccgccgacgtcgaggtgcccgaaggaccgcgcacctggtgcatgacccgcaagcccggtgcctga

SEQ ID NO: 10086 - DNA, 1971 bp, Artificial Sequence
  Synthetic Polynucloetide
atggccttaccagtgaccgccttgctcctgccgctggccttgctgctccacgccgccaggccggagatcgtgctgacacagtctcccgccacactgtcactgtctccaggcgaaagagccacactgagctgtagcgccaccagcagcgtgtcctacatccactggtatcagcagaagcccggacaggcccctagactgctgatctacagcaccagcaatctggcctctggcatccccgccagattttctggctctggaagcggcaccgacttcaccctgacaatcggcagactggaacccgaggacttcgccgtgtactactgccagcagagaagcagcagccccttcacctttggacagggcaccaaggtggaaatcaagagaggcggaggcggaagtggaggcggaggatctggcggcggaggctctgaagtgcagctggttgagtctggcggcggactggttaagcctgagggaagcctgagactgtcttgtgccgccagcggcttcaccttcagcagatacggcatgagctgggtccgacaggctcctggcaaaggactggaatgggtgtccacaatttccggcggaggcacctacatctactaccccgatagcgtgaagggcagattcaccatctccagagacaacgccaagaacagcctgttcctccagatgaactccctgagagccgaggacacagccgtgtattattgcgctcgggacaactacggcagaaactacgactacggcatggactactggggccagggcacactggttaccgttagctctacgcgtgggtctggaggcggaggcagcggcggaggcgggagcggccagagttttgggttgttggaccctaaattgtgctatctgttggacggaatcctgttcatttacggagtgatcctgaccgcattgttcctgcgggttaagttttccagatccgcagacgcacccgcttaccaacaagggcagaaccaactctacaatgaacttaatttggggcggagggaagagtacgacgttctggacaaaaggaggggacgagatcccgagatgggcggaaagcctcagcgaaggaagaatccgcaagaggggctttataacgaactccagaaagataaaatggcagaagcctatagtgagattgggatgaagggagaaaggaggaggggtaaaggtcacgatgggttgtaccaaggattgagcacagccactaaagatacctatgatgcgctccacatgcaggccctgccgccaagacgcgccaagagaagcggatctggcgtgaagcagaccctgaatttcgacctgctgaagctggctggcgacgtggaatccaacccaggcccttctagaggccatatgaccgagtacaagcccacggtgcgcctcgccacccgcgacgacgtccccagggccgtacgcaccctcgccgccgcgttcgccgactaccccgccacgcgccacaccgtcgatccggaccgccacatcgagcgggtcaccgagctgcaagaactcttcctcacgcgcgtcgggctcgacatcggcaaggtgtgggtcgcggacgacggcgccgcggtggcggtctggaccacgccggagagcgtcgaagcgggggcggtgttcgccgagatcggcccgcgcatggccgagttgagcggttcccggctggccgcgcagcaacagatggaaggcctcctggcgccgcaccggcccaaggagcccgcgtggttcctggccaccgtcggcgtctcgcccgaccaccagggcaagggtctgggcagcgccgtcgtgctccccggagtggaggcggccgagcgcgccggggtgcccgccttcctggagacctccgcgccccgcaacctccccttctacgagcggctcggcttcaccgtcaccgccgacgtcgaggtgcccgaaggaccgcgcacctggtgcatgacccgcaagcccggtgcctga

SEQ ID NO: 10087 - DNA, 2271 bp, Artificial Sequence
  Synthetic Polynucloetide
atggccttaccagtgaccgccttgctcctgccgctggccttgctgctccacgccgccaggccggaagtgcagctggttgaatctggcggaggactggttcagcctggcggatctctgagactgtcttgtgccgccagcggcttcagcttcagcgacttttggatgagctgggtccgacaggcccctggcaaaggacttgaatgggtcgccacaatcagccaggccggcagcgagaaggactacgtggactctgtgaagggcagattcaccatcagccgggacaacgccaagaagtccctgtacctccagatgaacagcctgagagccgaggacaccgccgtgtactattgtgcctctggcgtgtacagcttcgactacagaggccagggcaccctggtcacagtctcttctggtaccggcggaggcggatctggcggcggaggtagcggtggcggaggatctgaattcgagatcgtgctgacacagtctcccgccacactgtcactgtctccaggcgaaagagccacactgagctgtagcgccaccagcagcgtgtcctacatccactggtatcagcagaagcccggacaggcccctagactgctgatctacagcaccagcaatctggcctctggcatccccgccagattttctggctctggaagcggcaccgacttcaccctgacaatcggcagactggaacccgaggacttcgccgtgtactactgccagcagagaagcagcagccccttcacctttggacagggcaccaaggtggaaatcaagagactcgaggacctgaagaacgtgttcccacctgaggtggccgtgttcgagcctagcgaggccgagatcagccacacccagaaagccaccctcgtgtgcctggctaccggcttctaccccgaccatgtggaactgtcttggtgggtcaacggcaaagaggtgcacagcggcgtgtgtaccgacccccagccactgaaagaacagcccgccctgaacgacagccggtactgcctgagcagcagactgagagtgtccgccaccttctggcagaacccccggaaccacttcagatgccaggtgcagttctacggcctgagcgagaacgacgagtggacccaggacagagccaagcccgtgacccagatcgtgtctgccgaagcctggggcagagccgattgcggctttaccagcgagagctaccagcagggcgtgctgagcgccaccatcctgtacgagatcctgctgggcaaggccaccctgtacgccgtgctggtgtctgccctggtgctgatggctatggtcaagcggaaggacagccggggaagggccaagcgatctggatctggagcaacaaacttctcactactcaaacaagcaggtgacgtggaggagaatcccgggcctactagtatggactggatttggcgcatccttttccttgtcggcgctgctaccggcgcgcattccttcgaagaagtgcagctggttgagtctggcggcggactggttaagcctgagggaagcctgagactgtcttgtgccgccagcggcttcaccttcagcagatacggcatgagctgggtccgacaggctcctggcaaaggactggaatgggtgtccacaatttccggcggaggcacctacatctactaccccgatagcgtgaagggcagattcaccatctccagagacaacgccaagaacagcctgttcctccagatgaactccctgagagccgaggacacagccgtgtattattgcgctcgggacaactacggcagaaactacgactacggcatggactactggggccagggcacactggttaccgttagctctacgcgtatccagaaccctgatcctgccgtgtaccagctgcgggatagcaagagcagcgacaagagcgtgtgtctgttcaccgacttcgacagccagaccaacgtgtcccagagcaaggactccgacgtgtacatcaccgataagtgcgtgctggacatgcggagcatggacttcaagagcaactccgccgtggcctggtccaacaagtccgatttcgcctgcgccaacgccttcaacaacagcattatccccgaggacacattcttcccaagccccgagagcagctgcgacgtgaagctggtggaaaagagcttcgagacagacaccaacctgaacttccagaacctgagcgtgatcggcttcagaatcctgctgctgaaagtggccggctttaacctgctgatgaccctgcggctgtggtccagc

SEQ ID NO: 10088 - DNA, 2283 bp, Artificial Sequence
  Synthetic Polynucloetide
atggccttaccagtgaccgccttgctcctgccgctggccttgctgctccacgccgccaggccggaagtgcagctggttgaatctggcggaggactggttcagcctggcggatctctgagactgtcttgtgccgccagcggcttcagcttcagcgacttttggatgagctgggtccgacaggcccctggcaaaggacttgaatgggtcgccacaatcagccaggccggcagcgagaaggactacgtggactctgtgaagggcagattcaccatcagccgggacaacgccaagaagtccctgtacctccagatgaacagcctgagagccgaggacaccgccgtgtactattgtgcctctggcgtgtacagcttcgactacagaggccagggcaccctggtcacagtctcttctggtaccggcggaggcggatctggcggcggaggtagcggtggcggaggatctgaattcgagatcgtgctgacacagtctcccgccacactgtcactgtctccaggcgaaagagccacactgagctgtagcgccaccagcagcgtgtcctacatccactggtatcagcagaagcccggacaggcccctagactgctgatctacagcaccagcaatctggcctctggcatccccgccagattttctggctctggaagcggcaccgacttcaccctgacaatcggcagactggaacccgaggacttcgccgtgtactactgccagcagagaagcagcagccccttcacctttggacagggcaccaaggtggaaatcaagagactcgagatccagaaccctgatcctgccgtgtaccagctgcgggatagcaagagcagcgacaagagcgtgtgtctgttcaccgacttcgacagccagaccaacgtgtcccagagcaaggactccgacgtgtacatcaccgataagtgcgtgctggacatgcggagcatggacttcaagagcaactccgccgtggcctggtccaacaagtccgatttcgcctgcgccaacgccttcaacaacagcattatccccgaggacacattcttcccaagccccgagagcagctgcgacgtgaagctggtggaaaagagcttcgagacagacaccaacctgaacttccagaacctgagcgtgatcggcttcagaatcctgctgctgaaagtggccggctttaacctgctgatgaccctgcggctgtggtccagccgcgccaagagaagcggatctggcgtgaagcagaccctgaatttcgacctgctgaagctggctggcgacgtggaatccaacccaggccctactagtatggactggatttggcgcatccttttccttgtcggcgctgctaccggcgcgcattccttcgaagaagtgcagctggttgagtctggcggcggactggttaagcctgagggaagcctgagactgtcttgtgccgccagcggcttcaccttcagcagatacggcatgagctgggtccgacaggctcctggcaaaggactggaatgggtgtccacaatttccggcggaggcacctacatctactaccccgatagcgtgaagggcagattcaccatctccagagacaacgccaagaacagcctgttcctccagatgaactccctgagagccgaggacacagccgtgtattattgcgctcgggacaactacggcagaaactacgactacggcatggactactggggccagggcacactggttaccgttagctctacgcgtgaggacctgaagaacgtgttcccacctgaggtggccgtgttcgagcctagcgaggccgagatcagccacacccagaaagccaccctcgtgtgcctggctaccggcttctaccccgaccatgtggaactgtcttggtgggtcaacggcaaagaggtgcacagcggcgtgtgtaccgacccccagccactgaaagaacagcccgccctgaacgacagccggtactgcctgagcagcagactgagagtgtccgccaccttctggcagaacccccggaaccacttcagatgccaggtgcagttctacggcctgagcgagaacgacgagtggacccaggacagagccaagcccgtgacccagatcgtgtctgccgaagcctggggcagagccgattgcggctttaccagcgagagctaccagcagggcgtgctgagcgccaccatcctgtacgagatcctgctgggcaaggccaccctgtacgccgtgctggtgtctgccctggtgctgatggctatggtcaagcggaaggacagccgggga

SEQ ID NO: 10089 - DNA, 2859 bp, Artificial Sequence
  Synthetic Polynucloetide
atggccttaccagtgaccgccttgctcctgccgctggccttgctgctccacgccgccaggccggaagtgcagctggttgaatctggcggaggactggttcagcctggcggatctctgagactgtcttgtgccgccagcggcttcagcttcagcgacttttggatgagctgggtccgacaggcccctggcaaaggacttgaatgggtcgccacaatcagccaggccggcagcgagaaggactacgtggactctgtgaagggcagattcaccatcagccgggacaacgccaagaagtccctgtacctccagatgaacagcctgagagccgaggacaccgccgtgtactattgtgcctctggcgtgtacagcttcgactacagaggccagggcaccctggtcacagtctcttctggtaccggcggaggcggatctggcggcggaggtagcggtggcggaggatctgaattcgagatcgtgctgacacagtctcccgccacactgtcactgtctccaggcgaaagagccacactgagctgtagcgccaccagcagcgtgtcctacatccactggtatcagcagaagcccggacaggcccctagactgctgatctacagcaccagcaatctggcctctggcatccccgccagattttctggctctggaagcggcaccgacttcaccctgacaatcggcagactggaacccgaggacttcgccgtgtactactgccagcagagaagcagcagccccttcacctttggacagggcaccaaggtggaaatcaagagactcgaggacctgaagaacgtgttcccacctgaggtggccgtgttcgagcctagcgaggccgagatcagccacacccagaaagccaccctcgtgtgcctggctaccggcttctaccccgaccatgtggaactgtcttggtgggtcaacggcaaagaggtgcacagcggcgtgtctaccgacccccagccactgaaagaacagcccgccctgaacgacagccggtactgcctgagcagcagactgagagtgtccgccaccttctggcagaacccccggaaccacttcagatgccaggtgcagttctacggcctgagcgagaacgacgagtggacccaggacagagccaagcccgtgacccagatcgtgtctgccgaagcctggggcagagccgattgcggatcccagagcttcggcctgctggaccccaagctgtgctacctgctggatggcatcctgttcatctacggcgtgatcctgaccgccctgttcctgagagtgaagttcagcagaagcgccgacgcccctgcctaccagcagggacagaaccaactgtacaacgagctgaacctgggcagacgggaagagtacgacgtgctggacaagcggagaggcagggaccctgagatgggcggaaagccccagcggagaaagaacccccaggaaggactgtataacgaactccagaaagacaagatggccgaagcctacagcgagatcggcatgaagggcgagcggagaagaggcaagggccacgatggcctgtaccagggcctgagcaccgccaccaaggacacctatgacgccctgcacatgcaggccctgcctccaagaagggccaagcgatctggatctggagcaacaaacttctcactactcaaacaagcaggtgacgtggaggagaatcccgggcctactagtatggactggatttggcgcatccttttccttgtcggcgctgctaccggcgcgcattccttcgaagaagtgcagctggttgagtctggcggcggactggttaagcctgagggaagcctgagactgtcttgtgccgccagcggcttcaccttcagcagatacggcatgagctgggtccgacaggctcctggcaaaggactggaatgggtgtccacaatttccggcggaggcacctacatctactaccccgatagcgtgaagggcagattcaccatctccagagacaacgccaagaacagcctgttcctccagatgaactccctgagagccgaggacacagccgtgtattattgcgctcgggacaactacggcagaaactacgactacggcatggactactggggccagggcacactggttaccgttagctctacgcgtatccagaaccctgatcctgccgtgtaccagctgcgggatagcaagagcagcgacaagagcgtgtgtctgttcaccgacttcgacagccagaccaacgtgtcccagagcaaggactccgacgtgtacatcaccgataagaccgtgctggacatgcggagcatggacttcaagagcaactccgccgtggcctggtccaacaagtccgatttcgcctgcgccaacgccttcaacaacagcattatccccgaggacacattcttcccaagccccgagagcagctgcggtacccagagttttgggttgttggaccctaaattgtgctatctgttggacggaatcctgttcatttacggagtgatcctgaccgcattgttcctgcgggttaagttttccagatccgcagacgcacccgcttaccaacaagggcagaaccaactctacaatgaacttaatttggggcggagggaagagtacgacgttctggacaaaaggaggggacgagatcccgagatgggcggaaagcctcagcgaaggaagaatccgcaagaggggctttataacgaactccagaaagataaaatggcagaagcctatagtgagattgggatgaagggagaaaggaggaggggtaaaggtcacgatgggttgtaccaaggattgagcacagccactaaagatacctatgatgcgctccacatgcaggccctgccgccaaga

SEQ ID NO: 10090 - DNA, 2349 bp, Artificial Sequence
  Synthetic Polynucloetide
atggccttaccagtgaccgccttgctcctgccgctggccttgctgctccacgccgccaggccggaagtgcagctggttgaatctggcggaggactggttcagcctggcggatctctgagactgtcttgtgccgccagcggcttcagcttcagcgacttttggatgagctgggtccgacaggcccctggcaaaggacttgaatgggtcgccacaatcagccaggccggcagcgagaaggactacgtggactctgtgaagggcagattcaccatcagccgggacaacgccaagaagtccctgtacctccagatgaacagcctgagagccgaggacaccgccgtgtactattgtgcctctggcgtgtacagcttcgactacagaggccagggcaccctggtcacagtctcttctggtaccggcggaggcggatctggcggcggaggtagcggtggcggaggatctgaattcgagatcgtgctgacacagtctcccgccacactgtcactgtctccaggcgaaagagccacactgagctgtagcgccaccagcagcgtgtcctacatccactggtatcagcagaagcccggacaggcccctagactgctgatctacagcaccagcaatctggcctctggcatccccgccagattttctggctctggaagcggcaccgacttcaccctgacaatcggcagactggaacccgaggacttcgccgtgtactactgccagcagagaagcagcagccccttcacctttggacagggcaccaaggtggaaatcaagagactcgagggacagcctaaggccaatcctaccgtgacactgttccctccaagcagcgaagaactccaggccaacaaggccacacttgtgtgcctgatctccgacttctaccctggggctgtgacagtggcttggaaggccgatggatctcctgtgaaagccggcgtggaaaccaccaagccatccaagcagagcaacaacaaatacgccgccagctcctacctgagcctgacacctgagcagtggaagtcccacagatcctacagctgccaagtgacccacgaaggcagcaccgtggaaaagacagtggcccctacagagtgcagccccatcaagaccgatgtgattacaatggaccccaaggacaactgctccaaggacgccaacgataccctgctgctccagctgaccaacaccagcgcctactacatgtacttgttgctgctgctgaagtccgtggtgtacttcgccatcatcacatgctgcctgctgcggagaaccgccttctgctgcaacggcgagaagtctagggccaagcgatctggatctggagcaacaaacttctcactactcaaacaagcaggtgacgtggaggagaatcccgggcctactagtatggactggatttggcgcatccttttccttgtcggcgctgctaccggcgcgcattccttcgaagaagtgcagctggttgagtctggcggcggactggttaagcctgagggaagcctgagactgtcttgtgccgccagcggcttcaccttcagcagatacggcatgagctgggtccgacaggctcctggcaaaggactggaatgggtgtccacaatttccggcggaggcacctacatctactaccccgatagcgtgaagggcagattcaccatctccagagacaacgccaagaacagcctgttcctccagatgaactccctgagagccgaggacacagccgtgtattattgcgctcgggacaactacggcagaaactacgactacggcatggactactggggccagggcacactggttaccgttagctctacgcgtgcctctacaaagggaccctccgtgtttcctctggctcccagcagcaagtctacaagcggaggaacagccgctctgggctgcctggtcaaggattactttcccgagcctgtgaccgtgtcctggaatagcggagcactgacaagcggcgtgcacacctttccagccgtgctgcaaagcagcggcctgtactctctgagcagcgtggtcacagtgcctagctctagcctgggcacccagacctacatctgcaatgtgaaccacaagcctagcaacaccaaggtggacaagagagtggaacccaagagctgtgaagtgaaaaccgactccaccgaccacgtgaagcccaaagagacagagaacaccaagcagcccagcaagagctgccacaagcccaaggccatcgtgcacaccgagaaagtgaacatgatgagcctgaccgtgctgggcctgcggatgctgttcgccaaaaccgtggccgtgaacttcctgctgaccgccaagctgttcttcctc

SEQ ID NO: 10091 - DNA, 2292 bp, Artificial Sequence
  Synthetic Polynucloetide
atggccttaccagtgaccgccttgctcctgccgctggccttgctgctccacgccgccaggccggaagtgcagctggttgaatctggcggaggactggttcagcctggcggatctctgagactgtcttgtgccgccagcggcttcagcttcagcgacttttggatgagctgggtccgacaggcccctggcaaaggacttgaatgggtcgccacaatcagccaggccggcagcgagaaggactacgtggactctgtgaagggcagattcaccatcagccgggacaacgccaagaagtccctgtacctccagatgaacagcctgagagccgaggacaccgccgtgtactattgtgcctctggcgtgtacagcttcgactacagaggccagggcaccctggtcacagtctcttctggtaccggcggaggcggatctggcggcggaggtagcggtggcggaggatctgaattcgagatcgtgctgacacagtctcccgccacactgtcactgtctccaggcgaaagagccacactgagctgtagcgccaccagcagcgtgtcctacatccactggtatcagcagaagcccggacaggcccctagactgctgatctacagcaccagcaatctggcctctggcatccccgccagattttctggctctggaagcggcaccgacttcaccctgacaatcggcagactggaacccgaggacttcgccgtgtactactgccagcagagaagcagcagccccttcacctttggacagggcaccaaggtggaaatcaagagactcgagggacagcctaaggccaatcctaccgtgacactgttccctccaagcagcgaagaactccaggccaacaaggccacacttgtgtgcctgatctccgacttctaccctggggctgtgacagtggcttggaaggccgatggatctcctgtgaaagccggcgtggaaaccaccaagccatccaagcagagcaacaacaaatacgccgccagctcctacctgagcctgacacctgagcagtggaagtcccacagatcctacagctgccaagtgacccacgaaggcagcaccgtggaaaagacagtggcccctacagagtgcagcggcagagccgattgcggctttaccagcgagagctaccagcagggcgtgctgagcgccaccatcctgtacgagatcctgctgggcaaggccaccctgtacgccgtgctggtgtctgccctggtgctgatggctatggtcaagcggaaggacagccggggacgcgccaagagaagcggatctggcgtgaagcagaccctgaatttcgacctgctgaagctggctggcgacgtggaatccaacccaggccctactagtatggactggatttggcgcatccttttccttgtcggcgctgctaccggcgcgcattccttcgaagaagtgcagctggttgagtctggcggcggactggttaagcctgagggaagcctgagactgtcttgtgccgccagcggcttcaccttcagcagatacggcatgagctgggtccgacaggctcctggcaaaggactggaatgggtgtccacaatttccggcggaggcacctacatctactaccccgatagcgtgaagggcagattcaccatctccagagacaacgccaagaacagcctgttcctccagatgaactccctgagagccgaggacacagccgtgtattattgcgctcgggacaactacggcagaaactacgactacggcatggactactggggccagggcacactggttaccgttagctctacgcgtgcctctacaaagggaccctccgtgtttcctctggctcccagcagcaagtctacaagcggaggaacagccgctctgggctgcctggtcaaggattactttcccgagcctgtgaccgtgtcctggaatagcggagcactgacaagcggcgtgcacacctttccagccgtgctgcaaagcagcggcctgtactctctgagcagcgtggtcacagtgcctagctctagcctgggcacccagacctacatctgcaatgtgaaccacaagcctagcaacaccaaggtggacaagagagtggaacccaagagctgtatccccgaggacacattcttcccaagccccgagagcagctgcgacgtgaagctggtggaaaagagcttcgagacagacaccaacctgaacttccagaacctgagcgtgatcggcttcagaatcctgctgctgaaagtggccggctttaacctgctgatgaccctgcggctgtggtccagc

SEQ ID NO: 10092 - DNA, 2694 bp, Artificial Sequence
  Synthetic Polynucloetide
atggccttaccagtgaccgccttgctcctgccgctggccttgctgctccacgccgccaggccggaagtgcagctggttgaatctggcggaggactggttcagcctggcggatctctgagactgtcttgtgccgccagcggcttcagcttcagcgacttttggatgagctgggtccgacaggcccctggcaaaggacttgaatgggtcgccacaatcagccaggccggcagcgagaaggactacgtggactctgtgaagggcagattcaccatcagccgggacaacgccaagaagtccctgtacctccagatgaacagcctgagagccgaggacaccgccgtgtactattgtgcctctggcgtgtacagcttcgactacagaggccagggcaccctggtcacagtctcttctggtaccggcggaggcggatctggcggcggaggtagcggtggcggaggatctgaattcgagatcgtgctgacacagtctcccgccacactgtcactgtctccaggcgaaagagccacactgagctgtagcgccaccagcagcgtgtcctacatccactggtatcagcagaagcccggacaggcccctagactgctgatctacagcaccagcaatctggcctctggcatccccgccagattttctggctctggaagcggcaccgacttcaccctgacaatcggcagactggaacccgaggacttcgccgtgtactactgccagcagagaagcagcagccccttcacctttggacagggcaccaaggtggaaatcaagagactcgagatccagaaccctgatcctgccgtgtaccagctgcgggatagcaagagcagcgacaagagcgtgtgtctgttcaccgacttcgacagccagaccaacgtgtcccagagcaaggactccgacgtgtacatcaccgataagtgcgtgctggacatgcggagcatggacttcaagagcaactccgccgtggcctggtccaacaagtccgatttcgcctgcgccaacgccttcaacaacagcattatccccgaggacacattcttcccaagccccgagagcagctgcgacgtgaagctggtggaaaagagcttcgagacagacaccaacctgaacttccagaacctgagcgtgatcggcttcagaatcctgctgctgaaagtggccggctttaacctgctgatgaccctgcggctgtggtccagccgcgccaagagaagcggatctggcgtgaagcagaccctgaatttcgacctgctgaagctggctggcgacgtggaatccaacccaggccctactagtatggactggatttggcgcatccttttccttgtcggcgctgctaccggcgcgcattccgggccccagctccagctgcaagagtctggacctggcctggtcaagcctagcgagacactgagcctgacctgtaccgtgtccggcgatagcatcagcagcggcgattactactggggctggatcagacagcctcctggcaaaggactggaatggatcggccacatctactacagcggcgtgacctactacaaccccagcctgaagtccagagtgaccatcagcgtggacaccagccggaaccagttctccctgaagctgtctagcgtgacagccgccgataccgccgtgtactactgcaccagagaggacagcagcaactggcggagtagaggccagggaacactggtcacagttagctctggatccggcggaggcggaagtggaggcggaggatctggcggcggaggctctttcgaagaagtgcagctggttgagtctggcggcggactggttaagcctgagggaagcctgagactgtcttgtgccgccagcggcttcaccttcagcagatacggcatgagctgggtccgacaggctcctggcaaaggactggaatgggtgtccacaatttccggcggaggcacctacatctactaccccgatagcgtgaagggcagattcaccatctccagagacaacgccaagaacagcctgttcctccagatgaactccctgagagccgaggacacagccgtgtattattgcgctcgggacaactacggcagaaactacgactacggcatggactactggggccagggcacactggttaccgttagctctacgcgtgaggacctgaagaacgtgttcccacctgaggtggccgtgttcgagcctagcgaggccgagatcagccacacccagaaagccaccctcgtgtgcctggctaccggcttctaccccgaccatgtggaactgtcttggtgggtcaacggcaaagaggtgcacagcggcgtgtgtaccgacccccagccactgaaagaacagcccgccctgaacgacagccggtactgcctgagcagcagactgagagtgtccgccaccttctggcagaacccccggaaccacttcagatgccaggtgcagttctacggcctgagcgagaacgacgagtggacccaggacagagccaagcccgtgacccagatcgtgtctgccgaagcctggggcagagccgattgcggctttaccagcgagagctaccagcagggcgtgctgagcgccaccatcctgtacgagatcctgctgggcaaggccaccctgtacgccgtgctggtgtctgccctggtgctgatggctatggtcaagcggaaggacagccgggga

SEQ ID NO: 10093 - DNA, 3270 bp, Artificial Sequence
  Synthetic Polynucloetide
atggccttaccagtgaccgccttgctcctgccgctggccttgctgctccacgccgccaggccggaagtgcagctggttgaatctggcggaggactggttcagcctggcggatctctgagactgtcttgtgccgccagcggcttcagcttcagcgacttttggatgagctgggtccgacaggcccctggcaaaggacttgaatgggtcgccacaatcagccaggccggcagcgagaaggactacgtggactctgtgaagggcagattcaccatcagccgggacaacgccaagaagtccctgtacctccagatgaacagcctgagagccgaggacaccgccgtgtactattgtgcctctggcgtgtacagcttcgactacagaggccagggcaccctggtcacagtctcttctggtaccggcggaggcggatctggcggcggaggtagcggtggcggaggatctgaattcgagatcgtgctgacacagtctcccgccacactgtcactgtctccaggcgaaagagccacactgagctgtagcgccaccagcagcgtgtcctacatccactggtatcagcagaagcccggacaggcccctagactgctgatctacagcaccagcaatctggcctctggcatccccgccagattttctggctctggaagcggcaccgacttcaccctgacaatcggcagactggaacccgaggacttcgccgtgtactactgccagcagagaagcagcagccccttcacctttggacagggcaccaaggtggaaatcaagagactcgaggacctgaagaacgtgttcccacctgaggtggccgtgttcgagcctagcgaggccgagatcagccacacccagaaagccaccctcgtgtgcctggctaccggcttctaccccgaccatgtggaactgtcttggtgggtcaacggcaaagaggtgcacagcggcgtgtctaccgacccccagccactgaaagaacagcccgccctgaacgacagccggtactgcctgagcagcagactgagagtgtccgccaccttctggcagaacccccggaaccacttcagatgccaggtgcagttctacggcctgagcgagaacgacgagtggacccaggacagagccaagcccgtgacccagatcgtgtctgccgaagcctggggcagagccgattgcggatcccagagcttcggcctgctggaccccaagctgtgctacctgctggatggcatcctgttcatctacggcgtgatcctgaccgccctgttcctgagagtgaagttcagcagaagcgccgacgcccctgcctaccagcagggacagaaccaactgtacaacgagctgaacctgggcagacgggaagagtacgacgtgctggacaagcggagaggcagggaccctgagatgggcggaaagccccagcggagaaagaacccccaggaaggactgtataacgaactccagaaagacaagatggccgaagcctacagcgagatcggcatgaagggcgagcggagaagaggcaagggccacgatggcctgtaccagggcctgagcaccgccaccaaggacacctatgacgccctgcacatgcaggccctgcctccaagaagggccaagcgatctggatctggagcaacaaacttctcactactcaaacaagcaggtgacgtggaggagaatcccgggcctactagtatggactggatttggcgcatccttttccttgtcggcgctgctaccggcgcgcattccgggccccagctccagctgcaagagtctggacctggcctggtcaagcctagcgagacactgagcctgacctgtaccgtgtccggcgatagcatcagcagcggcgattactactggggctggatcagacagcctcctggcaaaggactggaatggatcggccacatctactacagcggcgtgacctactacaaccccagcctgaagtccagagtgaccatcagcgtggacaccagccggaaccagttctccctgaagctgtctagcgtgacagccgccgataccgccgtgtactactgcaccagagaggacagcagcaactggcggagtagaggccagggaacactggtcacagttagctctggatccggcggaggcggaagtggaggcggaggatctggcggcggaggctctttcgaagaagtgcagctggttgagtctggcggcggactggttaagcctgagggaagcctgagactgtcttgtgccgccagcggcttcaccttcagcagatacggcatgagctgggtccgacaggctcctggcaaaggactggaatgggtgtccacaatttccggcggaggcacctacatctactaccccgatagcgtgaagggcagattcaccatctccagagacaacgccaagaacagcctgttcctccagatgaactccctgagagccgaggacacagccgtgtattattgcgctcgggacaactacggcagaaactacgactacggcatggactactggggccagggcacactggttaccgttagctctacgcgtatccagaaccctgatcctgccgtgtaccagctgcgggatagcaagagcagcgacaagagcgtgtgtctgttcaccgacttcgacagccagaccaacgtgtcccagagcaaggactccgacgtgtacatcaccgataagaccgtgctggacatgcggagcatggacttcaagagcaactccgccgtggcctggtccaacaagtccgatttcgcctgcgccaacgccttcaacaacagcattatccccgaggacacattcttcccaagccccgagagcagctgcggtacccagagttttgggttgttggaccctaaattgtgctatctgttggacggaatcctgttcatttacggagtgatcctgaccgcattgttcctgcgggttaagttttccagatccgcagacgcacccgcttaccaacaagggcagaaccaactctacaatgaacttaatttggggcggagggaagagtacgacgttctggacaaaaggaggggacgagatcccgagatgggcggaaagcctcagcgaaggaagaatccgcaagaggggctttataacgaactccagaaagataaaatggcagaagcctatagtgagattgggatgaagggagaaaggaggaggggtaaaggtcacgatgggttgtaccaaggattgagcacagccactaaagatacctatgatgcgctccacatgcaggccctgccgccaaga

SEQ ID NO: 10094 - DNA, 2760 bp, Artificial Sequence
  Synthetic Polynucloetide
atggccttaccagtgaccgccttgctcctgccgctggccttgctgctccacgccgccaggccggaagtgcagctggttgaatctggcggaggactggttcagcctggcggatctctgagactgtcttgtgccgccagcggcttcagcttcagcgacttttggatgagctgggtccgacaggcccctggcaaaggacttgaatgggtcgccacaatcagccaggccggcagcgagaaggactacgtggactctgtgaagggcagattcaccatcagccgggacaacgccaagaagtccctgtacctccagatgaacagcctgagagccgaggacaccgccgtgtactattgtgcctctggcgtgtacagcttcgactacagaggccagggcaccctggtcacagtctcttctggtaccggcggaggcggatctggcggcggaggtagcggtggcggaggatctgaattcgagatcgtgctgacacagtctcccgccacactgtcactgtctccaggcgaaagagccacactgagctgtagcgccaccagcagcgtgtcctacatccactggtatcagcagaagcccggacaggcccctagactgctgatctacagcaccagcaatctggcctctggcatccccgccagattttctggctctggaagcggcaccgacttcaccctgacaatcggcagactggaacccgaggacttcgccgtgtactactgccagcagagaagcagcagccccttcacctttggacagggcaccaaggtggaaatcaagagactcgagggacagcctaaggccaatcctaccgtgacactgttccctccaagcagcgaagaactccaggccaacaaggccacacttgtgtgcctgatctccgacttctaccctggggctgtgacagtggcttggaaggccgatggatctcctgtgaaagccggcgtggaaaccaccaagccatccaagcagagcaacaacaaatacgccgccagctcctacctgagcctgacacctgagcagtggaagtcccacagatcctacagctgccaagtgacccacgaaggcagcaccgtggaaaagacagtggcccctacagagtgcagccccatcaagaccgatgtgattacaatggaccccaaggacaactgctccaaggacgccaacgataccctgctgctccagctgaccaacaccagcgcctactacatgtacttgttgctgctgctgaagtccgtggtgtacttcgccatcatcacatgctgcctgctgcggagaaccgccttctgctgcaacggcgagaagtctagggccaagcgatctggatctggagcaacaaacttctcactactcaaacaagcaggtgacgtggaggagaatcccgggcctactagtatggactggatttggcgcatccttttccttgtcggcgctgctaccggcgcgcattccgggccccagctccagctgcaagagtctggacctggcctggtcaagcctagcgagacactgagcctgacctgtaccgtgtccggcgatagcatcagcagcggcgattactactggggctggatcagacagcctcctggcaaaggactggaatggatcggccacatctactacagcggcgtgacctactacaaccccagcctgaagtccagagtgaccatcagcgtggacaccagccggaaccagttctccctgaagctgtctagcgtgacagccgccgataccgccgtgtactactgcaccagagaggacagcagcaactggcggagtagaggccagggaacactggtcacagttagctctggatccggcggaggcggaagtggaggcggaggatctggcggcggaggctctttcgaagaagtgcagctggttgagtctggcggcggactggttaagcctgagggaagcctgagactgtcttgtgccgccagcggcttcaccttcagcagatacggcatgagctgggtccgacaggctcctggcaaaggactggaatgggtgtccacaatttccggcggaggcacctacatctactaccccgatagcgtgaagggcagattcaccatctccagagacaacgccaagaacagcctgttcctccagatgaactccctgagagccgaggacacagccgtgtattattgcgctcgggacaactacggcagaaactacgactacggcatggactactggggccagggcacactggttaccgttagctctacgcgtgcctctacaaagggaccctccgtgtttcctctggctcccagcagcaagtctacaagcggaggaacagccgctctgggctgcctggtcaaggattactttcccgagcctgtgaccgtgtcctggaatagcggagcactgacaagcggcgtgcacacctttccagccgtgctgcaaagcagcggcctgtactctctgagcagcgtggtcacagtgcctagctctagcctgggcacccagacctacatctgcaatgtgaaccacaagcctagcaacaccaaggtggacaagagagtggaacccaagagctgtgaagtgaaaaccgactccaccgaccacgtgaagcccaaagagacagagaacaccaagcagcccagcaagagctgccacaagcccaaggccatcgtgcacaccgagaaagtgaacatgatgagcctgaccgtgctgggcctgcggatgctgttcgccaaaaccgtggccgtgaacttcctgctgaccgccaagctgttcttcctc

SEQ ID NO: 10095 - DNA, 2703 bp, Artificial Sequence
  Synthetic Polynucloetide
atggccttaccagtgaccgccttgctcctgccgctggccttgctgctccacgccgccaggccggaagtgcagctggttgaatctggcggaggactggttcagcctggcggatctctgagactgtcttgtgccgccagcggcttcagcttcagcgacttttggatgagctgggtccgacaggcccctggcaaaggacttgaatgggtcgccacaatcagccaggccggcagcgagaaggactacgtggactctgtgaagggcagattcaccatcagccgggacaacgccaagaagtccctgtacctccagatgaacagcctgagagccgaggacaccgccgtgtactattgtgcctctggcgtgtacagcttcgactacagaggccagggcaccctggtcacagtctcttctggtaccggcggaggcggatctggcggcggaggtagcggtggcggaggatctgaattcgagatcgtgctgacacagtctcccgccacactgtcactgtctccaggcgaaagagccacactgagctgtagcgccaccagcagcgtgtcctacatccactggtatcagcagaagcccggacaggcccctagactgctgatctacagcaccagcaatctggcctctggcatccccgccagattttctggctctggaagcggcaccgacttcaccctgacaatcggcagactggaacccgaggacttcgccgtgtactactgccagcagagaagcagcagccccttcacctttggacagggcaccaaggtggaaatcaagagactcgagggacagcctaaggccaatcctaccgtgacactgttccctccaagcagcgaagaactccaggccaacaaggccacacttgtgtgcctgatctccgacttctaccctggggctgtgacagtggcttggaaggccgatggatctcctgtgaaagccggcgtggaaaccaccaagccatccaagcagagcaacaacaaatacgccgccagctcctacctgagcctgacacctgagcagtggaagtcccacagatcctacagctgccaagtgacccacgaaggcagcaccgtggaaaagacagtggcccctacagagtgcagcggcagagccgattgcggctttaccagcgagagctaccagcagggcgtgctgagcgccaccatcctgtacgagatcctgctgggcaaggccaccctgtacgccgtgctggtgtctgccctggtgctgatggctatggtcaagcggaaggacagccggggacgcgccaagagaagcggatctggcgtgaagcagaccctgaatttcgacctgctgaagctggctggcgacgtggaatccaacccaggccctactagtatggactggatttggcgcatccttttccttgtcggcgctgctaccggcgcgcattccgggccccagctccagctgcaagagtctggacctggcctggtcaagcctagcgagacactgagcctgacctgtaccgtgtccggcgatagcatcagcagcggcgattactactggggctggatcagacagcctcctggcaaaggactggaatggatcggccacatctactacagcggcgtgacctactacaaccccagcctgaagtccagagtgaccatcagcgtggacaccagccggaaccagttctccctgaagctgtctagcgtgacagccgccgataccgccgtgtactactgcaccagagaggacagcagcaactggcggagtagaggccagggaacactggtcacagttagctctggatccggcggaggcggaagtggaggcggaggatctggcggcggaggctctttcgaagaagtgcagctggttgagtctggcggcggactggttaagcctgagggaagcctgagactgtcttgtgccgccagcggcttcaccttcagcagatacggcatgagctgggtccgacaggctcctggcaaaggactggaatgggtgtccacaatttccggcggaggcacctacatctactaccccgatagcgtgaagggcagattcaccatctccagagacaacgccaagaacagcctgttcctccagatgaactccctgagagccgaggacacagccgtgtattattgcgctcgggacaactacggcagaaactacgactacggcatggactactggggccagggcacactggttaccgttagctctacgcgtgcctctacaaagggaccctccgtgtttcctctggctcccagcagcaagtctacaagcggaggaacagccgctctgggctgcctggtcaaggattactttcccgagcctgtgaccgtgtcctggaatagcggagcactgacaagcggcgtgcacacctttccagccgtgctgcaaagcagcggcctgtactctctgagcagcgtggtcacagtgcctagctctagcctgggcacccagacctacatctgcaatgtgaaccacaagcctagcaacaccaaggtggacaagagagtggaacccaagagctgtatccccgaggacacattcttcccaagccccgagagcagctgcgacgtgaagctggtggaaaagagcttcgagacagacaccaacctgaacttccagaacctgagcgtgatcggcttcagaatcctgctgctgaaagtggccggctttaacctgctgatgaccctgcggctgtggtccagc

SEQ ID NO: 10096 - DNA, 2274 bp, Artificial Sequence
  Synthetic Polynucloetide
atggccttaccagtgaccgccttgctcctgccgctggccttgctgctccacgccgccaggccggaagtgcaggttttggagtctggcggaggactggttcagcctggcggatctctgagactgtcttgtgccgccagcggcttcaccttcagcaactttgccatgagctgggtccgacaggcccctggcaaaggacttgaatgggtgtccacaatcagcggcagcgccggcacaacagattacgccgattctgtgaagggcagattcaccatcagccgggacaacagcaagaaaaccctgtacctccagatgaacagcctgcgcgtggaagataccgccgtgtactactgtgccgatggcagaggccccttcttcgattatcgcggccagggcacactggtcaccgtttcttctggtaccggcggaggcggatctggcggcggaggtagcggtggcggaggatctgaattcgagatcgtgctgacacagtctcccgccacactgtcactgtctccaggcgaaagagccacactgagctgtagcgccaccagcagcgtgtcctacatccactggtatcagcagaagcccggacaggcccctagactgctgatctacagcaccagcaatctggcctctggcatccccgccagattttctggctctggaagcggcaccgacttcaccctgacaatcggcagactggaacccgaggacttcgccgtgtactactgccagcagagaagcagcagccccttcacctttggacagggcaccaaggtggaaatcaagagactcgaggacctgaagaacgtgttcccacctgaggtggccgtgttcgagcctagcgaggccgagatcagccacacccagaaagccaccctcgtgtgcctggctaccggcttctaccccgaccatgtggaactgtcttggtgggtcaacggcaaagaggtgcacagcggcgtgtgtaccgacccccagccactgaaagaacagcccgccctgaacgacagccggtactgcctgagcagcagactgagagtgtccgccaccttctggcagaacccccggaaccacttcagatgccaggtgcagttctacggcctgagcgagaacgacgagtggacccaggacagagccaagcccgtgacccagatcgtgtctgccgaagcctggggcagagccgattgcggctttaccagcgagagctaccagcagggcgtgctgagcgccaccatcctgtacgagatcctgctgggcaaggccaccctgtacgccgtgctggtgtctgccctggtgctgatggctatggtcaagcggaaggacagccggggaagggccaagcgatctggatctggagcaacaaacttctcactactcaaacaagcaggtgacgtggaggagaatcccgggcctactagtatggactggatttggcgcatccttttccttgtcggcgctgctaccggcgcgcattccttcgaagaagtgcagctggttgagtctggcggcggactggttaagcctgagggaagcctgagactgtcttgtgccgccagcggcttcaccttcagcagatacggcatgagctgggtccgacaggctcctggcaaaggactggaatgggtgtccacaatttccggcggaggcacctacatctactaccccgatagcgtgaagggcagattcaccatctccagagacaacgccaagaacagcctgttcctccagatgaactccctgagagccgaggacacagccgtgtattattgcgctcgggacaactacggcagaaactacgactacggcatggactactggggccagggcacactggttaccgttagctctacgcgtatccagaaccctgatcctgccgtgtaccagctgcgggatagcaagagcagcgacaagagcgtgtgtctgttcaccgacttcgacagccagaccaacgtgtcccagagcaaggactccgacgtgtacatcaccgataagtgcgtgctggacatgcggagcatggacttcaagagcaactccgccgtggcctggtccaacaagtccgatttcgcctgcgccaacgccttcaacaacagcattatccccgaggacacattcttcccaagccccgagagcagctgcgacgtgaagctggtggaaaagagcttcgagacagacaccaacctgaacttccagaacctgagcgtgatcggcttcagaatcctgctgctgaaagtggccggctttaacctgctgatgaccctgcggctgtggtccagc

SEQ ID NO: 10097 - DNA, 2277 bp, Artificial Sequence
  Synthetic Polynucloetide
atggccttaccagtgaccgccttgctcctgccgctggccttgctgctccacgccgccaggccggagatcgtgctgacacagtctcccgccacactgtcactgtctccaggcgaaagagccacactgagctgtagcgccaccagcagcgtgtcctacatccactggtatcagcagaagcccggacaggcccctagactgctgatctacagcaccagcaatctggcctctggcatccccgccagattttctggctctggaagcggcaccgacttcaccctgacaatcggcagactggaacccgaggacttcgccgtgtactactgccagcagagaagcagcagccccttcacctttggacagggcaccaaggtggaaatcaagagactcgaggacctgaagaacgtgttcccacctgaggtggccgtgttcgagcctagcgaggccgagatcagccacacccagaaagccaccctcgtgtgcctggctaccggcttctaccccgaccatgtggaactgtcttggtgggtcaacggcaaagaggtgcacagcggcgtgtgtaccgacccccagccactgaaagaacagcccgccctgaacgacagccggtactgcctgagcagcagactgagagtgtccgccaccttctggcagaacccccggaaccacttcagatgccaggtgcagttctacggcctgagcgagaacgacgagtggacccaggacagagccaagcccgtgacccagatcgtgtctgccgaagcctggggcagagccgattgcggctttaccagcgagagctaccagcagggcgtgctgagcgccaccatcctgtacgagatcctgctgggcaaggccaccctgtacgccgtgctggtgtctgccctggtgctgatggctatggtcaagcggaaggacagccggggaagggccaagcgatctggatctggagcaacaaacttctcactactcaaacaagcaggtgacgtggaggagaatcccgggcctactagtatggactggatttggcgcatccttttccttgtcggcgctgctaccggcgcccattccgggcccgaagtgcagctggttgaatctggcggaggactggttcaggctggcggatctctgagactgtcttgtgccgccagcggcagaacctttagcatgggctggtttagacaggcccctggcaaagagagagagttcgtcgccgccatcacatactctggcggcagcccttactacgccgactctgtgaagggcagattcaccatcagccgggacaacgccaagaacaccgtgtacctccagatgaacagcctgaagcctgaggacaccgccgtgtactactgcgccgccaatccaacatacggcagcgactggaacgccgagaattggggccagggaacccaagtgacagtgtctagcggatccggcggcggaggatctggcggaggcggatctgggggcggaggctctttcgaagaagtgcagctggttgagtctggcggcggactggttaagcctgagggaagcctgagactgtcttgtgccgccagcggcttcaccttcagcagatacggcatgagctgggtccgacaggctcctggcaaaggactggaatgggtgtccacaatttccggcggaggcacctacatctactaccccgatagcgtgaagggcagattcaccatctccagagacaacgccaagaacagcctgttcctccagatgaactccctgagagccgaggacacagccgtgtattattgcgctcgggacaactacggcagaaactacgactacggcatggactactggggccagggcacactggttaccgttagctctacgcgtatccagaaccctgatcctgccgtgtaccagctgcgggatagcaagagcagcgacaagagcgtgtgtctgttcaccgacttcgacagccagaccaacgtgtcccagagcaaggactccgacgtgtacatcaccgataagtgcgtgctggacatgcggagcatggacttcaagagcaactccgccgtggcctggtccaacaagtccgatttcgcctgcgccaacgccttcaacaacagcattatccccgaggacacattcttcccaagccccgagagcagctgcgacgtgaagctggtggaaaagagcttcgagacagacaccaacctgaacttccagaacctgagcgtgatcggcttcagaatcctgctgctgaaagtggccggctttaacctgctgatgaccctgcggctgtggtccagc

SEQ ID NO: 10098 - DNA, 2658 bp, Artificial Sequence
  Synthetic Polynucloetide
atggccttaccagtgaccgccttgctcctgccgctggccttgctgctccacgccgccaggccggagatcgtgctgacacagtctcccgccacactgtcactgtctccaggcgaaagagccacactgagctgtagcgccaccagcagcgtgtcctacatccactggtatcagcagaagcccggacaggcccctagactgctgatctacagcaccagcaatctggcctctggcatccccgccagattttctggctctggaagcggcaccgacttcaccctgacaatcggcagactggaacccgaggacttcgccgtgtactactgccagcagagaagcagcagccccttcacctttggacagggcaccaaggtggaaatcaagagactcgaggacctgaagaacgtgttcccacctgaggtggccgtgttcgagcctagcgaggccgagatcagccacacccagaaagccaccctcgtgtgcctggctaccggcttctaccccgaccatgtggaactgtcttggtgggtcaacggcaaagaggtgcacagcggcgtgtgtaccgacccccagccactgaaagaacagcccgccctgaacgacagccggtactgcctgagcagcagactgagagtgtccgccaccttctggcagaacccccggaaccacttcagatgccaggtgcagttctacggcctgagcgagaacgacgagtggacccaggacagagccaagcccgtgacccagatcgtgtctgccgaagcctggggcagagccgattgcggctttaccagcgagagctaccagcagggcgtgctgagcgccaccatcctgtacgagatcctgctgggcaaggccaccctgtacgccgtgctggtgtctgccctggtgctgatggctatggtcaagcggaaggacagccggggaagggccaagcgatctggatctggagcaacaaacttctcactactcaaacaagcaggtgacgtggaggagaatcccgggcctactagtatggactggatttggcgcatccttttccttgtcggcgctgctaccggcgcccattcccaactgcaactgcaagagtctggccctggcctggtcaagccttctgaaaccctgagcctgacctgtaccgtgtccggcggctctatcagcagcggcgattactactggggctggatcagacagcctccaggcaagggactcgaatggatcggcagcatcagctacagcggctccacctactacaacccaagcctgaagtccagagtgaccatcagcgtggacaccagcagaaaccagttctccctgaagctgagcagcgtgacagccgccgatacagccgtgtattattgcaccagagaggacagcagcaactggcggagtagaggacagggcacactggtcacagtgtcctcttctggaggcggtggaagcggtggaggaggatctgaagtgcagctggttgaatctggcggaggactggttcaggctggcggatctctgagactgtcttgtgccgccagcggcagaacctttagcatgggctggtttagacaggcccctggcaaagagagagagttcgtcgccgccatcacatactctggcggcagcccttactacgccgactctgtgaagggcagattcaccatcagccgggacaacgccaagaacaccgtgtacctccagatgaacagcctgaagcctgaggacaccgccgtgtactactgcgccgccaatccaacatacggcagcgactggaacgccgagaattggggccagggaacccaagtgacagtgtctagcggatccggcggcggaggatctggcggaggcggatctgggggcggaggctctttcgaagaagtgcagctggttgagtctggcggcggactggttaagcctgagggaagcctgagactgtcttgtgccgccagcggcttcaccttcagcagatacggcatgagctgggtccgacaggctcctggcaaaggactggaatgggtgtccacaatttccggcggaggcacctacatctactaccccgatagcgtgaagggcagattcaccatctccagagacaacgccaagaacagcctgttcctccagatgaactccctgagagccgaggacacagccgtgtattattgcgctcgggacaactacggcagaaactacgactacggcatggactactggggccagggcacactggttaccgttagctctacgcgtatccagaaccctgatcctgccgtgtaccagctgcgggatagcaagagcagcgacaagagcgtgtgtctgttcaccgacttcgacagccagaccaacgtgtcccagagcaaggactccgacgtgtacatcaccgataagtgcgtgctggacatgcggagcatggacttcaagagcaactccgccgtggcctggtccaacaagtccgatttcgcctgcgccaacgccttcaacaacagcattatccccgaggacacattcttcccaagccccgagagcagctgcgacgtgaagctggtggaaaagagcttcgagacagacaccaacctgaacttccagaacctgagcgtgatcggcttcagaatcctgctgctgaaagtggccggctttaacctgctgatgaccctgcggctgtggtccagc

SEQ ID NO: 10099 - DNA, 2685 bp, Artificial Sequence
  Synthetic Polynucloetide
atggccttaccagtgaccgccttgctcctgccgctggccttgctgctccacgccgccaggccggaagtgcaggttttggagtctggcggaggactggttcagcctggcggatctctgagactgtcttgtgccgccagcggcttcaccttcagcaactttgccatgagctgggtccgacaggcccctggcaaaggacttgaatgggtgtccacaatcagcggcagcgccggcacaacagattacgccgattctgtgaagggcagattcaccatcagccgggacaacagcaagaaaaccctgtacctccagatgaacagcctgcgcgtggaagataccgccgtgtactactgtgccgatggcagaggccccttcttcgattatcgcggccagggcacactggtcaccgtttcttctggtaccggcggaggcggatctggcggcggaggtagcggtggcggaggatctgaattcgagatcgtgctgacacagtctcccgccacactgtcactgtctccaggcgaaagagccacactgagctgtagcgccaccagcagcgtgtcctacatccactggtatcagcagaagcccggacaggcccctagactgctgatctacagcaccagcaatctggcctctggcatccccgccagattttctggctctggaagcggcaccgacttcaccctgacaatcggcagactggaacccgaggacttcgccgtgtactactgccagcagagaagcagcagccccttcacctttggacagggcaccaaggtggaaatcaagagactcgaggacctgaagaacgtgttcccacctgaggtggccgtgttcgagcctagcgaggccgagatcagccacacccagaaagccaccctcgtgtgcctggctaccggcttctaccccgaccatgtggaactgtcttggtgggtcaacggcaaagaggtgcacagcggcgtgtgtaccgacccccagccactgaaagaacagcccgccctgaacgacagccggtactgcctgagcagcagactgagagtgtccgccaccttctggcagaacccccggaaccacttcagatgccaggtgcagttctacggcctgagcgagaacgacgagtggacccaggacagagccaagcccgtgacccagatcgtgtctgccgaagcctggggcagagccgattgcggctttaccagcgagagctaccagcagggcgtgctgagcgccaccatcctgtacgagatcctgctgggcaaggccaccctgtacgccgtgctggtgtctgccctggtgctgatggctatggtcaagcggaaggacagccggggaagggccaagcgatctggatctggagcaacaaacttctcactactcaaacaagcaggtgacgtggaggagaatcccgggcctactagtatggactggatttggcgcatccttttccttgtcggcgctgctaccggcgcccattccgggcccgaagtgcagctggttgaatctggcggaggactggttcaggctggcggatctctgagactgtcttgtgccgccagcggcagaacctttagcatgggctggtttagacaggcccctggcaaagagagagagttcgtcgccgccatcacatacagcggcggcagcccttactacgcctcttctgtcagaggccggttcaccatcagccgggacaacgccaagaacaccgtgtacctccagatgaacagcctgaagccagaggacaccgccgtgtactactgtgccgccaatccaacctacggcagcgactggaatgccgagaattggggccagggcacccaagtgacagtgtctagtggatccggcggcggaggatctggcggaggcggatctgggggcggaggctctttcgaagaagtgcagctggttgagtctggcggcggactggttaagcctgagggaagcctgagactgtcttgtgccgccagcggcttcaccttcagcagatacggcatgagctgggtccgacaggctcctggcaaaggactggaatgggtgtccacaatttccggcggaggcacctacatctactaccccgatagcgtgaagggcagattcaccatctccagagacaacgccaagaacagcctgttcctccagatgaactccctgagagccgaggacacagccgtgtattattgcgctcgggacaactacggcagaaactacgactacggcatggactactggggccagggcacactggttaccgttagctctacgcgtatccagaaccctgatcctgccgtgtaccagctgcgggatagcaagagcagcgacaagagcgtgtgtctgttcaccgacttcgacagccagaccaacgtgtcccagagcaaggactccgacgtgtacatcaccgataagtgcgtgctggacatgcggagcatggacttcaagagcaactccgccgtggcctggtccaacaagtccgatttcgcctgcgccaacgccttcaacaacagcattatccccgaggacacattcttcccaagccccgagagcagctgcgacgtgaagctggtggaaaagagcttcgagacagacaccaacctgaacttccagaacctgagcgtgatcggcttcagaatcctgctgctgaaagtggccggctttaacctgctgatgaccctgcggctgtggtccagc

SEQ ID NO: 10100 - DNA, 2178 bp, Artificial Sequence
  Synthetic Polynucloetide
atggccttaccagtgaccgccttgctcctgccgctggccttgctgctccacgccgccaggccgcagatcgtgctgacacagagccctgccatcatgagtgcctctccaggcgaggaagtgaccctgacctgtagcgccaccagcagcgtgtcctacatccactggtttcagcagaggcccggcacaagccctaagctgtggatctacagcaccagcaatctggcctctggcgtgccagtgcggtttagcggatctggctacggcaccagctacagcctgaccatcagcagaatggaagccgaggatgccgccacctactactgccagcagagaagcagcagccccttcacatttggcagcggcaccaagctggaaatcaaaggcggaggcggaagtggaggcggaggatctggcggcggaggctctgaagtgaaggtggtggaatctggcggcgacctggttaagcctggcggatctctgaagctgagctgtgtggtgtccggcttcaccttcagcagatacggcatgagctgggtccgacagacccctggcaaaagactggaatgggtcgccacaatttccggcggaggcacctacatctactaccccgatagcgtgaagggcagattcaccatctccagagacaacgccaagaacaccctgtacctccagatgagcagcctgaagtctgaggacaccgccatgtaccactgcaccagggacaactacggcagaaactacgactacggcatggactactggggccagggcacaagcgtgacagtctcttctacgcgtgagcagaaactgatctcggaagaggatctggcgaagcccaccacgacgccagcgccgcgaccaccaacaccggcgcccaccatcgcgtcgcagcccctgtccctgcgcccagaggcgtgccggccagcggcggggggcgcagtgcacacgagggggctggacttcgcctgtgacatctacatctgggcgcccttggccgggacttgtggggtccttctcctgtcactggttatcaccctttactgcaaacggggcagaaagaaactcctgtatatattcaaacaaccatttatgagaccagtacaaactactcaagaggaagatggctgtagctgccgatttccagaagaagaagaaggaggatgtgaactgagagtgaagttcagcaggagcgcagacgcccccgcgtaccagcagggccagaaccagctctataacgagctgaatctaggacgaagagaggagtacgatgttttggacaagagacgtggccgggaccctgagatggggggaaagccgagaaggaagaaccctcaggaaggcctgtacaatgaactgcagaaagataagatggcggaggcctacagtgagattgggatgaaaggcgagcgccggaggggcaaggggcacgatggcctttaccagggtctcagtacagccaccaaggacacctacgacgcccttcacatgcaggccctgccccctcgctctagtggctccggcgagggcagaggaagtctactaacctgcggagatgtggaagaaaatcctggcccacatatgaccgagtacaagcccacggtgcgcctcgccacccgcgacgacgtccccagggccgtacgcaccctcgccgccgcgttcgccgactaccccgccacgcgccacaccgtcgatccggaccgccacatcgagcgggtcaccgagctgcaagaactcttcctcacgcgcgtcgggctcgacatcggcaaggtgtgggtcgcggacgacggcgccgcggtggcggtctggaccacgccggagagcgtcgaagcgggggcggtgttcgccgagatcggcccgcgcatggccgagttgagcggttcccggctggccgcgcagcaacagatggaaggcctcctggcgccgcaccggcccaaggagcccgcgtggttcctggccaccgtcggcgtctcgcccgaccaccagggcaagggtctgggcagcgccgtcgtgctccccggagtggaggcggccgagcgcgccggggtgcccgccttcctggagacctccgcgccccgcaacctccccttctacgagcggctcggcttcaccgtcaccgccgacgtcgaggtgcccgaaggaccgcgcacctggtgcatgacccgcaagcccggtgcctga

SEQ ID NO: 10101 - DNA, 2160 bp, Artificial Sequence
  Synthetic Polynucloetide
atggccttaccagtgaccgccttgctcctgccgctggccttgctgctccacgccgccaggccgcagatcgtgctgacacagagccctgccatcatgagtgcctctccaggcgaggaagtgaccctgacctgtagcgccaccagcagcgtgtcctacatccactggtttcagcagaggcccggcacaagccctaagctgtggatctacagcaccagcaatctggcctctggcgtgccagtgcggtttagcggatctggctacggcaccagctacagcctgaccatcagcagaatggaagccgaggatgccgccacctactactgccagcagagaagcagcagccccttcacatttggcagcggcaccaagctggaaatcaaaggcggaggcggaagtggaggcggaggatctggcggcggaggctctgaagtgaaggtggtggaatctggcggcgacctggttaagcctggcggatctctgaagctgagctgtgtggtgtccggcttcaccttcagcagatacggcatgagctgggtccgacagacccctggcaaaagactggaatgggtcgccacaatttccggcggaggcacctacatctactaccccgatagcgtgaagggcagattcaccatctccagagacaacgccaagaacaccctgtacctccagatgagcagcctgaagtctgaggacaccgccatgtaccactgcaccagggacaactacggcagaaactacgactacggcatggactactggggccagggcacaagcgtgacagtctcttctacgcgtgagcagaaactgatctcggaagaggatctgaaaattgaagttatgtatcctcctccttacctagacaatgagaagagcaatggaaccattatccatgtgaaagggaaacacctttgtccaagtcccctatttcccggaccttctaagcccttttgggtgctggtggtggttgggggagtcctggcttgctatagcttgctagtaacagtggcctttattattttctgggtgaggagtaagaggagcaggctcctgcacagtgactacatgaacatgactccacgccgccccggacccacccgcaagcattaccagccctatgccccaccacgcgacttcgcagcctatcgctccagagtgaagttcagcaggagcgcagacgcccccgcgtaccagcagggccagaaccagctctataacgagctcaatctaggacgaagagaggagtacgatgttttggacaagagacgtggccgggaccctgagatggggggaaagccgagaaggaagaaccctcaggaaggcctgtacaatgaactgcagaaagataagatggcggaggcctacagtgagattgggatgaaaggcgagcgccggaggggcaaggggcacgatggcctttaccagggtctcagtacagccaccaaggacacctacgacgcccttcacatgcaggccctgccccctcgctctagtggctccggcgagggcagaggaagtctactaacctgcggagatgtggaagaaaatcctggcccacatatgaccgagtacaagcccacggtgcgcctcgccacccgcgacgacgtccccagggccgtacgcaccctcgccgccgcgttcgccgactaccccgccacgcgccacaccgtcgatccggaccgccacatcgagcgggtcaccgagctgcaagaactcttcctcacgcgcgtcgggctcgacatcggcaaggtgtgggtcgcggacgacggcgccgcggtggcggtctggaccacgccggagagcgtcgaagcgggggcggtgttcgccgagatcggcccgcgcatggccgagttgagcggttcccggctggccgcgcagcaacagatggaaggcctcctggcgccgcaccggcccaaggagcccgcgtggttcctggccaccgtcggcgtctcgcccgaccaccagggcaagggtctgggcagcgccgtcgtgctccccggagtggaggcggccgagcgcgccggggtgcccgccttcctggagacctccgcgccccgcaacctccccttctacgagcggctcggcttcaccgtcaccgccgacgtcgaggtgcccgaaggaccgcgcacctggtgcatgacccgcaagcccggtgcctga

SEQ ID NO: 10102 - DNA, 1488 bp, Artificial Sequence
  Synthetic Polynucloetide
atggccttaccagtgaccgccttgctcctgccgctggccttgctgctccacgccgccaggccgcagatcgtgctgacacagagccctgccatcatgagtgcctctccaggcgaggaagtgaccctgacctgtagcgccaccagcagcgtgtcctacatccactggtttcagcagaggcccggcacaagccctaagctgtggatctacagcaccagcaatctggcctctggcgtgccagtgcggtttagcggatctggctacggcaccagctacagcctgaccatcagcagaatggaagccgaggatgccgccacctactactgccagcagagaagcagcagccccttcacatttggcagcggcaccaagctggaaatcaaaggcggaggcggaagtggaggcggaggatctggcggcggaggctctgaagtgaaggtggtggaatctggcggcgacctggttaagcctggcggatctctgaagctgagctgtgtggtgtccggcttcaccttcagcagatacggcatgagctgggtccgacagacccctggcaaaagactggaatgggtcgccacaatttccggcggaggcacctacatctactaccccgatagcgtgaagggcagattcaccatctccagagacaacgccaagaacaccctgtacctccagatgagcagcctgaagtctgaggacaccgccatgtaccactgcaccagggacaactacggcagaaactacgactacggcatggactactggggccagggcacaagcgtgacagtctcttctacgcgtgagcagaaactgatctcggaagaggatctgaaaattgaagttatgtatcctcctccttacctagacaatgagaagagcaatggaaccattatccatgtgaaagggaaacacctttgtccaagtcccctatttcccggaccttctaagcccttttgggtgctggtggtggttgggggagtcctggcttgctatagcttgctagtaacagtggcctttattattttctgggtgaggagtaagaggagcaggctcctgcacagtgactacatgaacatgactccacgccgccccggacccacccgcaagcattaccagccctatgccccaccacgcgacttcgcagcctatcgctccagagtgaagttcagcaggagcgcagacgcccccgcgtaccagcagggccagaaccagctctataacgagctcaatctaggacgaagagaggagtacgatgttttggacaagagacgtggccgggaccctgagatggggggaaagccgagaaggaagaaccctcaggaaggcctgtacaatgaactgcagaaagataagatggcggaggcctacagtgagattgggatgaaaggcgagcgccggaggggcaaggggcacgatggcctttaccagggtctcagtacagccaccaaggacacctacgacgcccttcacatgcaggccctgccccctcgc

SEQ ID NO: 10103 - DNA, 1509 bp, Artificial Sequence
  Synthetic Polynucloetide
atggccttaccagtgaccgccttgctcctgccgctggccttgctgctccacgccgccaggccgcagatcgtgctgacacagagccctgccatcatgagtgcctctccaggcgaggaagtgaccctgacctgtagcgccaccagcagcgtgtcctacatccactggtttcagcagaggcccggcacaagccctaagctgtggatctacagcaccagcaatctggcctctggcgtgccagtgcggtttagcggatctggctacggcaccagctacagcctgaccatcagcagaatggaagccgaggatgccgccacctactactgccagcagagaagcagcagccccttcacatttggcagcggcaccaagctggaaatcaaaggcggaggcggaagtggaggcggaggatctggcggcggaggctctgaagtgaaggtggtggaatctggcggcgacctggttaagcctggcggatctctgaagctgagctgtgtggtgtccggcttcaccttcagcagatacggcatgagctgggtccgacagacccctggcaaaagactggaatgggtcgccacaatttccggcggaggcacctacatctactaccccgatagcgtgaagggcagattcaccatctccagagacaacgccaagaacaccctgtacctccagatgagcagcctgaagtctgaggacaccgccatgtaccactgcaccagggacaactacggcagaaactacgactacggcatggactactggggccagggcacaagcgtgacagtctcttctacgcgtgagcagaaactgatctcggaagaggatctggcgaagcccaccacgacgccagcgccgcgaccaccaacaccggcgcccaccatcgcgtcgcagcccctgtccctgcgcccagaggcgtgccggccagcggcggggggcgcagtgcacacgagggggctggacttcgcctgtgacatctacatctgggcgcccttggccgggacttgtggggtccttctcctgtcactggttatcaccctttactgcaaacggggcagaaagaaactcctgtatatattcaaacaaccatttatgagaccagtacaaactactcaagaggaagatggctgtagctgccgatttccagaagaagaagaaggaggatgtgaactgagagtgaagttcagcaggagcgcagacgcccccgcgtaccagcagggccagaaccagctctataacgagctgaatctaggacgaagagaggagtacgatgttttggacaagagacgtggccgggaccctgagatggggggaaagccgagaaggaagaaccctcaggaaggcctgtacaatgaactgcagaaagataagatggcggaggcctacagtgagattgggatgaaaggcgagcgccggaggggcaaggggcacgatggcctttaccagggtctcagtacagccaccaaggacacctacgacgcccttcacatgcaggccctgccccctcgctga

SEQ ID NO: 10104 - DNA, 1509 bp, Artificial Sequence
  Synthetic Polynucloetide
atggccttaccagtgaccgccttgctcctgccgctggccttgctgctccacgccgccaggccggaagtgaaggtggtggaatctggcggcgacctggttaagcctggcggatctctgaagctgagctgtgtggtgtccggcttcaccttcagcagatacggcatgagctgggtccgacagacccctggcaaaagactggaatgggtcgccacaatttccggcggaggcacctacatctactaccccgatagcgtgaagggcagattcaccatctccagagacaacgccaagaacaccctgtacctccagatgagcagcctgaagtctgaggacaccgccatgtaccactgcaccagggacaactacggcagaaactacgactacggcatggactactggggccagggcacaagcgtgacagtctcttctggcggaggcggaagtggaggcggaggatctggcggcggaggctctcagatcgtgctgacacagagccctgccatcatgagtgcctctccaggcgaggaagtgaccctgacctgtagcgccaccagcagcgtgtcctacatccactggtttcagcagaggcccggcacaagccctaagctgtggatctacagcaccagcaatctggcctctggcgtgccagtgcggtttagcggatctggctacggcaccagctacagcctgaccatcagcagaatggaagccgaggatgccgccacctactactgccagcagagaagcagcagccccttcacatttggcagcggcaccaagctggaaatcaaaacgcgtgagcagaaactgatctcggaagaggatctggcgaagcccaccacgacgccagcgccgcgaccaccaacaccggcgcccaccatcgcgtcgcagcccctgtccctgcgcccagaggcgtgccggccagcggcggggggcgcagtgcacacgagggggctggacttcgcctgtgacatctacatctgggcgcccttggccgggacttgtggggtccttctcctgtcactggttatcaccctttactgcaaacggggcagaaagaaactcctgtatatattcaaacaaccatttatgagaccagtacaaactactcaagaggaagatggctgtagctgccgatttccagaagaagaagaaggaggatgtgaactgagagtgaagttcagcaggagcgcagacgcccccgcgtaccagcagggccagaaccagctctataacgagctgaatctaggacgaagagaggagtacgatgttttggacaagagacgtggccgggaccctgagatggggggaaagccgagaaggaagaaccctcaggaaggcctgtacaatgaactgcagaaagataagatggcggaggcctacagtgagattgggatgaaaggcgagcgccggaggggcaaggggcacgatggcctttaccagggtctcagtacagccaccaaggacacctacgacgcccttcacatgcaggccctgccccctcgctga

SEQ ID NO: 10105 - DNA, 2748 bp, Artificial Sequence
  Synthetic Polynucloetide
atggccttaccagtgaccgccttgctcctgccgctggccttgctgctccacgccgccaggccgcagatcgtgctgacacagagccctgccatcatgagtgcctctccaggcgaggaagtgaccctgacctgtagcgccaccagcagcgtgtcctacatccactggtttcagcagaggcccggcacaagccctaagctgtggatctacagcaccagcaatctggcctctggcgtgccagtgcggtttagcggatctggctacggcaccagctacagcctgaccatcagcagaatggaagccgaggatgccgccacctactactgccagcagagaagcagcagccccttcacatttggcagcggcaccaagctggaaatcaaaggcggaggcggaagtggaggcggaggatctggcggcggaggctctgaagtgaaggtggtggaatctggcggcgacctggttaagcctggcggatctctgaagctgagctgtgtggtgtccggcttcaccttcagcagatacggcatgagctgggtccgacagacccctggcaaaagactggaatgggtcgccacaatttccggcggaggcacctacatctactaccccgatagcgtgaagggcagattcaccatctccagagacaacgccaagaacaccctgtacctccagatgagcagcctgaagtctgaggacaccgccatgtaccactgcaccagggacaactacggcagaaactacgactacggcatggactactggggccagggcacaagcgtgacagtctcttctacgcgtgagcagaaactgatctcggaagaggatctggcgaagcccaccacgacgccagcgccgcgaccaccaacaccggcgcccaccatcgcgtcgcagcccctgtccctgcgcccagaggcgtgccggccagcggcggggggcgcagtgcacacgagggggctggacttcgcctgtgacatctacatctgggcgcccttggccgggacttgtggggtccttctcctgtcactggttatcaccctttactgcgggcgcgccagagtgaagttcagcaggagcgcagacgcccccgcgtaccagcagggccagaaccagctctataacgagctgaatctaggacgaagagaggagtacgatgttttggacaagagacgtggccgggaccctgagatggggggaaagccgagaaggaagaaccctcaggaaggcctgtacaatgaactgcagaaagataagatggcggaggcctacagtgagattgggatgaaaggcgagcgccggaggggcaaggggcacgatggcctttaccagggtctcagtacagccaccaaggacacctacgacgcccttcacatgcaggccctgccccctcgctctagaggatctggagcaacaaacttctcactactcaaacaagcaggtgacgtggaggagaatcccgggcctgggatccacatggccacttacgaggttctctgtgaggtggcgcggaaactgggcacggatgacagggaagtggtattgttcctcctaaacgtgttcatacctcaacccacactggcccaattaattggagctcttagagctttaaaggaggagggcaggttaacgtttcccctgttagcggaatgtctgtttcgtgcaggtcgcagagacctcttgcgcgacctgcttcacttagacccgcgttttttagagcgccacctagcgggcacaatgagttatttcagcccttatcagctcactgttctccacgtagacggggagctgtgtgcgagggatattaggtctttgatatttttaagcaaggacactatagggtctcgcagcacaccacagacattcttacactgggtgtactgtatggaaaacttagacctactgggtcccactgacgtggatgccctaatgtcaatgcttagatctttgtcaagagtagacctacagcgccaagtgcaaaccctaatgggccttcacctttccggcccatcacactcccaacactatcgccatacaccactcgagaccgatttctacgactacaaggacgacgatgacaagactagtggctccggcgagggcagaggaagtctactaacctgcggagatgtggaagaaaatcctggcccacatatgaccgagtacaagcccacggtgcgcctcgccacccgcgacgacgtccccagggccgtacgcaccctcgccgccgcgttcgccgactaccccgccacgcgccacaccgtcgatccggaccgccacatcgagcgggtcaccgagctgcaagaactcttcctcacgcgcgtcgggctcgacatcggcaaggtgtgggtcgcggacgacggcgccgcggtggcggtctggaccacgccggagagcgtcgaagcgggggcggtgttcgccgagatcggcccgcgcatggccgagttgagcggttcccggctggccgcgcagcaacagatggaaggcctcctggcgccgcaccggcccaaggagcccgcgtggttcctggccaccgtcggcgtctcgcccgaccaccagggcaagggtctgggcagcgccgtcgtgctccccggagtggaggcggccgagcgcgccggggtgcccgccttcctggagacctccgcgccccgcaacctccccttctacgagcggctcggcttcaccgtcaccgccgacgtcgaggtgcccgaaggaccgcgcacctggtgcatgacccgcaagcccggtgcctga

SEQ ID NO: 10106 - DNA, 2568 bp, Artificial Sequence
  Synthetic Polynucloetide
atggccttaccagtgaccgccttgctcctgccgctggccttgctgctccacgccgccaggccgcagatcgtgctgacacagagccctgccatcatgagtgcctctccaggcgaggaagtgaccctgacctgtagcgccaccagcagcgtgtcctacatccactggtttcagcagaggcccggcacaagccctaagctgtggatctacagcaccagcaatctggcctctggcgtgccagtgcggtttagcggatctggctacggcaccagctacagcctgaccatcagcagaatggaagccgaggatgccgccacctactactgccagcagagaagcagcagccccttcacatttggcagcggcaccaagctggaaatcaaactcgagatccagaaccctgatcctgccgtgtaccagctgcgggatagcaagagcagcgacaagagcgtgtgtctgttcaccgacttcgacagccagaccaacgtgtcccagagcaaggactccgacgtgtacatcaccgataagtgcgtgctggacatgcggagcatggacttcaagagcaactccgccgtggcctggtccaacaagtccgatttcgcctgcgccaacgccttcaacaacagcattatccccgaggacacattcttcccaagcagcgacgtgccctgcgacgtgaagctggtggaaaagagcttcgagacagacaccaacctgaacttccagaacctgagcgtgatcggcttcagaatcctgctgctgaaagtggccggctttaacctgctgatgaccctgcggctgtggtccagccgcgccaagagaagcggatctggcgtgaagcagaccctgaatttcgacctgctgaagctggctggcgacgtggaatccaacccaggccctactagtatggactggatttggcgcatccttttccttgtcggcgctgctaccggcgcgcattccttcgaagaagtgaaggtggtggaatctggcggcgacctggttaagcctggcggatctctgaagctgagctgtgtggtgtccggcttcaccttcagcagatacggcatgagctgggtccgacagacccctggcaaaagactggaatgggtcgccacaatttccggcggaggcacctacatctactaccccgatagcgtgaagggcagattcaccatctccagagacaacgccaagaacaccctgtacctccagatgagcagcctgaagtctgaggacaccgccatgtaccactgcaccagggacaactacggcagaaactacgactacggcatggactactggggccagggcacaagcgtgacagtctcttctacgcgtgaggacctgaagaacgtgttcccacctgaggtggccgtgttcgagcctagcaaggccgagatcgcccacacccagaaagccaccctcgtgtgcctggctaccggcttctaccccgaccatgtggaactgtcttggtgggtcaacggcaaagaggtgcacagcggcgtgtgtaccgacccccagccactgaaagaacagcccgccctgaacgacagccggtactgcctgagcagcagactgagagtgtccgccaccttctggcagaacccccggaaccacttcagatgccaggtgcagttctacggcctgagcgagaacgacgagtggacccaggacagagccaagcccgtgacccagatcgtgtctgccgaagcctggggcagagccgattgcggcatcaccagcgccagctaccaccagggcgtgctgagcgccaccatcctgtacgagatcctgctgggcaaggccaccctgtacgccgtgctggtgtctgccctggtgctgatggctatggtcaagcggaaggacagccggggaagggccaagcgatctggatctggagcaacaaacttctcactactcaaacaagcaggtgacgtggaggagaatcccgggccttctagaggccatatgaccgagtacaagcccacggtgcgcctcgccacccgcgacgacgtccccagggccgtacgcaccctcgccgccgcgttcgccgactaccccgccacgcgccacaccgtcgatccggaccgccacatcgagcgggtcaccgagctgcaagaactcttcctcacgcgcgtcgggctcgacatcggcaaggtgtgggtcgcggacgacggcgccgcggtggcggtctggaccacgccggagagcgtcgaagcgggggcggtgttcgccgagatcggcccgcgcatggccgagttgagcggttcccggctggccgcgcagcaacagatggaaggcctcctggcgccgcaccggcccaaggagcccgcgtggttcctggccaccgtcggcgtctcgcccgaccaccagggcaagggtctgggcagcgccgtcgtgctccccggagtggaggcggccgagcgcgccggggtgcccgccttcctggagacctccgcgccccgcaacctccccttctacgagcggctcggcttcaccgtcaccgccgacgtcgaggtgcccgaaggaccgcgcacctggtgcatgacccgcaagcccggtgcctga

SEQ ID NO: 10107 - DNA, 2565 bp, Artificial Sequence
  Synthetic Polynucloetide
atggccttaccagtgaccgccttgctcctgccgctggccttgctgctccacgccgccaggccgcagatcgtgctgacacagagccctgccatcatgagtgcctctccaggcgaggaagtgaccctgacctgtagcgccaccagcagcgtgtcctacatccactggtttcagcagaggcccggcacaagccctaagctgtggatctacagcaccagcaatctggcctctggcgtgccagtgcggtttagcggatctggctacggcaccagctacagcctgaccatcagcagaatggaagccgaggatgccgccacctactactgccagcagagaagcagcagccccttcacatttggcagcggcaccaagctggaaatcaaactcgaggacctgaagaacgtgttcccacctgaggtggccgtgttcgagcctagcaaggccgagatcgcccacacccagaaagccaccctcgtgtgcctggctaccggcttctaccccgaccatgtggaactgtcttggtgggtcaacggcaaagaggtgcacagcggcgtgtgtaccgacccccagccactgaaagaacagcccgccctgaacgacagccggtactgcctgagcagcagactgagagtgtccgccaccttctggcagaacccccggaaccacttcagatgccaggtgcagttctacggcctgagcgagaacgacgagtggacccaggacagagccaagcccgtgacccagatcgtgtctgccgaagcctggggcagagccgattgcggcatcaccagcgccagctaccaccagggcgtgctgagcgccaccatcctgtacgagatcctgctgggcaaggccaccctgtacgccgtgctggtgtctgccctggtgctgatggctatggtcaagcggaaggacagccggggaagggccaagcgatctggatctggagcaacaaacttctcactactcaaacaagcaggtgacgtggaggagaatcccgggcctactagtatggactggatttggcgcatccttttccttgtcggcgctgctaccggcgcgcattccttcgaagaagtgaaggtggtggaatctggcggcgacctggttaagcctggcggatctctgaagctgagctgtgtggtgtccggcttcaccttcagcagatacggcatgagctgggtccgacagacccctggcaaaagactggaatgggtcgccacaatttccggcggaggcacctacatctactaccccgatagcgtgaagggcagattcaccatctccagagacaacgccaagaacaccctgtacctccagatgagcagcctgaagtctgaggacaccgccatgtaccactgcaccagggacaactacggcagaaactacgactacggcatggactactggggccagggcacaagcgtgacagtctcttctacgcgtatccagaaccctgatcctgccgtgtaccagctgcgggatagcaagagcagcgacaagagcgtgtgtctgttcaccgacttcgacagccagaccaacgtgtcccagagcaaggactccgacgtgtacatcaccgataagtgcgtgctggacatgcggagcatggacttcaagagcaactccgccgtggcctggtccaacaagtccgatttcgcctgcgccaacgccttcaacaacagcattatccccgaggacacattcttcccaagcagcgacgtgccctgcgacgtgaagctggtggaaaagagcttcgagacagacaccaacctgaacttccagaacctgagcgtgatcggcttcagaatcctgctgctgaaagtggccggctttaacctgctgatgaccctgcggctgtggtccagccgcgccaagagaagcggatctggcgtgaagcagaccctgaatttcgacctgctgaagctggctggcgacgtggaatccaacccaggcccttctagaggccatatgaccgagtacaagcccacggtgcgcctcgccacccgcgacgacgtccccagggccgtacgcaccctcgccgccgcgttcgccgactaccccgccacgcgccacaccgtcgatccggaccgccacatcgagcgggtcaccgagctgcaagaactcttcctcacgcgcgtcgggctcgacatcggcaaggtgtgggtcgcggacgacggcgccgcggtggcggtctggaccacgccggagagcgtcgaagcgggggcggtgttcgccgagatcggcccgcgcatggccgagttgagcggttcccggctggccgcgcagcaacagatggaaggcctcctggcgccgcaccggcccaaggagcccgcgtggttcctggccaccgtcggcgtctcgcccgaccaccagggcaagggtctgggcagcgccgtcgtgctccccggagtggaggcggccgagcgcgccggggtgcccgccttcctggagacctccgcgccccgcaacctccccttctacgagcggctcggcttcaccgtcaccgccgacgtcgaggtgcccgaaggaccgcgcacctggtgcatgacccgcaagcccggtgcctga

SEQ ID NO: 10108 - DNA, 1863 bp, Artificial Sequence
  Synthetic Polynucloetide
atggccttaccagtgaccgccttgctcctgccgctggccttgctgctccacgccgccaggccgcagatcgtgctgacacagagccctgccatcatgagtgcctctccaggcgaggaagtgaccctgacctgtagcgccaccagcagcgtgtcctacatccactggtttcagcagaggcccggcacaagccctaagctgtggatctacagcaccagcaatctggcctctggcgtgccagtgcggtttagcggatctggctacggcaccagctacagcctgaccatcagcagaatggaagccgaggatgccgccacctactactgccagcagagaagcagcagccccttcacatttggcagcggcaccaagctggaaatcaaactcgaggacctgaagaacgtgttcccacctgaggtggccgtgttcgagcctagcgaggccgagatcagccacacccagaaagccaccctcgtgtgcctggctaccggcttctaccccgaccatgtggaactgtcttggtgggtcaacggcaaagaggtgcacagcggcgtgtgtaccgacccccagccactgaaagaacagcccgccctgaacgacagccggtactgcctgagcagcagactgagagtgtccgccaccttctggcagaacccccggaaccacttcagatgccaggtgcagttctacggcctgagcgagaacgacgagtggacccaggacagagccaagcccgtgacccagatcgtgtctgccgaagcctggggcagagccgattgcggctttaccagcgagagctaccagcagggcgtgctgagcgccaccatcctgtacgagatcctgctgggcaaggccaccctgtacgccgtgctggtgtctgccctggtgctgatggctatggtcaagcggaaggacagccggggaagggccaagcgatctggatctggagcaacaaacttctcactactcaaacaagcaggtgacgtggaggagaatcccgggcctactagtatggactggatttggcgcatccttttccttgtcggcgctgctaccggcgcgcattccttcgaagaagtgaaggtggtggaatctggcggcgacctggttaagcctggcggatctctgaagctgagctgtgtggtgtccggcttcaccttcagcagatacggcatgagctgggtccgacagacccctggcaaaagactggaatgggtcgccacaatttccggcggaggcacctacatctactaccccgatagcgtgaagggcagattcaccatctccagagacaacgccaagaacaccctgtacctccagatgagcagcctgaagtctgaggacaccgccatgtaccactgcaccagggacaactacggcagaaactacgactacggcatggactactggggccagggcacaagcgtgacagtctcttctacgcgtatccagaaccctgatcctgccgtgtaccagctgcgggatagcaagagcagcgacaagagcgtgtgtctgttcaccgacttcgacagccagaccaacgtgtcccagagcaaggactccgacgtgtacatcaccgataagtgcgtgctggacatgcggagcatggacttcaagagcaactccgccgtggcctggtccaacaagtccgatttcgcctgcgccaacgccttcaacaacagcattatccccgaggacacattcttcccaagccccgagagcagctgcgacgtgaagctggtggaaaagagcttcgagacagacaccaacctgaacttccagaacctgagcgtgatcggcttcagaatcctgctgctgaaagtggccggctttaacctgctgatgaccctgcggctgtggtccagc

SEQ ID NO: 10109 - DNA, 2538 bp, Artificial Sequence
  Synthetic Polynucloetide
atggccttaccagtgaccgccttgctcctgccgctggccttgctgctccacgccgccaggccgcagatcgtgctgacacagagccctgccatcatgagtgcctctccaggcgaggaagtgaccctgacctgtagcgccaccagcagcgtgtcctacatccactggtttcagcagaggcccggcacaagccctaagctgtggatctacagcaccagcaatctggcctctggcgtgccagtgcggtttagcggatctggctacggcaccagctacagcctgaccatcagcagaatggaagccgaggatgccgccacctactactgccagcagagaagcagcagccccttcacatttggcagcggcaccaagctggaaatcaaactcgaggacctgaagaacgtgttcccacctgaggtggccgtgttcgagcctagcgaggccgagatcagccacacccagaaagccaccctcgtgtgcctggctaccggcttctaccccgaccatgtggaactgtcttggtgggtcaacggcaaagaggtgcacagcggcgtgtgtaccgacccccagccactgaaagaacagcccgccctgaacgacagccggtactgcctgagcagcagactgagagtgtccgccaccttctggcagaacccccggaaccacttcagatgccaggtgcagttctacggcctgagcgagaacgacgagtggacccaggacagagccaagcccgtgacccagatcgtgtctgccgaagcctggggcagagccgattgcggctttaccagcgagagctaccagcagggcgtgctgagcgccaccatcctgtacgagatcctgctgggcaaggccaccctgtacgccgtgctggtgtctgccctggtgctgatggctatggtcaagcggaaggacagccggggaagggccaagcgatctggatctggagcaacaaacttctcactactcaaacaagcaggtgacgtggaggagaatcccgggcctactagtatggactggatttggcgcatccttttccttgtcggcgctgctaccggcgcgcattccttcgaagaagtgaaggtggtggaatctggcggcgacctggttaagcctggcggatctctgaagctgagctgtgtggtgtccggcttcaccttcagcagatacggcatgagctgggtccgacagacccctggcaaaagactggaatgggtcgccacaatttccggcggaggcacctacatctactaccccgatagcgtgaagggcagattcaccatctccagagacaacgccaagaacaccctgtacctccagatgagcagcctgaagtctgaggacaccgccatgtaccactgcaccagggacaactacggcagaaactacgactacggcatggactactggggccagggcacaagcgtgacagtctcttctacgcgtatccagaaccctgatcctgccgtgtaccagctgcgggatagcaagagcagcgacaagagcgtgtgtctgttcaccgacttcgacagccagaccaacgtgtcccagagcaaggactccgacgtgtacatcaccgataagtgcgtgctggacatgcggagcatggacttcaagagcaactccgccgtggcctggtccaacaagtccgatttcgcctgcgccaacgccttcaacaacagcattatccccgaggacacattcttcccaagccccgagagcagctgcgacgtgaagctggtggaaaagagcttcgagacagacaccaacctgaacttccagaacctgagcgtgatcggcttcagaatcctgctgctgaaagtggccggctttaacctgctgatgaccctgcggctgtggtccagccgcgccaagagaagcggatctggcgtgaagcagaccctgaatttcgacctgctgaagctggctggcgacgtggaatccaacccaggcccttctagaggcgggatccacaccatggctacctacgaggtgctgtgcgaggtggcaagaaagctgggcaccgacgacagagaagtggtgctgttcctgctgaacgtgttcatccctcagcctacactggcccagctgatcggtgcactgagagccctgaaagaggaaggccggctgacctttcctctgctggccgaatgcctgttcagagccggaagaagggatctgctgcgggacctgctgcatctggaccccagatttctggaaagacacctggccggcaccatgagctacttcagcccttaccagctgaccgtgctgcacgttgacggcgaactgtgcgccagagatattcggagcctgatcttcctgagcaaggacaccatcggcagccggtctacccctcagacatttctgcactgggtgtactgcatggaaaacctggacctgctcggccccacagatgtggatgccctgatgtccatgctgagaagcctgagcagagtggacctccagagacaggtgcagacactgatgggactgcacctgagcggacctagccacagccagcactacagacacacccct

SEQ ID NO: 10110 - DNA, 1875 bp, Artificial Sequence
  Synthetic Polynucloetide
atggccttaccagtgaccgccttgctcctgccgctggccttgctgctccacgccgccaggccgcagatcgtgctgacacagagccctgccatcatgagtgcctctccaggcgaggaagtgaccctgacctgtagcgccaccagcagcgtgtcctacatccactggtttcagcagaggcccggcacaagccctaagctgtggatctacagcaccagcaatctggcctctggcgtgccagtgcggtttagcggatctggctacggcaccagctacagcctgaccatcagcagaatggaagccgaggatgccgccacctactactgccagcagagaagcagcagccccttcacatttggcagcggcaccaagctggaaatcaaactcgagatccagaaccctgatcctgccgtgtaccagctgcgggatagcaagagcagcgacaagagcgtgtgtctgttcaccgacttcgacagccagaccaacgtgtcccagagcaaggactccgacgtgtacatcaccgataagtgcgtgctggacatgcggagcatggacttcaagagcaactccgccgtggcctggtccaacaagtccgatttcgcctgcgccaacgccttcaacaacagcattatccccgaggacacattcttcccaagccccgagagcagctgcgacgtgaagctggtggaaaagagcttcgagacagacaccaacctgaacttccagaacctgagcgtgatcggcttcagaatcctgctgctgaaagtggccggctttaacctgctgatgaccctgcggctgtggtccagccgcgccaagagaagcggatctggcgtgaagcagaccctgaatttcgacctgctgaagctggctggcgacgtggaatccaacccaggccctactagtatggactggatttggcgcatccttttccttgtcggcgctgctaccggcgcgcattccttcgaagaagtgaaggtggtggaatctggcggcgacctggttaagcctggcggatctctgaagctgagctgtgtggtgtccggcttcaccttcagcagatacggcatgagctgggtccgacagacccctggcaaaagactggaatgggtcgccacaatttccggcggaggcacctacatctactaccccgatagcgtgaagggcagattcaccatctccagagacaacgccaagaacaccctgtacctccagatgagcagcctgaagtctgaggacaccgccatgtaccactgcaccagggacaactacggcagaaactacgactacggcatggactactggggccagggcacaagcgtgacagtctcttctacgcgtgaggacctgaagaacgtgttcccacctgaggtggccgtgttcgagcctagcgaggccgagatcagccacacccagaaagccaccctcgtgtgcctggctaccggcttctaccccgaccatgtggaactgtcttggtgggtcaacggcaaagaggtgcacagcggcgtgtgtaccgacccccagccactgaaagaacagcccgccctgaacgacagccggtactgcctgagcagcagactgagagtgtccgccaccttctggcagaacccccggaaccacttcagatgccaggtgcagttctacggcctgagcgagaacgacgagtggacccaggacagagccaagcccgtgacccagatcgtgtctgccgaagcctggggcagagccgattgcggctttaccagcgagagctaccagcagggcgtgctgagcgccaccatcctgtacgagatcctgctgggcaaggccaccctgtacgccgtgctggtgtctgccctggtgctgatggctatggtcaagcggaaggacagccgggga

SEQ ID NO: 10111 - DNA, 2541 bp, Artificial Sequence
  Synthetic Polynucloetide
atggccttaccagtgaccgccttgctcctgccgctggccttgctgctccacgccgccaggccgcagatcgtgctgacacagagccctgccatcatgagtgcctctccaggcgaggaagtgaccctgacctgtagcgccaccagcagcgtgtcctacatccactggtttcagcagaggcccggcacaagccctaagctgtggatctacagcaccagcaatctggcctctggcgtgccagtgcggtttagcggatctggctacggcaccagctacagcctgaccatcagcagaatggaagccgaggatgccgccacctactactgccagcagagaagcagcagccccttcacatttggcagcggcaccaagctggaaatcaaactcgagatccagaaccctgatcctgccgtgtaccagctgcgggatagcaagagcagcgacaagagcgtgtgtctgttcaccgacttcgacagccagaccaacgtgtcccagagcaaggactccgacgtgtacatcaccgataagtgcgtgctggacatgcggagcatggacttcaagagcaactccgccgtggcctggtccaacaagtccgatttcgcctgcgccaacgccttcaacaacagcattatccccgaggacacattcttcccaagccccgagagcagctgcgacgtgaagctggtggaaaagagcttcgagacagacaccaacctgaacttccagaacctgagcgtgatcggcttcagaatcctgctgctgaaagtggccggctttaacctgctgatgaccctgcggctgtggtccagccgcgccaagagaagcggatctggcgtgaagcagaccctgaatttcgacctgctgaagctggctggcgacgtggaatccaacccaggccctactagtatggactggatttggcgcatccttttccttgtcggcgctgctaccggcgcgcattccttcgaagaagtgaaggtggtggaatctggcggcgacctggttaagcctggcggatctctgaagctgagctgtgtggtgtccggcttcaccttcagcagatacggcatgagctgggtccgacagacccctggcaaaagactggaatgggtcgccacaatttccggcggaggcacctacatctactaccccgatagcgtgaagggcagattcaccatctccagagacaacgccaagaacaccctgtacctccagatgagcagcctgaagtctgaggacaccgccatgtaccactgcaccagggacaactacggcagaaactacgactacggcatggactactggggccagggcacaagcgtgacagtctcttctacgcgtgaggacctgaagaacgtgttcccacctgaggtggccgtgttcgagcctagcgaggccgagatcagccacacccagaaagccaccctcgtgtgcctggctaccggcttctaccccgaccatgtggaactgtcttggtgggtcaacggcaaagaggtgcacagcggcgtgtgtaccgacccccagccactgaaagaacagcccgccctgaacgacagccggtactgcctgagcagcagactgagagtgtccgccaccttctggcagaacccccggaaccacttcagatgccaggtgcagttctacggcctgagcgagaacgacgagtggacccaggacagagccaagcccgtgacccagatcgtgtctgccgaagcctggggcagagccgattgcggctttaccagcgagagctaccagcagggcgtgctgagcgccaccatcctgtacgagatcctgctgggcaaggccaccctgtacgccgtgctggtgtctgccctggtgctgatggctatggtcaagcggaaggacagccggggaagggccaagcgatctggatctggagcaacaaacttctcactactcaaacaagcaggtgacgtggaggagaatcccgggccttctagaggcgggatccacaccatggctacctacgaggtgctgtgcgaggtggcaagaaagctgggcaccgacgacagagaagtggtgctgttcctgctgaacgtgttcatccctcagcctacactggcccagctgatcggtgcactgagagccctgaaagaggaaggccggctgacctttcctctgctggccgaatgcctgttcagagccggaagaagggatctgctgcgggacctgctgcatctggaccccagatttctggaaagacacctggccggcaccatgagctacttcagcccttaccagctgaccgtgctgcacgttgacggcgaactgtgcgccagagatattcggagcctgatcttcctgagcaaggacaccatcggcagccggtctacccctcagacatttctgcactgggtgtactgcatggaaaacctggacctgctcggccccacagatgtggatgccctgatgtccatgctgagaagcctgagcagagtggacctccagagacaggtgcagacactgatgggactgcacctgagcggacctagccacagccagcactacagacacacccct

SEQ ID NO: 10112 - DNA, 2700 bp, Artificial Sequence
  Synthetic Polynucloetide
atggccttaccagtgaccgccttgctcctgccgctggccttgctgctccacgccgccaggccgctcgaggggaaaccaattcccaaccctcttctgggactggattcaaccggcagcggcgaggacctgaagaacgtgttcccacctgaggtggccgtgttcgagcctagcaaggccgagatcgcccacacccagaaagccaccctcgtgtgcctggctaccggcttctaccccgaccatgtggaactgtcttggtgggtcaacggcaaagaggtgcacagcggcgtgtgtaccgacccccagccactgaaagaacagcccgccctgaacgacagccggtactgcctgagcagcagactgagagtgtccgccaccttctggcagaacccccggaaccacttcagatgccaggtgcagttctacggcctgagcgagaacgacgagtggacccaggacagagccaagcccgtgacccagatcgtgtctgccgaagcctggggcagagccgattgcggcatcaccagcgccagctaccaccagggcgtgctgagcgccaccatcctgtacgagatcctgctgggcaaggccaccctgtacgccgtgctggtgtctgccctggtgctgatggctatggtcaagcggaaggacagccggggaagggccaagcgatctggatctggagcaacaaacttctcactactcaaacaagcaggtgacgtggaggagaatcccgggcctactagcatggccttaccagtgaccgccttgctcctgccgctggccttgctgctccacgccgccaggccgcagatcgtgctgacacagagccctgccatcatgagtgcctctccaggcgaggaagtgaccctgacctgtagcgccaccagcagcgtgtcctacatccactggtttcagcagaggcccggcacaagccctaagctgtggatctacagcaccagcaatctggcctctggcgtgccagtgcggtttagcggatctggctacggcaccagctacagcctgaccatcagcagaatggaagccgaggatgccgccacctactactgccagcagagaagcagcagccccttcacatttggcagcggcaccaagctggaaatcaaaggcggaggcggaagtggaggcggaggatctggcggcggaggctctgaagtgaaggtggtggaatctggcggcgacctggttaagcctggcggatctctgaagctgagctgtgtggtgtccggcttcaccttcagcagatacggcatgagctgggtccgacagacccctggcaaaagactggaatgggtcgccacaatttccggcggaggcacctacatctactaccccgatagcgtgaagggcagattcaccatctccagagacaacgccaagaacaccctgtacctccagatgagcagcctgaagtctgaggacaccgccatgtaccactgcaccagggacaactacggcagaaactacgactacggcatggactactggggccagggcacaagcgtgacagtctcttctacgcgtgagcagaaactgatctcggaagaggatgggagcggcatccagaaccctgatcctgccgtgtaccagctgcgggatagcaagagcagcgacaagagcgtgtgtctgttcaccgacttcgacagccagaccaacgtgtcccagagcaaggactccgacgtgtacatcaccgataagtgcgtgctggacatgcggagcatggacttcaagagcaactccgccgtggcctggtccaacaagtccgatttcgcctgcgccaacgccttcaacaacagcattatccccgaggacacattcttcccaagcagcgacgtgccctgcgacgtgaagctggtggaaaagagcttcgagacagacaccaacctgaacttccagaacctgagcgtgatcggcttcagaatcctgctgctgaaagtggccggctttaacctgctgatgaccctgcggctgtggtccagccgcgccaagagaagcggatctggcgtgaagcagaccctgaatttcgacctgctgaagctggctggcgacgtggaatccaacccaggcccttctagaggccatatgaccgagtacaagcccacggtgcgcctcgccacccgcgacgacgtccccagggccgtacgcaccctcgccgccgcgttcgccgactaccccgccacgcgccacaccgtcgatccggaccgccacatcgagcgggtcaccgagctgcaagaactcttcctcacgcgcgtcgggctcgacatcggcaaggtgtgggtcgcggacgacggcgccgcggtggcggtctggaccacgccggagagcgtcgaagcgggggcggtgttcgccgagatcggcccgcgcatggccgagttgagcggttcccggctggccgcgcagcaacagatggaaggcctcctggcgccgcaccggcccaaggagcccgcgtggttcctggccaccgtcggcgtctcgcccgaccaccagggcaagggtctgggcagcgccgtcgtgctccccggagtggaggcggccgagcgcgccggggtgcccgccttcctggagacctccgcgccccgcaacctccccttctacgagcggctcggcttcaccgtcaccgccgacgtcgaggtgcccgaaggaccgcgcacctggtgcatgacccgcaagcccggtgcctga

SEQ ID NO: 10113 - DNA, 2703 bp, Artificial Sequence
  Synthetic Polynucloetide
atggccttaccagtgaccgccttgctcctgccgctggccttgctgctccacgccgccaggccgctcgagcagaaactgatctcggaagaggatctgggctccggcgatcgccctgatcctgccgtgtaccagctgcgggatagcaagagcagcgacaagagcgtgtgtctgttcaccgacttcgacagccagaccaacgtgtcccagagcaaggactccgacgtgtacatcaccgataagtgcgtgctggacatgcggagcatggacttcaagagcaactccgccgtggcctggtccaacaagtccgatttcgcctgcgccaacgccttcaacaacagcattatccccgaggacacattcttcccaagccccgagagcagctgcgacgtgaagctggtggaaaagagcttcgagacagacaccaacctgaacttccagaacctgagcgtgatcggcttcagaatcctgctgctgaaagtggccggctttaacctgctgatgaccctgcggctgtggtccagctctagtcgcgccaagagaagcggatctggcgtgaagcagaccctgaatttcgacctgctgaagctggctggcgacgtggaatccaacccaggccccactagcatggccttaccagtgaccgccttgctcctgccgctggccttgctgctccacgccgccaggccgcagatcgtgctgacacagagccctgccatcatgagtgcctctccaggcgaggaagtgaccctgacctgtagcgccaccagcagcgtgtcctacatccactggtttcagcagaggcccggcacaagccctaagctgtggatctacagcaccagcaatctggcctctggcgtgccagtgcggtttagcggatctggctacggcaccagctacagcctgaccatcagcagaatggaagccgaggatgccgccacctactactgccagcagagaagcagcagccccttcacatttggcagcggcaccaagctggaaatcaaaggcggaggcggaagtggaggcggaggatctggcggcggaggctctgaagtgaaggtggtggaatctggcggcgacctggttaagcctggcggatctctgaagctgagctgtgtggtgtccggcttcaccttcagcagatacggcatgagctgggtccgacagacccctggcaaaagactggaatgggtcgccacaatttccggcggaggcacctacatctactaccccgatagcgtgaagggcagattcaccatctccagagacaacgccaagaacaccctgtacctccagatgagcagcctgaagtctgaggacaccgccatgtaccactgcaccagggacaactacggcagaaactacgactacggcatggactactggggccagggcacaagcgtgacagtctcttctacgcgtgggaaaccaattcccaaccctcttctgggactggattcaaccggcagcggcgaggacctgaagaacgtgttcccacctgaggtggccgtgttcgagcctagcgaggccgagatcagccacacccagaaagccaccctcgtgtgcctggctaccggcttctaccccgaccatgtggaactgtcttggtgggtcaacggcaaagaggtgcacagcggcgtgtgtaccgacccccagccactgaaagaacagcccgccctgaacgacagccggtactgcctgagcagcagactgagagtgtccgccaccttctggcagaacccccggaaccacttcagatgccaggtgcagttctacggcctgagcgagaacgacgagtggacccaggacagagccaagcccgtgacccagatcgtgtctgccgaagcctggggcagagccgattgcggctttaccagcgagagctaccagcagggcgtgctgagcgccaccatcctgtacgagatcctgctgggcaaggccaccctgtacgccgtgctggtgtctgccctggtgctgatggctatggtcaagcggaaggacagccggggaagggccaagcgatctggatctggagcaacaaacttctcactactcaaacaagcaggtgacgtggaggagaatcccgggccttctagaggccatatgaccgagtacaagcccacggtgcgcctcgccacccgcgacgacgtccccagggccgtacgcaccctcgccgccgcgttcgccgactaccccgccacgcgccacaccgtcgatccggaccgccacatcgagcgggtcaccgagctgcaagaactcttcctcacgcgcgtcgggctcgacatcggcaaggtgtgggtcgcggacgacggcgccgcggtggcggtctggaccacgccggagagcgtcgaagcgggggcggtgttcgccgagatcggcccgcgcatggccgagttgagcggttcccggctggccgcgcagcaacagatggaaggcctcctggcgccgcaccggcccaaggagcccgcgtggttcctggccaccgtcggcgtctcgcccgaccaccagggcaagggtctgggcagcgccgtcgtgctccccggagtggaggcggccgagcgcgccggggtgcccgccttcctggagacctccgcgccccgcaacctccccttctacgagcggctcggcttcaccgtcaccgccgacgtcgaggtgcccgaaggaccgcgcacctggtgcatgacccgcaagcccggtgcctga

SEQ ID NO: 10114 - DNA, 2565 bp, Artificial Sequence
  Synthetic Polynucloetide
atggccttaccagtgaccgccttgctcctgccgctggccttgctgctccacgccgccaggccgcagatcgtgctgacacagagccctgccatcatgagtgcctctccaggcgaggaagtgaccctgacctgtagcgccaccagcagcgtgtcctacatccactggtttcagcagaggcccggcacaagccctaagctgtggatctacagcaccagcaatctggcctctggcgtgccagtgcggtttagcggatctggctacggcaccagctacagcctgaccatcagcagaatggaagccgaggatgccgccacctactactgccagcagagaagcagcagccccttcacatttggcagcggcaccaagctggaaatcaaactcgaggacctgaagaacgtgttcccacctgaggtggccgtgttcgagcctagcgaggccgagatcagccacacccagaaagccaccctcgtgtgcctggctaccggcttctaccccgaccatgtggaactgtcttggtgggtcaacggcaaagaggtgcacagcggcgtgtctaccgacccccagccactgaaagaacagcccgccctgaacgacagccggtactgcctgagcagcagactgagagtgtccgccaccttctggcagaacccccggaaccacttcagatgccaggtgcagttctacggcctgagcgagaacgacgagtggacccaggacagagccaagcccgtgacccagatcgtgtctgccgaagcctggggcagagccgattgcggctttaccagcgagagctaccagcagggcgtgctgagcgccaccatcctgtacgagatcctgctgggcaaggccaccctgtacgccgtgctggtgtctgccctggtgctgatggctatggtcaagcggaaggacagccggggaagggccaagcgatctggatctggagcaacaaacttctcactactcaaacaagcaggtgacgtggaggagaatcccgggcctactagtatggactggatttggcgcatccttttccttgtcggcgctgctaccggcgcgcattccttcgaagaagtgaaggtggtggaatctggcggcgacctggttaagcctggcggatctctgaagctgagctgtgtggtgtccggcttcaccttcagcagatacggcatgagctgggtccgacagacccctggcaaaagactggaatgggtcgccacaatttccggcggaggcacctacatctactaccccgatagcgtgaagggcagattcaccatctccagagacaacgccaagaacaccctgtacctccagatgagcagcctgaagtctgaggacaccgccatgtaccactgcaccagggacaactacggcagaaactacgactacggcatggactactggggccagggcacaagcgtgacagtctcttctacgcgtatccagaaccctgatcctgccgtgtaccagctgcgggatagcaagagcagcgacaagagcgtgtgtctgttcaccgacttcgacagccagaccaacgtgtcccagagcaaggactccgacgtgtacatcaccgataagaccgtgctggacatgcggagcatggacttcaagagcaactccgccgtggcctggtccaacaagtccgatttcgcctgcgccaacgccttcaacaacagcattatccccgaggacacattcttcccaagccccgagagcagctgcgacgtgaagctggtggaaaagagcttcgagacagacaccaacctgaacttccagaacctgagcgtgatcggcttcagaatcctgctgctgaaagtggccggctttaacctgctgatgaccctgcggctgtggtccagccgcgccaagagaagcggatctggcgtgaagcagaccctgaatttcgacctgctgaagctggctggcgacgtggaatccaacccaggcccttctagaggccatatgaccgagtacaagcccacggtgcgcctcgccacccgcgacgacgtccccagggccgtacgcaccctcgccgccgcgttcgccgactaccccgccacgcgccacaccgtcgatccggaccgccacatcgagcgggtcaccgagctgcaagaactcttcctcacgcgcgtcgggctcgacatcggcaaggtgtgggtcgcggacgacggcgccgcggtggcggtctggaccacgccggagagcgtcgaagcgggggcggtgttcgccgagatcggcccgcgcatggccgagttgagcggttcccggctggccgcgcagcaacagatggaaggcctcctggcgccgcaccggcccaaggagcccgcgtggttcctggccaccgtcggcgtctcgcccgaccaccagggcaagggtctgggcagcgccgtcgtgctccccggagtggaggcggccgagcgcgccggggtgcccgccttcctggagacctccgcgccccgcaacctccccttctacgagcggctcggcttcaccgtcaccgccgacgtcgaggtgcccgaaggaccgcgcacctggtgcatgacccgcaagcccggtgcctga

SEQ ID NO: 10115 - DNA, 2811 bp, Artificial Sequence
  Synthetic Polynucloetide
atggccttaccagtgaccgccttgctcctgccgctggccttgctgctccacgccgccaggccgcagatcgtgctgacacagagccctgccatcatgagtgcctctccaggcgaggaagtgaccctgacctgtagcgccaccagcagcgtgtcctacatccactggtttcagcagaggcccggcacaagccctaagctgtggatctacagcaccagcaatctggcctctggcgtgccagtgcggtttagcggatctggctacggcaccagctacagcctgaccatcagcagaatggaagccgaggatgccgccacctactactgccagcagagaagcagcagccccttcacatttggcagcggcaccaagctggaaatcaaactcgaggacctgaagaacgtgttcccacctgaggtggccgtgttcgagcctagcgaggccgagatcagccacacccagaaagccaccctcgtgtgcctggctaccggcttctaccccgaccatgtggaactgtcttggtgggtcaacggcaaagaggtgcacagcggcgtgtctaccgacccccagccactgaaagaacagcccgccctgaacgacagccggtactgcctgagcagcagactgagagtgtccgccaccttctggcagaacccccggaaccacttcagatgccaggtgcagttctacggcctgagcgagaacgacgagtggacccaggacagagccaagcccgtgacccagatcgtgtctgccgaagcctggggcagagccgattgcggctttaccagcgagagctaccagcagggcgtgctgagcgccaccatcctgtacgagatcctgctgggcaaggccaccctgtacgccgtgctggtgtctgccctggtgctgatggctatggtcaagcggaaggacagccggggaagggccaagcgatctggatctggagcaacaaacttctcactactcaaacaagcaggtgacgtggaggagaatcccgggcctactagtatggactggatttggcgcatccttttccttgtcggcgctgctaccggcgcgcattccttcgaagaagtgaaggtggtggaatctggcggcgacctggttaagcctggcggatctctgaagctgagctgtgtggtgtccggcttcaccttcagcagatacggcatgagctgggtccgacagacccctggcaaaagactggaatgggtcgccacaatttccggcggaggcacctacatctactaccccgatagcgtgaagggcagattcaccatctccagagacaacgccaagaacaccctgtacctccagatgagcagcctgaagtctgaggacaccgccatgtaccactgcaccagggacaactacggcagaaactacgactacggcatggactactggggccagggcacaagcgtgacagtctcttctacgcgtgagcagaaactgatctcggaagaggatgggagcggcaccccattcccttctctggcccctcccatcatgctgctggtggacggcaagcagcagatggtggtcgtgtgcctggtgctggatgtggccccacctggactggacagccccatctggtttagcgccggcaatggctctgccctggacgcctttacctacggcccaagccctgccaccgatggcacctggacaaatctggcccacctgagcctgcccagcgaggaactggcttcttgggagcctctcgtgtgccacacaggacctggcgctgagggacacagcagatccacccagcctatgcacctgtctggcgaggccagcaccgccagaacctgtcctcaggaacctctgagaggcacccctggcggagcactgtggctgggagtgctgagactgctgctgttcaagctgctgctgtttgacctgctgctgacctgctcctgtctgtgcgatcctgccggccctctgccttctcctgccaccaccacaagactgagagccctgggcagccacagactgcaccctgccacagagacaggcggcagagaggccacaagcagccctagaccccagcccagagacagaagatggggcgataccccccctggcagaaagcctggatctccagtccgcgccaagagaagcggatctggcgtgaagcagaccctgaatttcgacctgctgaagctggctggcgacgtggaatccaacccaggcccttctagaggccatatgaccgagtacaagcccacggtgcgcctcgccacccgcgacgacgtccccagggccgtacgcaccctcgccgccgcgttcgccgactaccccgccacgcgccacaccgtcgatccggaccgccacatcgagcgggtcaccgagctgcaagaactcttcctcacgcgcgtcgggctcgacatcggcaaggtgtgggtcgcggacgacggcgccgcggtggcggtctggaccacgccggagagcgtcgaagcgggggcggtgttcgccgagatcggcccgcgcatggccgagttgagcggttcccggctggccgcgcagcaacagatggaaggcctcctggcgccgcaccggcccaaggagcccgcgtggttcctggccaccgtcggcgtctcgcccgaccaccagggcaagggtctgggcagcgccgtcgtgctccccggagtggaggcggccgagcgcgccggggtgcccgccttcctggagacctccgcgccccgcaacctccccttctacgagcggctcggcttcaccgtcaccgccgacgtcgaggtgcccgaaggaccgcgcacctggtgcatgacccgcaagcccggtgcctga

SEQ ID NO: 10116 - DNA, 2865 bp, Artificial Sequence
  Synthetic Polynucloetide
atggccttaccagtgaccgccttgctcctgccgctggccttgctgctccacgccgccaggccgctcgaggacctgaagaacgtgttcccacctgaggtggccgtgttcgagcctagcgaggccgagatcagccacacccagaaagccaccctcgtgtgcctggctaccggcttctaccccgaccatgtggaactgtcttggtgggtcaacggcaaagaggtgcacagcggcgtgtctaccgacccccagccactgaaagaacagcccgccctgaacgacagccggtactgcctgagcagcagactgagagtgtccgccaccttctggcagaacccccggaaccacttcagatgccaggtgcagttctacggcctgagcgagaacgacgagtggacccaggacagagccaagcccgtgacccagatcgtgtctgccgaagcctggggcagagccgattgcggctttaccagcgagagctaccagcagggcgtgctgagcgccaccatcctgtacgagatcctgctgggcaaggccaccctgtacgccgtgctggtgtctgccctggtgctgatggctatggtcaagcggaaggacagccggggaagggccaagcgatctggatctggagcaacaaacttctcactactcaaacaagcaggtgacgtggaggagaatcccgggcctactagcatggccttaccagtgaccgccttgctcctgccgctggccttgctgctccacgccgccaggccgcagatcgtgctgacacagagccctgccatcatgagtgcctctccaggcgaggaagtgaccctgacctgtagcgccaccagcagcgtgtcctacatccactggtttcagcagaggcccggcacaagccctaagctgtggatctacagcaccagcaatctggcctctggcgtgccagtgcggtttagcggatctggctacggcaccagctacagcctgaccatcagcagaatggaagccgaggatgccgccacctactactgccagcagagaagcagcagccccttcacatttggcagcggcaccaagctggaaatcaaaggcggaggcggaagtggaggcggaggatctggcggcggaggctctgaagtgaaggtggtggaatctggcggcgacctggttaagcctggcggatctctgaagctgagctgtgtggtgtccggcttcaccttcagcagatacggcatgagctgggtccgacagacccctggcaaaagactggaatgggtcgccacaatttccggcggaggcacctacatctactaccccgatagcgtgaagggcagattcaccatctccagagacaacgccaagaacaccctgtacctccagatgagcagcctgaagtctgaggacaccgccatgtaccactgcaccagggacaactacggcagaaactacgactacggcatggactactggggccagggcacaagcgtgacagtctcttctacgcgtgagcagaaactgatctcggaagaggatctggggagcggcaccccattcccttctctggcccctcccatcatgctgctggtggacggcaagcagcagatggtggtcgtgtgcctggtgctggatgtggccccacctggactggacagccccatctggtttagcgccggcaatggctctgccctggacgcctttacctacggcccaagccctgccaccgatggcacctggacaaatctggcccacctgagcctgcccagcgaggaactggcttcttgggagcctctcgtgtgccacacaggacctggcgctgagggacacagcagatccacccagcctatgcacctgtctggcgaggccagcaccgccagaacctgtcctcaggaacctctgagaggcacccctggcggagcactgtggctgggagtgctgagactgctgctgttcaagctgctgctgtttgacctgctgctgacctgctcctgtctgtgcgatcctgccggccctctgccttctcctgccaccaccacaagactgagagccctgggcagccacagactgcaccctgccacagagacaggcggcagagaggccacaagcagccctagaccccagcccagagacagaagatggggcgataccccccctggcagaaagcctggatctccagtccgcgccaagagaagcggatctggcgtgaagcagaccctgaatttcgacctgctgaagctggctggcgacgtggaatccaacccaggcccttctagatctagaggccatatgaccgagtacaagcccacggtgcgcctcgccacccgcgacgacgtccccagggccgtacgcaccctcgccgccgcgttcgccgactaccccgccacgcgccacaccgtcgatccggaccgccacatcgagcgggtcaccgagctgcaagaactcttcctcacgcgcgtcgggctcgacatcggcaaggtgtgggtcgcggacgacggcgccgcggtggcggtctggaccacgccggagagcgtcgaagcgggggcggtgttcgccgagatcggcccgcgcatggccgagttgagcggttcccggctggccgcgcagcaacagatggaaggcctcctggcgccgcaccggcccaaggagcccgcgtggttcctggccaccgtcggcgtctcgcccgaccaccagggcaagggtctgggcagcgccgtcgtgctccccggagtggaggcggccgagcgcgccggggtgcccgccttcctggagacctccgcgccccgcaacctccccttctacgagcggctcggcttcaccgtcaccgccgacgtcgaggtgcccgaaggaccgcgcacctggtgcatgacccgcaagcccggtgcctga

SEQ ID NO: 10117 - DNA, 2676 bp, Artificial Sequence
  Synthetic Polynucloetide
atggccttaccagtgaccgccttgctcctgccgctggccttgctgctccacgccgccaggccgcagatcgtgctgacacagagccctgccatcatgagtgcctctccaggcgaggaagtgaccctgacctgtagcgccaccagcagcgtgtcctacatccactggtttcagcagaggcccggcacaagccctaagctgtggatctacagcaccagcaatctggcctctggcgtgccagtgcggtttagcggatctggctacggcaccagctacagcctgaccatcagcagaatggaagccgaggatgccgccacctactactgccagcagagaagcagcagccccttcacatttggcagcggcaccaagctggaaatcaaactcgaggggaaaccaattcccaaccctcttctgggactggattcaaccggcagcggcgacaagcagctggacgccgacgtgtcccccaagcctaccatcttcctgccctctatcgccgagacaaagctccagaaggccggcacctacctgtgcctgctggaaaagttcttcccagatgtgattaagatccactggcaggaaaagaagtccaacaccatcctgggcagccaggaaggcaacaccatgaagaccaacgacacctacatgaagttcagctggctgaccgtgcccgagaagtccctggacaaagaacacagatgcatcgtgcggcacgaaaacaacaagaacggcgtggaccaggaaatcatcttcccacccatcaagaccgatgtgattacaatggaccccaaggacaactgctccaaggacgccaacgataccctgctgctccagctgaccaacaccagcgcctactacatgtacttgttgctgctgctgaagtccgtggtgtacttcgccatcatcacatgctgcctgctgcggagaaccgccttctgctgcaacggcgagaagtctagggccaagcgatctggatctggagcaacaaacttctcactactcaaacaagcaggtgacgtggaggagaatcccgggcctactagtatggactggatttggcgcatccttttccttgtcggcgctgctaccggcgcgcattccttcgaagaagtgaaggtggtggaatctggcggcgacctggttaagcctggcggatctctgaagctgagctgtgtggtgtccggcttcaccttcagcagatacggcatgagctgggtccgacagacccctggcaaaagactggaatgggtcgccacaatttccggcggaggcacctacatctactaccccgatagcgtgaagggcagattcaccatctccagagacaacgccaagaacaccctgtacctccagatgagcagcctgaagtctgaggacaccgccatgtaccactgcaccagggacaactacggcagaaactacgactacggcatggactactggggccagggcacaagcgtgacagtctcttctacgcgtgagcagaaactgatctcggaagaggatgggagcggcagccagcctcacaccaagcccagcgtgttcgtgatgaagaacggcaccaacgtggcctgcctcgtgaaagagttctaccccaaggacatcaggatcaacctggtgtccagcaagaagatcaccgagttcgaccccgccatcgtgatctcccccagcggcaagtacaacgccgtgaagctggggaagtacgaggacagcaacagcgtgacctgctccgtgcagcacgacaacaagaccgtgcacagcaccgactttgaagtgaaaaccgactccaccgaccacgtgaagcccaaagagacagagaacaccaagcagcccagcaagagctgccacaagcccaaggccatcgtgcacaccgagaaagtgaacatgatgagcctgaccgtgctgggcctgcggatgctgttcgccaaaaccgtggccgtgaacttcctgctgaccgccaagctgttcttcctccgcgccaagagaagcggatctggcgtgaagcagaccctgaatttcgacctgctgaagctggctggcgacgtggaatccaacccaggcccttctagaggccatatgaccgagtacaagcccacggtgcgcctcgccacccgcgacgacgtccccagggccgtacgcaccctcgccgccgcgttcgccgactaccccgccacgcgccacaccgtcgatccggaccgccacatcgagcgggtcaccgagctgcaagaactcttcctcacgcgcgtcgggctcgacatcggcaaggtgtgggtcgcggacgacggcgccgcggtggcggtctggaccacgccggagagcgtcgaagcgggggcggtgttcgccgagatcggcccgcgcatggccgagttgagcggttcccggctggccgcgcagcaacagatggaaggcctcctggcgccgcaccggcccaaggagcccgcgtggttcctggccaccgtcggcgtctcgcccgaccaccagggcaagggtctgggcagcgccgtcgtgctccccggagtggaggcggccgagcgcgccggggtgcccgccttcctggagacctccgcgccccgcaacctccccttctacgagcggctcggcttcaccgtcaccgccgacgtcgaggtgcccgaaggaccgcgcacctggtgcatgacccgcaagcccggtgcctga

SEQ ID NO: 10118 - DNA, 1887 bp, Artificial Sequence
  Synthetic Polynucloetide
atggccttaccagtgaccgccttgctcctgccgctggccttgctgctccacgccgccaggccgcagatcgtgctgacacagagccctgccatcatgagtgcctctccaggcgaggaagtgaccctgacctgtagcgccaccagcagcgtgtcctacatccactggtttcagcagaggcccggcacaagccctaagctgtggatctacagcaccagcaatctggcctctggcgtgccagtgcggtttagcggatctggctacggcaccagctacagcctgaccatcagcagaatggaagccgaggatgccgccacctactactgccagcagagaagcagcagccccttcacatttggcagcggcaccaagctggaaatcaaactcgagagccagcctcacaccaagcccagcgtgttcgtgatgaagaacggcaccaacgtggcctgcctcgtgaaagagttctaccccaaggacatcaggatcaacctggtgtccagcaagaagatcaccgagttcgaccccgccatcgtgatctcccccagcggcaagtacaacgccgtgaagctggggaagtacgaggacagcaacagcgtgacctgctccgtgcagcacgacaacaagaccgtgcacagcaccgactttgaagtgaaaaccgactccaccgaccacgtgaagcccaaagagacagagaacaccaagcagcccagcaagagctgccacaagcccaaggccatcgtgcacaccgagaaagtgaacatgatgagcctgaccgtgctgggcctgcggatgctgttcgccaaaaccgtggccgtgaacttcctgctgaccgccaagctgttcttcctcagggccaagcgatctggatctggagcaacaaacttctcactactcaaacaagcaggtgacgtggaggagaatcccgggcctactagtatggactggatttggcgcatccttttccttgtcggcgctgctaccggcgcgcattccttcgaagaagtgaaggtggtggaatctggcggcgacctggttaagcctggcggatctctgaagctgagctgtgtggtgtccggcttcaccttcagcagatacggcatgagctgggtccgacagacccctggcaaaagactggaatgggtcgccacaatttccggcggaggcacctacatctactaccccgatagcgtgaagggcagattcaccatctccagagacaacgccaagaacaccctgtacctccagatgagcagcctgaagtctgaggacaccgccatgtaccactgcaccagggacaactacggcagaaactacgactacggcatggactactggggccagggcacaagcgtgacagtctcttctacgcgtgacaagcagctggacgccgacgtgtcccccaagcctaccatcttcctgccctctatcgccgagacaaagctccagaaggccggcacctacctgtgcctgctggaaaagttcttcccagatgtgattaagatccactggcaggaaaagaagtccaacaccatcctgggcagccaggaaggcaacaccatgaagaccaacgacacctacatgaagttcagctggctgaccgtgcccgagaagtccctggacaaagaacacagatgcatcgtgcggcacgaaaacaacaagaacggcgtggaccaggaaatcatcttcccacccatcaagaccgatgtgattacaatggaccccaaggacaactgctccaaggacgccaacgataccctgctgctccagctgaccaacaccagcgcctactacatgtacttgttgctgctgctgaagtccgtggtgtacttcgccatcatcacatgctgcctgctgcggagaaccgccttctgctgcaacggcgagaagtct

SEQ ID NO: 10119 - DNA, 2721 bp, Artificial Sequence
  Synthetic Polynucloetide
atggccttaccagtgaccgccttgctcctgccgctggccttgctgctccacgccgccaggccgctcgaggggaaaccaattcccaaccctcttctgggactggattcaaccggcagcggcgacaagcagctggacgccgacgtgtcccccaagcctaccatcttcctgccctctatcgccgagacaaagctccagaaggccggcacctacctgtgcctgctggaaaagttcttcccagatgtgattaagatccactggcaggaaaagaagtccaacaccatcctgggcagccaggaaggcaacaccatgaagaccaacgacacctacatgaagttcagctggctgaccgtgcccgagaagtccctggacaaagaacacagatgcatcgtgcggcacgaaaacaacaagaacggcgtggaccaggaaatcatcttcccacccatcaagaccgatgtgattacaatggaccccaaggacaactgctccaaggacgccaacgataccctgctgctccagctgaccaacaccagcgcctactacatgtacttgttgctgctgctgaagtccgtggtgtacttcgccatcatcacatgctgcctgctgcggagaaccgccttctgctgcaacggcgagaagtctagggccaagcgatctggatctggagcaacaaacttctcactactcaaacaagcaggtgacgtggaggagaatcccgggcctactagcatggccttaccagtgaccgccttgctcctgccgctggccttgctgctccacgccgccaggccgcagatcgtgctgacacagagccctgccatcatgagtgcctctccaggcgaggaagtgaccctgacctgtagcgccaccagcagcgtgtcctacatccactggtttcagcagaggcccggcacaagccctaagctgtggatctacagcaccagcaatctggcctctggcgtgccagtgcggtttagcggatctggctacggcaccagctacagcctgaccatcagcagaatggaagccgaggatgccgccacctactactgccagcagagaagcagcagccccttcacatttggcagcggcaccaagctggaaatcaaaggcggaggcggaagtggaggcggaggatctggcggcggaggctctgaagtgaaggtggtggaatctggcggcgacctggttaagcctggcggatctctgaagctgagctgtgtggtgtccggcttcaccttcagcagatacggcatgagctgggtccgacagacccctggcaaaagactggaatgggtcgccacaatttccggcggaggcacctacatctactaccccgatagcgtgaagggcagattcaccatctccagagacaacgccaagaacaccctgtacctccagatgagcagcctgaagtctgaggacaccgccatgtaccactgcaccagggacaactacggcagaaactacgactacggcatggactactggggccagggcacaagcgtgacagtctcttctacgcgtgagcagaaactgatctcggaagaggatgggagcggcagccagcctcacaccaagcccagcgtgttcgtgatgaagaacggcaccaacgtggcctgcctcgtgaaagagttctaccccaaggacatcaggatcaacctggtgtccagcaagaagatcaccgagttcgaccccgccatcgtgatctcccccagcggcaagtacaacgccgtgaagctggggaagtacgaggacagcaacagcgtgacctgctccgtgcagcacgacaacaagaccgtgcacagcaccgactttgaagtgaaaaccgactccaccgaccacgtgaagcccaaagagacagagaacaccaagcagcccagcaagagctgccacaagcccaaggccatcgtgcacaccgagaaagtgaacatgatgagcctgaccgtgctgggcctgcggatgctgttcgccaaaaccgtggccgtgaacttcctgctgaccgccaagctgttcttcctccgcgccaagagaagcggatctggcgtgaagcagaccctgaatttcgacctgctgaagctggctggcgacgtggaatccaacccaggcccttctagaggccatatgaccgagtacaagcccacggtgcgcctcgccacccgcgacgacgtccccagggccgtacgcaccctcgccgccgcgttcgccgactaccccgccacgcgccacaccgtcgatccggaccgccacatcgagcgggtcaccgagctgcaagaactcttcctcacgcgcgtcgggctcgacatcggcaaggtgtgggtcgcggacgacggcgccgcggtggcggtctggaccacgccggagagcgtcgaagcgggggcggtgttcgccgagatcggcccgcgcatggccgagttgagcggttcccggctggccgcgcagcaacagatggaaggcctcctggcgccgcaccggcccaaggagcccgcgtggttcctggccaccgtcggcgtctcgcccgaccaccagggcaagggtctgggcagcgccgtcgtgctccccggagtggaggcggccgagcgcgccggggtgcccgccttcctggagacctccgcgccccgcaacctccccttctacgagcggctcggcttcaccgtcaccgccgacgtcgaggtgcccgaaggaccgcgcacctggtgcatgacccgcaagcccggtgcctga

SEQ ID NO: 10120 - DNA, 3096 bp, Artificial Sequence
  Synthetic Polynucloetide
atggccttaccagtgaccgccttgctcctgccgctggccttgctgctccacgccgccaggccgcagatcgtgctgacacagagccctgccatcatgagtgcctctccaggcgaggaagtgaccctgacctgtagcgccaccagcagcgtgtcctacatccactggtttcagcagaggcccggcacaagccctaagctgtggatctacagcaccagcaatctggcctctggcgtgccagtgcggtttagcggatctggctacggcaccagctacagcctgaccatcagcagaatggaagccgaggatgccgccacctactactgccagcagagaagcagcagccccttcacatttggcagcggcaccaagctggaaatcaaaggacagcctaaggccaatcctaccgtgacactgttccctccaagcagcgaagaactccaggccaacaaggccacacttgtgtgcctgatctccgacttctaccctggggctgtgacagtggcttggaaggccgatggatctcctgtgaaagccggcgtggaaaccaccaagccatccaagcagagcaacaacaaatacgccgccagctcctacctgagcctgacacctgagcagtggaagtcccacagatcctacagctgccaagtgacccacgaaggcagcaccgtggaaaagacagtggcccctacagagtgcagcggatcccagagcttcggcctgctggaccccaagctgtgctacctgctggatggcatcctgttcatctacggcgtgatcctgaccgccctgttcctgagagtgaagttcagcagaagcgccgacgcccctgcctaccagcagggacagaaccaactgtacaacgagctgaacctgggcagacgggaagagtacgacgtgctggacaagcggagaggcagggaccctgagatgggcggaaagccccagcggagaaagaacccccaggaaggactgtataacgaactccagaaagacaagatggccgaagcctacagcgagatcggcatgaagggcgagcggagaagaggcaagggccacgatggcctgtaccagggcctgagcaccgccaccaaggacacctatgacgccctgcacatgcaggccctgcctccaagaagggccaagcgatctggatctggagcaacaaacttctcactactcaaacaagcaggtgacgtggaggagaatcccgggcctactagtatggactggatttggcgcatccttttccttgtcggcgctgctaccggcgcgcattccttcgaagaagtgaaggtggtggaatctggcggcgacctggttaagcctggcggatctctgaagctgagctgtgtggtgtccggcttcaccttcagcagatacggcatgagctgggtccgacagacccctggcaaaagactggaatgggtcgccacaatttccggcggaggcacctacatctactaccccgatagcgtgaagggcagattcaccatctccagagacaacgccaagaacaccctgtacctccagatgagcagcctgaagtctgaggacaccgccatgtaccactgcaccagggacaactacggcagaaactacgactacggcatggactactggggccagggcacaagcgtgacagtctcttctgcctctacaaagggaccctccgtgtttcctctggctcccagcagcaagtctacaagcggaggaacagccgctctgggctgcctggtcaaggattactttcccgagcctgtgaccgtgtcctggaatagcggagcactgacaagcggcgtgcacacctttccagccgtgctgcaaagcagcggcctgtactctctgagcagcgtggtcacagtgcctagctctagcctgggcacccagacctacatctgcaatgtgaaccacaagcctagcaacaccaaggtggacaagagagtggaacccaagagctgtggtacccagagttttgggttgttggaccctaaattgtgctatctgttggacggaatcctgttcatttacggagtgatcctgaccgcattgttcctgcgggttaagttttccagatccgcagacgcacccgcttaccaacaagggcagaaccaactctacaatgaacttaatttggggcggagggaagagtacgacgttctggacaaaaggaggggacgagatcccgagatgggcggaaagcctcagcgaaggaagaatccgcaagaggggctttataacgaactccagaaagataaaatggcagaagcctatagtgagattgggatgaagggagaaaggaggaggggtaaaggtcacgatgggttgtaccaaggattgagcacagccactaaagatacctatgatgcgctccacatgcaggccctgccgccaagacgcgccaagagaagcggatctggcgtgaagcagaccctgaatttcgacctgctgaagctggctggcgacgtggaatccaacccaggcccttctagaggccatatgaccgagtacaagcccacggtgcgcctcgccacccgcgacgacgtccccagggccgtacgcaccctcgccgccgcgttcgccgactaccccgccacgcgccacaccgtcgatccggaccgccacatcgagcgggtcaccgagctgcaagaactcttcctcacgcgcgtcgggctcgacatcggcaaggtgtgggtcgcggacgacggcgccgcggtggcggtctggaccacgccggagagcgtcgaagcgggggcggtgttcgccgagatcggcccgcgcatggccgagttgagcggttcccggctggccgcgcagcaacagatggaaggcctcctggcgccgcaccggcccaaggagcccgcgtggttcctggccaccgtcggcgtctcgcccgaccaccagggcaagggtctgggcagcgccgtcgtgctccccggagtggaggcggccgagcgcgccggggtgcccgccttcctggagacctccgcgccccgcaacctccccttctacgagcggctcggcttcaccgtcaccgccgacgtcgaggtgcccgaaggaccgcgcacctggtgcatgacccgcaagcccggtgcctga

SEQ ID NO: 10121 - DNA, 2451 bp, Artificial Sequence
  Synthetic Polynucloetide
atggccttaccagtgaccgccttgctcctgccgctggccttgctgctccacgccgccaggccgcagatcgtgctgacacagagccctgccatcatgagtgcctctccaggcgaggaagtgaccctgacctgtagcgccaccagcagcgtgtcctacatccactggtttcagcagaggcccggcacaagccctaagctgtggatctacagcaccagcaatctggcctctggcgtgccagtgcggtttagcggatctggctacggcaccagctacagcctgaccatcagcagaatggaagccgaggatgccgccacctactactgccagcagagaagcagcagccccttcacatttggcagcggcaccaagctggaaatcaaactcgaggacctgaagaacgtgttcccacctgaggtggccgtgttcgagcctagcgaggccgagatcagccacacccagaaagccaccctcgtgtgcctggctaccggcttctaccccgaccatgtggaactgtcttggtgggtcaacggcaaagaggtgcacagcggcgtgtctaccgacccccagccactgaaagaacagcccgccctgaacgacagccggtactgcctgagcagcagactgagagtgtccgccaccttctggcagaacccccggaaccacttcagatgccaggtgcagttctacggcctgagcgagaacgacgagtggacccaggacagagccaagcccgtgacccagatcgtgtctgccgaagcctggggcagagccgattgcggatcccagagcttcggcctgctggaccccaagctgtgctacctgctggatggcatcctgttcatctacggcgtgatcctgaccgccctgttcctgagagtgaagttcagcagaagcgccgacgcccctgcctaccagcagggacagaaccaactgtacaacgagctgaacctgggcagacgggaagagtacgacgtgctggacaagcggagaggcagggaccctgagatgggcggaaagccccagcggagaaagaacccccaggaaggactgtataacgaactccagaaagacaagatggccgaagcctacagcgagatcggcatgaagggcgagcggagaagaggcaagggccacgatggcctgtaccagggcctgagcaccgccaccaaggacacctatgacgccctgcacatgcaggccctgcctccaagaagggccaagcgatctggatctggagcaacaaacttctcactactcaaacaagcaggtgacgtggaggagaatcccgggcctactagtatggactggatttggcgcatccttttccttgtcggcgctgctaccggcgcgcattccttcgaagaagtgaaggtggtggaatctggcggcgacctggttaagcctggcggatctctgaagctgagctgtgtggtgtccggcttcaccttcagcagatacggcatgagctgggtccgacagacccctggcaaaagactggaatgggtcgccacaatttccggcggaggcacctacatctactaccccgatagcgtgaagggcagattcaccatctccagagacaacgccaagaacaccctgtacctccagatgagcagcctgaagtctgaggacaccgccatgtaccactgcaccagggacaactacggcagaaactacgactacggcatggactactggggccagggcacaagcgtgacagtctcttctacgcgtatccagaaccctgatcctgccgtgtaccagctgcgggatagcaagagcagcgacaagagcgtgtgtctgttcaccgacttcgacagccagaccaacgtgtcccagagcaaggactccgacgtgtacatcaccgataagaccgtgctggacatgcggagcatggacttcaagagcaactccgccgtggcctggtccaacaagtccgatttcgcctgcgccaacgccttcaacaacagcattatccccgaggacacattcttcccaagccccgagagcagctgcggtacccagagttttgggttgttggaccctaaattgtgctatctgttggacggaatcctgttcatttacggagtgatcctgaccgcattgttcctgcgggttaagttttccagatccgcagacgcacccgcttaccaacaagggcagaaccaactctacaatgaacttaatttggggcggagggaagagtacgacgttctggacaaaaggaggggacgagatcccgagatgggcggaaagcctcagcgaaggaagaatccgcaagaggggctttataacgaactccagaaagataaaatggcagaagcctatagtgagattgggatgaagggagaaaggaggaggggtaaaggtcacgatgggttgtaccaaggattgagcacagccactaaagatacctatgatgcgctccacatgcaggccctgccgccaaga

SEQ ID NO: 10122 - DNA, 2451 bp, Artificial Sequence
  Synthetic Polynucloetide
atggccttaccagtgaccgccttgctcctgccgctggccttgctgctccacgccgccaggccgcagatcgtgctgacacagagccctgccatcatgagtgcctctccaggcgaggaagtgaccctgacctgtagcgccaccagcagcgtgtcctacatccactggtttcagcagaggcccggcacaagccctaagctgtggatctacagcaccagcaatctggcctctggcgtgccagtgcggtttagcggatctggctacggcaccagctacagcctgaccatcagcagaatggaagccgaggatgccgccacctactactgccagcagagaagcagcagccccttcacatttggcagcggcaccaagctggaaatcaaactcgaggacctgaagaacgtgttcccacctgaggtggccgtgttcgagcctagcaaggccgagatcgcccacacccagaaagccaccctcgtgtgcctggctaccggcttctaccccgaccatgtggaactgtcttggtgggtcaacggcaaagaggtgcacagcggcgtgtgtaccgacccccagccactgaaagaacagcccgccctgaacgacagccggtactgcctgagcagcagactgagagtgtccgccaccttctggcagaacccccggaaccacttcagatgccaggtgcagttctacggcctgagcgagaacgacgagtggacccaggacagagccaagcccgtgacccagatcgtgtctgccgaagcctggggcagagccgattgcggatcccagagcttcggcctgctggaccccaagctgtgctacctgctggatggcatcctgttcatctacggcgtgatcctgaccgccctgttcctgagagtgaagttcagcagaagcgccgacgcccctgcctaccagcagggacagaaccaactgtacaacgagctgaacctgggcagacgggaagagtacgacgtgctggacaagcggagaggcagggaccctgagatgggcggaaagccccagcggagaaagaacccccaggaaggactgtataacgaactccagaaagacaagatggccgaagcctacagcgagatcggcatgaagggcgagcggagaagaggcaagggccacgatggcctgtaccagggcctgagcaccgccaccaaggacacctatgacgccctgcacatgcaggccctgcctccaagaagggccaagcgatctggatctggagcaacaaacttctcactactcaaacaagcaggtgacgtggaggagaatcccgggcctactagtatggactggatttggcgcatccttttccttgtcggcgctgctaccggcgcgcattccttcgaagaagtgaaggtggtggaatctggcggcgacctggttaagcctggcggatctctgaagctgagctgtgtggtgtccggcttcaccttcagcagatacggcatgagctgggtccgacagacccctggcaaaagactggaatgggtcgccacaatttccggcggaggcacctacatctactaccccgatagcgtgaagggcagattcaccatctccagagacaacgccaagaacaccctgtacctccagatgagcagcctgaagtctgaggacaccgccatgtaccactgcaccagggacaactacggcagaaactacgactacggcatggactactggggccagggcacaagcgtgacagtctcttctacgcgtatccagaaccctgatcctgccgtgtaccagctgcgggatagcaagagcagcgacaagagcgtgtgtctgttcaccgacttcgacagccagaccaacgtgtcccagagcaaggactccgacgtgtacatcaccgataagtgcgtgctggacatgcggagcatggacttcaagagcaactccgccgtggcctggtccaacaagtccgatttcgcctgcgccaacgccttcaacaacagcattatccccgaggacacattcttcccaagcagcgacgtgccctgcggtacccagagttttgggttgttggaccctaaattgtgctatctgttggacggaatcctgttcatttacggagtgatcctgaccgcattgttcctgcgggttaagttttccagatccgcagacgcacccgcttaccaacaagggcagaaccaactctacaatgaacttaatttggggcggagggaagagtacgacgttctggacaaaaggaggggacgagatcccgagatgggcggaaagcctcagcgaaggaagaatccgcaagaggggctttataacgaactccagaaagataaaatggcagaagcctatagtgagattgggatgaagggagaaaggaggaggggtaaaggtcacgatgggttgtaccaaggattgagcacagccactaaagatacctatgatgcgctccacatgcaggccctgccgccaaga

SEQ ID NO: 10123 - DNA, 2664 bp, Artificial Sequence
  Synthetic Polynucloetide
atggccttaccagtgaccgccttgctcctgccgctggccttgctgctccacgccgccaggccgcagatcgtgctgacacagagccctgccatcatgagtgcctctccaggcgaggaagtgaccctgacctgtagcgccaccagcagcgtgtcctacatccactggtttcagcagaggcccggcacaagccctaagctgtggatctacagcaccagcaatctggcctctggcgtgccagtgcggtttagcggatctggctacggcaccagctacagcctgaccatcagcagaatggaagccgaggatgccgccacctactactgccagcagagaagcagcagccccttcacatttggcagcggcaccaagctggaaatcaaactcgaggggaaaccaattcccaaccctcttctgggactggattcaaccggcagcggcgaggacctgaagaacgtgttcccacctgaggtggccgtgttcgagcctagcgaggccgagatcagccacacccagaaagccaccctcgtgtgcctggctaccggcttctaccccgaccatgtggaactgtcttggtgggtcaacggcaaagaggtgcacagcggcgtgtctaccgacccccagccactgaaagaacagcccgccctgaacgacagccggtactgcctgagcagcagactgagagtgtccgccaccttctggcagaacccccggaaccacttcagatgccaggtgcagttctacggcctgagcgagaacgacgagtggacccaggacagagccaagcccgtgacccagatcgtgtctgccgaagcctggggcagagccgattgcggatcccagagcttcggcctgctggaccccaagctgtgctacctgctggatggcatcctgttcatctacggcgtgatcctgaccgccctgttcctgagagtgaagttcagcagaagcgccgacgcccctgcctaccagcagggacagaaccaactgtacaacgagctgaacctgggcagacgggaagagtacgacgtgctggacaagcggagaggcagggaccctgagatgggcggaaagccccagcggagaaagaacccccaggaaggactgtataacgaactccagaaagacaagatggccgaagcctacagcgagatcggcatgaagggcgagcggagaagaggcaagggccacgatggcctgtaccagggcctgagcaccgccaccaaggacacctatgacgccctgcacatgcaggccctgcctccaagaagggccaagcgatctggatctggagcaacaaacttctcactactcaaacaagcaggtgacgtggaggagaatcccgggcctactagtatggactggatttggcgcatccttttccttgtcggcgctgctaccggcgcgcattccttcgaagaagtgaaggtggtggaatctggcggcgacctggttaagcctggcggatctctgaagctgagctgtgtggtgtccggcttcaccttcagcagatacggcatgagctgggtccgacagacccctggcaaaagactggaatgggtcgccacaatttccggcggaggcacctacatctactaccccgatagcgtgaagggcagattcaccatctccagagacaacgccaagaacaccctgtacctccagatgagcagcctgaagtctgaggacaccgccatgtaccactgcaccagggacaactacggcagaaactacgactacggcatggactactggggccagggcacaagcgtgacagtctcttctacgcgtgagcagaaactgatctcggaagaggatgggagcggcatccagaaccctgatcctgccgtgtaccagctgcgggatagcaagagcagcgacaagagcgtgtgtctgttcaccgacttcgacagccagaccaacgtgtcccagagcaaggactccgacgtgtacatcaccgataagaccgtgctggacatgcggagcatggacttcaagagcaactccgccgtggcctggtccaacaagtccgatttcgcctgcgccaacgccttcaacaacagcattatccccgaggacacattcttcccaagccccgagagcagctgcggtacccagagttttgggttgttggaccctaaattgtgctatctgttggacggaatcctgttcatttacggagtgatcctgaccgcattgttcctgaggagcaagcggtcacggctgctccacagcgattacatgaatatgacaccacgaagaccgggtcctactcgcaaacactaccaaccctacgcacctccccgcgactttgcagcgtaccgatctcgggttaagttttccagatccgcagacgcacccgcttaccaacaagggcagaaccaactctacaatgaacttaatttggggcggagggaagagtacgacgttctggacaaaaggaggggacgagatcccgagatgggcggaaagcctcagcgaaggaagaatccgcaagaggggctttataacgaactccagaaagataaaatggcagaagcctatagtgagattgggatgaagggagaaaggaggaggggtaaaggtcacgatgggttgtaccaaggattgagcacagccactaaagatacctatgatgcgctccacatgcaggccctgccgccaaga

SEQ ID NO: 10124 - DNA, 2787 bp, Artificial Sequence
  Synthetic Polynucloetide
atggccttaccagtgaccgccttgctcctgccgctggccttgctgctccacgccgccaggccgcagatcgtgctgacacagagccctgccatcatgagtgcctctccaggcgaggaagtgaccctgacctgtagcgccaccagcagcgtgtcctacatccactggtttcagcagaggcccggcacaagccctaagctgtggatctacagcaccagcaatctggcctctggcgtgccagtgcggtttagcggatctggctacggcaccagctacagcctgaccatcagcagaatggaagccgaggatgccgccacctactactgccagcagagaagcagcagccccttcacatttggcagcggcaccaagctggaaatcaaactcgaggggaaaccaattcccaaccctcttctgggactggattcaaccggcagcggcgaggacctgaagaacgtgttcccacctgaggtggccgtgttcgagcctagcgaggccgagatcagccacacccagaaagccaccctcgtgtgcctggctaccggcttctaccccgaccatgtggaactgtcttggtgggtcaacggcaaagaggtgcacagcggcgtgtctaccgacccccagccactgaaagaacagcccgccctgaacgacagccggtactgcctgagcagcagactgagagtgtccgccaccttctggcagaacccccggaaccacttcagatgccaggtgcagttctacggcctgagcgagaacgacgagtggacccaggacagagccaagcccgtgacccagatcgtgtctgccgaagcctggggcagagccgattgcggatcccagagcttcggcctgctggaccccaagctgtgctacctgctggatggcatcctgttcatctacggcgtgatcctgaccgccctgttcctgaggagtaagaggagcaggctcctgcacagtgactacatgaacatgactccacgccgccccggacccacccgcaagcattaccagccctatgccccaccacgcgacttcgcagcctatcgctccagagtgaagttcagcagaagcgccgacgcccctgcctaccagcagggacagaaccaactgtacaacgagctgaacctgggcagacgggaagagtacgacgtgctggacaagcggagaggcagggaccctgagatgggcggaaagccccagcggagaaagaacccccaggaaggactgtataacgaactccagaaagacaagatggccgaagcctacagcgagatcggcatgaagggcgagcggagaagaggcaagggccacgatggcctgtaccagggcctgagcaccgccaccaaggacacctatgacgccctgcacatgcaggccctgcctccaagaagggccaagcgatctggatctggagcaacaaacttctcactactcaaacaagcaggtgacgtggaggagaatcccgggcctactagtatggactggatttggcgcatccttttccttgtcggcgctgctaccggcgcgcattccttcgaagaagtgaaggtggtggaatctggcggcgacctggttaagcctggcggatctctgaagctgagctgtgtggtgtccggcttcaccttcagcagatacggcatgagctgggtccgacagacccctggcaaaagactggaatgggtcgccacaatttccggcggaggcacctacatctactaccccgatagcgtgaagggcagattcaccatctccagagacaacgccaagaacaccctgtacctccagatgagcagcctgaagtctgaggacaccgccatgtaccactgcaccagggacaactacggcagaaactacgactacggcatggactactggggccagggcacaagcgtgacagtctcttctacgcgtgagcagaaactgatctcggaagaggatgggagcggcatccagaaccctgatcctgccgtgtaccagctgcgggatagcaagagcagcgacaagagcgtgtgtctgttcaccgacttcgacagccagaccaacgtgtcccagagcaaggactccgacgtgtacatcaccgataagaccgtgctggacatgcggagcatggacttcaagagcaactccgccgtggcctggtccaacaagtccgatttcgcctgcgccaacgccttcaacaacagcattatccccgaggacacattcttcccaagccccgagagcagctgcggtacccagagttttgggttgttggaccctaaattgtgctatctgttggacggaatcctgttcatttacggagtgatcctgaccgcattgttcctgaggagcaagcggtcacggctgctccacagcgattacatgaatatgacaccacgaagaccgggtcctactcgcaaacactaccaaccctacgcacctccccgcgactttgcagcgtaccgatctcgggttaagttttccagatccgcagacgcacccgcttaccaacaagggcagaaccaactctacaatgaacttaatttggggcggagggaagagtacgacgttctggacaaaaggaggggacgagatcccgagatgggcggaaagcctcagcgaaggaagaatccgcaagaggggctttataacgaactccagaaagataaaatggcagaagcctatagtgagattgggatgaagggagaaaggaggaggggtaaaggtcacgatgggttgtaccaaggattgagcacagccactaaagatacctatgatgcgctccacatgcaggccctgccgccaaga

SEQ ID NO: 10125 - DNA, 2670 bp, Artificial Sequence
  Synthetic Polynucloetide
atggccttaccagtgaccgccttgctcctgccgctggccttgctgctccacgccgccaggccgcagatcgtgctgacacagagccctgccatcatgagtgcctctccaggcgaggaagtgaccctgacctgtagcgccaccagcagcgtgtcctacatccactggtttcagcagaggcccggcacaagccctaagctgtggatctacagcaccagcaatctggcctctggcgtgccagtgcggtttagcggatctggctacggcaccagctacagcctgaccatcagcagaatggaagccgaggatgccgccacctactactgccagcagagaagcagcagccccttcacatttggcagcggcaccaagctggaaatcaaactcgaggggaaaccaattcccaaccctcttctgggactggattcaaccggcagcggcgaggacctgaagaacgtgttcccacctgaggtggccgtgttcgagcctagcgaggccgagatcagccacacccagaaagccaccctcgtgtgcctggctaccggcttctaccccgaccatgtggaactgtcttggtgggtcaacggcaaagaggtgcacagcggcgtgtctaccgacccccagccactgaaagaacagcccgccctgaacgacagccggtactgcctgagcagcagactgagagtgtccgccaccttctggcagaacccccggaaccacttcagatgccaggtgcagttctacggcctgagcgagaacgacgagtggacccaggacagagccaagcccgtgacccagatcgtgtctgccgaagcctggggcagagccgattgcggatcccagagcttcggcctgctggaccccaagctgtgctacctgctggatggcatcctgttcatctacggcgtgatcctgaccgccctgttcctgagagtgaagttcagcagaagcgccgacgcccctgcctaccagcagggacagaaccaactgtacaacgagctgaacctgggcagacgggaagagtacgacgtgctggacaagcggagaggcagggaccctgagatgggcggaaagccccagcggagaaagaacccccaggaaggactgtataacgaactccagaaagacaagatggccgaagcctacagcgagatcggcatgaagggcgagcggagaagaggcaagggccacgatggcctgtaccagggcctgagcaccgccaccaaggacacctatgacgccctgcacatgcaggccctgcctccaagaagggccaagcgatctggatctggagcaacaaacttctcactactcaaacaagcaggtgacgtggaggagaatcccgggcctactagtatggactggatttggcgcatccttttccttgtcggcgctgctaccggcgcgcattccttcgaagaagtgaaggtggtggaatctggcggcgacctggttaagcctggcggatctctgaagctgagctgtgtggtgtccggcttcaccttcagcagatacggcatgagctgggtccgacagacccctggcaaaagactggaatgggtcgccacaatttccggcggaggcacctacatctactaccccgatagcgtgaagggcagattcaccatctccagagacaacgccaagaacaccctgtacctccagatgagcagcctgaagtctgaggacaccgccatgtaccactgcaccagggacaactacggcagaaactacgactacggcatggactactggggccagggcacaagcgtgacagtctcttctacgcgtgagcagaaactgatctcggaagaggatctggggagcggcatccagaaccctgatcctgccgtgtaccagctgcgggatagcaagagcagcgacaagagcgtgtgtctgttcaccgacttcgacagccagaccaacgtgtcccagagcaaggactccgacgtgtacatcaccgataagaccgtgctggacatgcggagcatggacttcaagagcaactccgccgtggcctggtccaacaagtccgatttcgcctgcgccaacgccttcaacaacagcattatccccgaggacacattcttcccaagccccgagagcagctgcggtacccagagttttgggttgttggaccctaaattgtgctatctgttggacggaatcctgttcatttacggagtgatcctgaccgcattgttcctgaagagaggccggaagaagctgctgtacatcttcaagcagcctttcatgcggcccgtgcagaccacccaggaagaggacggctgctcctgccggttccccgaggaagaagaaggcggctgcgagctgcgggttaagttttccagatccgcagacgcacccgcttaccaacaagggcagaaccaactctacaatgaacttaatttggggcggagggaagagtacgacgttctggacaaaaggaggggacgagatcccgagatgggcggaaagcctcagcgaaggaagaatccgcaagaggggctttataacgaactccagaaagataaaatggcagaagcctatagtgagattgggatgaagggagaaaggaggaggggtaaaggtcacgatgggttgtaccaaggattgagcacagccactaaagatacctatgatgcgctccacatgcaggccctgccgccaaga

SEQ ID NO: 10126 - DNA, 2796 bp, Artificial Sequence
  Synthetic Polynucloetide
atggccttaccagtgaccgccttgctcctgccgctggccttgctgctccacgccgccaggccgcagatcgtgctgacacagagccctgccatcatgagtgcctctccaggcgaggaagtgaccctgacctgtagcgccaccagcagcgtgtcctacatccactggtttcagcagaggcccggcacaagccctaagctgtggatctacagcaccagcaatctggcctctggcgtgccagtgcggtttagcggatctggctacggcaccagctacagcctgaccatcagcagaatggaagccgaggatgccgccacctactactgccagcagagaagcagcagccccttcacatttggcagcggcaccaagctggaaatcaaactcgaggggaaaccaattcccaaccctcttctgggactggattcaaccggcagcggcgaggacctgaagaacgtgttcccacctgaggtggccgtgttcgagcctagcgaggccgagatcagccacacccagaaagccaccctcgtgtgcctggctaccggcttctaccccgaccatgtggaactgtcttggtgggtcaacggcaaagaggtgcacagcggcgtgtctaccgacccccagccactgaaagaacagcccgccctgaacgacagccggtactgcctgagcagcagactgagagtgtccgccaccttctggcagaacccccggaaccacttcagatgccaggtgcagttctacggcctgagcgagaacgacgagtggacccaggacagagccaagcccgtgacccagatcgtgtctgccgaagcctggggcagagccgattgcggatcccagagcttcggcctgctggaccccaagctgtgctacctgctggatggcatcctgttcatctacggcgtgatcctgaccgccctgttcctgaaacggggcagaaagaaactcctgtatatattcaaacaaccatttatgagaccagtacaaactactcaagaggaagatggctgtagctgccgatttccagaagaagaagaaggaggatgtgaactgagagtgaagttcagcagaagcgccgacgcccctgcctaccagcagggacagaaccaactgtacaacgagctgaacctgggcagacgggaagagtacgacgtgctggacaagcggagaggcagggaccctgagatgggcggaaagccccagcggagaaagaacccccaggaaggactgtataacgaactccagaaagacaagatggccgaagcctacagcgagatcggcatgaagggcgagcggagaagaggcaagggccacgatggcctgtaccagggcctgagcaccgccaccaaggacacctatgacgccctgcacatgcaggccctgcctccaagaagggccaagcgatctggatctggagcaacaaacttctcactactcaaacaagcaggtgacgtggaggagaatcccgggcctactagtatggactggatttggcgcatccttttccttgtcggcgctgctaccggcgcgcattccttcgaagaagtgaaggtggtggaatctggcggcgacctggttaagcctggcggatctctgaagctgagctgtgtggtgtccggcttcaccttcagcagatacggcatgagctgggtccgacagacccctggcaaaagactggaatgggtcgccacaatttccggcggaggcacctacatctactaccccgatagcgtgaagggcagattcaccatctccagagacaacgccaagaacaccctgtacctccagatgagcagcctgaagtctgaggacaccgccatgtaccactgcaccagggacaactacggcagaaactacgactacggcatggactactggggccagggcacaagcgtgacagtctcttctacgcgtgagcagaaactgatctcggaagaggatctggggagcggcatccagaaccctgatcctgccgtgtaccagctgcgggatagcaagagcagcgacaagagcgtgtgtctgttcaccgacttcgacagccagaccaacgtgtcccagagcaaggactccgacgtgtacatcaccgataagaccgtgctggacatgcggagcatggacttcaagagcaactccgccgtggcctggtccaacaagtccgatttcgcctgcgccaacgccttcaacaacagcattatccccgaggacacattcttcccaagccccgagagcagctgcggtacccagagttttgggttgttggaccctaaattgtgctatctgttggacggaatcctgttcatttacggagtgatcctgaccgcattgttcctgaagagaggccggaagaagctgctgtacatcttcaagcagcctttcatgcggcccgtgcagaccacccaggaagaggacggctgctcctgccggttccccgaggaagaagaaggcggctgcgagctgcgggttaagttttccagatccgcagacgcacccgcttaccaacaagggcagaaccaactctacaatgaacttaatttggggcggagggaagagtacgacgttctggacaaaaggaggggacgagatcccgagatgggcggaaagcctcagcgaaggaagaatccgcaagaggggctttataacgaactccagaaagataaaatggcagaagcctatagtgagattgggatgaagggagaaaggaggaggggtaaaggtcacgatgggttgtaccaaggattgagcacagccactaaagatacctatgatgcgctccacatgcaggccctgccgccaaga

SEQ ID NO: 10127 - DNA, 2469 bp, Artificial Sequence
  Synthetic Polynucloetide
atggccttaccagtgaccgccttgctcctgccgctggccttgctgctccacgccgccaggccgcagatcgtgctgacacagagccctgccatcatgagtgcctctccaggcgaggaagtgaccctgacctgtagcgccaccagcagcgtgtcctacatccactggtttcagcagaggcccggcacaagccctaagctgtggatctacagcaccagcaatctggcctctggcgtgccagtgcggtttagcggatctggctacggcaccagctacagcctgaccatcagcagaatggaagccgaggatgccgccacctactactgccagcagagaagcagcagccccttcacatttggcagcggcaccaagctggaaatcaaactcgagcagagcttcggcctgctggaccccaagctgtgctacctgctggatggcatcctgttcatctacggcgtgatcctgaccgccctgttcctgagagtgaagttcagcagaagcgccgacgcccctgcctaccagcagggacagaaccaactgtacaacgagctgaacctgggcagacgggaagagtacgacgtgctggacaagcggagaggcagggaccctgagatgggcggaaagccccagcggagaaagaacccccaggaaggactgtataacgaactccagaaagacaagatggccgaagcctacagcgagatcggcatgaagggcgagcggagaagaggcaagggccacgatggcctgtaccagggcctgagcaccgccaccaaggacacctatgacgccctgcacatgcaggccctgcctccaagaagggccaagcgatctggatctggagcaacaaacttctcactactcaaacaagcaggtgacgtggaggagaatcccgggcctactagtatggactggatttggcgcatccttttccttgtcggcgctgctaccggcgcgcattccttcgaagaagtgaaggtggtggaatctggcggcgacctggttaagcctggcggatctctgaagctgagctgtgtggtgtccggcttcaccttcagcagatacggcatgagctgggtccgacagacccctggcaaaagactggaatgggtcgccacaatttccggcggaggcacctacatctactaccccgatagcgtgaagggcagattcaccatctccagagacaacgccaagaacaccctgtacctccagatgagcagcctgaagtctgaggacaccgccatgtaccactgcaccagggacaactacggcagaaactacgactacggcatggactactggggccagggcacaagcgtgacagtctcttctacgcgtcagagttttgggttgttggaccctaaattgtgctatctgttggacggaatcctgttcatttacggagtgatcctgaccgcattgttcctgcgggttaagttttccagatccgcagacgcacccgcttaccaacaagggcagaaccaactctacaatgaacttaatttggggcggagggaagagtacgacgttctggacaaaaggaggggacgagatcccgagatgggcggaaagcctcagcgaaggaagaatccgcaagaggggctttataacgaactccagaaagataaaatggcagaagcctatagtgagattgggatgaagggagaaaggaggaggggtaaaggtcacgatgggttgtaccaaggattgagcacagccactaaagatacctatgatgcgctccacatgcaggccctgccgccaagacgcgccaagagaagcggatctggcgtgaagcagaccctgaatttcgacctgctgaagctggctggcgacgtggaatccaacccaggcccttctagaggccatatgaccgagtacaagcccacggtgcgcctcgccacccgcgacgacgtccccagggccgtacgcaccctcgccgccgcgttcgccgactaccccgccacgcgccacaccgtcgatccggaccgccacatcgagcgggtcaccgagctgcaagaactcttcctcacgcgcgtcgggctcgacatcggcaaggtgtgggtcgcggacgacggcgccgcggtggcggtctggaccacgccggagagcgtcgaagcgggggcggtgttcgccgagatcggcccgcgcatggccgagttgagcggttcccggctggccgcgcagcaacagatggaaggcctcctggcgccgcaccggcccaaggagcccgcgtggttcctggccaccgtcggcgtctcgcccgaccaccagggcaagggtctgggcagcgccgtcgtgctccccggagtggaggcggccgagcgcgccggggtgcccgccttcctggagacctccgcgccccgcaacctccccttctacgagcggctcggcttcaccgtcaccgccgacgtcgaggtgcccgaaggaccgcgcacctggtgcatgacccgcaagcccggtgcctga

SEQ ID NO: 10128 - DNA, 1941 bp, Artificial Sequence
  Synthetic Polynucloetide
atggccttaccagtgaccgccttgctcctgccgctggccttgctgctccacgccgccaggccgcagatcgtgctgacacagagccctgccatcatgagtgcctctccaggcgaggaagtgaccctgacctgtagcgccaccagcagcgtgtcctacatccactggtttcagcagaggcccggcacaagccctaagctgtggatctacagcaccagcaatctggcctctggcgtgccagtgcggtttagcggatctggctacggcaccagctacagcctgaccatcagcagaatggaagccgaggatgccgccacctactactgccagcagagaagcagcagccccttcacatttggcagcggcaccaagctggaaatcaaactcgagggacagcctaaggccaatcctaccgtgacactgttccctccaagcagcgaagaactccaggccaacaaggccacacttgtgtgcctgatctccgacttctaccctggggctgtgacagtggcttggaaggccgatggatctcctgtgaaagccggcgtggaaaccaccaagccatccaagcagagcaacaacaaatacgccgccagctcctacctgagcctgacacctgagcagtggaagtcccacagatcctacagctgccaagtgacccacgaaggcagcaccgtggaaaagacagtggcccctacagagtgcagccccatcaagaccgatgtgattacaatggaccccaaggacaactgctccaaggacgccaacgataccctgctgctccagctgaccaacaccagcgcctactacatgtacttgttgctgctgctgaagtccgtggtgtacttcgccatcatcacatgctgcctgctgcggagaaccgccttctgctgcaacggcgagaagtctagggccaagcgatctggatctggagcaacaaacttctcactactcaaacaagcaggtgacgtggaggagaatcccgggcctactagtatggactggatttggcgcatccttttccttgtcggcgctgctaccggcgcgcattccttcgaagaagtgaaggtggtggaatctggcggcgacctggttaagcctggcggatctctgaagctgagctgtgtggtgtccggcttcaccttcagcagatacggcatgagctgggtccgacagacccctggcaaaagactggaatgggtcgccacaatttccggcggaggcacctacatctactaccccgatagcgtgaagggcagattcaccatctccagagacaacgccaagaacaccctgtacctccagatgagcagcctgaagtctgaggacaccgccatgtaccactgcaccagggacaactacggcagaaactacgactacggcatggactactggggccagggcacaagcgtgacagtctcttctacgcgtgcctctacaaagggaccctccgtgtttcctctggctcccagcagcaagtctacaagcggaggaacagccgctctgggctgcctggtcaaggattactttcccgagcctgtgaccgtgtcctggaatagcggagcactgacaagcggcgtgcacacctttccagccgtgctgcaaagcagcggcctgtactctctgagcagcgtggtcacagtgcctagctctagcctgggcacccagacctacatctgcaatgtgaaccacaagcctagcaacaccaaggtggacaagagagtggaacccaagagctgtgaagtgaaaaccgactccaccgaccacgtgaagcccaaagagacagagaacaccaagcagcccagcaagagctgccacaagcccaaggccatcgtgcacaccgagaaagtgaacatgatgagcctgaccgtgctgggcctgcggatgctgttcgccaaaaccgtggccgtgaacttcctgctgaccgccaagctgttcttcctc

SEQ ID NO: 10129 - DNA, 1875 bp, Artificial Sequence
  Synthetic Polynucloetide
atggccttaccagtgaccgccttgctcctgccgctggccttgctgctccacgccgccaggccgcagatcgtgctgacacagagccctgccatcatgagtgcctctccaggcgaggaagtgaccctgacctgtagcgccaccagcagcgtgtcctacatccactggtttcagcagaggcccggcacaagccctaagctgtggatctacagcaccagcaatctggcctctggcgtgccagtgcggtttagcggatctggctacggcaccagctacagcctgaccatcagcagaatggaagccgaggatgccgccacctactactgccagcagagaagcagcagccccttcacatttggcagcggcaccaagctggaaatcaaactcgagggacagcctaaggccaatcctaccgtgacactgttccctccaagcagcgaagaactccaggccaacaaggccacacttgtgtgcctgatctccgacttctaccctggggctgtgacagtggcttggaaggccgatggatctcctgtgaaagccggcgtggaaaccaccaagccatccaagcagagcaacaacaaatacgccgccagctcctacctgagcctgacacctgagcagtggaagtcccacagatcctacagctgccaagtgacccacgaaggcagcaccgtggaaaagacagtggcccctacagagtgcagcggcagagccgattgcggcatcaccagcgccagctaccaccagggcgtgctgagcgccaccatcctgtacgagatcctgctgggcaaggccaccctgtacgccgtgctggtgtctgccctggtgctgatggctatggtcaagcggaaggacagccggggaagggccaagcgatctggatctggagcaacaaacttctcactactcaaacaagcaggtgacgtggaggagaatcccgggcctactagtatggactggatttggcgcatccttttccttgtcggcgctgctaccggcgcgcattccttcgaagaagtgaaggtggtggaatctggcggcgacctggttaagcctggcggatctctgaagctgagctgtgtggtgtccggcttcaccttcagcagatacggcatgagctgggtccgacagacccctggcaaaagactggaatgggtcgccacaatttccggcggaggcacctacatctactaccccgatagcgtgaagggcagattcaccatctccagagacaacgccaagaacaccctgtacctccagatgagcagcctgaagtctgaggacaccgccatgtaccactgcaccagggacaactacggcagaaactacgactacggcatggactactggggccagggcacaagcgtgacagtctcttctacgcgtgcctctacaaagggaccctccgtgtttcctctggctcccagcagcaagtctacaagcggaggaacagccgctctgggctgcctggtcaaggattactttcccgagcctgtgaccgtgtcctggaatagcggagcactgacaagcggcgtgcacacctttccagccgtgctgcaaagcagcggcctgtactctctgagcagcgtggtcacagtgcctagctctagcctgggcacccagacctacatctgcaatgtgaaccacaagcctagcaacaccaaggtggacaagagagtggaacccaagagctgtatccccgaggacacattcttcccaagcagcgacgtgccctgcgacgtgaagctggtggaaaagagcttcgagacagacaccaacctgaacttccagaacctgagcgtgatcggcttcagaatcctgctgctgaaagtggccggctttaacctgctgatgaccctgcggctgtggtccagc

SEQ ID NO: 10130 - DNA, 1875 bp, Artificial Sequence
  Synthetic Polynucloetide
atggccttaccagtgaccgccttgctcctgccgctggccttgctgctccacgccgccaggccgcagatcgtgctgacacagagccctgccatcatgagtgcctctccaggcgaggaagtgaccctgacctgtagcgccaccagcagcgtgtcctacatccactggtttcagcagaggcccggcacaagccctaagctgtggatctacagcaccagcaatctggcctctggcgtgccagtgcggtttagcggatctggctacggcaccagctacagcctgaccatcagcagaatggaagccgaggatgccgccacctactactgccagcagagaagcagcagccccttcacatttggcagcggcaccaagctggaaatcaaactcgagggacagcctaaggccaatcctaccgtgacactgttccctccaagcagcgaagaactccaggccaacaaggccacacttgtgtgcctgatctccgacttctaccctggggctgtgacagtggcttggaaggccgatggatctcctgtgaaagccggcgtggaaaccaccaagccatccaagcagagcaacaacaaatacgccgccagctcctacctgagcctgacacctgagcagtggaagtcccacagatcctacagctgccaagtgacccacgaaggcagcaccgtggaaaagacagtggcccctacagagtgcagcggcagagccgattgcggctttaccagcgagagctaccagcagggcgtgctgagcgccaccatcctgtacgagatcctgctgggcaaggccaccctgtacgccgtgctggtgtctgccctggtgctgatggctatggtcaagcggaaggacagccggggaagggccaagcgatctggatctggagcaacaaacttctcactactcaaacaagcaggtgacgtggaggagaatcccgggcctactagtatggactggatttggcgcatccttttccttgtcggcgctgctaccggcgcgcattccttcgaagaagtgaaggtggtggaatctggcggcgacctggttaagcctggcggatctctgaagctgagctgtgtggtgtccggcttcaccttcagcagatacggcatgagctgggtccgacagacccctggcaaaagactggaatgggtcgccacaatttccggcggaggcacctacatctactaccccgatagcgtgaagggcagattcaccatctccagagacaacgccaagaacaccctgtacctccagatgagcagcctgaagtctgaggacaccgccatgtaccactgcaccagggacaactacggcagaaactacgactacggcatggactactggggccagggcacaagcgtgacagtctcttctacgcgtgcctctacaaagggaccctccgtgtttcctctggctcccagcagcaagtctacaagcggaggaacagccgctctgggctgcctggtcaaggattactttcccgagcctgtgaccgtgtcctggaatagcggagcactgacaagcggcgtgcacacctttccagccgtgctgcaaagcagcggcctgtactctctgagcagcgtggtcacagtgcctagctctagcctgggcacccagacctacatctgcaatgtgaaccacaagcctagcaacaccaaggtggacaagagagtggaacccaagagctgtatccccgaggacacattcttcccaagccccgagagcagctgcgacgtgaagctggtggaaaagagcttcgagacagacaccaacctgaacttccagaacctgagcgtgatcggcttcagaatcctgctgctgaaagtggccggctttaacctgctgatgaccctgcggctgtggtccagc

SEQ ID NO: 10131 - DNA, 1353 bp, Artificial Sequence
  Synthetic Polynucloetide
atggccttaccagtgaccgccttgctcctgccgctggccttgctgctccacgccgccaggccgcagatcgtgctgacacagagccctgccatcatgagtgcctctccaggcgaggaagtgaccctgacctgtagcgccaccagcagcgtgtcctacatccactggtttcagcagaggcccggcacaagccctaagctgtggatctacagcaccagcaatctggcctctggcgtgccagtgcggtttagcggatctggctacggcaccagctacagcctgaccatcagcagaatggaagccgaggatgccgccacctactactgccagcagagaagcagcagccccttcacatttggcagcggcaccaagctggaaatcaaaggcggaggcggaagtggaggcggaggatctggcggcggaggctctgaagtgaaggtggtggaatctggcggcgacctggttaagcctggcggatctctgaagctgagctgtgtggtgtccggcttcaccttcagcagatacggcatgagctgggtccgacagacccctggcaaaagactggaatgggtcgccacaatttccggcggaggcacctacatctactaccccgatagcgtgaagggcagattcaccatctccagagacaacgccaagaacaccctgtacctccagatgagcagcctgaagtctgaggacaccgccatgtaccactgcaccagggacaactacggcagaaactacgactacggcatggactactggggccagggcacaagcgtgacagtctcttctacgcgtgacggtaacgaggagatgggaggaatcactcaaaccccttacaaagtctcaatttcaggaacaactgttatccttacatgtccccagtatcctggcagcgagatcctttggcagcataacgacaagaatatagggggagatgaagacgataagaatatcggatctgacgaggatcacttgagcctgaaagagttctccgagcttgaacaaagcggatattatgtgtgctatccgcgcgggtcaaagccggaagacgctaacttttacctttatctccgagccagagtgtgcgaaaattgcatggaaatggacgttatgtccgttgctacaatagttatcgtagatatatgcatcacgggtggactgcttctgctggtttattattggtccaagaatagaaaggccaaagctaaacccgtgaccagaggcgctggcgcaggcggaaggcaaaggggacaaaacaaagaacggccaccaccagtgccaaatccagattatgagcctattcggaaaggacagagggacctgtactctggcctgaatcagagaagaatc

SEQ ID NO: 10132 - DNA, 1248 bp, Artificial Sequence
  Synthetic Polynucloetide
atggccttaccagtgaccgccttgctcctgccgctggccttgctgctccacgccgccaggccgcagatcgtgctgacacagagccctgccatcatgagtgcctctccaggcgaggaagtgaccctgacctgtagcgccaccagcagcgtgtcctacatccactggtttcagcagaggcccggcacaagccctaagctgtggatctacagcaccagcaatctggcctctggcgtgccagtgcggtttagcggatctggctacggcaccagctacagcctgaccatcagcagaatggaagccgaggatgccgccacctactactgccagcagagaagcagcagccccttcacatttggcagcggcaccaagctggaaatcaaaggcggaggcggaagtggaggcggaggatctggcggcggaggctctgaagtgaaggtggtggaatctggcggcgacctggttaagcctggcggatctctgaagctgagctgtgtggtgtccggcttcaccttcagcagatacggcatgagctgggtccgacagacccctggcaaaagactggaatgggtcgccacaatttccggcggaggcacctacatctactaccccgatagcgtgaagggcagattcaccatctccagagacaacgccaagaacaccctgtacctccagatgagcagcctgaagtctgaggacaccgccatgtaccactgcaccagggacaactacggcagaaactacgactacggcatggactactggggccagggcacaagcgtgacagtctcttctacgcgtttcaagatccccatcgaggaactggaagatcgggtgttcgtgaactgcaacacctctatcacctgggtggaaggcaccgtgggaacactgctgagcgacatcaccagactggacctcggcaagcggattctggaccctcggggcatctacagatgcaacggcaccgacatctacaaggacaaagaaagcaccgtgcaggtccactacagaatgtgccagtcctgcgtggaactggaccctgctacagtggccggcatcatcgtgaccgatgtgatcgctactctgctgctggctctgggagtgttctgcttcgccggacacgaaacaggcagactgtctggcgctgccgatacacaggccctgctgagaaacgaccaagtgtatcagcccctgcgcgacagagatgatgcccagtattctcacctcggcggcaactgggctagaaacaag

SEQ ID NO: 10133 - DNA, 1278 bp, Artificial Sequence
  Synthetic Polynucloetide
atggccttaccagtgaccgccttgctcctgccgctggccttgctgctccacgccgccaggccgcagatcgtgctgacacagagccctgccatcatgagtgcctctccaggcgaggaagtgaccctgacctgtagcgccaccagcagcgtgtcctacatccactggtttcagcagaggcccggcacaagccctaagctgtggatctacagcaccagcaatctggcctctggcgtgccagtgcggtttagcggatctggctacggcaccagctacagcctgaccatcagcagaatggaagccgaggatgccgccacctactactgccagcagagaagcagcagccccttcacatttggcagcggcaccaagctggaaatcaaaggcggaggcggaagtggaggcggaggatctggcggcggaggctctgaagtgaaggtggtggaatctggcggcgacctggttaagcctggcggatctctgaagctgagctgtgtggtgtccggcttcaccttcagcagatacggcatgagctgggtccgacagacccctggcaaaagactggaatgggtcgccacaatttccggcggaggcacctacatctactaccccgatagcgtgaagggcagattcaccatctccagagacaacgccaagaacaccctgtacctccagatgagcagcctgaagtctgaggacaccgccatgtaccactgcaccagggacaactacggcagaaactacgactacggcatggactactggggccagggcacaagcgtgacagtctcttctacgcgtcagagcatcaagggcaaccacctggtcaaggtgtacgactaccaagaggacggcagcgtgctgctgacatgtgatgccgaggccaagaacatcacctggtttaaggacggcaagatgatcggcttcctgaccgaggacaagaagaagtggaacctgggcagcaacgctaaggaccccagaggcatgtatcagtgcaagggcagccagaacaagagcaagcccctccaggtgtactaccggatgtgccagaactgcatcgagctgaacgccgctaccatcagcggctttctgttcgccgagatcgtgtccatcttcgtgctggccgtgggcgtgtactttatcgctggacaggatggcgtgcggcagagcagagcttccgataagcaaaccctgctgcctaacgaccagctgtaccagcctctgaaggacagagaggacgaccagtacagccacctccagggcaatcagctgagaagaaac

SEQ ID NO: 10134 - DNA, 1227 bp, Artificial Sequence
  Synthetic Polynucloetide
atggccttaccagtgaccgccttgctcctgccgctggccttgctgctccacgccgccaggccgcagatcgtgctgacacagagccctgccatcatgagtgcctctccaggcgaggaagtgaccctgacctgtagcgccaccagcagcgtgtcctacatccactggtttcagcagaggcccggcacaagccctaagctgtggatctacagcaccagcaatctggcctctggcgtgccagtgcggtttagcggatctggctacggcaccagctacagcctgaccatcagcagaatggaagccgaggatgccgccacctactactgccagcagagaagcagcagccccttcacatttggcagcggcaccaagctggaaatcaaaggcggaggcggaagtggaggcggaggatctggcggcggaggctctgaagtgaaggtggtggaatctggcggcgacctggttaagcctggcggatctctgaagctgagctgtgtggtgtccggcttcaccttcagcagatacggcatgagctgggtccgacagacccctggcaaaagactggaatgggtcgccacaatttccggcggaggcacctacatctactaccccgatagcgtgaagggcagattcaccatctccagagacaacgccaagaacaccctgtacctccagatgagcagcctgaagtctgaggacaccgccatgtaccactgcaccagggacaactacggcagaaactacgactacggcatggactactggggccagggcacaagcgtgacagtctcttctacgcgtcagagttttgggttgttggaccctaaattgtgctatctgttggacggaatcctgttcatttacggagtgatcctgaccgcattgttcctgcgggttaagttttccagatccgcagacgcacccgcttaccaacaagggcagaaccaactctacaatgaacttaatttggggcggagggaagagtacgacgttctggacaaaaggaggggacgagatcccgagatgggcggaaagcctcagcgaaggaagaatccgcaagaggggctttataacgaactccagaaagataaaatggcagaagcctatagtgagattgggatgaagggagaaaggaggaggggtaaaggtcacgatgggttgtaccaaggattgagcacagccactaaagatacctatgatgcgctccacatgcaggccctgccgccaaga

SEQ ID NO: 10135 - DNA, 1353 bp, Artificial Sequence
  Synthetic Polynucloetide
atggccttaccagtgaccgccttgctcctgccgctggccttgctgctccacgccgccaggccggaagtgaaggtggtggaatctggcggcgacctggttaagcctggcggatctctgaagctgagctgtgtggtgtccggcttcaccttcagcagatacggcatgagctgggtccgacagacccctggcaaaagactggaatgggtcgccacaatttccggcggaggcacctacatctactaccccgatagcgtgaagggcagattcaccatctccagagacaacgccaagaacaccctgtacctccagatgagcagcctgaagtctgaggacaccgccatgtaccactgcaccagggacaactacggcagaaactacgactacggcatggactactggggccagggcacaagcgtgacagtctcttctggcggaggcggaagtggaggcggaggatctggcggcggaggctctcagatcgtgctgacacagagccctgccatcatgagtgcctctccaggcgaggaagtgaccctgacctgtagcgccaccagcagcgtgtcctacatccactggtttcagcagaggcccggcacaagccctaagctgtggatctacagcaccagcaatctggcctctggcgtgccagtgcggtttagcggatctggctacggcaccagctacagcctgaccatcagcagaatggaagccgaggatgccgccacctactactgccagcagagaagcagcagccccttcacatttggcagcggcaccaagctggaaatcaaaacgcgtgacggtaacgaggagatgggaggaatcactcaaaccccttacaaagtctcaatttcaggaacaactgttatccttacatgtccccagtatcctggcagcgagatcctttggcagcataacgacaagaatatagggggagatgaagacgataagaatatcggatctgacgaggatcacttgagcctgaaagagttctccgagcttgaacaaagcggatattatgtgtgctatccgcgcgggtcaaagccggaagacgctaacttttacctttatctccgagccagagtgtgcgaaaattgcatggaaatggacgttatgtccgttgctacaatagttatcgtagatatatgcatcacgggtggactgcttctgctggtttattattggtccaagaatagaaaggccaaagctaaacccgtgaccagaggcgctggcgcaggcggaaggcaaaggggacaaaacaaagaacggccaccaccagtgccaaatccagattatgagcctattcggaaaggacagagggacctgtactctggcctgaatcagagaagaatc

SEQ ID NO: 10136 - DNA, 1248 bp, Artificial Sequence
  Synthetic Polynucloetide
atggccttaccagtgaccgccttgctcctgccgctggccttgctgctccacgccgccaggccggaagtgaaggtggtggaatctggcggcgacctggttaagcctggcggatctctgaagctgagctgtgtggtgtccggcttcaccttcagcagatacggcatgagctgggtccgacagacccctggcaaaagactggaatgggtcgccacaatttccggcggaggcacctacatctactaccccgatagcgtgaagggcagattcaccatctccagagacaacgccaagaacaccctgtacctccagatgagcagcctgaagtctgaggacaccgccatgtaccactgcaccagggacaactacggcagaaactacgactacggcatggactactggggccagggcacaagcgtgacagtctcttctggcggaggcggaagtggaggcggaggatctggcggcggaggctctcagatcgtgctgacacagagccctgccatcatgagtgcctctccaggcgaggaagtgaccctgacctgtagcgccaccagcagcgtgtcctacatccactggtttcagcagaggcccggcacaagccctaagctgtggatctacagcaccagcaatctggcctctggcgtgccagtgcggtttagcggatctggctacggcaccagctacagcctgaccatcagcagaatggaagccgaggatgccgccacctactactgccagcagagaagcagcagccccttcacatttggcagcggcaccaagctggaaatcaaaacgcgtttcaagatccccatcgaggaactggaagatcgggtgttcgtgaactgcaacacctctatcacctgggtggaaggcaccgtgggaacactgctgagcgacatcaccagactggacctcggcaagcggattctggaccctcggggcatctacagatgcaacggcaccgacatctacaaggacaaagaaagcaccgtgcaggtccactacagaatgtgccagtcctgcgtggaactggaccctgctacagtggccggcatcatcgtgaccgatgtgatcgctactctgctgctggctctgggagtgttctgcttcgccggacacgaaacaggcagactgtctggcgctgccgatacacaggccctgctgagaaacgaccaagtgtatcagcccctgcgcgacagagatgatgcccagtattctcacctcggcggcaactgggctagaaacaag

SEQ ID NO: 10137 - DNA, 1278 bp, Artificial Sequence
  Synthetic Polynucloetide
atggccttaccagtgaccgccttgctcctgccgctggccttgctgctccacgccgccaggccggaagtgaaggtggtggaatctggcggcgacctggttaagcctggcggatctctgaagctgagctgtgtggtgtccggcttcaccttcagcagatacggcatgagctgggtccgacagacccctggcaaaagactggaatgggtcgccacaatttccggcggaggcacctacatctactaccccgatagcgtgaagggcagattcaccatctccagagacaacgccaagaacaccctgtacctccagatgagcagcctgaagtctgaggacaccgccatgtaccactgcaccagggacaactacggcagaaactacgactacggcatggactactggggccagggcacaagcgtgacagtctcttctggcggaggcggaagtggaggcggaggatctggcggcggaggctctcagatcgtgctgacacagagccctgccatcatgagtgcctctccaggcgaggaagtgaccctgacctgtagcgccaccagcagcgtgtcctacatccactggtttcagcagaggcccggcacaagccctaagctgtggatctacagcaccagcaatctggcctctggcgtgccagtgcggtttagcggatctggctacggcaccagctacagcctgaccatcagcagaatggaagccgaggatgccgccacctactactgccagcagagaagcagcagccccttcacatttggcagcggcaccaagctggaaatcaaaacgcgtcagagcatcaagggcaaccacctggtcaaggtgtacgactaccaagaggacggcagcgtgctgctgacatgtgatgccgaggccaagaacatcacctggtttaaggacggcaagatgatcggcttcctgaccgaggacaagaagaagtggaacctgggcagcaacgctaaggaccccagaggcatgtatcagtgcaagggcagccagaacaagagcaagcccctccaggtgtactaccggatgtgccagaactgcatcgagctgaacgccgctaccatcagcggctttctgttcgccgagatcgtgtccatcttcgtgctggccgtgggcgtgtactttatcgctggacaggatggcgtgcggcagagcagagcttccgataagcaaaccctgctgcctaacgaccagctgtaccagcctctgaaggacagagaggacgaccagtacagccacctccagggcaatcagctgagaagaaac

SEQ ID NO: 10138 - DNA, 1227 bp, Artificial Sequence
  Synthetic Polynucloetide
atggccttaccagtgaccgccttgctcctgccgctggccttgctgctccacgccgccaggccggaagtgaaggtggtggaatctggcggcgacctggttaagcctggcggatctctgaagctgagctgtgtggtgtccggcttcaccttcagcagatacggcatgagctgggtccgacagacccctggcaaaagactggaatgggtcgccacaatttccggcggaggcacctacatctactaccccgatagcgtgaagggcagattcaccatctccagagacaacgccaagaacaccctgtacctccagatgagcagcctgaagtctgaggacaccgccatgtaccactgcaccagggacaactacggcagaaactacgactacggcatggactactggggccagggcacaagcgtgacagtctcttctggcggaggcggaagtggaggcggaggatctggcggcggaggctctcagatcgtgctgacacagagccctgccatcatgagtgcctctccaggcgaggaagtgaccctgacctgtagcgccaccagcagcgtgtcctacatccactggtttcagcagaggcccggcacaagccctaagctgtggatctacagcaccagcaatctggcctctggcgtgccagtgcggtttagcggatctggctacggcaccagctacagcctgaccatcagcagaatggaagccgaggatgccgccacctactactgccagcagagaagcagcagccccttcacatttggcagcggcaccaagctggaaatcaaaacgcgtcagagttttgggttgttggaccctaaattgtgctatctgttggacggaatcctgttcatttacggagtgatcctgaccgcattgttcctgcgggttaagttttccagatccgcagacgcacccgcttaccaacaagggcagaaccaactctacaatgaacttaatttggggcggagggaagagtacgacgttctggacaaaaggaggggacgagatcccgagatgggcggaaagcctcagcgaaggaagaatccgcaagaggggctttataacgaactccagaaagataaaatggcagaagcctatagtgagattgggatgaagggagaaaggaggaggggtaaaggtcacgatgggttgtaccaaggattgagcacagccactaaagatacctatgatgcgctccacatgcaggccctgccgccaaga

SEQ ID NO: 10139 - DNA, 1929 bp, Artificial Sequence
  Synthetic Polynucloetide
atggccttaccagtgaccgccttgctcctgccgctggccttgctgctccacgccgccaggccgcagatcgtgctgacacagagccctgccatcatgagtgcctctccaggcgaggaagtgaccctgacctgtagcgccaccagcagcgtgtcctacatccactggtttcagcagaggcccggcacaagccctaagctgtggatctacagcaccagcaatctggcctctggcgtgccagtgcggtttagcggatctggctacggcaccagctacagcctgaccatcagcagaatggaagccgaggatgccgccacctactactgccagcagagaagcagcagccccttcacatttggcagcggcaccaagctggaaatcaaaggcggaggcggaagtggaggcggaggatctggcggcggaggctctgaagtgaaggtggtggaatctggcggcgacctggttaagcctggcggatctctgaagctgagctgtgtggtgtccggcttcaccttcagcagatacggcatgagctgggtccgacagacccctggcaaaagactggaatgggtcgccacaatttccggcggaggcacctacatctactaccccgatagcgtgaagggcagattcaccatctccagagacaacgccaagaacaccctgtacctccagatgagcagcctgaagtctgaggacaccgccatgtaccactgcaccagggacaactacggcagaaactacgactacggcatggactactggggccagggcacaagcgtgacagtctcttctacgcgtgggagcggcatccagaaccctgatcctgccgtgtaccagctgcgggatagcaagagcagcgacaagagcgtgtgtctgttcaccgacttcgacagccagaccaacgtgtcccagagcaaggactccgacgtgtacatcaccgataagaccgtgctggacatgcggagcatggacttcaagagcaactccgccgtggcctggtccaacaagtccgatttcgcctgcgccaacgccttcaacaacagcattatccccgaggacacattcttcccaagccccgagagcagctgcgacgtgaagctggtggaaaagagcttcgagacagacaccaacctgaacttccagaacctgagcgtgatcggcttcagaatcctgctgctgaaagtggccggctttaacctgctgatgaccctgcggctgtggtccagccgcgccaagagaagcggatctggcgtgaagcagaccctgaatttcgacctgctgaagctggctggcgacgtggaatccaacccaggcccttctagaggccatatgaccgagtacaagcccacggtgcgcctcgccacccgcgacgacgtccccagggccgtacgcaccctcgccgccgcgttcgccgactaccccgccacgcgccacaccgtcgatccggaccgccacatcgagcgggtcaccgagctgcaagaactcttcctcacgcgcgtcgggctcgacatcggcaaggtgtgggtcgcggacgacggcgccgcggtggcggtctggaccacgccggagagcgtcgaagcgggggcggtgttcgccgagatcggcccgcgcatggccgagttgagcggttcccggctggccgcgcagcaacagatggaaggcctcctggcgccgcaccggcccaaggagcccgcgtggttcctggccaccgtcggcgtctcgcccgaccaccagggcaagggtctgggcagcgccgtcgtgctccccggagtggaggcggccgagcgcgccggggtgcccgccttcctggagacctccgcgccccgcaacctccccttctacgagcggctcggcttcaccgtcaccgccgacgtcgaggtgcccgaaggaccgcgcacctggtgcatgacccgcaagcccggtgcctga

SEQ ID NO: 10140 - DNA, 2025 bp, Artificial Sequence
  Synthetic Polynucloetide
atggccttaccagtgaccgccttgctcctgccgctggccttgctgctccacgccgccaggccgcagatcgtgctgacacagagccctgccatcatgagtgcctctccaggcgaggaagtgaccctgacctgtagcgccaccagcagcgtgtcctacatccactggtttcagcagaggcccggcacaagccctaagctgtggatctacagcaccagcaatctggcctctggcgtgccagtgcggtttagcggatctggctacggcaccagctacagcctgaccatcagcagaatggaagccgaggatgccgccacctactactgccagcagagaagcagcagccccttcacatttggcagcggcaccaagctggaaatcaaaggcggaggcggaagtggaggcggaggatctggcggcggaggctctgaagtgaaggtggtggaatctggcggcgacctggttaagcctggcggatctctgaagctgagctgtgtggtgtccggcttcaccttcagcagatacggcatgagctgggtccgacagacccctggcaaaagactggaatgggtcgccacaatttccggcggaggcacctacatctactaccccgatagcgtgaagggcagattcaccatctccagagacaacgccaagaacaccctgtacctccagatgagcagcctgaagtctgaggacaccgccatgtaccactgcaccagggacaactacggcagaaactacgactacggcatggactactggggccagggcacaagcgtgacagtctcttctctcgaggacctgaagaacgtgttcccacctgaggtggccgtgttcgagcctagcgaggccgagatcagccacacccagaaagccaccctcgtgtgcctggctaccggcttctaccccgaccatgtggaactgtcttggtgggtcaacggcaaagaggtgcacagcggcgtgtctaccgacccccagccactgaaagaacagcccgccctgaacgacagccggtactgcctgagcagcagactgagagtgtccgccaccttctggcagaacccccggaaccacttcagatgccaggtgcagttctacggcctgagcgagaacgacgagtggacccaggacagagccaagcccgtgacccagatcgtgtctgccgaagcctggggcagagccgattgcggctttaccagcgagagctaccagcagggcgtgctgagcgccaccatcctgtacgagatcctgctgggcaaggccaccctgtacgccgtgctggtgtctgccctggtgctgatggctatggtcaagcggaaggacagccggggaagggccaagcgatctggatctggagcaacaaacttctcactactcaaacaagcaggtgacgtggaggagaatcccgggcctactagaggccatatgaccgagtacaagcccacggtgcgcctcgccacccgcgacgacgtccccagggccgtacgcaccctcgccgccgcgttcgccgactaccccgccacgcgccacaccgtcgatccggaccgccacatcgagcgggtcaccgagctgcaagaactcttcctcacgcgcgtcgggctcgacatcggcaaggtgtgggtcgcggacgacggcgccgcggtggcggtctggaccacgccggagagcgtcgaagcgggggcggtgttcgccgagatcggcccgcgcatggccgagttgagcggttcccggctggccgcgcagcaacagatggaaggcctcctggcgccgcaccggcccaaggagcccgcgtggttcctggccaccgtcggcgtctcgcccgaccaccagggcaagggtctgggcagcgccgtcgtgctccccggagtggaggcggccgagcgcgccggggtgcccgccttcctggagacctccgcgccccgcaacctccccttctacgagcggctcggcttcaccgtcaccgccgacgtcgaggtgcccgaaggaccgcgcacctggtgcatgacccgcaagcccggtgcctga

SEQ ID NO: 10141 - DNA, 2175 bp, Artificial Sequence
  Synthetic Polynucloetide
atggccttaccagtgaccgccttgctcctgccgctggccttgctgctccacgccgccaggccgcagatcgtgctgacacagagccctgccatcatgagtgcctctccaggcgaggaagtgaccctgacctgtagcgccaccagcagcgtgtcctacatccactggtttcagcagaggcccggcacaagccctaagctgtggatctacagcaccagcaatctggcctctggcgtgccagtgcggtttagcggatctggctacggcaccagctacagcctgaccatcagcagaatggaagccgaggatgccgccacctactactgccagcagagaagcagcagccccttcacatttggcagcggcaccaagctggaaatcaaaggcggaggcggaagtggaggcggaggatctggcggcggaggctctgaagtgaaggtggtggaatctggcggcgacctggttaagcctggcggatctctgaagctgagctgtgtggtgtccggcttcaccttcagcagatacggcatgagctgggtccgacagacccctggcaaaagactggaatgggtcgccacaatttccggcggaggcacctacatctactaccccgatagcgtgaagggcagattcaccatctccagagacaacgccaagaacaccctgtacctccagatgagcagcctgaagtctgaggacaccgccatgtaccactgcaccagggacaactacggcagaaactacgactacggcatggactactggggccagggcacaagcgtgacagtctcttctacgcgtgagcagaaactgatctcggaagaggatctggggagcggcaccccattcccttctctggcccctcccatcatgctgctggtggacggcaagcagcagatggtggtcgtgtgcctggtgctggatgtggccccacctggactggacagccccatctggtttagcgccggcaatggctctgccctggacgcctttacctacggcccaagccctgccaccgatggcacctggacaaatctggcccacctgagcctgcccagcgaggaactggcttcttgggagcctctcgtgtgccacacaggacctggcgctgagggacacagcagatccacccagcctatgcacctgtctggcgaggccagcaccgccagaacctgtcctcaggaacctctgagaggcacccctggcggagcactgtggctgggagtgctgagactgctgctgttcaagctgctgctgtttgacctgctgctgacctgctcctgtctgtgcgatcctgccggccctctgccttctcctgccaccaccacaagactgagagccctgggcagccacagactgcaccctgccacagagacaggcggcagagaggccacaagcagccctagaccccagcccagagacagaagatggggcgataccccccctggcagaaagcctggatctccagtccgcgccaagagaagcggatctggcgtgaagcagaccctgaatttcgacctgctgaagctggctggcgacgtggaatccaacccaggcccttctagatctagaggccatatgaccgagtacaagcccacggtgcgcctcgccacccgcgacgacgtccccagggccgtacgcaccctcgccgccgcgttcgccgactaccccgccacgcgccacaccgtcgatccggaccgccacatcgagcgggtcaccgagctgcaagaactcttcctcacgcgcgtcgggctcgacatcggcaaggtgtgggtcgcggacgacggcgccgcggtggcggtctggaccacgccggagagcgtcgaagcgggggcggtgttcgccgagatcggcccgcgcatggccgagttgagcggttcccggctggccgcgcagcaacagatggaaggcctcctggcgccgcaccggcccaaggagcccgcgtggttcctggccaccgtcggcgtctcgcccgaccaccagggcaagggtctgggcagcgccgtcgtgctccccggagtggaggcggccgagcgcgccggggtgcccgccttcctggagacctccgcgccccgcaacctccccttctacgagcggctcggcttcaccgtcaccgccgacgtcgaggtgcccgaaggaccgcgcacctggtgcatgacccgcaagcccggtgcctga

SEQ ID NO: 10142 - DNA, 1614 bp, Artificial Sequence
  Synthetic Polynucloetide
atggccttaccagtgaccgccttgctcctgccgctggccttgctgctccacgccgccaggccgcagatcgtgctgacacagagccctgccatcatgagtgcctctccaggcgaggaagtgaccctgacctgtagcgccaccagcagcgtgtcctacatccactggtttcagcagaggcccggcacaagccctaagctgtggatctacagcaccagcaatctggcctctggcgtgccagtgcggtttagcggatctggctacggcaccagctacagcctgaccatcagcagaatggaagccgaggatgccgccacctactactgccagcagagaagcagcagccccttcacatttggcagcggcaccaagctggaaatcaaactcgaggacctgaagaacgtgttcccacctgaggtggccgtgttcgagcctagcgaggccgagatcagccacacccagaaagccaccctcgtgtgcctggctaccggcttctaccccgaccatgtggaactgtcttggtgggtcaacggcaaagaggtgcacagcggcgtgtctaccgacccccagccactgaaagaacagcccgccctgaacgacagccggtactgcctgagcagcagactgagagtgtccgccaccttctggcagaacccccggaaccacttcagatgccaggtgcagttctacggcctgagcgagaacgacgagtggacccaggacagagccaagcccgtgacccagatcgtgtctgccgaagcctggggcagagccgattgcggctttaccagcgagagctaccagcagggcgtgctgagcgccaccatcctgtacgagatcctgctgggcaaggccaccctgtacgccgtgctggtgtctgccctggtgctgatggctatggtcaagcggaaggacagccggggaagggccaagcgatctggatctggagcaacaaacttctcactactcaaacaagcaggtgacgtggaggagaatcccgggcctactagaggccatatgaccgagtacaagcccacggtgcgcctcgccacccgcgacgacgtccccagggccgtacgcaccctcgccgccgcgttcgccgactaccccgccacgcgccacaccgtcgatccggaccgccacatcgagcgggtcaccgagctgcaagaactcttcctcacgcgcgtcgggctcgacatcggcaaggtgtgggtcgcggacgacggcgccgcggtggcggtctggaccacgccggagagcgtcgaagcgggggcggtgttcgccgagatcggcccgcgcatggccgagttgagcggttcccggctggccgcgcagcaacagatggaaggcctcctggcgccgcaccggcccaaggagcccgcgtggttcctggccaccgtcggcgtctcgcccgaccaccagggcaagggtctgggcagcgccgtcgtgctccccggagtggaggcggccgagcgcgccggggtgcccgccttcctggagacctccgcgccccgcaacctccccttctacgagcggctcggcttcaccgtcaccgccgacgtcgaggtgcccgaaggaccgcgcacctggtgcatgacccgcaagcccggtgcctga

SEQ ID NO: 10143 - DNA, 921 bp, Artificial Sequence
  Synthetic Polynucloetide
atggccttaccagtgaccgccttgctcctgccgctggccttgctgctccacgccgccaggccgcagatcgtgctgacacagagccctgccatcatgagtgcctctccaggcgaggaagtgaccctgacctgtagcgccaccagcagcgtgtcctacatccactggtttcagcagaggcccggcacaagccctaagctgtggatctacagcaccagcaatctggcctctggcgtgccagtgcggtttagcggatctggctacggcaccagctacagcctgaccatcagcagaatggaagccgaggatgccgccacctactactgccagcagagaagcagcagccccttcacatttggcagcggcaccaagctggaaatcaaactcgaggacctgaagaacgtgttcccacctgaggtggccgtgttcgagcctagcgaggccgagatcagccacacccagaaagccaccctcgtgtgcctggctaccggcttctaccccgaccatgtggaactgtcttggtgggtcaacggcaaagaggtgcacagcggcgtgtctaccgacccccagccactgaaagaacagcccgccctgaacgacagccggtactgcctgagcagcagactgagagtgtccgccaccttctggcagaacccccggaaccacttcagatgccaggtgcagttctacggcctgagcgagaacgacgagtggacccaggacagagccaagcccgtgacccagatcgtgtctgccgaagcctggggcagagccgattgcggctttaccagcgagagctaccagcagggcgtgctgagcgccaccatcctgtacgagatcctgctgggcaaggccaccctgtacgccgtgctggtgtctgccctggtgctgatggctatggtcaagcggaaggacagccgggga

SEQ ID NO: 10144 - DNA, 1356 bp, Artificial Sequence
  Synthetic Polynucloetide
atggactggatttggcgcatccttttccttgtcggcgctgctaccggcgcgcattccttcgaagaagtgaaggtggtggaatctggcggcgacctggttaagcctggcggatctctgaagctgagctgtgtggtgtccggcttcaccttcagcagatacggcatgagctgggtccgacagacccctggcaaaagactggaatgggtcgccacaatttccggcggaggcacctacatctactaccccgatagcgtgaagggcagattcaccatctccagagacaacgccaagaacaccctgtacctccagatgagcagcctgaagtctgaggacaccgccatgtaccactgcaccagggacaactacggcagaaactacgactacggcatggactactggggccagggcacaagcgtgacagtctcttctacgcgtatccagaaccctgatcctgccgtgtaccagctgcgggatagcaagagcagcgacaagagcgtgtgtctgttcaccgacttcgacagccagaccaacgtgtcccagagcaaggactccgacgtgtacatcaccgataagaccgtgctggacatgcggagcatggacttcaagagcaactccgccgtggcctggtccaacaagtccgatttcgcctgcgccaacgccttcaacaacagcattatccccgaggacacattcttcccaagccccgagagcagctgcgacgtgaagctggtggaaaagagcttcgagacagacaccaacctgaacttccagaacctgagcgtgatcggcttcagaatcctgctgctgaaagtggccggctttaacctgctgatgaccctgcggctgtggtccagccgcgccaagagaagcggatctggcgtgaagcagaccctgaatttcgacctgctgaagctggctggcgacgtggaatccaacccaggcccttctagaggccatatggccaagcctttgtctcaagaagaatccaccctcattgaaagagcaacggctacaatcaacagcatccccatctctgaagactacagcgtcgccagcgcagctctctctagcgacggccgcatcttcactggtgtcaatgtatatcattttactgggggaccttgtgcagaactcgtggtgctgggcactgctgctgctgcggcagctggcaacctgacttgtatcgtcgcgatcggaaatgagaacaggggcatcttgagcccctgcggacggtgccgacaggtgcttctcgatctgcatcctgggatcaaagccatagtgaaggacagtgatggacagccgacggcagttgggattcgtgaattgctgccctctggttatgtgtgggagggctga

SEQ ID NO: 10145 - DNA, 855 bp, Artificial Sequence
  Synthetic Polynucloetide
atggactggatttggcgcatccttttccttgtcggcgctgctaccggcgcgcattccttcgaagaagtgaaggtggtggaatctggcggcgacctggttaagcctggcggatctctgaagctgagctgtgtggtgtccggcttcaccttcagcagatacggcatgagctgggtccgacagacccctggcaaaagactggaatgggtcgccacaatttccggcggaggcacctacatctactaccccgatagcgtgaagggcagattcaccatctccagagacaacgccaagaacaccctgtacctccagatgagcagcctgaagtctgaggacaccgccatgtaccactgcaccagggacaactacggcagaaactacgactacggcatggactactggggccagggcacaagcgtgacagtctcttctacgcgtatccagaaccctgatcctgccgtgtaccagctgcgggatagcaagagcagcgacaagagcgtgtgtctgttcaccgacttcgacagccagaccaacgtgtcccagagcaaggactccgacgtgtacatcaccgataagaccgtgctggacatgcggagcatggacttcaagagcaactccgccgtggcctggtccaacaagtccgatttcgcctgcgccaacgccttcaacaacagcattatccccgaggacacattcttcccaagccccgagagcagctgcgacgtgaagctggtggaaaagagcttcgagacagacaccaacctgaacttccagaacctgagcgtgatcggcttcagaatcctgctgctgaaagtggccggctttaacctgctgatgaccctgcggctgtggtccagc

SEQ ID NO: 10146 - DNA, 1668 bp, Artificial Sequence
  Synthetic Polynucloetide
atggccttaccagtgaccgccttgctcctgccgctggccttgctgctccacgccgccaggccgcagatcgtgctgacacagagccctgccatcatgagtgcctctccaggcgaggaagtgaccctgacctgtagcgccaccagcagcgtgtcctacatccactggtttcagcagaggcccggcacaagccctaagctgtggatctacagcaccagcaatctggcctctggcgtgccagtgcggtttagcggatctggctacggcaccagctacagcctgaccatcagcagaatggaagccgaggatgccgccacctactactgccagcagagaagcagcagccccttcacatttggcagcggcaccaagctggaaatcaaactcgaggggaaaccaattcccaaccctcttctgggactggattcaaccggcagcggcgaggacctgaagaacgtgttcccacctgaggtggccgtgttcgagcctagcgaggccgagatcagccacacccagaaagccaccctcgtgtgcctggctaccggcttctaccccgaccatgtggaactgtcttggtgggtcaacggcaaagaggtgcacagcggcgtgtgtaccgacccccagccactgaaagaacagcccgccctgaacgacagccggtactgcctgagcagcagactgagagtgtccgccaccttctggcagaacccccggaaccacttcagatgccaggtgcagttctacggcctgagcgagaacgacgagtggacccaggacagagccaagcccgtgacccagatcgtgtctgccgaagcctggggcagagccgattgcggctttaccagcgagagctaccagcagggcgtgctgagcgccaccatcctgtacgagatcctgctgggcaaggccaccctgtacgccgtgctggtgtctgccctggtgctgatggctatggtcaagcggaaggacagccggggaagggccaagcgatctggatctggagcaacaaacttctcactactcaaacaagcaggtgacgtggaggagaatcccgggcctactagaggccatatgaccgagtacaagcccacggtgcgcctcgccacccgcgacgacgtccccagggccgtacgcaccctcgccgccgcgttcgccgactaccccgccacgcgccacaccgtcgatccggaccgccacatcgagcgggtcaccgagctgcaagaactcttcctcacgcgcgtcgggctcgacatcggcaaggtgtgggtcgcggacgacggcgccgcggtggcggtctggaccacgccggagagcgtcgaagcgggggcggtgttcgccgagatcggcccgcgcatggccgagttgagcggttcccggctggccgcgcagcaacagatggaaggcctcctggcgccgcaccggcccaaggagcccgcgtggttcctggccaccgtcggcgtctcgcccgaccaccagggcaagggtctgggcagcgccgtcgtgctccccggagtggaggcggccgagcgcgccggggtgcccgccttcctggagacctccgcgccccgcaacctccccttctacgagcggctcggcttcaccgtcaccgccgacgtcgaggtgcccgaaggaccgcgcacctggtgcatgacccgcaagcccggtgcctga

SEQ ID NO: 10147 - DNA, 978 bp, Artificial Sequence
  Synthetic Polynucloetide
atggccttaccagtgaccgccttgctcctgccgctggccttgctgctccacgccgccaggccgcagatcgtgctgacacagagccctgccatcatgagtgcctctccaggcgaggaagtgaccctgacctgtagcgccaccagcagcgtgtcctacatccactggtttcagcagaggcccggcacaagccctaagctgtggatctacagcaccagcaatctggcctctggcgtgccagtgcggtttagcggatctggctacggcaccagctacagcctgaccatcagcagaatggaagccgaggatgccgccacctactactgccagcagagaagcagcagccccttcacatttggcagcggcaccaagctggaaatcaaactcgaggggaaaccaattcccaaccctcttctgggactggattcaaccggcagcggcgaggacctgaagaacgtgttcccacctgaggtggccgtgttcgagcctagcgaggccgagatcagccacacccagaaagccaccctcgtgtgcctggctaccggcttctaccccgaccatgtggaactgtcttggtgggtcaacggcaaagaggtgcacagcggcgtgtgtaccgacccccagccactgaaagaacagcccgccctgaacgacagccggtactgcctgagcagcagactgagagtgtccgccaccttctggcagaacccccggaaccacttcagatgccaggtgcagttctacggcctgagcgagaacgacgagtggacccaggacagagccaagcccgtgacccagatcgtgtctgccgaagcctggggcagagccgattgcggctttaccagcgagagctaccagcagggcgtgctgagcgccaccatcctgtacgagatcctgctgggcaaggccaccctgtacgccgtgctggtgtctgccctggtgctgatggctatggtcaagcggaaggacagccggggatga

SEQ ID NO: 10148 - DNA, 1392 bp, Artificial Sequence
  Synthetic Polynucloetide
atggactggatttggcgcatccttttccttgtcggcgctgctaccggcgcgcattccttcgaagaagtgaaggtggtggaatctggcggcgacctggttaagcctggcggatctctgaagctgagctgtgtggtgtccggcttcaccttcagcagatacggcatgagctgggtccgacagacccctggcaaaagactggaatgggtcgccacaatttccggcggaggcacctacatctactaccccgatagcgtgaagggcagattcaccatctccagagacaacgccaagaacaccctgtacctccagatgagcagcctgaagtctgaggacaccgccatgtaccactgcaccagggacaactacggcagaaactacgactacggcatggactactggggccagggcacaagcgtgacagtctcttctacgcgtgagcagaaactgatctcggaagaggatgggagcggcatccagaaccctgatcctgccgtgtaccagctgcgggatagcaagagcagcgacaagagcgtgtgtctgttcaccgacttcgacagccagaccaacgtgtcccagagcaaggactccgacgtgtacatcaccgataagtgcgtgctggacatgcggagcatggacttcaagagcaactccgccgtggcctggtccaacaagtccgatttcgcctgcgccaacgccttcaacaacagcattatccccgaggacacattcttcccaagccccgagagcagctgcgacgtgaagctggtggaaaagagcttcgagacagacaccaacctgaacttccagaacctgagcgtgatcggcttcagaatcctgctgctgaaagtggccggctttaacctgctgatgaccctgcggctgtggtccagccgcgccaagagaagcggatctggcgtgaagcagaccctgaatttcgacctgctgaagctggctggcgacgtggaatccaacccaggcccttctagaggccatatggccaagcctttgtctcaagaagaatccaccctcattgaaagagcaacggctacaatcaacagcatccccatctctgaagactacagcgtcgccagcgcagctctctctagcgacggccgcatcttcactggtgtcaatgtatatcattttactgggggaccttgtgcagaactcgtggtgctgggcactgctgctgctgcggcagctggcaacctgacttgtatcgtcgcgatcggaaatgagaacaggggcatcttgagcccctgcggacggtgccgacaggtgcttctcgatctgcatcctgggatcaaagccatagtgaaggacagtgatggacagccgacggcagttgggattcgtgaattgctgccctctggttatgtgtgggagggctga

SEQ ID NO: 10149 - DNA, 894 bp, Artificial Sequence
  Synthetic Polynucloetide
atggactggatttggcgcatccttttccttgtcggcgctgctaccggcgcgcattccttcgaagaagtgaaggtggtggaatctggcggcgacctggttaagcctggcggatctctgaagctgagctgtgtggtgtccggcttcaccttcagcagatacggcatgagctgggtccgacagacccctggcaaaagactggaatgggtcgccacaatttccggcggaggcacctacatctactaccccgatagcgtgaagggcagattcaccatctccagagacaacgccaagaacaccctgtacctccagatgagcagcctgaagtctgaggacaccgccatgtaccactgcaccagggacaactacggcagaaactacgactacggcatggactactggggccagggcacaagcgtgacagtctcttctacgcgtgagcagaaactgatctcggaagaggatgggagcggcatccagaaccctgatcctgccgtgtaccagctgcgggatagcaagagcagcgacaagagcgtgtgtctgttcaccgacttcgacagccagaccaacgtgtcccagagcaaggactccgacgtgtacatcaccgataagtgcgtgctggacatgcggagcatggacttcaagagcaactccgccgtggcctggtccaacaagtccgatttcgcctgcgccaacgccttcaacaacagcattatccccgaggacacattcttcccaagccccgagagcagctgcgacgtgaagctggtggaaaagagcttcgagacagacaccaacctgaacttccagaacctgagcgtgatcggcttcagaatcctgctgctgaaagtggccggctttaacctgctgatgaccctgcggctgtggtccagctga

SEQ ID NO: 10150 - DNA, 1929 bp, Artificial Sequence
  Synthetic Polynucloetide
atggccttaccagtgaccgccttgctcctgccgctggccttgctgctccacgccgccaggccgcagatcgtgctgacacagagccctgccatcatgagtgcctctccaggcgaggaagtgaccctgacctgtagcgccaccagcagcgtgtcctacatccactggtttcagcagaggcccggcacaagccctaagctgtggatctacagcaccagcaatctggcctctggcgtgccagtgcggtttagcggatctggctacggcaccagctacagcctgaccatcagcagaatggaagccgaggatgccgccacctactactgccagcagagaagcagcagccccttcacatttggcagcggcaccaagctggaaatcaaaggcggaggcggaagtggaggcggaggatctggcggcggaggctctgaagtgaaggtggtggaatctggcggcgacctggttaagcctggcggatctctgaagctgagctgtgtggtgtccggcttcaccttcagcagatacggcatgagctgggtccgacagacccctggcaaaagactggaatgggtcgccacaatttccggcggaggcacctacatctactaccccgatagcgtgaagggcagattcaccatctccagagacaacgccaagaacaccctgtacctccagatgagcagcctgaagtctgaggacaccgccatgtaccactgcaccagggacaactacggcagaaactacgactacggcatggactactggggccagggcacaagcgtgacagtctcttctacgcgtgggagcggcatccagaaccctgatcctgccgtgtaccagctgcgggatagcaagagcagcgacaagagcgtgtgtctgttcaccgacttcgacagccagaccaacgtgtcccagagcaaggactccgacgtgtacatcaccgataagaccgtgctggacatgcggagcatggacttcaagagcaactccgccgtggcctggtccaacaagtccgatttcgcctgcgccaacgccttcaacaacagcattatccccgaggacacattcttcccaagcagcgacgtgccctgcgacgtgaagctggtggaaaagagcttcgagacagacaccaacctgaacttccagaacctgagcgtgatcggcttcagaatcctgctgctgaaagtggccggctttaacctgctgatgaccctgcggctgtggtccagccgcgccaagagaagcggatctggcgtgaagcagaccctgaatttcgacctgctgaagctggctggcgacgtggaatccaacccaggcccttctagaggccatatgaccgagtacaagcccacggtgcgcctcgccacccgcgacgacgtccccagggccgtacgcaccctcgccgccgcgttcgccgactaccccgccacgcgccacaccgtcgatccggaccgccacatcgagcgggtcaccgagctgcaagaactcttcctcacgcgcgtcgggctcgacatcggcaaggtgtgggtcgcggacgacggcgccgcggtggcggtctggaccacgccggagagcgtcgaagcgggggcggtgttcgccgagatcggcccgcgcatggccgagttgagcggttcccggctggccgcgcagcaacagatggaaggcctcctggcgccgcaccggcccaaggagcccgcgtggttcctggccaccgtcggcgtctcgcccgaccaccagggcaagggtctgggcagcgccgtcgtgctccccggagtggaggcggccgagcgcgccggggtgcccgccttcctggagacctccgcgccccgcaacctccccttctacgagcggctcggcttcaccgtcaccgccgacgtcgaggtgcccgaaggaccgcgcacctggtgcatgacccgcaagcccggtgcctga

SEQ ID NO: 10151 - DNA, 2025 bp, Artificial Sequence
  Synthetic Polynucloetide
atggccttaccagtgaccgccttgctcctgccgctggccttgctgctccacgccgccaggccgcagatcgtgctgacacagagccctgccatcatgagtgcctctccaggcgaggaagtgaccctgacctgtagcgccaccagcagcgtgtcctacatccactggtttcagcagaggcccggcacaagccctaagctgtggatctacagcaccagcaatctggcctctggcgtgccagtgcggtttagcggatctggctacggcaccagctacagcctgaccatcagcagaatggaagccgaggatgccgccacctactactgccagcagagaagcagcagccccttcacatttggcagcggcaccaagctggaaatcaaaggcggaggcggaagtggaggcggaggatctggcggcggaggctctgaagtgaaggtggtggaatctggcggcgacctggttaagcctggcggatctctgaagctgagctgtgtggtgtccggcttcaccttcagcagatacggcatgagctgggtccgacagacccctggcaaaagactggaatgggtcgccacaatttccggcggaggcacctacatctactaccccgatagcgtgaagggcagattcaccatctccagagacaacgccaagaacaccctgtacctccagatgagcagcctgaagtctgaggacaccgccatgtaccactgcaccagggacaactacggcagaaactacgactacggcatggactactggggccagggcacaagcgtgacagtctcttctctcgaggacctgaagaacgtgttcccacctgaggtggccgtgttcgagcctagcaaggccgagatcgcccacacccagaaagccaccctcgtgtgcctggctaccggcttctaccccgaccatgtggaactgtcttggtgggtcaacggcaaagaggtgcacagcggcgtgtctaccgacccccagccactgaaagaacagcccgccctgaacgacagccggtactgcctgagcagcagactgagagtgtccgccaccttctggcagaacccccggaaccacttcagatgccaggtgcagttctacggcctgagcgagaacgacgagtggacccaggacagagccaagcccgtgacccagatcgtgtctgccgaagcctggggcagagccgattgcggcatcaccagcgccagctaccaccagggcgtgctgagcgccaccatcctgtacgagatcctgctgggcaaggccaccctgtacgccgtgctggtgtctgccctggtgctgatggctatggtcaagcggaaggacagccggggaagggccaagcgatctggatctggagcaacaaacttctcactactcaaacaagcaggtgacgtggaggagaatcccgggcctactagaggccatatgaccgagtacaagcccacggtgcgcctcgccacccgcgacgacgtccccagggccgtacgcaccctcgccgccgcgttcgccgactaccccgccacgcgccacaccgtcgatccggaccgccacatcgagcgggtcaccgagctgcaagaactcttcctcacgcgcgtcgggctcgacatcggcaaggtgtgggtcgcggacgacggcgccgcggtggcggtctggaccacgccggagagcgtcgaagcgggggcggtgttcgccgagatcggcccgcgcatggccgagttgagcggttcccggctggccgcgcagcaacagatggaaggcctcctggcgccgcaccggcccaaggagcccgcgtggttcctggccaccgtcggcgtctcgcccgaccaccagggcaagggtctgggcagcgccgtcgtgctccccggagtggaggcggccgagcgcgccggggtgcccgccttcctggagacctccgcgccccgcaacctccccttctacgagcggctcggcttcaccgtcaccgccgacgtcgaggtgcccgaaggaccgcgcacctggtgcatgacccgcaagcccggtgcctga

SEQ ID NO: 10152 - DNA, 2094 bp, Artificial Sequence
  Synthetic Polynucloetide
atggccttaccagtgaccgccttgctcctgccgctggccttgctgctccacgccgccaggccgcagatcgtgctgacacagagccctgccatcatgagtgcctctccaggcgaggaagtgaccctgacctgtagcgccaccagcagcgtgtcctacatccactggtttcagcagaggcccggcacaagccctaagctgtggatctacagcaccagcaatctggcctctggcgtgccagtgcggtttagcggatctggctacggcaccagctacagcctgaccatcagcagaatggaagccgaggatgccgccacctactactgccagcagagaagcagcagccccttcacatttggcagcggcaccaagctggaaatcaaaggcggaggcggaagtggaggcggaggatctggcggcggaggctctgaagtgaaggtggtggaatctggcggcgacctggttaagcctggcggatctctgaagctgagctgtgtggtgtccggcttcaccttcagcagatacggcatgagctgggtccgacagacccctggcaaaagactggaatgggtcgccacaatttccggcggaggcacctacatctactaccccgatagcgtgaagggcagattcaccatctccagagacaacgccaagaacaccctgtacctccagatgagcagcctgaagtctgaggacaccgccatgtaccactgcaccagggacaactacggcagaaactacgactacggcatggactactggggccagggcacaagcgtgacagtctcttctacgcgtgggtctggaggcggaggcagcggcggaggcgggagcggcgacggtaacgaggagatgggaggaatcactcaaaccccttacaaagtctcaatttcaggaacaactgttatccttacatgtccccagtatcctggcagcgagatcctttggcagcataacgacaagaatatagggggagatgaagacgataagaatatcggatctgacgaggatcacttgagcctgaaagagttctccgagcttgaacaaagcggatattatgtgtgctatccgcgcgggtcaaagccggaagacgctaacttttacctttatctccgagccagagtgtgcgaaaattgcatggaaatggacgttatgtccgttgctacaatagttatcgtagatatatgcatcacgggtggactgcttctgctggtttattattggtccaagaatagaaaggccaaagctaaacccgtgaccagaggcgctggcgcaggcggaaggcaaaggggacaaaacaaagaacggccaccaccagtgccaaatccagattatgagcctattcggaaaggacagagggacctgtactctggcctgaatcagagaagaatccgcgccaagagaagcggatctggcgtgaagcagaccctgaatttcgacctgctgaagctggctggcgacgtggaatccaacccaggcccttctagaggccatatgaccgagtacaagcccacggtgcgcctcgccacccgcgacgacgtccccagggccgtacgcaccctcgccgccgcgttcgccgactaccccgccacgcgccacaccgtcgatccggaccgccacatcgagcgggtcaccgagctgcaagaactcttcctcacgcgcgtcgggctcgacatcggcaaggtgtgggtcgcggacgacggcgccgcggtggcggtctggaccacgccggagagcgtcgaagcgggggcggtgttcgccgagatcggcccgcgcatggccgagttgagcggttcccggctggccgcgcagcaacagatggaaggcctcctggcgccgcaccggcccaaggagcccgcgtggttcctggccaccgtcggcgtctcgcccgaccaccagggcaagggtctgggcagcgccgtcgtgctccccggagtggaggcggccgagcgcgccggggtgcccgccttcctggagacctccgcgccccgcaacctccccttctacgagcggctcggcttcaccgtcaccgccgacgtcgaggtgcccgaaggaccgcgcacctggtgcatgacccgcaagcccggtgcctga

SEQ ID NO: 10153 - DNA, 1989 bp, Artificial Sequence
  Synthetic Polynucloetide
atggccttaccagtgaccgccttgctcctgccgctggccttgctgctccacgccgccaggccgcagatcgtgctgacacagagccctgccatcatgagtgcctctccaggcgaggaagtgaccctgacctgtagcgccaccagcagcgtgtcctacatccactggtttcagcagaggcccggcacaagccctaagctgtggatctacagcaccagcaatctggcctctggcgtgccagtgcggtttagcggatctggctacggcaccagctacagcctgaccatcagcagaatggaagccgaggatgccgccacctactactgccagcagagaagcagcagccccttcacatttggcagcggcaccaagctggaaatcaaaggcggaggcggaagtggaggcggaggatctggcggcggaggctctgaagtgaaggtggtggaatctggcggcgacctggttaagcctggcggatctctgaagctgagctgtgtggtgtccggcttcaccttcagcagatacggcatgagctgggtccgacagacccctggcaaaagactggaatgggtcgccacaatttccggcggaggcacctacatctactaccccgatagcgtgaagggcagattcaccatctccagagacaacgccaagaacaccctgtacctccagatgagcagcctgaagtctgaggacaccgccatgtaccactgcaccagggacaactacggcagaaactacgactacggcatggactactggggccagggcacaagcgtgacagtctcttctacgcgtgggtctggaggcggaggcagcggcggaggcgggagcggcttcaagatccccatcgaggaactggaagatcgggtgttcgtgaactgcaacacctctatcacctgggtggaaggcaccgtgggaacactgctgagcgacatcaccagactggacctcggcaagcggattctggaccctcggggcatctacagatgcaacggcaccgacatctacaaggacaaagaaagcaccgtgcaggtccactacagaatgtgccagtcctgcgtggaactggaccctgctacagtggccggcatcatcgtgaccgatgtgatcgctactctgctgctggctctgggagtgttctgcttcgccggacacgaaacaggcagactgtctggcgctgccgatacacaggccctgctgagaaacgaccaagtgtatcagcccctgcgcgacagagatgatgcccagtattctcacctcggcggcaactgggctagaaacaagcgcgccaagagaagcggatctggcgtgaagcagaccctgaatttcgacctgctgaagctggctggcgacgtggaatccaacccaggcccttctagaggccatatgaccgagtacaagcccacggtgcgcctcgccacccgcgacgacgtccccagggccgtacgcaccctcgccgccgcgttcgccgactaccccgccacgcgccacaccgtcgatccggaccgccacatcgagcgggtcaccgagctgcaagaactcttcctcacgcgcgtcgggctcgacatcggcaaggtgtgggtcgcggacgacggcgccgcggtggcggtctggaccacgccggagagcgtcgaagcgggggcggtgttcgccgagatcggcccgcgcatggccgagttgagcggttcccggctggccgcgcagcaacagatggaaggcctcctggcgccgcaccggcccaaggagcccgcgtggttcctggccaccgtcggcgtctcgcccgaccaccagggcaagggtctgggcagcgccgtcgtgctccccggagtggaggcggccgagcgcgccggggtgcccgccttcctggagacctccgcgccccgcaacctccccttctacgagcggctcggcttcaccgtcaccgccgacgtcgaggtgcccgaaggaccgcgcacctggtgcatgacccgcaagcccggtgcctga

SEQ ID NO: 10154 - DNA, 2019 bp, Artificial Sequence
  Synthetic Polynucloetide
atggccttaccagtgaccgccttgctcctgccgctggccttgctgctccacgccgccaggccgcagatcgtgctgacacagagccctgccatcatgagtgcctctccaggcgaggaagtgaccctgacctgtagcgccaccagcagcgtgtcctacatccactggtttcagcagaggcccggcacaagccctaagctgtggatctacagcaccagcaatctggcctctggcgtgccagtgcggtttagcggatctggctacggcaccagctacagcctgaccatcagcagaatggaagccgaggatgccgccacctactactgccagcagagaagcagcagccccttcacatttggcagcggcaccaagctggaaatcaaaggcggaggcggaagtggaggcggaggatctggcggcggaggctctgaagtgaaggtggtggaatctggcggcgacctggttaagcctggcggatctctgaagctgagctgtgtggtgtccggcttcaccttcagcagatacggcatgagctgggtccgacagacccctggcaaaagactggaatgggtcgccacaatttccggcggaggcacctacatctactaccccgatagcgtgaagggcagattcaccatctccagagacaacgccaagaacaccctgtacctccagatgagcagcctgaagtctgaggacaccgccatgtaccactgcaccagggacaactacggcagaaactacgactacggcatggactactggggccagggcacaagcgtgacagtctcttctacgcgtgggtctggaggcggaggcagcggcggaggcgggagcggccagagcatcaagggcaaccacctggtcaaggtgtacgactaccaagaggacggcagcgtgctgctgacatgtgatgccgaggccaagaacatcacctggtttaaggacggcaagatgatcggcttcctgaccgaggacaagaagaagtggaacctgggcagcaacgctaaggaccccagaggcatgtatcagtgcaagggcagccagaacaagagcaagcccctccaggtgtactaccggatgtgccagaactgcatcgagctgaacgccgctaccatcagcggctttctgttcgccgagatcgtgtccatcttcgtgctggccgtgggcgtgtactttatcgctggacaggatggcgtgcggcagagcagagcttccgataagcaaaccctgctgcctaacgaccagctgtaccagcctctgaaggacagagaggacgaccagtacagccacctccagggcaatcagctgagaagaaaccgcgccaagagaagcggatctggcgtgaagcagaccctgaatttcgacctgctgaagctggctggcgacgtggaatccaacccaggcccttctagaggccatatgaccgagtacaagcccacggtgcgcctcgccacccgcgacgacgtccccagggccgtacgcaccctcgccgccgcgttcgccgactaccccgccacgcgccacaccgtcgatccggaccgccacatcgagcgggtcaccgagctgcaagaactcttcctcacgcgcgtcgggctcgacatcggcaaggtgtgggtcgcggacgacggcgccgcggtggcggtctggaccacgccggagagcgtcgaagcgggggcggtgttcgccgagatcggcccgcgcatggccgagttgagcggttcccggctggccgcgcagcaacagatggaaggcctcctggcgccgcaccggcccaaggagcccgcgtggttcctggccaccgtcggcgtctcgcccgaccaccagggcaagggtctgggcagcgccgtcgtgctccccggagtggaggcggccgagcgcgccggggtgcccgccttcctggagacctccgcgccccgcaacctccccttctacgagcggctcggcttcaccgtcaccgccgacgtcgaggtgcccgaaggaccgcgcacctggtgcatgacccgcaagcccggtgcctga

SEQ ID NO: 10155 - DNA, 1968 bp, Artificial Sequence
  Synthetic Polynucloetide
atggccttaccagtgaccgccttgctcctgccgctggccttgctgctccacgccgccaggccgcagatcgtgctgacacagagccctgccatcatgagtgcctctccaggcgaggaagtgaccctgacctgtagcgccaccagcagcgtgtcctacatccactggtttcagcagaggcccggcacaagccctaagctgtggatctacagcaccagcaatctggcctctggcgtgccagtgcggtttagcggatctggctacggcaccagctacagcctgaccatcagcagaatggaagccgaggatgccgccacctactactgccagcagagaagcagcagccccttcacatttggcagcggcaccaagctggaaatcaaaggcggaggcggaagtggaggcggaggatctggcggcggaggctctgaagtgaaggtggtggaatctggcggcgacctggttaagcctggcggatctctgaagctgagctgtgtggtgtccggcttcaccttcagcagatacggcatgagctgggtccgacagacccctggcaaaagactggaatgggtcgccacaatttccggcggaggcacctacatctactaccccgatagcgtgaagggcagattcaccatctccagagacaacgccaagaacaccctgtacctccagatgagcagcctgaagtctgaggacaccgccatgtaccactgcaccagggacaactacggcagaaactacgactacggcatggactactggggccagggcacaagcgtgacagtctcttctacgcgtgggtctggaggcggaggcagcggcggaggcgggagcggccagagttttgggttgttggaccctaaattgtgctatctgttggacggaatcctgttcatttacggagtgatcctgaccgcattgttcctgcgggttaagttttccagatccgcagacgcacccgcttaccaacaagggcagaaccaactctacaatgaacttaatttggggcggagggaagagtacgacgttctggacaaaaggaggggacgagatcccgagatgggcggaaagcctcagcgaaggaagaatccgcaagaggggctttataacgaactccagaaagataaaatggcagaagcctatagtgagattgggatgaagggagaaaggaggaggggtaaaggtcacgatgggttgtaccaaggattgagcacagccactaaagatacctatgatgcgctccacatgcaggccctgccgccaagacgcgccaagagaagcggatctggcgtgaagcagaccctgaatttcgacctgctgaagctggctggcgacgtggaatccaacccaggcccttctagaggccatatgaccgagtacaagcccacggtgcgcctcgccacccgcgacgacgtccccagggccgtacgcaccctcgccgccgcgttcgccgactaccccgccacgcgccacaccgtcgatccggaccgccacatcgagcgggtcaccgagctgcaagaactcttcctcacgcgcgtcgggctcgacatcggcaaggtgtgggtcgcggacgacggcgccgcggtggcggtctggaccacgccggagagcgtcgaagcgggggcggtgttcgccgagatcggcccgcgcatggccgagttgagcggttcccggctggccgcgcagcaacagatggaaggcctcctggcgccgcaccggcccaaggagcccgcgtggttcctggccaccgtcggcgtctcgcccgaccaccagggcaagggtctgggcagcgccgtcgtgctccccggagtggaggcggccgagcgcgccggggtgcccgccttcctggagacctccgcgccccgcaacctccccttctacgagcggctcggcttcaccgtcaccgccgacgtcgaggtgcccgaaggaccgcgcacctggtgcatgacccgcaagcccggtgcctga

SEQ ID NO: 10156 - DNA, 2268 bp, Artificial Sequence
  Synthetic Polynucloetide
atggccttaccagtgaccgccttgctcctgccgctggccttgctgctccacgccgccaggccggaagtgcagctggttgaatctggcggaggactggttcagcctggcggatctctgagactgtcttgtgccgccagcggcttcagcttcagcgacttttggatgagctgggtccgacaggcccctggcaaaggacttgaatgggtcgccacaatcagccaggccggcagcgagaaggactacgtggactctgtgaagggcagattcaccatcagccgggacaacgccaagaagtccctgtacctccagatgaacagcctgagagccgaggacaccgccgtgtactattgtgcctctggcgtgtacagcttcgactacagaggccagggcaccctggtcacagtctcttctggtaccggcggaggcggatctggcggcggaggtagcggtggcggaggatctgaattccagatcgtgctgacacagagccctgccatcatgagtgcctctccaggcgaggaagtgaccctgacctgtagcgccaccagcagcgtgtcctacatccactggtttcagcagaggcccggcacaagccctaagctgtggatctacagcaccagcaatctggcctctggcgtgccagtgcggtttagcggatctggctacggcaccagctacagcctgaccatcagcagaatggaagccgaggatgccgccacctactactgccagcagagaagcagcagccccttcacatttggcagcggcaccaagctggaaatcaaactcgaggacctgaagaacgtgttcccacctgaggtggccgtgttcgagcctagcgaggccgagatcagccacacccagaaagccaccctcgtgtgcctggctaccggcttctaccccgaccatgtggaactgtcttggtgggtcaacggcaaagaggtgcacagcggcgtgtgtaccgacccccagccactgaaagaacagcccgccctgaacgacagccggtactgcctgagcagcagactgagagtgtccgccaccttctggcagaacccccggaaccacttcagatgccaggtgcagttctacggcctgagcgagaacgacgagtggacccaggacagagccaagcccgtgacccagatcgtgtctgccgaagcctggggcagagccgattgcggctttaccagcgagagctaccagcagggcgtgctgagcgccaccatcctgtacgagatcctgctgggcaaggccaccctgtacgccgtgctggtgtctgccctggtgctgatggctatggtcaagcggaaggacagccggggaagggccaagcgatctggatctggagcaacaaacttctcactactcaaacaagcaggtgacgtggaggagaatcccgggcctactagtatggactggatttggcgcatccttttccttgtcggcgctgctaccggcgcgcattccttcgaagaagtgaaggtggtggaatctggcggcgacctggttaagcctggcggatctctgaagctgagctgtgtggtgtccggcttcaccttcagcagatacggcatgagctgggtccgacagacccctggcaaaagactggaatgggtcgccacaatttccggcggaggcacctacatctactaccccgatagcgtgaagggcagattcaccatctccagagacaacgccaagaacaccctgtacctccagatgagcagcctgaagtctgaggacaccgccatgtaccactgcaccagggacaactacggcagaaactacgactacggcatggactactggggccagggcacaagcgtgacagtctcttctacgcgtatccagaaccctgatcctgccgtgtaccagctgcgggatagcaagagcagcgacaagagcgtgtgtctgttcaccgacttcgacagccagaccaacgtgtcccagagcaaggactccgacgtgtacatcaccgataagtgcgtgctggacatgcggagcatggacttcaagagcaactccgccgtggcctggtccaacaagtccgatttcgcctgcgccaacgccttcaacaacagcattatccccgaggacacattcttcccaagccccgagagcagctgcgacgtgaagctggtggaaaagagcttcgagacagacaccaacctgaacttccagaacctgagcgtgatcggcttcagaatcctgctgctgaaagtggccggctttaacctgctgatgaccctgcggctgtggtccagc

SEQ ID NO: 10157 - DNA, 2280 bp, Artificial Sequence
  Synthetic Polynucloetide
atggccttaccagtgaccgccttgctcctgccgctggccttgctgctccacgccgccaggccggaagtgcagctggttgaatctggcggaggactggttcagcctggcggatctctgagactgtcttgtgccgccagcggcttcagcttcagcgacttttggatgagctgggtccgacaggcccctggcaaaggacttgaatgggtcgccacaatcagccaggccggcagcgagaaggactacgtggactctgtgaagggcagattcaccatcagccgggacaacgccaagaagtccctgtacctccagatgaacagcctgagagccgaggacaccgccgtgtactattgtgcctctggcgtgtacagcttcgactacagaggccagggcaccctggtcacagtctcttctggtaccggcggaggcggatctggcggcggaggtagcggtggcggaggatctgaattccagatcgtgctgacacagagccctgccatcatgagtgcctctccaggcgaggaagtgaccctgacctgtagcgccaccagcagcgtgtcctacatccactggtttcagcagaggcccggcacaagccctaagctgtggatctacagcaccagcaatctggcctctggcgtgccagtgcggtttagcggatctggctacggcaccagctacagcctgaccatcagcagaatggaagccgaggatgccgccacctactactgccagcagagaagcagcagccccttcacatttggcagcggcaccaagctggaaatcaaactcgagatccagaaccctgatcctgccgtgtaccagctgcgggatagcaagagcagcgacaagagcgtgtgtctgttcaccgacttcgacagccagaccaacgtgtcccagagcaaggactccgacgtgtacatcaccgataagtgcgtgctggacatgcggagcatggacttcaagagcaactccgccgtggcctggtccaacaagtccgatttcgcctgcgccaacgccttcaacaacagcattatccccgaggacacattcttcccaagccccgagagcagctgcgacgtgaagctggtggaaaagagcttcgagacagacaccaacctgaacttccagaacctgagcgtgatcggcttcagaatcctgctgctgaaagtggccggctttaacctgctgatgaccctgcggctgtggtccagccgcgccaagagaagcggatctggcgtgaagcagaccctgaatttcgacctgctgaagctggctggcgacgtggaatccaacccaggccctactagtatggactggatttggcgcatccttttccttgtcggcgctgctaccggcgcgcattccttcgaagaagtgaaggtggtggaatctggcggcgacctggttaagcctggcggatctctgaagctgagctgtgtggtgtccggcttcaccttcagcagatacggcatgagctgggtccgacagacccctggcaaaagactggaatgggtcgccacaatttccggcggaggcacctacatctactaccccgatagcgtgaagggcagattcaccatctccagagacaacgccaagaacaccctgtacctccagatgagcagcctgaagtctgaggacaccgccatgtaccactgcaccagggacaactacggcagaaactacgactacggcatggactactggggccagggcacaagcgtgacagtctcttctacgcgtgaggacctgaagaacgtgttcccacctgaggtggccgtgttcgagcctagcgaggccgagatcagccacacccagaaagccaccctcgtgtgcctggctaccggcttctaccccgaccatgtggaactgtcttggtgggtcaacggcaaagaggtgcacagcggcgtgtgtaccgacccccagccactgaaagaacagcccgccctgaacgacagccggtactgcctgagcagcagactgagagtgtccgccaccttctggcagaacccccggaaccacttcagatgccaggtgcagttctacggcctgagcgagaacgacgagtggacccaggacagagccaagcccgtgacccagatcgtgtctgccgaagcctggggcagagccgattgcggctttaccagcgagagctaccagcagggcgtgctgagcgccaccatcctgtacgagatcctgctgggcaaggccaccctgtacgccgtgctggtgtctgccctggtgctgatggctatggtcaagcggaaggacagccgggga

SEQ ID NO: 10158 - DNA, 2856 bp, Artificial Sequence
  Synthetic Polynucloetide
atggccttaccagtgaccgccttgctcctgccgctggccttgctgctccacgccgccaggccggaagtgcagctggttgaatctggcggaggactggttcagcctggcggatctctgagactgtcttgtgccgccagcggcttcagcttcagcgacttttggatgagctgggtccgacaggcccctggcaaaggacttgaatgggtcgccacaatcagccaggccggcagcgagaaggactacgtggactctgtgaagggcagattcaccatcagccgggacaacgccaagaagtccctgtacctccagatgaacagcctgagagccgaggacaccgccgtgtactattgtgcctctggcgtgtacagcttcgactacagaggccagggcaccctggtcacagtctcttctggtaccggcggaggcggatctggcggcggaggtagcggtggcggaggatctgaattccagatcgtgctgacacagagccctgccatcatgagtgcctctccaggcgaggaagtgaccctgacctgtagcgccaccagcagcgtgtcctacatccactggtttcagcagaggcccggcacaagccctaagctgtggatctacagcaccagcaatctggcctctggcgtgccagtgcggtttagcggatctggctacggcaccagctacagcctgaccatcagcagaatggaagccgaggatgccgccacctactactgccagcagagaagcagcagccccttcacatttggcagcggcaccaagctggaaatcaaactcgaggacctgaagaacgtgttcccacctgaggtggccgtgttcgagcctagcgaggccgagatcagccacacccagaaagccaccctcgtgtgcctggctaccggcttctaccccgaccatgtggaactgtcttggtgggtcaacggcaaagaggtgcacagcggcgtgtctaccgacccccagccactgaaagaacagcccgccctgaacgacagccggtactgcctgagcagcagactgagagtgtccgccaccttctggcagaacccccggaaccacttcagatgccaggtgcagttctacggcctgagcgagaacgacgagtggacccaggacagagccaagcccgtgacccagatcgtgtctgccgaagcctggggcagagccgattgcggatcccagagcttcggcctgctggaccccaagctgtgctacctgctggatggcatcctgttcatctacggcgtgatcctgaccgccctgttcctgagagtgaagttcagcagaagcgccgacgcccctgcctaccagcagggacagaaccaactgtacaacgagctgaacctgggcagacgggaagagtacgacgtgctggacaagcggagaggcagggaccctgagatgggcggaaagccccagcggagaaagaacccccaggaaggactgtataacgaactccagaaagacaagatggccgaagcctacagcgagatcggcatgaagggcgagcggagaagaggcaagggccacgatggcctgtaccagggcctgagcaccgccaccaaggacacctatgacgccctgcacatgcaggccctgcctccaagaagggccaagcgatctggatctggagcaacaaacttctcactactcaaacaagcaggtgacgtggaggagaatcccgggcctactagtatggactggatttggcgcatccttttccttgtcggcgctgctaccggcgcgcattccttcgaagaagtgaaggtggtggaatctggcggcgacctggttaagcctggcggatctctgaagctgagctgtgtggtgtccggcttcaccttcagcagatacggcatgagctgggtccgacagacccctggcaaaagactggaatgggtcgccacaatttccggcggaggcacctacatctactaccccgatagcgtgaagggcagattcaccatctccagagacaacgccaagaacaccctgtacctccagatgagcagcctgaagtctgaggacaccgccatgtaccactgcaccagggacaactacggcagaaactacgactacggcatggactactggggccagggcacaagcgtgacagtctcttctacgcgtatccagaaccctgatcctgccgtgtaccagctgcgggatagcaagagcagcgacaagagcgtgtgtctgttcaccgacttcgacagccagaccaacgtgtcccagagcaaggactccgacgtgtacatcaccgataagaccgtgctggacatgcggagcatggacttcaagagcaactccgccgtggcctggtccaacaagtccgatttcgcctgcgccaacgccttcaacaacagcattatccccgaggacacattcttcccaagccccgagagcagctgcggtacccagagttttgggttgttggaccctaaattgtgctatctgttggacggaatcctgttcatttacggagtgatcctgaccgcattgttcctgcgggttaagttttccagatccgcagacgcacccgcttaccaacaagggcagaaccaactctacaatgaacttaatttggggcggagggaagagtacgacgttctggacaaaaggaggggacgagatcccgagatgggcggaaagcctcagcgaaggaagaatccgcaagaggggctttataacgaactccagaaagataaaatggcagaagcctatagtgagattgggatgaagggagaaaggaggaggggtaaaggtcacgatgggttgtaccaaggattgagcacagccactaaagatacctatgatgcgctccacatgcaggccctgccgccaaga

SEQ ID NO: 10159 - DNA, 2346 bp, Artificial Sequence
  Synthetic Polynucloetide
atggccttaccagtgaccgccttgctcctgccgctggccttgctgctccacgccgccaggccggaagtgcagctggttgaatctggcggaggactggttcagcctggcggatctctgagactgtcttgtgccgccagcggcttcagcttcagcgacttttggatgagctgggtccgacaggcccctggcaaaggacttgaatgggtcgccacaatcagccaggccggcagcgagaaggactacgtggactctgtgaagggcagattcaccatcagccgggacaacgccaagaagtccctgtacctccagatgaacagcctgagagccgaggacaccgccgtgtactattgtgcctctggcgtgtacagcttcgactacagaggccagggcaccctggtcacagtctcttctggtaccggcggaggcggatctggcggcggaggtagcggtggcggaggatctgaattccagatcgtgctgacacagagccctgccatcatgagtgcctctccaggcgaggaagtgaccctgacctgtagcgccaccagcagcgtgtcctacatccactggtttcagcagaggcccggcacaagccctaagctgtggatctacagcaccagcaatctggcctctggcgtgccagtgcggtttagcggatctggctacggcaccagctacagcctgaccatcagcagaatggaagccgaggatgccgccacctactactgccagcagagaagcagcagccccttcacatttggcagcggcaccaagctggaaatcaaactcgagggacagcctaaggccaatcctaccgtgacactgttccctccaagcagcgaagaactccaggccaacaaggccacacttgtgtgcctgatctccgacttctaccctggggctgtgacagtggcttggaaggccgatggatctcctgtgaaagccggcgtggaaaccaccaagccatccaagcagagcaacaacaaatacgccgccagctcctacctgagcctgacacctgagcagtggaagtcccacagatcctacagctgccaagtgacccacgaaggcagcaccgtggaaaagacagtggcccctacagagtgcagccccatcaagaccgatgtgattacaatggaccccaaggacaactgctccaaggacgccaacgataccctgctgctccagctgaccaacaccagcgcctactacatgtacttgttgctgctgctgaagtccgtggtgtacttcgccatcatcacatgctgcctgctgcggagaaccgccttctgctgcaacggcgagaagtctagggccaagcgatctggatctggagcaacaaacttctcactactcaaacaagcaggtgacgtggaggagaatcccgggcctactagtatggactggatttggcgcatccttttccttgtcggcgctgctaccggcgcgcattccttcgaagaagtgaaggtggtggaatctggcggcgacctggttaagcctggcggatctctgaagctgagctgtgtggtgtccggcttcaccttcagcagatacggcatgagctgggtccgacagacccctggcaaaagactggaatgggtcgccacaatttccggcggaggcacctacatctactaccccgatagcgtgaagggcagattcaccatctccagagacaacgccaagaacaccctgtacctccagatgagcagcctgaagtctgaggacaccgccatgtaccactgcaccagggacaactacggcagaaactacgactacggcatggactactggggccagggcacaagcgtgacagtctcttctacgcgtgcctctacaaagggaccctccgtgtttcctctggctcccagcagcaagtctacaagcggaggaacagccgctctgggctgcctggtcaaggattactttcccgagcctgtgaccgtgtcctggaatagcggagcactgacaagcggcgtgcacacctttccagccgtgctgcaaagcagcggcctgtactctctgagcagcgtggtcacagtgcctagctctagcctgggcacccagacctacatctgcaatgtgaaccacaagcctagcaacaccaaggtggacaagagagtggaacccaagagctgtgaagtgaaaaccgactccaccgaccacgtgaagcccaaagagacagagaacaccaagcagcccagcaagagctgccacaagcccaaggccatcgtgcacaccgagaaagtgaacatgatgagcctgaccgtgctgggcctgcggatgctgttcgccaaaaccgtggccgtgaacttcctgctgaccgccaagctgttcttcctc

SEQ ID NO: 10160 - DNA, 2289 bp, Artificial Sequence
  Synthetic Polynucloetide
atggccttaccagtgaccgccttgctcctgccgctggccttgctgctccacgccgccaggccggaagtgcagctggttgaatctggcggaggactggttcagcctggcggatctctgagactgtcttgtgccgccagcggcttcagcttcagcgacttttggatgagctgggtccgacaggcccctggcaaaggacttgaatgggtcgccacaatcagccaggccggcagcgagaaggactacgtggactctgtgaagggcagattcaccatcagccgggacaacgccaagaagtccctgtacctccagatgaacagcctgagagccgaggacaccgccgtgtactattgtgcctctggcgtgtacagcttcgactacagaggccagggcaccctggtcacagtctcttctggtaccggcggaggcggatctggcggcggaggtagcggtggcggaggatctgaattccagatcgtgctgacacagagccctgccatcatgagtgcctctccaggcgaggaagtgaccctgacctgtagcgccaccagcagcgtgtcctacatccactggtttcagcagaggcccggcacaagccctaagctgtggatctacagcaccagcaatctggcctctggcgtgccagtgcggtttagcggatctggctacggcaccagctacagcctgaccatcagcagaatggaagccgaggatgccgccacctactactgccagcagagaagcagcagccccttcacatttggcagcggcaccaagctggaaatcaaactcgagggacagcctaaggccaatcctaccgtgacactgttccctccaagcagcgaagaactccaggccaacaaggccacacttgtgtgcctgatctccgacttctaccctggggctgtgacagtggcttggaaggccgatggatctcctgtgaaagccggcgtggaaaccaccaagccatccaagcagagcaacaacaaatacgccgccagctcctacctgagcctgacacctgagcagtggaagtcccacagatcctacagctgccaagtgacccacgaaggcagcaccgtggaaaagacagtggcccctacagagtgcagcggcagagccgattgcggctttaccagcgagagctaccagcagggcgtgctgagcgccaccatcctgtacgagatcctgctgggcaaggccaccctgtacgccgtgctggtgtctgccctggtgctgatggctatggtcaagcggaaggacagccggggacgcgccaagagaagcggatctggcgtgaagcagaccctgaatttcgacctgctgaagctggctggcgacgtggaatccaacccaggccctactagtatggactggatttggcgcatccttttccttgtcggcgctgctaccggcgcgcattccttcgaagaagtgaaggtggtggaatctggcggcgacctggttaagcctggcggatctctgaagctgagctgtgtggtgtccggcttcaccttcagcagatacggcatgagctgggtccgacagacccctggcaaaagactggaatgggtcgccacaatttccggcggaggcacctacatctactaccccgatagcgtgaagggcagattcaccatctccagagacaacgccaagaacaccctgtacctccagatgagcagcctgaagtctgaggacaccgccatgtaccactgcaccagggacaactacggcagaaactacgactacggcatggactactggggccagggcacaagcgtgacagtctcttctacgcgtgcctctacaaagggaccctccgtgtttcctctggctcccagcagcaagtctacaagcggaggaacagccgctctgggctgcctggtcaaggattactttcccgagcctgtgaccgtgtcctggaatagcggagcactgacaagcggcgtgcacacctttccagccgtgctgcaaagcagcggcctgtactctctgagcagcgtggtcacagtgcctagctctagcctgggcacccagacctacatctgcaatgtgaaccacaagcctagcaacaccaaggtggacaagagagtggaacccaagagctgtatccccgaggacacattcttcccaagccccgagagcagctgcgacgtgaagctggtggaaaagagcttcgagacagacaccaacctgaacttccagaacctgagcgtgatcggcttcagaatcctgctgctgaaagtggccggctttaacctgctgatgaccctgcggctgtggtccagc

SEQ ID NO: 10161 - DNA, 2691 bp, Artificial Sequence
  Synthetic Polynucloetide
atggccttaccagtgaccgccttgctcctgccgctggccttgctgctccacgccgccaggccggaagtgcagctggttgaatctggcggaggactggttcagcctggcggatctctgagactgtcttgtgccgccagcggcttcagcttcagcgacttttggatgagctgggtccgacaggcccctggcaaaggacttgaatgggtcgccacaatcagccaggccggcagcgagaaggactacgtggactctgtgaagggcagattcaccatcagccgggacaacgccaagaagtccctgtacctccagatgaacagcctgagagccgaggacaccgccgtgtactattgtgcctctggcgtgtacagcttcgactacagaggccagggcaccctggtcacagtctcttctggtaccggcggaggcggatctggcggcggaggtagcggtggcggaggatctgaattccagatcgtgctgacacagagccctgccatcatgagtgcctctccaggcgaggaagtgaccctgacctgtagcgccaccagcagcgtgtcctacatccactggtttcagcagaggcccggcacaagccctaagctgtggatctacagcaccagcaatctggcctctggcgtgccagtgcggtttagcggatctggctacggcaccagctacagcctgaccatcagcagaatggaagccgaggatgccgccacctactactgccagcagagaagcagcagccccttcacatttggcagcggcaccaagctggaaatcaaactcgagatccagaaccctgatcctgccgtgtaccagctgcgggatagcaagagcagcgacaagagcgtgtgtctgttcaccgacttcgacagccagaccaacgtgtcccagagcaaggactccgacgtgtacatcaccgataagtgcgtgctggacatgcggagcatggacttcaagagcaactccgccgtggcctggtccaacaagtccgatttcgcctgcgccaacgccttcaacaacagcattatccccgaggacacattcttcccaagccccgagagcagctgcgacgtgaagctggtggaaaagagcttcgagacagacaccaacctgaacttccagaacctgagcgtgatcggcttcagaatcctgctgctgaaagtggccggctttaacctgctgatgaccctgcggctgtggtccagccgcgccaagagaagcggatctggcgtgaagcagaccctgaatttcgacctgctgaagctggctggcgacgtggaatccaacccaggccctactagtatggactggatttggcgcatccttttccttgtcggcgctgctaccggcgcgcattccgggccccagctccagctgcaagagtctggacctggcctggtcaagcctagcgagacactgagcctgacctgtaccgtgtccggcgatagcatcagcagcggcgattactactggggctggatcagacagcctcctggcaaaggactggaatggatcggccacatctactacagcggcgtgacctactacaaccccagcctgaagtccagagtgaccatcagcgtggacaccagccggaaccagttctccctgaagctgtctagcgtgacagccgccgataccgccgtgtactactgcaccagagaggacagcagcaactggcggagtagaggccagggaacactggtcacagttagctctggatccggcggaggcggaagtggaggcggaggatctggcggcggaggctctttcgaagaagtgaaggtggtggaatctggcggcgacctggttaagcctggcggatctctgaagctgagctgtgtggtgtccggcttcaccttcagcagatacggcatgagctgggtccgacagacccctggcaaaagactggaatgggtcgccacaatttccggcggaggcacctacatctactaccccgatagcgtgaagggcagattcaccatctccagagacaacgccaagaacaccctgtacctccagatgagcagcctgaagtctgaggacaccgccatgtaccactgcaccagggacaactacggcagaaactacgactacggcatggactactggggccagggcacaagcgtgacagtctcttctacgcgtgaggacctgaagaacgtgttcccacctgaggtggccgtgttcgagcctagcgaggccgagatcagccacacccagaaagccaccctcgtgtgcctggctaccggcttctaccccgaccatgtggaactgtcttggtgggtcaacggcaaagaggtgcacagcggcgtgtgtaccgacccccagccactgaaagaacagcccgccctgaacgacagccggtactgcctgagcagcagactgagagtgtccgccaccttctggcagaacccccggaaccacttcagatgccaggtgcagttctacggcctgagcgagaacgacgagtggacccaggacagagccaagcccgtgacccagatcgtgtctgccgaagcctggggcagagccgattgcggctttaccagcgagagctaccagcagggcgtgctgagcgccaccatcctgtacgagatcctgctgggcaaggccaccctgtacgccgtgctggtgtctgccctggtgctgatggctatggtcaagcggaaggacagccgggga

SEQ ID NO: 10162 - DNA, 3267 bp, Artificial Sequence
  Synthetic Polynucloetide
atggccttaccagtgaccgccttgctcctgccgctggccttgctgctccacgccgccaggccggaagtgcagctggttgaatctggcggaggactggttcagcctggcggatctctgagactgtcttgtgccgccagcggcttcagcttcagcgacttttggatgagctgggtccgacaggcccctggcaaaggacttgaatgggtcgccacaatcagccaggccggcagcgagaaggactacgtggactctgtgaagggcagattcaccatcagccgggacaacgccaagaagtccctgtacctccagatgaacagcctgagagccgaggacaccgccgtgtactattgtgcctctggcgtgtacagcttcgactacagaggccagggcaccctggtcacagtctcttctggtaccggcggaggcggatctggcggcggaggtagcggtggcggaggatctgaattccagatcgtgctgacacagagccctgccatcatgagtgcctctccaggcgaggaagtgaccctgacctgtagcgccaccagcagcgtgtcctacatccactggtttcagcagaggcccggcacaagccctaagctgtggatctacagcaccagcaatctggcctctggcgtgccagtgcggtttagcggatctggctacggcaccagctacagcctgaccatcagcagaatggaagccgaggatgccgccacctactactgccagcagagaagcagcagccccttcacatttggcagcggcaccaagctggaaatcaaactcgaggacctgaagaacgtgttcccacctgaggtggccgtgttcgagcctagcgaggccgagatcagccacacccagaaagccaccctcgtgtgcctggctaccggcttctaccccgaccatgtggaactgtcttggtgggtcaacggcaaagaggtgcacagcggcgtgtctaccgacccccagccactgaaagaacagcccgccctgaacgacagccggtactgcctgagcagcagactgagagtgtccgccaccttctggcagaacccccggaaccacttcagatgccaggtgcagttctacggcctgagcgagaacgacgagtggacccaggacagagccaagcccgtgacccagatcgtgtctgccgaagcctggggcagagccgattgcggatcccagagcttcggcctgctggaccccaagctgtgctacctgctggatggcatcctgttcatctacggcgtgatcctgaccgccctgttcctgagagtgaagttcagcagaagcgccgacgcccctgcctaccagcagggacagaaccaactgtacaacgagctgaacctgggcagacgggaagagtacgacgtgctggacaagcggagaggcagggaccctgagatgggcggaaagccccagcggagaaagaacccccaggaaggactgtataacgaactccagaaagacaagatggccgaagcctacagcgagatcggcatgaagggcgagcggagaagaggcaagggccacgatggcctgtaccagggcctgagcaccgccaccaaggacacctatgacgccctgcacatgcaggccctgcctccaagaagggccaagcgatctggatctggagcaacaaacttctcactactcaaacaagcaggtgacgtggaggagaatcccgggcctactagtatggactggatttggcgcatccttttccttgtcggcgctgctaccggcgcgcattccgggccccagctccagctgcaagagtctggacctggcctggtcaagcctagcgagacactgagcctgacctgtaccgtgtccggcgatagcatcagcagcggcgattactactggggctggatcagacagcctcctggcaaaggactggaatggatcggccacatctactacagcggcgtgacctactacaaccccagcctgaagtccagagtgaccatcagcgtggacaccagccggaaccagttctccctgaagctgtctagcgtgacagccgccgataccgccgtgtactactgcaccagagaggacagcagcaactggcggagtagaggccagggaacactggtcacagttagctctggatccggcggaggcggaagtggaggcggaggatctggcggcggaggctctttcgaagaagtgaaggtggtggaatctggcggcgacctggttaagcctggcggatctctgaagctgagctgtgtggtgtccggcttcaccttcagcagatacggcatgagctgggtccgacagacccctggcaaaagactggaatgggtcgccacaatttccggcggaggcacctacatctactaccccgatagcgtgaagggcagattcaccatctccagagacaacgccaagaacaccctgtacctccagatgagcagcctgaagtctgaggacaccgccatgtaccactgcaccagggacaactacggcagaaactacgactacggcatggactactggggccagggcacaagcgtgacagtctcttctacgcgtatccagaaccctgatcctgccgtgtaccagctgcgggatagcaagagcagcgacaagagcgtgtgtctgttcaccgacttcgacagccagaccaacgtgtcccagagcaaggactccgacgtgtacatcaccgataagaccgtgctggacatgcggagcatggacttcaagagcaactccgccgtggcctggtccaacaagtccgatttcgcctgcgccaacgccttcaacaacagcattatccccgaggacacattcttcccaagccccgagagcagctgcggtacccagagttttgggttgttggaccctaaattgtgctatctgttggacggaatcctgttcatttacggagtgatcctgaccgcattgttcctgcgggttaagttttccagatccgcagacgcacccgcttaccaacaagggcagaaccaactctacaatgaacttaatttggggcggagggaagagtacgacgttctggacaaaaggaggggacgagatcccgagatgggcggaaagcctcagcgaaggaagaatccgcaagaggggctttataacgaactccagaaagataaaatggcagaagcctatagtgagattgggatgaagggagaaaggaggaggggtaaaggtcacgatgggttgtaccaaggattgagcacagccactaaagatacctatgatgcgctccacatgcaggccctgccgccaaga

SEQ ID NO: 10163 - DNA, 2757 bp, Artificial Sequence
  Synthetic Polynucloetide
atggccttaccagtgaccgccttgctcctgccgctggccttgctgctccacgccgccaggccggaagtgcagctggttgaatctggcggaggactggttcagcctggcggatctctgagactgtcttgtgccgccagcggcttcagcttcagcgacttttggatgagctgggtccgacaggcccctggcaaaggacttgaatgggtcgccacaatcagccaggccggcagcgagaaggactacgtggactctgtgaagggcagattcaccatcagccgggacaacgccaagaagtccctgtacctccagatgaacagcctgagagccgaggacaccgccgtgtactattgtgcctctggcgtgtacagcttcgactacagaggccagggcaccctggtcacagtctcttctggtaccggcggaggcggatctggcggcggaggtagcggtggcggaggatctgaattccagatcgtgctgacacagagccctgccatcatgagtgcctctccaggcgaggaagtgaccctgacctgtagcgccaccagcagcgtgtcctacatccactggtttcagcagaggcccggcacaagccctaagctgtggatctacagcaccagcaatctggcctctggcgtgccagtgcggtttagcggatctggctacggcaccagctacagcctgaccatcagcagaatggaagccgaggatgccgccacctactactgccagcagagaagcagcagccccttcacatttggcagcggcaccaagctggaaatcaaactcgagggacagcctaaggccaatcctaccgtgacactgttccctccaagcagcgaagaactccaggccaacaaggccacacttgtgtgcctgatctccgacttctaccctggggctgtgacagtggcttggaaggccgatggatctcctgtgaaagccggcgtggaaaccaccaagccatccaagcagagcaacaacaaatacgccgccagctcctacctgagcctgacacctgagcagtggaagtcccacagatcctacagctgccaagtgacccacgaaggcagcaccgtggaaaagacagtggcccctacagagtgcagccccatcaagaccgatgtgattacaatggaccccaaggacaactgctccaaggacgccaacgataccctgctgctccagctgaccaacaccagcgcctactacatgtacttgttgctgctgctgaagtccgtggtgtacttcgccatcatcacatgctgcctgctgcggagaaccgccttctgctgcaacggcgagaagtctagggccaagcgatctggatctggagcaacaaacttctcactactcaaacaagcaggtgacgtggaggagaatcccgggcctactagtatggactggatttggcgcatccttttccttgtcggcgctgctaccggcgcgcattccgggccccagctccagctgcaagagtctggacctggcctggtcaagcctagcgagacactgagcctgacctgtaccgtgtccggcgatagcatcagcagcggcgattactactggggctggatcagacagcctcctggcaaaggactggaatggatcggccacatctactacagcggcgtgacctactacaaccccagcctgaagtccagagtgaccatcagcgtggacaccagccggaaccagttctccctgaagctgtctagcgtgacagccgccgataccgccgtgtactactgcaccagagaggacagcagcaactggcggagtagaggccagggaacactggtcacagttagctctggatccggcggaggcggaagtggaggcggaggatctggcggcggaggctctttcgaagaagtgaaggtggtggaatctggcggcgacctggttaagcctggcggatctctgaagctgagctgtgtggtgtccggcttcaccttcagcagatacggcatgagctgggtccgacagacccctggcaaaagactggaatgggtcgccacaatttccggcggaggcacctacatctactaccccgatagcgtgaagggcagattcaccatctccagagacaacgccaagaacaccctgtacctccagatgagcagcctgaagtctgaggacaccgccatgtaccactgcaccagggacaactacggcagaaactacgactacggcatggactactggggccagggcacaagcgtgacagtctcttctacgcgtgcctctacaaagggaccctccgtgtttcctctggctcccagcagcaagtctacaagcggaggaacagccgctctgggctgcctggtcaaggattactttcccgagcctgtgaccgtgtcctggaatagcggagcactgacaagcggcgtgcacacctttccagccgtgctgcaaagcagcggcctgtactctctgagcagcgtggtcacagtgcctagctctagcctgggcacccagacctacatctgcaatgtgaaccacaagcctagcaacaccaaggtggacaagagagtggaacccaagagctgtgaagtgaaaaccgactccaccgaccacgtgaagcccaaagagacagagaacaccaagcagcccagcaagagctgccacaagcccaaggccatcgtgcacaccgagaaagtgaacatgatgagcctgaccgtgctgggcctgcggatgctgttcgccaaaaccgtggccgtgaacttcctgctgaccgccaagctgttcttcctc

SEQ ID NO: 10164 - DNA, 2700 bp, Artificial Sequence
  Synthetic Polynucloetide
atggccttaccagtgaccgccttgctcctgccgctggccttgctgctccacgccgccaggccggaagtgcagctggttgaatctggcggaggactggttcagcctggcggatctctgagactgtcttgtgccgccagcggcttcagcttcagcgacttttggatgagctgggtccgacaggcccctggcaaaggacttgaatgggtcgccacaatcagccaggccggcagcgagaaggactacgtggactctgtgaagggcagattcaccatcagccgggacaacgccaagaagtccctgtacctccagatgaacagcctgagagccgaggacaccgccgtgtactattgtgcctctggcgtgtacagcttcgactacagaggccagggcaccctggtcacagtctcttctggtaccggcggaggcggatctggcggcggaggtagcggtggcggaggatctgaattccagatcgtgctgacacagagccctgccatcatgagtgcctctccaggcgaggaagtgaccctgacctgtagcgccaccagcagcgtgtcctacatccactggtttcagcagaggcccggcacaagccctaagctgtggatctacagcaccagcaatctggcctctggcgtgccagtgcggtttagcggatctggctacggcaccagctacagcctgaccatcagcagaatggaagccgaggatgccgccacctactactgccagcagagaagcagcagccccttcacatttggcagcggcaccaagctggaaatcaaactcgagggacagcctaaggccaatcctaccgtgacactgttccctccaagcagcgaagaactccaggccaacaaggccacacttgtgtgcctgatctccgacttctaccctggggctgtgacagtggcttggaaggccgatggatctcctgtgaaagccggcgtggaaaccaccaagccatccaagcagagcaacaacaaatacgccgccagctcctacctgagcctgacacctgagcagtggaagtcccacagatcctacagctgccaagtgacccacgaaggcagcaccgtggaaaagacagtggcccctacagagtgcagcggcagagccgattgcggctttaccagcgagagctaccagcagggcgtgctgagcgccaccatcctgtacgagatcctgctgggcaaggccaccctgtacgccgtgctggtgtctgccctggtgctgatggctatggtcaagcggaaggacagccggggacgcgccaagagaagcggatctggcgtgaagcagaccctgaatttcgacctgctgaagctggctggcgacgtggaatccaacccaggccctactagtatggactggatttggcgcatccttttccttgtcggcgctgctaccggcgcgcattccgggccccagctccagctgcaagagtctggacctggcctggtcaagcctagcgagacactgagcctgacctgtaccgtgtccggcgatagcatcagcagcggcgattactactggggctggatcagacagcctcctggcaaaggactggaatggatcggccacatctactacagcggcgtgacctactacaaccccagcctgaagtccagagtgaccatcagcgtggacaccagccggaaccagttctccctgaagctgtctagcgtgacagccgccgataccgccgtgtactactgcaccagagaggacagcagcaactggcggagtagaggccagggaacactggtcacagttagctctggatccggcggaggcggaagtggaggcggaggatctggcggcggaggctctttcgaagaagtgaaggtggtggaatctggcggcgacctggttaagcctggcggatctctgaagctgagctgtgtggtgtccggcttcaccttcagcagatacggcatgagctgggtccgacagacccctggcaaaagactggaatgggtcgccacaatttccggcggaggcacctacatctactaccccgatagcgtgaagggcagattcaccatctccagagacaacgccaagaacaccctgtacctccagatgagcagcctgaagtctgaggacaccgccatgtaccactgcaccagggacaactacggcagaaactacgactacggcatggactactggggccagggcacaagcgtgacagtctcttctacgcgtgcctctacaaagggaccctccgtgtttcctctggctcccagcagcaagtctacaagcggaggaacagccgctctgggctgcctggtcaaggattactttcccgagcctgtgaccgtgtcctggaatagcggagcactgacaagcggcgtgcacacctttccagccgtgctgcaaagcagcggcctgtactctctgagcagcgtggtcacagtgcctagctctagcctgggcacccagacctacatctgcaatgtgaaccacaagcctagcaacaccaaggtggacaagagagtggaacccaagagctgtatccccgaggacacattcttcccaagccccgagagcagctgcgacgtgaagctggtggaaaagagcttcgagacagacaccaacctgaacttccagaacctgagcgtgatcggcttcagaatcctgctgctgaaagtggccggctttaacctgctgatgaccctgcggctgtggtccagc

SEQ ID NO: 10165 - DNA, 2271 bp, Artificial Sequence
  Synthetic Polynucloetide
atggccttaccagtgaccgccttgctcctgccgctggccttgctgctccacgccgccaggccggaagtgcaggttttggagtctggcggaggactggttcagcctggcggatctctgagactgtcttgtgccgccagcggcttcaccttcagcaactttgccatgagctgggtccgacaggcccctggcaaaggacttgaatgggtgtccacaatcagcggcagcgccggcacaacagattacgccgattctgtgaagggcagattcaccatcagccgggacaacagcaagaaaaccctgtacctccagatgaacagcctgcgcgtggaagataccgccgtgtactactgtgccgatggcagaggccccttcttcgattatcgcggccagggcacactggtcaccgtttcttctggtaccggcggaggcggatctggcggcggaggtagcggtggcggaggatctgaattccagatcgtgctgacacagagccctgccatcatgagtgcctctccaggcgaggaagtgaccctgacctgtagcgccaccagcagcgtgtcctacatccactggtttcagcagaggcccggcacaagccctaagctgtggatctacagcaccagcaatctggcctctggcgtgccagtgcggtttagcggatctggctacggcaccagctacagcctgaccatcagcagaatggaagccgaggatgccgccacctactactgccagcagagaagcagcagccccttcacatttggcagcggcaccaagctggaaatcaaactcgaggacctgaagaacgtgttcccacctgaggtggccgtgttcgagcctagcgaggccgagatcagccacacccagaaagccaccctcgtgtgcctggctaccggcttctaccccgaccatgtggaactgtcttggtgggtcaacggcaaagaggtgcacagcggcgtgtgtaccgacccccagccactgaaagaacagcccgccctgaacgacagccggtactgcctgagcagcagactgagagtgtccgccaccttctggcagaacccccggaaccacttcagatgccaggtgcagttctacggcctgagcgagaacgacgagtggacccaggacagagccaagcccgtgacccagatcgtgtctgccgaagcctggggcagagccgattgcggctttaccagcgagagctaccagcagggcgtgctgagcgccaccatcctgtacgagatcctgctgggcaaggccaccctgtacgccgtgctggtgtctgccctggtgctgatggctatggtcaagcggaaggacagccggggaagggccaagcgatctggatctggagcaacaaacttctcactactcaaacaagcaggtgacgtggaggagaatcccgggcctactagtatggactggatttggcgcatccttttccttgtcggcgctgctaccggcgcgcattccttcgaagaagtgaaggtggtggaatctggcggcgacctggttaagcctggcggatctctgaagctgagctgtgtggtgtccggcttcaccttcagcagatacggcatgagctgggtccgacagacccctggcaaaagactggaatgggtcgccacaatttccggcggaggcacctacatctactaccccgatagcgtgaagggcagattcaccatctccagagacaacgccaagaacaccctgtacctccagatgagcagcctgaagtctgaggacaccgccatgtaccactgcaccagggacaactacggcagaaactacgactacggcatggactactggggccagggcacaagcgtgacagtctcttctacgcgtatccagaaccctgatcctgccgtgtaccagctgcgggatagcaagagcagcgacaagagcgtgtgtctgttcaccgacttcgacagccagaccaacgtgtcccagagcaaggactccgacgtgtacatcaccgataagtgcgtgctggacatgcggagcatggacttcaagagcaactccgccgtggcctggtccaacaagtccgatttcgcctgcgccaacgccttcaacaacagcattatccccgaggacacattcttcccaagccccgagagcagctgcgacgtgaagctggtggaaaagagcttcgagacagacaccaacctgaacttccagaacctgagcgtgatcggcttcagaatcctgctgctgaaagtggccggctttaacctgctgatgaccctgcggctgtggtccagc

SEQ ID NO: 10166 - DNA, 2274 bp, Artificial Sequence
  Synthetic Polynucloetide
atggccttaccagtgaccgccttgctcctgccgctggccttgctgctccacgccgccaggccgcagatcgtgctgacacagagccctgccatcatgagtgcctctccaggcgaggaagtgaccctgacctgtagcgccaccagcagcgtgtcctacatccactggtttcagcagaggcccggcacaagccctaagctgtggatctacagcaccagcaatctggcctctggcgtgccagtgcggtttagcggatctggctacggcaccagctacagcctgaccatcagcagaatggaagccgaggatgccgccacctactactgccagcagagaagcagcagccccttcacatttggcagcggcaccaagctggaaatcaaactcgaggacctgaagaacgtgttcccacctgaggtggccgtgttcgagcctagcgaggccgagatcagccacacccagaaagccaccctcgtgtgcctggctaccggcttctaccccgaccatgtggaactgtcttggtgggtcaacggcaaagaggtgcacagcggcgtgtgtaccgacccccagccactgaaagaacagcccgccctgaacgacagccggtactgcctgagcagcagactgagagtgtccgccaccttctggcagaacccccggaaccacttcagatgccaggtgcagttctacggcctgagcgagaacgacgagtggacccaggacagagccaagcccgtgacccagatcgtgtctgccgaagcctggggcagagccgattgcggctttaccagcgagagctaccagcagggcgtgctgagcgccaccatcctgtacgagatcctgctgggcaaggccaccctgtacgccgtgctggtgtctgccctggtgctgatggctatggtcaagcggaaggacagccggggaagggccaagcgatctggatctggagcaacaaacttctcactactcaaacaagcaggtgacgtggaggagaatcccgggcctactagtatggactggatttggcgcatccttttccttgtcggcgctgctaccggcgcccattccgggcccgaagtgcagctggttgaatctggcggaggactggttcaggctggcggatctctgagactgtcttgtgccgccagcggcagaacctttagcatgggctggtttagacaggcccctggcaaagagagagagttcgtcgccgccatcacatactctggcggcagcccttactacgccgactctgtgaagggcagattcaccatcagccgggacaacgccaagaacaccgtgtacctccagatgaacagcctgaagcctgaggacaccgccgtgtactactgcgccgccaatccaacatacggcagcgactggaacgccgagaattggggccagggaacccaagtgacagtgtctagcggatccggcggcggaggatctggcggaggcggatctgggggcggaggctctttcgaagaagtgaaggtggtggaatctggcggcgacctggttaagcctggcggatctctgaagctgagctgtgtggtgtccggcttcaccttcagcagatacggcatgagctgggtccgacagacccctggcaaaagactggaatgggtcgccacaatttccggcggaggcacctacatctactaccccgatagcgtgaagggcagattcaccatctccagagacaacgccaagaacaccctgtacctccagatgagcagcctgaagtctgaggacaccgccatgtaccactgcaccagggacaactacggcagaaactacgactacggcatggactactggggccagggcacaagcgtgacagtctcttctacgcgtatccagaaccctgatcctgccgtgtaccagctgcgggatagcaagagcagcgacaagagcgtgtgtctgttcaccgacttcgacagccagaccaacgtgtcccagagcaaggactccgacgtgtacatcaccgataagtgcgtgctggacatgcggagcatggacttcaagagcaactccgccgtggcctggtccaacaagtccgatttcgcctgcgccaacgccttcaacaacagcattatccccgaggacacattcttcccaagccccgagagcagctgcgacgtgaagctggtggaaaagagcttcgagacagacaccaacctgaacttccagaacctgagcgtgatcggcttcagaatcctgctgctgaaagtggccggctttaacctgctgatgaccctgcggctgtggtccagc

SEQ ID NO: 10167 - DNA, 2655 bp, Artificial Sequence
  Synthetic Polynucloetide
atggccttaccagtgaccgccttgctcctgccgctggccttgctgctccacgccgccaggccgcagatcgtgctgacacagagccctgccatcatgagtgcctctccaggcgaggaagtgaccctgacctgtagcgccaccagcagcgtgtcctacatccactggtttcagcagaggcccggcacaagccctaagctgtggatctacagcaccagcaatctggcctctggcgtgccagtgcggtttagcggatctggctacggcaccagctacagcctgaccatcagcagaatggaagccgaggatgccgccacctactactgccagcagagaagcagcagccccttcacatttggcagcggcaccaagctggaaatcaaactcgaggacctgaagaacgtgttcccacctgaggtggccgtgttcgagcctagcgaggccgagatcagccacacccagaaagccaccctcgtgtgcctggctaccggcttctaccccgaccatgtggaactgtcttggtgggtcaacggcaaagaggtgcacagcggcgtgtgtaccgacccccagccactgaaagaacagcccgccctgaacgacagccggtactgcctgagcagcagactgagagtgtccgccaccttctggcagaacccccggaaccacttcagatgccaggtgcagttctacggcctgagcgagaacgacgagtggacccaggacagagccaagcccgtgacccagatcgtgtctgccgaagcctggggcagagccgattgcggctttaccagcgagagctaccagcagggcgtgctgagcgccaccatcctgtacgagatcctgctgggcaaggccaccctgtacgccgtgctggtgtctgccctggtgctgatggctatggtcaagcggaaggacagccggggaagggccaagcgatctggatctggagcaacaaacttctcactactcaaacaagcaggtgacgtggaggagaatcccgggcctactagtatggactggatttggcgcatccttttccttgtcggcgctgctaccggcgcccattcccaactgcaactgcaagagtctggccctggcctggtcaagccttctgaaaccctgagcctgacctgtaccgtgtccggcggctctatcagcagcggcgattactactggggctggatcagacagcctccaggcaagggactcgaatggatcggcagcatcagctacagcggctccacctactacaacccaagcctgaagtccagagtgaccatcagcgtggacaccagcagaaaccagttctccctgaagctgagcagcgtgacagccgccgatacagccgtgtattattgcaccagagaggacagcagcaactggcggagtagaggacagggcacactggtcacagtgtcctcttctggaggcggtggaagcggtggaggaggatctgaagtgcagctggttgaatctggcggaggactggttcaggctggcggatctctgagactgtcttgtgccgccagcggcagaacctttagcatgggctggtttagacaggcccctggcaaagagagagagttcgtcgccgccatcacatactctggcggcagcccttactacgccgactctgtgaagggcagattcaccatcagccgggacaacgccaagaacaccgtgtacctccagatgaacagcctgaagcctgaggacaccgccgtgtactactgcgccgccaatccaacatacggcagcgactggaacgccgagaattggggccagggaacccaagtgacagtgtctagcggatccggcggcggaggatctggcggaggcggatctgggggcggaggctctttcgaagaagtgaaggtggtggaatctggcggcgacctggttaagcctggcggatctctgaagctgagctgtgtggtgtccggcttcaccttcagcagatacggcatgagctgggtccgacagacccctggcaaaagactggaatgggtcgccacaatttccggcggaggcacctacatctactaccccgatagcgtgaagggcagattcaccatctccagagacaacgccaagaacaccctgtacctccagatgagcagcctgaagtctgaggacaccgccatgtaccactgcaccagggacaactacggcagaaactacgactacggcatggactactggggccagggcacaagcgtgacagtctcttctacgcgtatccagaaccctgatcctgccgtgtaccagctgcgggatagcaagagcagcgacaagagcgtgtgtctgttcaccgacttcgacagccagaccaacgtgtcccagagcaaggactccgacgtgtacatcaccgataagtgcgtgctggacatgcggagcatggacttcaagagcaactccgccgtggcctggtccaacaagtccgatttcgcctgcgccaacgccttcaacaacagcattatccccgaggacacattcttcccaagccccgagagcagctgcgacgtgaagctggtggaaaagagcttcgagacagacaccaacctgaacttccagaacctgagcgtgatcggcttcagaatcctgctgctgaaagtggccggctttaacctgctgatgaccctgcggctgtggtccagc

SEQ ID NO: 10168 - DNA, 2682 bp, Artificial Sequence
  Synthetic Polynucloetide
atggccttaccagtgaccgccttgctcctgccgctggccttgctgctccacgccgccaggccggaagtgcaggttttggagtctggcggaggactggttcagcctggcggatctctgagactgtcttgtgccgccagcggcttcaccttcagcaactttgccatgagctgggtccgacaggcccctggcaaaggacttgaatgggtgtccacaatcagcggcagcgccggcacaacagattacgccgattctgtgaagggcagattcaccatcagccgggacaacagcaagaaaaccctgtacctccagatgaacagcctgcgcgtggaagataccgccgtgtactactgtgccgatggcagaggccccttcttcgattatcgcggccagggcacactggtcaccgtttcttctggtaccggcggaggcggatctggcggcggaggtagcggtggcggaggatctgaattccagatcgtgctgacacagagccctgccatcatgagtgcctctccaggcgaggaagtgaccctgacctgtagcgccaccagcagcgtgtcctacatccactggtttcagcagaggcccggcacaagccctaagctgtggatctacagcaccagcaatctggcctctggcgtgccagtgcggtttagcggatctggctacggcaccagctacagcctgaccatcagcagaatggaagccgaggatgccgccacctactactgccagcagagaagcagcagccccttcacatttggcagcggcaccaagctggaaatcaaactcgaggacctgaagaacgtgttcccacctgaggtggccgtgttcgagcctagcgaggccgagatcagccacacccagaaagccaccctcgtgtgcctggctaccggcttctaccccgaccatgtggaactgtcttggtgggtcaacggcaaagaggtgcacagcggcgtgtgtaccgacccccagccactgaaagaacagcccgccctgaacgacagccggtactgcctgagcagcagactgagagtgtccgccaccttctggcagaacccccggaaccacttcagatgccaggtgcagttctacggcctgagcgagaacgacgagtggacccaggacagagccaagcccgtgacccagatcgtgtctgccgaagcctggggcagagccgattgcggctttaccagcgagagctaccagcagggcgtgctgagcgccaccatcctgtacgagatcctgctgggcaaggccaccctgtacgccgtgctggtgtctgccctggtgctgatggctatggtcaagcggaaggacagccggggaagggccaagcgatctggatctggagcaacaaacttctcactactcaaacaagcaggtgacgtggaggagaatcccgggcctactagtatggactggatttggcgcatccttttccttgtcggcgctgctaccggcgcccattccgggcccgaagtgcagctggttgaatctggcggaggactggttcaggctggcggatctctgagactgtcttgtgccgccagcggcagaacctttagcatgggctggtttagacaggcccctggcaaagagagagagttcgtcgccgccatcacatacagcggcggcagcccttactacgcctcttctgtcagaggccggttcaccatcagccgggacaacgccaagaacaccgtgtacctccagatgaacagcctgaagccagaggacaccgccgtgtactactgtgccgccaatccaacctacggcagcgactggaatgccgagaattggggccagggcacccaagtgacagtgtctagtggatccggcggcggaggatctggcggaggcggatctgggggcggaggctctttcgaagaagtgaaggtggtggaatctggcggcgacctggttaagcctggcggatctctgaagctgagctgtgtggtgtccggcttcaccttcagcagatacggcatgagctgggtccgacagacccctggcaaaagactggaatgggtcgccacaatttccggcggaggcacctacatctactaccccgatagcgtgaagggcagattcaccatctccagagacaacgccaagaacaccctgtacctccagatgagcagcctgaagtctgaggacaccgccatgtaccactgcaccagggacaactacggcagaaactacgactacggcatggactactggggccagggcacaagcgtgacagtctcttctacgcgtatccagaaccctgatcctgccgtgtaccagctgcgggatagcaagagcagcgacaagagcgtgtgtctgttcaccgacttcgacagccagaccaacgtgtcccagagcaaggactccgacgtgtacatcaccgataagtgcgtgctggacatgcggagcatggacttcaagagcaactccgccgtggcctggtccaacaagtccgatttcgcctgcgccaacgccttcaacaacagcattatccccgaggacacattcttcccaagccccgagagcagctgcgacgtgaagctggtggaaaagagcttcgagacagacaccaacctgaacttccagaacctgagcgtgatcggcttcagaatcctgctgctgaaagtggccggctttaacctgctgatgaccctgcggctgtggtccagc

SEQ ID NO: 10169 - DNA, 2196 bp, Artificial Sequence
  Synthetic Polynucloetide
atggccttaccagtgaccgccttgctcctgccgctggccttgctgctccacgccgccaggccggacatcgtgctgacacagagccctgcttctctggccgtttctcctggacagagggccaccatcacatgcagagccagcaagagcgtgtccaccagcggctacagctacatgcactggtatcagcagaagcccggccagcctcctaagctgctgatctacctggcctccaacctggaaagcggagtgcctgccagattttctggcagcggctctggcaccgacttcaccctgacaatcaaccccgtggaagccaacgacaccgccaactactactgccagcacagcagagagctgcccttcacatttggcggaggcaccaaggtggaaatcaagagaacaggcggaggcggaagtggaggcggaggatctggcggcggaggctctgaagtgcagctggttgagtctggcggcggacttgtgaaacctggcggaagcctgagactgagctgtgccgcttccggctttacctttagcggctacgccatgagctgggtccgacaggctcctggcaaaggactggaatgggtgtccacaatcagcagcggcggcacctacatctactaccccgatagcgtgaaaggccggttcaccatcagccgggacaacgccaagaacagcctgtacctccagatgaactccctgagagccgaggacaccgccgtgtactattgtgccagactcggcggcgacaattactacgagtatttcgacgtgtggggcaagggcaccaccgtgacagtttcttctacgcgtgagcagaaactgatctcggaagaggatctggcgaagcccaccacgacgccagcgccgcgaccaccaacaccggcgcccaccatcgcgtcgcagcccctgtccctgcgcccagaggcgtgccggccagcggcggggggcgcagtgcacacgagggggctggacttcgcctgtgacatctacatctgggcgcccttggccgggacttgtggggtccttctcctgtcactggttatcaccctttactgcaaacggggcagaaagaaactcctgtatatattcaaacaaccatttatgagaccagtacaaactactcaagaggaagatggctgtagctgccgatttccagaagaagaagaaggaggatgtgaactgagagtgaagttcagcaggagcgcagacgcccccgcgtaccagcagggccagaaccagctctataacgagctgaatctaggacgaagagaggagtacgatgttttggacaagagacgtggccgggaccctgagatggggggaaagccgagaaggaagaaccctcaggaaggcctgtacaatgaactgcagaaagataagatggcggaggcctacagtgagattgggatgaaaggcgagcgccggaggggcaaggggcacgatggcctttaccagggtctcagtacagccaccaaggacacctacgacgcccttcacatgcaggccctgccccctcgctctagtggctccggcgagggcagaggaagtctactaacctgcggagatgtggaagaaaatcctggcccacatatgaccgagtacaagcccacggtgcgcctcgccacccgcgacgacgtccccagggccgtacgcaccctcgccgccgcgttcgccgactaccccgccacgcgccacaccgtcgatccggaccgccacatcgagcgggtcaccgagctgcaagaactcttcctcacgcgcgtcgggctcgacatcggcaaggtgtgggtcgcggacgacggcgccgcggtggcggtctggaccacgccggagagcgtcgaagcgggggcggtgttcgccgagatcggcccgcgcatggccgagttgagcggttcccggctggccgcgcagcaacagatggaaggcctcctggcgccgcaccggcccaaggagcccgcgtggttcctggccaccgtcggcgtctcgcccgaccaccagggcaagggtctgggcagcgccgtcgtgctccccggagtggaggcggccgagcgcgccggggtgcccgccttcctggagacctccgcgccccgcaacctccccttctacgagcggctcggcttcaccgtcaccgccgacgtcgaggtgcccgaaggaccgcgcacctggtgcatgacccgcaagcccggtgcctga

SEQ ID NO: 10170 - DNA, 2178 bp, Artificial Sequence
  Synthetic Polynucloetide
atggccttaccagtgaccgccttgctcctgccgctggccttgctgctccacgccgccaggccggacatcgtgctgacacagagccctgcttctctggccgtttctcctggacagagggccaccatcacatgcagagccagcaagagcgtgtccaccagcggctacagctacatgcactggtatcagcagaagcccggccagcctcctaagctgctgatctacctggcctccaacctggaaagcggagtgcctgccagattttctggcagcggctctggcaccgacttcaccctgacaatcaaccccgtggaagccaacgacaccgccaactactactgccagcacagcagagagctgcccttcacatttggcggaggcaccaaggtggaaatcaagagaacaggcggaggcggaagtggaggcggaggatctggcggcggaggctctgaagtgcagctggttgagtctggcggcggacttgtgaaacctggcggaagcctgagactgagctgtgccgcttccggctttacctttagcggctacgccatgagctgggtccgacaggctcctggcaaaggactggaatgggtgtccacaatcagcagcggcggcacctacatctactaccccgatagcgtgaaaggccggttcaccatcagccgggacaacgccaagaacagcctgtacctccagatgaactccctgagagccgaggacaccgccgtgtactattgtgccagactcggcggcgacaattactacgagtatttcgacgtgtggggcaagggcaccaccgtgacagtttcttctacgcgtgagcagaaactgatctcggaagaggatctgaaaattgaagttatgtatcctcctccttacctagacaatgagaagagcaatggaaccattatccatgtgaaagggaaacacctttgtccaagtcccctatttcccggaccttctaagcccttttgggtgctggtggtggttgggggagtcctggcttgctatagcttgctagtaacagtggcctttattattttctgggtgaggagtaagaggagcaggctcctgcacagtgactacatgaacatgactccacgccgccccggacccacccgcaagcattaccagccctatgccccaccacgcgacttcgcagcctatcgctccagagtgaagttcagcaggagcgcagacgcccccgcgtaccagcagggccagaaccagctctataacgagctcaatctaggacgaagagaggagtacgatgttttggacaagagacgtggccgggaccctgagatggggggaaagccgagaaggaagaaccctcaggaaggcctgtacaatgaactgcagaaagataagatggcggaggcctacagtgagattgggatgaaaggcgagcgccggaggggcaaggggcacgatggcctttaccagggtctcagtacagccaccaaggacacctacgacgcccttcacatgcaggccctgccccctcgctctagtggctccggcgagggcagaggaagtctactaacctgcggagatgtggaagaaaatcctggcccacatatgaccgagtacaagcccacggtgcgcctcgccacccgcgacgacgtccccagggccgtacgcaccctcgccgccgcgttcgccgactaccccgccacgcgccacaccgtcgatccggaccgccacatcgagcgggtcaccgagctgcaagaactcttcctcacgcgcgtcgggctcgacatcggcaaggtgtgggtcgcggacgacggcgccgcggtggcggtctggaccacgccggagagcgtcgaagcgggggcggtgttcgccgagatcggcccgcgcatggccgagttgagcggttcccggctggccgcgcagcaacagatggaaggcctcctggcgccgcaccggcccaaggagcccgcgtggttcctggccaccgtcggcgtctcgcccgaccaccagggcaagggtctgggcagcgccgtcgtgctccccggagtggaggcggccgagcgcgccggggtgcccgccttcctggagacctccgcgccccgcaacctccccttctacgagcggctcggcttcaccgtcaccgccgacgtcgaggtgcccgaaggaccgcgcacctggtgcatgacccgcaagcccggtgcctga

SEQ ID NO: 10171 - DNA, 1506 bp, Artificial Sequence
  Synthetic Polynucloetide
atggccttaccagtgaccgccttgctcctgccgctggccttgctgctccacgccgccaggccggacatcgtgctgacacagagccctgcttctctggccgtttctcctggacagagggccaccatcacatgcagagccagcaagagcgtgtccaccagcggctacagctacatgcactggtatcagcagaagcccggccagcctcctaagctgctgatctacctggcctccaacctggaaagcggagtgcctgccagattttctggcagcggctctggcaccgacttcaccctgacaatcaaccccgtggaagccaacgacaccgccaactactactgccagcacagcagagagctgcccttcacatttggcggaggcaccaaggtggaaatcaagagaacaggcggaggcggaagtggaggcggaggatctggcggcggaggctctgaagtgcagctggttgagtctggcggcggacttgtgaaacctggcggaagcctgagactgagctgtgccgcttccggctttacctttagcggctacgccatgagctgggtccgacaggctcctggcaaaggactggaatgggtgtccacaatcagcagcggcggcacctacatctactaccccgatagcgtgaaaggccggttcaccatcagccgggacaacgccaagaacagcctgtacctccagatgaactccctgagagccgaggacaccgccgtgtactattgtgccagactcggcggcgacaattactacgagtatttcgacgtgtggggcaagggcaccaccgtgacagtttcttctacgcgtgagcagaaactgatctcggaagaggatctgaaaattgaagttatgtatcctcctccttacctagacaatgagaagagcaatggaaccattatccatgtgaaagggaaacacctttgtccaagtcccctatttcccggaccttctaagcccttttgggtgctggtggtggttgggggagtcctggcttgctatagcttgctagtaacagtggcctttattattttctgggtgaggagtaagaggagcaggctcctgcacagtgactacatgaacatgactccacgccgccccggacccacccgcaagcattaccagccctatgccccaccacgcgacttcgcagcctatcgctccagagtgaagttcagcaggagcgcagacgcccccgcgtaccagcagggccagaaccagctctataacgagctcaatctaggacgaagagaggagtacgatgttttggacaagagacgtggccgggaccctgagatggggggaaagccgagaaggaagaaccctcaggaaggcctgtacaatgaactgcagaaagataagatggcggaggcctacagtgagattgggatgaaaggcgagcgccggaggggcaaggggcacgatggcctttaccagggtctcagtacagccaccaaggacacctacgacgcccttcacatgcaggccctgccccctcgc

SEQ ID NO: 10172 - DNA, 1527 bp, Artificial Sequence
  Synthetic Polynucloetide
atggccttaccagtgaccgccttgctcctgccgctggccttgctgctccacgccgccaggccggacatcgtgctgacacagagccctgcttctctggccgtttctcctggacagagggccaccatcacatgcagagccagcaagagcgtgtccaccagcggctacagctacatgcactggtatcagcagaagcccggccagcctcctaagctgctgatctacctggcctccaacctggaaagcggagtgcctgccagattttctggcagcggctctggcaccgacttcaccctgacaatcaaccccgtggaagccaacgacaccgccaactactactgccagcacagcagagagctgcccttcacatttggcggaggcaccaaggtggaaatcaagagaacaggcggaggcggaagtggaggcggaggatctggcggcggaggctctgaagtgcagctggttgagtctggcggcggacttgtgaaacctggcggaagcctgagactgagctgtgccgcttccggctttacctttagcggctacgccatgagctgggtccgacaggctcctggcaaaggactggaatgggtgtccacaatcagcagcggcggcacctacatctactaccccgatagcgtgaaaggccggttcaccatcagccgggacaacgccaagaacagcctgtacctccagatgaactccctgagagccgaggacaccgccgtgtactattgtgccagactcggcggcgacaattactacgagtatttcgacgtgtggggcaagggcaccaccgtgacagtttcttctacgcgtgagcagaaactgatctcggaagaggatctggcgaagcccaccacgacgccagcgccgcgaccaccaacaccggcgcccaccatcgcgtcgcagcccctgtccctgcgcccagaggcgtgccggccagcggcggggggcgcagtgcacacgagggggctggacttcgcctgtgacatctacatctgggcgcccttggccgggacttgtggggtccttctcctgtcactggttatcaccctttactgcaaacggggcagaaagaaactcctgtatatattcaaacaaccatttatgagaccagtacaaactactcaagaggaagatggctgtagctgccgatttccagaagaagaagaaggaggatgtgaactgagagtgaagttcagcaggagcgcagacgcccccgcgtaccagcagggccagaaccagctctataacgagctgaatctaggacgaagagaggagtacgatgttttggacaagagacgtggccgggaccctgagatggggggaaagccgagaaggaagaaccctcaggaaggcctgtacaatgaactgcagaaagataagatggcggaggcctacagtgagattgggatgaaaggcgagcgccggaggggcaaggggcacgatggcctttaccagggtctcagtacagccaccaaggacacctacgacgcccttcacatgcaggccctgccccctcgctga

SEQ ID NO: 10173 - DNA, 1527 bp, Artificial Sequence
  Synthetic Polynucloetide
atggccttaccagtgaccgccttgctcctgccgctggccttgctgctccacgccgccaggccggaagtgcagctggttgagtctggcggcggacttgtgaaacctggcggaagcctgagactgagctgtgccgcttccggctttacctttagcggctacgccatgagctgggtccgacaggctcctggcaaaggactggaatgggtgtccacaatcagcagcggcggcacctacatctactaccccgatagcgtgaaaggccggttcaccatcagccgggacaacgccaagaacagcctgtacctccagatgaactccctgagagccgaggacaccgccgtgtactattgtgccagactcggcggcgacaattactacgagtatttcgacgtgtggggcaagggcaccaccgtgacagtttcttctggcggaggcggaagtggaggcggaggatctggcggcggaggctctgacatcgtgctgacacagagccctgcttctctggccgtttctcctggacagagggccaccatcacatgcagagccagcaagagcgtgtccaccagcggctacagctacatgcactggtatcagcagaagcccggccagcctcctaagctgctgatctacctggcctccaacctggaaagcggagtgcctgccagattttctggcagcggctctggcaccgacttcaccctgacaatcaaccccgtggaagccaacgacaccgccaactactactgccagcacagcagagagctgcccttcacatttggcggaggcaccaaggtggaaatcaagagaacaacgcgtgagcagaaactgatctcggaagaggatctggcgaagcccaccacgacgccagcgccgcgaccaccaacaccggcgcccaccatcgcgtcgcagcccctgtccctgcgcccagaggcgtgccggccagcggcggggggcgcagtgcacacgagggggctggacttcgcctgtgacatctacatctgggcgcccttggccgggacttgtggggtccttctcctgtcactggttatcaccctttactgcaaacggggcagaaagaaactcctgtatatattcaaacaaccatttatgagaccagtacaaactactcaagaggaagatggctgtagctgccgatttccagaagaagaagaaggaggatgtgaactgagagtgaagttcagcaggagcgcagacgcccccgcgtaccagcagggccagaaccagctctataacgagctgaatctaggacgaagagaggagtacgatgttttggacaagagacgtggccgggaccctgagatggggggaaagccgagaaggaagaaccctcaggaaggcctgtacaatgaactgcagaaagataagatggcggaggcctacagtgagattgggatgaaaggcgagcgccggaggggcaaggggcacgatggcctttaccagggtctcagtacagccaccaaggacacctacgacgcccttcacatgcaggccctgccccctcgctga

SEQ ID NO: 10174 - DNA, 2766 bp, Artificial Sequence
  Synthetic Polynucloetide
atggccttaccagtgaccgccttgctcctgccgctggccttgctgctccacgccgccaggccggacatcgtgctgacacagagccctgcttctctggccgtttctcctggacagagggccaccatcacatgcagagccagcaagagcgtgtccaccagcggctacagctacatgcactggtatcagcagaagcccggccagcctcctaagctgctgatctacctggcctccaacctggaaagcggagtgcctgccagattttctggcagcggctctggcaccgacttcaccctgacaatcaaccccgtggaagccaacgacaccgccaactactactgccagcacagcagagagctgcccttcacatttggcggaggcaccaaggtggaaatcaagagaacaggcggaggcggaagtggaggcggaggatctggcggcggaggctctgaagtgcagctggttgagtctggcggcggacttgtgaaacctggcggaagcctgagactgagctgtgccgcttccggctttacctttagcggctacgccatgagctgggtccgacaggctcctggcaaaggactggaatgggtgtccacaatcagcagcggcggcacctacatctactaccccgatagcgtgaaaggccggttcaccatcagccgggacaacgccaagaacagcctgtacctccagatgaactccctgagagccgaggacaccgccgtgtactattgtgccagactcggcggcgacaattactacgagtatttcgacgtgtggggcaagggcaccaccgtgacagtttcttctacgcgtgagcagaaactgatctcggaagaggatctggcgaagcccaccacgacgccagcgccgcgaccaccaacaccggcgcccaccatcgcgtcgcagcccctgtccctgcgcccagaggcgtgccggccagcggcggggggcgcagtgcacacgagggggctggacttcgcctgtgacatctacatctgggcgcccttggccgggacttgtggggtccttctcctgtcactggttatcaccctttactgcgggcgcgccagagtgaagttcagcaggagcgcagacgcccccgcgtaccagcagggccagaaccagctctataacgagctgaatctaggacgaagagaggagtacgatgttttggacaagagacgtggccgggaccctgagatggggggaaagccgagaaggaagaaccctcaggaaggcctgtacaatgaactgcagaaagataagatggcggaggcctacagtgagattgggatgaaaggcgagcgccggaggggcaaggggcacgatggcctttaccagggtctcagtacagccaccaaggacacctacgacgcccttcacatgcaggccctgccccctcgctctagaggatctggagcaacaaacttctcactactcaaacaagcaggtgacgtggaggagaatcccgggcctgggatccacatggccacttacgaggttctctgtgaggtggcgcggaaactgggcacggatgacagggaagtggtattgttcctcctaaacgtgttcatacctcaacccacactggcccaattaattggagctcttagagctttaaaggaggagggcaggttaacgtttcccctgttagcggaatgtctgtttcgtgcaggtcgcagagacctcttgcgcgacctgcttcacttagacccgcgttttttagagcgccacctagcgggcacaatgagttatttcagcccttatcagctcactgttctccacgtagacggggagctgtgtgcgagggatattaggtctttgatatttttaagcaaggacactatagggtctcgcagcacaccacagacattcttacactgggtgtactgtatggaaaacttagacctactgggtcccactgacgtggatgccctaatgtcaatgcttagatctttgtcaagagtagacctacagcgccaagtgcaaaccctaatgggccttcacctttccggcccatcacactcccaacactatcgccatacaccactcgagaccgatttctacgactacaaggacgacgatgacaagactagtggctccggcgagggcagaggaagtctactaacctgcggagatgtggaagaaaatcctggcccacatatgaccgagtacaagcccacggtgcgcctcgccacccgcgacgacgtccccagggccgtacgcaccctcgccgccgcgttcgccgactaccccgccacgcgccacaccgtcgatccggaccgccacatcgagcgggtcaccgagctgcaagaactcttcctcacgcgcgtcgggctcgacatcggcaaggtgtgggtcgcggacgacggcgccgcggtggcggtctggaccacgccggagagcgtcgaagcgggggcggtgttcgccgagatcggcccgcgcatggccgagttgagcggttcccggctggccgcgcagcaacagatggaaggcctcctggcgccgcaccggcccaaggagcccgcgtggttcctggccaccgtcggcgtctcgcccgaccaccagggcaagggtctgggcagcgccgtcgtgctccccggagtggaggcggccgagcgcgccggggtgcccgccttcctggagacctccgcgccccgcaacctccccttctacgagcggctcggcttcaccgtcaccgccgacgtcgaggtgcccgaaggaccgcgcacctggtgcatgacccgcaagcccggtgcctga

SEQ ID NO: 10175 - DNA, 2586 bp, Artificial Sequence
  Synthetic Polynucloetide
atggccttaccagtgaccgccttgctcctgccgctggccttgctgctccacgccgccaggccggacatcgtgctgacacagagccctgcttctctggccgtttctcctggacagagggccaccatcacatgcagagccagcaagagcgtgtccaccagcggctacagctacatgcactggtatcagcagaagcccggccagcctcctaagctgctgatctacctggcctccaacctggaaagcggagtgcctgccagattttctggcagcggctctggcaccgacttcaccctgacaatcaaccccgtggaagccaacgacaccgccaactactactgccagcacagcagagagctgcccttcacatttggcggaggcaccaaggtggaaatcaagagaacactcgagatccagaaccctgatcctgccgtgtaccagctgcgggatagcaagagcagcgacaagagcgtgtgtctgttcaccgacttcgacagccagaccaacgtgtcccagagcaaggactccgacgtgtacatcaccgataagtgcgtgctggacatgcggagcatggacttcaagagcaactccgccgtggcctggtccaacaagtccgatttcgcctgcgccaacgccttcaacaacagcattatccccgaggacacattcttcccaagcagcgacgtgccctgcgacgtgaagctggtggaaaagagcttcgagacagacaccaacctgaacttccagaacctgagcgtgatcggcttcagaatcctgctgctgaaagtggccggctttaacctgctgatgaccctgcggctgtggtccagccgcgccaagagaagcggatctggcgtgaagcagaccctgaatttcgacctgctgaagctggctggcgacgtggaatccaacccaggccctactagtatggactggatttggcgcatccttttccttgtcggcgctgctaccggcgcgcattccttcgaagaagtgcagctggttgagtctggcggcggacttgtgaaacctggcggaagcctgagactgagctgtgccgcttccggctttacctttagcggctacgccatgagctgggtccgacaggctcctggcaaaggactggaatgggtgtccacaatcagcagcggcggcacctacatctactaccccgatagcgtgaaaggccggttcaccatcagccgggacaacgccaagaacagcctgtacctccagatgaactccctgagagccgaggacaccgccgtgtactattgtgccagactcggcggcgacaattactacgagtatttcgacgtgtggggcaagggcaccaccgtgacagtttcttctacgcgtgaggacctgaagaacgtgttcccacctgaggtggccgtgttcgagcctagcaaggccgagatcgcccacacccagaaagccaccctcgtgtgcctggctaccggcttctaccccgaccatgtggaactgtcttggtgggtcaacggcaaagaggtgcacagcggcgtgtgtaccgacccccagccactgaaagaacagcccgccctgaacgacagccggtactgcctgagcagcagactgagagtgtccgccaccttctggcagaacccccggaaccacttcagatgccaggtgcagttctacggcctgagcgagaacgacgagtggacccaggacagagccaagcccgtgacccagatcgtgtctgccgaagcctggggcagagccgattgcggcatcaccagcgccagctaccaccagggcgtgctgagcgccaccatcctgtacgagatcctgctgggcaaggccaccctgtacgccgtgctggtgtctgccctggtgctgatggctatggtcaagcggaaggacagccggggaagggccaagcgatctggatctggagcaacaaacttctcactactcaaacaagcaggtgacgtggaggagaatcccgggccttctagaggccatatgaccgagtacaagcccacggtgcgcctcgccacccgcgacgacgtccccagggccgtacgcaccctcgccgccgcgttcgccgactaccccgccacgcgccacaccgtcgatccggaccgccacatcgagcgggtcaccgagctgcaagaactcttcctcacgcgcgtcgggctcgacatcggcaaggtgtgggtcgcggacgacggcgccgcggtggcggtctggaccacgccggagagcgtcgaagcgggggcggtgttcgccgagatcggcccgcgcatggccgagttgagcggttcccggctggccgcgcagcaacagatggaaggcctcctggcgccgcaccggcccaaggagcccgcgtggttcctggccaccgtcggcgtctcgcccgaccaccagggcaagggtctgggcagcgccgtcgtgctccccggagtggaggcggccgagcgcgccggggtgcccgccttcctggagacctccgcgccccgcaacctccccttctacgagcggctcggcttcaccgtcaccgccgacgtcgaggtgcccgaaggaccgcgcacctggtgcatgacccgcaagcccggtgcctga

SEQ ID NO: 10176 - DNA, 2583 bp, Artificial Sequence
  Synthetic Polynucloetide
atggccttaccagtgaccgccttgctcctgccgctggccttgctgctccacgccgccaggccggacatcgtgctgacacagagccctgcttctctggccgtttctcctggacagagggccaccatcacatgcagagccagcaagagcgtgtccaccagcggctacagctacatgcactggtatcagcagaagcccggccagcctcctaagctgctgatctacctggcctccaacctggaaagcggagtgcctgccagattttctggcagcggctctggcaccgacttcaccctgacaatcaaccccgtggaagccaacgacaccgccaactactactgccagcacagcagagagctgcccttcacatttggcggaggcaccaaggtggaaatcaagagaacactcgaggacctgaagaacgtgttcccacctgaggtggccgtgttcgagcctagcaaggccgagatcgcccacacccagaaagccaccctcgtgtgcctggctaccggcttctaccccgaccatgtggaactgtcttggtgggtcaacggcaaagaggtgcacagcggcgtgtgtaccgacccccagccactgaaagaacagcccgccctgaacgacagccggtactgcctgagcagcagactgagagtgtccgccaccttctggcagaacccccggaaccacttcagatgccaggtgcagttctacggcctgagcgagaacgacgagtggacccaggacagagccaagcccgtgacccagatcgtgtctgccgaagcctggggcagagccgattgcggcatcaccagcgccagctaccaccagggcgtgctgagcgccaccatcctgtacgagatcctgctgggcaaggccaccctgtacgccgtgctggtgtctgccctggtgctgatggctatggtcaagcggaaggacagccggggaagggccaagcgatctggatctggagcaacaaacttctcactactcaaacaagcaggtgacgtggaggagaatcccgggcctactagtatggactggatttggcgcatccttttccttgtcggcgctgctaccggcgcgcattccttcgaagaagtgcagctggttgagtctggcggcggacttgtgaaacctggcggaagcctgagactgagctgtgccgcttccggctttacctttagcggctacgccatgagctgggtccgacaggctcctggcaaaggactggaatgggtgtccacaatcagcagcggcggcacctacatctactaccccgatagcgtgaaaggccggttcaccatcagccgggacaacgccaagaacagcctgtacctccagatgaactccctgagagccgaggacaccgccgtgtactattgtgccagactcggcggcgacaattactacgagtatttcgacgtgtggggcaagggcaccaccgtgacagtttcttctacgcgtatccagaaccctgatcctgccgtgtaccagctgcgggatagcaagagcagcgacaagagcgtgtgtctgttcaccgacttcgacagccagaccaacgtgtcccagagcaaggactccgacgtgtacatcaccgataagtgcgtgctggacatgcggagcatggacttcaagagcaactccgccgtggcctggtccaacaagtccgatttcgcctgcgccaacgccttcaacaacagcattatccccgaggacacattcttcccaagcagcgacgtgccctgcgacgtgaagctggtggaaaagagcttcgagacagacaccaacctgaacttccagaacctgagcgtgatcggcttcagaatcctgctgctgaaagtggccggctttaacctgctgatgaccctgcggctgtggtccagccgcgccaagagaagcggatctggcgtgaagcagaccctgaatttcgacctgctgaagctggctggcgacgtggaatccaacccaggcccttctagaggccatatgaccgagtacaagcccacggtgcgcctcgccacccgcgacgacgtccccagggccgtacgcaccctcgccgccgcgttcgccgactaccccgccacgcgccacaccgtcgatccggaccgccacatcgagcgggtcaccgagctgcaagaactcttcctcacgcgcgtcgggctcgacatcggcaaggtgtgggtcgcggacgacggcgccgcggtggcggtctggaccacgccggagagcgtcgaagcgggggcggtgttcgccgagatcggcccgcgcatggccgagttgagcggttcccggctggccgcgcagcaacagatggaaggcctcctggcgccgcaccggcccaaggagcccgcgtggttcctggccaccgtcggcgtctcgcccgaccaccagggcaagggtctgggcagcgccgtcgtgctccccggagtggaggcggccgagcgcgccggggtgcccgccttcctggagacctccgcgccccgcaacctccccttctacgagcggctcggcttcaccgtcaccgccgacgtcgaggtgcccgaaggaccgcgcacctggtgcatgacccgcaagcccggtgcctga

SEQ ID NO: 10177 - DNA, 1881 bp, Artificial Sequence
  Synthetic Polynucloetide
atggccttaccagtgaccgccttgctcctgccgctggccttgctgctccacgccgccaggccggacatcgtgctgacacagagccctgcttctctggccgtttctcctggacagagggccaccatcacatgcagagccagcaagagcgtgtccaccagcggctacagctacatgcactggtatcagcagaagcccggccagcctcctaagctgctgatctacctggcctccaacctggaaagcggagtgcctgccagattttctggcagcggctctggcaccgacttcaccctgacaatcaaccccgtggaagccaacgacaccgccaactactactgccagcacagcagagagctgcccttcacatttggcggaggcaccaaggtggaaatcaagagaacactcgaggacctgaagaacgtgttcccacctgaggtggccgtgttcgagcctagcgaggccgagatcagccacacccagaaagccaccctcgtgtgcctggctaccggcttctaccccgaccatgtggaactgtcttggtgggtcaacggcaaagaggtgcacagcggcgtgtgtaccgacccccagccactgaaagaacagcccgccctgaacgacagccggtactgcctgagcagcagactgagagtgtccgccaccttctggcagaacccccggaaccacttcagatgccaggtgcagttctacggcctgagcgagaacgacgagtggacccaggacagagccaagcccgtgacccagatcgtgtctgccgaagcctggggcagagccgattgcggctttaccagcgagagctaccagcagggcgtgctgagcgccaccatcctgtacgagatcctgctgggcaaggccaccctgtacgccgtgctggtgtctgccctggtgctgatggctatggtcaagcggaaggacagccggggaagggccaagcgatctggatctggagcaacaaacttctcactactcaaacaagcaggtgacgtggaggagaatcccgggcctactagtatggactggatttggcgcatccttttccttgtcggcgctgctaccggcgcgcattccttcgaagaagtgcagctggttgagtctggcggcggacttgtgaaacctggcggaagcctgagactgagctgtgccgcttccggctttacctttagcggctacgccatgagctgggtccgacaggctcctggcaaaggactggaatgggtgtccacaatcagcagcggcggcacctacatctactaccccgatagcgtgaaaggccggttcaccatcagccgggacaacgccaagaacagcctgtacctccagatgaactccctgagagccgaggacaccgccgtgtactattgtgccagactcggcggcgacaattactacgagtatttcgacgtgtggggcaagggcaccaccgtgacagtttcttctacgcgtatccagaaccctgatcctgccgtgtaccagctgcgggatagcaagagcagcgacaagagcgtgtgtctgttcaccgacttcgacagccagaccaacgtgtcccagagcaaggactccgacgtgtacatcaccgataagtgcgtgctggacatgcggagcatggacttcaagagcaactccgccgtggcctggtccaacaagtccgatttcgcctgcgccaacgccttcaacaacagcattatccccgaggacacattcttcccaagccccgagagcagctgcgacgtgaagctggtggaaaagagcttcgagacagacaccaacctgaacttccagaacctgagcgtgatcggcttcagaatcctgctgctgaaagtggccggctttaacctgctgatgaccctgcggctgtggtccagc

SEQ ID NO: 10178 - DNA, 2556 bp, Artificial Sequence
  Synthetic Polynucloetide
atggccttaccagtgaccgccttgctcctgccgctggccttgctgctccacgccgccaggccggacatcgtgctgacacagagccctgcttctctggccgtttctcctggacagagggccaccatcacatgcagagccagcaagagcgtgtccaccagcggctacagctacatgcactggtatcagcagaagcccggccagcctcctaagctgctgatctacctggcctccaacctggaaagcggagtgcctgccagattttctggcagcggctctggcaccgacttcaccctgacaatcaaccccgtggaagccaacgacaccgccaactactactgccagcacagcagagagctgcccttcacatttggcggaggcaccaaggtggaaatcaagagaacactcgaggacctgaagaacgtgttcccacctgaggtggccgtgttcgagcctagcgaggccgagatcagccacacccagaaagccaccctcgtgtgcctggctaccggcttctaccccgaccatgtggaactgtcttggtgggtcaacggcaaagaggtgcacagcggcgtgtgtaccgacccccagccactgaaagaacagcccgccctgaacgacagccggtactgcctgagcagcagactgagagtgtccgccaccttctggcagaacccccggaaccacttcagatgccaggtgcagttctacggcctgagcgagaacgacgagtggacccaggacagagccaagcccgtgacccagatcgtgtctgccgaagcctggggcagagccgattgcggctttaccagcgagagctaccagcagggcgtgctgagcgccaccatcctgtacgagatcctgctgggcaaggccaccctgtacgccgtgctggtgtctgccctggtgctgatggctatggtcaagcggaaggacagccggggaagggccaagcgatctggatctggagcaacaaacttctcactactcaaacaagcaggtgacgtggaggagaatcccgggcctactagtatggactggatttggcgcatccttttccttgtcggcgctgctaccggcgcgcattccttcgaagaagtgcagctggttgagtctggcggcggacttgtgaaacctggcggaagcctgagactgagctgtgccgcttccggctttacctttagcggctacgccatgagctgggtccgacaggctcctggcaaaggactggaatgggtgtccacaatcagcagcggcggcacctacatctactaccccgatagcgtgaaaggccggttcaccatcagccgggacaacgccaagaacagcctgtacctccagatgaactccctgagagccgaggacaccgccgtgtactattgtgccagactcggcggcgacaattactacgagtatttcgacgtgtggggcaagggcaccaccgtgacagtttcttctacgcgtatccagaaccctgatcctgccgtgtaccagctgcgggatagcaagagcagcgacaagagcgtgtgtctgttcaccgacttcgacagccagaccaacgtgtcccagagcaaggactccgacgtgtacatcaccgataagtgcgtgctggacatgcggagcatggacttcaagagcaactccgccgtggcctggtccaacaagtccgatttcgcctgcgccaacgccttcaacaacagcattatccccgaggacacattcttcccaagccccgagagcagctgcgacgtgaagctggtggaaaagagcttcgagacagacaccaacctgaacttccagaacctgagcgtgatcggcttcagaatcctgctgctgaaagtggccggctttaacctgctgatgaccctgcggctgtggtccagccgcgccaagagaagcggatctggcgtgaagcagaccctgaatttcgacctgctgaagctggctggcgacgtggaatccaacccaggcccttctagaggcgggatccacaccatggctacctacgaggtgctgtgcgaggtggcaagaaagctgggcaccgacgacagagaagtggtgctgttcctgctgaacgtgttcatccctcagcctacactggcccagctgatcggtgcactgagagccctgaaagaggaaggccggctgacctttcctctgctggccgaatgcctgttcagagccggaagaagggatctgctgcgggacctgctgcatctggaccccagatttctggaaagacacctggccggcaccatgagctacttcagcccttaccagctgaccgtgctgcacgttgacggcgaactgtgcgccagagatattcggagcctgatcttcctgagcaaggacaccatcggcagccggtctacccctcagacatttctgcactgggtgtactgcatggaaaacctggacctgctcggccccacagatgtggatgccctgatgtccatgctgagaagcctgagcagagtggacctccagagacaggtgcagacactgatgggactgcacctgagcggacctagccacagccagcactacagacacacccct

SEQ ID NO: 10179 - DNA, 1893 bp, Artificial Sequence
  Synthetic Polynucloetide
atggccttaccagtgaccgccttgctcctgccgctggccttgctgctccacgccgccaggccggacatcgtgctgacacagagccctgcttctctggccgtttctcctggacagagggccaccatcacatgcagagccagcaagagcgtgtccaccagcggctacagctacatgcactggtatcagcagaagcccggccagcctcctaagctgctgatctacctggcctccaacctggaaagcggagtgcctgccagattttctggcagcggctctggcaccgacttcaccctgacaatcaaccccgtggaagccaacgacaccgccaactactactgccagcacagcagagagctgcccttcacatttggcggaggcaccaaggtggaaatcaagagaacactcgagatccagaaccctgatcctgccgtgtaccagctgcgggatagcaagagcagcgacaagagcgtgtgtctgttcaccgacttcgacagccagaccaacgtgtcccagagcaaggactccgacgtgtacatcaccgataagtgcgtgctggacatgcggagcatggacttcaagagcaactccgccgtggcctggtccaacaagtccgatttcgcctgcgccaacgccttcaacaacagcattatccccgaggacacattcttcccaagccccgagagcagctgcgacgtgaagctggtggaaaagagcttcgagacagacaccaacctgaacttccagaacctgagcgtgatcggcttcagaatcctgctgctgaaagtggccggctttaacctgctgatgaccctgcggctgtggtccagccgcgccaagagaagcggatctggcgtgaagcagaccctgaatttcgacctgctgaagctggctggcgacgtggaatccaacccaggccctactagtatggactggatttggcgcatccttttccttgtcggcgctgctaccggcgcgcattccttcgaagaagtgcagctggttgagtctggcggcggacttgtgaaacctggcggaagcctgagactgagctgtgccgcttccggctttacctttagcggctacgccatgagctgggtccgacaggctcctggcaaaggactggaatgggtgtccacaatcagcagcggcggcacctacatctactaccccgatagcgtgaaaggccggttcaccatcagccgggacaacgccaagaacagcctgtacctccagatgaactccctgagagccgaggacaccgccgtgtactattgtgccagactcggcggcgacaattactacgagtatttcgacgtgtggggcaagggcaccaccgtgacagtttcttctacgcgtgaggacctgaagaacgtgttcccacctgaggtggccgtgttcgagcctagcgaggccgagatcagccacacccagaaagccaccctcgtgtgcctggctaccggcttctaccccgaccatgtggaactgtcttggtgggtcaacggcaaagaggtgcacagcggcgtgtgtaccgacccccagccactgaaagaacagcccgccctgaacgacagccggtactgcctgagcagcagactgagagtgtccgccaccttctggcagaacccccggaaccacttcagatgccaggtgcagttctacggcctgagcgagaacgacgagtggacccaggacagagccaagcccgtgacccagatcgtgtctgccgaagcctggggcagagccgattgcggctttaccagcgagagctaccagcagggcgtgctgagcgccaccatcctgtacgagatcctgctgggcaaggccaccctgtacgccgtgctggtgtctgccctggtgctgatggctatggtcaagcggaaggacagccgggga

SEQ ID NO: 10180 - DNA, 2559 bp, Artificial Sequence
  Synthetic Polynucloetide
atggccttaccagtgaccgccttgctcctgccgctggccttgctgctccacgccgccaggccggacatcgtgctgacacagagccctgcttctctggccgtttctcctggacagagggccaccatcacatgcagagccagcaagagcgtgtccaccagcggctacagctacatgcactggtatcagcagaagcccggccagcctcctaagctgctgatctacctggcctccaacctggaaagcggagtgcctgccagattttctggcagcggctctggcaccgacttcaccctgacaatcaaccccgtggaagccaacgacaccgccaactactactgccagcacagcagagagctgcccttcacatttggcggaggcaccaaggtggaaatcaagagaacactcgagatccagaaccctgatcctgccgtgtaccagctgcgggatagcaagagcagcgacaagagcgtgtgtctgttcaccgacttcgacagccagaccaacgtgtcccagagcaaggactccgacgtgtacatcaccgataagtgcgtgctggacatgcggagcatggacttcaagagcaactccgccgtggcctggtccaacaagtccgatttcgcctgcgccaacgccttcaacaacagcattatccccgaggacacattcttcccaagccccgagagcagctgcgacgtgaagctggtggaaaagagcttcgagacagacaccaacctgaacttccagaacctgagcgtgatcggcttcagaatcctgctgctgaaagtggccggctttaacctgctgatgaccctgcggctgtggtccagccgcgccaagagaagcggatctggcgtgaagcagaccctgaatttcgacctgctgaagctggctggcgacgtggaatccaacccaggccctactagtatggactggatttggcgcatccttttccttgtcggcgctgctaccggcgcgcattccttcgaagaagtgcagctggttgagtctggcggcggacttgtgaaacctggcggaagcctgagactgagctgtgccgcttccggctttacctttagcggctacgccatgagctgggtccgacaggctcctggcaaaggactggaatgggtgtccacaatcagcagcggcggcacctacatctactaccccgatagcgtgaaaggccggttcaccatcagccgggacaacgccaagaacagcctgtacctccagatgaactccctgagagccgaggacaccgccgtgtactattgtgccagactcggcggcgacaattactacgagtatttcgacgtgtggggcaagggcaccaccgtgacagtttcttctacgcgtgaggacctgaagaacgtgttcccacctgaggtggccgtgttcgagcctagcgaggccgagatcagccacacccagaaagccaccctcgtgtgcctggctaccggcttctaccccgaccatgtggaactgtcttggtgggtcaacggcaaagaggtgcacagcggcgtgtgtaccgacccccagccactgaaagaacagcccgccctgaacgacagccggtactgcctgagcagcagactgagagtgtccgccaccttctggcagaacccccggaaccacttcagatgccaggtgcagttctacggcctgagcgagaacgacgagtggacccaggacagagccaagcccgtgacccagatcgtgtctgccgaagcctggggcagagccgattgcggctttaccagcgagagctaccagcagggcgtgctgagcgccaccatcctgtacgagatcctgctgggcaaggccaccctgtacgccgtgctggtgtctgccctggtgctgatggctatggtcaagcggaaggacagccggggaagggccaagcgatctggatctggagcaacaaacttctcactactcaaacaagcaggtgacgtggaggagaatcccgggccttctagaggcgggatccacaccatggctacctacgaggtgctgtgcgaggtggcaagaaagctgggcaccgacgacagagaagtggtgctgttcctgctgaacgtgttcatccctcagcctacactggcccagctgatcggtgcactgagagccctgaaagaggaaggccggctgacctttcctctgctggccgaatgcctgttcagagccggaagaagggatctgctgcgggacctgctgcatctggaccccagatttctggaaagacacctggccggcaccatgagctacttcagcccttaccagctgaccgtgctgcacgttgacggcgaactgtgcgccagagatattcggagcctgatcttcctgagcaaggacaccatcggcagccggtctacccctcagacatttctgcactgggtgtactgcatggaaaacctggacctgctcggccccacagatgtggatgccctgatgtccatgctgagaagcctgagcagagtggacctccagagacaggtgcagacactgatgggactgcacctgagcggacctagccacagccagcactacagacacacccct

SEQ ID NO: 10181 - DNA, 2718 bp, Artificial Sequence
  Synthetic Polynucloetide
atggccttaccagtgaccgccttgctcctgccgctggccttgctgctccacgccgccaggccgctcgaggggaaaccaattcccaaccctcttctgggactggattcaaccggcagcggcgaggacctgaagaacgtgttcccacctgaggtggccgtgttcgagcctagcaaggccgagatcgcccacacccagaaagccaccctcgtgtgcctggctaccggcttctaccccgaccatgtggaactgtcttggtgggtcaacggcaaagaggtgcacagcggcgtgtgtaccgacccccagccactgaaagaacagcccgccctgaacgacagccggtactgcctgagcagcagactgagagtgtccgccaccttctggcagaacccccggaaccacttcagatgccaggtgcagttctacggcctgagcgagaacgacgagtggacccaggacagagccaagcccgtgacccagatcgtgtctgccgaagcctggggcagagccgattgcggcatcaccagcgccagctaccaccagggcgtgctgagcgccaccatcctgtacgagatcctgctgggcaaggccaccctgtacgccgtgctggtgtctgccctggtgctgatggctatggtcaagcggaaggacagccggggaagggccaagcgatctggatctggagcaacaaacttctcactactcaaacaagcaggtgacgtggaggagaatcccgggcctactagcatggccttaccagtgaccgccttgctcctgccgctggccttgctgctccacgccgccaggccggacatcgtgctgacacagagccctgcttctctggccgtttctcctggacagagggccaccatcacatgcagagccagcaagagcgtgtccaccagcggctacagctacatgcactggtatcagcagaagcccggccagcctcctaagctgctgatctacctggcctccaacctggaaagcggagtgcctgccagattttctggcagcggctctggcaccgacttcaccctgacaatcaaccccgtggaagccaacgacaccgccaactactactgccagcacagcagagagctgcccttcacatttggcggaggcaccaaggtggaaatcaagagaacaggcggaggcggaagtggaggcggaggatctggcggcggaggctctgaagtgcagctggttgagtctggcggcggacttgtgaaacctggcggaagcctgagactgagctgtgccgcttccggctttacctttagcggctacgccatgagctgggtccgacaggctcctggcaaaggactggaatgggtgtccacaatcagcagcggcggcacctacatctactaccccgatagcgtgaaaggccggttcaccatcagccgggacaacgccaagaacagcctgtacctccagatgaactccctgagagccgaggacaccgccgtgtactattgtgccagactcggcggcgacaattactacgagtatttcgacgtgtggggcaagggcaccaccgtgacagtttcttctacgcgtgagcagaaactgatctcggaagaggatgggagcggcatccagaaccctgatcctgccgtgtaccagctgcgggatagcaagagcagcgacaagagcgtgtgtctgttcaccgacttcgacagccagaccaacgtgtcccagagcaaggactccgacgtgtacatcaccgataagtgcgtgctggacatgcggagcatggacttcaagagcaactccgccgtggcctggtccaacaagtccgatttcgcctgcgccaacgccttcaacaacagcattatccccgaggacacattcttcccaagcagcgacgtgccctgcgacgtgaagctggtggaaaagagcttcgagacagacaccaacctgaacttccagaacctgagcgtgatcggcttcagaatcctgctgctgaaagtggccggctttaacctgctgatgaccctgcggctgtggtccagccgcgccaagagaagcggatctggcgtgaagcagaccctgaatttcgacctgctgaagctggctggcgacgtggaatccaacccaggcccttctagaggccatatgaccgagtacaagcccacggtgcgcctcgccacccgcgacgacgtccccagggccgtacgcaccctcgccgccgcgttcgccgactaccccgccacgcgccacaccgtcgatccggaccgccacatcgagcgggtcaccgagctgcaagaactcttcctcacgcgcgtcgggctcgacatcggcaaggtgtgggtcgcggacgacggcgccgcggtggcggtctggaccacgccggagagcgtcgaagcgggggcggtgttcgccgagatcggcccgcgcatggccgagttgagcggttcccggctggccgcgcagcaacagatggaaggcctcctggcgccgcaccggcccaaggagcccgcgtggttcctggccaccgtcggcgtctcgcccgaccaccagggcaagggtctgggcagcgccgtcgtgctccccggagtggaggcggccgagcgcgccggggtgcccgccttcctggagacctccgcgccccgcaacctccccttctacgagcggctcggcttcaccgtcaccgccgacgtcgaggtgcccgaaggaccgcgcacctggtgcatgacccgcaagcccggtgcctga

SEQ ID NO: 10182 - DNA, 2721 bp, Artificial Sequence
  Synthetic Polynucloetide
atggccttaccagtgaccgccttgctcctgccgctggccttgctgctccacgccgccaggccgctcgagcagaaactgatctcggaagaggatctgggctccggcgatcgccctgatcctgccgtgtaccagctgcgggatagcaagagcagcgacaagagcgtgtgtctgttcaccgacttcgacagccagaccaacgtgtcccagagcaaggactccgacgtgtacatcaccgataagtgcgtgctggacatgcggagcatggacttcaagagcaactccgccgtggcctggtccaacaagtccgatttcgcctgcgccaacgccttcaacaacagcattatccccgaggacacattcttcccaagccccgagagcagctgcgacgtgaagctggtggaaaagagcttcgagacagacaccaacctgaacttccagaacctgagcgtgatcggcttcagaatcctgctgctgaaagtggccggctttaacctgctgatgaccctgcggctgtggtccagctctagtcgcgccaagagaagcggatctggcgtgaagcagaccctgaatttcgacctgctgaagctggctggcgacgtggaatccaacccaggccccactagcatggccttaccagtgaccgccttgctcctgccgctggccttgctgctccacgccgccaggccggacatcgtgctgacacagagccctgcttctctggccgtttctcctggacagagggccaccatcacatgcagagccagcaagagcgtgtccaccagcggctacagctacatgcactggtatcagcagaagcccggccagcctcctaagctgctgatctacctggcctccaacctggaaagcggagtgcctgccagattttctggcagcggctctggcaccgacttcaccctgacaatcaaccccgtggaagccaacgacaccgccaactactactgccagcacagcagagagctgcccttcacatttggcggaggcaccaaggtggaaatcaagagaacaggcggaggcggaagtggaggcggaggatctggcggcggaggctctgaagtgcagctggttgagtctggcggcggacttgtgaaacctggcggaagcctgagactgagctgtgccgcttccggctttacctttagcggctacgccatgagctgggtccgacaggctcctggcaaaggactggaatgggtgtccacaatcagcagcggcggcacctacatctactaccccgatagcgtgaaaggccggttcaccatcagccgggacaacgccaagaacagcctgtacctccagatgaactccctgagagccgaggacaccgccgtgtactattgtgccagactcggcggcgacaattactacgagtatttcgacgtgtggggcaagggcaccaccgtgacagtttcttctacgcgtgggaaaccaattcccaaccctcttctgggactggattcaaccggcagcggcgaggacctgaagaacgtgttcccacctgaggtggccgtgttcgagcctagcgaggccgagatcagccacacccagaaagccaccctcgtgtgcctggctaccggcttctaccccgaccatgtggaactgtcttggtgggtcaacggcaaagaggtgcacagcggcgtgtgtaccgacccccagccactgaaagaacagcccgccctgaacgacagccggtactgcctgagcagcagactgagagtgtccgccaccttctggcagaacccccggaaccacttcagatgccaggtgcagttctacggcctgagcgagaacgacgagtggacccaggacagagccaagcccgtgacccagatcgtgtctgccgaagcctggggcagagccgattgcggctttaccagcgagagctaccagcagggcgtgctgagcgccaccatcctgtacgagatcctgctgggcaaggccaccctgtacgccgtgctggtgtctgccctggtgctgatggctatggtcaagcggaaggacagccggggaagggccaagcgatctggatctggagcaacaaacttctcactactcaaacaagcaggtgacgtggaggagaatcccgggccttctagaggccatatgaccgagtacaagcccacggtgcgcctcgccacccgcgacgacgtccccagggccgtacgcaccctcgccgccgcgttcgccgactaccccgccacgcgccacaccgtcgatccggaccgccacatcgagcgggtcaccgagctgcaagaactcttcctcacgcgcgtcgggctcgacatcggcaaggtgtgggtcgcggacgacggcgccgcggtggcggtctggaccacgccggagagcgtcgaagcgggggcggtgttcgccgagatcggcccgcgcatggccgagttgagcggttcccggctggccgcgcagcaacagatggaaggcctcctggcgccgcaccggcccaaggagcccgcgtggttcctggccaccgtcggcgtctcgcccgaccaccagggcaagggtctgggcagcgccgtcgtgctccccggagtggaggcggccgagcgcgccggggtgcccgccttcctggagacctccgcgccccgcaacctccccttctacgagcggctcggcttcaccgtcaccgccgacgtcgaggtgcccgaaggaccgcgcacctggtgcatgacccgcaagcccggtgcctga

SEQ ID NO: 10183 - DNA, 2583 bp, Artificial Sequence
  Synthetic Polynucloetide
atggccttaccagtgaccgccttgctcctgccgctggccttgctgctccacgccgccaggccggacatcgtgctgacacagagccctgcttctctggccgtttctcctggacagagggccaccatcacatgcagagccagcaagagcgtgtccaccagcggctacagctacatgcactggtatcagcagaagcccggccagcctcctaagctgctgatctacctggcctccaacctggaaagcggagtgcctgccagattttctggcagcggctctggcaccgacttcaccctgacaatcaaccccgtggaagccaacgacaccgccaactactactgccagcacagcagagagctgcccttcacatttggcggaggcaccaaggtggaaatcaagagaacactcgaggacctgaagaacgtgttcccacctgaggtggccgtgttcgagcctagcgaggccgagatcagccacacccagaaagccaccctcgtgtgcctggctaccggcttctaccccgaccatgtggaactgtcttggtgggtcaacggcaaagaggtgcacagcggcgtgtctaccgacccccagccactgaaagaacagcccgccctgaacgacagccggtactgcctgagcagcagactgagagtgtccgccaccttctggcagaacccccggaaccacttcagatgccaggtgcagttctacggcctgagcgagaacgacgagtggacccaggacagagccaagcccgtgacccagatcgtgtctgccgaagcctggggcagagccgattgcggctttaccagcgagagctaccagcagggcgtgctgagcgccaccatcctgtacgagatcctgctgggcaaggccaccctgtacgccgtgctggtgtctgccctggtgctgatggctatggtcaagcggaaggacagccggggaagggccaagcgatctggatctggagcaacaaacttctcactactcaaacaagcaggtgacgtggaggagaatcccgggcctactagtatggactggatttggcgcatccttttccttgtcggcgctgctaccggcgcgcattccttcgaagaagtgcagctggttgagtctggcggcggacttgtgaaacctggcggaagcctgagactgagctgtgccgcttccggctttacctttagcggctacgccatgagctgggtccgacaggctcctggcaaaggactggaatgggtgtccacaatcagcagcggcggcacctacatctactaccccgatagcgtgaaaggccggttcaccatcagccgggacaacgccaagaacagcctgtacctccagatgaactccctgagagccgaggacaccgccgtgtactattgtgccagactcggcggcgacaattactacgagtatttcgacgtgtggggcaagggcaccaccgtgacagtttcttctacgcgtatccagaaccctgatcctgccgtgtaccagctgcgggatagcaagagcagcgacaagagcgtgtgtctgttcaccgacttcgacagccagaccaacgtgtcccagagcaaggactccgacgtgtacatcaccgataagaccgtgctggacatgcggagcatggacttcaagagcaactccgccgtggcctggtccaacaagtccgatttcgcctgcgccaacgccttcaacaacagcattatccccgaggacacattcttcccaagccccgagagcagctgcgacgtgaagctggtggaaaagagcttcgagacagacaccaacctgaacttccagaacctgagcgtgatcggcttcagaatcctgctgctgaaagtggccggctttaacctgctgatgaccctgcggctgtggtccagccgcgccaagagaagcggatctggcgtgaagcagaccctgaatttcgacctgctgaagctggctggcgacgtggaatccaacccaggcccttctagaggccatatgaccgagtacaagcccacggtgcgcctcgccacccgcgacgacgtccccagggccgtacgcaccctcgccgccgcgttcgccgactaccccgccacgcgccacaccgtcgatccggaccgccacatcgagcgggtcaccgagctgcaagaactcttcctcacgcgcgtcgggctcgacatcggcaaggtgtgggtcgcggacgacggcgccgcggtggcggtctggaccacgccggagagcgtcgaagcgggggcggtgttcgccgagatcggcccgcgcatggccgagttgagcggttcccggctggccgcgcagcaacagatggaaggcctcctggcgccgcaccggcccaaggagcccgcgtggttcctggccaccgtcggcgtctcgcccgaccaccagggcaagggtctgggcagcgccgtcgtgctccccggagtggaggcggccgagcgcgccggggtgcccgccttcctggagacctccgcgccccgcaacctccccttctacgagcggctcggcttcaccgtcaccgccgacgtcgaggtgcccgaaggaccgcgcacctggtgcatgacccgcaagcccggtgcctga

SEQ ID NO: 10184 - DNA, 2829 bp, Artificial Sequence
  Synthetic Polynucloetide
atggccttaccagtgaccgccttgctcctgccgctggccttgctgctccacgccgccaggccggacatcgtgctgacacagagccctgcttctctggccgtttctcctggacagagggccaccatcacatgcagagccagcaagagcgtgtccaccagcggctacagctacatgcactggtatcagcagaagcccggccagcctcctaagctgctgatctacctggcctccaacctggaaagcggagtgcctgccagattttctggcagcggctctggcaccgacttcaccctgacaatcaaccccgtggaagccaacgacaccgccaactactactgccagcacagcagagagctgcccttcacatttggcggaggcaccaaggtggaaatcaagagaacactcgaggacctgaagaacgtgttcccacctgaggtggccgtgttcgagcctagcgaggccgagatcagccacacccagaaagccaccctcgtgtgcctggctaccggcttctaccccgaccatgtggaactgtcttggtgggtcaacggcaaagaggtgcacagcggcgtgtctaccgacccccagccactgaaagaacagcccgccctgaacgacagccggtactgcctgagcagcagactgagagtgtccgccaccttctggcagaacccccggaaccacttcagatgccaggtgcagttctacggcctgagcgagaacgacgagtggacccaggacagagccaagcccgtgacccagatcgtgtctgccgaagcctggggcagagccgattgcggctttaccagcgagagctaccagcagggcgtgctgagcgccaccatcctgtacgagatcctgctgggcaaggccaccctgtacgccgtgctggtgtctgccctggtgctgatggctatggtcaagcggaaggacagccggggaagggccaagcgatctggatctggagcaacaaacttctcactactcaaacaagcaggtgacgtggaggagaatcccgggcctactagtatggactggatttggcgcatccttttccttgtcggcgctgctaccggcgcgcattccttcgaagaagtgcagctggttgagtctggcggcggacttgtgaaacctggcggaagcctgagactgagctgtgccgcttccggctttacctttagcggctacgccatgagctgggtccgacaggctcctggcaaaggactggaatgggtgtccacaatcagcagcggcggcacctacatctactaccccgatagcgtgaaaggccggttcaccatcagccgggacaacgccaagaacagcctgtacctccagatgaactccctgagagccgaggacaccgccgtgtactattgtgccagactcggcggcgacaattactacgagtatttcgacgtgtggggcaagggcaccaccgtgacagtttcttctacgcgtgagcagaaactgatctcggaagaggatgggagcggcaccccattcccttctctggcccctcccatcatgctgctggtggacggcaagcagcagatggtggtcgtgtgcctggtgctggatgtggccccacctggactggacagccccatctggtttagcgccggcaatggctctgccctggacgcctttacctacggcccaagccctgccaccgatggcacctggacaaatctggcccacctgagcctgcccagcgaggaactggcttcttgggagcctctcgtgtgccacacaggacctggcgctgagggacacagcagatccacccagcctatgcacctgtctggcgaggccagcaccgccagaacctgtcctcaggaacctctgagaggcacccctggcggagcactgtggctgggagtgctgagactgctgctgttcaagctgctgctgtttgacctgctgctgacctgctcctgtctgtgcgatcctgccggccctctgccttctcctgccaccaccacaagactgagagccctgggcagccacagactgcaccctgccacagagacaggcggcagagaggccacaagcagccctagaccccagcccagagacagaagatggggcgataccccccctggcagaaagcctggatctccagtccgcgccaagagaagcggatctggcgtgaagcagaccctgaatttcgacctgctgaagctggctggcgacgtggaatccaacccaggcccttctagaggccatatgaccgagtacaagcccacggtgcgcctcgccacccgcgacgacgtccccagggccgtacgcaccctcgccgccgcgttcgccgactaccccgccacgcgccacaccgtcgatccggaccgccacatcgagcgggtcaccgagctgcaagaactcttcctcacgcgcgtcgggctcgacatcggcaaggtgtgggtcgcggacgacggcgccgcggtggcggtctggaccacgccggagagcgtcgaagcgggggcggtgttcgccgagatcggcccgcgcatggccgagttgagcggttcccggctggccgcgcagcaacagatggaaggcctcctggcgccgcaccggcccaaggagcccgcgtggttcctggccaccgtcggcgtctcgcccgaccaccagggcaagggtctgggcagcgccgtcgtgctccccggagtggaggcggccgagcgcgccggggtgcccgccttcctggagacctccgcgccccgcaacctccccttctacgagcggctcggcttcaccgtcaccgccgacgtcgaggtgcccgaaggaccgcgcacctggtgcatgacccgcaagcccggtgcctga

SEQ ID NO: 10185 - DNA, 2883 bp, Artificial Sequence
  Synthetic Polynucloetide
atggccttaccagtgaccgccttgctcctgccgctggccttgctgctccacgccgccaggccgctcgaggacctgaagaacgtgttcccacctgaggtggccgtgttcgagcctagcgaggccgagatcagccacacccagaaagccaccctcgtgtgcctggctaccggcttctaccccgaccatgtggaactgtcttggtgggtcaacggcaaagaggtgcacagcggcgtgtctaccgacccccagccactgaaagaacagcccgccctgaacgacagccggtactgcctgagcagcagactgagagtgtccgccaccttctggcagaacccccggaaccacttcagatgccaggtgcagttctacggcctgagcgagaacgacgagtggacccaggacagagccaagcccgtgacccagatcgtgtctgccgaagcctggggcagagccgattgcggctttaccagcgagagctaccagcagggcgtgctgagcgccaccatcctgtacgagatcctgctgggcaaggccaccctgtacgccgtgctggtgtctgccctggtgctgatggctatggtcaagcggaaggacagccggggaagggccaagcgatctggatctggagcaacaaacttctcactactcaaacaagcaggtgacgtggaggagaatcccgggcctactagcatggccttaccagtgaccgccttgctcctgccgctggccttgctgctccacgccgccaggccggacatcgtgctgacacagagccctgcttctctggccgtttctcctggacagagggccaccatcacatgcagagccagcaagagcgtgtccaccagcggctacagctacatgcactggtatcagcagaagcccggccagcctcctaagctgctgatctacctggcctccaacctggaaagcggagtgcctgccagattttctggcagcggctctggcaccgacttcaccctgacaatcaaccccgtggaagccaacgacaccgccaactactactgccagcacagcagagagctgcccttcacatttggcggaggcaccaaggtggaaatcaagagaacaggcggaggcggaagtggaggcggaggatctggcggcggaggctctgaagtgcagctggttgagtctggcggcggacttgtgaaacctggcggaagcctgagactgagctgtgccgcttccggctttacctttagcggctacgccatgagctgggtccgacaggctcctggcaaaggactggaatgggtgtccacaatcagcagcggcggcacctacatctactaccccgatagcgtgaaaggccggttcaccatcagccgggacaacgccaagaacagcctgtacctccagatgaactccctgagagccgaggacaccgccgtgtactattgtgccagactcggcggcgacaattactacgagtatttcgacgtgtggggcaagggcaccaccgtgacagtttcttctacgcgtgagcagaaactgatctcggaagaggatctggggagcggcaccccattcccttctctggcccctcccatcatgctgctggtggacggcaagcagcagatggtggtcgtgtgcctggtgctggatgtggccccacctggactggacagccccatctggtttagcgccggcaatggctctgccctggacgcctttacctacggcccaagccctgccaccgatggcacctggacaaatctggcccacctgagcctgcccagcgaggaactggcttcttgggagcctctcgtgtgccacacaggacctggcgctgagggacacagcagatccacccagcctatgcacctgtctggcgaggccagcaccgccagaacctgtcctcaggaacctctgagaggcacccctggcggagcactgtggctgggagtgctgagactgctgctgttcaagctgctgctgtttgacctgctgctgacctgctcctgtctgtgcgatcctgccggccctctgccttctcctgccaccaccacaagactgagagccctgggcagccacagactgcaccctgccacagagacaggcggcagagaggccacaagcagccctagaccccagcccagagacagaagatggggcgataccccccctggcagaaagcctggatctccagtccgcgccaagagaagcggatctggcgtgaagcagaccctgaatttcgacctgctgaagctggctggcgacgtggaatccaacccaggcccttctagatctagaggccatatgaccgagtacaagcccacggtgcgcctcgccacccgcgacgacgtccccagggccgtacgcaccctcgccgccgcgttcgccgactaccccgccacgcgccacaccgtcgatccggaccgccacatcgagcgggtcaccgagctgcaagaactcttcctcacgcgcgtcgggctcgacatcggcaaggtgtgggtcgcggacgacggcgccgcggtggcggtctggaccacgccggagagcgtcgaagcgggggcggtgttcgccgagatcggcccgcgcatggccgagttgagcggttcccggctggccgcgcagcaacagatggaaggcctcctggcgccgcaccggcccaaggagcccgcgtggttcctggccaccgtcggcgtctcgcccgaccaccagggcaagggtctgggcagcgccgtcgtgctccccggagtggaggcggccgagcgcgccggggtgcccgccttcctggagacctccgcgccccgcaacctccccttctacgagcggctcggcttcaccgtcaccgccgacgtcgaggtgcccgaaggaccgcgcacctggtgcatgacccgcaagcccggtgcctga

SEQ ID NO: 10186 - DNA, 2694 bp, Artificial Sequence
  Synthetic Polynucloetide
atggccttaccagtgaccgccttgctcctgccgctggccttgctgctccacgccgccaggccggacatcgtgctgacacagagccctgcttctctggccgtttctcctggacagagggccaccatcacatgcagagccagcaagagcgtgtccaccagcggctacagctacatgcactggtatcagcagaagcccggccagcctcctaagctgctgatctacctggcctccaacctggaaagcggagtgcctgccagattttctggcagcggctctggcaccgacttcaccctgacaatcaaccccgtggaagccaacgacaccgccaactactactgccagcacagcagagagctgcccttcacatttggcggaggcaccaaggtggaaatcaagagaacactcgaggggaaaccaattcccaaccctcttctgggactggattcaaccggcagcggcgacaagcagctggacgccgacgtgtcccccaagcctaccatcttcctgccctctatcgccgagacaaagctccagaaggccggcacctacctgtgcctgctggaaaagttcttcccagatgtgattaagatccactggcaggaaaagaagtccaacaccatcctgggcagccaggaaggcaacaccatgaagaccaacgacacctacatgaagttcagctggctgaccgtgcccgagaagtccctggacaaagaacacagatgcatcgtgcggcacgaaaacaacaagaacggcgtggaccaggaaatcatcttcccacccatcaagaccgatgtgattacaatggaccccaaggacaactgctccaaggacgccaacgataccctgctgctccagctgaccaacaccagcgcctactacatgtacttgttgctgctgctgaagtccgtggtgtacttcgccatcatcacatgctgcctgctgcggagaaccgccttctgctgcaacggcgagaagtctagggccaagcgatctggatctggagcaacaaacttctcactactcaaacaagcaggtgacgtggaggagaatcccgggcctactagtatggactggatttggcgcatccttttccttgtcggcgctgctaccggcgcgcattccttcgaagaagtgcagctggttgagtctggcggcggacttgtgaaacctggcggaagcctgagactgagctgtgccgcttccggctttacctttagcggctacgccatgagctgggtccgacaggctcctggcaaaggactggaatgggtgtccacaatcagcagcggcggcacctacatctactaccccgatagcgtgaaaggccggttcaccatcagccgggacaacgccaagaacagcctgtacctccagatgaactccctgagagccgaggacaccgccgtgtactattgtgccagactcggcggcgacaattactacgagtatttcgacgtgtggggcaagggcaccaccgtgacagtttcttctacgcgtgagcagaaactgatctcggaagaggatgggagcggcagccagcctcacaccaagcccagcgtgttcgtgatgaagaacggcaccaacgtggcctgcctcgtgaaagagttctaccccaaggacatcaggatcaacctggtgtccagcaagaagatcaccgagttcgaccccgccatcgtgatctcccccagcggcaagtacaacgccgtgaagctggggaagtacgaggacagcaacagcgtgacctgctccgtgcagcacgacaacaagaccgtgcacagcaccgactttgaagtgaaaaccgactccaccgaccacgtgaagcccaaagagacagagaacaccaagcagcccagcaagagctgccacaagcccaaggccatcgtgcacaccgagaaagtgaacatgatgagcctgaccgtgctgggcctgcggatgctgttcgccaaaaccgtggccgtgaacttcctgctgaccgccaagctgttcttcctccgcgccaagagaagcggatctggcgtgaagcagaccctgaatttcgacctgctgaagctggctggcgacgtggaatccaacccaggcccttctagaggccatatgaccgagtacaagcccacggtgcgcctcgccacccgcgacgacgtccccagggccgtacgcaccctcgccgccgcgttcgccgactaccccgccacgcgccacaccgtcgatccggaccgccacatcgagcgggtcaccgagctgcaagaactcttcctcacgcgcgtcgggctcgacatcggcaaggtgtgggtcgcggacgacggcgccgcggtggcggtctggaccacgccggagagcgtcgaagcgggggcggtgttcgccgagatcggcccgcgcatggccgagttgagcggttcccggctggccgcgcagcaacagatggaaggcctcctggcgccgcaccggcccaaggagcccgcgtggttcctggccaccgtcggcgtctcgcccgaccaccagggcaagggtctgggcagcgccgtcgtgctccccggagtggaggcggccgagcgcgccggggtgcccgccttcctggagacctccgcgccccgcaacctccccttctacgagcggctcggcttcaccgtcaccgccgacgtcgaggtgcccgaaggaccgcgcacctggtgcatgacccgcaagcccggtgcctga

SEQ ID NO: 10187 - DNA, 1905 bp, Artificial Sequence
  Synthetic Polynucloetide
atggccttaccagtgaccgccttgctcctgccgctggccttgctgctccacgccgccaggccggacatcgtgctgacacagagccctgcttctctggccgtttctcctggacagagggccaccatcacatgcagagccagcaagagcgtgtccaccagcggctacagctacatgcactggtatcagcagaagcccggccagcctcctaagctgctgatctacctggcctccaacctggaaagcggagtgcctgccagattttctggcagcggctctggcaccgacttcaccctgacaatcaaccccgtggaagccaacgacaccgccaactactactgccagcacagcagagagctgcccttcacatttggcggaggcaccaaggtggaaatcaagagaacactcgagagccagcctcacaccaagcccagcgtgttcgtgatgaagaacggcaccaacgtggcctgcctcgtgaaagagttctaccccaaggacatcaggatcaacctggtgtccagcaagaagatcaccgagttcgaccccgccatcgtgatctcccccagcggcaagtacaacgccgtgaagctggggaagtacgaggacagcaacagcgtgacctgctccgtgcagcacgacaacaagaccgtgcacagcaccgactttgaagtgaaaaccgactccaccgaccacgtgaagcccaaagagacagagaacaccaagcagcccagcaagagctgccacaagcccaaggccatcgtgcacaccgagaaagtgaacatgatgagcctgaccgtgctgggcctgcggatgctgttcgccaaaaccgtggccgtgaacttcctgctgaccgccaagctgttcttcctcagggccaagcgatctggatctggagcaacaaacttctcactactcaaacaagcaggtgacgtggaggagaatcccgggcctactagtatggactggatttggcgcatccttttccttgtcggcgctgctaccggcgcgcattccttcgaagaagtgcagctggttgagtctggcggcggacttgtgaaacctggcggaagcctgagactgagctgtgccgcttccggctttacctttagcggctacgccatgagctgggtccgacaggctcctggcaaaggactggaatgggtgtccacaatcagcagcggcggcacctacatctactaccccgatagcgtgaaaggccggttcaccatcagccgggacaacgccaagaacagcctgtacctccagatgaactccctgagagccgaggacaccgccgtgtactattgtgccagactcggcggcgacaattactacgagtatttcgacgtgtggggcaagggcaccaccgtgacagtttcttctacgcgtgacaagcagctggacgccgacgtgtcccccaagcctaccatcttcctgccctctatcgccgagacaaagctccagaaggccggcacctacctgtgcctgctggaaaagttcttcccagatgtgattaagatccactggcaggaaaagaagtccaacaccatcctgggcagccaggaaggcaacaccatgaagaccaacgacacctacatgaagttcagctggctgaccgtgcccgagaagtccctggacaaagaacacagatgcatcgtgcggcacgaaaacaacaagaacggcgtggaccaggaaatcatcttcccacccatcaagaccgatgtgattacaatggaccccaaggacaactgctccaaggacgccaacgataccctgctgctccagctgaccaacaccagcgcctactacatgtacttgttgctgctgctgaagtccgtggtgtacttcgccatcatcacatgctgcctgctgcggagaaccgccttctgctgcaacggcgagaagtct

SEQ ID NO: 10188 - DNA, 2739 bp, Artificial Sequence
  Synthetic Polynucloetide
atggccttaccagtgaccgccttgctcctgccgctggccttgctgctccacgccgccaggccgctcgaggggaaaccaattcccaaccctcttctgggactggattcaaccggcagcggcgacaagcagctggacgccgacgtgtcccccaagcctaccatcttcctgccctctatcgccgagacaaagctccagaaggccggcacctacctgtgcctgctggaaaagttcttcccagatgtgattaagatccactggcaggaaaagaagtccaacaccatcctgggcagccaggaaggcaacaccatgaagaccaacgacacctacatgaagttcagctggctgaccgtgcccgagaagtccctggacaaagaacacagatgcatcgtgcggcacgaaaacaacaagaacggcgtggaccaggaaatcatcttcccacccatcaagaccgatgtgattacaatggaccccaaggacaactgctccaaggacgccaacgataccctgctgctccagctgaccaacaccagcgcctactacatgtacttgttgctgctgctgaagtccgtggtgtacttcgccatcatcacatgctgcctgctgcggagaaccgccttctgctgcaacggcgagaagtctagggccaagcgatctggatctggagcaacaaacttctcactactcaaacaagcaggtgacgtggaggagaatcccgggcctactagcatggccttaccagtgaccgccttgctcctgccgctggccttgctgctccacgccgccaggccggacatcgtgctgacacagagccctgcttctctggccgtttctcctggacagagggccaccatcacatgcagagccagcaagagcgtgtccaccagcggctacagctacatgcactggtatcagcagaagcccggccagcctcctaagctgctgatctacctggcctccaacctggaaagcggagtgcctgccagattttctggcagcggctctggcaccgacttcaccctgacaatcaaccccgtggaagccaacgacaccgccaactactactgccagcacagcagagagctgcccttcacatttggcggaggcaccaaggtggaaatcaagagaacaggcggaggcggaagtggaggcggaggatctggcggcggaggctctgaagtgcagctggttgagtctggcggcggacttgtgaaacctggcggaagcctgagactgagctgtgccgcttccggctttacctttagcggctacgccatgagctgggtccgacaggctcctggcaaaggactggaatgggtgtccacaatcagcagcggcggcacctacatctactaccccgatagcgtgaaaggccggttcaccatcagccgggacaacgccaagaacagcctgtacctccagatgaactccctgagagccgaggacaccgccgtgtactattgtgccagactcggcggcgacaattactacgagtatttcgacgtgtggggcaagggcaccaccgtgacagtttcttctacgcgtgagcagaaactgatctcggaagaggatgggagcggcagccagcctcacaccaagcccagcgtgttcgtgatgaagaacggcaccaacgtggcctgcctcgtgaaagagttctaccccaaggacatcaggatcaacctggtgtccagcaagaagatcaccgagttcgaccccgccatcgtgatctcccccagcggcaagtacaacgccgtgaagctggggaagtacgaggacagcaacagcgtgacctgctccgtgcagcacgacaacaagaccgtgcacagcaccgactttgaagtgaaaaccgactccaccgaccacgtgaagcccaaagagacagagaacaccaagcagcccagcaagagctgccacaagcccaaggccatcgtgcacaccgagaaagtgaacatgatgagcctgaccgtgctgggcctgcggatgctgttcgccaaaaccgtggccgtgaacttcctgctgaccgccaagctgttcttcctccgcgccaagagaagcggatctggcgtgaagcagaccctgaatttcgacctgctgaagctggctggcgacgtggaatccaacccaggcccttctagaggccatatgaccgagtacaagcccacggtgcgcctcgccacccgcgacgacgtccccagggccgtacgcaccctcgccgccgcgttcgccgactaccccgccacgcgccacaccgtcgatccggaccgccacatcgagcgggtcaccgagctgcaagaactcttcctcacgcgcgtcgggctcgacatcggcaaggtgtgggtcgcggacgacggcgccgcggtggcggtctggaccacgccggagagcgtcgaagcgggggcggtgttcgccgagatcggcccgcgcatggccgagttgagcggttcccggctggccgcgcagcaacagatggaaggcctcctggcgccgcaccggcccaaggagcccgcgtggttcctggccaccgtcggcgtctcgcccgaccaccagggcaagggtctgggcagcgccgtcgtgctccccggagtggaggcggccgagcgcgccggggtgcccgccttcctggagacctccgcgccccgcaacctccccttctacgagcggctcggcttcaccgtcaccgccgacgtcgaggtgcccgaaggaccgcgcacctggtgcatgacccgcaagcccggtgcctga

SEQ ID NO: 10189 - DNA, 3114 bp, Artificial Sequence
  Synthetic Polynucloetide
atggccttaccagtgaccgccttgctcctgccgctggccttgctgctccacgccgccaggccggacatcgtgctgacacagagccctgcttctctggccgtttctcctggacagagggccaccatcacatgcagagccagcaagagcgtgtccaccagcggctacagctacatgcactggtatcagcagaagcccggccagcctcctaagctgctgatctacctggcctccaacctggaaagcggagtgcctgccagattttctggcagcggctctggcaccgacttcaccctgacaatcaaccccgtggaagccaacgacaccgccaactactactgccagcacagcagagagctgcccttcacatttggcggaggcaccaaggtggaaatcaagagaacaggacagcctaaggccaatcctaccgtgacactgttccctccaagcagcgaagaactccaggccaacaaggccacacttgtgtgcctgatctccgacttctaccctggggctgtgacagtggcttggaaggccgatggatctcctgtgaaagccggcgtggaaaccaccaagccatccaagcagagcaacaacaaatacgccgccagctcctacctgagcctgacacctgagcagtggaagtcccacagatcctacagctgccaagtgacccacgaaggcagcaccgtggaaaagacagtggcccctacagagtgcagcggatcccagagcttcggcctgctggaccccaagctgtgctacctgctggatggcatcctgttcatctacggcgtgatcctgaccgccctgttcctgagagtgaagttcagcagaagcgccgacgcccctgcctaccagcagggacagaaccaactgtacaacgagctgaacctgggcagacgggaagagtacgacgtgctggacaagcggagaggcagggaccctgagatgggcggaaagccccagcggagaaagaacccccaggaaggactgtataacgaactccagaaagacaagatggccgaagcctacagcgagatcggcatgaagggcgagcggagaagaggcaagggccacgatggcctgtaccagggcctgagcaccgccaccaaggacacctatgacgccctgcacatgcaggccctgcctccaagaagggccaagcgatctggatctggagcaacaaacttctcactactcaaacaagcaggtgacgtggaggagaatcccgggcctactagtatggactggatttggcgcatccttttccttgtcggcgctgctaccggcgcgcattccttcgaagaagtgcagctggttgagtctggcggcggacttgtgaaacctggcggaagcctgagactgagctgtgccgcttccggctttacctttagcggctacgccatgagctgggtccgacaggctcctggcaaaggactggaatgggtgtccacaatcagcagcggcggcacctacatctactaccccgatagcgtgaaaggccggttcaccatcagccgggacaacgccaagaacagcctgtacctccagatgaactccctgagagccgaggacaccgccgtgtactattgtgccagactcggcggcgacaattactacgagtatttcgacgtgtggggcaagggcaccaccgtgacagtttcttctgcctctacaaagggaccctccgtgtttcctctggctcccagcagcaagtctacaagcggaggaacagccgctctgggctgcctggtcaaggattactttcccgagcctgtgaccgtgtcctggaatagcggagcactgacaagcggcgtgcacacctttccagccgtgctgcaaagcagcggcctgtactctctgagcagcgtggtcacagtgcctagctctagcctgggcacccagacctacatctgcaatgtgaaccacaagcctagcaacaccaaggtggacaagagagtggaacccaagagctgtggtacccagagttttgggttgttggaccctaaattgtgctatctgttggacggaatcctgttcatttacggagtgatcctgaccgcattgttcctgcgggttaagttttccagatccgcagacgcacccgcttaccaacaagggcagaaccaactctacaatgaacttaatttggggcggagggaagagtacgacgttctggacaaaaggaggggacgagatcccgagatgggcggaaagcctcagcgaaggaagaatccgcaagaggggctttataacgaactccagaaagataaaatggcagaagcctatagtgagattgggatgaagggagaaaggaggaggggtaaaggtcacgatgggttgtaccaaggattgagcacagccactaaagatacctatgatgcgctccacatgcaggccctgccgccaagacgcgccaagagaagcggatctggcgtgaagcagaccctgaatttcgacctgctgaagctggctggcgacgtggaatccaacccaggcccttctagaggccatatgaccgagtacaagcccacggtgcgcctcgccacccgcgacgacgtccccagggccgtacgcaccctcgccgccgcgttcgccgactaccccgccacgcgccacaccgtcgatccggaccgccacatcgagcgggtcaccgagctgcaagaactcttcctcacgcgcgtcgggctcgacatcggcaaggtgtgggtcgcggacgacggcgccgcggtggcggtctggaccacgccggagagcgtcgaagcgggggcggtgttcgccgagatcggcccgcgcatggccgagttgagcggttcccggctggccgcgcagcaacagatggaaggcctcctggcgccgcaccggcccaaggagcccgcgtggttcctggccaccgtcggcgtctcgcccgaccaccagggcaagggtctgggcagcgccgtcgtgctccccggagtggaggcggccgagcgcgccggggtgcccgccttcctggagacctccgcgccccgcaacctccccttctacgagcggctcggcttcaccgtcaccgccgacgtcgaggtgcccgaaggaccgcgcacctggtgcatgacccgcaagcccggtgcctga

SEQ ID NO: 10190 - DNA, 2469 bp, Artificial Sequence
  Synthetic Polynucloetide
atggccttaccagtgaccgccttgctcctgccgctggccttgctgctccacgccgccaggccggacatcgtgctgacacagagccctgcttctctggccgtttctcctggacagagggccaccatcacatgcagagccagcaagagcgtgtccaccagcggctacagctacatgcactggtatcagcagaagcccggccagcctcctaagctgctgatctacctggcctccaacctggaaagcggagtgcctgccagattttctggcagcggctctggcaccgacttcaccctgacaatcaaccccgtggaagccaacgacaccgccaactactactgccagcacagcagagagctgcccttcacatttggcggaggcaccaaggtggaaatcaagagaacactcgaggacctgaagaacgtgttcccacctgaggtggccgtgttcgagcctagcgaggccgagatcagccacacccagaaagccaccctcgtgtgcctggctaccggcttctaccccgaccatgtggaactgtcttggtgggtcaacggcaaagaggtgcacagcggcgtgtctaccgacccccagccactgaaagaacagcccgccctgaacgacagccggtactgcctgagcagcagactgagagtgtccgccaccttctggcagaacccccggaaccacttcagatgccaggtgcagttctacggcctgagcgagaacgacgagtggacccaggacagagccaagcccgtgacccagatcgtgtctgccgaagcctggggcagagccgattgcggatcccagagcttcggcctgctggaccccaagctgtgctacctgctggatggcatcctgttcatctacggcgtgatcctgaccgccctgttcctgagagtgaagttcagcagaagcgccgacgcccctgcctaccagcagggacagaaccaactgtacaacgagctgaacctgggcagacgggaagagtacgacgtgctggacaagcggagaggcagggaccctgagatgggcggaaagccccagcggagaaagaacccccaggaaggactgtataacgaactccagaaagacaagatggccgaagcctacagcgagatcggcatgaagggcgagcggagaagaggcaagggccacgatggcctgtaccagggcctgagcaccgccaccaaggacacctatgacgccctgcacatgcaggccctgcctccaagaagggccaagcgatctggatctggagcaacaaacttctcactactcaaacaagcaggtgacgtggaggagaatcccgggcctactagtatggactggatttggcgcatccttttccttgtcggcgctgctaccggcgcgcattccttcgaagaagtgcagctggttgagtctggcggcggacttgtgaaacctggcggaagcctgagactgagctgtgccgcttccggctttacctttagcggctacgccatgagctgggtccgacaggctcctggcaaaggactggaatgggtgtccacaatcagcagcggcggcacctacatctactaccccgatagcgtgaaaggccggttcaccatcagccgggacaacgccaagaacagcctgtacctccagatgaactccctgagagccgaggacaccgccgtgtactattgtgccagactcggcggcgacaattactacgagtatttcgacgtgtggggcaagggcaccaccgtgacagtttcttctacgcgtatccagaaccctgatcctgccgtgtaccagctgcgggatagcaagagcagcgacaagagcgtgtgtctgttcaccgacttcgacagccagaccaacgtgtcccagagcaaggactccgacgtgtacatcaccgataagaccgtgctggacatgcggagcatggacttcaagagcaactccgccgtggcctggtccaacaagtccgatttcgcctgcgccaacgccttcaacaacagcattatccccgaggacacattcttcccaagccccgagagcagctgcggtacccagagttttgggttgttggaccctaaattgtgctatctgttggacggaatcctgttcatttacggagtgatcctgaccgcattgttcctgcgggttaagttttccagatccgcagacgcacccgcttaccaacaagggcagaaccaactctacaatgaacttaatttggggcggagggaagagtacgacgttctggacaaaaggaggggacgagatcccgagatgggcggaaagcctcagcgaaggaagaatccgcaagaggggctttataacgaactccagaaagataaaatggcagaagcctatagtgagattgggatgaagggagaaaggaggaggggtaaaggtcacgatgggttgtaccaaggattgagcacagccactaaagatacctatgatgcgctccacatgcaggccctgccgccaaga

SEQ ID NO: 10191 - DNA, 2469 bp, Artificial Sequence
  Synthetic Polynucloetide
atggccttaccagtgaccgccttgctcctgccgctggccttgctgctccacgccgccaggccggacatcgtgctgacacagagccctgcttctctggccgtttctcctggacagagggccaccatcacatgcagagccagcaagagcgtgtccaccagcggctacagctacatgcactggtatcagcagaagcccggccagcctcctaagctgctgatctacctggcctccaacctggaaagcggagtgcctgccagattttctggcagcggctctggcaccgacttcaccctgacaatcaaccccgtggaagccaacgacaccgccaactactactgccagcacagcagagagctgcccttcacatttggcggaggcaccaaggtggaaatcaagagaacactcgaggacctgaagaacgtgttcccacctgaggtggccgtgttcgagcctagcaaggccgagatcgcccacacccagaaagccaccctcgtgtgcctggctaccggcttctaccccgaccatgtggaactgtcttggtgggtcaacggcaaagaggtgcacagcggcgtgtgtaccgacccccagccactgaaagaacagcccgccctgaacgacagccggtactgcctgagcagcagactgagagtgtccgccaccttctggcagaacccccggaaccacttcagatgccaggtgcagttctacggcctgagcgagaacgacgagtggacccaggacagagccaagcccgtgacccagatcgtgtctgccgaagcctggggcagagccgattgcggatcccagagcttcggcctgctggaccccaagctgtgctacctgctggatggcatcctgttcatctacggcgtgatcctgaccgccctgttcctgagagtgaagttcagcagaagcgccgacgcccctgcctaccagcagggacagaaccaactgtacaacgagctgaacctgggcagacgggaagagtacgacgtgctggacaagcggagaggcagggaccctgagatgggcggaaagccccagcggagaaagaacccccaggaaggactgtataacgaactccagaaagacaagatggccgaagcctacagcgagatcggcatgaagggcgagcggagaagaggcaagggccacgatggcctgtaccagggcctgagcaccgccaccaaggacacctatgacgccctgcacatgcaggccctgcctccaagaagggccaagcgatctggatctggagcaacaaacttctcactactcaaacaagcaggtgacgtggaggagaatcccgggcctactagtatggactggatttggcgcatccttttccttgtcggcgctgctaccggcgcgcattccttcgaagaagtgcagctggttgagtctggcggcggacttgtgaaacctggcggaagcctgagactgagctgtgccgcttccggctttacctttagcggctacgccatgagctgggtccgacaggctcctggcaaaggactggaatgggtgtccacaatcagcagcggcggcacctacatctactaccccgatagcgtgaaaggccggttcaccatcagccgggacaacgccaagaacagcctgtacctccagatgaactccctgagagccgaggacaccgccgtgtactattgtgccagactcggcggcgacaattactacgagtatttcgacgtgtggggcaagggcaccaccgtgacagtttcttctacgcgtatccagaaccctgatcctgccgtgtaccagctgcgggatagcaagagcagcgacaagagcgtgtgtctgttcaccgacttcgacagccagaccaacgtgtcccagagcaaggactccgacgtgtacatcaccgataagtgcgtgctggacatgcggagcatggacttcaagagcaactccgccgtggcctggtccaacaagtccgatttcgcctgcgccaacgccttcaacaacagcattatccccgaggacacattcttcccaagcagcgacgtgccctgcggtacccagagttttgggttgttggaccctaaattgtgctatctgttggacggaatcctgttcatttacggagtgatcctgaccgcattgttcctgcgggttaagttttccagatccgcagacgcacccgcttaccaacaagggcagaaccaactctacaatgaacttaatttggggcggagggaagagtacgacgttctggacaaaaggaggggacgagatcccgagatgggcggaaagcctcagcgaaggaagaatccgcaagaggggctttataacgaactccagaaagataaaatggcagaagcctatagtgagattgggatgaagggagaaaggaggaggggtaaaggtcacgatgggttgtaccaaggattgagcacagccactaaagatacctatgatgcgctccacatgcaggccctgccgccaaga

SEQ ID NO: 10192 - DNA, 2682 bp, Artificial Sequence
  Synthetic Polynucloetide
atggccttaccagtgaccgccttgctcctgccgctggccttgctgctccacgccgccaggccggacatcgtgctgacacagagccctgcttctctggccgtttctcctggacagagggccaccatcacatgcagagccagcaagagcgtgtccaccagcggctacagctacatgcactggtatcagcagaagcccggccagcctcctaagctgctgatctacctggcctccaacctggaaagcggagtgcctgccagattttctggcagcggctctggcaccgacttcaccctgacaatcaaccccgtggaagccaacgacaccgccaactactactgccagcacagcagagagctgcccttcacatttggcggaggcaccaaggtggaaatcaagagaacactcgaggggaaaccaattcccaaccctcttctgggactggattcaaccggcagcggcgaggacctgaagaacgtgttcccacctgaggtggccgtgttcgagcctagcgaggccgagatcagccacacccagaaagccaccctcgtgtgcctggctaccggcttctaccccgaccatgtggaactgtcttggtgggtcaacggcaaagaggtgcacagcggcgtgtctaccgacccccagccactgaaagaacagcccgccctgaacgacagccggtactgcctgagcagcagactgagagtgtccgccaccttctggcagaacccccggaaccacttcagatgccaggtgcagttctacggcctgagcgagaacgacgagtggacccaggacagagccaagcccgtgacccagatcgtgtctgccgaagcctggggcagagccgattgcggatcccagagcttcggcctgctggaccccaagctgtgctacctgctggatggcatcctgttcatctacggcgtgatcctgaccgccctgttcctgagagtgaagttcagcagaagcgccgacgcccctgcctaccagcagggacagaaccaactgtacaacgagctgaacctgggcagacgggaagagtacgacgtgctggacaagcggagaggcagggaccctgagatgggcggaaagccccagcggagaaagaacccccaggaaggactgtataacgaactccagaaagacaagatggccgaagcctacagcgagatcggcatgaagggcgagcggagaagaggcaagggccacgatggcctgtaccagggcctgagcaccgccaccaaggacacctatgacgccctgcacatgcaggccctgcctccaagaagggccaagcgatctggatctggagcaacaaacttctcactactcaaacaagcaggtgacgtggaggagaatcccgggcctactagtatggactggatttggcgcatccttttccttgtcggcgctgctaccggcgcgcattccttcgaagaagtgcagctggttgagtctggcggcggacttgtgaaacctggcggaagcctgagactgagctgtgccgcttccggctttacctttagcggctacgccatgagctgggtccgacaggctcctggcaaaggactggaatgggtgtccacaatcagcagcggcggcacctacatctactaccccgatagcgtgaaaggccggttcaccatcagccgggacaacgccaagaacagcctgtacctccagatgaactccctgagagccgaggacaccgccgtgtactattgtgccagactcggcggcgacaattactacgagtatttcgacgtgtggggcaagggcaccaccgtgacagtttcttctacgcgtgagcagaaactgatctcggaagaggatgggagcggcatccagaaccctgatcctgccgtgtaccagctgcgggatagcaagagcagcgacaagagcgtgtgtctgttcaccgacttcgacagccagaccaacgtgtcccagagcaaggactccgacgtgtacatcaccgataagaccgtgctggacatgcggagcatggacttcaagagcaactccgccgtggcctggtccaacaagtccgatttcgcctgcgccaacgccttcaacaacagcattatccccgaggacacattcttcccaagccccgagagcagctgcggtacccagagttttgggttgttggaccctaaattgtgctatctgttggacggaatcctgttcatttacggagtgatcctgaccgcattgttcctgaggagcaagcggtcacggctgctccacagcgattacatgaatatgacaccacgaagaccgggtcctactcgcaaacactaccaaccctacgcacctccccgcgactttgcagcgtaccgatctcgggttaagttttccagatccgcagacgcacccgcttaccaacaagggcagaaccaactctacaatgaacttaatttggggcggagggaagagtacgacgttctggacaaaaggaggggacgagatcccgagatgggcggaaagcctcagcgaaggaagaatccgcaagaggggctttataacgaactccagaaagataaaatggcagaagcctatagtgagattgggatgaagggagaaaggaggaggggtaaaggtcacgatgggttgtaccaaggattgagcacagccactaaagatacctatgatgcgctccacatgcaggccctgccgccaaga

SEQ ID NO: 10193 - DNA, 2805 bp, Artificial Sequence
  Synthetic Polynucloetide
atggccttaccagtgaccgccttgctcctgccgctggccttgctgctccacgccgccaggccggacatcgtgctgacacagagccctgcttctctggccgtttctcctggacagagggccaccatcacatgcagagccagcaagagcgtgtccaccagcggctacagctacatgcactggtatcagcagaagcccggccagcctcctaagctgctgatctacctggcctccaacctggaaagcggagtgcctgccagattttctggcagcggctctggcaccgacttcaccctgacaatcaaccccgtggaagccaacgacaccgccaactactactgccagcacagcagagagctgcccttcacatttggcggaggcaccaaggtggaaatcaagagaacactcgaggggaaaccaattcccaaccctcttctgggactggattcaaccggcagcggcgaggacctgaagaacgtgttcccacctgaggtggccgtgttcgagcctagcgaggccgagatcagccacacccagaaagccaccctcgtgtgcctggctaccggcttctaccccgaccatgtggaactgtcttggtgggtcaacggcaaagaggtgcacagcggcgtgtctaccgacccccagccactgaaagaacagcccgccctgaacgacagccggtactgcctgagcagcagactgagagtgtccgccaccttctggcagaacccccggaaccacttcagatgccaggtgcagttctacggcctgagcgagaacgacgagtggacccaggacagagccaagcccgtgacccagatcgtgtctgccgaagcctggggcagagccgattgcggatcccagagcttcggcctgctggaccccaagctgtgctacctgctggatggcatcctgttcatctacggcgtgatcctgaccgccctgttcctgaggagtaagaggagcaggctcctgcacagtgactacatgaacatgactccacgccgccccggacccacccgcaagcattaccagccctatgccccaccacgcgacttcgcagcctatcgctccagagtgaagttcagcagaagcgccgacgcccctgcctaccagcagggacagaaccaactgtacaacgagctgaacctgggcagacgggaagagtacgacgtgctggacaagcggagaggcagggaccctgagatgggcggaaagccccagcggagaaagaacccccaggaaggactgtataacgaactccagaaagacaagatggccgaagcctacagcgagatcggcatgaagggcgagcggagaagaggcaagggccacgatggcctgtaccagggcctgagcaccgccaccaaggacacctatgacgccctgcacatgcaggccctgcctccaagaagggccaagcgatctggatctggagcaacaaacttctcactactcaaacaagcaggtgacgtggaggagaatcccgggcctactagtatggactggatttggcgcatccttttccttgtcggcgctgctaccggcgcgcattccttcgaagaagtgcagctggttgagtctggcggcggacttgtgaaacctggcggaagcctgagactgagctgtgccgcttccggctttacctttagcggctacgccatgagctgggtccgacaggctcctggcaaaggactggaatgggtgtccacaatcagcagcggcggcacctacatctactaccccgatagcgtgaaaggccggttcaccatcagccgggacaacgccaagaacagcctgtacctccagatgaactccctgagagccgaggacaccgccgtgtactattgtgccagactcggcggcgacaattactacgagtatttcgacgtgtggggcaagggcaccaccgtgacagtttcttctacgcgtgagcagaaactgatctcggaagaggatgggagcggcatccagaaccctgatcctgccgtgtaccagctgcgggatagcaagagcagcgacaagagcgtgtgtctgttcaccgacttcgacagccagaccaacgtgtcccagagcaaggactccgacgtgtacatcaccgataagaccgtgctggacatgcggagcatggacttcaagagcaactccgccgtggcctggtccaacaagtccgatttcgcctgcgccaacgccttcaacaacagcattatccccgaggacacattcttcccaagccccgagagcagctgcggtacccagagttttgggttgttggaccctaaattgtgctatctgttggacggaatcctgttcatttacggagtgatcctgaccgcattgttcctgaggagcaagcggtcacggctgctccacagcgattacatgaatatgacaccacgaagaccgggtcctactcgcaaacactaccaaccctacgcacctccccgcgactttgcagcgtaccgatctcgggttaagttttccagatccgcagacgcacccgcttaccaacaagggcagaaccaactctacaatgaacttaatttggggcggagggaagagtacgacgttctggacaaaaggaggggacgagatcccgagatgggcggaaagcctcagcgaaggaagaatccgcaagaggggctttataacgaactccagaaagataaaatggcagaagcctatagtgagattgggatgaagggagaaaggaggaggggtaaaggtcacgatgggttgtaccaaggattgagcacagccactaaagatacctatgatgcgctccacatgcaggccctgccgccaaga

SEQ ID NO: 10194 - DNA, 2688 bp, Artificial Sequence
  Synthetic Polynucloetide
atggccttaccagtgaccgccttgctcctgccgctggccttgctgctccacgccgccaggccggacatcgtgctgacacagagccctgcttctctggccgtttctcctggacagagggccaccatcacatgcagagccagcaagagcgtgtccaccagcggctacagctacatgcactggtatcagcagaagcccggccagcctcctaagctgctgatctacctggcctccaacctggaaagcggagtgcctgccagattttctggcagcggctctggcaccgacttcaccctgacaatcaaccccgtggaagccaacgacaccgccaactactactgccagcacagcagagagctgcccttcacatttggcggaggcaccaaggtggaaatcaagagaacactcgaggggaaaccaattcccaaccctcttctgggactggattcaaccggcagcggcgaggacctgaagaacgtgttcccacctgaggtggccgtgttcgagcctagcgaggccgagatcagccacacccagaaagccaccctcgtgtgcctggctaccggcttctaccccgaccatgtggaactgtcttggtgggtcaacggcaaagaggtgcacagcggcgtgtctaccgacccccagccactgaaagaacagcccgccctgaacgacagccggtactgcctgagcagcagactgagagtgtccgccaccttctggcagaacccccggaaccacttcagatgccaggtgcagttctacggcctgagcgagaacgacgagtggacccaggacagagccaagcccgtgacccagatcgtgtctgccgaagcctggggcagagccgattgcggatcccagagcttcggcctgctggaccccaagctgtgctacctgctggatggcatcctgttcatctacggcgtgatcctgaccgccctgttcctgagagtgaagttcagcagaagcgccgacgcccctgcctaccagcagggacagaaccaactgtacaacgagctgaacctgggcagacgggaagagtacgacgtgctggacaagcggagaggcagggaccctgagatgggcggaaagccccagcggagaaagaacccccaggaaggactgtataacgaactccagaaagacaagatggccgaagcctacagcgagatcggcatgaagggcgagcggagaagaggcaagggccacgatggcctgtaccagggcctgagcaccgccaccaaggacacctatgacgccctgcacatgcaggccctgcctccaagaagggccaagcgatctggatctggagcaacaaacttctcactactcaaacaagcaggtgacgtggaggagaatcccgggcctactagtatggactggatttggcgcatccttttccttgtcggcgctgctaccggcgcgcattccttcgaagaagtgcagctggttgagtctggcggcggacttgtgaaacctggcggaagcctgagactgagctgtgccgcttccggctttacctttagcggctacgccatgagctgggtccgacaggctcctggcaaaggactggaatgggtgtccacaatcagcagcggcggcacctacatctactaccccgatagcgtgaaaggccggttcaccatcagccgggacaacgccaagaacagcctgtacctccagatgaactccctgagagccgaggacaccgccgtgtactattgtgccagactcggcggcgacaattactacgagtatttcgacgtgtggggcaagggcaccaccgtgacagtttcttctacgcgtgagcagaaactgatctcggaagaggatctggggagcggcatccagaaccctgatcctgccgtgtaccagctgcgggatagcaagagcagcgacaagagcgtgtgtctgttcaccgacttcgacagccagaccaacgtgtcccagagcaaggactccgacgtgtacatcaccgataagaccgtgctggacatgcggagcatggacttcaagagcaactccgccgtggcctggtccaacaagtccgatttcgcctgcgccaacgccttcaacaacagcattatccccgaggacacattcttcccaagccccgagagcagctgcggtacccagagttttgggttgttggaccctaaattgtgctatctgttggacggaatcctgttcatttacggagtgatcctgaccgcattgttcctgaagagaggccggaagaagctgctgtacatcttcaagcagcctttcatgcggcccgtgcagaccacccaggaagaggacggctgctcctgccggttccccgaggaagaagaaggcggctgcgagctgcgggttaagttttccagatccgcagacgcacccgcttaccaacaagggcagaaccaactctacaatgaacttaatttggggcggagggaagagtacgacgttctggacaaaaggaggggacgagatcccgagatgggcggaaagcctcagcgaaggaagaatccgcaagaggggctttataacgaactccagaaagataaaatggcagaagcctatagtgagattgggatgaagggagaaaggaggaggggtaaaggtcacgatgggttgtaccaaggattgagcacagccactaaagatacctatgatgcgctccacatgcaggccctgccgccaaga

SEQ ID NO: 10195 - DNA, 2814 bp, Artificial Sequence
  Synthetic Polynucloetide
atggccttaccagtgaccgccttgctcctgccgctggccttgctgctccacgccgccaggccggacatcgtgctgacacagagccctgcttctctggccgtttctcctggacagagggccaccatcacatgcagagccagcaagagcgtgtccaccagcggctacagctacatgcactggtatcagcagaagcccggccagcctcctaagctgctgatctacctggcctccaacctggaaagcggagtgcctgccagattttctggcagcggctctggcaccgacttcaccctgacaatcaaccccgtggaagccaacgacaccgccaactactactgccagcacagcagagagctgcccttcacatttggcggaggcaccaaggtggaaatcaagagaacactcgaggggaaaccaattcccaaccctcttctgggactggattcaaccggcagcggcgaggacctgaagaacgtgttcccacctgaggtggccgtgttcgagcctagcgaggccgagatcagccacacccagaaagccaccctcgtgtgcctggctaccggcttctaccccgaccatgtggaactgtcttggtgggtcaacggcaaagaggtgcacagcggcgtgtctaccgacccccagccactgaaagaacagcccgccctgaacgacagccggtactgcctgagcagcagactgagagtgtccgccaccttctggcagaacccccggaaccacttcagatgccaggtgcagttctacggcctgagcgagaacgacgagtggacccaggacagagccaagcccgtgacccagatcgtgtctgccgaagcctggggcagagccgattgcggatcccagagcttcggcctgctggaccccaagctgtgctacctgctggatggcatcctgttcatctacggcgtgatcctgaccgccctgttcctgaaacggggcagaaagaaactcctgtatatattcaaacaaccatttatgagaccagtacaaactactcaagaggaagatggctgtagctgccgatttccagaagaagaagaaggaggatgtgaactgagagtgaagttcagcagaagcgccgacgcccctgcctaccagcagggacagaaccaactgtacaacgagctgaacctgggcagacgggaagagtacgacgtgctggacaagcggagaggcagggaccctgagatgggcggaaagccccagcggagaaagaacccccaggaaggactgtataacgaactccagaaagacaagatggccgaagcctacagcgagatcggcatgaagggcgagcggagaagaggcaagggccacgatggcctgtaccagggcctgagcaccgccaccaaggacacctatgacgccctgcacatgcaggccctgcctccaagaagggccaagcgatctggatctggagcaacaaacttctcactactcaaacaagcaggtgacgtggaggagaatcccgggcctactagtatggactggatttggcgcatccttttccttgtcggcgctgctaccggcgcgcattccttcgaagaagtgcagctggttgagtctggcggcggacttgtgaaacctggcggaagcctgagactgagctgtgccgcttccggctttacctttagcggctacgccatgagctgggtccgacaggctcctggcaaaggactggaatgggtgtccacaatcagcagcggcggcacctacatctactaccccgatagcgtgaaaggccggttcaccatcagccgggacaacgccaagaacagcctgtacctccagatgaactccctgagagccgaggacaccgccgtgtactattgtgccagactcggcggcgacaattactacgagtatttcgacgtgtggggcaagggcaccaccgtgacagtttcttctacgcgtgagcagaaactgatctcggaagaggatctggggagcggcatccagaaccctgatcctgccgtgtaccagctgcgggatagcaagagcagcgacaagagcgtgtgtctgttcaccgacttcgacagccagaccaacgtgtcccagagcaaggactccgacgtgtacatcaccgataagaccgtgctggacatgcggagcatggacttcaagagcaactccgccgtggcctggtccaacaagtccgatttcgcctgcgccaacgccttcaacaacagcattatccccgaggacacattcttcccaagccccgagagcagctgcggtacccagagttttgggttgttggaccctaaattgtgctatctgttggacggaatcctgttcatttacggagtgatcctgaccgcattgttcctgaagagaggccggaagaagctgctgtacatcttcaagcagcctttcatgcggcccgtgcagaccacccaggaagaggacggctgctcctgccggttccccgaggaagaagaaggcggctgcgagctgcgggttaagttttccagatccgcagacgcacccgcttaccaacaagggcagaaccaactctacaatgaacttaatttggggcggagggaagagtacgacgttctggacaaaaggaggggacgagatcccgagatgggcggaaagcctcagcgaaggaagaatccgcaagaggggctttataacgaactccagaaagataaaatggcagaagcctatagtgagattgggatgaagggagaaaggaggaggggtaaaggtcacgatgggttgtaccaaggattgagcacagccactaaagatacctatgatgcgctccacatgcaggccctgccgccaaga

SEQ ID NO: 10196 - DNA, 2487 bp, Artificial Sequence
  Synthetic Polynucloetide
atggccttaccagtgaccgccttgctcctgccgctggccttgctgctccacgccgccaggccggacatcgtgctgacacagagccctgcttctctggccgtttctcctggacagagggccaccatcacatgcagagccagcaagagcgtgtccaccagcggctacagctacatgcactggtatcagcagaagcccggccagcctcctaagctgctgatctacctggcctccaacctggaaagcggagtgcctgccagattttctggcagcggctctggcaccgacttcaccctgacaatcaaccccgtggaagccaacgacaccgccaactactactgccagcacagcagagagctgcccttcacatttggcggaggcaccaaggtggaaatcaagagaacactcgagcagagcttcggcctgctggaccccaagctgtgctacctgctggatggcatcctgttcatctacggcgtgatcctgaccgccctgttcctgagagtgaagttcagcagaagcgccgacgcccctgcctaccagcagggacagaaccaactgtacaacgagctgaacctgggcagacgggaagagtacgacgtgctggacaagcggagaggcagggaccctgagatgggcggaaagccccagcggagaaagaacccccaggaaggactgtataacgaactccagaaagacaagatggccgaagcctacagcgagatcggcatgaagggcgagcggagaagaggcaagggccacgatggcctgtaccagggcctgagcaccgccaccaaggacacctatgacgccctgcacatgcaggccctgcctccaagaagggccaagcgatctggatctggagcaacaaacttctcactactcaaacaagcaggtgacgtggaggagaatcccgggcctactagtatggactggatttggcgcatccttttccttgtcggcgctgctaccggcgcgcattccttcgaagaagtgcagctggttgagtctggcggcggacttgtgaaacctggcggaagcctgagactgagctgtgccgcttccggctttacctttagcggctacgccatgagctgggtccgacaggctcctggcaaaggactggaatgggtgtccacaatcagcagcggcggcacctacatctactaccccgatagcgtgaaaggccggttcaccatcagccgggacaacgccaagaacagcctgtacctccagatgaactccctgagagccgaggacaccgccgtgtactattgtgccagactcggcggcgacaattactacgagtatttcgacgtgtggggcaagggcaccaccgtgacagtttcttctacgcgtcagagttttgggttgttggaccctaaattgtgctatctgttggacggaatcctgttcatttacggagtgatcctgaccgcattgttcctgcgggttaagttttccagatccgcagacgcacccgcttaccaacaagggcagaaccaactctacaatgaacttaatttggggcggagggaagagtacgacgttctggacaaaaggaggggacgagatcccgagatgggcggaaagcctcagcgaaggaagaatccgcaagaggggctttataacgaactccagaaagataaaatggcagaagcctatagtgagattgggatgaagggagaaaggaggaggggtaaaggtcacgatgggttgtaccaaggattgagcacagccactaaagatacctatgatgcgctccacatgcaggccctgccgccaagacgcgccaagagaagcggatctggcgtgaagcagaccctgaatttcgacctgctgaagctggctggcgacgtggaatccaacccaggcccttctagaggccatatgaccgagtacaagcccacggtgcgcctcgccacccgcgacgacgtccccagggccgtacgcaccctcgccgccgcgttcgccgactaccccgccacgcgccacaccgtcgatccggaccgccacatcgagcgggtcaccgagctgcaagaactcttcctcacgcgcgtcgggctcgacatcggcaaggtgtgggtcgcggacgacggcgccgcggtggcggtctggaccacgccggagagcgtcgaagcgggggcggtgttcgccgagatcggcccgcgcatggccgagttgagcggttcccggctggccgcgcagcaacagatggaaggcctcctggcgccgcaccggcccaaggagcccgcgtggttcctggccaccgtcggcgtctcgcccgaccaccagggcaagggtctgggcagcgccgtcgtgctccccggagtggaggcggccgagcgcgccggggtgcccgccttcctggagacctccgcgccccgcaacctccccttctacgagcggctcggcttcaccgtcaccgccgacgtcgaggtgcccgaaggaccgcgcacctggtgcatgacccgcaagcccggtgcctga

SEQ ID NO: 10197 - DNA, 1959 bp, Artificial Sequence
  Synthetic Polynucloetide
atggccttaccagtgaccgccttgctcctgccgctggccttgctgctccacgccgccaggccggacatcgtgctgacacagagccctgcttctctggccgtttctcctggacagagggccaccatcacatgcagagccagcaagagcgtgtccaccagcggctacagctacatgcactggtatcagcagaagcccggccagcctcctaagctgctgatctacctggcctccaacctggaaagcggagtgcctgccagattttctggcagcggctctggcaccgacttcaccctgacaatcaaccccgtggaagccaacgacaccgccaactactactgccagcacagcagagagctgcccttcacatttggcggaggcaccaaggtggaaatcaagagaacactcgagggacagcctaaggccaatcctaccgtgacactgttccctccaagcagcgaagaactccaggccaacaaggccacacttgtgtgcctgatctccgacttctaccctggggctgtgacagtggcttggaaggccgatggatctcctgtgaaagccggcgtggaaaccaccaagccatccaagcagagcaacaacaaatacgccgccagctcctacctgagcctgacacctgagcagtggaagtcccacagatcctacagctgccaagtgacccacgaaggcagcaccgtggaaaagacagtggcccctacagagtgcagccccatcaagaccgatgtgattacaatggaccccaaggacaactgctccaaggacgccaacgataccctgctgctccagctgaccaacaccagcgcctactacatgtacttgttgctgctgctgaagtccgtggtgtacttcgccatcatcacatgctgcctgctgcggagaaccgccttctgctgcaacggcgagaagtctagggccaagcgatctggatctggagcaacaaacttctcactactcaaacaagcaggtgacgtggaggagaatcccgggcctactagtatggactggatttggcgcatccttttccttgtcggcgctgctaccggcgcgcattccttcgaagaagtgcagctggttgagtctggcggcggacttgtgaaacctggcggaagcctgagactgagctgtgccgcttccggctttacctttagcggctacgccatgagctgggtccgacaggctcctggcaaaggactggaatgggtgtccacaatcagcagcggcggcacctacatctactaccccgatagcgtgaaaggccggttcaccatcagccgggacaacgccaagaacagcctgtacctccagatgaactccctgagagccgaggacaccgccgtgtactattgtgccagactcggcggcgacaattactacgagtatttcgacgtgtggggcaagggcaccaccgtgacagtttcttctacgcgtgcctctacaaagggaccctccgtgtttcctctggctcccagcagcaagtctacaagcggaggaacagccgctctgggctgcctggtcaaggattactttcccgagcctgtgaccgtgtcctggaatagcggagcactgacaagcggcgtgcacacctttccagccgtgctgcaaagcagcggcctgtactctctgagcagcgtggtcacagtgcctagctctagcctgggcacccagacctacatctgcaatgtgaaccacaagcctagcaacaccaaggtggacaagagagtggaacccaagagctgtgaagtgaaaaccgactccaccgaccacgtgaagcccaaagagacagagaacaccaagcagcccagcaagagctgccacaagcccaaggccatcgtgcacaccgagaaagtgaacatgatgagcctgaccgtgctgggcctgcggatgctgttcgccaaaaccgtggccgtgaacttcctgctgaccgccaagctgttcttcctc

SEQ ID NO: 10198 - DNA, 1893 bp, Artificial Sequence
  Synthetic Polynucloetide
atggccttaccagtgaccgccttgctcctgccgctggccttgctgctccacgccgccaggccggacatcgtgctgacacagagccctgcttctctggccgtttctcctggacagagggccaccatcacatgcagagccagcaagagcgtgtccaccagcggctacagctacatgcactggtatcagcagaagcccggccagcctcctaagctgctgatctacctggcctccaacctggaaagcggagtgcctgccagattttctggcagcggctctggcaccgacttcaccctgacaatcaaccccgtggaagccaacgacaccgccaactactactgccagcacagcagagagctgcccttcacatttggcggaggcaccaaggtggaaatcaagagaacactcgagggacagcctaaggccaatcctaccgtgacactgttccctccaagcagcgaagaactccaggccaacaaggccacacttgtgtgcctgatctccgacttctaccctggggctgtgacagtggcttggaaggccgatggatctcctgtgaaagccggcgtggaaaccaccaagccatccaagcagagcaacaacaaatacgccgccagctcctacctgagcctgacacctgagcagtggaagtcccacagatcctacagctgccaagtgacccacgaaggcagcaccgtggaaaagacagtggcccctacagagtgcagcggcagagccgattgcggcatcaccagcgccagctaccaccagggcgtgctgagcgccaccatcctgtacgagatcctgctgggcaaggccaccctgtacgccgtgctggtgtctgccctggtgctgatggctatggtcaagcggaaggacagccggggaagggccaagcgatctggatctggagcaacaaacttctcactactcaaacaagcaggtgacgtggaggagaatcccgggcctactagtatggactggatttggcgcatccttttccttgtcggcgctgctaccggcgcgcattccttcgaagaagtgcagctggttgagtctggcggcggacttgtgaaacctggcggaagcctgagactgagctgtgccgcttccggctttacctttagcggctacgccatgagctgggtccgacaggctcctggcaaaggactggaatgggtgtccacaatcagcagcggcggcacctacatctactaccccgatagcgtgaaaggccggttcaccatcagccgggacaacgccaagaacagcctgtacctccagatgaactccctgagagccgaggacaccgccgtgtactattgtgccagactcggcggcgacaattactacgagtatttcgacgtgtggggcaagggcaccaccgtgacagtttcttctacgcgtgcctctacaaagggaccctccgtgtttcctctggctcccagcagcaagtctacaagcggaggaacagccgctctgggctgcctggtcaaggattactttcccgagcctgtgaccgtgtcctggaatagcggagcactgacaagcggcgtgcacacctttccagccgtgctgcaaagcagcggcctgtactctctgagcagcgtggtcacagtgcctagctctagcctgggcacccagacctacatctgcaatgtgaaccacaagcctagcaacaccaaggtggacaagagagtggaacccaagagctgtatccccgaggacacattcttcccaagcagcgacgtgccctgcgacgtgaagctggtggaaaagagcttcgagacagacaccaacctgaacttccagaacctgagcgtgatcggcttcagaatcctgctgctgaaagtggccggctttaacctgctgatgaccctgcggctgtggtccagc

SEQ ID NO: 10199 - DNA, 1893 bp, Artificial Sequence
  Synthetic Polynucloetide
atggccttaccagtgaccgccttgctcctgccgctggccttgctgctccacgccgccaggccggacatcgtgctgacacagagccctgcttctctggccgtttctcctggacagagggccaccatcacatgcagagccagcaagagcgtgtccaccagcggctacagctacatgcactggtatcagcagaagcccggccagcctcctaagctgctgatctacctggcctccaacctggaaagcggagtgcctgccagattttctggcagcggctctggcaccgacttcaccctgacaatcaaccccgtggaagccaacgacaccgccaactactactgccagcacagcagagagctgcccttcacatttggcggaggcaccaaggtggaaatcaagagaacactcgagggacagcctaaggccaatcctaccgtgacactgttccctccaagcagcgaagaactccaggccaacaaggccacacttgtgtgcctgatctccgacttctaccctggggctgtgacagtggcttggaaggccgatggatctcctgtgaaagccggcgtggaaaccaccaagccatccaagcagagcaacaacaaatacgccgccagctcctacctgagcctgacacctgagcagtggaagtcccacagatcctacagctgccaagtgacccacgaaggcagcaccgtggaaaagacagtggcccctacagagtgcagcggcagagccgattgcggctttaccagcgagagctaccagcagggcgtgctgagcgccaccatcctgtacgagatcctgctgggcaaggccaccctgtacgccgtgctggtgtctgccctggtgctgatggctatggtcaagcggaaggacagccggggaagggccaagcgatctggatctggagcaacaaacttctcactactcaaacaagcaggtgacgtggaggagaatcccgggcctactagtatggactggatttggcgcatccttttccttgtcggcgctgctaccggcgcgcattccttcgaagaagtgcagctggttgagtctggcggcggacttgtgaaacctggcggaagcctgagactgagctgtgccgcttccggctttacctttagcggctacgccatgagctgggtccgacaggctcctggcaaaggactggaatgggtgtccacaatcagcagcggcggcacctacatctactaccccgatagcgtgaaaggccggttcaccatcagccgggacaacgccaagaacagcctgtacctccagatgaactccctgagagccgaggacaccgccgtgtactattgtgccagactcggcggcgacaattactacgagtatttcgacgtgtggggcaagggcaccaccgtgacagtttcttctacgcgtgcctctacaaagggaccctccgtgtttcctctggctcccagcagcaagtctacaagcggaggaacagccgctctgggctgcctggtcaaggattactttcccgagcctgtgaccgtgtcctggaatagcggagcactgacaagcggcgtgcacacctttccagccgtgctgcaaagcagcggcctgtactctctgagcagcgtggtcacagtgcctagctctagcctgggcacccagacctacatctgcaatgtgaaccacaagcctagcaacaccaaggtggacaagagagtggaacccaagagctgtatccccgaggacacattcttcccaagccccgagagcagctgcgacgtgaagctggtggaaaagagcttcgagacagacaccaacctgaacttccagaacctgagcgtgatcggcttcagaatcctgctgctgaaagtggccggctttaacctgctgatgaccctgcggctgtggtccagc

SEQ ID NO: 10200 - DNA, 1371 bp, Artificial Sequence
  Synthetic Polynucloetide
atggccttaccagtgaccgccttgctcctgccgctggccttgctgctccacgccgccaggccggacatcgtgctgacacagagccctgcttctctggccgtttctcctggacagagggccaccatcacatgcagagccagcaagagcgtgtccaccagcggctacagctacatgcactggtatcagcagaagcccggccagcctcctaagctgctgatctacctggcctccaacctggaaagcggagtgcctgccagattttctggcagcggctctggcaccgacttcaccctgacaatcaaccccgtggaagccaacgacaccgccaactactactgccagcacagcagagagctgcccttcacatttggcggaggcaccaaggtggaaatcaagagaacaggcggaggcggaagtggaggcggaggatctggcggcggaggctctgaagtgcagctggttgagtctggcggcggacttgtgaaacctggcggaagcctgagactgagctgtgccgcttccggctttacctttagcggctacgccatgagctgggtccgacaggctcctggcaaaggactggaatgggtgtccacaatcagcagcggcggcacctacatctactaccccgatagcgtgaaaggccggttcaccatcagccgggacaacgccaagaacagcctgtacctccagatgaactccctgagagccgaggacaccgccgtgtactattgtgccagactcggcggcgacaattactacgagtatttcgacgtgtggggcaagggcaccaccgtgacagtttcttctacgcgtgacggtaacgaggagatgggaggaatcactcaaaccccttacaaagtctcaatttcaggaacaactgttatccttacatgtccccagtatcctggcagcgagatcctttggcagcataacgacaagaatatagggggagatgaagacgataagaatatcggatctgacgaggatcacttgagcctgaaagagttctccgagcttgaacaaagcggatattatgtgtgctatccgcgcgggtcaaagccggaagacgctaacttttacctttatctccgagccagagtgtgcgaaaattgcatggaaatggacgttatgtccgttgctacaatagttatcgtagatatatgcatcacgggtggactgcttctgctggtttattattggtccaagaatagaaaggccaaagctaaacccgtgaccagaggcgctggcgcaggcggaaggcaaaggggacaaaacaaagaacggccaccaccagtgccaaatccagattatgagcctattcggaaaggacagagggacctgtactctggcctgaatcagagaagaatc

SEQ ID NO: 10201 - DNA, 1266 bp, Artificial Sequence
  Synthetic Polynucloetide
atggccttaccagtgaccgccttgctcctgccgctggccttgctgctccacgccgccaggccggacatcgtgctgacacagagccctgcttctctggccgtttctcctggacagagggccaccatcacatgcagagccagcaagagcgtgtccaccagcggctacagctacatgcactggtatcagcagaagcccggccagcctcctaagctgctgatctacctggcctccaacctggaaagcggagtgcctgccagattttctggcagcggctctggcaccgacttcaccctgacaatcaaccccgtggaagccaacgacaccgccaactactactgccagcacagcagagagctgcccttcacatttggcggaggcaccaaggtggaaatcaagagaacaggcggaggcggaagtggaggcggaggatctggcggcggaggctctgaagtgcagctggttgagtctggcggcggacttgtgaaacctggcggaagcctgagactgagctgtgccgcttccggctttacctttagcggctacgccatgagctgggtccgacaggctcctggcaaaggactggaatgggtgtccacaatcagcagcggcggcacctacatctactaccccgatagcgtgaaaggccggttcaccatcagccgggacaacgccaagaacagcctgtacctccagatgaactccctgagagccgaggacaccgccgtgtactattgtgccagactcggcggcgacaattactacgagtatttcgacgtgtggggcaagggcaccaccgtgacagtttcttctacgcgtttcaagatccccatcgaggaactggaagatcgggtgttcgtgaactgcaacacctctatcacctgggtggaaggcaccgtgggaacactgctgagcgacatcaccagactggacctcggcaagcggattctggaccctcggggcatctacagatgcaacggcaccgacatctacaaggacaaagaaagcaccgtgcaggtccactacagaatgtgccagtcctgcgtggaactggaccctgctacagtggccggcatcatcgtgaccgatgtgatcgctactctgctgctggctctgggagtgttctgcttcgccggacacgaaacaggcagactgtctggcgctgccgatacacaggccctgctgagaaacgaccaagtgtatcagcccctgcgcgacagagatgatgcccagtattctcacctcggcggcaactgggctagaaacaag

SEQ ID NO: 10202 - DNA, 1296 bp, Artificial Sequence
  Synthetic Polynucloetide
atggccttaccagtgaccgccttgctcctgccgctggccttgctgctccacgccgccaggccggacatcgtgctgacacagagccctgcttctctggccgtttctcctggacagagggccaccatcacatgcagagccagcaagagcgtgtccaccagcggctacagctacatgcactggtatcagcagaagcccggccagcctcctaagctgctgatctacctggcctccaacctggaaagcggagtgcctgccagattttctggcagcggctctggcaccgacttcaccctgacaatcaaccccgtggaagccaacgacaccgccaactactactgccagcacagcagagagctgcccttcacatttggcggaggcaccaaggtggaaatcaagagaacaggcggaggcggaagtggaggcggaggatctggcggcggaggctctgaagtgcagctggttgagtctggcggcggacttgtgaaacctggcggaagcctgagactgagctgtgccgcttccggctttacctttagcggctacgccatgagctgggtccgacaggctcctggcaaaggactggaatgggtgtccacaatcagcagcggcggcacctacatctactaccccgatagcgtgaaaggccggttcaccatcagccgggacaacgccaagaacagcctgtacctccagatgaactccctgagagccgaggacaccgccgtgtactattgtgccagactcggcggcgacaattactacgagtatttcgacgtgtggggcaagggcaccaccgtgacagtttcttctacgcgtcagagcatcaagggcaaccacctggtcaaggtgtacgactaccaagaggacggcagcgtgctgctgacatgtgatgccgaggccaagaacatcacctggtttaaggacggcaagatgatcggcttcctgaccgaggacaagaagaagtggaacctgggcagcaacgctaaggaccccagaggcatgtatcagtgcaagggcagccagaacaagagcaagcccctccaggtgtactaccggatgtgccagaactgcatcgagctgaacgccgctaccatcagcggctttctgttcgccgagatcgtgtccatcttcgtgctggccgtgggcgtgtactttatcgctggacaggatggcgtgcggcagagcagagcttccgataagcaaaccctgctgcctaacgaccagctgtaccagcctctgaaggacagagaggacgaccagtacagccacctccagggcaatcagctgagaagaaac

SEQ ID NO: 10203 - DNA, 1245 bp, Artificial Sequence
  Synthetic Polynucloetide
atggccttaccagtgaccgccttgctcctgccgctggccttgctgctccacgccgccaggccggacatcgtgctgacacagagccctgcttctctggccgtttctcctggacagagggccaccatcacatgcagagccagcaagagcgtgtccaccagcggctacagctacatgcactggtatcagcagaagcccggccagcctcctaagctgctgatctacctggcctccaacctggaaagcggagtgcctgccagattttctggcagcggctctggcaccgacttcaccctgacaatcaaccccgtggaagccaacgacaccgccaactactactgccagcacagcagagagctgcccttcacatttggcggaggcaccaaggtggaaatcaagagaacaggcggaggcggaagtggaggcggaggatctggcggcggaggctctgaagtgcagctggttgagtctggcggcggacttgtgaaacctggcggaagcctgagactgagctgtgccgcttccggctttacctttagcggctacgccatgagctgggtccgacaggctcctggcaaaggactggaatgggtgtccacaatcagcagcggcggcacctacatctactaccccgatagcgtgaaaggccggttcaccatcagccgggacaacgccaagaacagcctgtacctccagatgaactccctgagagccgaggacaccgccgtgtactattgtgccagactcggcggcgacaattactacgagtatttcgacgtgtggggcaagggcaccaccgtgacagtttcttctacgcgtcagagttttgggttgttggaccctaaattgtgctatctgttggacggaatcctgttcatttacggagtgatcctgaccgcattgttcctgcgggttaagttttccagatccgcagacgcacccgcttaccaacaagggcagaaccaactctacaatgaacttaatttggggcggagggaagagtacgacgttctggacaaaaggaggggacgagatcccgagatgggcggaaagcctcagcgaaggaagaatccgcaagaggggctttataacgaactccagaaagataaaatggcagaagcctatagtgagattgggatgaagggagaaaggaggaggggtaaaggtcacgatgggttgtaccaaggattgagcacagccactaaagatacctatgatgcgctccacatgcaggccctgccgccaaga

SEQ ID NO: 10204 - DNA, 1371 bp, Artificial Sequence
  Synthetic Polynucloetide
atggccttaccagtgaccgccttgctcctgccgctggccttgctgctccacgccgccaggccggaagtgcagctggttgagtctggcggcggacttgtgaaacctggcggaagcctgagactgagctgtgccgcttccggctttacctttagcggctacgccatgagctgggtccgacaggctcctggcaaaggactggaatgggtgtccacaatcagcagcggcggcacctacatctactaccccgatagcgtgaaaggccggttcaccatcagccgggacaacgccaagaacagcctgtacctccagatgaactccctgagagccgaggacaccgccgtgtactattgtgccagactcggcggcgacaattactacgagtatttcgacgtgtggggcaagggcaccaccgtgacagtttcttctggcggaggcggaagtggaggcggaggatctggcggcggaggctctgacatcgtgctgacacagagccctgcttctctggccgtttctcctggacagagggccaccatcacatgcagagccagcaagagcgtgtccaccagcggctacagctacatgcactggtatcagcagaagcccggccagcctcctaagctgctgatctacctggcctccaacctggaaagcggagtgcctgccagattttctggcagcggctctggcaccgacttcaccctgacaatcaaccccgtggaagccaacgacaccgccaactactactgccagcacagcagagagctgcccttcacatttggcggaggcaccaaggtggaaatcaagagaacaacgcgtgacggtaacgaggagatgggaggaatcactcaaaccccttacaaagtctcaatttcaggaacaactgttatccttacatgtccccagtatcctggcagcgagatcctttggcagcataacgacaagaatatagggggagatgaagacgataagaatatcggatctgacgaggatcacttgagcctgaaagagttctccgagcttgaacaaagcggatattatgtgtgctatccgcgcgggtcaaagccggaagacgctaacttttacctttatctccgagccagagtgtgcgaaaattgcatggaaatggacgttatgtccgttgctacaatagttatcgtagatatatgcatcacgggtggactgcttctgctggtttattattggtccaagaatagaaaggccaaagctaaacccgtgaccagaggcgctggcgcaggcggaaggcaaaggggacaaaacaaagaacggccaccaccagtgccaaatccagattatgagcctattcggaaaggacagagggacctgtactctggcctgaatcagagaagaatc

SEQ ID NO: 10205 - DNA, 1266 bp, Artificial Sequence
  Synthetic Polynucloetide
atggccttaccagtgaccgccttgctcctgccgctggccttgctgctccacgccgccaggccggaagtgcagctggttgagtctggcggcggacttgtgaaacctggcggaagcctgagactgagctgtgccgcttccggctttacctttagcggctacgccatgagctgggtccgacaggctcctggcaaaggactggaatgggtgtccacaatcagcagcggcggcacctacatctactaccccgatagcgtgaaaggccggttcaccatcagccgggacaacgccaagaacagcctgtacctccagatgaactccctgagagccgaggacaccgccgtgtactattgtgccagactcggcggcgacaattactacgagtatttcgacgtgtggggcaagggcaccaccgtgacagtttcttctggcggaggcggaagtggaggcggaggatctggcggcggaggctctgacatcgtgctgacacagagccctgcttctctggccgtttctcctggacagagggccaccatcacatgcagagccagcaagagcgtgtccaccagcggctacagctacatgcactggtatcagcagaagcccggccagcctcctaagctgctgatctacctggcctccaacctggaaagcggagtgcctgccagattttctggcagcggctctggcaccgacttcaccctgacaatcaaccccgtggaagccaacgacaccgccaactactactgccagcacagcagagagctgcccttcacatttggcggaggcaccaaggtggaaatcaagagaacaacgcgtttcaagatccccatcgaggaactggaagatcgggtgttcgtgaactgcaacacctctatcacctgggtggaaggcaccgtgggaacactgctgagcgacatcaccagactggacctcggcaagcggattctggaccctcggggcatctacagatgcaacggcaccgacatctacaaggacaaagaaagcaccgtgcaggtccactacagaatgtgccagtcctgcgtggaactggaccctgctacagtggccggcatcatcgtgaccgatgtgatcgctactctgctgctggctctgggagtgttctgcttcgccggacacgaaacaggcagactgtctggcgctgccgatacacaggccctgctgagaaacgaccaagtgtatcagcccctgcgcgacagagatgatgcccagtattctcacctcggcggcaactgggctagaaacaag

SEQ ID NO: 10206 - DNA, 1296 bp, Artificial Sequence
  Synthetic Polynucloetide
atggccttaccagtgaccgccttgctcctgccgctggccttgctgctccacgccgccaggccggaagtgcagctggttgagtctggcggcggacttgtgaaacctggcggaagcctgagactgagctgtgccgcttccggctttacctttagcggctacgccatgagctgggtccgacaggctcctggcaaaggactggaatgggtgtccacaatcagcagcggcggcacctacatctactaccccgatagcgtgaaaggccggttcaccatcagccgggacaacgccaagaacagcctgtacctccagatgaactccctgagagccgaggacaccgccgtgtactattgtgccagactcggcggcgacaattactacgagtatttcgacgtgtggggcaagggcaccaccgtgacagtttcttctggcggaggcggaagtggaggcggaggatctggcggcggaggctctgacatcgtgctgacacagagccctgcttctctggccgtttctcctggacagagggccaccatcacatgcagagccagcaagagcgtgtccaccagcggctacagctacatgcactggtatcagcagaagcccggccagcctcctaagctgctgatctacctggcctccaacctggaaagcggagtgcctgccagattttctggcagcggctctggcaccgacttcaccctgacaatcaaccccgtggaagccaacgacaccgccaactactactgccagcacagcagagagctgcccttcacatttggcggaggcaccaaggtggaaatcaagagaacaacgcgtcagagcatcaagggcaaccacctggtcaaggtgtacgactaccaagaggacggcagcgtgctgctgacatgtgatgccgaggccaagaacatcacctggtttaaggacggcaagatgatcggcttcctgaccgaggacaagaagaagtggaacctgggcagcaacgctaaggaccccagaggcatgtatcagtgcaagggcagccagaacaagagcaagcccctccaggtgtactaccggatgtgccagaactgcatcgagctgaacgccgctaccatcagcggctttctgttcgccgagatcgtgtccatcttcgtgctggccgtgggcgtgtactttatcgctggacaggatggcgtgcggcagagcagagcttccgataagcaaaccctgctgcctaacgaccagctgtaccagcctctgaaggacagagaggacgaccagtacagccacctccagggcaatcagctgagaagaaac

SEQ ID NO: 10207 - DNA, 1245 bp, Artificial Sequence
  Synthetic Polynucloetide
atggccttaccagtgaccgccttgctcctgccgctggccttgctgctccacgccgccaggccggaagtgcagctggttgagtctggcggcggacttgtgaaacctggcggaagcctgagactgagctgtgccgcttccggctttacctttagcggctacgccatgagctgggtccgacaggctcctggcaaaggactggaatgggtgtccacaatcagcagcggcggcacctacatctactaccccgatagcgtgaaaggccggttcaccatcagccgggacaacgccaagaacagcctgtacctccagatgaactccctgagagccgaggacaccgccgtgtactattgtgccagactcggcggcgacaattactacgagtatttcgacgtgtggggcaagggcaccaccgtgacagtttcttctggcggaggcggaagtggaggcggaggatctggcggcggaggctctgacatcgtgctgacacagagccctgcttctctggccgtttctcctggacagagggccaccatcacatgcagagccagcaagagcgtgtccaccagcggctacagctacatgcactggtatcagcagaagcccggccagcctcctaagctgctgatctacctggcctccaacctggaaagcggagtgcctgccagattttctggcagcggctctggcaccgacttcaccctgacaatcaaccccgtggaagccaacgacaccgccaactactactgccagcacagcagagagctgcccttcacatttggcggaggcaccaaggtggaaatcaagagaacaacgcgtcagagttttgggttgttggaccctaaattgtgctatctgttggacggaatcctgttcatttacggagtgatcctgaccgcattgttcctgcgggttaagttttccagatccgcagacgcacccgcttaccaacaagggcagaaccaactctacaatgaacttaatttggggcggagggaagagtacgacgttctggacaaaaggaggggacgagatcccgagatgggcggaaagcctcagcgaaggaagaatccgcaagaggggctttataacgaactccagaaagataaaatggcagaagcctatagtgagattgggatgaagggagaaaggaggaggggtaaaggtcacgatgggttgtaccaaggattgagcacagccactaaagatacctatgatgcgctccacatgcaggccctgccgccaaga

SEQ ID NO: 10208 - DNA, 1947 bp, Artificial Sequence
  Synthetic Polynucloetide
atggccttaccagtgaccgccttgctcctgccgctggccttgctgctccacgccgccaggccggacatcgtgctgacacagagccctgcttctctggccgtttctcctggacagagggccaccatcacatgcagagccagcaagagcgtgtccaccagcggctacagctacatgcactggtatcagcagaagcccggccagcctcctaagctgctgatctacctggcctccaacctggaaagcggagtgcctgccagattttctggcagcggctctggcaccgacttcaccctgacaatcaaccccgtggaagccaacgacaccgccaactactactgccagcacagcagagagctgcccttcacatttggcggaggcaccaaggtggaaatcaagagaacaggcggaggcggaagtggaggcggaggatctggcggcggaggctctgaagtgcagctggttgagtctggcggcggacttgtgaaacctggcggaagcctgagactgagctgtgccgcttccggctttacctttagcggctacgccatgagctgggtccgacaggctcctggcaaaggactggaatgggtgtccacaatcagcagcggcggcacctacatctactaccccgatagcgtgaaaggccggttcaccatcagccgggacaacgccaagaacagcctgtacctccagatgaactccctgagagccgaggacaccgccgtgtactattgtgccagactcggcggcgacaattactacgagtatttcgacgtgtggggcaagggcaccaccgtgacagtttcttctacgcgtgggagcggcatccagaaccctgatcctgccgtgtaccagctgcgggatagcaagagcagcgacaagagcgtgtgtctgttcaccgacttcgacagccagaccaacgtgtcccagagcaaggactccgacgtgtacatcaccgataagaccgtgctggacatgcggagcatggacttcaagagcaactccgccgtggcctggtccaacaagtccgatttcgcctgcgccaacgccttcaacaacagcattatccccgaggacacattcttcccaagccccgagagcagctgcgacgtgaagctggtggaaaagagcttcgagacagacaccaacctgaacttccagaacctgagcgtgatcggcttcagaatcctgctgctgaaagtggccggctttaacctgctgatgaccctgcggctgtggtccagccgcgccaagagaagcggatctggcgtgaagcagaccctgaatttcgacctgctgaagctggctggcgacgtggaatccaacccaggcccttctagaggccatatgaccgagtacaagcccacggtgcgcctcgccacccgcgacgacgtccccagggccgtacgcaccctcgccgccgcgttcgccgactaccccgccacgcgccacaccgtcgatccggaccgccacatcgagcgggtcaccgagctgcaagaactcttcctcacgcgcgtcgggctcgacatcggcaaggtgtgggtcgcggacgacggcgccgcggtggcggtctggaccacgccggagagcgtcgaagcgggggcggtgttcgccgagatcggcccgcgcatggccgagttgagcggttcccggctggccgcgcagcaacagatggaaggcctcctggcgccgcaccggcccaaggagcccgcgtggttcctggccaccgtcggcgtctcgcccgaccaccagggcaagggtctgggcagcgccgtcgtgctccccggagtggaggcggccgagcgcgccggggtgcccgccttcctggagacctccgcgccccgcaacctccccttctacgagcggctcggcttcaccgtcaccgccgacgtcgaggtgcccgaaggaccgcgcacctggtgcatgacccgcaagcccggtgcctga

SEQ ID NO: 10209 - DNA, 2043 bp, Artificial Sequence
  Synthetic Polynucloetide
atggccttaccagtgaccgccttgctcctgccgctggccttgctgctccacgccgccaggccggacatcgtgctgacacagagccctgcttctctggccgtttctcctggacagagggccaccatcacatgcagagccagcaagagcgtgtccaccagcggctacagctacatgcactggtatcagcagaagcccggccagcctcctaagctgctgatctacctggcctccaacctggaaagcggagtgcctgccagattttctggcagcggctctggcaccgacttcaccctgacaatcaaccccgtggaagccaacgacaccgccaactactactgccagcacagcagagagctgcccttcacatttggcggaggcaccaaggtggaaatcaagagaacaggcggaggcggaagtggaggcggaggatctggcggcggaggctctgaagtgcagctggttgagtctggcggcggacttgtgaaacctggcggaagcctgagactgagctgtgccgcttccggctttacctttagcggctacgccatgagctgggtccgacaggctcctggcaaaggactggaatgggtgtccacaatcagcagcggcggcacctacatctactaccccgatagcgtgaaaggccggttcaccatcagccgggacaacgccaagaacagcctgtacctccagatgaactccctgagagccgaggacaccgccgtgtactattgtgccagactcggcggcgacaattactacgagtatttcgacgtgtggggcaagggcaccaccgtgacagtttcttctctcgaggacctgaagaacgtgttcccacctgaggtggccgtgttcgagcctagcgaggccgagatcagccacacccagaaagccaccctcgtgtgcctggctaccggcttctaccccgaccatgtggaactgtcttggtgggtcaacggcaaagaggtgcacagcggcgtgtctaccgacccccagccactgaaagaacagcccgccctgaacgacagccggtactgcctgagcagcagactgagagtgtccgccaccttctggcagaacccccggaaccacttcagatgccaggtgcagttctacggcctgagcgagaacgacgagtggacccaggacagagccaagcccgtgacccagatcgtgtctgccgaagcctggggcagagccgattgcggctttaccagcgagagctaccagcagggcgtgctgagcgccaccatcctgtacgagatcctgctgggcaaggccaccctgtacgccgtgctggtgtctgccctggtgctgatggctatggtcaagcggaaggacagccggggaagggccaagcgatctggatctggagcaacaaacttctcactactcaaacaagcaggtgacgtggaggagaatcccgggcctactagaggccatatgaccgagtacaagcccacggtgcgcctcgccacccgcgacgacgtccccagggccgtacgcaccctcgccgccgcgttcgccgactaccccgccacgcgccacaccgtcgatccggaccgccacatcgagcgggtcaccgagctgcaagaactcttcctcacgcgcgtcgggctcgacatcggcaaggtgtgggtcgcggacgacggcgccgcggtggcggtctggaccacgccggagagcgtcgaagcgggggcggtgttcgccgagatcggcccgcgcatggccgagttgagcggttcccggctggccgcgcagcaacagatggaaggcctcctggcgccgcaccggcccaaggagcccgcgtggttcctggccaccgtcggcgtctcgcccgaccaccagggcaagggtctgggcagcgccgtcgtgctccccggagtggaggcggccgagcgcgccggggtgcccgccttcctggagacctccgcgccccgcaacctccccttctacgagcggctcggcttcaccgtcaccgccgacgtcgaggtgcccgaaggaccgcgcacctggtgcatgacccgcaagcccggtgcctga

SEQ ID NO: 10210 - DNA, 2193 bp, Artificial Sequence
  Synthetic Polynucloetide
atggccttaccagtgaccgccttgctcctgccgctggccttgctgctccacgccgccaggccggacatcgtgctgacacagagccctgcttctctggccgtttctcctggacagagggccaccatcacatgcagagccagcaagagcgtgtccaccagcggctacagctacatgcactggtatcagcagaagcccggccagcctcctaagctgctgatctacctggcctccaacctggaaagcggagtgcctgccagattttctggcagcggctctggcaccgacttcaccctgacaatcaaccccgtggaagccaacgacaccgccaactactactgccagcacagcagagagctgcccttcacatttggcggaggcaccaaggtggaaatcaagagaacaggcggaggcggaagtggaggcggaggatctggcggcggaggctctgaagtgcagctggttgagtctggcggcggacttgtgaaacctggcggaagcctgagactgagctgtgccgcttccggctttacctttagcggctacgccatgagctgggtccgacaggctcctggcaaaggactggaatgggtgtccacaatcagcagcggcggcacctacatctactaccccgatagcgtgaaaggccggttcaccatcagccgggacaacgccaagaacagcctgtacctccagatgaactccctgagagccgaggacaccgccgtgtactattgtgccagactcggcggcgacaattactacgagtatttcgacgtgtggggcaagggcaccaccgtgacagtttcttctacgcgtgagcagaaactgatctcggaagaggatctggggagcggcaccccattcccttctctggcccctcccatcatgctgctggtggacggcaagcagcagatggtggtcgtgtgcctggtgctggatgtggccccacctggactggacagccccatctggtttagcgccggcaatggctctgccctggacgcctttacctacggcccaagccctgccaccgatggcacctggacaaatctggcccacctgagcctgcccagcgaggaactggcttcttgggagcctctcgtgtgccacacaggacctggcgctgagggacacagcagatccacccagcctatgcacctgtctggcgaggccagcaccgccagaacctgtcctcaggaacctctgagaggcacccctggcggagcactgtggctgggagtgctgagactgctgctgttcaagctgctgctgtttgacctgctgctgacctgctcctgtctgtgcgatcctgccggccctctgccttctcctgccaccaccacaagactgagagccctgggcagccacagactgcaccctgccacagagacaggcggcagagaggccacaagcagccctagaccccagcccagagacagaagatggggcgataccccccctggcagaaagcctggatctccagtccgcgccaagagaagcggatctggcgtgaagcagaccctgaatttcgacctgctgaagctggctggcgacgtggaatccaacccaggcccttctagatctagaggccatatgaccgagtacaagcccacggtgcgcctcgccacccgcgacgacgtccccagggccgtacgcaccctcgccgccgcgttcgccgactaccccgccacgcgccacaccgtcgatccggaccgccacatcgagcgggtcaccgagctgcaagaactcttcctcacgcgcgtcgggctcgacatcggcaaggtgtgggtcgcggacgacggcgccgcggtggcggtctggaccacgccggagagcgtcgaagcgggggcggtgttcgccgagatcggcccgcgcatggccgagttgagcggttcccggctggccgcgcagcaacagatggaaggcctcctggcgccgcaccggcccaaggagcccgcgtggttcctggccaccgtcggcgtctcgcccgaccaccagggcaagggtctgggcagcgccgtcgtgctccccggagtggaggcggccgagcgcgccggggtgcccgccttcctggagacctccgcgccccgcaacctccccttctacgagcggctcggcttcaccgtcaccgccgacgtcgaggtgcccgaaggaccgcgcacctggtgcatgacccgcaagcccggtgcctga

SEQ ID NO: 10211 - DNA, 1635 bp, Artificial Sequence
  Synthetic Polynucloetide
atggccttaccagtgaccgccttgctcctgccgctggccttgctgctccacgccgccaggccggacatcgtgctgacacagagccctgcttctctggccgtttctcctggacagagggccaccatcacatgcagagccagcaagagcgtgtccaccagcggctacagctacatgcactggtatcagcagaagcccggccagcctcctaagctgctgatctacctggcctccaacctggaaagcggagtgcctgccagattttctggcagcggctctggcaccgacttcaccctgacaatcaaccccgtggaagccaacgacaccgccaactactactgccagcacagcagagagctgcccttcacatttggcggaggcaccaaggtggaaatcaagagaacactcgaggacctgaagaacgtgttcccacctgaggtggccgtgttcgagcctagcgaggccgagatcagccacacccagaaagccaccctcgtgtgcctggctaccggcttctaccccgaccatgtggaactgtcttggtgggtcaacggcaaagaggtgcacagcggcgtgtctaccgacccccagccactgaaagaacagcccgccctgaacgacagccggtactgcctgagcagcagactgagagtgtccgccaccttctggcagaacccccggaaccacttcagatgccaggtgcagttctacggcctgagcgagaacgacgagtggacccaggacagagccaagcccgtgacccagatcgtgtctgccgaagcctggggcagagccgattgcggctttaccagcgagagctaccagcagggcgtgctgagcgccaccatcctgtacgagatcctgctgggcaaggccaccctgtacgccgtgctggtgtctgccctggtgctgatggctatggtcaagcggaaggacagccggggaagggccaagcgatctggatctggagcaacaaacttctcactactcaaacaagcaggtgacgtggaggagaatcccgggcctactagaggccatatgaccgagtacaagcccacggtgcgcctcgccacccgcgacgacgtccccagggccgtacgcaccctcgccgccgcgttcgccgactaccccgccacgcgccacaccgtcgatccggaccgccacatcgagcgggtcaccgagctgcaagaactcttcctcacgcgcgtcgggctcgacatcggcaaggtgtgggtcgcggacgacggcgccgcggtggcggtctggaccacgccggagagcgtcgaagcgggggcggtgttcgccgagatcggcccgcgcatggccgagttgagcggttcccggctggccgcgcagcaacagatggaaggcctcctggcgccgcaccggcccaaggagcccgcgtggttcctggccaccgtcggcgtctcgcccgaccaccagggcaagggtctgggcagcgccgtcgtgctccccggagtggaggcggccgagcgcgccggggtgcccgccttcctggagacctccgcgccccgcaacctccccttctacgagcggctcggcttcaccgtcaccgccgacgtcgaggtgcccgaaggaccgcgcacctggtgcatgacccgcaagcccggtgcctga

SEQ ID NO: 10212 - DNA, 942 bp, Artificial Sequence
  Synthetic Polynucloetide
atggccttaccagtgaccgccttgctcctgccgctggccttgctgctccacgccgccaggccggacatcgtgctgacacagagccctgcttctctggccgtttctcctggacagagggccaccatcacatgcagagccagcaagagcgtgtccaccagcggctacagctacatgcactggtatcagcagaagcccggccagcctcctaagctgctgatctacctggcctccaacctggaaagcggagtgcctgccagattttctggcagcggctctggcaccgacttcaccctgacaatcaaccccgtggaagccaacgacaccgccaactactactgccagcacagcagagagctgcccttcacatttggcggaggcaccaaggtggaaatcaagagaacactcgaggacctgaagaacgtgttcccacctgaggtggccgtgttcgagcctagcgaggccgagatcagccacacccagaaagccaccctcgtgtgcctggctaccggcttctaccccgaccatgtggaactgtcttggtgggtcaacggcaaagaggtgcacagcggcgtgtctaccgacccccagccactgaaagaacagcccgccctgaacgacagccggtactgcctgagcagcagactgagagtgtccgccaccttctggcagaacccccggaaccacttcagatgccaggtgcagttctacggcctgagcgagaacgacgagtggacccaggacagagccaagcccgtgacccagatcgtgtctgccgaagcctggggcagagccgattgcggctttaccagcgagagctaccagcagggcgtgctgagcgccaccatcctgtacgagatcctgctgggcaaggccaccctgtacgccgtgctggtgtctgccctggtgctgatggctatggtcaagcggaaggacagccgggga

SEQ ID NO: 10213 - DNA, 1353 bp, Artificial Sequence
  Synthetic Polynucloetide
atggactggatttggcgcatccttttccttgtcggcgctgctaccggcgcgcattccttcgaagaagtgcagctggttgagtctggcggcggacttgtgaaacctggcggaagcctgagactgagctgtgccgcttccggctttacctttagcggctacgccatgagctgggtccgacaggctcctggcaaaggactggaatgggtgtccacaatcagcagcggcggcacctacatctactaccccgatagcgtgaaaggccggttcaccatcagccgggacaacgccaagaacagcctgtacctccagatgaactccctgagagccgaggacaccgccgtgtactattgtgccagactcggcggcgacaattactacgagtatttcgacgtgtggggcaagggcaccaccgtgacagtttcttctacgcgtatccagaaccctgatcctgccgtgtaccagctgcgggatagcaagagcagcgacaagagcgtgtgtctgttcaccgacttcgacagccagaccaacgtgtcccagagcaaggactccgacgtgtacatcaccgataagaccgtgctggacatgcggagcatggacttcaagagcaactccgccgtggcctggtccaacaagtccgatttcgcctgcgccaacgccttcaacaacagcattatccccgaggacacattcttcccaagccccgagagcagctgcgacgtgaagctggtggaaaagagcttcgagacagacaccaacctgaacttccagaacctgagcgtgatcggcttcagaatcctgctgctgaaagtggccggctttaacctgctgatgaccctgcggctgtggtccagccgcgccaagagaagcggatctggcgtgaagcagaccctgaatttcgacctgctgaagctggctggcgacgtggaatccaacccaggcccttctagaggccatatggccaagcctttgtctcaagaagaatccaccctcattgaaagagcaacggctacaatcaacagcatccccatctctgaagactacagcgtcgccagcgcagctctctctagcgacggccgcatcttcactggtgtcaatgtatatcattttactgggggaccttgtgcagaactcgtggtgctgggcactgctgctgctgcggcagctggcaacctgacttgtatcgtcgcgatcggaaatgagaacaggggcatcttgagcccctgcggacggtgccgacaggtgcttctcgatctgcatcctgggatcaaagccatagtgaaggacagtgatggacagccgacggcagttgggattcgtgaattgctgccctctggttatgtgtgggagggctga

SEQ ID NO: 10214 - DNA, 852 bp, Artificial Sequence
  Synthetic Polynucloetide
atggactggatttggcgcatccttttccttgtcggcgctgctaccggcgcgcattccttcgaagaagtgcagctggttgagtctggcggcggacttgtgaaacctggcggaagcctgagactgagctgtgccgcttccggctttacctttagcggctacgccatgagctgggtccgacaggctcctggcaaaggactggaatgggtgtccacaatcagcagcggcggcacctacatctactaccccgatagcgtgaaaggccggttcaccatcagccgggacaacgccaagaacagcctgtacctccagatgaactccctgagagccgaggacaccgccgtgtactattgtgccagactcggcggcgacaattactacgagtatttcgacgtgtggggcaagggcaccaccgtgacagtttcttctacgcgtatccagaaccctgatcctgccgtgtaccagctgcgggatagcaagagcagcgacaagagcgtgtgtctgttcaccgacttcgacagccagaccaacgtgtcccagagcaaggactccgacgtgtacatcaccgataagaccgtgctggacatgcggagcatggacttcaagagcaactccgccgtggcctggtccaacaagtccgatttcgcctgcgccaacgccttcaacaacagcattatccccgaggacacattcttcccaagccccgagagcagctgcgacgtgaagctggtggaaaagagcttcgagacagacaccaacctgaacttccagaacctgagcgtgatcggcttcagaatcctgctgctgaaagtggccggctttaacctgctgatgaccctgcggctgtggtccagc

SEQ ID NO: 10215 - DNA, 1689 bp, Artificial Sequence
  Synthetic Polynucloetide
atggccttaccagtgaccgccttgctcctgccgctggccttgctgctccacgccgccaggccggacatcgtgctgacacagagccctgcttctctggccgtttctcctggacagagggccaccatcacatgcagagccagcaagagcgtgtccaccagcggctacagctacatgcactggtatcagcagaagcccggccagcctcctaagctgctgatctacctggcctccaacctggaaagcggagtgcctgccagattttctggcagcggctctggcaccgacttcaccctgacaatcaaccccgtggaagccaacgacaccgccaactactactgccagcacagcagagagctgcccttcacatttggcggaggcaccaaggtggaaatcaagagaacactcgaggggaaaccaattcccaaccctcttctgggactggattcaaccggcagcggcgaggacctgaagaacgtgttcccacctgaggtggccgtgttcgagcctagcgaggccgagatcagccacacccagaaagccaccctcgtgtgcctggctaccggcttctaccccgaccatgtggaactgtcttggtgggtcaacggcaaagaggtgcacagcggcgtgtgtaccgacccccagccactgaaagaacagcccgccctgaacgacagccggtactgcctgagcagcagactgagagtgtccgccaccttctggcagaacccccggaaccacttcagatgccaggtgcagttctacggcctgagcgagaacgacgagtggacccaggacagagccaagcccgtgacccagatcgtgtctgccgaagcctggggcagagccgattgcggctttaccagcgagagctaccagcagggcgtgctgagcgccaccatcctgtacgagatcctgctgggcaaggccaccctgtacgccgtgctggtgtctgccctggtgctgatggctatggtcaagcggaaggacagccggggaagggccaagcgatctggatctggagcaacaaacttctcactactcaaacaagcaggtgacgtggaggagaatcccgggcctactagaggccatatgaccgagtacaagcccacggtgcgcctcgccacccgcgacgacgtccccagggccgtacgcaccctcgccgccgcgttcgccgactaccccgccacgcgccacaccgtcgatccggaccgccacatcgagcgggtcaccgagctgcaagaactcttcctcacgcgcgtcgggctcgacatcggcaaggtgtgggtcgcggacgacggcgccgcggtggcggtctggaccacgccggagagcgtcgaagcgggggcggtgttcgccgagatcggcccgcgcatggccgagttgagcggttcccggctggccgcgcagcaacagatggaaggcctcctggcgccgcaccggcccaaggagcccgcgtggttcctggccaccgtcggcgtctcgcccgaccaccagggcaagggtctgggcagcgccgtcgtgctccccggagtggaggcggccgagcgcgccggggtgcccgccttcctggagacctccgcgccccgcaacctccccttctacgagcggctcggcttcaccgtcaccgccgacgtcgaggtgcccgaaggaccgcgcacctggtgcatgacccgcaagcccggtgcctga

SEQ ID NO: 10216 - DNA, 999 bp, Artificial Sequence
  Synthetic Polynucloetide
atggccttaccagtgaccgccttgctcctgccgctggccttgctgctccacgccgccaggccggacatcgtgctgacacagagccctgcttctctggccgtttctcctggacagagggccaccatcacatgcagagccagcaagagcgtgtccaccagcggctacagctacatgcactggtatcagcagaagcccggccagcctcctaagctgctgatctacctggcctccaacctggaaagcggagtgcctgccagattttctggcagcggctctggcaccgacttcaccctgacaatcaaccccgtggaagccaacgacaccgccaactactactgccagcacagcagagagctgcccttcacatttggcggaggcaccaaggtggaaatcaagagaacactcgaggggaaaccaattcccaaccctcttctgggactggattcaaccggcagcggcgaggacctgaagaacgtgttcccacctgaggtggccgtgttcgagcctagcgaggccgagatcagccacacccagaaagccaccctcgtgtgcctggctaccggcttctaccccgaccatgtggaactgtcttggtgggtcaacggcaaagaggtgcacagcggcgtgtgtaccgacccccagccactgaaagaacagcccgccctgaacgacagccggtactgcctgagcagcagactgagagtgtccgccaccttctggcagaacccccggaaccacttcagatgccaggtgcagttctacggcctgagcgagaacgacgagtggacccaggacagagccaagcccgtgacccagatcgtgtctgccgaagcctggggcagagccgattgcggctttaccagcgagagctaccagcagggcgtgctgagcgccaccatcctgtacgagatcctgctgggcaaggccaccctgtacgccgtgctggtgtctgccctggtgctgatggctatggtcaagcggaaggacagccggggatga

SEQ ID NO: 10217 - DNA, 1389 bp, Artificial Sequence
  Synthetic Polynucloetide
atggactggatttggcgcatccttttccttgtcggcgctgctaccggcgcgcattccttcgaagaagtgcagctggttgagtctggcggcggacttgtgaaacctggcggaagcctgagactgagctgtgccgcttccggctttacctttagcggctacgccatgagctgggtccgacaggctcctggcaaaggactggaatgggtgtccacaatcagcagcggcggcacctacatctactaccccgatagcgtgaaaggccggttcaccatcagccgggacaacgccaagaacagcctgtacctccagatgaactccctgagagccgaggacaccgccgtgtactattgtgccagactcggcggcgacaattactacgagtatttcgacgtgtggggcaagggcaccaccgtgacagtttcttctacgcgtgagcagaaactgatctcggaagaggatgggagcggcatccagaaccctgatcctgccgtgtaccagctgcgggatagcaagagcagcgacaagagcgtgtgtctgttcaccgacttcgacagccagaccaacgtgtcccagagcaaggactccgacgtgtacatcaccgataagtgcgtgctggacatgcggagcatggacttcaagagcaactccgccgtggcctggtccaacaagtccgatttcgcctgcgccaacgccttcaacaacagcattatccccgaggacacattcttcccaagccccgagagcagctgcgacgtgaagctggtggaaaagagcttcgagacagacaccaacctgaacttccagaacctgagcgtgatcggcttcagaatcctgctgctgaaagtggccggctttaacctgctgatgaccctgcggctgtggtccagccgcgccaagagaagcggatctggcgtgaagcagaccctgaatttcgacctgctgaagctggctggcgacgtggaatccaacccaggcccttctagaggccatatggccaagcctttgtctcaagaagaatccaccctcattgaaagagcaacggctacaatcaacagcatccccatctctgaagactacagcgtcgccagcgcagctctctctagcgacggccgcatcttcactggtgtcaatgtatatcattttactgggggaccttgtgcagaactcgtggtgctgggcactgctgctgctgcggcagctggcaacctgacttgtatcgtcgcgatcggaaatgagaacaggggcatcttgagcccctgcggacggtgccgacaggtgcttctcgatctgcatcctgggatcaaagccatagtgaaggacagtgatggacagccgacggcagttgggattcgtgaattgctgccctctggttatgtgtgggagggctga

SEQ ID NO: 10218 - DNA, 891 bp, Artificial Sequence
  Synthetic Polynucloetide
atggactggatttggcgcatccttttccttgtcggcgctgctaccggcgcgcattccttcgaagaagtgcagctggttgagtctggcggcggacttgtgaaacctggcggaagcctgagactgagctgtgccgcttccggctttacctttagcggctacgccatgagctgggtccgacaggctcctggcaaaggactggaatgggtgtccacaatcagcagcggcggcacctacatctactaccccgatagcgtgaaaggccggttcaccatcagccgggacaacgccaagaacagcctgtacctccagatgaactccctgagagccgaggacaccgccgtgtactattgtgccagactcggcggcgacaattactacgagtatttcgacgtgtggggcaagggcaccaccgtgacagtttcttctacgcgtgagcagaaactgatctcggaagaggatgggagcggcatccagaaccctgatcctgccgtgtaccagctgcgggatagcaagagcagcgacaagagcgtgtgtctgttcaccgacttcgacagccagaccaacgtgtcccagagcaaggactccgacgtgtacatcaccgataagtgcgtgctggacatgcggagcatggacttcaagagcaactccgccgtggcctggtccaacaagtccgatttcgcctgcgccaacgccttcaacaacagcattatccccgaggacacattcttcccaagccccgagagcagctgcgacgtgaagctggtggaaaagagcttcgagacagacaccaacctgaacttccagaacctgagcgtgatcggcttcagaatcctgctgctgaaagtggccggctttaacctgctgatgaccctgcggctgtggtccagctga

SEQ ID NO: 10219 - DNA, 1947 bp, Artificial Sequence
  Synthetic Polynucloetide
atggccttaccagtgaccgccttgctcctgccgctggccttgctgctccacgccgccaggccggacatcgtgctgacacagagccctgcttctctggccgtttctcctggacagagggccaccatcacatgcagagccagcaagagcgtgtccaccagcggctacagctacatgcactggtatcagcagaagcccggccagcctcctaagctgctgatctacctggcctccaacctggaaagcggagtgcctgccagattttctggcagcggctctggcaccgacttcaccctgacaatcaaccccgtggaagccaacgacaccgccaactactactgccagcacagcagagagctgcccttcacatttggcggaggcaccaaggtggaaatcaagagaacaggcggaggcggaagtggaggcggaggatctggcggcggaggctctgaagtgcagctggttgagtctggcggcggacttgtgaaacctggcggaagcctgagactgagctgtgccgcttccggctttacctttagcggctacgccatgagctgggtccgacaggctcctggcaaaggactggaatgggtgtccacaatcagcagcggcggcacctacatctactaccccgatagcgtgaaaggccggttcaccatcagccgggacaacgccaagaacagcctgtacctccagatgaactccctgagagccgaggacaccgccgtgtactattgtgccagactcggcggcgacaattactacgagtatttcgacgtgtggggcaagggcaccaccgtgacagtttcttctacgcgtgggagcggcatccagaaccctgatcctgccgtgtaccagctgcgggatagcaagagcagcgacaagagcgtgtgtctgttcaccgacttcgacagccagaccaacgtgtcccagagcaaggactccgacgtgtacatcaccgataagaccgtgctggacatgcggagcatggacttcaagagcaactccgccgtggcctggtccaacaagtccgatttcgcctgcgccaacgccttcaacaacagcattatccccgaggacacattcttcccaagcagcgacgtgccctgcgacgtgaagctggtggaaaagagcttcgagacagacaccaacctgaacttccagaacctgagcgtgatcggcttcagaatcctgctgctgaaagtggccggctttaacctgctgatgaccctgcggctgtggtccagccgcgccaagagaagcggatctggcgtgaagcagaccctgaatttcgacctgctgaagctggctggcgacgtggaatccaacccaggcccttctagaggccatatgaccgagtacaagcccacggtgcgcctcgccacccgcgacgacgtccccagggccgtacgcaccctcgccgccgcgttcgccgactaccccgccacgcgccacaccgtcgatccggaccgccacatcgagcgggtcaccgagctgcaagaactcttcctcacgcgcgtcgggctcgacatcggcaaggtgtgggtcgcggacgacggcgccgcggtggcggtctggaccacgccggagagcgtcgaagcgggggcggtgttcgccgagatcggcccgcgcatggccgagttgagcggttcccggctggccgcgcagcaacagatggaaggcctcctggcgccgcaccggcccaaggagcccgcgtggttcctggccaccgtcggcgtctcgcccgaccaccagggcaagggtctgggcagcgccgtcgtgctccccggagtggaggcggccgagcgcgccggggtgcccgccttcctggagacctccgcgccccgcaacctccccttctacgagcggctcggcttcaccgtcaccgccgacgtcgaggtgcccgaaggaccgcgcacctggtgcatgacccgcaagcccggtgcctga

SEQ ID NO: 10220 - DNA, 2043 bp, Artificial Sequence
  Synthetic Polynucloetide
atggccttaccagtgaccgccttgctcctgccgctggccttgctgctccacgccgccaggccggacatcgtgctgacacagagccctgcttctctggccgtttctcctggacagagggccaccatcacatgcagagccagcaagagcgtgtccaccagcggctacagctacatgcactggtatcagcagaagcccggccagcctcctaagctgctgatctacctggcctccaacctggaaagcggagtgcctgccagattttctggcagcggctctggcaccgacttcaccctgacaatcaaccccgtggaagccaacgacaccgccaactactactgccagcacagcagagagctgcccttcacatttggcggaggcaccaaggtggaaatcaagagaacaggcggaggcggaagtggaggcggaggatctggcggcggaggctctgaagtgcagctggttgagtctggcggcggacttgtgaaacctggcggaagcctgagactgagctgtgccgcttccggctttacctttagcggctacgccatgagctgggtccgacaggctcctggcaaaggactggaatgggtgtccacaatcagcagcggcggcacctacatctactaccccgatagcgtgaaaggccggttcaccatcagccgggacaacgccaagaacagcctgtacctccagatgaactccctgagagccgaggacaccgccgtgtactattgtgccagactcggcggcgacaattactacgagtatttcgacgtgtggggcaagggcaccaccgtgacagtttcttctctcgaggacctgaagaacgtgttcccacctgaggtggccgtgttcgagcctagcaaggccgagatcgcccacacccagaaagccaccctcgtgtgcctggctaccggcttctaccccgaccatgtggaactgtcttggtgggtcaacggcaaagaggtgcacagcggcgtgtctaccgacccccagccactgaaagaacagcccgccctgaacgacagccggtactgcctgagcagcagactgagagtgtccgccaccttctggcagaacccccggaaccacttcagatgccaggtgcagttctacggcctgagcgagaacgacgagtggacccaggacagagccaagcccgtgacccagatcgtgtctgccgaagcctggggcagagccgattgcggcatcaccagcgccagctaccaccagggcgtgctgagcgccaccatcctgtacgagatcctgctgggcaaggccaccctgtacgccgtgctggtgtctgccctggtgctgatggctatggtcaagcggaaggacagccggggaagggccaagcgatctggatctggagcaacaaacttctcactactcaaacaagcaggtgacgtggaggagaatcccgggcctactagaggccatatgaccgagtacaagcccacggtgcgcctcgccacccgcgacgacgtccccagggccgtacgcaccctcgccgccgcgttcgccgactaccccgccacgcgccacaccgtcgatccggaccgccacatcgagcgggtcaccgagctgcaagaactcttcctcacgcgcgtcgggctcgacatcggcaaggtgtgggtcgcggacgacggcgccgcggtggcggtctggaccacgccggagagcgtcgaagcgggggcggtgttcgccgagatcggcccgcgcatggccgagttgagcggttcccggctggccgcgcagcaacagatggaaggcctcctggcgccgcaccggcccaaggagcccgcgtggttcctggccaccgtcggcgtctcgcccgaccaccagggcaagggtctgggcagcgccgtcgtgctccccggagtggaggcggccgagcgcgccggggtgcccgccttcctggagacctccgcgccccgcaacctccccttctacgagcggctcggcttcaccgtcaccgccgacgtcgaggtgcccgaaggaccgcgcacctggtgcatgacccgcaagcccggtgcctga

SEQ ID NO: 10221 - DNA, 2112 bp, Artificial Sequence
  Synthetic Polynucloetide
atggccttaccagtgaccgccttgctcctgccgctggccttgctgctccacgccgccaggccggacatcgtgctgacacagagccctgcttctctggccgtttctcctggacagagggccaccatcacatgcagagccagcaagagcgtgtccaccagcggctacagctacatgcactggtatcagcagaagcccggccagcctcctaagctgctgatctacctggcctccaacctggaaagcggagtgcctgccagattttctggcagcggctctggcaccgacttcaccctgacaatcaaccccgtggaagccaacgacaccgccaactactactgccagcacagcagagagctgcccttcacatttggcggaggcaccaaggtggaaatcaagagaacaggcggaggcggaagtggaggcggaggatctggcggcggaggctctgaagtgcagctggttgagtctggcggcggacttgtgaaacctggcggaagcctgagactgagctgtgccgcttccggctttacctttagcggctacgccatgagctgggtccgacaggctcctggcaaaggactggaatgggtgtccacaatcagcagcggcggcacctacatctactaccccgatagcgtgaaaggccggttcaccatcagccgggacaacgccaagaacagcctgtacctccagatgaactccctgagagccgaggacaccgccgtgtactattgtgccagactcggcggcgacaattactacgagtatttcgacgtgtggggcaagggcaccaccgtgacagtttcttctacgcgtgggtctggaggcggaggcagcggcggaggcgggagcggcgacggtaacgaggagatgggaggaatcactcaaaccccttacaaagtctcaatttcaggaacaactgttatccttacatgtccccagtatcctggcagcgagatcctttggcagcataacgacaagaatatagggggagatgaagacgataagaatatcggatctgacgaggatcacttgagcctgaaagagttctccgagcttgaacaaagcggatattatgtgtgctatccgcgcgggtcaaagccggaagacgctaacttttacctttatctccgagccagagtgtgcgaaaattgcatggaaatggacgttatgtccgttgctacaatagttatcgtagatatatgcatcacgggtggactgcttctgctggtttattattggtccaagaatagaaaggccaaagctaaacccgtgaccagaggcgctggcgcaggcggaaggcaaaggggacaaaacaaagaacggccaccaccagtgccaaatccagattatgagcctattcggaaaggacagagggacctgtactctggcctgaatcagagaagaatccgcgccaagagaagcggatctggcgtgaagcagaccctgaatttcgacctgctgaagctggctggcgacgtggaatccaacccaggcccttctagaggccatatgaccgagtacaagcccacggtgcgcctcgccacccgcgacgacgtccccagggccgtacgcaccctcgccgccgcgttcgccgactaccccgccacgcgccacaccgtcgatccggaccgccacatcgagcgggtcaccgagctgcaagaactcttcctcacgcgcgtcgggctcgacatcggcaaggtgtgggtcgcggacgacggcgccgcggtggcggtctggaccacgccggagagcgtcgaagcgggggcggtgttcgccgagatcggcccgcgcatggccgagttgagcggttcccggctggccgcgcagcaacagatggaaggcctcctggcgccgcaccggcccaaggagcccgcgtggttcctggccaccgtcggcgtctcgcccgaccaccagggcaagggtctgggcagcgccgtcgtgctccccggagtggaggcggccgagcgcgccggggtgcccgccttcctggagacctccgcgccccgcaacctccccttctacgagcggctcggcttcaccgtcaccgccgacgtcgaggtgcccgaaggaccgcgcacctggtgcatgacccgcaagcccggtgcctga

SEQ ID NO: 10222 - DNA, 2007 bp, Artificial Sequence
  Synthetic Polynucloetide
atggccttaccagtgaccgccttgctcctgccgctggccttgctgctccacgccgccaggccggacatcgtgctgacacagagccctgcttctctggccgtttctcctggacagagggccaccatcacatgcagagccagcaagagcgtgtccaccagcggctacagctacatgcactggtatcagcagaagcccggccagcctcctaagctgctgatctacctggcctccaacctggaaagcggagtgcctgccagattttctggcagcggctctggcaccgacttcaccctgacaatcaaccccgtggaagccaacgacaccgccaactactactgccagcacagcagagagctgcccttcacatttggcggaggcaccaaggtggaaatcaagagaacaggcggaggcggaagtggaggcggaggatctggcggcggaggctctgaagtgcagctggttgagtctggcggcggacttgtgaaacctggcggaagcctgagactgagctgtgccgcttccggctttacctttagcggctacgccatgagctgggtccgacaggctcctggcaaaggactggaatgggtgtccacaatcagcagcggcggcacctacatctactaccccgatagcgtgaaaggccggttcaccatcagccgggacaacgccaagaacagcctgtacctccagatgaactccctgagagccgaggacaccgccgtgtactattgtgccagactcggcggcgacaattactacgagtatttcgacgtgtggggcaagggcaccaccgtgacagtttcttctacgcgtgggtctggaggcggaggcagcggcggaggcgggagcggcttcaagatccccatcgaggaactggaagatcgggtgttcgtgaactgcaacacctctatcacctgggtggaaggcaccgtgggaacactgctgagcgacatcaccagactggacctcggcaagcggattctggaccctcggggcatctacagatgcaacggcaccgacatctacaaggacaaagaaagcaccgtgcaggtccactacagaatgtgccagtcctgcgtggaactggaccctgctacagtggccggcatcatcgtgaccgatgtgatcgctactctgctgctggctctgggagtgttctgcttcgccggacacgaaacaggcagactgtctggcgctgccgatacacaggccctgctgagaaacgaccaagtgtatcagcccctgcgcgacagagatgatgcccagtattctcacctcggcggcaactgggctagaaacaagcgcgccaagagaagcggatctggcgtgaagcagaccctgaatttcgacctgctgaagctggctggcgacgtggaatccaacccaggcccttctagaggccatatgaccgagtacaagcccacggtgcgcctcgccacccgcgacgacgtccccagggccgtacgcaccctcgccgccgcgttcgccgactaccccgccacgcgccacaccgtcgatccggaccgccacatcgagcgggtcaccgagctgcaagaactcttcctcacgcgcgtcgggctcgacatcggcaaggtgtgggtcgcggacgacggcgccgcggtggcggtctggaccacgccggagagcgtcgaagcgggggcggtgttcgccgagatcggcccgcgcatggccgagttgagcggttcccggctggccgcgcagcaacagatggaaggcctcctggcgccgcaccggcccaaggagcccgcgtggttcctggccaccgtcggcgtctcgcccgaccaccagggcaagggtctgggcagcgccgtcgtgctccccggagtggaggcggccgagcgcgccggggtgcccgccttcctggagacctccgcgccccgcaacctccccttctacgagcggctcggcttcaccgtcaccgccgacgtcgaggtgcccgaaggaccgcgcacctggtgcatgacccgcaagcccggtgcctga

SEQ ID NO: 10223 - DNA, 2037 bp, Artificial Sequence
  Synthetic Polynucloetide
atggccttaccagtgaccgccttgctcctgccgctggccttgctgctccacgccgccaggccggacatcgtgctgacacagagccctgcttctctggccgtttctcctggacagagggccaccatcacatgcagagccagcaagagcgtgtccaccagcggctacagctacatgcactggtatcagcagaagcccggccagcctcctaagctgctgatctacctggcctccaacctggaaagcggagtgcctgccagattttctggcagcggctctggcaccgacttcaccctgacaatcaaccccgtggaagccaacgacaccgccaactactactgccagcacagcagagagctgcccttcacatttggcggaggcaccaaggtggaaatcaagagaacaggcggaggcggaagtggaggcggaggatctggcggcggaggctctgaagtgcagctggttgagtctggcggcggacttgtgaaacctggcggaagcctgagactgagctgtgccgcttccggctttacctttagcggctacgccatgagctgggtccgacaggctcctggcaaaggactggaatgggtgtccacaatcagcagcggcggcacctacatctactaccccgatagcgtgaaaggccggttcaccatcagccgggacaacgccaagaacagcctgtacctccagatgaactccctgagagccgaggacaccgccgtgtactattgtgccagactcggcggcgacaattactacgagtatttcgacgtgtggggcaagggcaccaccgtgacagtttcttctacgcgtgggtctggaggcggaggcagcggcggaggcgggagcggccagagcatcaagggcaaccacctggtcaaggtgtacgactaccaagaggacggcagcgtgctgctgacatgtgatgccgaggccaagaacatcacctggtttaaggacggcaagatgatcggcttcctgaccgaggacaagaagaagtggaacctgggcagcaacgctaaggaccccagaggcatgtatcagtgcaagggcagccagaacaagagcaagcccctccaggtgtactaccggatgtgccagaactgcatcgagctgaacgccgctaccatcagcggctttctgttcgccgagatcgtgtccatcttcgtgctggccgtgggcgtgtactttatcgctggacaggatggcgtgcggcagagcagagcttccgataagcaaaccctgctgcctaacgaccagctgtaccagcctctgaaggacagagaggacgaccagtacagccacctccagggcaatcagctgagaagaaaccgcgccaagagaagcggatctggcgtgaagcagaccctgaatttcgacctgctgaagctggctggcgacgtggaatccaacccaggcccttctagaggccatatgaccgagtacaagcccacggtgcgcctcgccacccgcgacgacgtccccagggccgtacgcaccctcgccgccgcgttcgccgactaccccgccacgcgccacaccgtcgatccggaccgccacatcgagcgggtcaccgagctgcaagaactcttcctcacgcgcgtcgggctcgacatcggcaaggtgtgggtcgcggacgacggcgccgcggtggcggtctggaccacgccggagagcgtcgaagcgggggcggtgttcgccgagatcggcccgcgcatggccgagttgagcggttcccggctggccgcgcagcaacagatggaaggcctcctggcgccgcaccggcccaaggagcccgcgtggttcctggccaccgtcggcgtctcgcccgaccaccagggcaagggtctgggcagcgccgtcgtgctccccggagtggaggcggccgagcgcgccggggtgcccgccttcctggagacctccgcgccccgcaacctccccttctacgagcggctcggcttcaccgtcaccgccgacgtcgaggtgcccgaaggaccgcgcacctggtgcatgacccgcaagcccggtgcctga

SEQ ID NO: 10224 - DNA, 1986 bp, Artificial Sequence
  Synthetic Polynucloetide
atggccttaccagtgaccgccttgctcctgccgctggccttgctgctccacgccgccaggccggacatcgtgctgacacagagccctgcttctctggccgtttctcctggacagagggccaccatcacatgcagagccagcaagagcgtgtccaccagcggctacagctacatgcactggtatcagcagaagcccggccagcctcctaagctgctgatctacctggcctccaacctggaaagcggagtgcctgccagattttctggcagcggctctggcaccgacttcaccctgacaatcaaccccgtggaagccaacgacaccgccaactactactgccagcacagcagagagctgcccttcacatttggcggaggcaccaaggtggaaatcaagagaacaggcggaggcggaagtggaggcggaggatctggcggcggaggctctgaagtgcagctggttgagtctggcggcggacttgtgaaacctggcggaagcctgagactgagctgtgccgcttccggctttacctttagcggctacgccatgagctgggtccgacaggctcctggcaaaggactggaatgggtgtccacaatcagcagcggcggcacctacatctactaccccgatagcgtgaaaggccggttcaccatcagccgggacaacgccaagaacagcctgtacctccagatgaactccctgagagccgaggacaccgccgtgtactattgtgccagactcggcggcgacaattactacgagtatttcgacgtgtggggcaagggcaccaccgtgacagtttcttctacgcgtgggtctggaggcggaggcagcggcggaggcgggagcggccagagttttgggttgttggaccctaaattgtgctatctgttggacggaatcctgttcatttacggagtgatcctgaccgcattgttcctgcgggttaagttttccagatccgcagacgcacccgcttaccaacaagggcagaaccaactctacaatgaacttaatttggggcggagggaagagtacgacgttctggacaaaaggaggggacgagatcccgagatgggcggaaagcctcagcgaaggaagaatccgcaagaggggctttataacgaactccagaaagataaaatggcagaagcctatagtgagattgggatgaagggagaaaggaggaggggtaaaggtcacgatgggttgtaccaaggattgagcacagccactaaagatacctatgatgcgctccacatgcaggccctgccgccaagacgcgccaagagaagcggatctggcgtgaagcagaccctgaatttcgacctgctgaagctggctggcgacgtggaatccaacccaggcccttctagaggccatatgaccgagtacaagcccacggtgcgcctcgccacccgcgacgacgtccccagggccgtacgcaccctcgccgccgcgttcgccgactaccccgccacgcgccacaccgtcgatccggaccgccacatcgagcgggtcaccgagctgcaagaactcttcctcacgcgcgtcgggctcgacatcggcaaggtgtgggtcgcggacgacggcgccgcggtggcggtctggaccacgccggagagcgtcgaagcgggggcggtgttcgccgagatcggcccgcgcatggccgagttgagcggttcccggctggccgcgcagcaacagatggaaggcctcctggcgccgcaccggcccaaggagcccgcgtggttcctggccaccgtcggcgtctcgcccgaccaccagggcaagggtctgggcagcgccgtcgtgctccccggagtggaggcggccgagcgcgccggggtgcccgccttcctggagacctccgcgccccgcaacctccccttctacgagcggctcggcttcaccgtcaccgccgacgtcgaggtgcccgaaggaccgcgcacctggtgcatgacccgcaagcccggtgcctga

SEQ ID NO: 10225 - DNA, 2286 bp, Artificial Sequence
  Synthetic Polynucloetide
atggccttaccagtgaccgccttgctcctgccgctggccttgctgctccacgccgccaggccggaagtgcagctggttgaatctggcggaggactggttcagcctggcggatctctgagactgtcttgtgccgccagcggcttcagcttcagcgacttttggatgagctgggtccgacaggcccctggcaaaggacttgaatgggtcgccacaatcagccaggccggcagcgagaaggactacgtggactctgtgaagggcagattcaccatcagccgggacaacgccaagaagtccctgtacctccagatgaacagcctgagagccgaggacaccgccgtgtactattgtgcctctggcgtgtacagcttcgactacagaggccagggcaccctggtcacagtctcttctggtaccggcggaggcggatctggcggcggaggtagcggtggcggaggatctgaattcgacatcgtgctgacacagagccctgcttctctggccgtttctcctggacagagggccaccatcacatgcagagccagcaagagcgtgtccaccagcggctacagctacatgcactggtatcagcagaagcccggccagcctcctaagctgctgatctacctggcctccaacctggaaagcggagtgcctgccagattttctggcagcggctctggcaccgacttcaccctgacaatcaaccccgtggaagccaacgacaccgccaactactactgccagcacagcagagagctgcccttcacatttggcggaggcaccaaggtggaaatcaagagaacactcgaggacctgaagaacgtgttcccacctgaggtggccgtgttcgagcctagcgaggccgagatcagccacacccagaaagccaccctcgtgtgcctggctaccggcttctaccccgaccatgtggaactgtcttggtgggtcaacggcaaagaggtgcacagcggcgtgtgtaccgacccccagccactgaaagaacagcccgccctgaacgacagccggtactgcctgagcagcagactgagagtgtccgccaccttctggcagaacccccggaaccacttcagatgccaggtgcagttctacggcctgagcgagaacgacgagtggacccaggacagagccaagcccgtgacccagatcgtgtctgccgaagcctggggcagagccgattgcggctttaccagcgagagctaccagcagggcgtgctgagcgccaccatcctgtacgagatcctgctgggcaaggccaccctgtacgccgtgctggtgtctgccctggtgctgatggctatggtcaagcggaaggacagccggggaagggccaagcgatctggatctggagcaacaaacttctcactactcaaacaagcaggtgacgtggaggagaatcccgggcctactagtatggactggatttggcgcatccttttccttgtcggcgctgctaccggcgcgcattccttcgaagaagtgcagctggttgagtctggcggcggacttgtgaaacctggcggaagcctgagactgagctgtgccgcttccggctttacctttagcggctacgccatgagctgggtccgacaggctcctggcaaaggactggaatgggtgtccacaatcagcagcggcggcacctacatctactaccccgatagcgtgaaaggccggttcaccatcagccgggacaacgccaagaacagcctgtacctccagatgaactccctgagagccgaggacaccgccgtgtactattgtgccagactcggcggcgacaattactacgagtatttcgacgtgtggggcaagggcaccaccgtgacagtttcttctacgcgtatccagaaccctgatcctgccgtgtaccagctgcgggatagcaagagcagcgacaagagcgtgtgtctgttcaccgacttcgacagccagaccaacgtgtcccagagcaaggactccgacgtgtacatcaccgataagtgcgtgctggacatgcggagcatggacttcaagagcaactccgccgtggcctggtccaacaagtccgatttcgcctgcgccaacgccttcaacaacagcattatccccgaggacacattcttcccaagccccgagagcagctgcgacgtgaagctggtggaaaagagcttcgagacagacaccaacctgaacttccagaacctgagcgtgatcggcttcagaatcctgctgctgaaagtggccggctttaacctgctgatgaccctgcggctgtggtccagc

SEQ ID NO: 10226 - DNA, 2298 bp, Artificial Sequence
  Synthetic Polynucloetide
atggccttaccagtgaccgccttgctcctgccgctggccttgctgctccacgccgccaggccggaagtgcagctggttgaatctggcggaggactggttcagcctggcggatctctgagactgtcttgtgccgccagcggcttcagcttcagcgacttttggatgagctgggtccgacaggcccctggcaaaggacttgaatgggtcgccacaatcagccaggccggcagcgagaaggactacgtggactctgtgaagggcagattcaccatcagccgggacaacgccaagaagtccctgtacctccagatgaacagcctgagagccgaggacaccgccgtgtactattgtgcctctggcgtgtacagcttcgactacagaggccagggcaccctggtcacagtctcttctggtaccggcggaggcggatctggcggcggaggtagcggtggcggaggatctgaattcgacatcgtgctgacacagagccctgcttctctggccgtttctcctggacagagggccaccatcacatgcagagccagcaagagcgtgtccaccagcggctacagctacatgcactggtatcagcagaagcccggccagcctcctaagctgctgatctacctggcctccaacctggaaagcggagtgcctgccagattttctggcagcggctctggcaccgacttcaccctgacaatcaaccccgtggaagccaacgacaccgccaactactactgccagcacagcagagagctgcccttcacatttggcggaggcaccaaggtggaaatcaagagaacactcgagatccagaaccctgatcctgccgtgtaccagctgcgggatagcaagagcagcgacaagagcgtgtgtctgttcaccgacttcgacagccagaccaacgtgtcccagagcaaggactccgacgtgtacatcaccgataagtgcgtgctggacatgcggagcatggacttcaagagcaactccgccgtggcctggtccaacaagtccgatttcgcctgcgccaacgccttcaacaacagcattatccccgaggacacattcttcccaagccccgagagcagctgcgacgtgaagctggtggaaaagagcttcgagacagacaccaacctgaacttccagaacctgagcgtgatcggcttcagaatcctgctgctgaaagtggccggctttaacctgctgatgaccctgcggctgtggtccagccgcgccaagagaagcggatctggcgtgaagcagaccctgaatttcgacctgctgaagctggctggcgacgtggaatccaacccaggccctactagtatggactggatttggcgcatccttttccttgtcggcgctgctaccggcgcgcattccttcgaagaagtgcagctggttgagtctggcggcggacttgtgaaacctggcggaagcctgagactgagctgtgccgcttccggctttacctttagcggctacgccatgagctgggtccgacaggctcctggcaaaggactggaatgggtgtccacaatcagcagcggcggcacctacatctactaccccgatagcgtgaaaggccggttcaccatcagccgggacaacgccaagaacagcctgtacctccagatgaactccctgagagccgaggacaccgccgtgtactattgtgccagactcggcggcgacaattactacgagtatttcgacgtgtggggcaagggcaccaccgtgacagtttcttctacgcgtgaggacctgaagaacgtgttcccacctgaggtggccgtgttcgagcctagcgaggccgagatcagccacacccagaaagccaccctcgtgtgcctggctaccggcttctaccccgaccatgtggaactgtcttggtgggtcaacggcaaagaggtgcacagcggcgtgtgtaccgacccccagccactgaaagaacagcccgccctgaacgacagccggtactgcctgagcagcagactgagagtgtccgccaccttctggcagaacccccggaaccacttcagatgccaggtgcagttctacggcctgagcgagaacgacgagtggacccaggacagagccaagcccgtgacccagatcgtgtctgccgaagcctggggcagagccgattgcggctttaccagcgagagctaccagcagggcgtgctgagcgccaccatcctgtacgagatcctgctgggcaaggccaccctgtacgccgtgctggtgtctgccctggtgctgatggctatggtcaagcggaaggacagccgggga

SEQ ID NO: 10227 - DNA, 2874 bp, Artificial Sequence
  Synthetic Polynucloetide
atggccttaccagtgaccgccttgctcctgccgctggccttgctgctccacgccgccaggccggaagtgcagctggttgaatctggcggaggactggttcagcctggcggatctctgagactgtcttgtgccgccagcggcttcagcttcagcgacttttggatgagctgggtccgacaggcccctggcaaaggacttgaatgggtcgccacaatcagccaggccggcagcgagaaggactacgtggactctgtgaagggcagattcaccatcagccgggacaacgccaagaagtccctgtacctccagatgaacagcctgagagccgaggacaccgccgtgtactattgtgcctctggcgtgtacagcttcgactacagaggccagggcaccctggtcacagtctcttctggtaccggcggaggcggatctggcggcggaggtagcggtggcggaggatctgaattcgacatcgtgctgacacagagccctgcttctctggccgtttctcctggacagagggccaccatcacatgcagagccagcaagagcgtgtccaccagcggctacagctacatgcactggtatcagcagaagcccggccagcctcctaagctgctgatctacctggcctccaacctggaaagcggagtgcctgccagattttctggcagcggctctggcaccgacttcaccctgacaatcaaccccgtggaagccaacgacaccgccaactactactgccagcacagcagagagctgcccttcacatttggcggaggcaccaaggtggaaatcaagagaacactcgaggacctgaagaacgtgttcccacctgaggtggccgtgttcgagcctagcgaggccgagatcagccacacccagaaagccaccctcgtgtgcctggctaccggcttctaccccgaccatgtggaactgtcttggtgggtcaacggcaaagaggtgcacagcggcgtgtctaccgacccccagccactgaaagaacagcccgccctgaacgacagccggtactgcctgagcagcagactgagagtgtccgccaccttctggcagaacccccggaaccacttcagatgccaggtgcagttctacggcctgagcgagaacgacgagtggacccaggacagagccaagcccgtgacccagatcgtgtctgccgaagcctggggcagagccgattgcggatcccagagcttcggcctgctggaccccaagctgtgctacctgctggatggcatcctgttcatctacggcgtgatcctgaccgccctgttcctgagagtgaagttcagcagaagcgccgacgcccctgcctaccagcagggacagaaccaactgtacaacgagctgaacctgggcagacgggaagagtacgacgtgctggacaagcggagaggcagggaccctgagatgggcggaaagccccagcggagaaagaacccccaggaaggactgtataacgaactccagaaagacaagatggccgaagcctacagcgagatcggcatgaagggcgagcggagaagaggcaagggccacgatggcctgtaccagggcctgagcaccgccaccaaggacacctatgacgccctgcacatgcaggccctgcctccaagaagggccaagcgatctggatctggagcaacaaacttctcactactcaaacaagcaggtgacgtggaggagaatcccgggcctactagtatggactggatttggcgcatccttttccttgtcggcgctgctaccggcgcgcattccttcgaagaagtgcagctggttgagtctggcggcggacttgtgaaacctggcggaagcctgagactgagctgtgccgcttccggctttacctttagcggctacgccatgagctgggtccgacaggctcctggcaaaggactggaatgggtgtccacaatcagcagcggcggcacctacatctactaccccgatagcgtgaaaggccggttcaccatcagccgggacaacgccaagaacagcctgtacctccagatgaactccctgagagccgaggacaccgccgtgtactattgtgccagactcggcggcgacaattactacgagtatttcgacgtgtggggcaagggcaccaccgtgacagtttcttctacgcgtatccagaaccctgatcctgccgtgtaccagctgcgggatagcaagagcagcgacaagagcgtgtgtctgttcaccgacttcgacagccagaccaacgtgtcccagagcaaggactccgacgtgtacatcaccgataagaccgtgctggacatgcggagcatggacttcaagagcaactccgccgtggcctggtccaacaagtccgatttcgcctgcgccaacgccttcaacaacagcattatccccgaggacacattcttcccaagccccgagagcagctgcggtacccagagttttgggttgttggaccctaaattgtgctatctgttggacggaatcctgttcatttacggagtgatcctgaccgcattgttcctgcgggttaagttttccagatccgcagacgcacccgcttaccaacaagggcagaaccaactctacaatgaacttaatttggggcggagggaagagtacgacgttctggacaaaaggaggggacgagatcccgagatgggcggaaagcctcagcgaaggaagaatccgcaagaggggctttataacgaactccagaaagataaaatggcagaagcctatagtgagattgggatgaagggagaaaggaggaggggtaaaggtcacgatgggttgtaccaaggattgagcacagccactaaagatacctatgatgcgctccacatgcaggccctgccgccaaga

SEQ ID NO: 10228 - DNA, 2364 bp, Artificial Sequence
  Synthetic Polynucloetide
atggccttaccagtgaccgccttgctcctgccgctggccttgctgctccacgccgccaggccggaagtgcagctggttgaatctggcggaggactggttcagcctggcggatctctgagactgtcttgtgccgccagcggcttcagcttcagcgacttttggatgagctgggtccgacaggcccctggcaaaggacttgaatgggtcgccacaatcagccaggccggcagcgagaaggactacgtggactctgtgaagggcagattcaccatcagccgggacaacgccaagaagtccctgtacctccagatgaacagcctgagagccgaggacaccgccgtgtactattgtgcctctggcgtgtacagcttcgactacagaggccagggcaccctggtcacagtctcttctggtaccggcggaggcggatctggcggcggaggtagcggtggcggaggatctgaattcgacatcgtgctgacacagagccctgcttctctggccgtttctcctggacagagggccaccatcacatgcagagccagcaagagcgtgtccaccagcggctacagctacatgcactggtatcagcagaagcccggccagcctcctaagctgctgatctacctggcctccaacctggaaagcggagtgcctgccagattttctggcagcggctctggcaccgacttcaccctgacaatcaaccccgtggaagccaacgacaccgccaactactactgccagcacagcagagagctgcccttcacatttggcggaggcaccaaggtggaaatcaagagaacactcgagggacagcctaaggccaatcctaccgtgacactgttccctccaagcagcgaagaactccaggccaacaaggccacacttgtgtgcctgatctccgacttctaccctggggctgtgacagtggcttggaaggccgatggatctcctgtgaaagccggcgtggaaaccaccaagccatccaagcagagcaacaacaaatacgccgccagctcctacctgagcctgacacctgagcagtggaagtcccacagatcctacagctgccaagtgacccacgaaggcagcaccgtggaaaagacagtggcccctacagagtgcagccccatcaagaccgatgtgattacaatggaccccaaggacaactgctccaaggacgccaacgataccctgctgctccagctgaccaacaccagcgcctactacatgtacttgttgctgctgctgaagtccgtggtgtacttcgccatcatcacatgctgcctgctgcggagaaccgccttctgctgcaacggcgagaagtctagggccaagcgatctggatctggagcaacaaacttctcactactcaaacaagcaggtgacgtggaggagaatcccgggcctactagtatggactggatttggcgcatccttttccttgtcggcgctgctaccggcgcgcattccttcgaagaagtgcagctggttgagtctggcggcggacttgtgaaacctggcggaagcctgagactgagctgtgccgcttccggctttacctttagcggctacgccatgagctgggtccgacaggctcctggcaaaggactggaatgggtgtccacaatcagcagcggcggcacctacatctactaccccgatagcgtgaaaggccggttcaccatcagccgggacaacgccaagaacagcctgtacctccagatgaactccctgagagccgaggacaccgccgtgtactattgtgccagactcggcggcgacaattactacgagtatttcgacgtgtggggcaagggcaccaccgtgacagtttcttctacgcgtgcctctacaaagggaccctccgtgtttcctctggctcccagcagcaagtctacaagcggaggaacagccgctctgggctgcctggtcaaggattactttcccgagcctgtgaccgtgtcctggaatagcggagcactgacaagcggcgtgcacacctttccagccgtgctgcaaagcagcggcctgtactctctgagcagcgtggtcacagtgcctagctctagcctgggcacccagacctacatctgcaatgtgaaccacaagcctagcaacaccaaggtggacaagagagtggaacccaagagctgtgaagtgaaaaccgactccaccgaccacgtgaagcccaaagagacagagaacaccaagcagcccagcaagagctgccacaagcccaaggccatcgtgcacaccgagaaagtgaacatgatgagcctgaccgtgctgggcctgcggatgctgttcgccaaaaccgtggccgtgaacttcctgctgaccgccaagctgttcttcctc

SEQ ID NO: 10229 - DNA, 2307 bp, Artificial Sequence
  Synthetic Polynucloetide
atggccttaccagtgaccgccttgctcctgccgctggccttgctgctccacgccgccaggccggaagtgcagctggttgaatctggcggaggactggttcagcctggcggatctctgagactgtcttgtgccgccagcggcttcagcttcagcgacttttggatgagctgggtccgacaggcccctggcaaaggacttgaatgggtcgccacaatcagccaggccggcagcgagaaggactacgtggactctgtgaagggcagattcaccatcagccgggacaacgccaagaagtccctgtacctccagatgaacagcctgagagccgaggacaccgccgtgtactattgtgcctctggcgtgtacagcttcgactacagaggccagggcaccctggtcacagtctcttctggtaccggcggaggcggatctggcggcggaggtagcggtggcggaggatctgaattcgacatcgtgctgacacagagccctgcttctctggccgtttctcctggacagagggccaccatcacatgcagagccagcaagagcgtgtccaccagcggctacagctacatgcactggtatcagcagaagcccggccagcctcctaagctgctgatctacctggcctccaacctggaaagcggagtgcctgccagattttctggcagcggctctggcaccgacttcaccctgacaatcaaccccgtggaagccaacgacaccgccaactactactgccagcacagcagagagctgcccttcacatttggcggaggcaccaaggtggaaatcaagagaacactcgagggacagcctaaggccaatcctaccgtgacactgttccctccaagcagcgaagaactccaggccaacaaggccacacttgtgtgcctgatctccgacttctaccctggggctgtgacagtggcttggaaggccgatggatctcctgtgaaagccggcgtggaaaccaccaagccatccaagcagagcaacaacaaatacgccgccagctcctacctgagcctgacacctgagcagtggaagtcccacagatcctacagctgccaagtgacccacgaaggcagcaccgtggaaaagacagtggcccctacagagtgcagcggcagagccgattgcggctttaccagcgagagctaccagcagggcgtgctgagcgccaccatcctgtacgagatcctgctgggcaaggccaccctgtacgccgtgctggtgtctgccctggtgctgatggctatggtcaagcggaaggacagccggggacgcgccaagagaagcggatctggcgtgaagcagaccctgaatttcgacctgctgaagctggctggcgacgtggaatccaacccaggccctactagtatggactggatttggcgcatccttttccttgtcggcgctgctaccggcgcgcattccttcgaagaagtgcagctggttgagtctggcggcggacttgtgaaacctggcggaagcctgagactgagctgtgccgcttccggctttacctttagcggctacgccatgagctgggtccgacaggctcctggcaaaggactggaatgggtgtccacaatcagcagcggcggcacctacatctactaccccgatagcgtgaaaggccggttcaccatcagccgggacaacgccaagaacagcctgtacctccagatgaactccctgagagccgaggacaccgccgtgtactattgtgccagactcggcggcgacaattactacgagtatttcgacgtgtggggcaagggcaccaccgtgacagtttcttctacgcgtgcctctacaaagggaccctccgtgtttcctctggctcccagcagcaagtctacaagcggaggaacagccgctctgggctgcctggtcaaggattactttcccgagcctgtgaccgtgtcctggaatagcggagcactgacaagcggcgtgcacacctttccagccgtgctgcaaagcagcggcctgtactctctgagcagcgtggtcacagtgcctagctctagcctgggcacccagacctacatctgcaatgtgaaccacaagcctagcaacaccaaggtggacaagagagtggaacccaagagctgtatccccgaggacacattcttcccaagccccgagagcagctgcgacgtgaagctggtggaaaagagcttcgagacagacaccaacctgaacttccagaacctgagcgtgatcggcttcagaatcctgctgctgaaagtggccggctttaacctgctgatgaccctgcggctgtggtccagc

SEQ ID NO: 10230 - DNA, 2709 bp, Artificial Sequence
  Synthetic Polynucloetide
atggccttaccagtgaccgccttgctcctgccgctggccttgctgctccacgccgccaggccggaagtgcagctggttgaatctggcggaggactggttcagcctggcggatctctgagactgtcttgtgccgccagcggcttcagcttcagcgacttttggatgagctgggtccgacaggcccctggcaaaggacttgaatgggtcgccacaatcagccaggccggcagcgagaaggactacgtggactctgtgaagggcagattcaccatcagccgggacaacgccaagaagtccctgtacctccagatgaacagcctgagagccgaggacaccgccgtgtactattgtgcctctggcgtgtacagcttcgactacagaggccagggcaccctggtcacagtctcttctggtaccggcggaggcggatctggcggcggaggtagcggtggcggaggatctgaattcgacatcgtgctgacacagagccctgcttctctggccgtttctcctggacagagggccaccatcacatgcagagccagcaagagcgtgtccaccagcggctacagctacatgcactggtatcagcagaagcccggccagcctcctaagctgctgatctacctggcctccaacctggaaagcggagtgcctgccagattttctggcagcggctctggcaccgacttcaccctgacaatcaaccccgtggaagccaacgacaccgccaactactactgccagcacagcagagagctgcccttcacatttggcggaggcaccaaggtggaaatcaagagaacactcgagatccagaaccctgatcctgccgtgtaccagctgcgggatagcaagagcagcgacaagagcgtgtgtctgttcaccgacttcgacagccagaccaacgtgtcccagagcaaggactccgacgtgtacatcaccgataagtgcgtgctggacatgcggagcatggacttcaagagcaactccgccgtggcctggtccaacaagtccgatttcgcctgcgccaacgccttcaacaacagcattatccccgaggacacattcttcccaagccccgagagcagctgcgacgtgaagctggtggaaaagagcttcgagacagacaccaacctgaacttccagaacctgagcgtgatcggcttcagaatcctgctgctgaaagtggccggctttaacctgctgatgaccctgcggctgtggtccagccgcgccaagagaagcggatctggcgtgaagcagaccctgaatttcgacctgctgaagctggctggcgacgtggaatccaacccaggccctactagtatggactggatttggcgcatccttttccttgtcggcgctgctaccggcgcgcattccgggccccagctccagctgcaagagtctggacctggcctggtcaagcctagcgagacactgagcctgacctgtaccgtgtccggcgatagcatcagcagcggcgattactactggggctggatcagacagcctcctggcaaaggactggaatggatcggccacatctactacagcggcgtgacctactacaaccccagcctgaagtccagagtgaccatcagcgtggacaccagccggaaccagttctccctgaagctgtctagcgtgacagccgccgataccgccgtgtactactgcaccagagaggacagcagcaactggcggagtagaggccagggaacactggtcacagttagctctggatccggcggaggcggaagtggaggcggaggatctggcggcggaggctctttcgaagaagtgcagctggttgagtctggcggcggacttgtgaaacctggcggaagcctgagactgagctgtgccgcttccggctttacctttagcggctacgccatgagctgggtccgacaggctcctggcaaaggactggaatgggtgtccacaatcagcagcggcggcacctacatctactaccccgatagcgtgaaaggccggttcaccatcagccgggacaacgccaagaacagcctgtacctccagatgaactccctgagagccgaggacaccgccgtgtactattgtgccagactcggcggcgacaattactacgagtatttcgacgtgtggggcaagggcaccaccgtgacagtttcttctacgcgtgaggacctgaagaacgtgttcccacctgaggtggccgtgttcgagcctagcgaggccgagatcagccacacccagaaagccaccctcgtgtgcctggctaccggcttctaccccgaccatgtggaactgtcttggtgggtcaacggcaaagaggtgcacagcggcgtgtgtaccgacccccagccactgaaagaacagcccgccctgaacgacagccggtactgcctgagcagcagactgagagtgtccgccaccttctggcagaacccccggaaccacttcagatgccaggtgcagttctacggcctgagcgagaacgacgagtggacccaggacagagccaagcccgtgacccagatcgtgtctgccgaagcctggggcagagccgattgcggctttaccagcgagagctaccagcagggcgtgctgagcgccaccatcctgtacgagatcctgctgggcaaggccaccctgtacgccgtgctggtgtctgccctggtgctgatggctatggtcaagcggaaggacagccgggga

SEQ ID NO: 10231 - DNA, 3285 bp, Artificial Sequence
  Synthetic Polynucloetide
atggccttaccagtgaccgccttgctcctgccgctggccttgctgctccacgccgccaggccggaagtgcagctggttgaatctggcggaggactggttcagcctggcggatctctgagactgtcttgtgccgccagcggcttcagcttcagcgacttttggatgagctgggtccgacaggcccctggcaaaggacttgaatgggtcgccacaatcagccaggccggcagcgagaaggactacgtggactctgtgaagggcagattcaccatcagccgggacaacgccaagaagtccctgtacctccagatgaacagcctgagagccgaggacaccgccgtgtactattgtgcctctggcgtgtacagcttcgactacagaggccagggcaccctggtcacagtctcttctggtaccggcggaggcggatctggcggcggaggtagcggtggcggaggatctgaattcgacatcgtgctgacacagagccctgcttctctggccgtttctcctggacagagggccaccatcacatgcagagccagcaagagcgtgtccaccagcggctacagctacatgcactggtatcagcagaagcccggccagcctcctaagctgctgatctacctggcctccaacctggaaagcggagtgcctgccagattttctggcagcggctctggcaccgacttcaccctgacaatcaaccccgtggaagccaacgacaccgccaactactactgccagcacagcagagagctgcccttcacatttggcggaggcaccaaggtggaaatcaagagaacactcgaggacctgaagaacgtgttcccacctgaggtggccgtgttcgagcctagcgaggccgagatcagccacacccagaaagccaccctcgtgtgcctggctaccggcttctaccccgaccatgtggaactgtcttggtgggtcaacggcaaagaggtgcacagcggcgtgtctaccgacccccagccactgaaagaacagcccgccctgaacgacagccggtactgcctgagcagcagactgagagtgtccgccaccttctggcagaacccccggaaccacttcagatgccaggtgcagttctacggcctgagcgagaacgacgagtggacccaggacagagccaagcccgtgacccagatcgtgtctgccgaagcctggggcagagccgattgcggatcccagagcttcggcctgctggaccccaagctgtgctacctgctggatggcatcctgttcatctacggcgtgatcctgaccgccctgttcctgagagtgaagttcagcagaagcgccgacgcccctgcctaccagcagggacagaaccaactgtacaacgagctgaacctgggcagacgggaagagtacgacgtgctggacaagcggagaggcagggaccctgagatgggcggaaagccccagcggagaaagaacccccaggaaggactgtataacgaactccagaaagacaagatggccgaagcctacagcgagatcggcatgaagggcgagcggagaagaggcaagggccacgatggcctgtaccagggcctgagcaccgccaccaaggacacctatgacgccctgcacatgcaggccctgcctccaagaagggccaagcgatctggatctggagcaacaaacttctcactactcaaacaagcaggtgacgtggaggagaatcccgggcctactagtatggactggatttggcgcatccttttccttgtcggcgctgctaccggcgcgcattccgggccccagctccagctgcaagagtctggacctggcctggtcaagcctagcgagacactgagcctgacctgtaccgtgtccggcgatagcatcagcagcggcgattactactggggctggatcagacagcctcctggcaaaggactggaatggatcggccacatctactacagcggcgtgacctactacaaccccagcctgaagtccagagtgaccatcagcgtggacaccagccggaaccagttctccctgaagctgtctagcgtgacagccgccgataccgccgtgtactactgcaccagagaggacagcagcaactggcggagtagaggccagggaacactggtcacagttagctctggatccggcggaggcggaagtggaggcggaggatctggcggcggaggctctttcgaagaagtgcagctggttgagtctggcggcggacttgtgaaacctggcggaagcctgagactgagctgtgccgcttccggctttacctttagcggctacgccatgagctgggtccgacaggctcctggcaaaggactggaatgggtgtccacaatcagcagcggcggcacctacatctactaccccgatagcgtgaaaggccggttcaccatcagccgggacaacgccaagaacagcctgtacctccagatgaactccctgagagccgaggacaccgccgtgtactattgtgccagactcggcggcgacaattactacgagtatttcgacgtgtggggcaagggcaccaccgtgacagtttcttctacgcgtatccagaaccctgatcctgccgtgtaccagctgcgggatagcaagagcagcgacaagagcgtgtgtctgttcaccgacttcgacagccagaccaacgtgtcccagagcaaggactccgacgtgtacatcaccgataagaccgtgctggacatgcggagcatggacttcaagagcaactccgccgtggcctggtccaacaagtccgatttcgcctgcgccaacgccttcaacaacagcattatccccgaggacacattcttcccaagccccgagagcagctgcggtacccagagttttgggttgttggaccctaaattgtgctatctgttggacggaatcctgttcatttacggagtgatcctgaccgcattgttcctgcgggttaagttttccagatccgcagacgcacccgcttaccaacaagggcagaaccaactctacaatgaacttaatttggggcggagggaagagtacgacgttctggacaaaaggaggggacgagatcccgagatgggcggaaagcctcagcgaaggaagaatccgcaagaggggctttataacgaactccagaaagataaaatggcagaagcctatagtgagattgggatgaagggagaaaggaggaggggtaaaggtcacgatgggttgtaccaaggattgagcacagccactaaagatacctatgatgcgctccacatgcaggccctgccgccaaga

SEQ ID NO: 10232 - DNA, 2775 bp, Artificial Sequence
  Synthetic Polynucloetide
atggccttaccagtgaccgccttgctcctgccgctggccttgctgctccacgccgccaggccggaagtgcagctggttgaatctggcggaggactggttcagcctggcggatctctgagactgtcttgtgccgccagcggcttcagcttcagcgacttttggatgagctgggtccgacaggcccctggcaaaggacttgaatgggtcgccacaatcagccaggccggcagcgagaaggactacgtggactctgtgaagggcagattcaccatcagccgggacaacgccaagaagtccctgtacctccagatgaacagcctgagagccgaggacaccgccgtgtactattgtgcctctggcgtgtacagcttcgactacagaggccagggcaccctggtcacagtctcttctggtaccggcggaggcggatctggcggcggaggtagcggtggcggaggatctgaattcgacatcgtgctgacacagagccctgcttctctggccgtttctcctggacagagggccaccatcacatgcagagccagcaagagcgtgtccaccagcggctacagctacatgcactggtatcagcagaagcccggccagcctcctaagctgctgatctacctggcctccaacctggaaagcggagtgcctgccagattttctggcagcggctctggcaccgacttcaccctgacaatcaaccccgtggaagccaacgacaccgccaactactactgccagcacagcagagagctgcccttcacatttggcggaggcaccaaggtggaaatcaagagaacactcgagggacagcctaaggccaatcctaccgtgacactgttccctccaagcagcgaagaactccaggccaacaaggccacacttgtgtgcctgatctccgacttctaccctggggctgtgacagtggcttggaaggccgatggatctcctgtgaaagccggcgtggaaaccaccaagccatccaagcagagcaacaacaaatacgccgccagctcctacctgagcctgacacctgagcagtggaagtcccacagatcctacagctgccaagtgacccacgaaggcagcaccgtggaaaagacagtggcccctacagagtgcagccccatcaagaccgatgtgattacaatggaccccaaggacaactgctccaaggacgccaacgataccctgctgctccagctgaccaacaccagcgcctactacatgtacttgttgctgctgctgaagtccgtggtgtacttcgccatcatcacatgctgcctgctgcggagaaccgccttctgctgcaacggcgagaagtctagggccaagcgatctggatctggagcaacaaacttctcactactcaaacaagcaggtgacgtggaggagaatcccgggcctactagtatggactggatttggcgcatccttttccttgtcggcgctgctaccggcgcgcattccgggccccagctccagctgcaagagtctggacctggcctggtcaagcctagcgagacactgagcctgacctgtaccgtgtccggcgatagcatcagcagcggcgattactactggggctggatcagacagcctcctggcaaaggactggaatggatcggccacatctactacagcggcgtgacctactacaaccccagcctgaagtccagagtgaccatcagcgtggacaccagccggaaccagttctccctgaagctgtctagcgtgacagccgccgataccgccgtgtactactgcaccagagaggacagcagcaactggcggagtagaggccagggaacactggtcacagttagctctggatccggcggaggcggaagtggaggcggaggatctggcggcggaggctctttcgaagaagtgcagctggttgagtctggcggcggacttgtgaaacctggcggaagcctgagactgagctgtgccgcttccggctttacctttagcggctacgccatgagctgggtccgacaggctcctggcaaaggactggaatgggtgtccacaatcagcagcggcggcacctacatctactaccccgatagcgtgaaaggccggttcaccatcagccgggacaacgccaagaacagcctgtacctccagatgaactccctgagagccgaggacaccgccgtgtactattgtgccagactcggcggcgacaattactacgagtatttcgacgtgtggggcaagggcaccaccgtgacagtttcttctacgcgtgcctctacaaagggaccctccgtgtttcctctggctcccagcagcaagtctacaagcggaggaacagccgctctgggctgcctggtcaaggattactttcccgagcctgtgaccgtgtcctggaatagcggagcactgacaagcggcgtgcacacctttccagccgtgctgcaaagcagcggcctgtactctctgagcagcgtggtcacagtgcctagctctagcctgggcacccagacctacatctgcaatgtgaaccacaagcctagcaacaccaaggtggacaagagagtggaacccaagagctgtgaagtgaaaaccgactccaccgaccacgtgaagcccaaagagacagagaacaccaagcagcccagcaagagctgccacaagcccaaggccatcgtgcacaccgagaaagtgaacatgatgagcctgaccgtgctgggcctgcggatgctgttcgccaaaaccgtggccgtgaacttcctgctgaccgccaagctgttcttcctc

SEQ ID NO: 10233 - DNA, 2718 bp, Artificial Sequence
  Synthetic Polynucloetide
atggccttaccagtgaccgccttgctcctgccgctggccttgctgctccacgccgccaggccggaagtgcagctggttgaatctggcggaggactggttcagcctggcggatctctgagactgtcttgtgccgccagcggcttcagcttcagcgacttttggatgagctgggtccgacaggcccctggcaaaggacttgaatgggtcgccacaatcagccaggccggcagcgagaaggactacgtggactctgtgaagggcagattcaccatcagccgggacaacgccaagaagtccctgtacctccagatgaacagcctgagagccgaggacaccgccgtgtactattgtgcctctggcgtgtacagcttcgactacagaggccagggcaccctggtcacagtctcttctggtaccggcggaggcggatctggcggcggaggtagcggtggcggaggatctgaattcgacatcgtgctgacacagagccctgcttctctggccgtttctcctggacagagggccaccatcacatgcagagccagcaagagcgtgtccaccagcggctacagctacatgcactggtatcagcagaagcccggccagcctcctaagctgctgatctacctggcctccaacctggaaagcggagtgcctgccagattttctggcagcggctctggcaccgacttcaccctgacaatcaaccccgtggaagccaacgacaccgccaactactactgccagcacagcagagagctgcccttcacatttggcggaggcaccaaggtggaaatcaagagaacactcgagggacagcctaaggccaatcctaccgtgacactgttccctccaagcagcgaagaactccaggccaacaaggccacacttgtgtgcctgatctccgacttctaccctggggctgtgacagtggcttggaaggccgatggatctcctgtgaaagccggcgtggaaaccaccaagccatccaagcagagcaacaacaaatacgccgccagctcctacctgagcctgacacctgagcagtggaagtcccacagatcctacagctgccaagtgacccacgaaggcagcaccgtggaaaagacagtggcccctacagagtgcagcggcagagccgattgcggctttaccagcgagagctaccagcagggcgtgctgagcgccaccatcctgtacgagatcctgctgggcaaggccaccctgtacgccgtgctggtgtctgccctggtgctgatggctatggtcaagcggaaggacagccggggacgcgccaagagaagcggatctggcgtgaagcagaccctgaatttcgacctgctgaagctggctggcgacgtggaatccaacccaggccctactagtatggactggatttggcgcatccttttccttgtcggcgctgctaccggcgcgcattccgggccccagctccagctgcaagagtctggacctggcctggtcaagcctagcgagacactgagcctgacctgtaccgtgtccggcgatagcatcagcagcggcgattactactggggctggatcagacagcctcctggcaaaggactggaatggatcggccacatctactacagcggcgtgacctactacaaccccagcctgaagtccagagtgaccatcagcgtggacaccagccggaaccagttctccctgaagctgtctagcgtgacagccgccgataccgccgtgtactactgcaccagagaggacagcagcaactggcggagtagaggccagggaacactggtcacagttagctctggatccggcggaggcggaagtggaggcggaggatctggcggcggaggctctttcgaagaagtgcagctggttgagtctggcggcggacttgtgaaacctggcggaagcctgagactgagctgtgccgcttccggctttacctttagcggctacgccatgagctgggtccgacaggctcctggcaaaggactggaatgggtgtccacaatcagcagcggcggcacctacatctactaccccgatagcgtgaaaggccggttcaccatcagccgggacaacgccaagaacagcctgtacctccagatgaactccctgagagccgaggacaccgccgtgtactattgtgccagactcggcggcgacaattactacgagtatttcgacgtgtggggcaagggcaccaccgtgacagtttcttctacgcgtgcctctacaaagggaccctccgtgtttcctctggctcccagcagcaagtctacaagcggaggaacagccgctctgggctgcctggtcaaggattactttcccgagcctgtgaccgtgtcctggaatagcggagcactgacaagcggcgtgcacacctttccagccgtgctgcaaagcagcggcctgtactctctgagcagcgtggtcacagtgcctagctctagcctgggcacccagacctacatctgcaatgtgaaccacaagcctagcaacaccaaggtggacaagagagtggaacccaagagctgtatccccgaggacacattcttcccaagccccgagagcagctgcgacgtgaagctggtggaaaagagcttcgagacagacaccaacctgaacttccagaacctgagcgtgatcggcttcagaatcctgctgctgaaagtggccggctttaacctgctgatgaccctgcggctgtggtccagc

SEQ ID NO: 10234 - DNA, 2289 bp, Artificial Sequence
  Synthetic Polynucloetide
atggccttaccagtgaccgccttgctcctgccgctggccttgctgctccacgccgccaggccggaagtgcaggttttggagtctggcggaggactggttcagcctggcggatctctgagactgtcttgtgccgccagcggcttcaccttcagcaactttgccatgagctgggtccgacaggcccctggcaaaggacttgaatgggtgtccacaatcagcggcagcgccggcacaacagattacgccgattctgtgaagggcagattcaccatcagccgggacaacagcaagaaaaccctgtacctccagatgaacagcctgcgcgtggaagataccgccgtgtactactgtgccgatggcagaggccccttcttcgattatcgcggccagggcacactggtcaccgtttcttctggtaccggcggaggcggatctggcggcggaggtagcggtggcggaggatctgaattcgacatcgtgctgacacagagccctgcttctctggccgtttctcctggacagagggccaccatcacatgcagagccagcaagagcgtgtccaccagcggctacagctacatgcactggtatcagcagaagcccggccagcctcctaagctgctgatctacctggcctccaacctggaaagcggagtgcctgccagattttctggcagcggctctggcaccgacttcaccctgacaatcaaccccgtggaagccaacgacaccgccaactactactgccagcacagcagagagctgcccttcacatttggcggaggcaccaaggtggaaatcaagagaacactcgaggacctgaagaacgtgttcccacctgaggtggccgtgttcgagcctagcgaggccgagatcagccacacccagaaagccaccctcgtgtgcctggctaccggcttctaccccgaccatgtggaactgtcttggtgggtcaacggcaaagaggtgcacagcggcgtgtgtaccgacccccagccactgaaagaacagcccgccctgaacgacagccggtactgcctgagcagcagactgagagtgtccgccaccttctggcagaacccccggaaccacttcagatgccaggtgcagttctacggcctgagcgagaacgacgagtggacccaggacagagccaagcccgtgacccagatcgtgtctgccgaagcctggggcagagccgattgcggctttaccagcgagagctaccagcagggcgtgctgagcgccaccatcctgtacgagatcctgctgggcaaggccaccctgtacgccgtgctggtgtctgccctggtgctgatggctatggtcaagcggaaggacagccggggaagggccaagcgatctggatctggagcaacaaacttctcactactcaaacaagcaggtgacgtggaggagaatcccgggcctactagtatggactggatttggcgcatccttttccttgtcggcgctgctaccggcgcgcattccttcgaagaagtgcagctggttgagtctggcggcggacttgtgaaacctggcggaagcctgagactgagctgtgccgcttccggctttacctttagcggctacgccatgagctgggtccgacaggctcctggcaaaggactggaatgggtgtccacaatcagcagcggcggcacctacatctactaccccgatagcgtgaaaggccggttcaccatcagccgggacaacgccaagaacagcctgtacctccagatgaactccctgagagccgaggacaccgccgtgtactattgtgccagactcggcggcgacaattactacgagtatttcgacgtgtggggcaagggcaccaccgtgacagtttcttctacgcgtatccagaaccctgatcctgccgtgtaccagctgcgggatagcaagagcagcgacaagagcgtgtgtctgttcaccgacttcgacagccagaccaacgtgtcccagagcaaggactccgacgtgtacatcaccgataagtgcgtgctggacatgcggagcatggacttcaagagcaactccgccgtggcctggtccaacaagtccgatttcgcctgcgccaacgccttcaacaacagcattatccccgaggacacattcttcccaagccccgagagcagctgcgacgtgaagctggtggaaaagagcttcgagacagacaccaacctgaacttccagaacctgagcgtgatcggcttcagaatcctgctgctgaaagtggccggctttaacctgctgatgaccctgcggctgtggtccagc

SEQ ID NO: 10235 - DNA, 2292 bp, Artificial Sequence
  Synthetic Polynucloetide
atggccttaccagtgaccgccttgctcctgccgctggccttgctgctccacgccgccaggccggacatcgtgctgacacagagccctgcttctctggccgtttctcctggacagagggccaccatcacatgcagagccagcaagagcgtgtccaccagcggctacagctacatgcactggtatcagcagaagcccggccagcctcctaagctgctgatctacctggcctccaacctggaaagcggagtgcctgccagattttctggcagcggctctggcaccgacttcaccctgacaatcaaccccgtggaagccaacgacaccgccaactactactgccagcacagcagagagctgcccttcacatttggcggaggcaccaaggtggaaatcaagagaacactcgaggacctgaagaacgtgttcccacctgaggtggccgtgttcgagcctagcgaggccgagatcagccacacccagaaagccaccctcgtgtgcctggctaccggcttctaccccgaccatgtggaactgtcttggtgggtcaacggcaaagaggtgcacagcggcgtgtgtaccgacccccagccactgaaagaacagcccgccctgaacgacagccggtactgcctgagcagcagactgagagtgtccgccaccttctggcagaacccccggaaccacttcagatgccaggtgcagttctacggcctgagcgagaacgacgagtggacccaggacagagccaagcccgtgacccagatcgtgtctgccgaagcctggggcagagccgattgcggctttaccagcgagagctaccagcagggcgtgctgagcgccaccatcctgtacgagatcctgctgggcaaggccaccctgtacgccgtgctggtgtctgccctggtgctgatggctatggtcaagcggaaggacagccggggaagggccaagcgatctggatctggagcaacaaacttctcactactcaaacaagcaggtgacgtggaggagaatcccgggcctactagtatggactggatttggcgcatccttttccttgtcggcgctgctaccggcgcccattccgggcccgaagtgcagctggttgaatctggcggaggactggttcaggctggcggatctctgagactgtcttgtgccgccagcggcagaacctttagcatgggctggtttagacaggcccctggcaaagagagagagttcgtcgccgccatcacatactctggcggcagcccttactacgccgactctgtgaagggcagattcaccatcagccgggacaacgccaagaacaccgtgtacctccagatgaacagcctgaagcctgaggacaccgccgtgtactactgcgccgccaatccaacatacggcagcgactggaacgccgagaattggggccagggaacccaagtgacagtgtctagcggatccggcggcggaggatctggcggaggcggatctgggggcggaggctctttcgaagaagtgcagctggttgagtctggcggcggacttgtgaaacctggcggaagcctgagactgagctgtgccgcttccggctttacctttagcggctacgccatgagctgggtccgacaggctcctggcaaaggactggaatgggtgtccacaatcagcagcggcggcacctacatctactaccccgatagcgtgaaaggccggttcaccatcagccgggacaacgccaagaacagcctgtacctccagatgaactccctgagagccgaggacaccgccgtgtactattgtgccagactcggcggcgacaattactacgagtatttcgacgtgtggggcaagggcaccaccgtgacagtttcttctacgcgtatccagaaccctgatcctgccgtgtaccagctgcgggatagcaagagcagcgacaagagcgtgtgtctgttcaccgacttcgacagccagaccaacgtgtcccagagcaaggactccgacgtgtacatcaccgataagtgcgtgctggacatgcggagcatggacttcaagagcaactccgccgtggcctggtccaacaagtccgatttcgcctgcgccaacgccttcaacaacagcattatccccgaggacacattcttcccaagccccgagagcagctgcgacgtgaagctggtggaaaagagcttcgagacagacaccaacctgaacttccagaacctgagcgtgatcggcttcagaatcctgctgctgaaagtggccggctttaacctgctgatgaccctgcggctgtggtccagc

SEQ ID NO: 10236 - DNA, 2673 bp, Artificial Sequence
  Synthetic Polynucloetide
atggccttaccagtgaccgccttgctcctgccgctggccttgctgctccacgccgccaggccggacatcgtgctgacacagagccctgcttctctggccgtttctcctggacagagggccaccatcacatgcagagccagcaagagcgtgtccaccagcggctacagctacatgcactggtatcagcagaagcccggccagcctcctaagctgctgatctacctggcctccaacctggaaagcggagtgcctgccagattttctggcagcggctctggcaccgacttcaccctgacaatcaaccccgtggaagccaacgacaccgccaactactactgccagcacagcagagagctgcccttcacatttggcggaggcaccaaggtggaaatcaagagaacactcgaggacctgaagaacgtgttcccacctgaggtggccgtgttcgagcctagcgaggccgagatcagccacacccagaaagccaccctcgtgtgcctggctaccggcttctaccccgaccatgtggaactgtcttggtgggtcaacggcaaagaggtgcacagcggcgtgtgtaccgacccccagccactgaaagaacagcccgccctgaacgacagccggtactgcctgagcagcagactgagagtgtccgccaccttctggcagaacccccggaaccacttcagatgccaggtgcagttctacggcctgagcgagaacgacgagtggacccaggacagagccaagcccgtgacccagatcgtgtctgccgaagcctggggcagagccgattgcggctttaccagcgagagctaccagcagggcgtgctgagcgccaccatcctgtacgagatcctgctgggcaaggccaccctgtacgccgtgctggtgtctgccctggtgctgatggctatggtcaagcggaaggacagccggggaagggccaagcgatctggatctggagcaacaaacttctcactactcaaacaagcaggtgacgtggaggagaatcccgggcctactagtatggactggatttggcgcatccttttccttgtcggcgctgctaccggcgcccattcccaactgcaactgcaagagtctggccctggcctggtcaagccttctgaaaccctgagcctgacctgtaccgtgtccggcggctctatcagcagcggcgattactactggggctggatcagacagcctccaggcaagggactcgaatggatcggcagcatcagctacagcggctccacctactacaacccaagcctgaagtccagagtgaccatcagcgtggacaccagcagaaaccagttctccctgaagctgagcagcgtgacagccgccgatacagccgtgtattattgcaccagagaggacagcagcaactggcggagtagaggacagggcacactggtcacagtgtcctcttctggaggcggtggaagcggtggaggaggatctgaagtgcagctggttgaatctggcggaggactggttcaggctggcggatctctgagactgtcttgtgccgccagcggcagaacctttagcatgggctggtttagacaggcccctggcaaagagagagagttcgtcgccgccatcacatactctggcggcagcccttactacgccgactctgtgaagggcagattcaccatcagccgggacaacgccaagaacaccgtgtacctccagatgaacagcctgaagcctgaggacaccgccgtgtactactgcgccgccaatccaacatacggcagcgactggaacgccgagaattggggccagggaacccaagtgacagtgtctagcggatccggcggcggaggatctggcggaggcggatctgggggcggaggctctttcgaagaagtgcagctggttgagtctggcggcggacttgtgaaacctggcggaagcctgagactgagctgtgccgcttccggctttacctttagcggctacgccatgagctgggtccgacaggctcctggcaaaggactggaatgggtgtccacaatcagcagcggcggcacctacatctactaccccgatagcgtgaaaggccggttcaccatcagccgggacaacgccaagaacagcctgtacctccagatgaactccctgagagccgaggacaccgccgtgtactattgtgccagactcggcggcgacaattactacgagtatttcgacgtgtggggcaagggcaccaccgtgacagtttcttctacgcgtatccagaaccctgatcctgccgtgtaccagctgcgggatagcaagagcagcgacaagagcgtgtgtctgttcaccgacttcgacagccagaccaacgtgtcccagagcaaggactccgacgtgtacatcaccgataagtgcgtgctggacatgcggagcatggacttcaagagcaactccgccgtggcctggtccaacaagtccgatttcgcctgcgccaacgccttcaacaacagcattatccccgaggacacattcttcccaagccccgagagcagctgcgacgtgaagctggtggaaaagagcttcgagacagacaccaacctgaacttccagaacctgagcgtgatcggcttcagaatcctgctgctgaaagtggccggctttaacctgctgatgaccctgcggctgtggtccagc

SEQ ID NO: 10237 - DNA, 2700 bp, Artificial Sequence
  Synthetic Polynucloetide
atggccttaccagtgaccgccttgctcctgccgctggccttgctgctccacgccgccaggccggaagtgcaggttttggagtctggcggaggactggttcagcctggcggatctctgagactgtcttgtgccgccagcggcttcaccttcagcaactttgccatgagctgggtccgacaggcccctggcaaaggacttgaatgggtgtccacaatcagcggcagcgccggcacaacagattacgccgattctgtgaagggcagattcaccatcagccgggacaacagcaagaaaaccctgtacctccagatgaacagcctgcgcgtggaagataccgccgtgtactactgtgccgatggcagaggccccttcttcgattatcgcggccagggcacactggtcaccgtttcttctggtaccggcggaggcggatctggcggcggaggtagcggtggcggaggatctgaattcgacatcgtgctgacacagagccctgcttctctggccgtttctcctggacagagggccaccatcacatgcagagccagcaagagcgtgtccaccagcggctacagctacatgcactggtatcagcagaagcccggccagcctcctaagctgctgatctacctggcctccaacctggaaagcggagtgcctgccagattttctggcagcggctctggcaccgacttcaccctgacaatcaaccccgtggaagccaacgacaccgccaactactactgccagcacagcagagagctgcccttcacatttggcggaggcaccaaggtggaaatcaagagaacactcgaggacctgaagaacgtgttcccacctgaggtggccgtgttcgagcctagcgaggccgagatcagccacacccagaaagccaccctcgtgtgcctggctaccggcttctaccccgaccatgtggaactgtcttggtgggtcaacggcaaagaggtgcacagcggcgtgtgtaccgacccccagccactgaaagaacagcccgccctgaacgacagccggtactgcctgagcagcagactgagagtgtccgccaccttctggcagaacccccggaaccacttcagatgccaggtgcagttctacggcctgagcgagaacgacgagtggacccaggacagagccaagcccgtgacccagatcgtgtctgccgaagcctggggcagagccgattgcggctttaccagcgagagctaccagcagggcgtgctgagcgccaccatcctgtacgagatcctgctgggcaaggccaccctgtacgccgtgctggtgtctgccctggtgctgatggctatggtcaagcggaaggacagccggggaagggccaagcgatctggatctggagcaacaaacttctcactactcaaacaagcaggtgacgtggaggagaatcccgggcctactagtatggactggatttggcgcatccttttccttgtcggcgctgctaccggcgcccattccgggcccgaagtgcagctggttgaatctggcggaggactggttcaggctggcggatctctgagactgtcttgtgccgccagcggcagaacctttagcatgggctggtttagacaggcccctggcaaagagagagagttcgtcgccgccatcacatacagcggcggcagcccttactacgcctcttctgtcagaggccggttcaccatcagccgggacaacgccaagaacaccgtgtacctccagatgaacagcctgaagccagaggacaccgccgtgtactactgtgccgccaatccaacctacggcagcgactggaatgccgagaattggggccagggcacccaagtgacagtgtctagtggatccggcggcggaggatctggcggaggcggatctgggggcggaggctctttcgaagaagtgcagctggttgagtctggcggcggacttgtgaaacctggcggaagcctgagactgagctgtgccgcttccggctttacctttagcggctacgccatgagctgggtccgacaggctcctggcaaaggactggaatgggtgtccacaatcagcagcggcggcacctacatctactaccccgatagcgtgaaaggccggttcaccatcagccgggacaacgccaagaacagcctgtacctccagatgaactccctgagagccgaggacaccgccgtgtactattgtgccagactcggcggcgacaattactacgagtatttcgacgtgtggggcaagggcaccaccgtgacagtttcttctacgcgtatccagaaccctgatcctgccgtgtaccagctgcgggatagcaagagcagcgacaagagcgtgtgtctgttcaccgacttcgacagccagaccaacgtgtcccagagcaaggactccgacgtgtacatcaccgataagtgcgtgctggacatgcggagcatggacttcaagagcaactccgccgtggcctggtccaacaagtccgatttcgcctgcgccaacgccttcaacaacagcattatccccgaggacacattcttcccaagccccgagagcagctgcgacgtgaagctggtggaaaagagcttcgagacagacaccaacctgaacttccagaacctgagcgtgatcggcttcagaatcctgctgctgaaagtggccggctttaacctgctgatgaccctgcggctgtggtccagc

SEQ ID NO: 10238 - DNA, 2169 bp, Artificial Sequence
  Synthetic Polynucloetide
atggccttaccagtgaccgccttgctcctgccgctggccttgctgctccacgccgccaggccggacatccagatgacacagagccctagcagcctgtccgtgtccgtgggagacagagtgaccatcacatgcaaggccagccagaacgtgcggacagtggtggcttggtatcagcagaagcctggactggcccctaagacactgatctacctggcctccaacagacacaccggcgtgccaagcagattttctggcagcggctctggcaccgacttcaccttcacaatatccagcctccagcctgaggacattgccacctacttttgccagcagcactggtcttaccctctgacctttggacagggcaccaaggtggaagtgaagagaggcggaggcggaagtggaggcggaggatctggcggcggaggctctgaagttcagctgcttgaatctggcggcggactggttcaacctggcggatctctgagactgagctgtgccgcctctggcttcgccttcagcacctacgatatgagctgggtccgacaggcccctggcaaaggacttgaatgggtcgccacaatcagcagcggcggcagctacacctactacctggatagcgtgaagggcagattcaccatcagccgggacagcagcaagaacaccctgtacctccagatgaactccctccaggccgaggactccgccatctactattgtgcccctaccaccgtggtgcctttcgcctattggggacagggaaccctggtcaccgttagctctacgcgtgagcagaaactgatctcggaagaggatctggcgaagcccaccacgacgccagcgccgcgaccaccaacaccggcgcccaccatcgcgtcgcagcccctgtccctgcgcccagaggcgtgccggccagcggcggggggcgcagtgcacacgagggggctggacttcgcctgtgacatctacatctgggcgcccttggccgggacttgtggggtccttctcctgtcactggttatcaccctttactgcaaacggggcagaaagaaactcctgtatatattcaaacaaccatttatgagaccagtacaaactactcaagaggaagatggctgtagctgccgatttccagaagaagaagaaggaggatgtgaactgagagtgaagttcagcaggagcgcagacgcccccgcgtaccagcagggccagaaccagctctataacgagctgaatctaggacgaagagaggagtacgatgttttggacaagagacgtggccgggaccctgagatggggggaaagccgagaaggaagaaccctcaggaaggcctgtacaatgaactgcagaaagataagatggcggaggcctacagtgagattgggatgaaaggcgagcgccggaggggcaaggggcacgatggcctttaccagggtctcagtacagccaccaaggacacctacgacgcccttcacatgcaggccctgccccctcgctctagtggctccggcgagggcagaggaagtctactaacctgcggagatgtggaagaaaatcctggcccacatatgaccgagtacaagcccacggtgcgcctcgccacccgcgacgacgtccccagggccgtacgcaccctcgccgccgcgttcgccgactaccccgccacgcgccacaccgtcgatccggaccgccacatcgagcgggtcaccgagctgcaagaactcttcctcacgcgcgtcgggctcgacatcggcaaggtgtgggtcgcggacgacggcgccgcggtggcggtctggaccacgccggagagcgtcgaagcgggggcggtgttcgccgagatcggcccgcgcatggccgagttgagcggttcccggctggccgcgcagcaacagatggaaggcctcctggcgccgcaccggcccaaggagcccgcgtggttcctggccaccgtcggcgtctcgcccgaccaccagggcaagggtctgggcagcgccgtcgtgctccccggagtggaggcggccgagcgcgccggggtgcccgccttcctggagacctccgcgccccgcaacctccccttctacgagcggctcggcttcaccgtcaccgccgacgtcgaggtgcccgaaggaccgcgcacctggtgcatgacccgcaagcccggtgcctga

SEQ ID NO: 10239 - DNA, 2151 bp, Artificial Sequence
  Synthetic Polynucloetide
atggccttaccagtgaccgccttgctcctgccgctggccttgctgctccacgccgccaggccggacatccagatgacacagagccctagcagcctgtccgtgtccgtgggagacagagtgaccatcacatgcaaggccagccagaacgtgcggacagtggtggcttggtatcagcagaagcctggactggcccctaagacactgatctacctggcctccaacagacacaccggcgtgccaagcagattttctggcagcggctctggcaccgacttcaccttcacaatatccagcctccagcctgaggacattgccacctacttttgccagcagcactggtcttaccctctgacctttggacagggcaccaaggtggaagtgaagagaggcggaggcggaagtggaggcggaggatctggcggcggaggctctgaagttcagctgcttgaatctggcggcggactggttcaacctggcggatctctgagactgagctgtgccgcctctggcttcgccttcagcacctacgatatgagctgggtccgacaggcccctggcaaaggacttgaatgggtcgccacaatcagcagcggcggcagctacacctactacctggatagcgtgaagggcagattcaccatcagccgggacagcagcaagaacaccctgtacctccagatgaactccctccaggccgaggactccgccatctactattgtgcccctaccaccgtggtgcctttcgcctattggggacagggaaccctggtcaccgttagctctacgcgtgagcagaaactgatctcggaagaggatctgaaaattgaagttatgtatcctcctccttacctagacaatgagaagagcaatggaaccattatccatgtgaaagggaaacacctttgtccaagtcccctatttcccggaccttctaagcccttttgggtgctggtggtggttgggggagtcctggcttgctatagcttgctagtaacagtggcctttattattttctgggtgaggagtaagaggagcaggctcctgcacagtgactacatgaacatgactccacgccgccccggacccacccgcaagcattaccagccctatgccccaccacgcgacttcgcagcctatcgctccagagtgaagttcagcaggagcgcagacgcccccgcgtaccagcagggccagaaccagctctataacgagctcaatctaggacgaagagaggagtacgatgttttggacaagagacgtggccgggaccctgagatggggggaaagccgagaaggaagaaccctcaggaaggcctgtacaatgaactgcagaaagataagatggcggaggcctacagtgagattgggatgaaaggcgagcgccggaggggcaaggggcacgatggcctttaccagggtctcagtacagccaccaaggacacctacgacgcccttcacatgcaggccctgccccctcgctctagtggctccggcgagggcagaggaagtctactaacctgcggagatgtggaagaaaatcctggcccacatatgaccgagtacaagcccacggtgcgcctcgccacccgcgacgacgtccccagggccgtacgcaccctcgccgccgcgttcgccgactaccccgccacgcgccacaccgtcgatccggaccgccacatcgagcgggtcaccgagctgcaagaactcttcctcacgcgcgtcgggctcgacatcggcaaggtgtgggtcgcggacgacggcgccgcggtggcggtctggaccacgccggagagcgtcgaagcgggggcggtgttcgccgagatcggcccgcgcatggccgagttgagcggttcccggctggccgcgcagcaacagatggaaggcctcctggcgccgcaccggcccaaggagcccgcgtggttcctggccaccgtcggcgtctcgcccgaccaccagggcaagggtctgggcagcgccgtcgtgctccccggagtggaggcggccgagcgcgccggggtgcccgccttcctggagacctccgcgccccgcaacctccccttctacgagcggctcggcttcaccgtcaccgccgacgtcgaggtgcccgaaggaccgcgcacctggtgcatgacccgcaagcccggtgcctga

SEQ ID NO: 10240 - DNA, 1479 bp, Artificial Sequence
  Synthetic Polynucloetide
atggccttaccagtgaccgccttgctcctgccgctggccttgctgctccacgccgccaggccggacatccagatgacacagagccctagcagcctgtccgtgtccgtgggagacagagtgaccatcacatgcaaggccagccagaacgtgcggacagtggtggcttggtatcagcagaagcctggactggcccctaagacactgatctacctggcctccaacagacacaccggcgtgccaagcagattttctggcagcggctctggcaccgacttcaccttcacaatatccagcctccagcctgaggacattgccacctacttttgccagcagcactggtcttaccctctgacctttggacagggcaccaaggtggaagtgaagagaggcggaggcggaagtggaggcggaggatctggcggcggaggctctgaagttcagctgcttgaatctggcggcggactggttcaacctggcggatctctgagactgagctgtgccgcctctggcttcgccttcagcacctacgatatgagctgggtccgacaggcccctggcaaaggacttgaatgggtcgccacaatcagcagcggcggcagctacacctactacctggatagcgtgaagggcagattcaccatcagccgggacagcagcaagaacaccctgtacctccagatgaactccctccaggccgaggactccgccatctactattgtgcccctaccaccgtggtgcctttcgcctattggggacagggaaccctggtcaccgttagctctacgcgtgagcagaaactgatctcggaagaggatctgaaaattgaagttatgtatcctcctccttacctagacaatgagaagagcaatggaaccattatccatgtgaaagggaaacacctttgtccaagtcccctatttcccggaccttctaagcccttttgggtgctggtggtggttgggggagtcctggcttgctatagcttgctagtaacagtggcctttattattttctgggtgaggagtaagaggagcaggctcctgcacagtgactacatgaacatgactccacgccgccccggacccacccgcaagcattaccagccctatgccccaccacgcgacttcgcagcctatcgctccagagtgaagttcagcaggagcgcagacgcccccgcgtaccagcagggccagaaccagctctataacgagctcaatctaggacgaagagaggagtacgatgttttggacaagagacgtggccgggaccctgagatggggggaaagccgagaaggaagaaccctcaggaaggcctgtacaatgaactgcagaaagataagatggcggaggcctacagtgagattgggatgaaaggcgagcgccggaggggcaaggggcacgatggcctttaccagggtctcagtacagccaccaaggacacctacgacgcccttcacatgcaggccctgccccctcgc

SEQ ID NO: 10241 - DNA, 1500 bp, Artificial Sequence
  Synthetic Polynucloetide
atggccttaccagtgaccgccttgctcctgccgctggccttgctgctccacgccgccaggccggacatccagatgacacagagccctagcagcctgtccgtgtccgtgggagacagagtgaccatcacatgcaaggccagccagaacgtgcggacagtggtggcttggtatcagcagaagcctggactggcccctaagacactgatctacctggcctccaacagacacaccggcgtgccaagcagattttctggcagcggctctggcaccgacttcaccttcacaatatccagcctccagcctgaggacattgccacctacttttgccagcagcactggtcttaccctctgacctttggacagggcaccaaggtggaagtgaagagaggcggaggcggaagtggaggcggaggatctggcggcggaggctctgaagttcagctgcttgaatctggcggcggactggttcaacctggcggatctctgagactgagctgtgccgcctctggcttcgccttcagcacctacgatatgagctgggtccgacaggcccctggcaaaggacttgaatgggtcgccacaatcagcagcggcggcagctacacctactacctggatagcgtgaagggcagattcaccatcagccgggacagcagcaagaacaccctgtacctccagatgaactccctccaggccgaggactccgccatctactattgtgcccctaccaccgtggtgcctttcgcctattggggacagggaaccctggtcaccgttagctctacgcgtgagcagaaactgatctcggaagaggatctggcgaagcccaccacgacgccagcgccgcgaccaccaacaccggcgcccaccatcgcgtcgcagcccctgtccctgcgcccagaggcgtgccggccagcggcggggggcgcagtgcacacgagggggctggacttcgcctgtgacatctacatctgggcgcccttggccgggacttgtggggtccttctcctgtcactggttatcaccctttactgcaaacggggcagaaagaaactcctgtatatattcaaacaaccatttatgagaccagtacaaactactcaagaggaagatggctgtagctgccgatttccagaagaagaagaaggaggatgtgaactgagagtgaagttcagcaggagcgcagacgcccccgcgtaccagcagggccagaaccagctctataacgagctgaatctaggacgaagagaggagtacgatgttttggacaagagacgtggccgggaccctgagatggggggaaagccgagaaggaagaaccctcaggaaggcctgtacaatgaactgcagaaagataagatggcggaggcctacagtgagattgggatgaaaggcgagcgccggaggggcaaggggcacgatggcctttaccagggtctcagtacagccaccaaggacacctacgacgcccttcacatgcaggccctgccccctcgctga

SEQ ID NO: 10242 - DNA, 1500 bp, Artificial Sequence
  Synthetic Polynucloetide
atggccttaccagtgaccgccttgctcctgccgctggccttgctgctccacgccgccaggccggaagttcagctgcttgaatctggcggcggactggttcaacctggcggatctctgagactgagctgtgccgcctctggcttcgccttcagcacctacgatatgagctgggtccgacaggcccctggcaaaggacttgaatgggtcgccacaatcagcagcggcggcagctacacctactacctggatagcgtgaagggcagattcaccatcagccgggacagcagcaagaacaccctgtacctccagatgaactccctccaggccgaggactccgccatctactattgtgcccctaccaccgtggtgcctttcgcctattggggacagggaaccctggtcaccgttagctctggcggaggcggaagtggaggcggaggatctggcggcggaggctctgacatccagatgacacagagccctagcagcctgtccgtgtccgtgggagacagagtgaccatcacatgcaaggccagccagaacgtgcggacagtggtggcttggtatcagcagaagcctggactggcccctaagacactgatctacctggcctccaacagacacaccggcgtgccaagcagattttctggcagcggctctggcaccgacttcaccttcacaatatccagcctccagcctgaggacattgccacctacttttgccagcagcactggtcttaccctctgacctttggacagggcaccaaggtggaagtgaagagaacgcgtgagcagaaactgatctcggaagaggatctggcgaagcccaccacgacgccagcgccgcgaccaccaacaccggcgcccaccatcgcgtcgcagcccctgtccctgcgcccagaggcgtgccggccagcggcggggggcgcagtgcacacgagggggctggacttcgcctgtgacatctacatctgggcgcccttggccgggacttgtggggtccttctcctgtcactggttatcaccctttactgcaaacggggcagaaagaaactcctgtatatattcaaacaaccatttatgagaccagtacaaactactcaagaggaagatggctgtagctgccgatttccagaagaagaagaaggaggatgtgaactgagagtgaagttcagcaggagcgcagacgcccccgcgtaccagcagggccagaaccagctctataacgagctgaatctaggacgaagagaggagtacgatgttttggacaagagacgtggccgggaccctgagatggggggaaagccgagaaggaagaaccctcaggaaggcctgtacaatgaactgcagaaagataagatggcggaggcctacagtgagattgggatgaaaggcgagcgccggaggggcaaggggcacgatggcctttaccagggtctcagtacagccaccaaggacacctacgacgcccttcacatgcaggccctgccccctcgctga

SEQ ID NO: 10243 - DNA, 2739 bp, Artificial Sequence
  Synthetic Polynucloetide
atggccttaccagtgaccgccttgctcctgccgctggccttgctgctccacgccgccaggccggacatccagatgacacagagccctagcagcctgtccgtgtccgtgggagacagagtgaccatcacatgcaaggccagccagaacgtgcggacagtggtggcttggtatcagcagaagcctggactggcccctaagacactgatctacctggcctccaacagacacaccggcgtgccaagcagattttctggcagcggctctggcaccgacttcaccttcacaatatccagcctccagcctgaggacattgccacctacttttgccagcagcactggtcttaccctctgacctttggacagggcaccaaggtggaagtgaagagaggcggaggcggaagtggaggcggaggatctggcggcggaggctctgaagttcagctgcttgaatctggcggcggactggttcaacctggcggatctctgagactgagctgtgccgcctctggcttcgccttcagcacctacgatatgagctgggtccgacaggcccctggcaaaggacttgaatgggtcgccacaatcagcagcggcggcagctacacctactacctggatagcgtgaagggcagattcaccatcagccgggacagcagcaagaacaccctgtacctccagatgaactccctccaggccgaggactccgccatctactattgtgcccctaccaccgtggtgcctttcgcctattggggacagggaaccctggtcaccgttagctctacgcgtgagcagaaactgatctcggaagaggatctggcgaagcccaccacgacgccagcgccgcgaccaccaacaccggcgcccaccatcgcgtcgcagcccctgtccctgcgcccagaggcgtgccggccagcggcggggggcgcagtgcacacgagggggctggacttcgcctgtgacatctacatctgggcgcccttggccgggacttgtggggtccttctcctgtcactggttatcaccctttactgcgggcgcgccagagtgaagttcagcaggagcgcagacgcccccgcgtaccagcagggccagaaccagctctataacgagctgaatctaggacgaagagaggagtacgatgttttggacaagagacgtggccgggaccctgagatggggggaaagccgagaaggaagaaccctcaggaaggcctgtacaatgaactgcagaaagataagatggcggaggcctacagtgagattgggatgaaaggcgagcgccggaggggcaaggggcacgatggcctttaccagggtctcagtacagccaccaaggacacctacgacgcccttcacatgcaggccctgccccctcgctctagaggatctggagcaacaaacttctcactactcaaacaagcaggtgacgtggaggagaatcccgggcctgggatccacatggccacttacgaggttctctgtgaggtggcgcggaaactgggcacggatgacagggaagtggtattgttcctcctaaacgtgttcatacctcaacccacactggcccaattaattggagctcttagagctttaaaggaggagggcaggttaacgtttcccctgttagcggaatgtctgtttcgtgcaggtcgcagagacctcttgcgcgacctgcttcacttagacccgcgttttttagagcgccacctagcgggcacaatgagttatttcagcccttatcagctcactgttctccacgtagacggggagctgtgtgcgagggatattaggtctttgatatttttaagcaaggacactatagggtctcgcagcacaccacagacattcttacactgggtgtactgtatggaaaacttagacctactgggtcccactgacgtggatgccctaatgtcaatgcttagatctttgtcaagagtagacctacagcgccaagtgcaaaccctaatgggccttcacctttccggcccatcacactcccaacactatcgccatacaccactcgagaccgatttctacgactacaaggacgacgatgacaagactagtggctccggcgagggcagaggaagtctactaacctgcggagatgtggaagaaaatcctggcccacatatgaccgagtacaagcccacggtgcgcctcgccacccgcgacgacgtccccagggccgtacgcaccctcgccgccgcgttcgccgactaccccgccacgcgccacaccgtcgatccggaccgccacatcgagcgggtcaccgagctgcaagaactcttcctcacgcgcgtcgggctcgacatcggcaaggtgtgggtcgcggacgacggcgccgcggtggcggtctggaccacgccggagagcgtcgaagcgggggcggtgttcgccgagatcggcccgcgcatggccgagttgagcggttcccggctggccgcgcagcaacagatggaaggcctcctggcgccgcaccggcccaaggagcccgcgtggttcctggccaccgtcggcgtctcgcccgaccaccagggcaagggtctgggcagcgccgtcgtgctccccggagtggaggcggccgagcgcgccggggtgcccgccttcctggagacctccgcgccccgcaacctccccttctacgagcggctcggcttcaccgtcaccgccgacgtcgaggtgcccgaaggaccgcgcacctggtgcatgacccgcaagcccggtgcctga

SEQ ID NO: 10244 - DNA, 2559 bp, Artificial Sequence
  Synthetic Polynucloetide
atggccttaccagtgaccgccttgctcctgccgctggccttgctgctccacgccgccaggccggacatccagatgacacagagccctagcagcctgtccgtgtccgtgggagacagagtgaccatcacatgcaaggccagccagaacgtgcggacagtggtggcttggtatcagcagaagcctggactggcccctaagacactgatctacctggcctccaacagacacaccggcgtgccaagcagattttctggcagcggctctggcaccgacttcaccttcacaatatccagcctccagcctgaggacattgccacctacttttgccagcagcactggtcttaccctctgacctttggacagggcaccaaggtggaagtgaagagactcgagatccagaaccctgatcctgccgtgtaccagctgcgggatagcaagagcagcgacaagagcgtgtgtctgttcaccgacttcgacagccagaccaacgtgtcccagagcaaggactccgacgtgtacatcaccgataagtgcgtgctggacatgcggagcatggacttcaagagcaactccgccgtggcctggtccaacaagtccgatttcgcctgcgccaacgccttcaacaacagcattatccccgaggacacattcttcccaagcagcgacgtgccctgcgacgtgaagctggtggaaaagagcttcgagacagacaccaacctgaacttccagaacctgagcgtgatcggcttcagaatcctgctgctgaaagtggccggctttaacctgctgatgaccctgcggctgtggtccagccgcgccaagagaagcggatctggcgtgaagcagaccctgaatttcgacctgctgaagctggctggcgacgtggaatccaacccaggccctactagtatggactggatttggcgcatccttttccttgtcggcgctgctaccggcgcgcattccttcgaagaagttcagctgcttgaatctggcggcggactggttcaacctggcggatctctgagactgagctgtgccgcctctggcttcgccttcagcacctacgatatgagctgggtccgacaggcccctggcaaaggacttgaatgggtcgccacaatcagcagcggcggcagctacacctactacctggatagcgtgaagggcagattcaccatcagccgggacagcagcaagaacaccctgtacctccagatgaactccctccaggccgaggactccgccatctactattgtgcccctaccaccgtggtgcctttcgcctattggggacagggaaccctggtcaccgttagctctacgcgtgaggacctgaagaacgtgttcccacctgaggtggccgtgttcgagcctagcaaggccgagatcgcccacacccagaaagccaccctcgtgtgcctggctaccggcttctaccccgaccatgtggaactgtcttggtgggtcaacggcaaagaggtgcacagcggcgtgtgtaccgacccccagccactgaaagaacagcccgccctgaacgacagccggtactgcctgagcagcagactgagagtgtccgccaccttctggcagaacccccggaaccacttcagatgccaggtgcagttctacggcctgagcgagaacgacgagtggacccaggacagagccaagcccgtgacccagatcgtgtctgccgaagcctggggcagagccgattgcggcatcaccagcgccagctaccaccagggcgtgctgagcgccaccatcctgtacgagatcctgctgggcaaggccaccctgtacgccgtgctggtgtctgccctggtgctgatggctatggtcaagcggaaggacagccggggaagggccaagcgatctggatctggagcaacaaacttctcactactcaaacaagcaggtgacgtggaggagaatcccgggccttctagaggccatatgaccgagtacaagcccacggtgcgcctcgccacccgcgacgacgtccccagggccgtacgcaccctcgccgccgcgttcgccgactaccccgccacgcgccacaccgtcgatccggaccgccacatcgagcgggtcaccgagctgcaagaactcttcctcacgcgcgtcgggctcgacatcggcaaggtgtgggtcgcggacgacggcgccgcggtggcggtctggaccacgccggagagcgtcgaagcgggggcggtgttcgccgagatcggcccgcgcatggccgagttgagcggttcccggctggccgcgcagcaacagatggaaggcctcctggcgccgcaccggcccaaggagcccgcgtggttcctggccaccgtcggcgtctcgcccgaccaccagggcaagggtctgggcagcgccgtcgtgctccccggagtggaggcggccgagcgcgccggggtgcccgccttcctggagacctccgcgccccgcaacctccccttctacgagcggctcggcttcaccgtcaccgccgacgtcgaggtgcccgaaggaccgcgcacctggtgcatgacccgcaagcccggtgcctga

SEQ ID NO: 10245 - DNA, 2556 bp, Artificial Sequence
  Synthetic Polynucloetide
atggccttaccagtgaccgccttgctcctgccgctggccttgctgctccacgccgccaggccggacatccagatgacacagagccctagcagcctgtccgtgtccgtgggagacagagtgaccatcacatgcaaggccagccagaacgtgcggacagtggtggcttggtatcagcagaagcctggactggcccctaagacactgatctacctggcctccaacagacacaccggcgtgccaagcagattttctggcagcggctctggcaccgacttcaccttcacaatatccagcctccagcctgaggacattgccacctacttttgccagcagcactggtcttaccctctgacctttggacagggcaccaaggtggaagtgaagagactcgaggacctgaagaacgtgttcccacctgaggtggccgtgttcgagcctagcaaggccgagatcgcccacacccagaaagccaccctcgtgtgcctggctaccggcttctaccccgaccatgtggaactgtcttggtgggtcaacggcaaagaggtgcacagcggcgtgtgtaccgacccccagccactgaaagaacagcccgccctgaacgacagccggtactgcctgagcagcagactgagagtgtccgccaccttctggcagaacccccggaaccacttcagatgccaggtgcagttctacggcctgagcgagaacgacgagtggacccaggacagagccaagcccgtgacccagatcgtgtctgccgaagcctggggcagagccgattgcggcatcaccagcgccagctaccaccagggcgtgctgagcgccaccatcctgtacgagatcctgctgggcaaggccaccctgtacgccgtgctggtgtctgccctggtgctgatggctatggtcaagcggaaggacagccggggaagggccaagcgatctggatctggagcaacaaacttctcactactcaaacaagcaggtgacgtggaggagaatcccgggcctactagtatggactggatttggcgcatccttttccttgtcggcgctgctaccggcgcgcattccttcgaagaagttcagctgcttgaatctggcggcggactggttcaacctggcggatctctgagactgagctgtgccgcctctggcttcgccttcagcacctacgatatgagctgggtccgacaggcccctggcaaaggacttgaatgggtcgccacaatcagcagcggcggcagctacacctactacctggatagcgtgaagggcagattcaccatcagccgggacagcagcaagaacaccctgtacctccagatgaactccctccaggccgaggactccgccatctactattgtgcccctaccaccgtggtgcctttcgcctattggggacagggaaccctggtcaccgttagctctacgcgtatccagaaccctgatcctgccgtgtaccagctgcgggatagcaagagcagcgacaagagcgtgtgtctgttcaccgacttcgacagccagaccaacgtgtcccagagcaaggactccgacgtgtacatcaccgataagtgcgtgctggacatgcggagcatggacttcaagagcaactccgccgtggcctggtccaacaagtccgatttcgcctgcgccaacgccttcaacaacagcattatccccgaggacacattcttcccaagcagcgacgtgccctgcgacgtgaagctggtggaaaagagcttcgagacagacaccaacctgaacttccagaacctgagcgtgatcggcttcagaatcctgctgctgaaagtggccggctttaacctgctgatgaccctgcggctgtggtccagccgcgccaagagaagcggatctggcgtgaagcagaccctgaatttcgacctgctgaagctggctggcgacgtggaatccaacccaggcccttctagaggccatatgaccgagtacaagcccacggtgcgcctcgccacccgcgacgacgtccccagggccgtacgcaccctcgccgccgcgttcgccgactaccccgccacgcgccacaccgtcgatccggaccgccacatcgagcgggtcaccgagctgcaagaactcttcctcacgcgcgtcgggctcgacatcggcaaggtgtgggtcgcggacgacggcgccgcggtggcggtctggaccacgccggagagcgtcgaagcgggggcggtgttcgccgagatcggcccgcgcatggccgagttgagcggttcccggctggccgcgcagcaacagatggaaggcctcctggcgccgcaccggcccaaggagcccgcgtggttcctggccaccgtcggcgtctcgcccgaccaccagggcaagggtctgggcagcgccgtcgtgctccccggagtggaggcggccgagcgcgccggggtgcccgccttcctggagacctccgcgccccgcaacctccccttctacgagcggctcggcttcaccgtcaccgccgacgtcgaggtgcccgaaggaccgcgcacctggtgcatgacccgcaagcccggtgcctga

SEQ ID NO: 10246 - DNA, 1854 bp, Artificial Sequence
  Synthetic Polynucloetide
atggccttaccagtgaccgccttgctcctgccgctggccttgctgctccacgccgccaggccggacatccagatgacacagagccctagcagcctgtccgtgtccgtgggagacagagtgaccatcacatgcaaggccagccagaacgtgcggacagtggtggcttggtatcagcagaagcctggactggcccctaagacactgatctacctggcctccaacagacacaccggcgtgccaagcagattttctggcagcggctctggcaccgacttcaccttcacaatatccagcctccagcctgaggacattgccacctacttttgccagcagcactggtcttaccctctgacctttggacagggcaccaaggtggaagtgaagagactcgaggacctgaagaacgtgttcccacctgaggtggccgtgttcgagcctagcgaggccgagatcagccacacccagaaagccaccctcgtgtgcctggctaccggcttctaccccgaccatgtggaactgtcttggtgggtcaacggcaaagaggtgcacagcggcgtgtgtaccgacccccagccactgaaagaacagcccgccctgaacgacagccggtactgcctgagcagcagactgagagtgtccgccaccttctggcagaacccccggaaccacttcagatgccaggtgcagttctacggcctgagcgagaacgacgagtggacccaggacagagccaagcccgtgacccagatcgtgtctgccgaagcctggggcagagccgattgcggctttaccagcgagagctaccagcagggcgtgctgagcgccaccatcctgtacgagatcctgctgggcaaggccaccctgtacgccgtgctggtgtctgccctggtgctgatggctatggtcaagcggaaggacagccggggaagggccaagcgatctggatctggagcaacaaacttctcactactcaaacaagcaggtgacgtggaggagaatcccgggcctactagtatggactggatttggcgcatccttttccttgtcggcgctgctaccggcgcgcattccttcgaagaagttcagctgcttgaatctggcggcggactggttcaacctggcggatctctgagactgagctgtgccgcctctggcttcgccttcagcacctacgatatgagctgggtccgacaggcccctggcaaaggacttgaatgggtcgccacaatcagcagcggcggcagctacacctactacctggatagcgtgaagggcagattcaccatcagccgggacagcagcaagaacaccctgtacctccagatgaactccctccaggccgaggactccgccatctactattgtgcccctaccaccgtggtgcctttcgcctattggggacagggaaccctggtcaccgttagctctacgcgtatccagaaccctgatcctgccgtgtaccagctgcgggatagcaagagcagcgacaagagcgtgtgtctgttcaccgacttcgacagccagaccaacgtgtcccagagcaaggactccgacgtgtacatcaccgataagtgcgtgctggacatgcggagcatggacttcaagagcaactccgccgtggcctggtccaacaagtccgatttcgcctgcgccaacgccttcaacaacagcattatccccgaggacacattcttcccaagccccgagagcagctgcgacgtgaagctggtggaaaagagcttcgagacagacaccaacctgaacttccagaacctgagcgtgatcggcttcagaatcctgctgctgaaagtggccggctttaacctgctgatgaccctgcggctgtggtccagc

SEQ ID NO: 10247 - DNA, 2529 bp, Artificial Sequence
  Synthetic Polynucloetide
atggccttaccagtgaccgccttgctcctgccgctggccttgctgctccacgccgccaggccggacatccagatgacacagagccctagcagcctgtccgtgtccgtgggagacagagtgaccatcacatgcaaggccagccagaacgtgcggacagtggtggcttggtatcagcagaagcctggactggcccctaagacactgatctacctggcctccaacagacacaccggcgtgccaagcagattttctggcagcggctctggcaccgacttcaccttcacaatatccagcctccagcctgaggacattgccacctacttttgccagcagcactggtcttaccctctgacctttggacagggcaccaaggtggaagtgaagagactcgaggacctgaagaacgtgttcccacctgaggtggccgtgttcgagcctagcgaggccgagatcagccacacccagaaagccaccctcgtgtgcctggctaccggcttctaccccgaccatgtggaactgtcttggtgggtcaacggcaaagaggtgcacagcggcgtgtgtaccgacccccagccactgaaagaacagcccgccctgaacgacagccggtactgcctgagcagcagactgagagtgtccgccaccttctggcagaacccccggaaccacttcagatgccaggtgcagttctacggcctgagcgagaacgacgagtggacccaggacagagccaagcccgtgacccagatcgtgtctgccgaagcctggggcagagccgattgcggctttaccagcgagagctaccagcagggcgtgctgagcgccaccatcctgtacgagatcctgctgggcaaggccaccctgtacgccgtgctggtgtctgccctggtgctgatggctatggtcaagcggaaggacagccggggaagggccaagcgatctggatctggagcaacaaacttctcactactcaaacaagcaggtgacgtggaggagaatcccgggcctactagtatggactggatttggcgcatccttttccttgtcggcgctgctaccggcgcgcattccttcgaagaagttcagctgcttgaatctggcggcggactggttcaacctggcggatctctgagactgagctgtgccgcctctggcttcgccttcagcacctacgatatgagctgggtccgacaggcccctggcaaaggacttgaatgggtcgccacaatcagcagcggcggcagctacacctactacctggatagcgtgaagggcagattcaccatcagccgggacagcagcaagaacaccctgtacctccagatgaactccctccaggccgaggactccgccatctactattgtgcccctaccaccgtggtgcctttcgcctattggggacagggaaccctggtcaccgttagctctacgcgtatccagaaccctgatcctgccgtgtaccagctgcgggatagcaagagcagcgacaagagcgtgtgtctgttcaccgacttcgacagccagaccaacgtgtcccagagcaaggactccgacgtgtacatcaccgataagtgcgtgctggacatgcggagcatggacttcaagagcaactccgccgtggcctggtccaacaagtccgatttcgcctgcgccaacgccttcaacaacagcattatccccgaggacacattcttcccaagccccgagagcagctgcgacgtgaagctggtggaaaagagcttcgagacagacaccaacctgaacttccagaacctgagcgtgatcggcttcagaatcctgctgctgaaagtggccggctttaacctgctgatgaccctgcggctgtggtccagccgcgccaagagaagcggatctggcgtgaagcagaccctgaatttcgacctgctgaagctggctggcgacgtggaatccaacccaggcccttctagaggcgggatccacaccatggctacctacgaggtgctgtgcgaggtggcaagaaagctgggcaccgacgacagagaagtggtgctgttcctgctgaacgtgttcatccctcagcctacactggcccagctgatcggtgcactgagagccctgaaagaggaaggccggctgacctttcctctgctggccgaatgcctgttcagagccggaagaagggatctgctgcgggacctgctgcatctggaccccagatttctggaaagacacctggccggcaccatgagctacttcagcccttaccagctgaccgtgctgcacgttgacggcgaactgtgcgccagagatattcggagcctgatcttcctgagcaaggacaccatcggcagccggtctacccctcagacatttctgcactgggtgtactgcatggaaaacctggacctgctcggccccacagatgtggatgccctgatgtccatgctgagaagcctgagcagagtggacctccagagacaggtgcagacactgatgggactgcacctgagcggacctagccacagccagcactacagacacacccct

SEQ ID NO: 10248 - DNA, 1866 bp, Artificial Sequence
  Synthetic Polynucloetide
atggccttaccagtgaccgccttgctcctgccgctggccttgctgctccacgccgccaggccggacatccagatgacacagagccctagcagcctgtccgtgtccgtgggagacagagtgaccatcacatgcaaggccagccagaacgtgcggacagtggtggcttggtatcagcagaagcctggactggcccctaagacactgatctacctggcctccaacagacacaccggcgtgccaagcagattttctggcagcggctctggcaccgacttcaccttcacaatatccagcctccagcctgaggacattgccacctacttttgccagcagcactggtcttaccctctgacctttggacagggcaccaaggtggaagtgaagagactcgagatccagaaccctgatcctgccgtgtaccagctgcgggatagcaagagcagcgacaagagcgtgtgtctgttcaccgacttcgacagccagaccaacgtgtcccagagcaaggactccgacgtgtacatcaccgataagtgcgtgctggacatgcggagcatggacttcaagagcaactccgccgtggcctggtccaacaagtccgatttcgcctgcgccaacgccttcaacaacagcattatccccgaggacacattcttcccaagccccgagagcagctgcgacgtgaagctggtggaaaagagcttcgagacagacaccaacctgaacttccagaacctgagcgtgatcggcttcagaatcctgctgctgaaagtggccggctttaacctgctgatgaccctgcggctgtggtccagccgcgccaagagaagcggatctggcgtgaagcagaccctgaatttcgacctgctgaagctggctggcgacgtggaatccaacccaggccctactagtatggactggatttggcgcatccttttccttgtcggcgctgctaccggcgcgcattccttcgaagaagttcagctgcttgaatctggcggcggactggttcaacctggcggatctctgagactgagctgtgccgcctctggcttcgccttcagcacctacgatatgagctgggtccgacaggcccctggcaaaggacttgaatgggtcgccacaatcagcagcggcggcagctacacctactacctggatagcgtgaagggcagattcaccatcagccgggacagcagcaagaacaccctgtacctccagatgaactccctccaggccgaggactccgccatctactattgtgcccctaccaccgtggtgcctttcgcctattggggacagggaaccctggtcaccgttagctctacgcgtgaggacctgaagaacgtgttcccacctgaggtggccgtgttcgagcctagcgaggccgagatcagccacacccagaaagccaccctcgtgtgcctggctaccggcttctaccccgaccatgtggaactgtcttggtgggtcaacggcaaagaggtgcacagcggcgtgtgtaccgacccccagccactgaaagaacagcccgccctgaacgacagccggtactgcctgagcagcagactgagagtgtccgccaccttctggcagaacccccggaaccacttcagatgccaggtgcagttctacggcctgagcgagaacgacgagtggacccaggacagagccaagcccgtgacccagatcgtgtctgccgaagcctggggcagagccgattgcggctttaccagcgagagctaccagcagggcgtgctgagcgccaccatcctgtacgagatcctgctgggcaaggccaccctgtacgccgtgctggtgtctgccctggtgctgatggctatggtcaagcggaaggacagccgggga

SEQ ID NO: 10249 - DNA, 2532 bp, Artificial Sequence
  Synthetic Polynucloetide
atggccttaccagtgaccgccttgctcctgccgctggccttgctgctccacgccgccaggccggacatccagatgacacagagccctagcagcctgtccgtgtccgtgggagacagagtgaccatcacatgcaaggccagccagaacgtgcggacagtggtggcttggtatcagcagaagcctggactggcccctaagacactgatctacctggcctccaacagacacaccggcgtgccaagcagattttctggcagcggctctggcaccgacttcaccttcacaatatccagcctccagcctgaggacattgccacctacttttgccagcagcactggtcttaccctctgacctttggacagggcaccaaggtggaagtgaagagactcgagatccagaaccctgatcctgccgtgtaccagctgcgggatagcaagagcagcgacaagagcgtgtgtctgttcaccgacttcgacagccagaccaacgtgtcccagagcaaggactccgacgtgtacatcaccgataagtgcgtgctggacatgcggagcatggacttcaagagcaactccgccgtggcctggtccaacaagtccgatttcgcctgcgccaacgccttcaacaacagcattatccccgaggacacattcttcccaagccccgagagcagctgcgacgtgaagctggtggaaaagagcttcgagacagacaccaacctgaacttccagaacctgagcgtgatcggcttcagaatcctgctgctgaaagtggccggctttaacctgctgatgaccctgcggctgtggtccagccgcgccaagagaagcggatctggcgtgaagcagaccctgaatttcgacctgctgaagctggctggcgacgtggaatccaacccaggccctactagtatggactggatttggcgcatccttttccttgtcggcgctgctaccggcgcgcattccttcgaagaagttcagctgcttgaatctggcggcggactggttcaacctggcggatctctgagactgagctgtgccgcctctggcttcgccttcagcacctacgatatgagctgggtccgacaggcccctggcaaaggacttgaatgggtcgccacaatcagcagcggcggcagctacacctactacctggatagcgtgaagggcagattcaccatcagccgggacagcagcaagaacaccctgtacctccagatgaactccctccaggccgaggactccgccatctactattgtgcccctaccaccgtggtgcctttcgcctattggggacagggaaccctggtcaccgttagctctacgcgtgaggacctgaagaacgtgttcccacctgaggtggccgtgttcgagcctagcgaggccgagatcagccacacccagaaagccaccctcgtgtgcctggctaccggcttctaccccgaccatgtggaactgtcttggtgggtcaacggcaaagaggtgcacagcggcgtgtgtaccgacccccagccactgaaagaacagcccgccctgaacgacagccggtactgcctgagcagcagactgagagtgtccgccaccttctggcagaacccccggaaccacttcagatgccaggtgcagttctacggcctgagcgagaacgacgagtggacccaggacagagccaagcccgtgacccagatcgtgtctgccgaagcctggggcagagccgattgcggctttaccagcgagagctaccagcagggcgtgctgagcgccaccatcctgtacgagatcctgctgggcaaggccaccctgtacgccgtgctggtgtctgccctggtgctgatggctatggtcaagcggaaggacagccggggaagggccaagcgatctggatctggagcaacaaacttctcactactcaaacaagcaggtgacgtggaggagaatcccgggccttctagaggcgggatccacaccatggctacctacgaggtgctgtgcgaggtggcaagaaagctgggcaccgacgacagagaagtggtgctgttcctgctgaacgtgttcatccctcagcctacactggcccagctgatcggtgcactgagagccctgaaagaggaaggccggctgacctttcctctgctggccgaatgcctgttcagagccggaagaagggatctgctgcgggacctgctgcatctggaccccagatttctggaaagacacctggccggcaccatgagctacttcagcccttaccagctgaccgtgctgcacgttgacggcgaactgtgcgccagagatattcggagcctgatcttcctgagcaaggacaccatcggcagccggtctacccctcagacatttctgcactgggtgtactgcatggaaaacctggacctgctcggccccacagatgtggatgccctgatgtccatgctgagaagcctgagcagagtggacctccagagacaggtgcagacactgatgggactgcacctgagcggacctagccacagccagcactacagacacacccct

SEQ ID NO: 10250 - DNA, 2691 bp, Artificial Sequence
  Synthetic Polynucloetide
atggccttaccagtgaccgccttgctcctgccgctggccttgctgctccacgccgccaggccgctcgaggggaaaccaattcccaaccctcttctgggactggattcaaccggcagcggcgaggacctgaagaacgtgttcccacctgaggtggccgtgttcgagcctagcaaggccgagatcgcccacacccagaaagccaccctcgtgtgcctggctaccggcttctaccccgaccatgtggaactgtcttggtgggtcaacggcaaagaggtgcacagcggcgtgtgtaccgacccccagccactgaaagaacagcccgccctgaacgacagccggtactgcctgagcagcagactgagagtgtccgccaccttctggcagaacccccggaaccacttcagatgccaggtgcagttctacggcctgagcgagaacgacgagtggacccaggacagagccaagcccgtgacccagatcgtgtctgccgaagcctggggcagagccgattgcggcatcaccagcgccagctaccaccagggcgtgctgagcgccaccatcctgtacgagatcctgctgggcaaggccaccctgtacgccgtgctggtgtctgccctggtgctgatggctatggtcaagcggaaggacagccggggaagggccaagcgatctggatctggagcaacaaacttctcactactcaaacaagcaggtgacgtggaggagaatcccgggcctactagcatggccttaccagtgaccgccttgctcctgccgctggccttgctgctccacgccgccaggccggacatccagatgacacagagccctagcagcctgtccgtgtccgtgggagacagagtgaccatcacatgcaaggccagccagaacgtgcggacagtggtggcttggtatcagcagaagcctggactggcccctaagacactgatctacctggcctccaacagacacaccggcgtgccaagcagattttctggcagcggctctggcaccgacttcaccttcacaatatccagcctccagcctgaggacattgccacctacttttgccagcagcactggtcttaccctctgacctttggacagggcaccaaggtggaagtgaagagaggcggaggcggaagtggaggcggaggatctggcggcggaggctctgaagttcagctgcttgaatctggcggcggactggttcaacctggcggatctctgagactgagctgtgccgcctctggcttcgccttcagcacctacgatatgagctgggtccgacaggcccctggcaaaggacttgaatgggtcgccacaatcagcagcggcggcagctacacctactacctggatagcgtgaagggcagattcaccatcagccgggacagcagcaagaacaccctgtacctccagatgaactccctccaggccgaggactccgccatctactattgtgcccctaccaccgtggtgcctttcgcctattggggacagggaaccctggtcaccgttagctctacgcgtgagcagaaactgatctcggaagaggatgggagcggcatccagaaccctgatcctgccgtgtaccagctgcgggatagcaagagcagcgacaagagcgtgtgtctgttcaccgacttcgacagccagaccaacgtgtcccagagcaaggactccgacgtgtacatcaccgataagtgcgtgctggacatgcggagcatggacttcaagagcaactccgccgtggcctggtccaacaagtccgatttcgcctgcgccaacgccttcaacaacagcattatccccgaggacacattcttcccaagcagcgacgtgccctgcgacgtgaagctggtggaaaagagcttcgagacagacaccaacctgaacttccagaacctgagcgtgatcggcttcagaatcctgctgctgaaagtggccggctttaacctgctgatgaccctgcggctgtggtccagccgcgccaagagaagcggatctggcgtgaagcagaccctgaatttcgacctgctgaagctggctggcgacgtggaatccaacccaggcccttctagaggccatatgaccgagtacaagcccacggtgcgcctcgccacccgcgacgacgtccccagggccgtacgcaccctcgccgccgcgttcgccgactaccccgccacgcgccacaccgtcgatccggaccgccacatcgagcgggtcaccgagctgcaagaactcttcctcacgcgcgtcgggctcgacatcggcaaggtgtgggtcgcggacgacggcgccgcggtggcggtctggaccacgccggagagcgtcgaagcgggggcggtgttcgccgagatcggcccgcgcatggccgagttgagcggttcccggctggccgcgcagcaacagatggaaggcctcctggcgccgcaccggcccaaggagcccgcgtggttcctggccaccgtcggcgtctcgcccgaccaccagggcaagggtctgggcagcgccgtcgtgctccccggagtggaggcggccgagcgcgccggggtgcccgccttcctggagacctccgcgccccgcaacctccccttctacgagcggctcggcttcaccgtcaccgccgacgtcgaggtgcccgaaggaccgcgcacctggtgcatgacccgcaagcccggtgcctga

SEQ ID NO: 10251 - DNA, 2694 bp, Artificial Sequence
  Synthetic Polynucloetide
atggccttaccagtgaccgccttgctcctgccgctggccttgctgctccacgccgccaggccgctcgagcagaaactgatctcggaagaggatctgggctccggcgatcgccctgatcctgccgtgtaccagctgcgggatagcaagagcagcgacaagagcgtgtgtctgttcaccgacttcgacagccagaccaacgtgtcccagagcaaggactccgacgtgtacatcaccgataagtgcgtgctggacatgcggagcatggacttcaagagcaactccgccgtggcctggtccaacaagtccgatttcgcctgcgccaacgccttcaacaacagcattatccccgaggacacattcttcccaagccccgagagcagctgcgacgtgaagctggtggaaaagagcttcgagacagacaccaacctgaacttccagaacctgagcgtgatcggcttcagaatcctgctgctgaaagtggccggctttaacctgctgatgaccctgcggctgtggtccagctctagtcgcgccaagagaagcggatctggcgtgaagcagaccctgaatttcgacctgctgaagctggctggcgacgtggaatccaacccaggccccactagcatggccttaccagtgaccgccttgctcctgccgctggccttgctgctccacgccgccaggccggacatccagatgacacagagccctagcagcctgtccgtgtccgtgggagacagagtgaccatcacatgcaaggccagccagaacgtgcggacagtggtggcttggtatcagcagaagcctggactggcccctaagacactgatctacctggcctccaacagacacaccggcgtgccaagcagattttctggcagcggctctggcaccgacttcaccttcacaatatccagcctccagcctgaggacattgccacctacttttgccagcagcactggtcttaccctctgacctttggacagggcaccaaggtggaagtgaagagaggcggaggcggaagtggaggcggaggatctggcggcggaggctctgaagttcagctgcttgaatctggcggcggactggttcaacctggcggatctctgagactgagctgtgccgcctctggcttcgccttcagcacctacgatatgagctgggtccgacaggcccctggcaaaggacttgaatgggtcgccacaatcagcagcggcggcagctacacctactacctggatagcgtgaagggcagattcaccatcagccgggacagcagcaagaacaccctgtacctccagatgaactccctccaggccgaggactccgccatctactattgtgcccctaccaccgtggtgcctttcgcctattggggacagggaaccctggtcaccgttagctctacgcgtgggaaaccaattcccaaccctcttctgggactggattcaaccggcagcggcgaggacctgaagaacgtgttcccacctgaggtggccgtgttcgagcctagcgaggccgagatcagccacacccagaaagccaccctcgtgtgcctggctaccggcttctaccccgaccatgtggaactgtcttggtgggtcaacggcaaagaggtgcacagcggcgtgtgtaccgacccccagccactgaaagaacagcccgccctgaacgacagccggtactgcctgagcagcagactgagagtgtccgccaccttctggcagaacccccggaaccacttcagatgccaggtgcagttctacggcctgagcgagaacgacgagtggacccaggacagagccaagcccgtgacccagatcgtgtctgccgaagcctggggcagagccgattgcggctttaccagcgagagctaccagcagggcgtgctgagcgccaccatcctgtacgagatcctgctgggcaaggccaccctgtacgccgtgctggtgtctgccctggtgctgatggctatggtcaagcggaaggacagccggggaagggccaagcgatctggatctggagcaacaaacttctcactactcaaacaagcaggtgacgtggaggagaatcccgggccttctagaggccatatgaccgagtacaagcccacggtgcgcctcgccacccgcgacgacgtccccagggccgtacgcaccctcgccgccgcgttcgccgactaccccgccacgcgccacaccgtcgatccggaccgccacatcgagcgggtcaccgagctgcaagaactcttcctcacgcgcgtcgggctcgacatcggcaaggtgtgggtcgcggacgacggcgccgcggtggcggtctggaccacgccggagagcgtcgaagcgggggcggtgttcgccgagatcggcccgcgcatggccgagttgagcggttcccggctggccgcgcagcaacagatggaaggcctcctggcgccgcaccggcccaaggagcccgcgtggttcctggccaccgtcggcgtctcgcccgaccaccagggcaagggtctgggcagcgccgtcgtgctccccggagtggaggcggccgagcgcgccggggtgcccgccttcctggagacctccgcgccccgcaacctccccttctacgagcggctcggcttcaccgtcaccgccgacgtcgaggtgcccgaaggaccgcgcacctggtgcatgacccgcaagcccggtgcctga

SEQ ID NO: 10252 - DNA, 2556 bp, Artificial Sequence
  Synthetic Polynucloetide
atggccttaccagtgaccgccttgctcctgccgctggccttgctgctccacgccgccaggccggacatccagatgacacagagccctagcagcctgtccgtgtccgtgggagacagagtgaccatcacatgcaaggccagccagaacgtgcggacagtggtggcttggtatcagcagaagcctggactggcccctaagacactgatctacctggcctccaacagacacaccggcgtgccaagcagattttctggcagcggctctggcaccgacttcaccttcacaatatccagcctccagcctgaggacattgccacctacttttgccagcagcactggtcttaccctctgacctttggacagggcaccaaggtggaagtgaagagactcgaggacctgaagaacgtgttcccacctgaggtggccgtgttcgagcctagcgaggccgagatcagccacacccagaaagccaccctcgtgtgcctggctaccggcttctaccccgaccatgtggaactgtcttggtgggtcaacggcaaagaggtgcacagcggcgtgtctaccgacccccagccactgaaagaacagcccgccctgaacgacagccggtactgcctgagcagcagactgagagtgtccgccaccttctggcagaacccccggaaccacttcagatgccaggtgcagttctacggcctgagcgagaacgacgagtggacccaggacagagccaagcccgtgacccagatcgtgtctgccgaagcctggggcagagccgattgcggctttaccagcgagagctaccagcagggcgtgctgagcgccaccatcctgtacgagatcctgctgggcaaggccaccctgtacgccgtgctggtgtctgccctggtgctgatggctatggtcaagcggaaggacagccggggaagggccaagcgatctggatctggagcaacaaacttctcactactcaaacaagcaggtgacgtggaggagaatcccgggcctactagtatggactggatttggcgcatccttttccttgtcggcgctgctaccggcgcgcattccttcgaagaagttcagctgcttgaatctggcggcggactggttcaacctggcggatctctgagactgagctgtgccgcctctggcttcgccttcagcacctacgatatgagctgggtccgacaggcccctggcaaaggacttgaatgggtcgccacaatcagcagcggcggcagctacacctactacctggatagcgtgaagggcagattcaccatcagccgggacagcagcaagaacaccctgtacctccagatgaactccctccaggccgaggactccgccatctactattgtgcccctaccaccgtggtgcctttcgcctattggggacagggaaccctggtcaccgttagctctacgcgtatccagaaccctgatcctgccgtgtaccagctgcgggatagcaagagcagcgacaagagcgtgtgtctgttcaccgacttcgacagccagaccaacgtgtcccagagcaaggactccgacgtgtacatcaccgataagaccgtgctggacatgcggagcatggacttcaagagcaactccgccgtggcctggtccaacaagtccgatttcgcctgcgccaacgccttcaacaacagcattatccccgaggacacattcttcccaagccccgagagcagctgcgacgtgaagctggtggaaaagagcttcgagacagacaccaacctgaacttccagaacctgagcgtgatcggcttcagaatcctgctgctgaaagtggccggctttaacctgctgatgaccctgcggctgtggtccagccgcgccaagagaagcggatctggcgtgaagcagaccctgaatttcgacctgctgaagctggctggcgacgtggaatccaacccaggcccttctagaggccatatgaccgagtacaagcccacggtgcgcctcgccacccgcgacgacgtccccagggccgtacgcaccctcgccgccgcgttcgccgactaccccgccacgcgccacaccgtcgatccggaccgccacatcgagcgggtcaccgagctgcaagaactcttcctcacgcgcgtcgggctcgacatcggcaaggtgtgggtcgcggacgacggcgccgcggtggcggtctggaccacgccggagagcgtcgaagcgggggcggtgttcgccgagatcggcccgcgcatggccgagttgagcggttcccggctggccgcgcagcaacagatggaaggcctcctggcgccgcaccggcccaaggagcccgcgtggttcctggccaccgtcggcgtctcgcccgaccaccagggcaagggtctgggcagcgccgtcgtgctccccggagtggaggcggccgagcgcgccggggtgcccgccttcctggagacctccgcgccccgcaacctccccttctacgagcggctcggcttcaccgtcaccgccgacgtcgaggtgcccgaaggaccgcgcacctggtgcatgacccgcaagcccggtgcctga

SEQ ID NO: 10253 - DNA, 2802 bp, Artificial Sequence
  Synthetic Polynucloetide
atggccttaccagtgaccgccttgctcctgccgctggccttgctgctccacgccgccaggccggacatccagatgacacagagccctagcagcctgtccgtgtccgtgggagacagagtgaccatcacatgcaaggccagccagaacgtgcggacagtggtggcttggtatcagcagaagcctggactggcccctaagacactgatctacctggcctccaacagacacaccggcgtgccaagcagattttctggcagcggctctggcaccgacttcaccttcacaatatccagcctccagcctgaggacattgccacctacttttgccagcagcactggtcttaccctctgacctttggacagggcaccaaggtggaagtgaagagactcgaggacctgaagaacgtgttcccacctgaggtggccgtgttcgagcctagcgaggccgagatcagccacacccagaaagccaccctcgtgtgcctggctaccggcttctaccccgaccatgtggaactgtcttggtgggtcaacggcaaagaggtgcacagcggcgtgtctaccgacccccagccactgaaagaacagcccgccctgaacgacagccggtactgcctgagcagcagactgagagtgtccgccaccttctggcagaacccccggaaccacttcagatgccaggtgcagttctacggcctgagcgagaacgacgagtggacccaggacagagccaagcccgtgacccagatcgtgtctgccgaagcctggggcagagccgattgcggctttaccagcgagagctaccagcagggcgtgctgagcgccaccatcctgtacgagatcctgctgggcaaggccaccctgtacgccgtgctggtgtctgccctggtgctgatggctatggtcaagcggaaggacagccggggaagggccaagcgatctggatctggagcaacaaacttctcactactcaaacaagcaggtgacgtggaggagaatcccgggcctactagtatggactggatttggcgcatccttttccttgtcggcgctgctaccggcgcgcattccttcgaagaagttcagctgcttgaatctggcggcggactggttcaacctggcggatctctgagactgagctgtgccgcctctggcttcgccttcagcacctacgatatgagctgggtccgacaggcccctggcaaaggacttgaatgggtcgccacaatcagcagcggcggcagctacacctactacctggatagcgtgaagggcagattcaccatcagccgggacagcagcaagaacaccctgtacctccagatgaactccctccaggccgaggactccgccatctactattgtgcccctaccaccgtggtgcctttcgcctattggggacagggaaccctggtcaccgttagctctacgcgtgagcagaaactgatctcggaagaggatgggagcggcaccccattcccttctctggcccctcccatcatgctgctggtggacggcaagcagcagatggtggtcgtgtgcctggtgctggatgtggccccacctggactggacagccccatctggtttagcgccggcaatggctctgccctggacgcctttacctacggcccaagccctgccaccgatggcacctggacaaatctggcccacctgagcctgcccagcgaggaactggcttcttgggagcctctcgtgtgccacacaggacctggcgctgagggacacagcagatccacccagcctatgcacctgtctggcgaggccagcaccgccagaacctgtcctcaggaacctctgagaggcacccctggcggagcactgtggctgggagtgctgagactgctgctgttcaagctgctgctgtttgacctgctgctgacctgctcctgtctgtgcgatcctgccggccctctgccttctcctgccaccaccacaagactgagagccctgggcagccacagactgcaccctgccacagagacaggcggcagagaggccacaagcagccctagaccccagcccagagacagaagatggggcgataccccccctggcagaaagcctggatctccagtccgcgccaagagaagcggatctggcgtgaagcagaccctgaatttcgacctgctgaagctggctggcgacgtggaatccaacccaggcccttctagaggccatatgaccgagtacaagcccacggtgcgcctcgccacccgcgacgacgtccccagggccgtacgcaccctcgccgccgcgttcgccgactaccccgccacgcgccacaccgtcgatccggaccgccacatcgagcgggtcaccgagctgcaagaactcttcctcacgcgcgtcgggctcgacatcggcaaggtgtgggtcgcggacgacggcgccgcggtggcggtctggaccacgccggagagcgtcgaagcgggggcggtgttcgccgagatcggcccgcgcatggccgagttgagcggttcccggctggccgcgcagcaacagatggaaggcctcctggcgccgcaccggcccaaggagcccgcgtggttcctggccaccgtcggcgtctcgcccgaccaccagggcaagggtctgggcagcgccgtcgtgctccccggagtggaggcggccgagcgcgccggggtgcccgccttcctggagacctccgcgccccgcaacctccccttctacgagcggctcggcttcaccgtcaccgccgacgtcgaggtgcccgaaggaccgcgcacctggtgcatgacccgcaagcccggtgcctga

SEQ ID NO: 10254 - DNA, 2856 bp, Artificial Sequence
  Synthetic Polynucloetide
atggccttaccagtgaccgccttgctcctgccgctggccttgctgctccacgccgccaggccgctcgaggacctgaagaacgtgttcccacctgaggtggccgtgttcgagcctagcgaggccgagatcagccacacccagaaagccaccctcgtgtgcctggctaccggcttctaccccgaccatgtggaactgtcttggtgggtcaacggcaaagaggtgcacagcggcgtgtctaccgacccccagccactgaaagaacagcccgccctgaacgacagccggtactgcctgagcagcagactgagagtgtccgccaccttctggcagaacccccggaaccacttcagatgccaggtgcagttctacggcctgagcgagaacgacgagtggacccaggacagagccaagcccgtgacccagatcgtgtctgccgaagcctggggcagagccgattgcggctttaccagcgagagctaccagcagggcgtgctgagcgccaccatcctgtacgagatcctgctgggcaaggccaccctgtacgccgtgctggtgtctgccctggtgctgatggctatggtcaagcggaaggacagccggggaagggccaagcgatctggatctggagcaacaaacttctcactactcaaacaagcaggtgacgtggaggagaatcccgggcctactagcatggccttaccagtgaccgccttgctcctgccgctggccttgctgctccacgccgccaggccggacatccagatgacacagagccctagcagcctgtccgtgtccgtgggagacagagtgaccatcacatgcaaggccagccagaacgtgcggacagtggtggcttggtatcagcagaagcctggactggcccctaagacactgatctacctggcctccaacagacacaccggcgtgccaagcagattttctggcagcggctctggcaccgacttcaccttcacaatatccagcctccagcctgaggacattgccacctacttttgccagcagcactggtcttaccctctgacctttggacagggcaccaaggtggaagtgaagagaggcggaggcggaagtggaggcggaggatctggcggcggaggctctgaagttcagctgcttgaatctggcggcggactggttcaacctggcggatctctgagactgagctgtgccgcctctggcttcgccttcagcacctacgatatgagctgggtccgacaggcccctggcaaaggacttgaatgggtcgccacaatcagcagcggcggcagctacacctactacctggatagcgtgaagggcagattcaccatcagccgggacagcagcaagaacaccctgtacctccagatgaactccctccaggccgaggactccgccatctactattgtgcccctaccaccgtggtgcctttcgcctattggggacagggaaccctggtcaccgttagctctacgcgtgagcagaaactgatctcggaagaggatctggggagcggcaccccattcccttctctggcccctcccatcatgctgctggtggacggcaagcagcagatggtggtcgtgtgcctggtgctggatgtggccccacctggactggacagccccatctggtttagcgccggcaatggctctgccctggacgcctttacctacggcccaagccctgccaccgatggcacctggacaaatctggcccacctgagcctgcccagcgaggaactggcttcttgggagcctctcgtgtgccacacaggacctggcgctgagggacacagcagatccacccagcctatgcacctgtctggcgaggccagcaccgccagaacctgtcctcaggaacctctgagaggcacccctggcggagcactgtggctgggagtgctgagactgctgctgttcaagctgctgctgtttgacctgctgctgacctgctcctgtctgtgcgatcctgccggccctctgccttctcctgccaccaccacaagactgagagccctgggcagccacagactgcaccctgccacagagacaggcggcagagaggccacaagcagccctagaccccagcccagagacagaagatggggcgataccccccctggcagaaagcctggatctccagtccgcgccaagagaagcggatctggcgtgaagcagaccctgaatttcgacctgctgaagctggctggcgacgtggaatccaacccaggcccttctagatctagaggccatatgaccgagtacaagcccacggtgcgcctcgccacccgcgacgacgtccccagggccgtacgcaccctcgccgccgcgttcgccgactaccccgccacgcgccacaccgtcgatccggaccgccacatcgagcgggtcaccgagctgcaagaactcttcctcacgcgcgtcgggctcgacatcggcaaggtgtgggtcgcggacgacggcgccgcggtggcggtctggaccacgccggagagcgtcgaagcgggggcggtgttcgccgagatcggcccgcgcatggccgagttgagcggttcccggctggccgcgcagcaacagatggaaggcctcctggcgccgcaccggcccaaggagcccgcgtggttcctggccaccgtcggcgtctcgcccgaccaccagggcaagggtctgggcagcgccgtcgtgctccccggagtggaggcggccgagcgcgccggggtgcccgccttcctggagacctccgcgccccgcaacctccccttctacgagcggctcggcttcaccgtcaccgccgacgtcgaggtgcccgaaggaccgcgcacctggtgcatgacccgcaagcccggtgcctga

SEQ ID NO: 10255 - DNA, 2667 bp, Artificial Sequence
  Synthetic Polynucloetide
atggccttaccagtgaccgccttgctcctgccgctggccttgctgctccacgccgccaggccggacatccagatgacacagagccctagcagcctgtccgtgtccgtgggagacagagtgaccatcacatgcaaggccagccagaacgtgcggacagtggtggcttggtatcagcagaagcctggactggcccctaagacactgatctacctggcctccaacagacacaccggcgtgccaagcagattttctggcagcggctctggcaccgacttcaccttcacaatatccagcctccagcctgaggacattgccacctacttttgccagcagcactggtcttaccctctgacctttggacagggcaccaaggtggaagtgaagagactcgaggggaaaccaattcccaaccctcttctgggactggattcaaccggcagcggcgacaagcagctggacgccgacgtgtcccccaagcctaccatcttcctgccctctatcgccgagacaaagctccagaaggccggcacctacctgtgcctgctggaaaagttcttcccagatgtgattaagatccactggcaggaaaagaagtccaacaccatcctgggcagccaggaaggcaacaccatgaagaccaacgacacctacatgaagttcagctggctgaccgtgcccgagaagtccctggacaaagaacacagatgcatcgtgcggcacgaaaacaacaagaacggcgtggaccaggaaatcatcttcccacccatcaagaccgatgtgattacaatggaccccaaggacaactgctccaaggacgccaacgataccctgctgctccagctgaccaacaccagcgcctactacatgtacttgttgctgctgctgaagtccgtggtgtacttcgccatcatcacatgctgcctgctgcggagaaccgccttctgctgcaacggcgagaagtctagggccaagcgatctggatctggagcaacaaacttctcactactcaaacaagcaggtgacgtggaggagaatcccgggcctactagtatggactggatttggcgcatccttttccttgtcggcgctgctaccggcgcgcattccttcgaagaagttcagctgcttgaatctggcggcggactggttcaacctggcggatctctgagactgagctgtgccgcctctggcttcgccttcagcacctacgatatgagctgggtccgacaggcccctggcaaaggacttgaatgggtcgccacaatcagcagcggcggcagctacacctactacctggatagcgtgaagggcagattcaccatcagccgggacagcagcaagaacaccctgtacctccagatgaactccctccaggccgaggactccgccatctactattgtgcccctaccaccgtggtgcctttcgcctattggggacagggaaccctggtcaccgttagctctacgcgtgagcagaaactgatctcggaagaggatgggagcggcagccagcctcacaccaagcccagcgtgttcgtgatgaagaacggcaccaacgtggcctgcctcgtgaaagagttctaccccaaggacatcaggatcaacctggtgtccagcaagaagatcaccgagttcgaccccgccatcgtgatctcccccagcggcaagtacaacgccgtgaagctggggaagtacgaggacagcaacagcgtgacctgctccgtgcagcacgacaacaagaccgtgcacagcaccgactttgaagtgaaaaccgactccaccgaccacgtgaagcccaaagagacagagaacaccaagcagcccagcaagagctgccacaagcccaaggccatcgtgcacaccgagaaagtgaacatgatgagcctgaccgtgctgggcctgcggatgctgttcgccaaaaccgtggccgtgaacttcctgctgaccgccaagctgttcttcctccgcgccaagagaagcggatctggcgtgaagcagaccctgaatttcgacctgctgaagctggctggcgacgtggaatccaacccaggcccttctagaggccatatgaccgagtacaagcccacggtgcgcctcgccacccgcgacgacgtccccagggccgtacgcaccctcgccgccgcgttcgccgactaccccgccacgcgccacaccgtcgatccggaccgccacatcgagcgggtcaccgagctgcaagaactcttcctcacgcgcgtcgggctcgacatcggcaaggtgtgggtcgcggacgacggcgccgcggtggcggtctggaccacgccggagagcgtcgaagcgggggcggtgttcgccgagatcggcccgcgcatggccgagttgagcggttcccggctggccgcgcagcaacagatggaaggcctcctggcgccgcaccggcccaaggagcccgcgtggttcctggccaccgtcggcgtctcgcccgaccaccagggcaagggtctgggcagcgccgtcgtgctccccggagtggaggcggccgagcgcgccggggtgcccgccttcctggagacctccgcgccccgcaacctccccttctacgagcggctcggcttcaccgtcaccgccgacgtcgaggtgcccgaaggaccgcgcacctggtgcatgacccgcaagcccggtgcctga

SEQ ID NO: 10256 - DNA, 1878 bp, Artificial Sequence
  Synthetic Polynucloetide
atggccttaccagtgaccgccttgctcctgccgctggccttgctgctccacgccgccaggccggacatccagatgacacagagccctagcagcctgtccgtgtccgtgggagacagagtgaccatcacatgcaaggccagccagaacgtgcggacagtggtggcttggtatcagcagaagcctggactggcccctaagacactgatctacctggcctccaacagacacaccggcgtgccaagcagattttctggcagcggctctggcaccgacttcaccttcacaatatccagcctccagcctgaggacattgccacctacttttgccagcagcactggtcttaccctctgacctttggacagggcaccaaggtggaagtgaagagactcgagagccagcctcacaccaagcccagcgtgttcgtgatgaagaacggcaccaacgtggcctgcctcgtgaaagagttctaccccaaggacatcaggatcaacctggtgtccagcaagaagatcaccgagttcgaccccgccatcgtgatctcccccagcggcaagtacaacgccgtgaagctggggaagtacgaggacagcaacagcgtgacctgctccgtgcagcacgacaacaagaccgtgcacagcaccgactttgaagtgaaaaccgactccaccgaccacgtgaagcccaaagagacagagaacaccaagcagcccagcaagagctgccacaagcccaaggccatcgtgcacaccgagaaagtgaacatgatgagcctgaccgtgctgggcctgcggatgctgttcgccaaaaccgtggccgtgaacttcctgctgaccgccaagctgttcttcctcagggccaagcgatctggatctggagcaacaaacttctcactactcaaacaagcaggtgacgtggaggagaatcccgggcctactagtatggactggatttggcgcatccttttccttgtcggcgctgctaccggcgcgcattccttcgaagaagttcagctgcttgaatctggcggcggactggttcaacctggcggatctctgagactgagctgtgccgcctctggcttcgccttcagcacctacgatatgagctgggtccgacaggcccctggcaaaggacttgaatgggtcgccacaatcagcagcggcggcagctacacctactacctggatagcgtgaagggcagattcaccatcagccgggacagcagcaagaacaccctgtacctccagatgaactccctccaggccgaggactccgccatctactattgtgcccctaccaccgtggtgcctttcgcctattggggacagggaaccctggtcaccgttagctctacgcgtgacaagcagctggacgccgacgtgtcccccaagcctaccatcttcctgccctctatcgccgagacaaagctccagaaggccggcacctacctgtgcctgctggaaaagttcttcccagatgtgattaagatccactggcaggaaaagaagtccaacaccatcctgggcagccaggaaggcaacaccatgaagaccaacgacacctacatgaagttcagctggctgaccgtgcccgagaagtccctggacaaagaacacagatgcatcgtgcggcacgaaaacaacaagaacggcgtggaccaggaaatcatcttcccacccatcaagaccgatgtgattacaatggaccccaaggacaactgctccaaggacgccaacgataccctgctgctccagctgaccaacaccagcgcctactacatgtacttgttgctgctgctgaagtccgtggtgtacttcgccatcatcacatgctgcctgctgcggagaaccgccttctgctgcaacggcgagaagtct

SEQ ID NO: 10257 - DNA, 2712 bp, Artificial Sequence
  Synthetic Polynucloetide
atggccttaccagtgaccgccttgctcctgccgctggccttgctgctccacgccgccaggccgctcgaggggaaaccaattcccaaccctcttctgggactggattcaaccggcagcggcgacaagcagctggacgccgacgtgtcccccaagcctaccatcttcctgccctctatcgccgagacaaagctccagaaggccggcacctacctgtgcctgctggaaaagttcttcccagatgtgattaagatccactggcaggaaaagaagtccaacaccatcctgggcagccaggaaggcaacaccatgaagaccaacgacacctacatgaagttcagctggctgaccgtgcccgagaagtccctggacaaagaacacagatgcatcgtgcggcacgaaaacaacaagaacggcgtggaccaggaaatcatcttcccacccatcaagaccgatgtgattacaatggaccccaaggacaactgctccaaggacgccaacgataccctgctgctccagctgaccaacaccagcgcctactacatgtacttgttgctgctgctgaagtccgtggtgtacttcgccatcatcacatgctgcctgctgcggagaaccgccttctgctgcaacggcgagaagtctagggccaagcgatctggatctggagcaacaaacttctcactactcaaacaagcaggtgacgtggaggagaatcccgggcctactagcatggccttaccagtgaccgccttgctcctgccgctggccttgctgctccacgccgccaggccggacatccagatgacacagagccctagcagcctgtccgtgtccgtgggagacagagtgaccatcacatgcaaggccagccagaacgtgcggacagtggtggcttggtatcagcagaagcctggactggcccctaagacactgatctacctggcctccaacagacacaccggcgtgccaagcagattttctggcagcggctctggcaccgacttcaccttcacaatatccagcctccagcctgaggacattgccacctacttttgccagcagcactggtcttaccctctgacctttggacagggcaccaaggtggaagtgaagagaggcggaggcggaagtggaggcggaggatctggcggcggaggctctgaagttcagctgcttgaatctggcggcggactggttcaacctggcggatctctgagactgagctgtgccgcctctggcttcgccttcagcacctacgatatgagctgggtccgacaggcccctggcaaaggacttgaatgggtcgccacaatcagcagcggcggcagctacacctactacctggatagcgtgaagggcagattcaccatcagccgggacagcagcaagaacaccctgtacctccagatgaactccctccaggccgaggactccgccatctactattgtgcccctaccaccgtggtgcctttcgcctattggggacagggaaccctggtcaccgttagctctacgcgtgagcagaaactgatctcggaagaggatgggagcggcagccagcctcacaccaagcccagcgtgttcgtgatgaagaacggcaccaacgtggcctgcctcgtgaaagagttctaccccaaggacatcaggatcaacctggtgtccagcaagaagatcaccgagttcgaccccgccatcgtgatctcccccagcggcaagtacaacgccgtgaagctggggaagtacgaggacagcaacagcgtgacctgctccgtgcagcacgacaacaagaccgtgcacagcaccgactttgaagtgaaaaccgactccaccgaccacgtgaagcccaaagagacagagaacaccaagcagcccagcaagagctgccacaagcccaaggccatcgtgcacaccgagaaagtgaacatgatgagcctgaccgtgctgggcctgcggatgctgttcgccaaaaccgtggccgtgaacttcctgctgaccgccaagctgttcttcctccgcgccaagagaagcggatctggcgtgaagcagaccctgaatttcgacctgctgaagctggctggcgacgtggaatccaacccaggcccttctagaggccatatgaccgagtacaagcccacggtgcgcctcgccacccgcgacgacgtccccagggccgtacgcaccctcgccgccgcgttcgccgactaccccgccacgcgccacaccgtcgatccggaccgccacatcgagcgggtcaccgagctgcaagaactcttcctcacgcgcgtcgggctcgacatcggcaaggtgtgggtcgcggacgacggcgccgcggtggcggtctggaccacgccggagagcgtcgaagcgggggcggtgttcgccgagatcggcccgcgcatggccgagttgagcggttcccggctggccgcgcagcaacagatggaaggcctcctggcgccgcaccggcccaaggagcccgcgtggttcctggccaccgtcggcgtctcgcccgaccaccagggcaagggtctgggcagcgccgtcgtgctccccggagtggaggcggccgagcgcgccggggtgcccgccttcctggagacctccgcgccccgcaacctccccttctacgagcggctcggcttcaccgtcaccgccgacgtcgaggtgcccgaaggaccgcgcacctggtgcatgacccgcaagcccggtgcctga

SEQ ID NO: 10258 - DNA, 3087 bp, Artificial Sequence
  Synthetic Polynucloetide
atggccttaccagtgaccgccttgctcctgccgctggccttgctgctccacgccgccaggccggacatccagatgacacagagccctagcagcctgtccgtgtccgtgggagacagagtgaccatcacatgcaaggccagccagaacgtgcggacagtggtggcttggtatcagcagaagcctggactggcccctaagacactgatctacctggcctccaacagacacaccggcgtgccaagcagattttctggcagcggctctggcaccgacttcaccttcacaatatccagcctccagcctgaggacattgccacctacttttgccagcagcactggtcttaccctctgacctttggacagggcaccaaggtggaagtgaagagaggacagcctaaggccaatcctaccgtgacactgttccctccaagcagcgaagaactccaggccaacaaggccacacttgtgtgcctgatctccgacttctaccctggggctgtgacagtggcttggaaggccgatggatctcctgtgaaagccggcgtggaaaccaccaagccatccaagcagagcaacaacaaatacgccgccagctcctacctgagcctgacacctgagcagtggaagtcccacagatcctacagctgccaagtgacccacgaaggcagcaccgtggaaaagacagtggcccctacagagtgcagcggatcccagagcttcggcctgctggaccccaagctgtgctacctgctggatggcatcctgttcatctacggcgtgatcctgaccgccctgttcctgagagtgaagttcagcagaagcgccgacgcccctgcctaccagcagggacagaaccaactgtacaacgagctgaacctgggcagacgggaagagtacgacgtgctggacaagcggagaggcagggaccctgagatgggcggaaagccccagcggagaaagaacccccaggaaggactgtataacgaactccagaaagacaagatggccgaagcctacagcgagatcggcatgaagggcgagcggagaagaggcaagggccacgatggcctgtaccagggcctgagcaccgccaccaaggacacctatgacgccctgcacatgcaggccctgcctccaagaagggccaagcgatctggatctggagcaacaaacttctcactactcaaacaagcaggtgacgtggaggagaatcccgggcctactagtatggactggatttggcgcatccttttccttgtcggcgctgctaccggcgcgcattccttcgaagaagttcagctgcttgaatctggcggcggactggttcaacctggcggatctctgagactgagctgtgccgcctctggcttcgccttcagcacctacgatatgagctgggtccgacaggcccctggcaaaggacttgaatgggtcgccacaatcagcagcggcggcagctacacctactacctggatagcgtgaagggcagattcaccatcagccgggacagcagcaagaacaccctgtacctccagatgaactccctccaggccgaggactccgccatctactattgtgcccctaccaccgtggtgcctttcgcctattggggacagggaaccctggtcaccgttagctctgcctctacaaagggaccctccgtgtttcctctggctcccagcagcaagtctacaagcggaggaacagccgctctgggctgcctggtcaaggattactttcccgagcctgtgaccgtgtcctggaatagcggagcactgacaagcggcgtgcacacctttccagccgtgctgcaaagcagcggcctgtactctctgagcagcgtggtcacagtgcctagctctagcctgggcacccagacctacatctgcaatgtgaaccacaagcctagcaacaccaaggtggacaagagagtggaacccaagagctgtggtacccagagttttgggttgttggaccctaaattgtgctatctgttggacggaatcctgttcatttacggagtgatcctgaccgcattgttcctgcgggttaagttttccagatccgcagacgcacccgcttaccaacaagggcagaaccaactctacaatgaacttaatttggggcggagggaagagtacgacgttctggacaaaaggaggggacgagatcccgagatgggcggaaagcctcagcgaaggaagaatccgcaagaggggctttataacgaactccagaaagataaaatggcagaagcctatagtgagattgggatgaagggagaaaggaggaggggtaaaggtcacgatgggttgtaccaaggattgagcacagccactaaagatacctatgatgcgctccacatgcaggccctgccgccaagacgcgccaagagaagcggatctggcgtgaagcagaccctgaatttcgacctgctgaagctggctggcgacgtggaatccaacccaggcccttctagaggccatatgaccgagtacaagcccacggtgcgcctcgccacccgcgacgacgtccccagggccgtacgcaccctcgccgccgcgttcgccgactaccccgccacgcgccacaccgtcgatccggaccgccacatcgagcgggtcaccgagctgcaagaactcttcctcacgcgcgtcgggctcgacatcggcaaggtgtgggtcgcggacgacggcgccgcggtggcggtctggaccacgccggagagcgtcgaagcgggggcggtgttcgccgagatcggcccgcgcatggccgagttgagcggttcccggctggccgcgcagcaacagatggaaggcctcctggcgccgcaccggcccaaggagcccgcgtggttcctggccaccgtcggcgtctcgcccgaccaccagggcaagggtctgggcagcgccgtcgtgctccccggagtggaggcggccgagcgcgccggggtgcccgccttcctggagacctccgcgccccgcaacctccccttctacgagcggctcggcttcaccgtcaccgccgacgtcgaggtgcccgaaggaccgcgcacctggtgcatgacccgcaagcccggtgcctga

SEQ ID NO: 10259 - DNA, 2442 bp, Artificial Sequence
  Synthetic Polynucloetide
atggccttaccagtgaccgccttgctcctgccgctggccttgctgctccacgccgccaggccggacatccagatgacacagagccctagcagcctgtccgtgtccgtgggagacagagtgaccatcacatgcaaggccagccagaacgtgcggacagtggtggcttggtatcagcagaagcctggactggcccctaagacactgatctacctggcctccaacagacacaccggcgtgccaagcagattttctggcagcggctctggcaccgacttcaccttcacaatatccagcctccagcctgaggacattgccacctacttttgccagcagcactggtcttaccctctgacctttggacagggcaccaaggtggaagtgaagagactcgaggacctgaagaacgtgttcccacctgaggtggccgtgttcgagcctagcgaggccgagatcagccacacccagaaagccaccctcgtgtgcctggctaccggcttctaccccgaccatgtggaactgtcttggtgggtcaacggcaaagaggtgcacagcggcgtgtctaccgacccccagccactgaaagaacagcccgccctgaacgacagccggtactgcctgagcagcagactgagagtgtccgccaccttctggcagaacccccggaaccacttcagatgccaggtgcagttctacggcctgagcgagaacgacgagtggacccaggacagagccaagcccgtgacccagatcgtgtctgccgaagcctggggcagagccgattgcggatcccagagcttcggcctgctggaccccaagctgtgctacctgctggatggcatcctgttcatctacggcgtgatcctgaccgccctgttcctgagagtgaagttcagcagaagcgccgacgcccctgcctaccagcagggacagaaccaactgtacaacgagctgaacctgggcagacgggaagagtacgacgtgctggacaagcggagaggcagggaccctgagatgggcggaaagccccagcggagaaagaacccccaggaaggactgtataacgaactccagaaagacaagatggccgaagcctacagcgagatcggcatgaagggcgagcggagaagaggcaagggccacgatggcctgtaccagggcctgagcaccgccaccaaggacacctatgacgccctgcacatgcaggccctgcctccaagaagggccaagcgatctggatctggagcaacaaacttctcactactcaaacaagcaggtgacgtggaggagaatcccgggcctactagtatggactggatttggcgcatccttttccttgtcggcgctgctaccggcgcgcattccttcgaagaagttcagctgcttgaatctggcggcggactggttcaacctggcggatctctgagactgagctgtgccgcctctggcttcgccttcagcacctacgatatgagctgggtccgacaggcccctggcaaaggacttgaatgggtcgccacaatcagcagcggcggcagctacacctactacctggatagcgtgaagggcagattcaccatcagccgggacagcagcaagaacaccctgtacctccagatgaactccctccaggccgaggactccgccatctactattgtgcccctaccaccgtggtgcctttcgcctattggggacagggaaccctggtcaccgttagctctacgcgtatccagaaccctgatcctgccgtgtaccagctgcgggatagcaagagcagcgacaagagcgtgtgtctgttcaccgacttcgacagccagaccaacgtgtcccagagcaaggactccgacgtgtacatcaccgataagaccgtgctggacatgcggagcatggacttcaagagcaactccgccgtggcctggtccaacaagtccgatttcgcctgcgccaacgccttcaacaacagcattatccccgaggacacattcttcccaagccccgagagcagctgcggtacccagagttttgggttgttggaccctaaattgtgctatctgttggacggaatcctgttcatttacggagtgatcctgaccgcattgttcctgcgggttaagttttccagatccgcagacgcacccgcttaccaacaagggcagaaccaactctacaatgaacttaatttggggcggagggaagagtacgacgttctggacaaaaggaggggacgagatcccgagatgggcggaaagcctcagcgaaggaagaatccgcaagaggggctttataacgaactccagaaagataaaatggcagaagcctatagtgagattgggatgaagggagaaaggaggaggggtaaaggtcacgatgggttgtaccaaggattgagcacagccactaaagatacctatgatgcgctccacatgcaggccctgccgccaaga

SEQ ID NO: 10260 - DNA, 2442 bp, Artificial Sequence
  Synthetic Polynucloetide
atggccttaccagtgaccgccttgctcctgccgctggccttgctgctccacgccgccaggccggacatccagatgacacagagccctagcagcctgtccgtgtccgtgggagacagagtgaccatcacatgcaaggccagccagaacgtgcggacagtggtggcttggtatcagcagaagcctggactggcccctaagacactgatctacctggcctccaacagacacaccggcgtgccaagcagattttctggcagcggctctggcaccgacttcaccttcacaatatccagcctccagcctgaggacattgccacctacttttgccagcagcactggtcttaccctctgacctttggacagggcaccaaggtggaagtgaagagactcgaggacctgaagaacgtgttcccacctgaggtggccgtgttcgagcctagcaaggccgagatcgcccacacccagaaagccaccctcgtgtgcctggctaccggcttctaccccgaccatgtggaactgtcttggtgggtcaacggcaaagaggtgcacagcggcgtgtgtaccgacccccagccactgaaagaacagcccgccctgaacgacagccggtactgcctgagcagcagactgagagtgtccgccaccttctggcagaacccccggaaccacttcagatgccaggtgcagttctacggcctgagcgagaacgacgagtggacccaggacagagccaagcccgtgacccagatcgtgtctgccgaagcctggggcagagccgattgcggatcccagagcttcggcctgctggaccccaagctgtgctacctgctggatggcatcctgttcatctacggcgtgatcctgaccgccctgttcctgagagtgaagttcagcagaagcgccgacgcccctgcctaccagcagggacagaaccaactgtacaacgagctgaacctgggcagacgggaagagtacgacgtgctggacaagcggagaggcagggaccctgagatgggcggaaagccccagcggagaaagaacccccaggaaggactgtataacgaactccagaaagacaagatggccgaagcctacagcgagatcggcatgaagggcgagcggagaagaggcaagggccacgatggcctgtaccagggcctgagcaccgccaccaaggacacctatgacgccctgcacatgcaggccctgcctccaagaagggccaagcgatctggatctggagcaacaaacttctcactactcaaacaagcaggtgacgtggaggagaatcccgggcctactagtatggactggatttggcgcatccttttccttgtcggcgctgctaccggcgcgcattccttcgaagaagttcagctgcttgaatctggcggcggactggttcaacctggcggatctctgagactgagctgtgccgcctctggcttcgccttcagcacctacgatatgagctgggtccgacaggcccctggcaaaggacttgaatgggtcgccacaatcagcagcggcggcagctacacctactacctggatagcgtgaagggcagattcaccatcagccgggacagcagcaagaacaccctgtacctccagatgaactccctccaggccgaggactccgccatctactattgtgcccctaccaccgtggtgcctttcgcctattggggacagggaaccctggtcaccgttagctctacgcgtatccagaaccctgatcctgccgtgtaccagctgcgggatagcaagagcagcgacaagagcgtgtgtctgttcaccgacttcgacagccagaccaacgtgtcccagagcaaggactccgacgtgtacatcaccgataagtgcgtgctggacatgcggagcatggacttcaagagcaactccgccgtggcctggtccaacaagtccgatttcgcctgcgccaacgccttcaacaacagcattatccccgaggacacattcttcccaagcagcgacgtgccctgcggtacccagagttttgggttgttggaccctaaattgtgctatctgttggacggaatcctgttcatttacggagtgatcctgaccgcattgttcctgcgggttaagttttccagatccgcagacgcacccgcttaccaacaagggcagaaccaactctacaatgaacttaatttggggcggagggaagagtacgacgttctggacaaaaggaggggacgagatcccgagatgggcggaaagcctcagcgaaggaagaatccgcaagaggggctttataacgaactccagaaagataaaatggcagaagcctatagtgagattgggatgaagggagaaaggaggaggggtaaaggtcacgatgggttgtaccaaggattgagcacagccactaaagatacctatgatgcgctccacatgcaggccctgccgccaaga

SEQ ID NO: 10261 - DNA, 2655 bp, Artificial Sequence
  Synthetic Polynucloetide
atggccttaccagtgaccgccttgctcctgccgctggccttgctgctccacgccgccaggccggacatccagatgacacagagccctagcagcctgtccgtgtccgtgggagacagagtgaccatcacatgcaaggccagccagaacgtgcggacagtggtggcttggtatcagcagaagcctggactggcccctaagacactgatctacctggcctccaacagacacaccggcgtgccaagcagattttctggcagcggctctggcaccgacttcaccttcacaatatccagcctccagcctgaggacattgccacctacttttgccagcagcactggtcttaccctctgacctttggacagggcaccaaggtggaagtgaagagactcgaggggaaaccaattcccaaccctcttctgggactggattcaaccggcagcggcgaggacctgaagaacgtgttcccacctgaggtggccgtgttcgagcctagcgaggccgagatcagccacacccagaaagccaccctcgtgtgcctggctaccggcttctaccccgaccatgtggaactgtcttggtgggtcaacggcaaagaggtgcacagcggcgtgtctaccgacccccagccactgaaagaacagcccgccctgaacgacagccggtactgcctgagcagcagactgagagtgtccgccaccttctggcagaacccccggaaccacttcagatgccaggtgcagttctacggcctgagcgagaacgacgagtggacccaggacagagccaagcccgtgacccagatcgtgtctgccgaagcctggggcagagccgattgcggatcccagagcttcggcctgctggaccccaagctgtgctacctgctggatggcatcctgttcatctacggcgtgatcctgaccgccctgttcctgagagtgaagttcagcagaagcgccgacgcccctgcctaccagcagggacagaaccaactgtacaacgagctgaacctgggcagacgggaagagtacgacgtgctggacaagcggagaggcagggaccctgagatgggcggaaagccccagcggagaaagaacccccaggaaggactgtataacgaactccagaaagacaagatggccgaagcctacagcgagatcggcatgaagggcgagcggagaagaggcaagggccacgatggcctgtaccagggcctgagcaccgccaccaaggacacctatgacgccctgcacatgcaggccctgcctccaagaagggccaagcgatctggatctggagcaacaaacttctcactactcaaacaagcaggtgacgtggaggagaatcccgggcctactagtatggactggatttggcgcatccttttccttgtcggcgctgctaccggcgcgcattccttcgaagaagttcagctgcttgaatctggcggcggactggttcaacctggcggatctctgagactgagctgtgccgcctctggcttcgccttcagcacctacgatatgagctgggtccgacaggcccctggcaaaggacttgaatgggtcgccacaatcagcagcggcggcagctacacctactacctggatagcgtgaagggcagattcaccatcagccgggacagcagcaagaacaccctgtacctccagatgaactccctccaggccgaggactccgccatctactattgtgcccctaccaccgtggtgcctttcgcctattggggacagggaaccctggtcaccgttagctctacgcgtgagcagaaactgatctcggaagaggatgggagcggcatccagaaccctgatcctgccgtgtaccagctgcgggatagcaagagcagcgacaagagcgtgtgtctgttcaccgacttcgacagccagaccaacgtgtcccagagcaaggactccgacgtgtacatcaccgataagaccgtgctggacatgcggagcatggacttcaagagcaactccgccgtggcctggtccaacaagtccgatttcgcctgcgccaacgccttcaacaacagcattatccccgaggacacattcttcccaagccccgagagcagctgcggtacccagagttttgggttgttggaccctaaattgtgctatctgttggacggaatcctgttcatttacggagtgatcctgaccgcattgttcctgaggagcaagcggtcacggctgctccacagcgattacatgaatatgacaccacgaagaccgggtcctactcgcaaacactaccaaccctacgcacctccccgcgactttgcagcgtaccgatctcgggttaagttttccagatccgcagacgcacccgcttaccaacaagggcagaaccaactctacaatgaacttaatttggggcggagggaagagtacgacgttctggacaaaaggaggggacgagatcccgagatgggcggaaagcctcagcgaaggaagaatccgcaagaggggctttataacgaactccagaaagataaaatggcagaagcctatagtgagattgggatgaagggagaaaggaggaggggtaaaggtcacgatgggttgtaccaaggattgagcacagccactaaagatacctatgatgcgctccacatgcaggccctgccgccaaga

SEQ ID NO: 10262 - DNA, 2778 bp, Artificial Sequence
  Synthetic Polynucloetide
atggccttaccagtgaccgccttgctcctgccgctggccttgctgctccacgccgccaggccggacatccagatgacacagagccctagcagcctgtccgtgtccgtgggagacagagtgaccatcacatgcaaggccagccagaacgtgcggacagtggtggcttggtatcagcagaagcctggactggcccctaagacactgatctacctggcctccaacagacacaccggcgtgccaagcagattttctggcagcggctctggcaccgacttcaccttcacaatatccagcctccagcctgaggacattgccacctacttttgccagcagcactggtcttaccctctgacctttggacagggcaccaaggtggaagtgaagagactcgaggggaaaccaattcccaaccctcttctgggactggattcaaccggcagcggcgaggacctgaagaacgtgttcccacctgaggtggccgtgttcgagcctagcgaggccgagatcagccacacccagaaagccaccctcgtgtgcctggctaccggcttctaccccgaccatgtggaactgtcttggtgggtcaacggcaaagaggtgcacagcggcgtgtctaccgacccccagccactgaaagaacagcccgccctgaacgacagccggtactgcctgagcagcagactgagagtgtccgccaccttctggcagaacccccggaaccacttcagatgccaggtgcagttctacggcctgagcgagaacgacgagtggacccaggacagagccaagcccgtgacccagatcgtgtctgccgaagcctggggcagagccgattgcggatcccagagcttcggcctgctggaccccaagctgtgctacctgctggatggcatcctgttcatctacggcgtgatcctgaccgccctgttcctgaggagtaagaggagcaggctcctgcacagtgactacatgaacatgactccacgccgccccggacccacccgcaagcattaccagccctatgccccaccacgcgacttcgcagcctatcgctccagagtgaagttcagcagaagcgccgacgcccctgcctaccagcagggacagaaccaactgtacaacgagctgaacctgggcagacgggaagagtacgacgtgctggacaagcggagaggcagggaccctgagatgggcggaaagccccagcggagaaagaacccccaggaaggactgtataacgaactccagaaagacaagatggccgaagcctacagcgagatcggcatgaagggcgagcggagaagaggcaagggccacgatggcctgtaccagggcctgagcaccgccaccaaggacacctatgacgccctgcacatgcaggccctgcctccaagaagggccaagcgatctggatctggagcaacaaacttctcactactcaaacaagcaggtgacgtggaggagaatcccgggcctactagtatggactggatttggcgcatccttttccttgtcggcgctgctaccggcgcgcattccttcgaagaagttcagctgcttgaatctggcggcggactggttcaacctggcggatctctgagactgagctgtgccgcctctggcttcgccttcagcacctacgatatgagctgggtccgacaggcccctggcaaaggacttgaatgggtcgccacaatcagcagcggcggcagctacacctactacctggatagcgtgaagggcagattcaccatcagccgggacagcagcaagaacaccctgtacctccagatgaactccctccaggccgaggactccgccatctactattgtgcccctaccaccgtggtgcctttcgcctattggggacagggaaccctggtcaccgttagctctacgcgtgagcagaaactgatctcggaagaggatgggagcggcatccagaaccctgatcctgccgtgtaccagctgcgggatagcaagagcagcgacaagagcgtgtgtctgttcaccgacttcgacagccagaccaacgtgtcccagagcaaggactccgacgtgtacatcaccgataagaccgtgctggacatgcggagcatggacttcaagagcaactccgccgtggcctggtccaacaagtccgatttcgcctgcgccaacgccttcaacaacagcattatccccgaggacacattcttcccaagccccgagagcagctgcggtacccagagttttgggttgttggaccctaaattgtgctatctgttggacggaatcctgttcatttacggagtgatcctgaccgcattgttcctgaggagcaagcggtcacggctgctccacagcgattacatgaatatgacaccacgaagaccgggtcctactcgcaaacactaccaaccctacgcacctccccgcgactttgcagcgtaccgatctcgggttaagttttccagatccgcagacgcacccgcttaccaacaagggcagaaccaactctacaatgaacttaatttggggcggagggaagagtacgacgttctggacaaaaggaggggacgagatcccgagatgggcggaaagcctcagcgaaggaagaatccgcaagaggggctttataacgaactccagaaagataaaatggcagaagcctatagtgagattgggatgaagggagaaaggaggaggggtaaaggtcacgatgggttgtaccaaggattgagcacagccactaaagatacctatgatgcgctccacatgcaggccctgccgccaaga

SEQ ID NO: 10263 - DNA, 2661 bp, Artificial Sequence
  Synthetic Polynucloetide
atggccttaccagtgaccgccttgctcctgccgctggccttgctgctccacgccgccaggccggacatccagatgacacagagccctagcagcctgtccgtgtccgtgggagacagagtgaccatcacatgcaaggccagccagaacgtgcggacagtggtggcttggtatcagcagaagcctggactggcccctaagacactgatctacctggcctccaacagacacaccggcgtgccaagcagattttctggcagcggctctggcaccgacttcaccttcacaatatccagcctccagcctgaggacattgccacctacttttgccagcagcactggtcttaccctctgacctttggacagggcaccaaggtggaagtgaagagactcgaggggaaaccaattcccaaccctcttctgggactggattcaaccggcagcggcgaggacctgaagaacgtgttcccacctgaggtggccgtgttcgagcctagcgaggccgagatcagccacacccagaaagccaccctcgtgtgcctggctaccggcttctaccccgaccatgtggaactgtcttggtgggtcaacggcaaagaggtgcacagcggcgtgtctaccgacccccagccactgaaagaacagcccgccctgaacgacagccggtactgcctgagcagcagactgagagtgtccgccaccttctggcagaacccccggaaccacttcagatgccaggtgcagttctacggcctgagcgagaacgacgagtggacccaggacagagccaagcccgtgacccagatcgtgtctgccgaagcctggggcagagccgattgcggatcccagagcttcggcctgctggaccccaagctgtgctacctgctggatggcatcctgttcatctacggcgtgatcctgaccgccctgttcctgagagtgaagttcagcagaagcgccgacgcccctgcctaccagcagggacagaaccaactgtacaacgagctgaacctgggcagacgggaagagtacgacgtgctggacaagcggagaggcagggaccctgagatgggcggaaagccccagcggagaaagaacccccaggaaggactgtataacgaactccagaaagacaagatggccgaagcctacagcgagatcggcatgaagggcgagcggagaagaggcaagggccacgatggcctgtaccagggcctgagcaccgccaccaaggacacctatgacgccctgcacatgcaggccctgcctccaagaagggccaagcgatctggatctggagcaacaaacttctcactactcaaacaagcaggtgacgtggaggagaatcccgggcctactagtatggactggatttggcgcatccttttccttgtcggcgctgctaccggcgcgcattccttcgaagaagttcagctgcttgaatctggcggcggactggttcaacctggcggatctctgagactgagctgtgccgcctctggcttcgccttcagcacctacgatatgagctgggtccgacaggcccctggcaaaggacttgaatgggtcgccacaatcagcagcggcggcagctacacctactacctggatagcgtgaagggcagattcaccatcagccgggacagcagcaagaacaccctgtacctccagatgaactccctccaggccgaggactccgccatctactattgtgcccctaccaccgtggtgcctttcgcctattggggacagggaaccctggtcaccgttagctctacgcgtgagcagaaactgatctcggaagaggatctggggagcggcatccagaaccctgatcctgccgtgtaccagctgcgggatagcaagagcagcgacaagagcgtgtgtctgttcaccgacttcgacagccagaccaacgtgtcccagagcaaggactccgacgtgtacatcaccgataagaccgtgctggacatgcggagcatggacttcaagagcaactccgccgtggcctggtccaacaagtccgatttcgcctgcgccaacgccttcaacaacagcattatccccgaggacacattcttcccaagccccgagagcagctgcggtacccagagttttgggttgttggaccctaaattgtgctatctgttggacggaatcctgttcatttacggagtgatcctgaccgcattgttcctgaagagaggccggaagaagctgctgtacatcttcaagcagcctttcatgcggcccgtgcagaccacccaggaagaggacggctgctcctgccggttccccgaggaagaagaaggcggctgcgagctgcgggttaagttttccagatccgcagacgcacccgcttaccaacaagggcagaaccaactctacaatgaacttaatttggggcggagggaagagtacgacgttctggacaaaaggaggggacgagatcccgagatgggcggaaagcctcagcgaaggaagaatccgcaagaggggctttataacgaactccagaaagataaaatggcagaagcctatagtgagattgggatgaagggagaaaggaggaggggtaaaggtcacgatgggttgtaccaaggattgagcacagccactaaagatacctatgatgcgctccacatgcaggccctgccgccaaga

SEQ ID NO: 10264 - DNA, 2787 bp, Artificial Sequence
  Synthetic Polynucloetide
atggccttaccagtgaccgccttgctcctgccgctggccttgctgctccacgccgccaggccggacatccagatgacacagagccctagcagcctgtccgtgtccgtgggagacagagtgaccatcacatgcaaggccagccagaacgtgcggacagtggtggcttggtatcagcagaagcctggactggcccctaagacactgatctacctggcctccaacagacacaccggcgtgccaagcagattttctggcagcggctctggcaccgacttcaccttcacaatatccagcctccagcctgaggacattgccacctacttttgccagcagcactggtcttaccctctgacctttggacagggcaccaaggtggaagtgaagagactcgaggggaaaccaattcccaaccctcttctgggactggattcaaccggcagcggcgaggacctgaagaacgtgttcccacctgaggtggccgtgttcgagcctagcgaggccgagatcagccacacccagaaagccaccctcgtgtgcctggctaccggcttctaccccgaccatgtggaactgtcttggtgggtcaacggcaaagaggtgcacagcggcgtgtctaccgacccccagccactgaaagaacagcccgccctgaacgacagccggtactgcctgagcagcagactgagagtgtccgccaccttctggcagaacccccggaaccacttcagatgccaggtgcagttctacggcctgagcgagaacgacgagtggacccaggacagagccaagcccgtgacccagatcgtgtctgccgaagcctggggcagagccgattgcggatcccagagcttcggcctgctggaccccaagctgtgctacctgctggatggcatcctgttcatctacggcgtgatcctgaccgccctgttcctgaaacggggcagaaagaaactcctgtatatattcaaacaaccatttatgagaccagtacaaactactcaagaggaagatggctgtagctgccgatttccagaagaagaagaaggaggatgtgaactgagagtgaagttcagcagaagcgccgacgcccctgcctaccagcagggacagaaccaactgtacaacgagctgaacctgggcagacgggaagagtacgacgtgctggacaagcggagaggcagggaccctgagatgggcggaaagccccagcggagaaagaacccccaggaaggactgtataacgaactccagaaagacaagatggccgaagcctacagcgagatcggcatgaagggcgagcggagaagaggcaagggccacgatggcctgtaccagggcctgagcaccgccaccaaggacacctatgacgccctgcacatgcaggccctgcctccaagaagggccaagcgatctggatctggagcaacaaacttctcactactcaaacaagcaggtgacgtggaggagaatcccgggcctactagtatggactggatttggcgcatccttttccttgtcggcgctgctaccggcgcgcattccttcgaagaagttcagctgcttgaatctggcggcggactggttcaacctggcggatctctgagactgagctgtgccgcctctggcttcgccttcagcacctacgatatgagctgggtccgacaggcccctggcaaaggacttgaatgggtcgccacaatcagcagcggcggcagctacacctactacctggatagcgtgaagggcagattcaccatcagccgggacagcagcaagaacaccctgtacctccagatgaactccctccaggccgaggactccgccatctactattgtgcccctaccaccgtggtgcctttcgcctattggggacagggaaccctggtcaccgttagctctacgcgtgagcagaaactgatctcggaagaggatctggggagcggcatccagaaccctgatcctgccgtgtaccagctgcgggatagcaagagcagcgacaagagcgtgtgtctgttcaccgacttcgacagccagaccaacgtgtcccagagcaaggactccgacgtgtacatcaccgataagaccgtgctggacatgcggagcatggacttcaagagcaactccgccgtggcctggtccaacaagtccgatttcgcctgcgccaacgccttcaacaacagcattatccccgaggacacattcttcccaagccccgagagcagctgcggtacccagagttttgggttgttggaccctaaattgtgctatctgttggacggaatcctgttcatttacggagtgatcctgaccgcattgttcctgaagagaggccggaagaagctgctgtacatcttcaagcagcctttcatgcggcccgtgcagaccacccaggaagaggacggctgctcctgccggttccccgaggaagaagaaggcggctgcgagctgcgggttaagttttccagatccgcagacgcacccgcttaccaacaagggcagaaccaactctacaatgaacttaatttggggcggagggaagagtacgacgttctggacaaaaggaggggacgagatcccgagatgggcggaaagcctcagcgaaggaagaatccgcaagaggggctttataacgaactccagaaagataaaatggcagaagcctatagtgagattgggatgaagggagaaaggaggaggggtaaaggtcacgatgggttgtaccaaggattgagcacagccactaaagatacctatgatgcgctccacatgcaggccctgccgccaaga

SEQ ID NO: 10265 - DNA, 2460 bp, Artificial Sequence
  Synthetic Polynucloetide
atggccttaccagtgaccgccttgctcctgccgctggccttgctgctccacgccgccaggccggacatccagatgacacagagccctagcagcctgtccgtgtccgtgggagacagagtgaccatcacatgcaaggccagccagaacgtgcggacagtggtggcttggtatcagcagaagcctggactggcccctaagacactgatctacctggcctccaacagacacaccggcgtgccaagcagattttctggcagcggctctggcaccgacttcaccttcacaatatccagcctccagcctgaggacattgccacctacttttgccagcagcactggtcttaccctctgacctttggacagggcaccaaggtggaagtgaagagactcgagcagagcttcggcctgctggaccccaagctgtgctacctgctggatggcatcctgttcatctacggcgtgatcctgaccgccctgttcctgagagtgaagttcagcagaagcgccgacgcccctgcctaccagcagggacagaaccaactgtacaacgagctgaacctgggcagacgggaagagtacgacgtgctggacaagcggagaggcagggaccctgagatgggcggaaagccccagcggagaaagaacccccaggaaggactgtataacgaactccagaaagacaagatggccgaagcctacagcgagatcggcatgaagggcgagcggagaagaggcaagggccacgatggcctgtaccagggcctgagcaccgccaccaaggacacctatgacgccctgcacatgcaggccctgcctccaagaagggccaagcgatctggatctggagcaacaaacttctcactactcaaacaagcaggtgacgtggaggagaatcccgggcctactagtatggactggatttggcgcatccttttccttgtcggcgctgctaccggcgcgcattccttcgaagaagttcagctgcttgaatctggcggcggactggttcaacctggcggatctctgagactgagctgtgccgcctctggcttcgccttcagcacctacgatatgagctgggtccgacaggcccctggcaaaggacttgaatgggtcgccacaatcagcagcggcggcagctacacctactacctggatagcgtgaagggcagattcaccatcagccgggacagcagcaagaacaccctgtacctccagatgaactccctccaggccgaggactccgccatctactattgtgcccctaccaccgtggtgcctttcgcctattggggacagggaaccctggtcaccgttagctctacgcgtcagagttttgggttgttggaccctaaattgtgctatctgttggacggaatcctgttcatttacggagtgatcctgaccgcattgttcctgcgggttaagttttccagatccgcagacgcacccgcttaccaacaagggcagaaccaactctacaatgaacttaatttggggcggagggaagagtacgacgttctggacaaaaggaggggacgagatcccgagatgggcggaaagcctcagcgaaggaagaatccgcaagaggggctttataacgaactccagaaagataaaatggcagaagcctatagtgagattgggatgaagggagaaaggaggaggggtaaaggtcacgatgggttgtaccaaggattgagcacagccactaaagatacctatgatgcgctccacatgcaggccctgccgccaagacgcgccaagagaagcggatctggcgtgaagcagaccctgaatttcgacctgctgaagctggctggcgacgtggaatccaacccaggcccttctagaggccatatgaccgagtacaagcccacggtgcgcctcgccacccgcgacgacgtccccagggccgtacgcaccctcgccgccgcgttcgccgactaccccgccacgcgccacaccgtcgatccggaccgccacatcgagcgggtcaccgagctgcaagaactcttcctcacgcgcgtcgggctcgacatcggcaaggtgtgggtcgcggacgacggcgccgcggtggcggtctggaccacgccggagagcgtcgaagcgggggcggtgttcgccgagatcggcccgcgcatggccgagttgagcggttcccggctggccgcgcagcaacagatggaaggcctcctggcgccgcaccggcccaaggagcccgcgtggttcctggccaccgtcggcgtctcgcccgaccaccagggcaagggtctgggcagcgccgtcgtgctccccggagtggaggcggccgagcgcgccggggtgcccgccttcctggagacctccgcgccccgcaacctccccttctacgagcggctcggcttcaccgtcaccgccgacgtcgaggtgcccgaaggaccgcgcacctggtgcatgacccgcaagcccggtgcctga

SEQ ID NO: 10266 - DNA, 1932 bp, Artificial Sequence
  Synthetic Polynucloetide
atggccttaccagtgaccgccttgctcctgccgctggccttgctgctccacgccgccaggccggacatccagatgacacagagccctagcagcctgtccgtgtccgtgggagacagagtgaccatcacatgcaaggccagccagaacgtgcggacagtggtggcttggtatcagcagaagcctggactggcccctaagacactgatctacctggcctccaacagacacaccggcgtgccaagcagattttctggcagcggctctggcaccgacttcaccttcacaatatccagcctccagcctgaggacattgccacctacttttgccagcagcactggtcttaccctctgacctttggacagggcaccaaggtggaagtgaagagactcgagggacagcctaaggccaatcctaccgtgacactgttccctccaagcagcgaagaactccaggccaacaaggccacacttgtgtgcctgatctccgacttctaccctggggctgtgacagtggcttggaaggccgatggatctcctgtgaaagccggcgtggaaaccaccaagccatccaagcagagcaacaacaaatacgccgccagctcctacctgagcctgacacctgagcagtggaagtcccacagatcctacagctgccaagtgacccacgaaggcagcaccgtggaaaagacagtggcccctacagagtgcagccccatcaagaccgatgtgattacaatggaccccaaggacaactgctccaaggacgccaacgataccctgctgctccagctgaccaacaccagcgcctactacatgtacttgttgctgctgctgaagtccgtggtgtacttcgccatcatcacatgctgcctgctgcggagaaccgccttctgctgcaacggcgagaagtctagggccaagcgatctggatctggagcaacaaacttctcactactcaaacaagcaggtgacgtggaggagaatcccgggcctactagtatggactggatttggcgcatccttttccttgtcggcgctgctaccggcgcgcattccttcgaagaagttcagctgcttgaatctggcggcggactggttcaacctggcggatctctgagactgagctgtgccgcctctggcttcgccttcagcacctacgatatgagctgggtccgacaggcccctggcaaaggacttgaatgggtcgccacaatcagcagcggcggcagctacacctactacctggatagcgtgaagggcagattcaccatcagccgggacagcagcaagaacaccctgtacctccagatgaactccctccaggccgaggactccgccatctactattgtgcccctaccaccgtggtgcctttcgcctattggggacagggaaccctggtcaccgttagctctacgcgtgcctctacaaagggaccctccgtgtttcctctggctcccagcagcaagtctacaagcggaggaacagccgctctgggctgcctggtcaaggattactttcccgagcctgtgaccgtgtcctggaatagcggagcactgacaagcggcgtgcacacctttccagccgtgctgcaaagcagcggcctgtactctctgagcagcgtggtcacagtgcctagctctagcctgggcacccagacctacatctgcaatgtgaaccacaagcctagcaacaccaaggtggacaagagagtggaacccaagagctgtgaagtgaaaaccgactccaccgaccacgtgaagcccaaagagacagagaacaccaagcagcccagcaagagctgccacaagcccaaggccatcgtgcacaccgagaaagtgaacatgatgagcctgaccgtgctgggcctgcggatgctgttcgccaaaaccgtggccgtgaacttcctgctgaccgccaagctgttcttcctc

SEQ ID NO: 10267 - DNA, 1866 bp, Artificial Sequence
  Synthetic Polynucloetide
atggccttaccagtgaccgccttgctcctgccgctggccttgctgctccacgccgccaggccggacatccagatgacacagagccctagcagcctgtccgtgtccgtgggagacagagtgaccatcacatgcaaggccagccagaacgtgcggacagtggtggcttggtatcagcagaagcctggactggcccctaagacactgatctacctggcctccaacagacacaccggcgtgccaagcagattttctggcagcggctctggcaccgacttcaccttcacaatatccagcctccagcctgaggacattgccacctacttttgccagcagcactggtcttaccctctgacctttggacagggcaccaaggtggaagtgaagagactcgagggacagcctaaggccaatcctaccgtgacactgttccctccaagcagcgaagaactccaggccaacaaggccacacttgtgtgcctgatctccgacttctaccctggggctgtgacagtggcttggaaggccgatggatctcctgtgaaagccggcgtggaaaccaccaagccatccaagcagagcaacaacaaatacgccgccagctcctacctgagcctgacacctgagcagtggaagtcccacagatcctacagctgccaagtgacccacgaaggcagcaccgtggaaaagacagtggcccctacagagtgcagcggcagagccgattgcggcatcaccagcgccagctaccaccagggcgtgctgagcgccaccatcctgtacgagatcctgctgggcaaggccaccctgtacgccgtgctggtgtctgccctggtgctgatggctatggtcaagcggaaggacagccggggaagggccaagcgatctggatctggagcaacaaacttctcactactcaaacaagcaggtgacgtggaggagaatcccgggcctactagtatggactggatttggcgcatccttttccttgtcggcgctgctaccggcgcgcattccttcgaagaagttcagctgcttgaatctggcggcggactggttcaacctggcggatctctgagactgagctgtgccgcctctggcttcgccttcagcacctacgatatgagctgggtccgacaggcccctggcaaaggacttgaatgggtcgccacaatcagcagcggcggcagctacacctactacctggatagcgtgaagggcagattcaccatcagccgggacagcagcaagaacaccctgtacctccagatgaactccctccaggccgaggactccgccatctactattgtgcccctaccaccgtggtgcctttcgcctattggggacagggaaccctggtcaccgttagctctacgcgtgcctctacaaagggaccctccgtgtttcctctggctcccagcagcaagtctacaagcggaggaacagccgctctgggctgcctggtcaaggattactttcccgagcctgtgaccgtgtcctggaatagcggagcactgacaagcggcgtgcacacctttccagccgtgctgcaaagcagcggcctgtactctctgagcagcgtggtcacagtgcctagctctagcctgggcacccagacctacatctgcaatgtgaaccacaagcctagcaacaccaaggtggacaagagagtggaacccaagagctgtatccccgaggacacattcttcccaagcagcgacgtgccctgcgacgtgaagctggtggaaaagagcttcgagacagacaccaacctgaacttccagaacctgagcgtgatcggcttcagaatcctgctgctgaaagtggccggctttaacctgctgatgaccctgcggctgtggtccagc

SEQ ID NO: 10268 - DNA, 1866 bp, Artificial Sequence
  Synthetic Polynucloetide
atggccttaccagtgaccgccttgctcctgccgctggccttgctgctccacgccgccaggccggacatccagatgacacagagccctagcagcctgtccgtgtccgtgggagacagagtgaccatcacatgcaaggccagccagaacgtgcggacagtggtggcttggtatcagcagaagcctggactggcccctaagacactgatctacctggcctccaacagacacaccggcgtgccaagcagattttctggcagcggctctggcaccgacttcaccttcacaatatccagcctccagcctgaggacattgccacctacttttgccagcagcactggtcttaccctctgacctttggacagggcaccaaggtggaagtgaagagactcgagggacagcctaaggccaatcctaccgtgacactgttccctccaagcagcgaagaactccaggccaacaaggccacacttgtgtgcctgatctccgacttctaccctggggctgtgacagtggcttggaaggccgatggatctcctgtgaaagccggcgtggaaaccaccaagccatccaagcagagcaacaacaaatacgccgccagctcctacctgagcctgacacctgagcagtggaagtcccacagatcctacagctgccaagtgacccacgaaggcagcaccgtggaaaagacagtggcccctacagagtgcagcggcagagccgattgcggctttaccagcgagagctaccagcagggcgtgctgagcgccaccatcctgtacgagatcctgctgggcaaggccaccctgtacgccgtgctggtgtctgccctggtgctgatggctatggtcaagcggaaggacagccggggaagggccaagcgatctggatctggagcaacaaacttctcactactcaaacaagcaggtgacgtggaggagaatcccgggcctactagtatggactggatttggcgcatccttttccttgtcggcgctgctaccggcgcgcattccttcgaagaagttcagctgcttgaatctggcggcggactggttcaacctggcggatctctgagactgagctgtgccgcctctggcttcgccttcagcacctacgatatgagctgggtccgacaggcccctggcaaaggacttgaatgggtcgccacaatcagcagcggcggcagctacacctactacctggatagcgtgaagggcagattcaccatcagccgggacagcagcaagaacaccctgtacctccagatgaactccctccaggccgaggactccgccatctactattgtgcccctaccaccgtggtgcctttcgcctattggggacagggaaccctggtcaccgttagctctacgcgtgcctctacaaagggaccctccgtgtttcctctggctcccagcagcaagtctacaagcggaggaacagccgctctgggctgcctggtcaaggattactttcccgagcctgtgaccgtgtcctggaatagcggagcactgacaagcggcgtgcacacctttccagccgtgctgcaaagcagcggcctgtactctctgagcagcgtggtcacagtgcctagctctagcctgggcacccagacctacatctgcaatgtgaaccacaagcctagcaacaccaaggtggacaagagagtggaacccaagagctgtatccccgaggacacattcttcccaagccccgagagcagctgcgacgtgaagctggtggaaaagagcttcgagacagacaccaacctgaacttccagaacctgagcgtgatcggcttcagaatcctgctgctgaaagtggccggctttaacctgctgatgaccctgcggctgtggtccagc

SEQ ID NO: 10269 - DNA, 1344 bp, Artificial Sequence
  Synthetic Polynucloetide
atggccttaccagtgaccgccttgctcctgccgctggccttgctgctccacgccgccaggccggacatccagatgacacagagccctagcagcctgtccgtgtccgtgggagacagagtgaccatcacatgcaaggccagccagaacgtgcggacagtggtggcttggtatcagcagaagcctggactggcccctaagacactgatctacctggcctccaacagacacaccggcgtgccaagcagattttctggcagcggctctggcaccgacttcaccttcacaatatccagcctccagcctgaggacattgccacctacttttgccagcagcactggtcttaccctctgacctttggacagggcaccaaggtggaagtgaagagaggcggaggcggaagtggaggcggaggatctggcggcggaggctctgaagttcagctgcttgaatctggcggcggactggttcaacctggcggatctctgagactgagctgtgccgcctctggcttcgccttcagcacctacgatatgagctgggtccgacaggcccctggcaaaggacttgaatgggtcgccacaatcagcagcggcggcagctacacctactacctggatagcgtgaagggcagattcaccatcagccgggacagcagcaagaacaccctgtacctccagatgaactccctccaggccgaggactccgccatctactattgtgcccctaccaccgtggtgcctttcgcctattggggacagggaaccctggtcaccgttagctctacgcgtgacggtaacgaggagatgggaggaatcactcaaaccccttacaaagtctcaatttcaggaacaactgttatccttacatgtccccagtatcctggcagcgagatcctttggcagcataacgacaagaatatagggggagatgaagacgataagaatatcggatctgacgaggatcacttgagcctgaaagagttctccgagcttgaacaaagcggatattatgtgtgctatccgcgcgggtcaaagccggaagacgctaacttttacctttatctccgagccagagtgtgcgaaaattgcatggaaatggacgttatgtccgttgctacaatagttatcgtagatatatgcatcacgggtggactgcttctgctggtttattattggtccaagaatagaaaggccaaagctaaacccgtgaccagaggcgctggcgcaggcggaaggcaaaggggacaaaacaaagaacggccaccaccagtgccaaatccagattatgagcctattcggaaaggacagagggacctgtactctggcctgaatcagagaagaatc

SEQ ID NO: 10270 - DNA, 1239 bp, Artificial Sequence
  Synthetic Polynucloetide
atggccttaccagtgaccgccttgctcctgccgctggccttgctgctccacgccgccaggccggacatccagatgacacagagccctagcagcctgtccgtgtccgtgggagacagagtgaccatcacatgcaaggccagccagaacgtgcggacagtggtggcttggtatcagcagaagcctggactggcccctaagacactgatctacctggcctccaacagacacaccggcgtgccaagcagattttctggcagcggctctggcaccgacttcaccttcacaatatccagcctccagcctgaggacattgccacctacttttgccagcagcactggtcttaccctctgacctttggacagggcaccaaggtggaagtgaagagaggcggaggcggaagtggaggcggaggatctggcggcggaggctctgaagttcagctgcttgaatctggcggcggactggttcaacctggcggatctctgagactgagctgtgccgcctctggcttcgccttcagcacctacgatatgagctgggtccgacaggcccctggcaaaggacttgaatgggtcgccacaatcagcagcggcggcagctacacctactacctggatagcgtgaagggcagattcaccatcagccgggacagcagcaagaacaccctgtacctccagatgaactccctccaggccgaggactccgccatctactattgtgcccctaccaccgtggtgcctttcgcctattggggacagggaaccctggtcaccgttagctctacgcgtttcaagatccccatcgaggaactggaagatcgggtgttcgtgaactgcaacacctctatcacctgggtggaaggcaccgtgggaacactgctgagcgacatcaccagactggacctcggcaagcggattctggaccctcggggcatctacagatgcaacggcaccgacatctacaaggacaaagaaagcaccgtgcaggtccactacagaatgtgccagtcctgcgtggaactggaccctgctacagtggccggcatcatcgtgaccgatgtgatcgctactctgctgctggctctgggagtgttctgcttcgccggacacgaaacaggcagactgtctggcgctgccgatacacaggccctgctgagaaacgaccaagtgtatcagcccctgcgcgacagagatgatgcccagtattctcacctcggcggcaactgggctagaaacaag

SEQ ID NO: 10271 - DNA, 1269 bp, Artificial Sequence
  Synthetic Polynucloetide
atggccttaccagtgaccgccttgctcctgccgctggccttgctgctccacgccgccaggccggacatccagatgacacagagccctagcagcctgtccgtgtccgtgggagacagagtgaccatcacatgcaaggccagccagaacgtgcggacagtggtggcttggtatcagcagaagcctggactggcccctaagacactgatctacctggcctccaacagacacaccggcgtgccaagcagattttctggcagcggctctggcaccgacttcaccttcacaatatccagcctccagcctgaggacattgccacctacttttgccagcagcactggtcttaccctctgacctttggacagggcaccaaggtggaagtgaagagaggcggaggcggaagtggaggcggaggatctggcggcggaggctctgaagttcagctgcttgaatctggcggcggactggttcaacctggcggatctctgagactgagctgtgccgcctctggcttcgccttcagcacctacgatatgagctgggtccgacaggcccctggcaaaggacttgaatgggtcgccacaatcagcagcggcggcagctacacctactacctggatagcgtgaagggcagattcaccatcagccgggacagcagcaagaacaccctgtacctccagatgaactccctccaggccgaggactccgccatctactattgtgcccctaccaccgtggtgcctttcgcctattggggacagggaaccctggtcaccgttagctctacgcgtcagagcatcaagggcaaccacctggtcaaggtgtacgactaccaagaggacggcagcgtgctgctgacatgtgatgccgaggccaagaacatcacctggtttaaggacggcaagatgatcggcttcctgaccgaggacaagaagaagtggaacctgggcagcaacgctaaggaccccagaggcatgtatcagtgcaagggcagccagaacaagagcaagcccctccaggtgtactaccggatgtgccagaactgcatcgagctgaacgccgctaccatcagcggctttctgttcgccgagatcgtgtccatcttcgtgctggccgtgggcgtgtactttatcgctggacaggatggcgtgcggcagagcagagcttccgataagcaaaccctgctgcctaacgaccagctgtaccagcctctgaaggacagagaggacgaccagtacagccacctccagggcaatcagctgagaagaaac

SEQ ID NO: 10272 - DNA, 1218 bp, Artificial Sequence
  Synthetic Polynucloetide
atggccttaccagtgaccgccttgctcctgccgctggccttgctgctccacgccgccaggccggacatccagatgacacagagccctagcagcctgtccgtgtccgtgggagacagagtgaccatcacatgcaaggccagccagaacgtgcggacagtggtggcttggtatcagcagaagcctggactggcccctaagacactgatctacctggcctccaacagacacaccggcgtgccaagcagattttctggcagcggctctggcaccgacttcaccttcacaatatccagcctccagcctgaggacattgccacctacttttgccagcagcactggtcttaccctctgacctttggacagggcaccaaggtggaagtgaagagaggcggaggcggaagtggaggcggaggatctggcggcggaggctctgaagttcagctgcttgaatctggcggcggactggttcaacctggcggatctctgagactgagctgtgccgcctctggcttcgccttcagcacctacgatatgagctgggtccgacaggcccctggcaaaggacttgaatgggtcgccacaatcagcagcggcggcagctacacctactacctggatagcgtgaagggcagattcaccatcagccgggacagcagcaagaacaccctgtacctccagatgaactccctccaggccgaggactccgccatctactattgtgcccctaccaccgtggtgcctttcgcctattggggacagggaaccctggtcaccgttagctctacgcgtcagagttttgggttgttggaccctaaattgtgctatctgttggacggaatcctgttcatttacggagtgatcctgaccgcattgttcctgcgggttaagttttccagatccgcagacgcacccgcttaccaacaagggcagaaccaactctacaatgaacttaatttggggcggagggaagagtacgacgttctggacaaaaggaggggacgagatcccgagatgggcggaaagcctcagcgaaggaagaatccgcaagaggggctttataacgaactccagaaagataaaatggcagaagcctatagtgagattgggatgaagggagaaaggaggaggggtaaaggtcacgatgggttgtaccaaggattgagcacagccactaaagatacctatgatgcgctccacatgcaggccctgccgccaaga

SEQ ID NO: 10273 - DNA, 1344 bp, Artificial Sequence
  Synthetic Polynucloetide
atggccttaccagtgaccgccttgctcctgccgctggccttgctgctccacgccgccaggccggaagttcagctgcttgaatctggcggcggactggttcaacctggcggatctctgagactgagctgtgccgcctctggcttcgccttcagcacctacgatatgagctgggtccgacaggcccctggcaaaggacttgaatgggtcgccacaatcagcagcggcggcagctacacctactacctggatagcgtgaagggcagattcaccatcagccgggacagcagcaagaacaccctgtacctccagatgaactccctccaggccgaggactccgccatctactattgtgcccctaccaccgtggtgcctttcgcctattggggacagggaaccctggtcaccgttagctctggcggaggcggaagtggaggcggaggatctggcggcggaggctctgacatccagatgacacagagccctagcagcctgtccgtgtccgtgggagacagagtgaccatcacatgcaaggccagccagaacgtgcggacagtggtggcttggtatcagcagaagcctggactggcccctaagacactgatctacctggcctccaacagacacaccggcgtgccaagcagattttctggcagcggctctggcaccgacttcaccttcacaatatccagcctccagcctgaggacattgccacctacttttgccagcagcactggtcttaccctctgacctttggacagggcaccaaggtggaagtgaagagaacgcgtgacggtaacgaggagatgggaggaatcactcaaaccccttacaaagtctcaatttcaggaacaactgttatccttacatgtccccagtatcctggcagcgagatcctttggcagcataacgacaagaatatagggggagatgaagacgataagaatatcggatctgacgaggatcacttgagcctgaaagagttctccgagcttgaacaaagcggatattatgtgtgctatccgcgcgggtcaaagccggaagacgctaacttttacctttatctccgagccagagtgtgcgaaaattgcatggaaatggacgttatgtccgttgctacaatagttatcgtagatatatgcatcacgggtggactgcttctgctggtttattattggtccaagaatagaaaggccaaagctaaacccgtgaccagaggcgctggcgcaggcggaaggcaaaggggacaaaacaaagaacggccaccaccagtgccaaatccagattatgagcctattcggaaaggacagagggacctgtactctggcctgaatcagagaagaatc

SEQ ID NO: 10274 - DNA, 1239 bp, Artificial Sequence
  Synthetic Polynucloetide
atggccttaccagtgaccgccttgctcctgccgctggccttgctgctccacgccgccaggccggaagttcagctgcttgaatctggcggcggactggttcaacctggcggatctctgagactgagctgtgccgcctctggcttcgccttcagcacctacgatatgagctgggtccgacaggcccctggcaaaggacttgaatgggtcgccacaatcagcagcggcggcagctacacctactacctggatagcgtgaagggcagattcaccatcagccgggacagcagcaagaacaccctgtacctccagatgaactccctccaggccgaggactccgccatctactattgtgcccctaccaccgtggtgcctttcgcctattggggacagggaaccctggtcaccgttagctctggcggaggcggaagtggaggcggaggatctggcggcggaggctctgacatccagatgacacagagccctagcagcctgtccgtgtccgtgggagacagagtgaccatcacatgcaaggccagccagaacgtgcggacagtggtggcttggtatcagcagaagcctggactggcccctaagacactgatctacctggcctccaacagacacaccggcgtgccaagcagattttctggcagcggctctggcaccgacttcaccttcacaatatccagcctccagcctgaggacattgccacctacttttgccagcagcactggtcttaccctctgacctttggacagggcaccaaggtggaagtgaagagaacgcgtttcaagatccccatcgaggaactggaagatcgggtgttcgtgaactgcaacacctctatcacctgggtggaaggcaccgtgggaacactgctgagcgacatcaccagactggacctcggcaagcggattctggaccctcggggcatctacagatgcaacggcaccgacatctacaaggacaaagaaagcaccgtgcaggtccactacagaatgtgccagtcctgcgtggaactggaccctgctacagtggccggcatcatcgtgaccgatgtgatcgctactctgctgctggctctgggagtgttctgcttcgccggacacgaaacaggcagactgtctggcgctgccgatacacaggccctgctgagaaacgaccaagtgtatcagcccctgcgcgacagagatgatgcccagtattctcacctcggcggcaactgggctagaaacaag

SEQ ID NO: 10275 - DNA, 1269 bp, Artificial Sequence
  Synthetic Polynucloetide
atggccttaccagtgaccgccttgctcctgccgctggccttgctgctccacgccgccaggccggaagttcagctgcttgaatctggcggcggactggttcaacctggcggatctctgagactgagctgtgccgcctctggcttcgccttcagcacctacgatatgagctgggtccgacaggcccctggcaaaggacttgaatgggtcgccacaatcagcagcggcggcagctacacctactacctggatagcgtgaagggcagattcaccatcagccgggacagcagcaagaacaccctgtacctccagatgaactccctccaggccgaggactccgccatctactattgtgcccctaccaccgtggtgcctttcgcctattggggacagggaaccctggtcaccgttagctctggcggaggcggaagtggaggcggaggatctggcggcggaggctctgacatccagatgacacagagccctagcagcctgtccgtgtccgtgggagacagagtgaccatcacatgcaaggccagccagaacgtgcggacagtggtggcttggtatcagcagaagcctggactggcccctaagacactgatctacctggcctccaacagacacaccggcgtgccaagcagattttctggcagcggctctggcaccgacttcaccttcacaatatccagcctccagcctgaggacattgccacctacttttgccagcagcactggtcttaccctctgacctttggacagggcaccaaggtggaagtgaagagaacgcgtcagagcatcaagggcaaccacctggtcaaggtgtacgactaccaagaggacggcagcgtgctgctgacatgtgatgccgaggccaagaacatcacctggtttaaggacggcaagatgatcggcttcctgaccgaggacaagaagaagtggaacctgggcagcaacgctaaggaccccagaggcatgtatcagtgcaagggcagccagaacaagagcaagcccctccaggtgtactaccggatgtgccagaactgcatcgagctgaacgccgctaccatcagcggctttctgttcgccgagatcgtgtccatcttcgtgctggccgtgggcgtgtactttatcgctggacaggatggcgtgcggcagagcagagcttccgataagcaaaccctgctgcctaacgaccagctgtaccagcctctgaaggacagagaggacgaccagtacagccacctccagggcaatcagctgagaagaaac

SEQ ID NO: 10276 - DNA, 1218 bp, Artificial Sequence
  Synthetic Polynucloetide
atggccttaccagtgaccgccttgctcctgccgctggccttgctgctccacgccgccaggccggaagttcagctgcttgaatctggcggcggactggttcaacctggcggatctctgagactgagctgtgccgcctctggcttcgccttcagcacctacgatatgagctgggtccgacaggcccctggcaaaggacttgaatgggtcgccacaatcagcagcggcggcagctacacctactacctggatagcgtgaagggcagattcaccatcagccgggacagcagcaagaacaccctgtacctccagatgaactccctccaggccgaggactccgccatctactattgtgcccctaccaccgtggtgcctttcgcctattggggacagggaaccctggtcaccgttagctctggcggaggcggaagtggaggcggaggatctggcggcggaggctctgacatccagatgacacagagccctagcagcctgtccgtgtccgtgggagacagagtgaccatcacatgcaaggccagccagaacgtgcggacagtggtggcttggtatcagcagaagcctggactggcccctaagacactgatctacctggcctccaacagacacaccggcgtgccaagcagattttctggcagcggctctggcaccgacttcaccttcacaatatccagcctccagcctgaggacattgccacctacttttgccagcagcactggtcttaccctctgacctttggacagggcaccaaggtggaagtgaagagaacgcgtcagagttttgggttgttggaccctaaattgtgctatctgttggacggaatcctgttcatttacggagtgatcctgaccgcattgttcctgcgggttaagttttccagatccgcagacgcacccgcttaccaacaagggcagaaccaactctacaatgaacttaatttggggcggagggaagagtacgacgttctggacaaaaggaggggacgagatcccgagatgggcggaaagcctcagcgaaggaagaatccgcaagaggggctttataacgaactccagaaagataaaatggcagaagcctatagtgagattgggatgaagggagaaaggaggaggggtaaaggtcacgatgggttgtaccaaggattgagcacagccactaaagatacctatgatgcgctccacatgcaggccctgccgccaaga

SEQ ID NO: 10277 - DNA, 1920 bp, Artificial Sequence
  Synthetic Polynucloetide
atggccttaccagtgaccgccttgctcctgccgctggccttgctgctccacgccgccaggccggacatccagatgacacagagccctagcagcctgtccgtgtccgtgggagacagagtgaccatcacatgcaaggccagccagaacgtgcggacagtggtggcttggtatcagcagaagcctggactggcccctaagacactgatctacctggcctccaacagacacaccggcgtgccaagcagattttctggcagcggctctggcaccgacttcaccttcacaatatccagcctccagcctgaggacattgccacctacttttgccagcagcactggtcttaccctctgacctttggacagggcaccaaggtggaagtgaagagaggcggaggcggaagtggaggcggaggatctggcggcggaggctctgaagttcagctgcttgaatctggcggcggactggttcaacctggcggatctctgagactgagctgtgccgcctctggcttcgccttcagcacctacgatatgagctgggtccgacaggcccctggcaaaggacttgaatgggtcgccacaatcagcagcggcggcagctacacctactacctggatagcgtgaagggcagattcaccatcagccgggacagcagcaagaacaccctgtacctccagatgaactccctccaggccgaggactccgccatctactattgtgcccctaccaccgtggtgcctttcgcctattggggacagggaaccctggtcaccgttagctctacgcgtgggagcggcatccagaaccctgatcctgccgtgtaccagctgcgggatagcaagagcagcgacaagagcgtgtgtctgttcaccgacttcgacagccagaccaacgtgtcccagagcaaggactccgacgtgtacatcaccgataagaccgtgctggacatgcggagcatggacttcaagagcaactccgccgtggcctggtccaacaagtccgatttcgcctgcgccaacgccttcaacaacagcattatccccgaggacacattcttcccaagccccgagagcagctgcgacgtgaagctggtggaaaagagcttcgagacagacaccaacctgaacttccagaacctgagcgtgatcggcttcagaatcctgctgctgaaagtggccggctttaacctgctgatgaccctgcggctgtggtccagccgcgccaagagaagcggatctggcgtgaagcagaccctgaatttcgacctgctgaagctggctggcgacgtggaatccaacccaggcccttctagaggccatatgaccgagtacaagcccacggtgcgcctcgccacccgcgacgacgtccccagggccgtacgcaccctcgccgccgcgttcgccgactaccccgccacgcgccacaccgtcgatccggaccgccacatcgagcgggtcaccgagctgcaagaactcttcctcacgcgcgtcgggctcgacatcggcaaggtgtgggtcgcggacgacggcgccgcggtggcggtctggaccacgccggagagcgtcgaagcgggggcggtgttcgccgagatcggcccgcgcatggccgagttgagcggttcccggctggccgcgcagcaacagatggaaggcctcctggcgccgcaccggcccaaggagcccgcgtggttcctggccaccgtcggcgtctcgcccgaccaccagggcaagggtctgggcagcgccgtcgtgctccccggagtggaggcggccgagcgcgccggggtgcccgccttcctggagacctccgcgccccgcaacctccccttctacgagcggctcggcttcaccgtcaccgccgacgtcgaggtgcccgaaggaccgcgcacctggtgcatgacccgcaagcccggtgcctga

SEQ ID NO: 10278 - DNA, 2016 bp, Artificial Sequence
  Synthetic Polynucloetide
atggccttaccagtgaccgccttgctcctgccgctggccttgctgctccacgccgccaggccggacatccagatgacacagagccctagcagcctgtccgtgtccgtgggagacagagtgaccatcacatgcaaggccagccagaacgtgcggacagtggtggcttggtatcagcagaagcctggactggcccctaagacactgatctacctggcctccaacagacacaccggcgtgccaagcagattttctggcagcggctctggcaccgacttcaccttcacaatatccagcctccagcctgaggacattgccacctacttttgccagcagcactggtcttaccctctgacctttggacagggcaccaaggtggaagtgaagagaggcggaggcggaagtggaggcggaggatctggcggcggaggctctgaagttcagctgcttgaatctggcggcggactggttcaacctggcggatctctgagactgagctgtgccgcctctggcttcgccttcagcacctacgatatgagctgggtccgacaggcccctggcaaaggacttgaatgggtcgccacaatcagcagcggcggcagctacacctactacctggatagcgtgaagggcagattcaccatcagccgggacagcagcaagaacaccctgtacctccagatgaactccctccaggccgaggactccgccatctactattgtgcccctaccaccgtggtgcctttcgcctattggggacagggaaccctggtcaccgttagctctctcgaggacctgaagaacgtgttcccacctgaggtggccgtgttcgagcctagcgaggccgagatcagccacacccagaaagccaccctcgtgtgcctggctaccggcttctaccccgaccatgtggaactgtcttggtgggtcaacggcaaagaggtgcacagcggcgtgtctaccgacccccagccactgaaagaacagcccgccctgaacgacagccggtactgcctgagcagcagactgagagtgtccgccaccttctggcagaacccccggaaccacttcagatgccaggtgcagttctacggcctgagcgagaacgacgagtggacccaggacagagccaagcccgtgacccagatcgtgtctgccgaagcctggggcagagccgattgcggctttaccagcgagagctaccagcagggcgtgctgagcgccaccatcctgtacgagatcctgctgggcaaggccaccctgtacgccgtgctggtgtctgccctggtgctgatggctatggtcaagcggaaggacagccggggaagggccaagcgatctggatctggagcaacaaacttctcactactcaaacaagcaggtgacgtggaggagaatcccgggcctactagaggccatatgaccgagtacaagcccacggtgcgcctcgccacccgcgacgacgtccccagggccgtacgcaccctcgccgccgcgttcgccgactaccccgccacgcgccacaccgtcgatccggaccgccacatcgagcgggtcaccgagctgcaagaactcttcctcacgcgcgtcgggctcgacatcggcaaggtgtgggtcgcggacgacggcgccgcggtggcggtctggaccacgccggagagcgtcgaagcgggggcggtgttcgccgagatcggcccgcgcatggccgagttgagcggttcccggctggccgcgcagcaacagatggaaggcctcctggcgccgcaccggcccaaggagcccgcgtggttcctggccaccgtcggcgtctcgcccgaccaccagggcaagggtctgggcagcgccgtcgtgctccccggagtggaggcggccgagcgcgccggggtgcccgccttcctggagacctccgcgccccgcaacctccccttctacgagcggctcggcttcaccgtcaccgccgacgtcgaggtgcccgaaggaccgcgcacctggtgcatgacccgcaagcccggtgcctga

SEQ ID NO: 10279 - DNA, 2166 bp, Artificial Sequence
  Synthetic Polynucloetide
atggccttaccagtgaccgccttgctcctgccgctggccttgctgctccacgccgccaggccggacatccagatgacacagagccctagcagcctgtccgtgtccgtgggagacagagtgaccatcacatgcaaggccagccagaacgtgcggacagtggtggcttggtatcagcagaagcctggactggcccctaagacactgatctacctggcctccaacagacacaccggcgtgccaagcagattttctggcagcggctctggcaccgacttcaccttcacaatatccagcctccagcctgaggacattgccacctacttttgccagcagcactggtcttaccctctgacctttggacagggcaccaaggtggaagtgaagagaggcggaggcggaagtggaggcggaggatctggcggcggaggctctgaagttcagctgcttgaatctggcggcggactggttcaacctggcggatctctgagactgagctgtgccgcctctggcttcgccttcagcacctacgatatgagctgggtccgacaggcccctggcaaaggacttgaatgggtcgccacaatcagcagcggcggcagctacacctactacctggatagcgtgaagggcagattcaccatcagccgggacagcagcaagaacaccctgtacctccagatgaactccctccaggccgaggactccgccatctactattgtgcccctaccaccgtggtgcctttcgcctattggggacagggaaccctggtcaccgttagctctacgcgtgagcagaaactgatctcggaagaggatctggggagcggcaccccattcccttctctggcccctcccatcatgctgctggtggacggcaagcagcagatggtggtcgtgtgcctggtgctggatgtggccccacctggactggacagccccatctggtttagcgccggcaatggctctgccctggacgcctttacctacggcccaagccctgccaccgatggcacctggacaaatctggcccacctgagcctgcccagcgaggaactggcttcttgggagcctctcgtgtgccacacaggacctggcgctgagggacacagcagatccacccagcctatgcacctgtctggcgaggccagcaccgccagaacctgtcctcaggaacctctgagaggcacccctggcggagcactgtggctgggagtgctgagactgctgctgttcaagctgctgctgtttgacctgctgctgacctgctcctgtctgtgcgatcctgccggccctctgccttctcctgccaccaccacaagactgagagccctgggcagccacagactgcaccctgccacagagacaggcggcagagaggccacaagcagccctagaccccagcccagagacagaagatggggcgataccccccctggcagaaagcctggatctccagtccgcgccaagagaagcggatctggcgtgaagcagaccctgaatttcgacctgctgaagctggctggcgacgtggaatccaacccaggcccttctagatctagaggccatatgaccgagtacaagcccacggtgcgcctcgccacccgcgacgacgtccccagggccgtacgcaccctcgccgccgcgttcgccgactaccccgccacgcgccacaccgtcgatccggaccgccacatcgagcgggtcaccgagctgcaagaactcttcctcacgcgcgtcgggctcgacatcggcaaggtgtgggtcgcggacgacggcgccgcggtggcggtctggaccacgccggagagcgtcgaagcgggggcggtgttcgccgagatcggcccgcgcatggccgagttgagcggttcccggctggccgcgcagcaacagatggaaggcctcctggcgccgcaccggcccaaggagcccgcgtggttcctggccaccgtcggcgtctcgcccgaccaccagggcaagggtctgggcagcgccgtcgtgctccccggagtggaggcggccgagcgcgccggggtgcccgccttcctggagacctccgcgccccgcaacctccccttctacgagcggctcggcttcaccgtcaccgccgacgtcgaggtgcccgaaggaccgcgcacctggtgcatgacccgcaagcccggtgcctga

SEQ ID NO: 10280 - DNA, 1620 bp, Artificial Sequence
  Synthetic Polynucloetide
atggccttaccagtgaccgccttgctcctgccgctggccttgctgctccacgccgccaggccggacatccagatgacacagagccctagcagcctgtccgtgtccgtgggagacagagtgaccatcacatgcaaggccagccagaacgtgcggacagtggtggcttggtatcagcagaagcctggactggcccctaagacactgatctacctggcctccaacagacacaccggcgtgccaagcagattttctggcagcggctctggcaccgacttcaccttcacaatatccagcctccagcctgaggacattgccacctacttttgccagcagcactggtcttaccctctgacctttggacagggcaccaaggtggaagtgaagagactcgaggacctgaagaacgtgttcccacctgaggtggccgtgttcgagcctagcgaggccgagatcagccacacccagaaagccaccctcgtgtgcctggctaccggcttctaccccgaccatgtggaactgtcttggtgggtcaacggcaaagaggtgcacagcggcgtgtctaccgacccccagccactgaaagaacagcccgccctgaacgacagccggtactgcctgagcagcagactgagagtgtccgccaccttctggcagaacccccggaaccacttcagatgccaggtgcagttctacggcctgagcgagaacgacgagtggacccaggacagagccaagcccgtgacccagatcgtgtctgccgaagcctggggcagagccgattgcggctttaccagcgagagctaccagcagggcgtgctgagcgccaccatcctgtacgagatcctgctgggcaaggccaccctgtacgccgtgctggtgtctgccctggtgctgatggctatggtcaagcggaaggacagccggggaagggccaagcgatctggatctggagcaacaaacttctcactactcaaacaagcaggtgacgtggaggagaatcccgggcctactagaggccatatgaccgagtacaagcccacggtgcgcctcgccacccgcgacgacgtccccagggccgtacgcaccctcgccgccgcgttcgccgactaccccgccacgcgccacaccgtcgatccggaccgccacatcgagcgggtcaccgagctgcaagaactcttcctcacgcgcgtcgggctcgacatcggcaaggtgtgggtcgcggacgacggcgccgcggtggcggtctggaccacgccggagagcgtcgaagcgggggcggtgttcgccgagatcggcccgcgcatggccgagttgagcggttcccggctggccgcgcagcaacagatggaaggcctcctggcgccgcaccggcccaaggagcccgcgtggttcctggccaccgtcggcgtctcgcccgaccaccagggcaagggtctgggcagcgccgtcgtgctccccggagtggaggcggccgagcgcgccggggtgcccgccttcctggagacctccgcgccccgcaacctccccttctacgagcggctcggcttcaccgtcaccgccgacgtcgaggtgcccgaaggaccgcgcacctggtgcatgacccgcaagcccggtgcctga

SEQ ID NO: 10281 - DNA, 927 bp, Artificial Sequence
  Synthetic Polynucloetide
atggccttaccagtgaccgccttgctcctgccgctggccttgctgctccacgccgccaggccggacatccagatgacacagagccctagcagcctgtccgtgtccgtgggagacagagtgaccatcacatgcaaggccagccagaacgtgcggacagtggtggcttggtatcagcagaagcctggactggcccctaagacactgatctacctggcctccaacagacacaccggcgtgccaagcagattttctggcagcggctctggcaccgacttcaccttcacaatatccagcctccagcctgaggacattgccacctacttttgccagcagcactggtcttaccctctgacctttggacagggcaccaaggtggaagtgaagagactcgaggacctgaagaacgtgttcccacctgaggtggccgtgttcgagcctagcgaggccgagatcagccacacccagaaagccaccctcgtgtgcctggctaccggcttctaccccgaccatgtggaactgtcttggtgggtcaacggcaaagaggtgcacagcggcgtgtctaccgacccccagccactgaaagaacagcccgccctgaacgacagccggtactgcctgagcagcagactgagagtgtccgccaccttctggcagaacccccggaaccacttcagatgccaggtgcagttctacggcctgagcgagaacgacgagtggacccaggacagagccaagcccgtgacccagatcgtgtctgccgaagcctggggcagagccgattgcggctttaccagcgagagctaccagcagggcgtgctgagcgccaccatcctgtacgagatcctgctgggcaaggccaccctgtacgccgtgctggtgtctgccctggtgctgatggctatggtcaagcggaaggacagccgggga

SEQ ID NO: 10282 - DNA, 1341 bp, Artificial Sequence
  Synthetic Polynucloetide
atggactggatttggcgcatccttttccttgtcggcgctgctaccggcgcgcattccttcgaagaagttcagctgcttgaatctggcggcggactggttcaacctggcggatctctgagactgagctgtgccgcctctggcttcgccttcagcacctacgatatgagctgggtccgacaggcccctggcaaaggacttgaatgggtcgccacaatcagcagcggcggcagctacacctactacctggatagcgtgaagggcagattcaccatcagccgggacagcagcaagaacaccctgtacctccagatgaactccctccaggccgaggactccgccatctactattgtgcccctaccaccgtggtgcctttcgcctattggggacagggaaccctggtcaccgttagctctacgcgtatccagaaccctgatcctgccgtgtaccagctgcgggatagcaagagcagcgacaagagcgtgtgtctgttcaccgacttcgacagccagaccaacgtgtcccagagcaaggactccgacgtgtacatcaccgataagaccgtgctggacatgcggagcatggacttcaagagcaactccgccgtggcctggtccaacaagtccgatttcgcctgcgccaacgccttcaacaacagcattatccccgaggacacattcttcccaagccccgagagcagctgcgacgtgaagctggtggaaaagagcttcgagacagacaccaacctgaacttccagaacctgagcgtgatcggcttcagaatcctgctgctgaaagtggccggctttaacctgctgatgaccctgcggctgtggtccagccgcgccaagagaagcggatctggcgtgaagcagaccctgaatttcgacctgctgaagctggctggcgacgtggaatccaacccaggcccttctagaggccatatggccaagcctttgtctcaagaagaatccaccctcattgaaagagcaacggctacaatcaacagcatccccatctctgaagactacagcgtcgccagcgcagctctctctagcgacggccgcatcttcactggtgtcaatgtatatcattttactgggggaccttgtgcagaactcgtggtgctgggcactgctgctgctgcggcagctggcaacctgacttgtatcgtcgcgatcggaaatgagaacaggggcatcttgagcccctgcggacggtgccgacaggtgcttctcgatctgcatcctgggatcaaagccatagtgaaggacagtgatggacagccgacggcagttgggattcgtgaattgctgccctctggttatgtgtgggagggctga

SEQ ID NO: 10283 - DNA, 840 bp, Artificial Sequence
  Synthetic Polynucloetide
atggactggatttggcgcatccttttccttgtcggcgctgctaccggcgcgcattccttcgaagaagttcagctgcttgaatctggcggcggactggttcaacctggcggatctctgagactgagctgtgccgcctctggcttcgccttcagcacctacgatatgagctgggtccgacaggcccctggcaaaggacttgaatgggtcgccacaatcagcagcggcggcagctacacctactacctggatagcgtgaagggcagattcaccatcagccgggacagcagcaagaacaccctgtacctccagatgaactccctccaggccgaggactccgccatctactattgtgcccctaccaccgtggtgcctttcgcctattggggacagggaaccctggtcaccgttagctctacgcgtatccagaaccctgatcctgccgtgtaccagctgcgggatagcaagagcagcgacaagagcgtgtgtctgttcaccgacttcgacagccagaccaacgtgtcccagagcaaggactccgacgtgtacatcaccgataagaccgtgctggacatgcggagcatggacttcaagagcaactccgccgtggcctggtccaacaagtccgatttcgcctgcgccaacgccttcaacaacagcattatccccgaggacacattcttcccaagccccgagagcagctgcgacgtgaagctggtggaaaagagcttcgagacagacaccaacctgaacttccagaacctgagcgtgatcggcttcagaatcctgctgctgaaagtggccggctttaacctgctgatgaccctgcggctgtggtccagc

SEQ ID NO: 10284 - DNA, 1674 bp, Artificial Sequence
  Synthetic Polynucloetide
atggccttaccagtgaccgccttgctcctgccgctggccttgctgctccacgccgccaggccggacatccagatgacacagagccctagcagcctgtccgtgtccgtgggagacagagtgaccatcacatgcaaggccagccagaacgtgcggacagtggtggcttggtatcagcagaagcctggactggcccctaagacactgatctacctggcctccaacagacacaccggcgtgccaagcagattttctggcagcggctctggcaccgacttcaccttcacaatatccagcctccagcctgaggacattgccacctacttttgccagcagcactggtcttaccctctgacctttggacagggcaccaaggtggaagtgaagagactcgaggggaaaccaattcccaaccctcttctgggactggattcaaccggcagcggcgaggacctgaagaacgtgttcccacctgaggtggccgtgttcgagcctagcgaggccgagatcagccacacccagaaagccaccctcgtgtgcctggctaccggcttctaccccgaccatgtggaactgtcttggtgggtcaacggcaaagaggtgcacagcggcgtgtgtaccgacccccagccactgaaagaacagcccgccctgaacgacagccggtactgcctgagcagcagactgagagtgtccgccaccttctggcagaacccccggaaccacttcagatgccaggtgcagttctacggcctgagcgagaacgacgagtggacccaggacagagccaagcccgtgacccagatcgtgtctgccgaagcctggggcagagccgattgcggctttaccagcgagagctaccagcagggcgtgctgagcgccaccatcctgtacgagatcctgctgggcaaggccaccctgtacgccgtgctggtgtctgccctggtgctgatggctatggtcaagcggaaggacagccggggaagggccaagcgatctggatctggagcaacaaacttctcactactcaaacaagcaggtgacgtggaggagaatcccgggcctactagaggccatatgaccgagtacaagcccacggtgcgcctcgccacccgcgacgacgtccccagggccgtacgcaccctcgccgccgcgttcgccgactaccccgccacgcgccacaccgtcgatccggaccgccacatcgagcgggtcaccgagctgcaagaactcttcctcacgcgcgtcgggctcgacatcggcaaggtgtgggtcgcggacgacggcgccgcggtggcggtctggaccacgccggagagcgtcgaagcgggggcggtgttcgccgagatcggcccgcgcatggccgagttgagcggttcccggctggccgcgcagcaacagatggaaggcctcctggcgccgcaccggcccaaggagcccgcgtggttcctggccaccgtcggcgtctcgcccgaccaccagggcaagggtctgggcagcgccgtcgtgctccccggagtggaggcggccgagcgcgccggggtgcccgccttcctggagacctccgcgccccgcaacctccccttctacgagcggctcggcttcaccgtcaccgccgacgtcgaggtgcccgaaggaccgcgcacctggtgcatgacccgcaagcccggtgcctga

SEQ ID NO: 10285 - DNA, 984 bp, Artificial Sequence
  Synthetic Polynucloetide
atggccttaccagtgaccgccttgctcctgccgctggccttgctgctccacgccgccaggccggacatccagatgacacagagccctagcagcctgtccgtgtccgtgggagacagagtgaccatcacatgcaaggccagccagaacgtgcggacagtggtggcttggtatcagcagaagcctggactggcccctaagacactgatctacctggcctccaacagacacaccggcgtgccaagcagattttctggcagcggctctggcaccgacttcaccttcacaatatccagcctccagcctgaggacattgccacctacttttgccagcagcactggtcttaccctctgacctttggacagggcaccaaggtggaagtgaagagactcgaggggaaaccaattcccaaccctcttctgggactggattcaaccggcagcggcgaggacctgaagaacgtgttcccacctgaggtggccgtgttcgagcctagcgaggccgagatcagccacacccagaaagccaccctcgtgtgcctggctaccggcttctaccccgaccatgtggaactgtcttggtgggtcaacggcaaagaggtgcacagcggcgtgtgtaccgacccccagccactgaaagaacagcccgccctgaacgacagccggtactgcctgagcagcagactgagagtgtccgccaccttctggcagaacccccggaaccacttcagatgccaggtgcagttctacggcctgagcgagaacgacgagtggacccaggacagagccaagcccgtgacccagatcgtgtctgccgaagcctggggcagagccgattgcggctttaccagcgagagctaccagcagggcgtgctgagcgccaccatcctgtacgagatcctgctgggcaaggccaccctgtacgccgtgctggtgtctgccctggtgctgatggctatggtcaagcggaaggacagccggggatga

SEQ ID NO: 10286 - DNA, 1377 bp, Artificial Sequence
  Synthetic Polynucloetide
atggactggatttggcgcatccttttccttgtcggcgctgctaccggcgcgcattccttcgaagaagttcagctgcttgaatctggcggcggactggttcaacctggcggatctctgagactgagctgtgccgcctctggcttcgccttcagcacctacgatatgagctgggtccgacaggcccctggcaaaggacttgaatgggtcgccacaatcagcagcggcggcagctacacctactacctggatagcgtgaagggcagattcaccatcagccgggacagcagcaagaacaccctgtacctccagatgaactccctccaggccgaggactccgccatctactattgtgcccctaccaccgtggtgcctttcgcctattggggacagggaaccctggtcaccgttagctctacgcgtgagcagaaactgatctcggaagaggatgggagcggcatccagaaccctgatcctgccgtgtaccagctgcgggatagcaagagcagcgacaagagcgtgtgtctgttcaccgacttcgacagccagaccaacgtgtcccagagcaaggactccgacgtgtacatcaccgataagtgcgtgctggacatgcggagcatggacttcaagagcaactccgccgtggcctggtccaacaagtccgatttcgcctgcgccaacgccttcaacaacagcattatccccgaggacacattcttcccaagccccgagagcagctgcgacgtgaagctggtggaaaagagcttcgagacagacaccaacctgaacttccagaacctgagcgtgatcggcttcagaatcctgctgctgaaagtggccggctttaacctgctgatgaccctgcggctgtggtccagccgcgccaagagaagcggatctggcgtgaagcagaccctgaatttcgacctgctgaagctggctggcgacgtggaatccaacccaggcccttctagaggccatatggccaagcctttgtctcaagaagaatccaccctcattgaaagagcaacggctacaatcaacagcatccccatctctgaagactacagcgtcgccagcgcagctctctctagcgacggccgcatcttcactggtgtcaatgtatatcattttactgggggaccttgtgcagaactcgtggtgctgggcactgctgctgctgcggcagctggcaacctgacttgtatcgtcgcgatcggaaatgagaacaggggcatcttgagcccctgcggacggtgccgacaggtgcttctcgatctgcatcctgggatcaaagccatagtgaaggacagtgatggacagccgacggcagttgggattcgtgaattgctgccctctggttatgtgtgggagggctga

SEQ ID NO: 10287 - DNA, 879 bp, Artificial Sequence
  Synthetic Polynucloetide
atggactggatttggcgcatccttttccttgtcggcgctgctaccggcgcgcattccttcgaagaagttcagctgcttgaatctggcggcggactggttcaacctggcggatctctgagactgagctgtgccgcctctggcttcgccttcagcacctacgatatgagctgggtccgacaggcccctggcaaaggacttgaatgggtcgccacaatcagcagcggcggcagctacacctactacctggatagcgtgaagggcagattcaccatcagccgggacagcagcaagaacaccctgtacctccagatgaactccctccaggccgaggactccgccatctactattgtgcccctaccaccgtggtgcctttcgcctattggggacagggaaccctggtcaccgttagctctacgcgtgagcagaaactgatctcggaagaggatgggagcggcatccagaaccctgatcctgccgtgtaccagctgcgggatagcaagagcagcgacaagagcgtgtgtctgttcaccgacttcgacagccagaccaacgtgtcccagagcaaggactccgacgtgtacatcaccgataagtgcgtgctggacatgcggagcatggacttcaagagcaactccgccgtggcctggtccaacaagtccgatttcgcctgcgccaacgccttcaacaacagcattatccccgaggacacattcttcccaagccccgagagcagctgcgacgtgaagctggtggaaaagagcttcgagacagacaccaacctgaacttccagaacctgagcgtgatcggcttcagaatcctgctgctgaaagtggccggctttaacctgctgatgaccctgcggctgtggtccagctga

SEQ ID NO: 10288 - DNA, 1920 bp, Artificial Sequence
  Synthetic Polynucloetide
atggccttaccagtgaccgccttgctcctgccgctggccttgctgctccacgccgccaggccggacatccagatgacacagagccctagcagcctgtccgtgtccgtgggagacagagtgaccatcacatgcaaggccagccagaacgtgcggacagtggtggcttggtatcagcagaagcctggactggcccctaagacactgatctacctggcctccaacagacacaccggcgtgccaagcagattttctggcagcggctctggcaccgacttcaccttcacaatatccagcctccagcctgaggacattgccacctacttttgccagcagcactggtcttaccctctgacctttggacagggcaccaaggtggaagtgaagagaggcggaggcggaagtggaggcggaggatctggcggcggaggctctgaagttcagctgcttgaatctggcggcggactggttcaacctggcggatctctgagactgagctgtgccgcctctggcttcgccttcagcacctacgatatgagctgggtccgacaggcccctggcaaaggacttgaatgggtcgccacaatcagcagcggcggcagctacacctactacctggatagcgtgaagggcagattcaccatcagccgggacagcagcaagaacaccctgtacctccagatgaactccctccaggccgaggactccgccatctactattgtgcccctaccaccgtggtgcctttcgcctattggggacagggaaccctggtcaccgttagctctacgcgtgggagcggcatccagaaccctgatcctgccgtgtaccagctgcgggatagcaagagcagcgacaagagcgtgtgtctgttcaccgacttcgacagccagaccaacgtgtcccagagcaaggactccgacgtgtacatcaccgataagaccgtgctggacatgcggagcatggacttcaagagcaactccgccgtggcctggtccaacaagtccgatttcgcctgcgccaacgccttcaacaacagcattatccccgaggacacattcttcccaagcagcgacgtgccctgcgacgtgaagctggtggaaaagagcttcgagacagacaccaacctgaacttccagaacctgagcgtgatcggcttcagaatcctgctgctgaaagtggccggctttaacctgctgatgaccctgcggctgtggtccagccgcgccaagagaagcggatctggcgtgaagcagaccctgaatttcgacctgctgaagctggctggcgacgtggaatccaacccaggcccttctagaggccatatgaccgagtacaagcccacggtgcgcctcgccacccgcgacgacgtccccagggccgtacgcaccctcgccgccgcgttcgccgactaccccgccacgcgccacaccgtcgatccggaccgccacatcgagcgggtcaccgagctgcaagaactcttcctcacgcgcgtcgggctcgacatcggcaaggtgtgggtcgcggacgacggcgccgcggtggcggtctggaccacgccggagagcgtcgaagcgggggcggtgttcgccgagatcggcccgcgcatggccgagttgagcggttcccggctggccgcgcagcaacagatggaaggcctcctggcgccgcaccggcccaaggagcccgcgtggttcctggccaccgtcggcgtctcgcccgaccaccagggcaagggtctgggcagcgccgtcgtgctccccggagtggaggcggccgagcgcgccggggtgcccgccttcctggagacctccgcgccccgcaacctccccttctacgagcggctcggcttcaccgtcaccgccgacgtcgaggtgcccgaaggaccgcgcacctggtgcatgacccgcaagcccggtgcctga

SEQ ID NO: 10289 - DNA, 2016 bp, Artificial Sequence
  Synthetic Polynucloetide
atggccttaccagtgaccgccttgctcctgccgctggccttgctgctccacgccgccaggccggacatccagatgacacagagccctagcagcctgtccgtgtccgtgggagacagagtgaccatcacatgcaaggccagccagaacgtgcggacagtggtggcttggtatcagcagaagcctggactggcccctaagacactgatctacctggcctccaacagacacaccggcgtgccaagcagattttctggcagcggctctggcaccgacttcaccttcacaatatccagcctccagcctgaggacattgccacctacttttgccagcagcactggtcttaccctctgacctttggacagggcaccaaggtggaagtgaagagaggcggaggcggaagtggaggcggaggatctggcggcggaggctctgaagttcagctgcttgaatctggcggcggactggttcaacctggcggatctctgagactgagctgtgccgcctctggcttcgccttcagcacctacgatatgagctgggtccgacaggcccctggcaaaggacttgaatgggtcgccacaatcagcagcggcggcagctacacctactacctggatagcgtgaagggcagattcaccatcagccgggacagcagcaagaacaccctgtacctccagatgaactccctccaggccgaggactccgccatctactattgtgcccctaccaccgtggtgcctttcgcctattggggacagggaaccctggtcaccgttagctctctcgaggacctgaagaacgtgttcccacctgaggtggccgtgttcgagcctagcaaggccgagatcgcccacacccagaaagccaccctcgtgtgcctggctaccggcttctaccccgaccatgtggaactgtcttggtgggtcaacggcaaagaggtgcacagcggcgtgtctaccgacccccagccactgaaagaacagcccgccctgaacgacagccggtactgcctgagcagcagactgagagtgtccgccaccttctggcagaacccccggaaccacttcagatgccaggtgcagttctacggcctgagcgagaacgacgagtggacccaggacagagccaagcccgtgacccagatcgtgtctgccgaagcctggggcagagccgattgcggcatcaccagcgccagctaccaccagggcgtgctgagcgccaccatcctgtacgagatcctgctgggcaaggccaccctgtacgccgtgctggtgtctgccctggtgctgatggctatggtcaagcggaaggacagccggggaagggccaagcgatctggatctggagcaacaaacttctcactactcaaacaagcaggtgacgtggaggagaatcccgggcctactagaggccatatgaccgagtacaagcccacggtgcgcctcgccacccgcgacgacgtccccagggccgtacgcaccctcgccgccgcgttcgccgactaccccgccacgcgccacaccgtcgatccggaccgccacatcgagcgggtcaccgagctgcaagaactcttcctcacgcgcgtcgggctcgacatcggcaaggtgtgggtcgcggacgacggcgccgcggtggcggtctggaccacgccggagagcgtcgaagcgggggcggtgttcgccgagatcggcccgcgcatggccgagttgagcggttcccggctggccgcgcagcaacagatggaaggcctcctggcgccgcaccggcccaaggagcccgcgtggttcctggccaccgtcggcgtctcgcccgaccaccagggcaagggtctgggcagcgccgtcgtgctccccggagtggaggcggccgagcgcgccggggtgcccgccttcctggagacctccgcgccccgcaacctccccttctacgagcggctcggcttcaccgtcaccgccgacgtcgaggtgcccgaaggaccgcgcacctggtgcatgacccgcaagcccggtgcctga

SEQ ID NO: 10290 - DNA, 2085 bp, Artificial Sequence
  Synthetic Polynucloetide
atggccttaccagtgaccgccttgctcctgccgctggccttgctgctccacgccgccaggccggacatccagatgacacagagccctagcagcctgtccgtgtccgtgggagacagagtgaccatcacatgcaaggccagccagaacgtgcggacagtggtggcttggtatcagcagaagcctggactggcccctaagacactgatctacctggcctccaacagacacaccggcgtgccaagcagattttctggcagcggctctggcaccgacttcaccttcacaatatccagcctccagcctgaggacattgccacctacttttgccagcagcactggtcttaccctctgacctttggacagggcaccaaggtggaagtgaagagaggcggaggcggaagtggaggcggaggatctggcggcggaggctctgaagttcagctgcttgaatctggcggcggactggttcaacctggcggatctctgagactgagctgtgccgcctctggcttcgccttcagcacctacgatatgagctgggtccgacaggcccctggcaaaggacttgaatgggtcgccacaatcagcagcggcggcagctacacctactacctggatagcgtgaagggcagattcaccatcagccgggacagcagcaagaacaccctgtacctccagatgaactccctccaggccgaggactccgccatctactattgtgcccctaccaccgtggtgcctttcgcctattggggacagggaaccctggtcaccgttagctctacgcgtgggtctggaggcggaggcagcggcggaggcgggagcggcgacggtaacgaggagatgggaggaatcactcaaaccccttacaaagtctcaatttcaggaacaactgttatccttacatgtccccagtatcctggcagcgagatcctttggcagcataacgacaagaatatagggggagatgaagacgataagaatatcggatctgacgaggatcacttgagcctgaaagagttctccgagcttgaacaaagcggatattatgtgtgctatccgcgcgggtcaaagccggaagacgctaacttttacctttatctccgagccagagtgtgcgaaaattgcatggaaatggacgttatgtccgttgctacaatagttatcgtagatatatgcatcacgggtggactgcttctgctggtttattattggtccaagaatagaaaggccaaagctaaacccgtgaccagaggcgctggcgcaggcggaaggcaaaggggacaaaacaaagaacggccaccaccagtgccaaatccagattatgagcctattcggaaaggacagagggacctgtactctggcctgaatcagagaagaatccgcgccaagagaagcggatctggcgtgaagcagaccctgaatttcgacctgctgaagctggctggcgacgtggaatccaacccaggcccttctagaggccatatgaccgagtacaagcccacggtgcgcctcgccacccgcgacgacgtccccagggccgtacgcaccctcgccgccgcgttcgccgactaccccgccacgcgccacaccgtcgatccggaccgccacatcgagcgggtcaccgagctgcaagaactcttcctcacgcgcgtcgggctcgacatcggcaaggtgtgggtcgcggacgacggcgccgcggtggcggtctggaccacgccggagagcgtcgaagcgggggcggtgttcgccgagatcggcccgcgcatggccgagttgagcggttcccggctggccgcgcagcaacagatggaaggcctcctggcgccgcaccggcccaaggagcccgcgtggttcctggccaccgtcggcgtctcgcccgaccaccagggcaagggtctgggcagcgccgtcgtgctccccggagtggaggcggccgagcgcgccggggtgcccgccttcctggagacctccgcgccccgcaacctccccttctacgagcggctcggcttcaccgtcaccgccgacgtcgaggtgcccgaaggaccgcgcacctggtgcatgacccgcaagcccggtgcctga

SEQ ID NO: 10291 - DNA, 1980 bp, Artificial Sequence
  Synthetic Polynucloetide
atggccttaccagtgaccgccttgctcctgccgctggccttgctgctccacgccgccaggccggacatccagatgacacagagccctagcagcctgtccgtgtccgtgggagacagagtgaccatcacatgcaaggccagccagaacgtgcggacagtggtggcttggtatcagcagaagcctggactggcccctaagacactgatctacctggcctccaacagacacaccggcgtgccaagcagattttctggcagcggctctggcaccgacttcaccttcacaatatccagcctccagcctgaggacattgccacctacttttgccagcagcactggtcttaccctctgacctttggacagggcaccaaggtggaagtgaagagaggcggaggcggaagtggaggcggaggatctggcggcggaggctctgaagttcagctgcttgaatctggcggcggactggttcaacctggcggatctctgagactgagctgtgccgcctctggcttcgccttcagcacctacgatatgagctgggtccgacaggcccctggcaaaggacttgaatgggtcgccacaatcagcagcggcggcagctacacctactacctggatagcgtgaagggcagattcaccatcagccgggacagcagcaagaacaccctgtacctccagatgaactccctccaggccgaggactccgccatctactattgtgcccctaccaccgtggtgcctttcgcctattggggacagggaaccctggtcaccgttagctctacgcgtgggtctggaggcggaggcagcggcggaggcgggagcggcttcaagatccccatcgaggaactggaagatcgggtgttcgtgaactgcaacacctctatcacctgggtggaaggcaccgtgggaacactgctgagcgacatcaccagactggacctcggcaagcggattctggaccctcggggcatctacagatgcaacggcaccgacatctacaaggacaaagaaagcaccgtgcaggtccactacagaatgtgccagtcctgcgtggaactggaccctgctacagtggccggcatcatcgtgaccgatgtgatcgctactctgctgctggctctgggagtgttctgcttcgccggacacgaaacaggcagactgtctggcgctgccgatacacaggccctgctgagaaacgaccaagtgtatcagcccctgcgcgacagagatgatgcccagtattctcacctcggcggcaactgggctagaaacaagcgcgccaagagaagcggatctggcgtgaagcagaccctgaatttcgacctgctgaagctggctggcgacgtggaatccaacccaggcccttctagaggccatatgaccgagtacaagcccacggtgcgcctcgccacccgcgacgacgtccccagggccgtacgcaccctcgccgccgcgttcgccgactaccccgccacgcgccacaccgtcgatccggaccgccacatcgagcgggtcaccgagctgcaagaactcttcctcacgcgcgtcgggctcgacatcggcaaggtgtgggtcgcggacgacggcgccgcggtggcggtctggaccacgccggagagcgtcgaagcgggggcggtgttcgccgagatcggcccgcgcatggccgagttgagcggttcccggctggccgcgcagcaacagatggaaggcctcctggcgccgcaccggcccaaggagcccgcgtggttcctggccaccgtcggcgtctcgcccgaccaccagggcaagggtctgggcagcgccgtcgtgctccccggagtggaggcggccgagcgcgccggggtgcccgccttcctggagacctccgcgccccgcaacctccccttctacgagcggctcggcttcaccgtcaccgccgacgtcgaggtgcccgaaggaccgcgcacctggtgcatgacccgcaagcccggtgcctga
